United States Patent Application Publication US 2011/0177960 A1 - sequence listing, part 10

SEQ ID NO: 148562 - DNA, 25 bp, Artificial
  probe
  misc_feature (1)..(25): SEQ ID NO: 1118; WAN024D97_at; Start 312; Stop 336
taatacagatggcaagggatttttt

SEQ ID NO: 148563 - DNA, 25 bp, Artificial
  probe
  misc_feature (1)..(25): SEQ ID NO: 1118; WAN024D97_at; Start 76; Stop 100
cacaatagagcctttgaggcgacag

SEQ ID NO: 148564 - DNA, 25 bp, Artificial
  probe
  misc_feature (1)..(25): SEQ ID NO: 1118; WAN024D97_at; Start 78; Stop 102
caatagagcctttgaggcgacagct

SEQ ID NO: 148565 - DNA, 25 bp, Artificial
  probe
  misc_feature (1)..(25): SEQ ID NO: 1118; WAN024D97_at; Start 68; Stop 92
ccttcatccacaatagagcctttga

SEQ ID NO: 148566 - DNA, 25 bp, Artificial
  probe
  misc_feature (1)..(25): SEQ ID NO: 1118; WAN024D97_at; Start 549; Stop 573
tgtttctgaactgcaagcaaggatt

SEQ ID NO: 148567 - DNA, 25 bp, Artificial
  probe
  misc_feature (1)..(25): SEQ ID NO: 1118; WAN024D97_at; Start 72; Stop 96
catccacaatagagcctttgaggcg

SEQ ID NO: 148568 - DNA, 25 bp, Artificial
  probe
  misc_feature (1)..(25): SEQ ID NO: 1118; WAN024D97_at; Start 28; Stop 52
gctgcagttgttgccaatcctatta

SEQ ID NO: 148569 - DNA, 25 bp, Artificial
  probe
  misc_feature (1)..(25): SEQ ID NO: 2486; WAN024D98_at; Start 42; Stop 66
gactattgcaagaggcttggaccct

SEQ ID NO: 148570 - DNA, 25 bp, Artificial
  probe
  misc_feature (1)..(25): SEQ ID NO: 2486; WAN024D98_at; Start 66; Stop 90
taattaccttgatatggatgctctg

SEQ ID NO: 148571 - DNA, 25 bp, Artificial
  probe
  misc_feature (1)..(25): SEQ ID NO: 2486; WAN024D98_at; Start 415; Stop 439
gctagtcgggttttggatgtgacca

SEQ ID NO: 148572 - DNA, 25 bp, Artificial
  probe
  misc_feature (1)..(25): SEQ ID NO: 2486; WAN024D98_at; Start 53; Stop 77
gaggcttggaccctaattaccttga

SEQ ID NO: 148573 - DNA, 25 bp, Artificial
  probe
  misc_feature (1)..(25): SEQ ID NO: 2486; WAN024D98_at; Start 34; Stop 58
ggaaaatcgactattgcaagaggct

SEQ ID NO: 148574 - DNA, 25 bp, Artificial
  probe
  misc_feature (1)..(25): SEQ ID NO: 2486; WAN024D98_at; Start 230; Stop 254
tttctcagagaaatcgtgacttact

SEQ ID NO: 148575 - DNA, 25 bp, Artificial
  probe
  misc_feature (1)..(25): SEQ ID NO: 2486; WAN024D98_at; Start 350; Stop 374
taaataatagcaaggaagaactagt

SEQ ID NO: 148576 - DNA, 25 bp, Artificial
  probe
  misc_feature (1)..(25): SEQ ID NO: 2486; WAN024D98_at; Start 195; Stop 219
agaccaagtcgtgtcaactggagga

SEQ ID NO: 148577 - DNA, 25 bp, Artificial
  probe
  misc_feature (1)..(25): SEQ ID NO: 2486; WAN024D98_at; Start 72; Stop 96
ccttgatatggatgctctgattgag

SEQ ID NO: 148578 - DNA, 25 bp, Artificial
  probe
  misc_feature (1)..(25): SEQ ID NO: 2486; WAN024D98_at; Start 245; Stop 269
gtgacttactcaagactaatacaga

SEQ ID NO: 148579 - DNA, 25 bp, Artificial
  probe
  misc_feature (1)..(25): SEQ ID NO: 2486; WAN024D98_at; Start 209; Stop 233
caactggaggaggagtggttatttc

SEQ ID NO: 148580 - DNA, 25 bp, Artificial
  probe
  misc_feature (1)..(25): SEQ ID NO: 2486; WAN024D98_at; Start 442; Stop 466
ctaagcccagaggaaattatagagg

SEQ ID NO: 148581 - DNA, 25 bp, Artificial
  probe
  misc_feature (1)..(25): SEQ ID NO: 2486; WAN024D98_at; Start 159; Stop 183
ggtagaatcagaagtcctagctgat

SEQ ID NO: 148582 - DNA, 25 bp, Artificial
  probe
  misc_feature (1)..(25): SEQ ID NO: 2486; WAN024D98_at; Start 198; Stop 222
ccaagtcgtgtcaactggaggagga

SEQ ID NO: 148583 - DNA, 25 bp, Artificial
  probe
  misc_feature (1)..(25): SEQ ID NO: 2486; WAN024D98_at; Start 425; Stop 449
ttttggatgtgaccaagctaagccc

SEQ ID NO: 148584 - DNA, 25 bp, Artificial
  probe
  misc_feature (1)..(25): SEQ ID NO: 2486; WAN024D98_at; Start 152; Stop 176
ttcgtcaggtagaatcagaagtcct

SEQ ID NO: 148585 - DNA, 25 bp, Artificial
  probe
  misc_feature (1)..(25): SEQ ID NO: 2486; WAN024D98_at; Start 117; Stop 141
tgcgaattttttcgctgaaaaggga

SEQ ID NO: 148586 - DNA, 25 bp, Artificial
  probe
  misc_feature (1)..(25): SEQ ID NO: 2486; WAN024D98_at; Start 218; Stop 242
gaggagtggttatttctcagagaaa

SEQ ID NO: 148587 - DNA, 25 bp, Artificial
  probe
  misc_feature (1)..(25): SEQ ID NO: 2486; WAN024D98_at; Start 400; Stop 424
tggtatgaggaagtggctagtcggg

SEQ ID NO: 148588 - DNA, 25 bp, Artificial
  probe
  misc_feature (1)..(25): SEQ ID NO: 2486; WAN024D98_at; Start 48; Stop 72
tgcaagaggcttggaccctaattac

SEQ ID NO: 148589 - DNA, 25 bp, Artificial
  probe
  misc_feature (1)..(25): SEQ ID NO: 2486; WAN024D98_at; Start 146; Stop 170
cagcctttcgtcaggtagaatcaga

SEQ ID NO: 148590 - DNA, 25 bp, Artificial
  probe
  misc_feature (1)..(25): SEQ ID NO: 2486; WAN024D98_at; Start 389; Stop 413
aaagacaggcttggtatgaggaagt

SEQ ID NO: 148591 - DNA, 25 bp, Artificial
  probe
  misc_feature (1)..(25): SEQ ID NO: 2486; WAN024D98_at; Start 59; Stop 83
tggaccctaattaccttgatatgga

SEQ ID NO: 148592 - DNA, 25 bp, Artificial
  probe
  misc_feature (1)..(25): SEQ ID NO: 2486; WAN024D98_at; Start 430; Stop 454
gatgtgaccaagctaagcccagagg

SEQ ID NO: 148593 - DNA, 25 bp, Artificial
  probe
  misc_feature (1)..(25): SEQ ID NO: 2486; WAN024D98_at; Start 106; Stop 130
ggtatgtccattgcgaattttttcg

SEQ ID NO: 148594 - DNA, 25 bp, Artificial
  probe
  misc_feature (1)..(25): SEQ ID NO: 2486; WAN024D98_at; Start 321; Stop 345
tgataaggacaatcagcgaccgctt

SEQ ID NO: 148595 - DNA, 25 bp, Artificial
  probe
  misc_feature (1)..(25): SEQ ID NO: 2486; WAN024D98_at; Start 448; Stop 472
ccagaggaaattatagaggaactaa

SEQ ID NO: 148596 - DNA, 25 bp, Artificial
  probe
  misc_feature (1)..(25): SEQ ID NO: 2486; WAN024D98_at; Start 100; Stop 124
cgcctaggtatgtccattgcgaatt

SEQ ID NO: 148597 - DNA, 25 bp, Artificial
  probe
  misc_feature (1)..(25): SEQ ID NO: 2486; WAN024D98_at; Start 341; Stop 365
cgctttttctaaataatagcaagga

SEQ ID NO: 148598 - DNA, 25 bp, Artificial
  probe
  misc_feature (1)..(25): SEQ ID NO: 2486; WAN024D98_at; Start 239; Stop 263
gaaatcgtgacttactcaagactaa

SEQ ID NO: 148599 - DNA, 25 bp, Artificial
  probe
  misc_feature (1)..(25): SEQ ID NO: 2486; WAN024D98_at; Start 434; Stop 458
tgaccaagctaagcccagaggaaat

SEQ ID NO: 148600 - DNA, 25 bp, Artificial
  probe
  misc_feature (1)..(25): SEQ ID NO: 2486; WAN024D98_at; Start 30; Stop 54
ggctggaaaatcgactattgcaaga

SEQ ID NO: 148601 - DNA, 25 bp, Artificial
  probe
  misc_feature (1)..(25): SEQ ID NO: 2486; WAN024D98_at; Start 258; Stop 282
gactaatacagataacatctacctg

SEQ ID NO: 148602 - DNA, 25 bp, Artificial
  probe
  misc_feature (1)..(25): SEQ ID NO: 2486; WAN024D98_at; Start 333; Stop 357
tcagcgaccgctttttctaaataat

SEQ ID NO: 148603 - DNA, 25 bp, Artificial
  probe
  misc_feature (1)..(25): SEQ ID NO: 2149; WAN024D99_at; Start 835; Stop 859
catcgttttttaaaaggccatgcct

SEQ ID NO: 148604 - DNA, 25 bp, Artificial
  probe
  misc_feature (1)..(25): SEQ ID NO: 2149; WAN024D99_at; Start 149; Stop 173
tgtgtgattcaatcgctgaacaaga

SEQ ID NO: 148605 - DNA, 25 bp, Artificial
  probe
  misc_feature (1)..(25): SEQ ID NO: 2149; WAN024D99_at; Start 226; Stop 250
aatgatgggatgaagcaggctcacg

SEQ ID NO: 148606 - DNA, 25 bp, Artificial
  probe
  misc_feature (1)..(25): SEQ ID NO: 2149; WAN024D99_at; Start 537; Stop 561
gatttacgaagatgcctattaccat

SEQ ID NO: 148607 - DNA, 25 bp, Artificial
  probe
  misc_feature (1)..(25): SEQ ID NO: 2149; WAN024D99_at; Start 319; Stop 343
caattagttcaagaagatgcggatg

SEQ ID NO: 148608 - DNA, 25 bp, Artificial
  probe
  misc_feature (1)..(25): SEQ ID NO: 2149; WAN024D99_at; Start 742; Stop 766
gcttttttcagattggcctatgccc

SEQ ID NO: 148609 - DNA, 25 bp, Artificial
  probe
  misc_feature (1)..(25): SEQ ID NO: 2149; WAN024D99_at; Start 706; Stop 730
gaagttgtgaaaaactatcctgact

SEQ ID NO: 148610 - DNA, 25 bp, Artificial
  probe
  misc_feature (1)..(25): SEQ ID NO: 2149; WAN024D99_at; Start 123; Stop 147
tggtgcaacagatgaaagtggtcgc

SEQ ID NO: 148611 - DNA, 25 bp, Artificial
  probe
  misc_feature (1)..(25): SEQ ID NO: 2149; WAN024D99_at; Start 81; Stop 105
gaagcagacctatcaaaatctggaa

SEQ ID NO: 148612 - DNA, 25 bp, Artificial
  probe
  misc_feature (1)..(25): SEQ ID NO: 2149; WAN024D99_at; Start 370; Stop 394
tatgctaatgatgaaagcccacagt

SEQ ID NO: 148613 - DNA, 25 bp, Artificial
  probe
  misc_feature (1)..(25): SEQ ID NO: 2149; WAN024D99_at; Start 385; Stop 409
agcccacagtcagccaatcaggatg

SEQ ID NO: 148614 - DNA, 25 bp, Artificial
  probe
  misc_feature (1)..(25): SEQ ID NO: 2149; WAN024D99_at; Start 11; Stop 35
cattaattagtgtgattgtgccagt

SEQ ID NO: 148615 - DNA, 25 bp, Artificial
  probe
  misc_feature (1)..(25): SEQ ID NO: 2149; WAN024D99_at; Start 285; Stop 309
tatccatccagaaatgattcagagc

SEQ ID NO: 148616 - DNA, 25 bp, Artificial
  probe
  misc_feature (1)..(25): SEQ ID NO: 2149; WAN024D99_at; Start 489; Stop 513
gctaatcaagagacagattgcaact

SEQ ID NO: 148617 - DNA, 25 bp, Artificial
  probe
  misc_feature (1)..(25): SEQ ID NO: 2149; WAN024D99_at; Start 721; Stop 745
tatcctgacttgaaagaggtcgctt

SEQ ID NO: 148618 - DNA, 25 bp, Artificial
  probe
  misc_feature (1)..(25): SEQ ID NO: 2149; WAN024D99_at; Start 850; Stop 874
ggccatgcctttgctatttctagga

SEQ ID NO: 148619 - DNA, 25 bp, Artificial
  probe
  misc_feature (1)..(25): SEQ ID NO: 2149; WAN024D99_at; Start 271; Stop 295
gactcagatgattatatccatccag

SEQ ID NO: 148620 - DNA, 25 bp, Artificial
  probe
  misc_feature (1)..(25): SEQ ID NO: 2149; WAN024D99_at; Start 66; Stop 90
gatagcttccattcagaagcagacc

SEQ ID NO: 148621 - DNA, 25 bp, Artificial
  probe
  misc_feature (1)..(25): SEQ ID NO: 2149; WAN024D99_at; Start 45; Stop 69
ggcgcagtacctagaaaaatcgata

SEQ ID NO: 148622 - DNA, 25 bp, Artificial
  probe
  misc_feature (1)..(25): SEQ ID NO: 2149; WAN024D99_at; Start 31; Stop 55
ccagtctataatgtggcgcagtacc

SEQ ID NO: 148623 - DNA, 25 bp, Artificial
  probe
  misc_feature (1)..(25): SEQ ID NO: 2149; WAN024D99_at; Start 177; Stop 201
cagggtgtcagtgcttcataaaaag

SEQ ID NO: 148624 - DNA, 25 bp, Artificial
  probe
  misc_feature (1)..(25): SEQ ID NO: 2149; WAN024D99_at; Start 193; Stop 217
cataaaaagaacgaaggattgtcgc

SEQ ID NO: 148625 - DNA, 25 bp, Artificial
  probe
  misc_feature (1)..(25): SEQ ID NO: 2149; WAN024D99_at; Start 209; Stop 233
gattgtcgcaagcacgaaatgatgg

SEQ ID NO: 148626 - DNA, 25 bp, Artificial
  probe
  misc_feature (1)..(25): SEQ ID NO: 2149; WAN024D99_at; Start 807; Stop 831
taaacagtttgaagcctattctcag

SEQ ID NO: 148627 - DNA, 25 bp, Artificial
  probe
  misc_feature (1)..(25): SEQ ID NO: 2149; WAN024D99_at; Start 350; Stop 374
gctgtggtgtcatgaatgtctatgc

SEQ ID NO: 148628 - DNA, 25 bp, Artificial
  probe
  misc_feature (1)..(25): SEQ ID NO: 2149; WAN024D99_at; Start 639; Stop 663
tattacgaccaaaccctatgcagag

SEQ ID NO: 148629 - DNA, 25 bp, Artificial
  probe
  misc_feature (1)..(25): SEQ ID NO: 2149; WAN024D99_at; Start 652; Stop 676
ccctatgcagagaaggatttagcct

SEQ ID NO: 148630 - DNA, 25 bp, Artificial
  probe
  misc_feature (1)..(25): SEQ ID NO: 2149; WAN024D99_at; Start 467; Stop 491
tacctgggacgatttgcaataagct

SEQ ID NO: 148631 - DNA, 25 bp, Artificial
  probe
  misc_feature (1)..(25): SEQ ID NO: 2149; WAN024D99_at; Start 136; Stop 160
gaaagtggtcgcttgtgtgattcaa

SEQ ID NO: 148632 - DNA, 25 bp, Artificial
  probe
  misc_feature (1)..(25): SEQ ID NO: 2149; WAN024D99_at; Start 452; Stop 476
tcataggtgaaaaaatacctgggac

SEQ ID NO: 148633 - DNA, 25 bp, Artificial
  probe
  misc_feature (1)..(25): SEQ ID NO: 2149; WAN024D99_at; Start 762; Stop 786
tgcccacttctttattctggataag

SEQ ID NO: 148634 - DNA, 25 bp, Artificial
  probe
  misc_feature (1)..(25): SEQ ID NO: 2149; WAN024D99_at; Start 436; Stop 460
tttctaaaggaatacctcataggtg

SEQ ID NO: 148635 - DNA, 25 bp, Artificial
  probe
  misc_feature (1)..(25): SEQ ID NO: 2149; WAN024D99_at; Start 791; Stop 815
tgctagatgatcagtataaacagtt

SEQ ID NO: 148636 - DNA, 25 bp, Artificial
  probe
  misc_feature (1)..(25): SEQ ID NO: 2149; WAN024D99_at; Start 572; Stop 596
tcaagttggccaagaagtatgtggt

SEQ ID NO: 148637 - DNA, 25 bp, Artificial
  probe
  misc_feature (1)..(25): SEQ ID NO: 2426; WAN024D9A_at; Start 893; Stop 917
tggaaaaagcaggatatggctatct

SEQ ID NO: 148638 - DNA, 25 bp, Artificial
  probe
  misc_feature (1)..(25): SEQ ID NO: 2426; WAN024D9A_at; Start 646; Stop 670
gagccactcttttttgccaaggata

SEQ ID NO: 148639 - DNA, 25 bp, Artificial
  probe
  misc_feature (1)..(25): SEQ ID NO: 2426; WAN024D9A_at; Start 750; Stop 774
ccatggaatggagcgaattgaagtt

SEQ ID NO: 148640 - DNA, 25 bp, Artificial
  probe
  misc_feature (1)..(25): SEQ ID NO: 2426; WAN024D9A_at; Start 391; Stop 415
tacattctggctgaagactaccacc

SEQ ID NO: 148641 - DNA, 25 bp, Artificial
  probe
  misc_feature (1)..(25): SEQ ID NO: 2426; WAN024D9A_at; Start 702; Stop 726
tagccgtccgatttccaaagagttg

SEQ ID NO: 148642 - DNA, 25 bp, Artificial
  probe
  misc_feature (1)..(25): SEQ ID NO: 2426; WAN024D9A_at; Start 736; Stop 760
tacaaggatctgagccatggaatgg

SEQ ID NO: 148643 - DNA, 25 bp, Artificial
  probe
  misc_feature (1)..(25): SEQ ID NO: 2426; WAN024D9A_at; Start 508; Stop 532
cctagtcaagaggtgttgaaggcca

SEQ ID NO: 148644 - DNA, 25 bp, Artificial
  probe
  misc_feature (1)..(25): SEQ ID NO: 2426; WAN024D9A_at; Start 456; Stop 480
cgatgtgaccgatgctgataagcca

SEQ ID NO: 148645 - DNA, 25 bp, Artificial
  probe
  misc_feature (1)..(25): SEQ ID NO: 2426; WAN024D9A_at; Start 59; Stop 83
gcatttctggagtgctagaaaccag

SEQ ID NO: 148646 - DNA, 25 bp, Artificial
  probe
  misc_feature (1)..(25): SEQ ID NO: 2426; WAN024D9A_at; Start 237; Stop 261
tatcaatcaacaagggaatgaccgt

SEQ ID NO: 148647 - DNA, 25 bp, Artificial
  probe
  misc_feature (1)..(25): SEQ ID NO: 2426; WAN024D9A_at; Start 807; Stop 831
tgttttcacagatggaccgcgggag

SEQ ID NO: 148648 - DNA, 25 bp, Artificial
  probe
  misc_feature (1)..(25): SEQ ID NO: 2426; WAN024D9A_at; Start 862; Stop 886
gcttctttacgctttgtggccaagg

SEQ ID NO: 148649 - DNA, 25 bp, Artificial
  probe
  misc_feature (1)..(25): SEQ ID NO: 2426; WAN024D9A_at; Start 631; Stop 655
gatattacgacaggtgagccactct

SEQ ID NO: 148650 - DNA, 25 bp, Artificial
  probe
  misc_feature (1)..(25): SEQ ID NO: 2426; WAN024D9A_at; Start 440; Stop 464
caggttactgtcatatcgatgtgac

SEQ ID NO: 148651 - DNA, 25 bp, Artificial
  probe
  misc_feature (1)..(25): SEQ ID NO: 2426; WAN024D9A_at; Start 265; Stop 289
cgccaatatcgaactgggatttatt

SEQ ID NO: 148652 - DNA, 25 bp, Artificial
  probe
  misc_feature (1)..(25): SEQ ID NO: 2426; WAN024D9A_at; Start 304; Stop 328
gatttgccagctatctacacagtgg

SEQ ID NO: 148653 - DNA, 25 bp, Artificial
  probe
  misc_feature (1)..(25): SEQ ID NO: 2426; WAN024D9A_at; Start 37; Stop 61
ggcctagaggaatatttttcacgca

SEQ ID NO: 148654 - DNA, 25 bp, Artificial
  probe
  misc_feature (1)..(25): SEQ ID NO: 2426; WAN024D9A_at; Start 355; Stop 379
cgaaagattgcagtagaagtggagc

SEQ ID NO: 148655 - DNA, 25 bp, Artificial
  probe
  misc_feature (1)..(25): SEQ ID NO: 2426; WAN024D9A_at; Start 105; Stop 129
agtcgaaacgaccaattaccagttg

SEQ ID NO: 148656 - DNA, 25 bp, Artificial
  probe
  misc_feature (1)..(25): SEQ ID NO: 2426; WAN024D9A_at; Start 339; Stop 363
ggaacgcatgctgggtcgaaagatt

SEQ ID NO: 148657 - DNA, 25 bp, Artificial
  probe
  misc_feature (1)..(25): SEQ ID NO: 2426; WAN024D9A_at; Start 685; Stop 709
tgtggttggccaagttttagccgtc

SEQ ID NO: 148658 - DNA, 25 bp, Artificial
  probe
  misc_feature (1)..(25): SEQ ID NO: 2426; WAN024D9A_at; Start 3; Stop 27
ggcagaaatttatctagcaggtggt

SEQ ID NO: 148659 - DNA, 25 bp, Artificial
  probe
  misc_feature (1)..(25): SEQ ID NO: 2426; WAN024D9A_at; Start 425; Stop 449
tcaggaagaatccttcaggttactg

SEQ ID NO: 148660 - DNA, 25 bp, Artificial
  probe
  misc_feature (1)..(25): SEQ ID NO: 2426; WAN024D9A_at; Start 793; Stop 817
gctcacttgggtcatgttttcacag

SEQ ID NO: 148661 - DNA, 25 bp, Artificial
  probe
  misc_feature (1)..(25): SEQ ID NO: 2426; WAN024D9A_at; Start 878; Stop 902
tggccaaggatgagatggaaaaagc

SEQ ID NO: 148662 - DNA, 25 bp, Artificial
  probe
  misc_feature (1)..(25): SEQ ID NO: 2426; WAN024D9A_at; Start 289; Stop 313
tatcaggatgaagcagatttgccag

SEQ ID NO: 148663 - DNA, 25 bp, Artificial
  probe
  misc_feature (1)..(25): SEQ ID NO: 2426; WAN024D9A_at; Start 524; Stop 548
tgaaggccagtctatctgaagagtc

SEQ ID NO: 148664 - DNA, 25 bp, Artificial
  probe
  misc_feature (1)..(25): SEQ ID NO: 2426; WAN024D9A_at; Start 472; Stop 496
gataagccattgattgatgcagcaa

SEQ ID NO: 148665 - DNA, 25 bp, Artificial
  probe
  misc_feature (1)..(25): SEQ ID NO: 2426; WAN024D9A_at; Start 88; Stop 112
ggctacgctaatggtcaagtcgaaa

SEQ ID NO: 148666 - DNA, 25 bp, Artificial
  probe
  misc_feature (1)..(25): SEQ ID NO: 2426; WAN024D9A_at; Start 487; Stop 511
gatgcagcaaactatgaaaagccta

SEQ ID NO: 148667 - DNA, 25 bp, Artificial
  probe
  misc_feature (1)..(25): SEQ ID NO: 2426; WAN024D9A_at; Start 671; Stop 695
agtttgcttcaggttgtggttggcc

SEQ ID NO: 148668 - DNA, 25 bp, Artificial
  probe
  misc_feature (1)..(25): SEQ ID NO: 2426; WAN024D9A_at; Start 592; Stop 616
aatgcctatgaccaaacctttgaag

SEQ ID NO: 148669 - DNA, 25 bp, Artificial
  probe
  misc_feature (1)..(25): SEQ ID NO: 2426; WAN024D9A_at; Start 774; Stop 798
tcgttctcgttcaggcagtgctcac

SEQ ID NO: 148670 - DNA, 25 bp, Artificial
  probe
  misc_feature (1)..(25): SEQ ID NO: 2426; WAN024D9A_at; Start 376; Stop 400
gagcaattacgccactacattctgg

SEQ ID NO: 148671 - DNA, 25 bp, Artificial
  probe
  misc_feature (1)..(25): SEQ ID NO: 1153; WAN024D9B_at; Start 213; Stop 237
ggcacttttaggctgttcaaagtca

SEQ ID NO: 148672 - DNA, 25 bp, Artificial
  probe
  misc_feature (1)..(25): SEQ ID NO: 1153; WAN024D9B_at; Start 153; Stop 177
caaaggttggattgatgaggatggg

SEQ ID NO: 148673 - DNA, 25 bp, Artificial
  probe
  misc_feature (1)..(25): SEQ ID NO: 1153; WAN024D9B_at; Start 61; Stop 85
cttttatttgagagtgaacggtata

SEQ ID NO: 148674 - DNA, 25 bp, Artificial
  probe
  misc_feature (1)..(25): SEQ ID NO: 1153; WAN024D9B_at; Start 147; Stop 171
tttgagcaaaggttggattgatgag

SEQ ID NO: 148675 - DNA, 25 bp, Artificial
  probe
  misc_feature (1)..(25): SEQ ID NO: 1153; WAN024D9B_at; Start 76; Stop 100
gaacggtataagaatatgaaactgg

SEQ ID NO: 148676 - DNA, 25 bp, Artificial
  probe
  misc_feature (1)..(25): SEQ ID NO: 1153; WAN024D9B_at; Start 206; Stop 230
atttgatggcacttttaggctgttc

SEQ ID NO: 148677 - DNA, 25 bp, Artificial
  probe
  misc_feature (1)..(25): SEQ ID NO: 1153; WAN024D9B_at; Start 88; Stop 112
aatatgaaactggaggttaaggtgg

SEQ ID NO: 148678 - DNA, 25 bp, Artificial
  probe
  misc_feature (1)..(25): SEQ ID NO: 1153; WAN024D9B_at; Start 35; Stop 59
cagagcgttattataagctccccaa

SEQ ID NO: 148679 - DNA, 25 bp, Artificial
  probe
  misc_feature (1)..(25): SEQ ID NO: 1153; WAN024D9B_at; Start 57; Stop 81
caaacttttatttgagagtgaacgg

SEQ ID NO: 148680 - DNA, 25 bp, Artificial
  probe
  misc_feature (1)..(25): SEQ ID NO: 1153; WAN024D9B_at; Start 65; Stop 89
tatttgagagtgaacggtataagaa

SEQ ID NO: 148681 - DNA, 25 bp, Artificial
  probe
  misc_feature (1)..(25): SEQ ID NO: 1153; WAN024D9B_at; Start 223; Stop 247
ggctgttcaaagtcaaaattactct

SEQ ID NO: 148682 - DNA, 25 bp, Artificial
  probe
  misc_feature (1)..(25): SEQ ID NO: 1153; WAN024D9B_at; Start 18; Stop 42
taatcaatatcagacatcagagcgt

SEQ ID NO: 148683 - DNA, 25 bp, Artificial
  probe
  misc_feature (1)..(25): SEQ ID NO: 1153; WAN024D9B_at; Start 228; Stop 252
ttcaaagtcaaaattactctccatg

SEQ ID NO: 148684 - DNA, 25 bp, Artificial
  probe
  misc_feature (1)..(25): SEQ ID NO: 1153; WAN024D9B_at; Start 50; Stop 74
agctccccaaacttttatttgagag

SEQ ID NO: 148685 - DNA, 25 bp, Artificial
  probe
  misc_feature (1)..(25): SEQ ID NO: 1153; WAN024D9B_at; Start 97; Stop 121
ctggaggttaaggtggtttactcag

SEQ ID NO: 148686 - DNA, 25 bp, Artificial
  probe
  misc_feature (1)..(25): SEQ ID NO: 1153; WAN024D9B_at; Start 84; Stop 108
taagaatatgaaactggaggttaag

SEQ ID NO: 148687 - DNA, 25 bp, Artificial
  probe
  misc_feature (1)..(25): SEQ ID NO: 1153; WAN024D9B_at; Start 79; Stop 103
cggtataagaatatgaaactggagg

SEQ ID NO: 148688 - DNA, 25 bp, Artificial
  probe
  misc_feature (1)..(25): SEQ ID NO: 1153; WAN024D9B_at; Start 139; Stop 163
gagttgtctttgagcaaaggttgga

SEQ ID NO: 148689 - DNA, 25 bp, Artificial
  probe
  misc_feature (1)..(25): SEQ ID NO: 1153; WAN024D9B_at; Start 69; Stop 93
tgagagtgaacggtataagaatatg

SEQ ID NO: 148690 - DNA, 25 bp, Artificial
  probe
  misc_feature (1)..(25): SEQ ID NO: 1153; WAN024D9B_at; Start 21; Stop 45
tcaatatcagacatcagagcgttat

SEQ ID NO: 148691 - DNA, 25 bp, Artificial
  probe
  misc_feature (1)..(25): SEQ ID NO: 1153; WAN024D9B_at; Start 117; Stop 141
ctcagttttaaaagatcggttggag

SEQ ID NO: 148692 - DNA, 25 bp, Artificial
  probe
  misc_feature (1)..(25): SEQ ID NO: 1153; WAN024D9B_at; Start 130; Stop 154
gatcggttggagttgtctttgagca

SEQ ID NO: 148693 - DNA, 25 bp, Artificial
  probe
  misc_feature (1)..(25): SEQ ID NO: 1153; WAN024D9B_at; Start 11; Stop 35
ttaccgctaatcaatatcagacatc

SEQ ID NO: 148694 - DNA, 25 bp, Artificial
  probe
  misc_feature (1)..(25): SEQ ID NO: 1153; WAN024D9B_at; Start 176; Stop 200
gggctatttatttgatttattccaa

SEQ ID NO: 148695 - DNA, 25 bp, Artificial
  probe
  misc_feature (1)..(25): SEQ ID NO: 1153; WAN024D9B_at; Start 210; Stop 234
gatggcacttttaggctgttcaaag

SEQ ID NO: 148696 - DNA, 25 bp, Artificial
  probe
  misc_feature (1)..(25): SEQ ID NO: 1153; WAN024D9B_at; Start 193; Stop 217
tattccaattcaaatttgatggcac

SEQ ID NO: 148697 - DNA, 25 bp, Artificial
  probe
  misc_feature (1)..(25): SEQ ID NO: 1153; WAN024D9B_at; Start 38; Stop 62
agcgttattataagctccccaaact

SEQ ID NO: 148698 - DNA, 25 bp, Artificial
  probe
  misc_feature (1)..(25): SEQ ID NO: 1153; WAN024D9B_at; Start 203; Stop 227
caaatttgatggcacttttaggctg

SEQ ID NO: 148699 - DNA, 25 bp, Artificial
  probe
  misc_feature (1)..(25): SEQ ID NO: 1153; WAN024D9B_at; Start 27; Stop 51
tcagacatcagagcgttattataag

SEQ ID NO: 148700 - DNA, 25 bp, Artificial
  probe
  misc_feature (1)..(25): SEQ ID NO: 1153; WAN024D9B_at; Start 215; Stop 239
cacttttaggctgttcaaagtcaaa

SEQ ID NO: 148701 - DNA, 25 bp, Artificial
  probe
  misc_feature (1)..(25): SEQ ID NO: 1153; WAN024D9B_at; Start 15; Stop 39
cgctaatcaatatcagacatcagag

SEQ ID NO: 148702 - DNA, 25 bp, Artificial
  probe
  misc_feature (1)..(25): SEQ ID NO: 1153; WAN024D9B_at; Start 32; Stop 56
catcagagcgttattataagctccc

SEQ ID NO: 148703 - DNA, 25 bp, Artificial
  probe
  misc_feature (1)..(25): SEQ ID NO: 1153; WAN024D9B_at; Start 133; Stop 157
cggttggagttgtctttgagcaaag

SEQ ID NO: 148704 - DNA, 25 bp, Artificial
  probe
  misc_feature (1)..(25): SEQ ID NO: 1153; WAN024D9B_at; Start 145; Stop 169
tctttgagcaaaggttggattgatg

SEQ ID NO: 148705 - DNA, 25 bp, Artificial
  probe
  misc_feature (1)..(25): SEQ ID NO: 7277; WAN024D9C_at; Start 12; Stop 36
tgatatcaaaataatcaatctcctt

SEQ ID NO: 148706 - DNA, 25 bp, Artificial
  probe
  misc_feature (1)..(25): SEQ ID NO: 7277; WAN024D9C_at; Start 33; Stop 57
cctttatgagctaattcttctctac

SEQ ID NO: 148707 - DNA, 25 bp, Artificial
  probe
  misc_feature (1)..(25): SEQ ID NO: 7277; WAN024D9C_at; Start 30; Stop 54
tctcctttatgagctaattcttctc

SEQ ID NO: 148708 - DNA, 25 bp, Artificial
  probe
  misc_feature (1)..(25): SEQ ID NO: 7277; WAN024D9C_at; Start 42; Stop 66
gctaattcttctctacaagctcttt

SEQ ID NO: 148709 - DNA, 25 bp, Artificial
  probe
  misc_feature (1)..(25): SEQ ID NO: 7277; WAN024D9C_at; Start 45; Stop 69
aattcttctctacaagctctttgga

SEQ ID NO: 148710 - DNA, 25 bp, Artificial
  probe
  misc_feature (1)..(25): SEQ ID NO: 7277; WAN024D9C_at; Start 55; Stop 79
tacaagctctttggagcagaacaac

SEQ ID NO: 148711 - DNA, 25 bp, Artificial
  probe
  misc_feature (1)..(25): SEQ ID NO: 7277; WAN024D9C_at; Start 27; Stop 51
caatctcctttatgagctaattctt

SEQ ID NO: 148712 - DNA, 25 bp, Artificial
  probe
  misc_feature (1)..(25): SEQ ID NO: 7277; WAN024D9C_at; Start 38; Stop 62
atgagctaattcttctctacaagct

SEQ ID NO: 148713 - DNA, 25 bp, Artificial
  probe
  misc_feature (1)..(25): SEQ ID NO: 7277; WAN024D9C_at; Start 10; Stop 34
tttgatatcaaaataatcaatctcc

SEQ ID NO: 148714 - DNA, 25 bp, Artificial
  probe
  misc_feature (1)..(25): SEQ ID NO: 7277; WAN024D9C_at; Start 49; Stop 73
cttctctacaagctctttggagcag

SEQ ID NO: 148715 - DNA, 25 bp, Artificial
  probe
  misc_feature (1)..(25): SEQ ID NO: 7277; WAN024D9C_at; Start 26; Stop 50
tcaatctcctttatgagctaattct

SEQ ID NO: 148716 - DNA, 25 bp, Artificial
  probe
  misc_feature (1)..(25): SEQ ID NO: 7277; WAN024D9C_at; Start 56; Stop 80
acaagctctttggagcagaacaact

SEQ ID NO: 148717 - DNA, 25 bp, Artificial
  probe
  misc_feature (1)..(25): SEQ ID NO: 7277; WAN024D9C_at; Start 39; Stop 63
tgagctaattcttctctacaagctc

SEQ ID NO: 148718 - DNA, 25 bp, Artificial
  probe
  misc_feature (1)..(25): SEQ ID NO: 7277; WAN024D9C_at; Start 53; Stop 77
tctacaagctctttggagcagaaca

SEQ ID NO: 148719 - DNA, 25 bp, Artificial
  probe
  misc_feature (1)..(25): SEQ ID NO: 7277; WAN024D9C_at; Start 50; Stop 74
ttctctacaagctctttggagcaga

SEQ ID NO: 148720 - DNA, 25 bp, Artificial
  probe
  misc_feature (1)..(25): SEQ ID NO: 7277; WAN024D9C_at; Start 28; Stop 52
aatctcctttatgagctaattcttc

SEQ ID NO: 148721 - DNA, 25 bp, Artificial
  probe
  misc_feature (1)..(25): SEQ ID NO: 7277; WAN024D9C_at; Start 52; Stop 76
ctctacaagctctttggagcagaac

SEQ ID NO: 148722 - DNA, 25 bp, Artificial
  probe
  misc_feature (1)..(25): SEQ ID NO: 7277; WAN024D9C_at; Start 47; Stop 71
ttcttctctacaagctctttggagc

SEQ ID NO: 148723 - DNA, 25 bp, Artificial
  probe
  misc_feature (1)..(25): SEQ ID NO: 7277; WAN024D9C_at; Start 20; Stop 44
aaataatcaatctcctttatgagct

SEQ ID NO: 148724 - DNA, 25 bp, Artificial
  probe
  misc_feature (1)..(25): SEQ ID NO: 7277; WAN024D9C_at; Start 57; Stop 81
caagctctttggagcagaacaactg

SEQ ID NO: 148725 - DNA, 25 bp, Artificial
  probe
  misc_feature (1)..(25): SEQ ID NO: 7277; WAN024D9C_at; Start 21; Stop 45
aataatcaatctcctttatgagcta

SEQ ID NO: 148726 - DNA, 25 bp, Artificial
  probe
  misc_feature (1)..(25): SEQ ID NO: 7277; WAN024D9C_at; Start 51; Stop 75
tctctacaagctctttggagcagaa

SEQ ID NO: 148727 - DNA, 25 bp, Artificial
  probe
  misc_feature (1)..(25): SEQ ID NO: 7277; WAN024D9C_at; Start 25; Stop 49
atcaatctcctttatgagctaattc

SEQ ID NO: 148728 - DNA, 25 bp, Artificial
  probe
  misc_feature (1)..(25): SEQ ID NO: 7277; WAN024D9C_at; Start 23; Stop 47
taatcaatctcctttatgagctaat

SEQ ID NO: 148729 - DNA, 25 bp, Artificial
  probe
  misc_feature (1)..(25): SEQ ID NO: 7277; WAN024D9C_at; Start 19; Stop 43
aaaataatcaatctcctttatgagc

SEQ ID NO: 148730 - DNA, 25 bp, Artificial
  probe
  misc_feature (1)..(25): SEQ ID NO: 7277; WAN024D9C_at; Start 48; Stop 72
tcttctctacaagctctttggagca

SEQ ID NO: 148731 - DNA, 25 bp, Artificial
  probe
  misc_feature (1)..(25): SEQ ID NO: 7277; WAN024D9C_at; Start 31; Stop 55
ctcctttatgagctaattcttctct

SEQ ID NO: 148732 - DNA, 25 bp, Artificial
  probe
  misc_feature (1)..(25): SEQ ID NO: 7277; WAN024D9C_at; Start 46; Stop 70
attcttctctacaagctctttggag

SEQ ID NO: 148733 - DNA, 25 bp, Artificial
  probe
  misc_feature (1)..(25): SEQ ID NO: 7277; WAN024D9C_at; Start 37; Stop 61
tatgagctaattcttctctacaagc

SEQ ID NO: 148734 - DNA, 25 bp, Artificial
  probe
  misc_feature (1)..(25): SEQ ID NO: 7277; WAN024D9C_at; Start 44; Stop 68
taattcttctctacaagctctttgg

SEQ ID NO: 148735 - DNA, 25 bp, Artificial
  probe
  misc_feature (1)..(25): SEQ ID NO: 7277; WAN024D9C_at; Start 18; Stop 42
caaaataatcaatctcctttatgag

SEQ ID NO: 148736 - DNA, 25 bp, Artificial
  probe
  misc_feature (1)..(25): SEQ ID NO: 7277; WAN024D9C_at; Start 54; Stop 78
ctacaagctctttggagcagaacaa

SEQ ID NO: 148737 - DNA, 25 bp, Artificial
  probe
  misc_feature (1)..(25): SEQ ID NO: 7277; WAN024D9C_at; Start 40; Stop 64
gagctaattcttctctacaagctct

SEQ ID NO: 148738 - DNA, 25 bp, Artificial
  probe
  misc_feature (1)..(25): SEQ ID NO: 7277; WAN024D9C_at; Start 13; Stop 37
gatatcaaaataatcaatctccttt

SEQ ID NO: 148739 - DNA, 25 bp, Artificial
  probe
  misc_feature (1)..(25): SEQ ID NO: 3986; WAN024D9D_at; Start 138; Stop 162
ccaaagagcttgtagagaagaatta

SEQ ID NO: 148740 - DNA, 25 bp, Artificial
  probe
  misc_feature (1)..(25): SEQ ID NO: 3986; WAN024D9D_at; Start 123; Stop 147
tacagttgttctgctccaaagagct

SEQ ID NO: 148741 - DNA, 25 bp, Artificial
  probe
  misc_feature (1)..(25): SEQ ID NO: 3986; WAN024D9D_at; Start 153; Stop 177
agaagaattagctcataaaggagat

SEQ ID NO: 148742 - DNA, 25 bp, Artificial
  probe
  misc_feature (1)..(25): SEQ ID NO: 3986; WAN024D9D_at; Start 129; Stop 153
tgttctgctccaaagagcttgtaga

SEQ ID NO: 148743 - DNA, 25 bp, Artificial
  probe
  misc_feature (1)..(25): SEQ ID NO: 3986; WAN024D9D_at; Start 137; Stop 161
tccaaagagcttgtagagaagaatt

SEQ ID NO: 148744 - DNA, 25 bp, Artificial
  probe
  misc_feature (1)..(25): SEQ ID NO: 3986; WAN024D9D_at; Start 89; Stop 113
gaagtatcttgattttatgtgtggt

SEQ ID NO: 148745 - DNA, 25 bp, Artificial
  probe
  misc_feature (1)..(25): SEQ ID NO: 3986; WAN024D9D_at; Start 33; Stop 57
cagtacaaatttaacgggtcaagat

SEQ ID NO: 148746 - DNA, 25 bp, Artificial
  probe
  misc_feature (1)..(25): SEQ ID NO: 3986; WAN024D9D_at; Start 145; Stop 169
gcttgtagagaagaattagctcata

SEQ ID NO: 148747 - DNA, 25 bp, Artificial
  probe
  misc_feature (1)..(25): SEQ ID NO: 3986; WAN024D9D_at; Start 120; Stop 144
acttacagttgttctgctccaaaga

SEQ ID NO: 148748 - DNA, 25 bp, Artificial
  probe
  misc_feature (1)..(25): SEQ ID NO: 3986; WAN024D9D_at; Start 135; Stop 159
gctccaaagagcttgtagagaagaa

SEQ ID NO: 148749 - DNA, 25 bp, Artificial
  probe
  misc_feature (1)..(25): SEQ ID NO: 3986; WAN024D9D_at; Start 122; Stop 146
ttacagttgttctgctccaaagagc

SEQ ID NO: 148750 - DNA, 25 bp, Artificial
  probe
  misc_feature (1)..(25): SEQ ID NO: 3986; WAN024D9D_at; Start 80; Stop 104
gggctgagagaagtatcttgatttt

SEQ ID NO: 148751 - DNA, 25 bp, Artificial
  probe
  misc_feature (1)..(25): SEQ ID NO: 3986; WAN024D9D_at; Start 2; Stop 26
tgagtgggataaaagtttcatttag

SEQ ID NO: 148752 - DNA, 25 bp, Artificial
  probe
  misc_feature (1)..(25): SEQ ID NO: 3986; WAN024D9D_at; Start 125; Stop 149
cagttgttctgctccaaagagcttg

SEQ ID NO: 148753 - DNA, 25 bp, Artificial
  probe
  misc_feature (1)..(25): SEQ ID NO: 3986; WAN024D9D_at; Start 128; Stop 152
ttgttctgctccaaagagcttgtag

SEQ ID NO: 148754 - DNA, 25 bp, Artificial
  probe
  misc_feature (1)..(25): SEQ ID NO: 3986; WAN024D9D_at; Start 146; Stop 170
cttgtagagaagaattagctcataa

SEQ ID NO: 148755 - DNA, 25 bp, Artificial
  probe
  misc_feature (1)..(25): SEQ ID NO: 3986; WAN024D9D_at; Start 32; Stop 56
tcagtacaaatttaacgggtcaaga

SEQ ID NO: 148756 - DNA, 25 bp, Artificial
  probe
  misc_feature (1)..(25): SEQ ID NO: 3986; WAN024D9D_at; Start 132; Stop 156
tctgctccaaagagcttgtagagaa

SEQ ID NO: 148757 - DNA, 25 bp, Artificial
  probe
  misc_feature (1)..(25): SEQ ID NO: 3986; WAN024D9D_at; Start 117; Stop 141
tatacttacagttgttctgctccaa

SEQ ID NO: 148758 - DNA, 25 bp, Artificial
  probe
  misc_feature (1)..(25): SEQ ID NO: 3986; WAN024D9D_at; Start 127; Stop 151
gttgttctgctccaaagagcttgta

SEQ ID NO: 148759 - DNA, 25 bp, Artificial
  probe
  misc_feature (1)..(25): SEQ ID NO: 3986; WAN024D9D_at; Start 121; Stop 145
cttacagttgttctgctccaaagag

SEQ ID NO: 148760 - DNA, 25 bp, Artificial
  probe
  misc_feature (1)..(25): SEQ ID NO: 3986; WAN024D9D_at; Start 85; Stop 109
gagagaagtatcttgattttatgtg

SEQ ID NO: 148761 - DNA, 25 bp, Artificial
  probe
  misc_feature (1)..(25): SEQ ID NO: 3986; WAN024D9D_at; Start 82; Stop 106
gctgagagaagtatcttgattttat

SEQ ID NO: 148762 - DNA, 25 bp, Artificial
  probe
  misc_feature (1)..(25): SEQ ID NO: 3986; WAN024D9D_at; Start 115; Stop 139
tttatacttacagttgttctgctcc

SEQ ID NO: 148763 - DNA, 25 bp, Artificial
  probe
  misc_feature (1)..(25): SEQ ID NO: 3986; WAN024D9D_at; Start 143; Stop 167
gagcttgtagagaagaattagctca

SEQ ID NO: 148764 - DNA, 25 bp, Artificial
  probe
  misc_feature (1)..(25): SEQ ID NO: 3986; WAN024D9D_at; Start 15; Stop 39
agtttcatttagtttattcagtaca

SEQ ID NO: 148765 - DNA, 25 bp, Artificial
  probe
  misc_feature (1)..(25): SEQ ID NO: 3986; WAN024D9D_at; Start 119; Stop 143
tacttacagttgttctgctccaaag

SEQ ID NO: 148766 - DNA, 25 bp, Artificial
  probe
  misc_feature (1)..(25): SEQ ID NO: 3986; WAN024D9D_at; Start 134; Stop 158
tgctccaaagagcttgtagagaaga

SEQ ID NO: 148767 - DNA, 25 bp, Artificial
  probe
  misc_feature (1)..(25): SEQ ID NO: 3986; WAN024D9D_at; Start 29; Stop 53
tattcagtacaaatttaacgggtca

SEQ ID NO: 148768 - DNA, 25 bp, Artificial
  probe
  misc_feature (1)..(25): SEQ ID NO: 3986; WAN024D9D_at; Start 130; Stop 154
gttctgctccaaagagcttgtagag

SEQ ID NO: 148769 - DNA, 25 bp, Artificial
  probe
  misc_feature (1)..(25): SEQ ID NO: 3986; WAN024D9D_at; Start 140; Stop 164
aaagagcttgtagagaagaattagc

SEQ ID NO: 148770 - DNA, 25 bp, Artificial
  probe
  misc_feature (1)..(25): SEQ ID NO: 3986; WAN024D9D_at; Start 152; Stop 176
gagaagaattagctcataaaggaga

SEQ ID NO: 148771 - DNA, 25 bp, Artificial
  probe
  misc_feature (1)..(25): SEQ ID NO: 3986; WAN024D9D_at; Start 103; Stop 127
ttatgtgtggtttttatacttacag

SEQ ID NO: 148772 - DNA, 25 bp, Artificial
  probe
  misc_feature (1)..(25): SEQ ID NO: 3986; WAN024D9D_at; Start 149; Stop 173
gtagagaagaattagctcataaagg

SEQ ID NO: 148773 - DNA, 25 bp, Artificial
  probe
  misc_feature (1)..(25): SEQ ID NO: 732; WAN024D9E_at; Start 68; Stop 92
tccttagcggttcaacaaaacgctc

SEQ ID NO: 148774 - DNA, 25 bp, Artificial
  probe
  misc_feature (1)..(25): SEQ ID NO: 732; WAN024D9E_at; Start 192; Stop 216
tcaagcagatggacgcgtggatcgt

SEQ ID NO: 148775 - DNA, 25 bp, Artificial
  probe
  misc_feature (1)..(25): SEQ ID NO: 732; WAN024D9E_at; Start 160; Stop 184
cacccattctacactggacgtcaaa

SEQ ID NO: 148776 - DNA, 25 bp, Artificial
  probe
  misc_feature (1)..(25): SEQ ID NO: 732; WAN024D9E_at; Start 101; Stop 125
cagttgagttcgaaggcgaaactta

SEQ ID NO: 148777 - DNA, 25 bp, Artificial
  probe
  misc_feature (1)..(25): SEQ ID NO: 732; WAN024D9E_at; Start 117; Stop 141
cgaaacttacccattgatccgtgtg

SEQ ID NO: 148778 - DNA, 25 bp, Artificial
  probe
  misc_feature (1)..(25): SEQ ID NO: 732; WAN024D9E_at; Start 23; Stop 47
aatatcgcccagttgtcttcatgga

SEQ ID NO: 148779 - DNA, 25 bp, Artificial
  probe
  misc_feature (1)..(25): SEQ ID NO: 732; WAN024D9E_at; Start 14; Stop 38
tccatccagaatatcgcccagttgt

SEQ ID NO: 148780 - DNA, 25 bp, Artificial
  probe
  misc_feature (1)..(25): SEQ ID NO: 732; WAN024D9E_at; Start 203; Stop 227
gacgcgtggatcgtttcaacaaaaa

SEQ ID NO: 148781 - DNA, 25 bp, Artificial
  probe
  misc_feature (1)..(25): SEQ ID NO: 732; WAN024D9E_at; Start 189; Stop 213
cactcaagcagatggacgcgtggat

SEQ ID NO: 148782 - DNA, 25 bp, Artificial
  probe
  misc_feature (1)..(25): SEQ ID NO: 732; WAN024D9E_at; Start 171; Stop 195
cactggacgtcaaaagttcactcaa

SEQ ID NO: 148783 - DNA, 25 bp, Artificial
  probe
  misc_feature (1)..(25): SEQ ID NO: 732; WAN024D9E_at; Start 181; Stop 205
caaaagttcactcaagcagatggac

SEQ ID NO: 148784 - DNA, 25 bp, Artificial
  probe
  misc_feature (1)..(25): SEQ ID NO: 732; WAN024D9E_at; Start 97; Stop 121
gaaacagttgagttcgaaggcgaaa

SEQ ID NO: 148785 - DNA, 25 bp, Artificial
  probe
  misc_feature (1)..(25): SEQ ID NO: 732; WAN024D9E_at; Start 176; Stop 200
gacgtcaaaagttcactcaagcaga

SEQ ID NO: 148786 - DNA, 25 bp, Artificial
  probe
  misc_feature (1)..(25): SEQ ID NO: 732; WAN024D9E_at; Start 22; Stop 46
gaatatcgcccagttgtcttcatgg

SEQ ID NO: 148787 - DNA, 25 bp, Artificial
  probe
  misc_feature (1)..(25): SEQ ID NO: 732; WAN024D9E_at; Start 164; Stop 188
cattctacactggacgtcaaaagtt

SEQ ID NO: 148788 - DNA, 25 bp, Artificial
  probe
  misc_feature (1)..(25): SEQ ID NO: 732; WAN024D9E_at; Start 143; Stop 167
aaatttcatcagactcacacccatt

SEQ ID NO: 148789 - DNA, 25 bp, Artificial
  probe
  misc_feature (1)..(25): SEQ ID NO: 732; WAN024D9E_at; Start 197; Stop 221
cagatggacgcgtggatcgtttcaa

SEQ ID NO: 148790 - DNA, 25 bp, Artificial
  probe
  misc_feature (1)..(25): SEQ ID NO: 732; WAN024D9E_at; Start 167; Stop 191
tctacactggacgtcaaaagttcac

SEQ ID NO: 148791 - DNA, 25 bp, Artificial
  probe
  misc_feature (1)..(25): SEQ ID NO: 732; WAN024D9E_at; Start 179; Stop 203
gtcaaaagttcactcaagcagatgg

SEQ ID NO: 148792 - DNA, 25 bp, Artificial
  probe
  misc_feature (1)..(25): SEQ ID NO: 732; WAN024D9E_at; Start 206; Stop 230
gcgtggatcgtttcaacaaaaaata

SEQ ID NO: 148793 - DNA, 25 bp, Artificial
  probe
  misc_feature (1)..(25): SEQ ID NO: 732; WAN024D9E_at; Start 89; Stop 113
gctctaacgaaacagttgagttcga

SEQ ID NO: 148794 - DNA, 25 bp, Artificial
  probe
  misc_feature (1)..(25): SEQ ID NO: 732; WAN024D9E_at; Start 79; Stop 103
tcaacaaaacgctctaacgaaacag

SEQ ID NO: 148795 - DNA, 25 bp, Artificial
  probe
  misc_feature (1)..(25): SEQ ID NO: 732; WAN024D9E_at; Start 113; Stop 137
aaggcgaaacttacccattgatccg

SEQ ID NO: 148796 - DNA, 25 bp, Artificial
  probe
  misc_feature (1)..(25): SEQ ID NO: 732; WAN024D9E_at; Start 93; Stop 117
taacgaaacagttgagttcgaaggc

SEQ ID NO: 148797 - DNA, 25 bp, Artificial
  probe
  misc_feature (1)..(25): SEQ ID NO: 732; WAN024D9E_at; Start 218; Stop 242
tcaacaaaaaatacggtctcaaata

SEQ ID NO: 148798 - DNA, 25 bp, Artificial
  probe
  misc_feature (1)..(25): SEQ ID NO: 732; WAN024D9E_at; Start 16; Stop 40
catccagaatatcgcccagttgtct

SEQ ID NO: 148799 - DNA, 25 bp, Artificial
  probe
  misc_feature (1)..(25): SEQ ID NO: 732; WAN024D9E_at; Start 10; Stop 34
gatatccatccagaatatcgcccag

SEQ ID NO: 148800 - DNA, 25 bp, Artificial
  probe
  misc_feature (1)..(25): SEQ ID NO: 732; WAN024D9E_at; Start 187; Stop 211
ttcactcaagcagatggacgcgtgg

SEQ ID NO: 148801 - DNA, 25 bp, Artificial
  probe
  misc_feature (1)..(25): SEQ ID NO: 732; WAN024D9E_at; Start 74; Stop 98
gcggttcaacaaaacgctctaacga

SEQ ID NO: 148802 - DNA, 25 bp, Artificial
  probe
  misc_feature (1)..(25): SEQ ID NO: 732; WAN024D9E_at; Start 84; Stop 108
aaaacgctctaacgaaacagttgag

SEQ ID NO: 148803 - DNA, 25 bp, Artificial
  probe
  misc_feature (1)..(25): SEQ ID NO: 732; WAN024D9E_at; Start 153; Stop 177
agactcacacccattctacactgga

SEQ ID NO: 148804 - DNA, 25 bp, Artificial
  probe
  misc_feature (1)..(25): SEQ ID NO: 732; WAN024D9E_at; Start 199; Stop 223
gatggacgcgtggatcgtttcaaca

SEQ ID NO: 148805 - DNA, 25 bp, Artificial
  probe
  misc_feature (1)..(25): SEQ ID NO: 732; WAN024D9E_at; Start 109; Stop 133
ttcgaaggcgaaacttacccattga

SEQ ID NO: 148806 - DNA, 25 bp, Artificial
  probe
  misc_feature (1)..(25): SEQ ID NO: 732; WAN024D9E_at; Start 184; Stop 208
aagttcactcaagcagatggacgcg

SEQ ID NO: 148807 - DNA, 25 bp, Artificial
  probe
  misc_feature (1)..(25): SEQ ID NO: 2364; WAN024D9F_at; Start 89; Stop 113
gggtggttgcttataagaaagcttc

SEQ ID NO: 148808 - DNA, 25 bp, Artificial
  probe
  misc_feature (1)..(25): SEQ ID NO: 2364; WAN024D9F_at; Start 54; Stop 78
caaactgttagaagaacgaatgcat

SEQ ID NO: 148809 - DNA, 25 bp, Artificial
  probe
  misc_feature (1)..(25): SEQ ID NO: 2364; WAN024D9F_at; Start 43; Stop 67
gaccaaattgtcaaactgttagaag

SEQ ID NO: 148810 - DNA, 25 bp, Artificial
  probe
  misc_feature (1)..(25): SEQ ID NO: 2364; WAN024D9F_at; Start 219; Stop 243
ggacatactcaaacgttcgcgtgat

SEQ ID NO: 148811 - DNA, 25 bp, Artificial
  probe
  misc_feature (1)..(25): SEQ ID NO: 2364; WAN024D9F_at; Start 109; Stop 133
gcttcaggtaaaccgattttagata

SEQ ID NO: 148812 - DNA, 25 bp, Artificial
  probe
  misc_feature (1)..(25): SEQ ID NO: 2364; WAN024D9F_at; Start 31; Stop 55
gatcaaatcgacgaccaaattgtca

SEQ ID NO: 148813 - DNA, 25 bp, Artificial
  probe
  misc_feature (1)..(25): SEQ ID NO: 2364; WAN024D9F_at; Start 93; Stop 117
ggttgcttataagaaagcttcaggt

SEQ ID NO: 148814 - DNA, 25 bp, Artificial
  probe
  misc_feature (1)..(25): SEQ ID NO: 2364; WAN024D9F_at; Start 117; Stop 141
taaaccgattttagatactaagaga

SEQ ID NO: 148815 - DNA, 25 bp, Artificial
  probe
  misc_feature (1)..(25): SEQ ID NO: 2364; WAN024D9F_at; Start 36; Stop 60
aatcgacgaccaaattgtcaaactg

SEQ ID NO: 148816 - DNA, 25 bp, Artificial
  probe
  misc_feature (1)..(25): SEQ ID NO: 2364; WAN024D9F_at; Start 230; Stop 254
aacgttcgcgtgattatcaggatca

SEQ ID NO: 148817 - DNA, 25 bp, Artificial
  probe
  misc_feature (1)..(25): SEQ ID NO: 2364; WAN024D9F_at; Start 180; Stop 204
ggacaagcgctatcaggagactatt

SEQ ID NO: 148818 - DNA, 25 bp, Artificial
  probe
  misc_feature (1)..(25): SEQ ID NO: 2364; WAN024D9F_at; Start 2; Stop 26
tggatttagatattattcgtcaaga

SEQ ID NO: 148819 - DNA, 25 bp, Artificial
  probe
  misc_feature (1)..(25): SEQ ID NO: 2364; WAN024D9F_at; Start 130; Stop 154
gatactaagagagaagaagttattt

SEQ ID NO: 148820 - DNA, 25 bp, Artificial
  probe
  misc_feature (1)..(25): SEQ ID NO: 2364; WAN024D9F_at; Start 178; Stop 202
gaggacaagcgctatcaggagacta

SEQ ID NO: 148821 - DNA, 25 bp, Artificial
  probe
  misc_feature (1)..(25): SEQ ID NO: 2364; WAN024D9F_at; Start 171; Stop 195
tcgtgtagaggacaagcgctatcag

SEQ ID NO: 148822 - DNA, 25 bp, Artificial
  probe
  misc_feature (1)..(25): SEQ ID NO: 2364; WAN024D9F_at; Start 10; Stop 34
gatattattcgtcaagaaatcgatc

SEQ ID NO: 148823 - DNA, 25 bp, Artificial
  probe
  misc_feature (1)..(25): SEQ ID NO: 2364; WAN024D9F_at; Start 233; Stop 257
gttcgcgtgattatcaggatcaaaa

SEQ ID NO: 148824 - DNA, 25 bp, Artificial
  probe
  misc_feature (1)..(25): SEQ ID NO: 2364; WAN024D9F_at; Start 59; Stop 83
tgttagaagaacgaatgcatttagt

SEQ ID NO: 148825 - DNA, 25 bp, Artificial
  probe
  misc_feature (1)..(25): SEQ ID NO: 2364; WAN024D9F_at; Start 51; Stop 75
tgtcaaactgttagaagaacgaatg

SEQ ID NO: 148826 - DNA, 25 bp, Artificial
  probe
  misc_feature (1)..(25): SEQ ID NO: 2364; WAN024D9F_at; Start 227; Stop 251
tcaaacgttcgcgtgattatcagga

SEQ ID NO: 148827 - DNA, 25 bp, Artificial
  probe
  misc_feature (1)..(25): SEQ ID NO: 2364; WAN024D9F_at; Start 18; Stop 42
tcgtcaagaaatcgatcaaatcgac

SEQ ID NO: 148828 - DNA, 25 bp, Artificial
  probe
  misc_feature (1)..(25): SEQ ID NO: 2364; WAN024D9F_at; Start 182; Stop 206
acaagcgctatcaggagactattgt

SEQ ID NO: 148829 - DNA, 25 bp, Artificial
  probe
  misc_feature (1)..(25): SEQ ID NO: 2364; WAN024D9F_at; Start 29; Stop 53
tcgatcaaatcgacgaccaaattgt

SEQ ID NO: 148830 - DNA, 25 bp, Artificial
  probe
  misc_feature (1)..(25): SEQ ID NO: 2364; WAN024D9F_at; Start 217; Stop 241
tcggacatactcaaacgttcgcgtg

SEQ ID NO: 148831 - DNA, 25 bp, Artificial
  probe
  misc_feature (1)..(25): SEQ ID NO: 2364; WAN024D9F_at; Start 22; Stop 46
caagaaatcgatcaaatcgacgacc

SEQ ID NO: 148832 - DNA, 25 bp, Artificial
  probe
  misc_feature (1)..(25): SEQ ID NO: 2364; WAN024D9F_at; Start 208; Stop 232
gcgactttttcggacatactcaaac

SEQ ID NO: 148833 - DNA, 25 bp, Artificial
  probe
  misc_feature (1)..(25): SEQ ID NO: 2364; WAN024D9F_at; Start 174; Stop 198
tgtagaggacaagcgctatcaggag

SEQ ID NO: 148834 - DNA, 25 bp, Artificial
  probe
  misc_feature (1)..(25): SEQ ID NO: 2364; WAN024D9F_at; Start 40; Stop 64
gacgaccaaattgtcaaactgttag

SEQ ID NO: 148835 - DNA, 25 bp, Artificial
  probe
  misc_feature (1)..(25): SEQ ID NO: 2364; WAN024D9F_at; Start 121; Stop 145
ccgattttagatactaagagagaag

SEQ ID NO: 148836 - DNA, 25 bp, Artificial
  probe
  misc_feature (1)..(25): SEQ ID NO: 2364; WAN024D9F_at; Start 168; Stop 192
gagtcgtgtagaggacaagcgctat

SEQ ID NO: 148837 - DNA, 25 bp, Artificial
  probe
  misc_feature (1)..(25): SEQ ID NO: 2364; WAN024D9F_at; Start 224; Stop 248
tactcaaacgttcgcgtgattatca

SEQ ID NO: 148838 - DNA, 25 bp, Artificial
  probe
  misc_feature (1)..(25): SEQ ID NO: 2364; WAN024D9F_at; Start 65; Stop 89
aagaacgaatgcatttagttgaggg

SEQ ID NO: 148839 - DNA, 25 bp, Artificial
  probe
  misc_feature (1)..(25): SEQ ID NO: 2364; WAN024D9F_at; Start 214; Stop 238
ttttcggacatactcaaacgttcgc

SEQ ID NO: 148840 - DNA, 25 bp, Artificial
  probe
  misc_feature (1)..(25): SEQ ID NO: 2364; WAN024D9F_at; Start 100; Stop 124
tataagaaagcttcaggtaaaccga

SEQ ID NO: 148841 - DNA, 25 bp, Artificial
  probe
  misc_feature (1)..(25): SEQ ID NO: 643; WAN024D9G_at; Start 111; Stop 135
gggcactctctttgtcaactatctg

SEQ ID NO: 148842 - DNA, 25 bp, Artificial
  probe
  misc_feature (1)..(25): SEQ ID NO: 643; WAN024D9G_at; Start 8; Stop 32
aagaacaattttatccgctaggaat

SEQ ID NO: 148843 - DNA, 25 bp, Artificial
  probe
  misc_feature (1)..(25): SEQ ID NO: 643; WAN024D9G_at; Start 39; Stop 63
agctgctatgttgggcggacttgtc

SEQ ID NO: 148844 - DNA, 25 bp, Artificial
  probe
  misc_feature (1)..(25): SEQ ID NO: 643; WAN024D9G_at; Start 36; Stop 60
tctagctgctatgttgggcggactt

SEQ ID NO: 148845 - DNA, 25 bp, Artificial
  probe
  misc_feature (1)..(25): SEQ ID NO: 643; WAN024D9G_at; Start 262; Stop 286
gatactgtgaagctgcttgatacag

SEQ ID NO: 148846 - DNA, 25 bp, Artificial
  probe
  misc_feature (1)..(25): SEQ ID NO: 643; WAN024D9G_at; Start 71; Stop 95
tagtttccacctggttaccagccag

SEQ ID NO: 148847 - DNA, 25 bp, Artificial
  probe
  misc_feature (1)..(25): SEQ ID NO: 643; WAN024D9G_at; Start 53; Stop 77
gcggacttgtccgatatctagtttc

SEQ ID NO: 148848 - DNA, 25 bp, Artificial
  probe
  misc_feature (1)..(25): SEQ ID NO: 643; WAN024D9G_at; Start 127; Stop 151
aactatctgggaattttctgcttga

SEQ ID NO: 148849 - DNA, 25 bp, Artificial
  probe
  misc_feature (1)..(25): SEQ ID NO: 643; WAN024D9G_at; Start 198; Stop 222
cttgattttagcactggggacgggt

SEQ ID NO: 148850 - DNA, 25 bp, Artificial
  probe
  misc_feature (1)..(25): SEQ ID NO: 643; WAN024D9G_at; Start 60; Stop 84
tgtccgatatctagtttccacctgg

SEQ ID NO: 148851 - DNA, 25 bp, Artificial
  probe
  misc_feature (1)..(25): SEQ ID NO: 643; WAN024D9G_at; Start 114; Stop 138
cactctctttgtcaactatctggga

SEQ ID NO: 148852 - DNA, 25 bp, Artificial
  probe
  misc_feature (1)..(25): SEQ ID NO: 643; WAN024D9G_at; Start 244; Stop 268
ttttccagcctaatgcttgatactg

SEQ ID NO: 148853 - DNA, 25 bp, Artificial
  probe
  misc_feature (1)..(25): SEQ ID NO: 643; WAN024D9G_at; Start 157; Stop 181
cttgtcaagggctatctggtctata

SEQ ID NO: 148854 - DNA, 25 bp, Artificial
  probe
  misc_feature (1)..(25): SEQ ID NO: 643; WAN024D9G_at; Start 270; Stop 294
gaagctgcttgatacagggcgttat

SEQ ID NO: 148855 - DNA, 25 bp, Artificial
  probe
  misc_feature (1)..(25): SEQ ID NO: 643; WAN024D9G_at; Start 191; Stop 215
gtaagggcttgattttagcactggg

SEQ ID NO: 148856 - DNA, 25 bp, Artificial
  probe
  misc_feature (1)..(25): SEQ ID NO: 643; WAN024D9G_at; Start 26; Stop 50
taggaatttttctagctgctatgtt

SEQ ID NO: 148857 - DNA, 25 bp, Artificial
  probe
  misc_feature (1)..(25): SEQ ID NO: 643; WAN024D9G_at; Start 254; Stop 278
taatgcttgatactgtgaagctgct

SEQ ID NO: 148858 - DNA, 25 bp, Artificial
  probe
  misc_feature (1)..(25): SEQ ID NO: 643; WAN024D9G_at; Start 67; Stop 91
tatctagtttccacctggttaccag

SEQ ID NO: 148859 - DNA, 25 bp, Artificial
  probe
  misc_feature (1)..(25): SEQ ID NO: 643; WAN024D9G_at; Start 56; Stop 80
gacttgtccgatatctagtttccac

SEQ ID NO: 148860 - DNA, 25 bp, Artificial
  probe
  misc_feature (1)..(25): SEQ ID NO: 643; WAN024D9G_at; Start 267; Stop 291
tgtgaagctgcttgatacagggcgt

SEQ ID NO: 148861 - DNA, 25 bp, Artificial
  probe
  misc_feature (1)..(25): SEQ ID NO: 643; WAN024D9G_at; Start 187; Stop 211
actagtaagggcttgattttagcac

SEQ ID NO: 148862 - DNA, 25 bp, Artificial
  probe
  misc_feature (1)..(25): SEQ ID NO: 643; WAN024D9G_at; Start 161; Stop 185
tcaagggctatctggtctataaggg

SEQ ID NO: 148863 - DNA, 25 bp, Artificial
  probe
  misc_feature (1)..(25): SEQ ID NO: 643; WAN024D9G_at; Start 44; Stop 68
ctatgttgggcggacttgtccgata

SEQ ID NO: 148864 - DNA, 25 bp, Artificial
  probe
  misc_feature (1)..(25): SEQ ID NO: 643; WAN024D9G_at; Start 49; Stop 73
ttgggcggacttgtccgatatctag

SEQ ID NO: 148865 - DNA, 25 bp, Artificial
  probe
  misc_feature (1)..(25): SEQ ID NO: 643; WAN024D9G_at; Start 123; Stop 147
tgtcaactatctgggaattttctgc

SEQ ID NO: 148866 - DNA, 25 bp, Artificial
  probe
  misc_feature (1)..(25): SEQ ID NO: 643; WAN024D9G_at; Start 239; Stop 263
caactttttccagcctaatgcttga

SEQ ID NO: 148867 - DNA, 25 bp, Artificial
  probe
  misc_feature (1)..(25): SEQ ID NO: 643; WAN024D9G_at; Start 34; Stop 58
tttctagctgctatgttgggcggac

SEQ ID NO: 148868 - DNA, 25 bp, Artificial
  probe
  misc_feature (1)..(25): SEQ ID NO: 643; WAN024D9G_at; Start 258; Stop 282
gcttgatactgtgaagctgcttgat

SEQ ID NO: 148869 - DNA, 25 bp, Artificial
  probe
  misc_feature (1)..(25): SEQ ID NO: 643; WAN024D9G_at; Start 236; Stop 260
taacaactttttccagcctaatgct

SEQ ID NO: 148870 - DNA, 25 bp, Artificial
  probe
  misc_feature (1)..(25): SEQ ID NO: 643; WAN024D9G_at; Start 63; Stop 87
ccgatatctagtttccacctggtta

SEQ ID NO: 148871 - DNA, 25 bp, Artificial
  probe
  misc_feature (1)..(25): SEQ ID NO: 643; WAN024D9G_at; Start 73; Stop 97
gtttccacctggttaccagccagtc

SEQ ID NO: 148872 - DNA, 25 bp, Artificial
  probe
  misc_feature (1)..(25): SEQ ID NO: 643; WAN024D9G_at; Start 171; Stop 195
tctggtctataaggggactagtaag

SEQ ID NO: 148873 - DNA, 25 bp, Artificial
  probe
  misc_feature (1)..(25): SEQ ID NO: 643; WAN024D9G_at; Start 249; Stop 273
cagcctaatgcttgatactgtgaag

SEQ ID NO: 148874 - DNA, 25 bp, Artificial
  probe
  misc_feature (1)..(25): SEQ ID NO: 643; WAN024D9G_at; Start 117; Stop 141
tctctttgtcaactatctgggaatt

SEQ ID NO: 148875 - DNA, 25 bp, Artificial
  probe
  misc_feature (1)..(25): SEQ ID NO: 2625; WAN024D9H_at; Start 67; Stop 91
tataatcaagcttctaaattgccac

SEQ ID NO: 148876 - DNA, 25 bp, Artificial
  probe
  misc_feature (1)..(25): SEQ ID NO: 2625; WAN024D9H_at; Start 150; Stop 174
tgtagagtctaaggaagtatatgct

SEQ ID NO: 148877 - DNA, 25 bp, Artificial
  probe
  misc_feature (1)..(25): SEQ ID NO: 2625; WAN024D9H_at; Start 75; Stop 99
agcttctaaattgccactcggaacg

SEQ ID NO: 148878 - DNA, 25 bp, Artificial
  probe
  misc_feature (1)..(25): SEQ ID NO: 2625; WAN024D9H_at; Start 154; Stop 178
gagtctaaggaagtatatgctattc

SEQ ID NO: 148879 - DNA, 25 bp, Artificial
  probe
  misc_feature (1)..(25): SEQ ID NO: 2625; WAN024D9H_at; Start 172; Stop 196
gctattctagcaacaggattttgtg

SEQ ID NO: 148880 - DNA, 25 bp, Artificial
  probe
  misc_feature (1)..(25): SEQ ID NO: 2625; WAN024D9H_at; Start 163; Stop 187
gaagtatatgctattctagcaacag

SEQ ID NO: 148881 - DNA, 25 bp, Artificial
  probe
  misc_feature (1)..(25): SEQ ID NO: 2625; WAN024D9H_at; Start 92; Stop 116
tcggaacgctcatagctaatctttt

SEQ ID NO: 148882 - DNA, 25 bp, Artificial
  probe
  misc_feature (1)..(25): SEQ ID NO: 2625; WAN024D9H_at; Start 65; Stop 89
gctataatcaagcttctaaattgcc

SEQ ID NO: 148883 - DNA, 25 bp, Artificial
  probe
  misc_feature (1)..(25): SEQ ID NO: 2625; WAN024D9H_at; Start 303; Stop 327
tgcgatttttttaggaattttgcta

SEQ ID NO: 148884 - DNA, 25 bp, Artificial
  probe
  misc_feature (1)..(25): SEQ ID NO: 2625; WAN024D9H_at; Start 86; Stop 110
tgccactcggaacgctcatagctaa

SEQ ID NO: 148885 - DNA, 25 bp, Artificial
  probe
  misc_feature (1)..(25): SEQ ID NO: 2625; WAN024D9H_at; Start 144; Stop 168
caatcatgtagagtctaaggaagta

SEQ ID NO: 148886 - DNA, 25 bp, Artificial
  probe
  misc_feature (1)..(25): SEQ ID NO: 2625; WAN024D9H_at; Start 142; Stop 166
tacaatcatgtagagtctaaggaag

SEQ ID NO: 148887 - DNA, 25 bp, Artificial
  probe
  misc_feature (1)..(25): SEQ ID NO: 2625; WAN024D9H_at; Start 70; Stop 94
aatcaagcttctaaattgccactcg

SEQ ID NO: 148888 - DNA, 25 bp, Artificial
  probe
  misc_feature (1)..(25): SEQ ID NO: 2625; WAN024D9H_at; Start 41; Stop 65
cactcgtacggtatttcttttctcg

SEQ ID NO: 148889 - DNA, 25 bp, Artificial
  probe
  misc_feature (1)..(25): SEQ ID NO: 2625; WAN024D9H_at; Start 79; Stop 103
tctaaattgccactcggaacgctca

SEQ ID NO: 148890 - DNA, 25 bp, Artificial
  probe
  misc_feature (1)..(25): SEQ ID NO: 2625; WAN024D9H_at; Start 174; Stop 198
tattctagcaacaggattttgtggc

SEQ ID NO: 148891 - DNA, 25 bp, Artificial
  probe
  misc_feature (1)..(25): SEQ ID NO: 2625; WAN024D9H_at; Start 99; Stop 123
gctcatagctaatcttttaggttgt

SEQ ID NO: 148892 - DNA, 25 bp, Artificial
  probe
  misc_feature (1)..(25): SEQ ID NO: 2625; WAN024D9H_at; Start 83; Stop 107
aattgccactcggaacgctcatagc

SEQ ID NO: 148893 - DNA, 25 bp, Artificial
  probe
  misc_feature (1)..(25): SEQ ID NO: 2625; WAN024D9H_at; Start 209; Stop 233
ctttttcgaccttgaatgacgaact

SEQ ID NO: 148894 - DNA, 25 bp, Artificial
  probe
  misc_feature (1)..(25): SEQ ID NO: 2625; WAN024D9H_at; Start 181; Stop 205
gcaacaggattttgtggcggtttaa

SEQ ID NO: 148895 - DNA, 25 bp, Artificial
  probe
  misc_feature (1)..(25): SEQ ID NO: 2625; WAN024D9H_at; Start 159; Stop 183
taaggaagtatatgctattctagca

SEQ ID NO: 148896 - DNA, 25 bp, Artificial
  probe
  misc_feature (1)..(25): SEQ ID NO: 2625; WAN024D9H_at; Start 81; Stop 105
taaattgccactcggaacgctcata

SEQ ID NO: 148897 - DNA, 25 bp, Artificial
  probe
  misc_feature (1)..(25): SEQ ID NO: 2625; WAN024D9H_at; Start 45; Stop 69
cgtacggtatttcttttctcgctat

SEQ ID NO: 148898 - DNA, 25 bp, Artificial
  probe
  misc_feature (1)..(25): SEQ ID NO: 2625; WAN024D9H_at; Start 73; Stop 97
caagcttctaaattgccactcggaa

SEQ ID NO: 148899 - DNA, 25 bp, Artificial
  probe
  misc_feature (1)..(25): SEQ ID NO: 2625; WAN024D9H_at; Start 89; Stop 113
cactcggaacgctcatagctaatct

SEQ ID NO: 148900 - DNA, 25 bp, Artificial
  probe
  misc_feature (1)..(25): SEQ ID NO: 2625; WAN024D9H_at; Start 212; Stop 236
tttcgaccttgaatgacgaacttca

SEQ ID NO: 148901 - DNA, 25 bp, Artificial
  probe
  misc_feature (1)..(25): SEQ ID NO: 2625; WAN024D9H_at; Start 203; Stop 227
taacaactttttcgaccttgaatga

SEQ ID NO: 148902 - DNA, 25 bp, Artificial
  probe
  misc_feature (1)..(25): SEQ ID NO: 2625; WAN024D9H_at; Start 166; Stop 190
gtatatgctattctagcaacaggat

SEQ ID NO: 148903 - DNA, 25 bp, Artificial
  probe
  misc_feature (1)..(25): SEQ ID NO: 2625; WAN024D9H_at; Start 215; Stop 239
cgaccttgaatgacgaacttcaaag

SEQ ID NO: 148904 - DNA, 25 bp, Artificial
  probe
  misc_feature (1)..(25): SEQ ID NO: 2625; WAN024D9H_at; Start 95; Stop 119
gaacgctcatagctaatcttttagg

SEQ ID NO: 148905 - DNA, 25 bp, Artificial
  probe
  misc_feature (1)..(25): SEQ ID NO: 2625; WAN024D9H_at; Start 56; Stop 80
tcttttctcgctataatcaagcttc

SEQ ID NO: 148906 - DNA, 25 bp, Artificial
  probe
  misc_feature (1)..(25): SEQ ID NO: 2625; WAN024D9H_at; Start 206; Stop 230
caactttttcgaccttgaatgacga

SEQ ID NO: 148907 - DNA, 25 bp, Artificial
  probe
  misc_feature (1)..(25): SEQ ID NO: 2625; WAN024D9H_at; Start 50; Stop 74
ggtatttcttttctcgctataatca

SEQ ID NO: 148908 - DNA, 25 bp, Artificial
  probe
  misc_feature (1)..(25): SEQ ID NO: 2625; WAN024D9H_at; Start 177; Stop 201
tctagcaacaggattttgtggcggt

SEQ ID NO: 148909 - DNA, 25 bp, Artificial
  probe
  misc_feature (1)..(25): SEQ ID NO: 1232; WAN024D9I_at; Start 46; Stop 70
gatatcccatcattccgtcctggtg

SEQ ID NO: 148910 - DNA, 25 bp, Artificial
  probe
  misc_feature (1)..(25): SEQ ID NO: 1232; WAN024D9I_at; Start 236; Stop 260
cacgtgttgaaaaaatcgaagttgt

SEQ ID NO: 148911 - DNA, 25 bp, Artificial
  probe
  misc_feature (1)..(25): SEQ ID NO: 1232; WAN024D9I_at; Start 11; Stop 35
taatccaaagcttgactgaaggtca

SEQ ID NO: 148912 - DNA, 25 bp, Artificial
  probe
  misc_feature (1)..(25): SEQ ID NO: 1232; WAN024D9I_at; Start 146; Stop 170
cacgtaaaggtgctggaatctcaga

SEQ ID NO: 148913 - DNA, 25 bp, Artificial
  probe
  misc_feature (1)..(25): SEQ ID NO: 1232; WAN024D9I_at; Start 290; Stop 314
tgtactacttgcgtgctcttcaagg

SEQ ID NO: 148914 - DNA, 25 bp, Artificial
  probe
  misc_feature (1)..(25): SEQ ID NO: 1232; WAN024D9I_at; Start 322; Stop 346
gctcgtatcaaagaaatccgtcgtt

SEQ ID NO: 148915 - DNA, 25 bp, Artificial
  probe
  misc_feature (1)..(25): SEQ ID NO: 1232; WAN024D9I_at; Start 283; Stop 307
gcgaaattgtactacttgcgtgctc

SEQ ID NO: 148916 - DNA, 25 bp, Artificial
  probe
  misc_feature (1)..(25): SEQ ID NO: 1232; WAN024D9I_at; Start 138; Stop 162
tgttatcgcacgtaaaggtgctgga

SEQ ID NO: 148917 - DNA, 25 bp, Artificial
  probe
  misc_feature (1)..(25): SEQ ID NO: 1232; WAN024D9I_at; Start 28; Stop 52
gaaggtcaacttcgtacagatatcc

SEQ ID NO: 148918 - DNA, 25 bp, Artificial
  probe
  misc_feature (1)..(25): SEQ ID NO: 1232; WAN024D9I_at; Start 24; Stop 48
gactgaaggtcaacttcgtacagat

SEQ ID NO: 148919 - DNA, 25 bp, Artificial
  probe
  misc_feature (1)..(25): SEQ ID NO: 1232; WAN024D9I_at; Start 267; Stop 291
cggtaaagtacgtcgtgcgaaattg

SEQ ID NO: 148920 - DNA, 25 bp, Artificial
  probe
  misc_feature (1)..(25): SEQ ID NO: 1232; WAN024D9I_at; Start 293; Stop 317
actacttgcgtgctcttcaaggtaa

SEQ ID NO: 148921 - DNA, 25 bp, Artificial
  probe
  misc_feature (1)..(25): SEQ ID NO: 1232; WAN024D9I_at; Start 203; Stop 227
taggtgttgagcgtatcttcccaat

SEQ ID NO: 148922 - DNA, 25 bp, Artificial
  probe
  misc_feature (1)..(25): SEQ ID NO: 1232; WAN024D9I_at; Start 327; Stop 351
tatcaaagaaatccgtcgttaacta

SEQ ID NO: 148923 - DNA, 25 bp, Artificial
  probe
  misc_feature (1)..(25): SEQ ID NO: 1232; WAN024D9I_at; Start 319; Stop 343
gcagctcgtatcaaagaaatccgtc

SEQ ID NO: 148924 - DNA, 25 bp, Artificial
  probe
  misc_feature (1)..(25): SEQ ID NO: 1232; WAN024D9I_at; Start 130; Stop 154
gaaggtgttgttatcgcacgtaaag

SEQ ID NO: 148925 - DNA, 25 bp, Artificial
  probe
  misc_feature (1)..(25): SEQ ID NO: 1232; WAN024D9I_at; Start 177; Stop 201
cacagttcgtaaaatctctaacggt

SEQ ID NO: 148926 - DNA, 25 bp, Artificial
  probe
  misc_feature (1)..(25): SEQ ID NO: 1232; WAN024D9I_at; Start 210; Stop 234
tgagcgtatcttcccaatccacact

SEQ ID NO: 148927 - DNA, 25 bp, Artificial
  probe
  misc_feature (1)..(25): SEQ ID NO: 1232; WAN024D9I_at; Start 100; Stop 124
gaaggtaaccgtgaacgtatccaga

SEQ ID NO: 148928 - DNA, 25 bp, Artificial
  probe
  misc_feature (1)..(25): SEQ ID NO: 1232; WAN024D9I_at; Start 157; Stop 181
gctggaatctcagaaaactacacag

SEQ ID NO: 148929 - DNA, 25 bp, Artificial
  probe
  misc_feature (1)..(25): SEQ ID NO: 1232; WAN024D9I_at; Start 31; Stop 55
ggtcaacttcgtacagatatcccat

SEQ ID NO: 148930 - DNA, 25 bp, Artificial
  probe
  misc_feature (1)..(25): SEQ ID NO: 1232; WAN024D9I_at; Start 2; Stop 26
tgaatccattaatccaaagcttgac

SEQ ID NO: 148931 - DNA, 25 bp, Artificial
  probe
  misc_feature (1)..(25): SEQ ID NO: 1232; WAN024D9I_at; Start 175; Stop 199
tacacagttcgtaaaatctctaacg

SEQ ID NO: 148932 - DNA, 25 bp, Artificial
  probe
  misc_feature (1)..(25): SEQ ID NO: 1232; WAN024D9I_at; Start 270; Stop 294
taaagtacgtcgtgcgaaattgtac

SEQ ID NO: 148933 - DNA, 25 bp, Artificial
  probe
  misc_feature (1)..(25): SEQ ID NO: 1232; WAN024D9I_at; Start 108; Stop 132
ccgtgaacgtatccagatttttgaa

SEQ ID NO: 148934 - DNA, 25 bp, Artificial
  probe
  misc_feature (1)..(25): SEQ ID NO: 1232; WAN024D9I_at; Start 125; Stop 149
tttttgaaggtgttgttatcgcacg

SEQ ID NO: 148935 - DNA, 25 bp, Artificial
  probe
  misc_feature (1)..(25): SEQ ID NO: 1232; WAN024D9I_at; Start 277; Stop 301
cgtcgtgcgaaattgtactacttgc

SEQ ID NO: 148936 - DNA, 25 bp, Artificial
  probe
  misc_feature (1)..(25): SEQ ID NO: 1232; WAN024D9I_at; Start 231; Stop 255
cactccacgtgttgaaaaaatcgaa

SEQ ID NO: 148937 - DNA, 25 bp, Artificial
  probe
  misc_feature (1)..(25): SEQ ID NO: 1232; WAN024D9I_at; Start 115; Stop 139
cgtatccagatttttgaaggtgttg

SEQ ID NO: 148938 - DNA, 25 bp, Artificial
  probe
  misc_feature (1)..(25): SEQ ID NO: 1232; WAN024D9I_at; Start 38; Stop 62
ttcgtacagatatcccatcattccg

SEQ ID NO: 148939 - DNA, 25 bp, Artificial
  probe
  misc_feature (1)..(25): SEQ ID NO: 1232; WAN024D9I_at; Start 161; Stop 185
gaatctcagaaaactacacagttcg

SEQ ID NO: 148940 - DNA, 25 bp, Artificial
  probe
  misc_feature (1)..(25): SEQ ID NO: 1232; WAN024D9I_at; Start 96; Stop 120
tgtcgaaggtaaccgtgaacgtatc

SEQ ID NO: 148941 - DNA, 25 bp, Artificial
  probe
  misc_feature (1)..(25): SEQ ID NO: 1232; WAN024D9I_at; Start 17; Stop 41
aaagcttgactgaaggtcaacttcg

SEQ ID NO: 148942 - DNA, 25 bp, Artificial
  probe
  misc_feature (1)..(25): SEQ ID NO: 1232; WAN024D9I_at; Start 224; Stop 248
caatccacactccacgtgttgaaaa

SEQ ID NO: 148943 - DNA, 25 bp, Artificial
  probe
  misc_feature (1)..(25): SEQ ID NO: 1695; WAN024D9J_at; Start 353; Stop 377
tacaactcttggctcaagaactgga

SEQ ID NO: 148944 - DNA, 25 bp, Artificial
  probe
  misc_feature (1)..(25): SEQ ID NO: 1695; WAN024D9J_at; Start 325; Stop 349
gattcactcaataagcgcatcaact

SEQ ID NO: 148945 - DNA, 25 bp, Artificial
  probe
  misc_feature (1)..(25): SEQ ID NO: 1695; WAN024D9J_at; Start 149; Stop 173
cggcgattacggacaaggaagaagt

SEQ ID NO: 148946 - DNA, 25 bp, Artificial
  probe
  misc_feature (1)..(25): SEQ ID NO: 1695; WAN024D9J_at; Start 198; Stop 222
gattgcacccattcttcaaggtttg

SEQ ID NO: 148947 - DNA, 25 bp, Artificial
  probe
  misc_feature (1)..(25): SEQ ID NO: 1695; WAN024D9J_at; Start 141; Stop 165
taatttgacggcgattacggacaag

SEQ ID NO: 148948 - DNA, 25 bp, Artificial
  probe
  misc_feature (1)..(25): SEQ ID NO: 1695; WAN024D9J_at; Start 448; Stop 472
tatgattttgtaacagctcgtgcgg

SEQ ID NO: 148949 - DNA, 25 bp, Artificial
  probe
  misc_feature (1)..(25): SEQ ID NO: 1695; WAN024D9J_at; Start 480; Stop 504
tatgcaggtcctatctgaattgact

SEQ ID NO: 148950 - DNA, 25 bp, Artificial
  probe
  misc_feature (1)..(25): SEQ ID NO: 1695; WAN024D9J_at; Start 264; Stop 288
ggcaggatttcctagtctaccaatg

SEQ ID NO: 148951 - DNA, 25 bp, Artificial
  probe
  misc_feature (1)..(25): SEQ ID NO: 1695; WAN024D9J_at; Start 184; Stop 208
catttttacgattcgattgcaccca

SEQ ID NO: 148952 - DNA, 25 bp, Artificial
  probe
  misc_feature (1)..(25): SEQ ID NO: 1695; WAN024D9J_at; Start 339; Stop 363
gcgcatcaacttcctacaactcttg

SEQ ID NO: 148953 - DNA, 25 bp, Artificial
  probe
  misc_feature (1)..(25): SEQ ID NO: 1695; WAN024D9J_at; Start 404; Stop 428
gacgtgccgaagattttgcccaaga

SEQ ID NO: 148954 - DNA, 25 bp, Artificial
  probe
  misc_feature (1)..(25): SEQ ID NO: 1695; WAN024D9J_at; Start 38; Stop 62
cattttacaacttgcttgccgagca

SEQ ID NO: 148955 - DNA, 25 bp, Artificial
  probe
  misc_feature (1)..(25): SEQ ID NO: 1695; WAN024D9J_at; Start 659; Stop 683
tcacagtggtagaaaagaaaaaaga

SEQ ID NO: 148956 - DNA, 25 bp, Artificial
  probe
  misc_feature (1)..(25): SEQ ID NO: 1695; WAN024D9J_at; Start 495; Stop 519
tgaattgactattccctaccttaag

SEQ ID NO: 148957 - DNA, 25 bp, Artificial
  probe
  misc_feature (1)..(25): SEQ ID NO: 1695; WAN024D9J_at; Start 689; Stop 713
caaataaatatccacgtaaggctgg

SEQ ID NO: 148958 - DNA, 25 bp, Artificial
  probe
  misc_feature (1)..(25): SEQ ID NO: 1695; WAN024D9J_at; Start 380; Stop 404
tgaacggagttcatttctaccacgg

SEQ ID NO: 148959 - DNA, 25 bp, Artificial
  probe
  misc_feature (1)..(25): SEQ ID NO: 1695; WAN024D9J_at; Start 611; Stop 635
tcgaagacaatctcagctacgccct

SEQ ID NO: 148960 - DNA, 25 bp, Artificial
  probe
  misc_feature (1)..(25): SEQ ID NO: 1695; WAN024D9J_at; Start 429; Stop 453
caagaacttccgtgctcaatatgat

SEQ ID NO: 148961 - DNA, 25 bp, Artificial
  probe
  misc_feature (1)..(25): SEQ ID NO: 1695; WAN024D9J_at; Start 214; Stop 238
caaggtttgattcccaatgaaacta

SEQ ID NO: 148962 - DNA, 25 bp, Artificial
  probe
  misc_feature (1)..(25): SEQ ID NO: 1695; WAN024D9J_at; Start 364; Stop 388
gctcaagaactggatttgaacggag

SEQ ID NO: 148963 - DNA, 25 bp, Artificial
  probe
  misc_feature (1)..(25): SEQ ID NO: 1695; WAN024D9J_at; Start 468; Stop 492
tgcggttgcccgtatgcaggtccta

SEQ ID NO: 148964 - DNA, 25 bp, Artificial
  probe
  misc_feature (1)..(25): SEQ ID NO: 1695; WAN024D9J_at; Start 418; Stop 442
tttgcccaagacaagaacttccgtg

SEQ ID NO: 148965 - DNA, 25 bp, Artificial
  probe
  misc_feature (1)..(25): SEQ ID NO: 1695; WAN024D9J_at; Start 705; Stop 729
taaggctggtatgccaaataaacgc

SEQ ID NO: 148966 - DNA, 25 bp, Artificial
  probe
  misc_feature (1)..(25): SEQ ID NO: 1695; WAN024D9J_at; Start 54; Stop 78
tgccgagcagaatcttccactttcg

SEQ ID NO: 148967 - DNA, 25 bp, Artificial
  probe
  misc_feature (1)..(25): SEQ ID NO: 1695; WAN024D9J_at; Start 129; Stop 153
gaatgagaagattaatttgacggcg

SEQ ID NO: 148968 - DNA, 25 bp, Artificial
  probe
  misc_feature (1)..(25): SEQ ID NO: 1695; WAN024D9J_at; Start 571; Stop 595
ttagaagctaagaatgccctcaatc

SEQ ID NO: 148969 - DNA, 25 bp, Artificial
  probe
  misc_feature (1)..(25): SEQ ID NO: 1695; WAN024D9J_at; Start 100; Stop 124
gaacgttattttgagctcttggtcg

SEQ ID NO: 148970 - DNA, 25 bp, Artificial
  probe
  misc_feature (1)..(25): SEQ ID NO: 1695; WAN024D9J_at; Start 390; Stop 414
tcatttctaccacggacgtgccgaa

SEQ ID NO: 148971 - DNA, 25 bp, Artificial
  probe
  misc_feature (1)..(25): SEQ ID NO: 1695; WAN024D9J_at; Start 582; Stop 606
gaatgccctcaatctcctttttagt

SEQ ID NO: 148972 - DNA, 25 bp, Artificial
  probe
  misc_feature (1)..(25): SEQ ID NO: 1695; WAN024D9J_at; Start 282; Stop 306
accaatgaaaattctctatccggag

SEQ ID NO: 148973 - DNA, 25 bp, Artificial
  probe
  misc_feature (1)..(25): SEQ ID NO: 1695; WAN024D9J_at; Start 113; Stop 137
agctcttggtcgagtggaatgagaa

SEQ ID NO: 148974 - DNA, 25 bp, Artificial
  probe
  misc_feature (1)..(25): SEQ ID NO: 1695; WAN024D9J_at; Start 296; Stop 320
tctatccggagttagatgtgaccat

SEQ ID NO: 148975 - DNA, 25 bp, Artificial
  probe
  misc_feature (1)..(25): SEQ ID NO: 1695; WAN024D9J_at; Start 455; Stop 479
ttgtaacagctcgtgcggttgcccg

SEQ ID NO: 148976 - DNA, 25 bp, Artificial
  probe
  misc_feature (1)..(25): SEQ ID NO: 1695; WAN024D9J_at; Start 81; Stop 105
ccagcaaaaagaacaatttgaacgt

SEQ ID NO: 148977 - DNA, 25 bp, Artificial
  probe
  misc_feature (1)..(25): SEQ ID NO: 579; WAN024D9K_at; Start 492; Stop 516
ggcagatttccttcaaacacctgaa

SEQ ID NO: 148978 - DNA, 25 bp, Artificial
  probe
  misc_feature (1)..(25): SEQ ID NO: 579; WAN024D9K_at; Start 340; Stop 364
gctaactttgttaaattgcaagagg

SEQ ID NO: 148979 - DNA, 25 bp, Artificial
  probe
  misc_feature (1)..(25): SEQ ID NO: 579; WAN024D9K_at; Start 311; Stop 335
cagaaagctatccagatttgaaagc

SEQ ID NO: 148980 - DNA, 25 bp, Artificial
  probe
  misc_feature (1)..(25): SEQ ID NO: 579; WAN024D9K_at; Start 156; Stop 180
gattgagactgtaaaaggttatgcc

SEQ ID NO: 148981 - DNA, 25 bp, Artificial
  probe
  misc_feature (1)..(25): SEQ ID NO: 579; WAN024D9K_at; Start 109; Stop 133
cagattgatgttcagttgaaacgtc

SEQ ID NO: 148982 - DNA, 25 bp, Artificial
  probe
  misc_feature (1)..(25): SEQ ID NO: 579; WAN024D9K_at; Start 482; Stop 506
gatttaaagcggcagatttccttca

SEQ ID NO: 148983 - DNA, 25 bp, Artificial
  probe
  misc_feature (1)..(25): SEQ ID NO: 579; WAN024D9K_at; Start 421; Stop 445
gtcagcaactacaatgtaaaattag

SEQ ID NO: 148984 - DNA, 25 bp, Artificial
  probe
  misc_feature (1)..(25): SEQ ID NO: 579; WAN024D9K_at; Start 540; Stop 564
tgattttagcggtttaggtgactaa

SEQ ID NO: 148985 - DNA, 25 bp, Artificial
  probe
  misc_feature (1)..(25): SEQ ID NO: 579; WAN024D9K_at; Start 191; Stop 215
gttctacccttgaaaaggtggcaga

SEQ ID NO: 148986 - DNA, 25 bp, Artificial
  probe
  misc_feature (1)..(25): SEQ ID NO: 579; WAN024D9K_at; Start 289; Stop 313
gtttcaggtatttttgcagttgcag

SEQ ID NO: 148987 - DNA, 25 bp, Artificial
  probe
  misc_feature (1)..(25): SEQ ID NO: 579; WAN024D9K_at; Start 384; Stop 408
taaaatttcttactctcgtcaactc

SEQ ID NO: 148988 - DNA, 25 bp, Artificial
  probe
  misc_feature (1)..(25): SEQ ID NO: 579; WAN024D9K_at; Start 355; Stop 379
ttgcaagaggagttgacaaacacag

SEQ ID NO: 148989 - DNA, 25 bp, Artificial
  probe
  misc_feature (1)..(25): SEQ ID NO: 579; WAN024D9K_at; Start 50; Stop 74
tgattgttagctataacggtttggt

SEQ ID NO: 148990 - DNA, 25 bp, Artificial
  probe
  misc_feature (1)..(25): SEQ ID NO: 579; WAN024D9K_at; Start 261; Stop 285
gaaagccagtgatgccctcactcgt

SEQ ID NO: 148991 - DNA, 25 bp, Artificial
  probe
  misc_feature (1)..(25): SEQ ID NO: 579; WAN024D9K_at; Start 505; Stop 529
caaacacctgaagaggaaaagtcgg

SEQ ID NO: 148992 - DNA, 25 bp, Artificial
  probe
  misc_feature (1)..(25): SEQ ID NO: 579; WAN024D9K_at; Start 394; Stop 418
tactctcgtcaactctataacagtg

SEQ ID NO: 148993 - DNA, 25 bp, Artificial
  probe
  misc_feature (1)..(25): SEQ ID NO: 579; WAN024D9K_at; Start 198; Stop 222
ccttgaaaaggtggcagaactacgt

SEQ ID NO: 148994 - DNA, 25 bp, Artificial
  probe
  misc_feature (1)..(25): SEQ ID NO: 579; WAN024D9K_at; Start 244; Stop 268
tcaccagcagaagctatgaaagcca

SEQ ID NO: 148995 - DNA, 25 bp, Artificial
  probe
  misc_feature (1)..(25): SEQ ID NO: 579; WAN024D9K_at; Start 473; Stop 497
gaatgtttggatttaaagcggcaga

SEQ ID NO: 148996 - DNA, 25 bp, Artificial
  probe
  misc_feature (1)..(25): SEQ ID NO: 579; WAN024D9K_at; Start 81; Stop 105
tcgtatgcaaaccaaggaggcttgg

SEQ ID NO: 148997 - DNA, 25 bp, Artificial
  probe
  misc_feature (1)..(25): SEQ ID NO: 579; WAN024D9K_at; Start 2; Stop 26
tcatgacttggattattcttggagt

SEQ ID NO: 148998 - DNA, 25 bp, Artificial
  probe
  misc_feature (1)..(25): SEQ ID NO: 579; WAN024D9K_at; Start 409; Stop 433
tataacagtgttgtcagcaactaca

SEQ ID NO: 148999 - DNA, 25 bp, Artificial
  probe
  misc_feature (1)..(25): SEQ ID NO: 579; WAN024D9K_at; Start 219; Stop 243
acgtaaccaagtggcggcagcgact

SEQ ID NO: 149000 - DNA, 25 bp, Artificial
  probe
  misc_feature (1)..(25): SEQ ID NO: 579; WAN024D9K_at; Start 75; Stop 99
taaaaatcgtatgcaaaccaaggag

SEQ ID NO: 149001 - DNA, 25 bp, Artificial
  probe
  misc_feature (1)..(25): SEQ ID NO: 579; WAN024D9K_at; Start 322; Stop 346
ccagatttgaaagctagtgctaact

SEQ ID NO: 149002 - DNA, 25 bp, Artificial
  probe
  misc_feature (1)..(25): SEQ ID NO: 579; WAN024D9K_at; Start 212; Stop 236
cagaactacgtaaccaagtggcggc

SEQ ID NO: 149003 - DNA, 25 bp, Artificial
  probe
  misc_feature (1)..(25): SEQ ID NO: 579; WAN024D9K_at; Start 459; Stop 483
caatattatcgctggaatgtttgga

SEQ ID NO: 149004 - DNA, 25 bp, Artificial
  probe
  misc_feature (1)..(25): SEQ ID NO: 579; WAN024D9K_at; Start 175; Stop 199
tatgccaaatatgaaggttctaccc

SEQ ID NO: 149005 - DNA, 25 bp, Artificial
  probe
  misc_feature (1)..(25): SEQ ID NO: 579; WAN024D9K_at; Start 445; Stop 469
gaaactttcccgagcaatattatcg

SEQ ID NO: 149006 - DNA, 25 bp, Artificial
  probe
  misc_feature (1)..(25): SEQ ID NO: 579; WAN024D9K_at; Start 93; Stop 117
caaggaggcttggagtcagattgat

SEQ ID NO: 149007 - DNA, 25 bp, Artificial
  probe
  misc_feature (1)..(25): SEQ ID NO: 579; WAN024D9K_at; Start 234; Stop 258
ggcagcgacttcaccagcagaagct

SEQ ID NO: 149008 - DNA, 25 bp, Artificial
  probe
  misc_feature (1)..(25): SEQ ID NO: 579; WAN024D9K_at; Start 256; Stop 280
gctatgaaagccagtgatgccctca

SEQ ID NO: 149009 - DNA, 25 bp, Artificial
  probe
  misc_feature (1)..(25): SEQ ID NO: 579; WAN024D9K_at; Start 363; Stop 387
ggagttgacaaacacagaaaataaa

SEQ ID NO: 149010 - DNA, 25 bp, Artificial
  probe
  misc_feature (1)..(25): SEQ ID NO: 579; WAN024D9K_at; Start 301; Stop 325
tttgcagttgcagaaagctatccag

SEQ ID NO: 149011 - DNA, 25 bp, Artificial
  probe
  misc_feature (1)..(25): SEQ ID NO: 4327; WAN024D9L_at; Start 7; Stop 31
gaccagtcgcaagtgaacaatagtg

SEQ ID NO: 149012 - DNA, 25 bp, Artificial
  probe
  misc_feature (1)..(25): SEQ ID NO: 4327; WAN024D9L_at; Start 19; Stop 43
gtgaacaatagtgtctgccgttttc

SEQ ID NO: 149013 - DNA, 25 bp, Artificial
  probe
  misc_feature (1)..(25): SEQ ID NO: 4327; WAN024D9L_at; Start 32; Stop 56
tctgccgttttcagaaagaaagtct

SEQ ID NO: 149014 - DNA, 25 bp, Artificial
  probe
  misc_feature (1)..(25): SEQ ID NO: 4327; WAN024D9L_at; Start 27; Stop 51
tagtgtctgccgttttcagaaagaa

SEQ ID NO: 149015 - DNA, 25 bp, Artificial
  probe
  misc_feature (1)..(25): SEQ ID NO: 4327; WAN024D9L_at; Start 11; Stop 35
agtcgcaagtgaacaatagtgtctg

SEQ ID NO: 149016 - DNA, 25 bp, Artificial
  probe
  misc_feature (1)..(25): SEQ ID NO: 4327; WAN024D9L_at; Start 12; Stop 36
gtcgcaagtgaacaatagtgtctgc

SEQ ID NO: 149017 - DNA, 25 bp, Artificial
  probe
  misc_feature (1)..(25): SEQ ID NO: 4327; WAN024D9L_at; Start 2; Stop 26
tgtttgaccagtcgcaagtgaacaa

SEQ ID NO: 149018 - DNA, 25 bp, Artificial
  probe
  misc_feature (1)..(25): SEQ ID NO: 4327; WAN024D9L_at; Start 13; Stop 37
tcgcaagtgaacaatagtgtctgcc

SEQ ID NO: 149019 - DNA, 25 bp, Artificial
  probe
  misc_feature (1)..(25): SEQ ID NO: 4327; WAN024D9L_at; Start 9; Stop 33
ccagtcgcaagtgaacaatagtgtc

SEQ ID NO: 149020 - DNA, 25 bp, Artificial
  probe
  misc_feature (1)..(25): SEQ ID NO: 4327; WAN024D9L_at; Start 17; Stop 41
aagtgaacaatagtgtctgccgttt

SEQ ID NO: 149021 - DNA, 25 bp, Artificial
  probe
  misc_feature (1)..(25): SEQ ID NO: 4327; WAN024D9L_at; Start 6; Stop 30
tgaccagtcgcaagtgaacaatagt

SEQ ID NO: 149022 - DNA, 25 bp, Artificial
  probe
  misc_feature (1)..(25): SEQ ID NO: 4327; WAN024D9L_at; Start 45; Stop 69
gaaagaaagtcttcatcatgggaaa

SEQ ID NO: 149023 - DNA, 25 bp, Artificial
  probe
  misc_feature (1)..(25): SEQ ID NO: 4327; WAN024D9L_at; Start 69; Stop 93
atgaaaataacggtttgcctggtct

SEQ ID NO: 149024 - DNA, 25 bp, Artificial
  probe
  misc_feature (1)..(25): SEQ ID NO: 4327; WAN024D9L_at; Start 22; Stop 46
aacaatagtgtctgccgttttcaga

SEQ ID NO: 149025 - DNA, 25 bp, Artificial
  probe
  misc_feature (1)..(25): SEQ ID NO: 4327; WAN024D9L_at; Start 43; Stop 67
cagaaagaaagtcttcatcatggga

SEQ ID NO: 149026 - DNA, 25 bp, Artificial
  probe
  misc_feature (1)..(25): SEQ ID NO: 4327; WAN024D9L_at; Start 16; Stop 40
caagtgaacaatagtgtctgccgtt

SEQ ID NO: 149027 - DNA, 25 bp, Artificial
  probe
  misc_feature (1)..(25): SEQ ID NO: 4327; WAN024D9L_at; Start 49; Stop 73
gaaagtcttcatcatgggaaatgaa

SEQ ID NO: 149028 - DNA, 25 bp, Artificial
  probe
  misc_feature (1)..(25): SEQ ID NO: 4327; WAN024D9L_at; Start 38; Stop 62
gttttcagaaagaaagtcttcatca

SEQ ID NO: 149029 - DNA, 25 bp, Artificial
  probe
  misc_feature (1)..(25): SEQ ID NO: 4327; WAN024D9L_at; Start 21; Stop 45
gaacaatagtgtctgccgttttcag

SEQ ID NO: 149030 - DNA, 25 bp, Artificial
  probe
  misc_feature (1)..(25): SEQ ID NO: 4327; WAN024D9L_at; Start 23; Stop 47
acaatagtgtctgccgttttcagaa

SEQ ID NO: 149031 - DNA, 25 bp, Artificial
  probe
  misc_feature (1)..(25): SEQ ID NO: 4327; WAN024D9L_at; Start 15; Stop 39
gcaagtgaacaatagtgtctgccgt

SEQ ID NO: 149032 - DNA, 25 bp, Artificial
  probe
  misc_feature (1)..(25): SEQ ID NO: 4327; WAN024D9L_at; Start 35; Stop 59
gccgttttcagaaagaaagtcttca

SEQ ID NO: 149033 - DNA, 25 bp, Artificial
  probe
  misc_feature (1)..(25): SEQ ID NO: 4327; WAN024D9L_at; Start 14; Stop 38
cgcaagtgaacaatagtgtctgccg

SEQ ID NO: 149034 - DNA, 25 bp, Artificial
  probe
  misc_feature (1)..(25): SEQ ID NO: 4327; WAN024D9L_at; Start 30; Stop 54
tgtctgccgttttcagaaagaaagt

SEQ ID NO: 149035 - DNA, 25 bp, Artificial
  probe
  misc_feature (1)..(25): SEQ ID NO: 4327; WAN024D9L_at; Start 4; Stop 28
tttgaccagtcgcaagtgaacaata

SEQ ID NO: 149036 - DNA, 25 bp, Artificial
  probe
  misc_feature (1)..(25): SEQ ID NO: 4327; WAN024D9L_at; Start 8; Stop 32
accagtcgcaagtgaacaatagtgt

SEQ ID NO: 149037 - DNA, 25 bp, Artificial
  probe
  misc_feature (1)..(25): SEQ ID NO: 4327; WAN024D9L_at; Start 36; Stop 60
ccgttttcagaaagaaagtcttcat

SEQ ID NO: 149038 - DNA, 25 bp, Artificial
  probe
  misc_feature (1)..(25): SEQ ID NO: 4327; WAN024D9L_at; Start 1; Stop 25
gtgtttgaccagtcgcaagtgaaca

SEQ ID NO: 149039 - DNA, 25 bp, Artificial
  probe
  misc_feature (1)..(25): SEQ ID NO: 4327; WAN024D9L_at; Start 34; Stop 58
tgccgttttcagaaagaaagtcttc

SEQ ID NO: 149040 - DNA, 25 bp, Artificial
  probe
  misc_feature (1)..(25): SEQ ID NO: 4327; WAN024D9L_at; Start 47; Stop 71
aagaaagtcttcatcatgggaaatg

SEQ ID NO: 149041 - DNA, 25 bp, Artificial
  probe
  misc_feature (1)..(25): SEQ ID NO: 4327; WAN024D9L_at; Start 5; Stop 29
ttgaccagtcgcaagtgaacaatag

SEQ ID NO: 149042 - DNA, 25 bp, Artificial
  probe
  misc_feature (1)..(25): SEQ ID NO: 4327; WAN024D9L_at; Start 29; Stop 53
gtgtctgccgttttcagaaagaaag

SEQ ID NO: 149043 - DNA, 25 bp, Artificial
  probe
  misc_feature (1)..(25): SEQ ID NO: 4327; WAN024D9L_at; Start 42; Stop 66
tcagaaagaaagtcttcatcatggg

SEQ ID NO: 149044 - DNA, 25 bp, Artificial
  probe
  misc_feature (1)..(25): SEQ ID NO: 4327; WAN024D9L_at; Start 10; Stop 34
cagtcgcaagtgaacaatagtgtct

SEQ ID NO: 149045 - DNA, 25 bp, Artificial
  probe
  misc_feature (1)..(25): SEQ ID NO: 1940; WAN024D9M_at; Start 478; Stop 502
gatgaaccttcaaatgacctagacc

SEQ ID NO: 149046 - DNA, 25 bp, Artificial
  probe
  misc_feature (1)..(25): SEQ ID NO: 1940; WAN024D9M_at; Start 493; Stop 517
gacctagaccttgagacagttgatt

SEQ ID NO: 149047 - DNA, 25 bp, Artificial
  probe
  misc_feature (1)..(25): SEQ ID NO: 1940; WAN024D9M_at; Start 598; Stop 622
gacactattgttcacttgcgactgg

SEQ ID NO: 149048 - DNA, 25 bp, Artificial
  probe
  misc_feature (1)..(25): SEQ ID NO: 1940; WAN024D9M_at; Start 613; Stop 637
ttgcgactggtcaaacaccgtaaag

SEQ ID NO: 149049 - DNA, 25 bp, Artificial
  probe
  misc_feature (1)..(25): SEQ ID NO: 1940; WAN024D9M_at; Start 643; Stop 667
gaaacgctagtagagcatttagact

SEQ ID NO: 149050 - DNA, 25 bp, Artificial
  probe
  misc_feature (1)..(25): SEQ ID NO: 1940; WAN024D9M_at; Start 1150; Stop 1174
ggttttatgccacaagattaccaca

SEQ ID NO: 149051 - DNA, 25 bp, Artificial
  probe
  misc_feature (1)..(25): SEQ ID NO: 1940; WAN024D9M_at; Start 1274; Stop 1298
tcagttatccagaaatgcagcatca

SEQ ID NO: 149052 - DNA, 25 bp, Artificial
  probe
  misc_feature (1)..(25): SEQ ID NO: 1940; WAN024D9M_at; Start 964; Stop 988
tctaaagtcttagtccaactggaaa

SEQ ID NO: 149053 - DNA, 25 bp, Artificial
  probe
  misc_feature (1)..(25): SEQ ID NO: 1940; WAN024D9M_at; Start 1312; Stop 1336
tctggcggacaacagggaaaactcc

SEQ ID NO: 149054 - DNA, 25 bp, Artificial
  probe
  misc_feature (1)..(25): SEQ ID NO: 1940; WAN024D9M_at; Start 853; Stop 877
gtcctctcacaagaaaaacgctacg

SEQ ID NO: 149055 - DNA, 25 bp, Artificial
  probe
  misc_feature (1)..(25): SEQ ID NO: 1940; WAN024D9M_at; Start 702; Stop 726
tgccaaacaaagtcagcaagctgct

SEQ ID NO: 149056 - DNA, 25 bp, Artificial
  probe
  misc_feature (1)..(25): SEQ ID NO: 1940; WAN024D9M_at; Start 1364; Stop 1388
caaactttctcctgctggatgaacc

SEQ ID NO: 149057 - DNA, 25 bp, Artificial
  probe
  misc_feature (1)..(25): SEQ ID NO: 1940; WAN024D9M_at; Start 1506; Stop 1530
catctatcgcatgacagaacacggt

SEQ ID NO: 149058 - DNA, 25 bp, Artificial
  probe
  misc_feature (1)..(25): SEQ ID NO: 1940; WAN024D9M_at; Start 574; Stop 598
gaagactttctttctgaaacggcag

SEQ ID NO: 149059 - DNA, 25 bp, Artificial
  probe
  misc_feature (1)..(25): SEQ ID NO: 1940; WAN024D9M_at; Start 1349; Stop 1373
tagtcctgcgcaaaccaaactttct

SEQ ID NO: 149060 - DNA, 25 bp, Artificial
  probe
  misc_feature (1)..(25): SEQ ID NO: 1940; WAN024D9M_at; Start 819; Stop 843
tgccggtcgcctattggctaaaaag

SEQ ID NO: 149061 - DNA, 25 bp, Artificial
  probe
  misc_feature (1)..(25): SEQ ID NO: 1940; WAN024D9M_at; Start 442; Stop 466
catgagttagccaaaccctttgaga

SEQ ID NO: 149062 - DNA, 25 bp, Artificial
  probe
  misc_feature (1)..(25): SEQ ID NO: 1940; WAN024D9M_at; Start 938; Stop 962
tttcagacatccaaccattaccagc

SEQ ID NO: 149063 - DNA, 25 bp, Artificial
  probe
  misc_feature (1)..(25): SEQ ID NO: 1940; WAN024D9M_at; Start 628; Stop 652
caccgtaaagaagcggaaacgctag

SEQ ID NO: 149064 - DNA, 25 bp, Artificial
  probe
  misc_feature (1)..(25): SEQ ID NO: 1940; WAN024D9M_at; Start 367; Stop 391
gatagcaatcgtttcgcaagtgacc

SEQ ID NO: 149065 - DNA, 25 bp, Artificial
  probe
  misc_feature (1)..(25): SEQ ID NO: 1940; WAN024D9M_at; Start 998; Stop 1022
tgtccattgacgaccgagttttggt

SEQ ID NO: 149066 - DNA, 25 bp, Artificial
  probe
  misc_feature (1)..(25): SEQ ID NO: 1940; WAN024D9M_at; Start 834; Stop 858
ggctaaaaagatgaaaactgtcctc

SEQ ID NO: 149067 - DNA, 25 bp, Artificial
  probe
  misc_feature (1)..(25): SEQ ID NO: 1940; WAN024D9M_at; Start 328; Stop 352
tacagtatcctctatcgtttggcgg

SEQ ID NO: 149068 - DNA, 25 bp, Artificial
  probe
  misc_feature (1)..(25): SEQ ID NO: 1940; WAN024D9M_at; Start 1297; Stop 1321
caaattcgctccttatctggcggac

SEQ ID NO: 149069 - DNA, 25 bp, Artificial
  probe
  misc_feature (1)..(25): SEQ ID NO: 1940; WAN024D9M_at; Start 1450; Stop 1474
ggcggtctcatcactgtttcgcatg

SEQ ID NO: 149070 - DNA, 25 bp, Artificial
  probe
  misc_feature (1)..(25): SEQ ID NO: 1940; WAN024D9M_at; Start 1379; Stop 1403
tggatgaacccacacgaaacttttc

SEQ ID NO: 149071 - DNA, 25 bp, Artificial
  probe
  misc_feature (1)..(25): SEQ ID NO: 1940; WAN024D9M_at; Start 806; Stop 830
ccaaagatagtactgccggtcgcct

SEQ ID NO: 149072 - DNA, 25 bp, Artificial
  probe
  misc_feature (1)..(25): SEQ ID NO: 1940; WAN024D9M_at; Start 235; Stop 259
cagtcactggcctacattcctcaaa

SEQ ID NO: 149073 - DNA, 25 bp, Artificial
  probe
  misc_feature (1)..(25): SEQ ID NO: 1940; WAN024D9M_at; Start 1165; Stop 1189
gattaccacaaaaaactgcaattgg

SEQ ID NO: 149074 - DNA, 25 bp, Artificial
  probe
  misc_feature (1)..(25): SEQ ID NO: 1940; WAN024D9M_at; Start 732; Stop 756
ccaaagagcctacgataaaaccatg

SEQ ID NO: 149075 - DNA, 25 bp, Artificial
  probe
  misc_feature (1)..(25): SEQ ID NO: 1940; WAN024D9M_at; Start 1058; Stop 1082
aaatcggtattatcgggccaaatgg

SEQ ID NO: 149076 - DNA, 25 bp, Artificial
  probe
  misc_feature (1)..(25): SEQ ID NO: 1940; WAN024D9M_at; Start 1470; Stop 1494
gcatgaccgtcgtttcttaaaagaa

SEQ ID NO: 149077 - DNA, 25 bp, Artificial
  probe
  misc_feature (1)..(25): SEQ ID NO: 1940; WAN024D9M_at; Start 787; Stop 811
gaaactgcgcttcgagctaccaaag

SEQ ID NO: 149078 - DNA, 25 bp, Artificial
  probe
  misc_feature (1)..(25): SEQ ID NO: 1940; WAN024D9M_at; Start 672; Stop 696
tagctatagtgagcagagaaaggct

SEQ ID NO: 149079 - DNA, 25 bp, Artificial
  probe
  misc_feature (1)..(25): SEQ ID NO: 4088; WAN024D9N_at; Start 46; Stop 70
cacatggaagacaagaaactcattc

SEQ ID NO: 149080 - DNA, 25 bp, Artificial
  probe
  misc_feature (1)..(25): SEQ ID NO: 4088; WAN024D9N_at; Start 206; Stop 230
ttgatcttgagaaattttaccaacc

SEQ ID NO: 149081 - DNA, 25 bp, Artificial
  probe
  misc_feature (1)..(25): SEQ ID NO: 4088; WAN024D9N_at; Start 60; Stop 84
gaaactcattcaactcctatccaag

SEQ ID NO: 149082 - DNA, 25 bp, Artificial
  probe
  misc_feature (1)..(25): SEQ ID NO: 4088; WAN024D9N_at; Start 328; Stop 352
cacgtactaagtctctatggacctg

SEQ ID NO: 149083 - DNA, 25 bp, Artificial
  probe
  misc_feature (1)..(25): SEQ ID NO: 4088; WAN024D9N_at; Start 16; Stop 40
gaaagagtacatcagatcaaggagg

SEQ ID NO: 149084 - DNA, 25 bp, Artificial
  probe
  misc_feature (1)..(25): SEQ ID NO: 4088; WAN024D9N_at; Start 324; Stop 348
caaacacgtactaagtctctatgga

SEQ ID NO: 149085 - DNA, 25 bp, Artificial
  probe
  misc_feature (1)..(25): SEQ ID NO: 4088; WAN024D9N_at; Start 240; Stop 264
tctgattggactgggtagcctaaaa

SEQ ID NO: 149086 - DNA, 25 bp, Artificial
  probe
  misc_feature (1)..(25): SEQ ID NO: 4088; WAN024D9N_at; Start 282; Stop 306
cactgcttggcgaaactatgataaa

SEQ ID NO: 149087 - DNA, 25 bp, Artificial
  probe
  misc_feature (1)..(25): SEQ ID NO: 4088; WAN024D9N_at; Start 278; Stop 302
cacgcactgcttggcgaaactatga

SEQ ID NO: 149088 - DNA, 25 bp, Artificial
  probe
  misc_feature (1)..(25): SEQ ID NO: 4088; WAN024D9N_at; Start 9; Stop 33
ctatagggaaagagtacatcagatc

SEQ ID NO: 149089 - DNA, 25 bp, Artificial
  probe
  misc_feature (1)..(25): SEQ ID NO: 4088; WAN024D9N_at; Start 117; Stop 141
tacggcagatgatattcgactacaa

SEQ ID NO: 149090 - DNA, 25 bp, Artificial
  probe
  misc_feature (1)..(25): SEQ ID NO: 4088; WAN024D9N_at; Start 37; Stop 61
gaggatgctcacatggaagacaaga

SEQ ID NO: 149091 - DNA, 25 bp, Artificial
  probe
  misc_feature (1)..(25): SEQ ID NO: 4088; WAN024D9N_at; Start 28; Stop 52
cagatcaaggaggatgctcacatgg

SEQ ID NO: 149092 - DNA, 25 bp, Artificial
  probe
  misc_feature (1)..(25): SEQ ID NO: 4088; WAN024D9N_at; Start 105; Stop 129
ctgtaaacagggtacggcagatgat

SEQ ID NO: 149093 - DNA, 25 bp, Artificial
  probe
  misc_feature (1)..(25): SEQ ID NO: 4088; WAN024D9N_at; Start 124; Stop 148
gatgatattcgactacaagagctgc

SEQ ID NO: 149094 - DNA, 25 bp, Artificial
  probe
  misc_feature (1)..(25): SEQ ID NO: 4088; WAN024D9N_at; Start 319; Stop 343
catgtcaaacacgtactaagtctct

SEQ ID NO: 149095 - DNA, 25 bp, Artificial
  probe
  misc_feature (1)..(25): SEQ ID NO: 4088; WAN024D9N_at; Start 42; Stop 66
tgctcacatggaagacaagaaactc

SEQ ID NO: 149096 - DNA, 25 bp, Artificial
  probe
  misc_feature (1)..(25): SEQ ID NO: 4088; WAN024D9N_at; Start 100; Stop 124
caaaactgtaaacagggtacggcag

SEQ ID NO: 149097 - DNA, 25 bp, Artificial
  probe
  misc_feature (1)..(25): SEQ ID NO: 4088; WAN024D9N_at; Start 127; Stop 151
gatattcgactacaagagctgctaa

SEQ ID NO: 149098 - DNA, 25 bp, Artificial
  probe
  misc_feature (1)..(25): SEQ ID NO: 4088; WAN024D9N_at; Start 25; Stop 49
catcagatcaaggaggatgctcaca

SEQ ID NO: 149099 - DNA, 25 bp, Artificial
  probe
  misc_feature (1)..(25): SEQ ID NO: 4088; WAN024D9N_at; Start 51; Stop 75
ggaagacaagaaactcattcaactc

SEQ ID NO: 149100 - DNA, 25 bp, Artificial
  probe
  misc_feature (1)..(25): SEQ ID NO: 4088; WAN024D9N_at; Start 112; Stop 136
cagggtacggcagatgatattcgac

SEQ ID NO: 149101 - DNA, 25 bp, Artificial
  probe
  misc_feature (1)..(25): SEQ ID NO: 4088; WAN024D9N_at; Start 243; Stop 267
gattggactgggtagcctaaaacta

SEQ ID NO: 149102 - DNA, 25 bp, Artificial
  probe
  misc_feature (1)..(25): SEQ ID NO: 4088; WAN024D9N_at; Start 142; Stop 166
gagctgctaaacactactatgcaag

SEQ ID NO: 149103 - DNA, 25 bp, Artificial
  probe
  misc_feature (1)..(25): SEQ ID NO: 4088; WAN024D9N_at; Start 153; Stop 177
cactactatgcaagagctcaaaaaa

SEQ ID NO: 149104 - DNA, 25 bp, Artificial
  probe
  misc_feature (1)..(25): SEQ ID NO: 4088; WAN024D9N_at; Start 273; Stop 297
tcaagcacgcactgcttggcgaaac

SEQ ID NO: 149105 - DNA, 25 bp, Artificial
  probe
  misc_feature (1)..(25): SEQ ID NO: 4088; WAN024D9N_at; Start 186; Stop 210
gttgaacaacagtatcttaattgat

SEQ ID NO: 149106 - DNA, 25 bp, Artificial
  probe
  misc_feature (1)..(25): SEQ ID NO: 4088; WAN024D9N_at; Start 1; Stop 25
gtgctatactatagggaaagagtac

SEQ ID NO: 149107 - DNA, 25 bp, Artificial
  probe
  misc_feature (1)..(25): SEQ ID NO: 4088; WAN024D9N_at; Start 134; Stop 158
gactacaagagctgctaaacactac

SEQ ID NO: 149108 - DNA, 25 bp, Artificial
  probe
  misc_feature (1)..(25): SEQ ID NO: 4088; WAN024D9N_at; Start 77; Stop 101
tatccaagttaaataaaagctacca

SEQ ID NO: 149109 - DNA, 25 bp, Artificial
  probe
  misc_feature (1)..(25): SEQ ID NO: 4088; WAN024D9N_at; Start 33; Stop 57
caaggaggatgctcacatggaagac

SEQ ID NO: 149110 - DNA, 25 bp, Artificial
  probe
  misc_feature (1)..(25): SEQ ID NO: 4088; WAN024D9N_at; Start 334; Stop 358
ctaagtctctatggacctgtttttg

SEQ ID NO: 149111 - DNA, 25 bp, Artificial
  probe
  misc_feature (1)..(25): SEQ ID NO: 4088; WAN024D9N_at; Start 149; Stop 173
taaacactactatgcaagagctcaa

SEQ ID NO: 149112 - DNA, 25 bp, Artificial
  probe
  misc_feature (1)..(25): SEQ ID NO: 4088; WAN024D9N_at; Start 192; Stop 216
caacagtatcttaattgatcttgag

SEQ ID NO: 149113 - DNA, 25 bp, Artificial
  probe
  misc_feature (1)..(25): SEQ ID NO: 3197; WAN024D9O_at; Start 160; Stop 184
cagatgcagcggtaaataaggccac

SEQ ID NO: 149114 - DNA, 25 bp, Artificial
  probe
  misc_feature (1)..(25): SEQ ID NO: 3197; WAN024D9O_at; Start 171; Stop 195
gtaaataaggccacaccaggtctct

SEQ ID NO: 149115 - DNA, 25 bp, Artificial
  probe
  misc_feature (1)..(25): SEQ ID NO: 3197; WAN024D9O_at; Start 293; Stop 317
attccttaaaaaatgtgcccaacag

SEQ ID NO: 149116 - DNA, 25 bp, Artificial
  probe
  misc_feature (1)..(25): SEQ ID NO: 3197; WAN024D9O_at; Start 322; Stop 346
tagacgattttgatggtcaagtccc

SEQ ID NO: 149117 - DNA, 25 bp, Artificial
  probe
  misc_feature (1)..(25): SEQ ID NO: 3197; WAN024D9O_at; Start 514; Stop 538
aaaagcgggtcatggatatcttgcc

SEQ ID NO: 149118 - DNA, 25 bp, Artificial
  probe
  misc_feature (1)..(25): SEQ ID NO: 3197; WAN024D9O_at; Start 394; Stop 418
cagccaatgttgtcatgagtgtagg

SEQ ID NO: 149119 - DNA, 25 bp, Artificial
  probe
  misc_feature (1)..(25): SEQ ID NO: 3197; WAN024D9O_at; Start 186; Stop 210
ccaggtctctttgttgcctttccaa

SEQ ID NO: 149120 - DNA, 25 bp, Artificial
  probe
  misc_feature (1)..(25): SEQ ID NO: 3197; WAN024D9O_at; Start 604; Stop 628
aaaatccagagtgtgaccagtaccc

SEQ ID NO: 149121 - DNA, 25 bp, Artificial
  probe
  misc_feature (1)..(25): SEQ ID NO: 3197; WAN024D9O_at; Start 232; Stop 256
cgacagagagtgagattgcttcaca

SEQ ID NO: 149122 - DNA, 25 bp, Artificial
  probe
  misc_feature (1)..(25): SEQ ID NO: 3197; WAN024D9O_at; Start 248; Stop 272
tgcttcacatatttctcgcttggga

SEQ ID NO: 149123 - DNA, 25 bp, Artificial
  probe
  misc_feature (1)..(25): SEQ ID NO: 3197; WAN024D9O_at; Start 306; Stop 330
tgtgcccaacagttactagacgatt

SEQ ID NO: 149124 - DNA, 25 bp, Artificial
  probe
  misc_feature (1)..(25): SEQ ID NO: 3197; WAN024D9O_at; Start 347; Stop 371
tcagacacgtgaagaattggagagt

SEQ ID NO: 149125 - DNA, 25 bp, Artificial
  probe
  misc_feature (1)..(25): SEQ ID NO: 3197; WAN024D9O_at; Start 501; Stop 525
ccacttgaggtggaaaagcgggtca

SEQ ID NO: 149126 - DNA, 25 bp, Artificial
  probe
  misc_feature (1)..(25): SEQ ID NO: 3197; WAN024D9O_at; Start 592; Stop 616
tttgccatccaaaaaatccagagtg

SEQ ID NO: 149127 - DNA, 25 bp, Artificial
  probe
  misc_feature (1)..(25): SEQ ID NO: 3197; WAN024D9O_at; Start 262; Stop 286
ctcgcttgggattgtatcggaataa

SEQ ID NO: 149128 - DNA, 25 bp, Artificial
  probe
  misc_feature (1)..(25): SEQ ID NO: 3197; WAN024D9O_at; Start 558; Stop 582
gcccatcaggccatgatttattttg

SEQ ID NO: 149129 - DNA, 25 bp, Artificial
  probe
  misc_feature (1)..(25): SEQ ID NO: 3197; WAN024D9O_at; Start 530; Stop 554
tatcttgccgcctgagcagtggtta

SEQ ID NO: 149130 - DNA, 25 bp, Artificial
  probe
  misc_feature (1)..(25): SEQ ID NO: 3197; WAN024D9O_at; Start 450; Stop 474
catgtggagcgtatttgcaaacacc

SEQ ID NO: 149131 - DNA, 25 bp, Artificial
  probe
  misc_feature (1)..(25): SEQ ID NO: 3197; WAN024D9O_at; Start 477; Stop 501
gatattgtcaaaaaatcagcgacgc

SEQ ID NO: 149132 - DNA, 25 bp, Artificial
  probe
  misc_feature (1)..(25): SEQ ID NO: 3197; WAN024D9O_at; Start 204; Stop 228
tttccaacaccccaagctatgtctg

SEQ ID NO: 149133 - DNA, 25 bp, Artificial
  probe
  misc_feature (1)..(25): SEQ ID NO: 3197; WAN024D9O_at; Start 49; Stop 73
cacgaaaggtgctagaagaaatcat

SEQ ID NO: 149134 - DNA, 25 bp, Artificial
  probe
  misc_feature (1)..(25): SEQ ID NO: 3197; WAN024D9O_at; Start 378; Stop 402
ggtgttggtcgcaagacagccaatg

SEQ ID NO: 149135 - DNA, 25 bp, Artificial
  probe
  misc_feature (1)..(25): SEQ ID NO: 3197; WAN024D9O_at; Start 617; Stop 641
tgaccagtacccacaattatatgat

SEQ ID NO: 149136 - DNA, 25 bp, Artificial
  probe
  misc_feature (1)..(25): SEQ ID NO: 3197; WAN024D9O_at; Start 144; Stop 168
ttatcagcccagacgacagatgcag

SEQ ID NO: 149137 - DNA, 25 bp, Artificial
  probe
  misc_feature (1)..(25): SEQ ID NO: 3197; WAN024D9O_at; Start 15; Stop 39
cggagatgaataatggtcttgtcaa

SEQ ID NO: 149138 - DNA, 25 bp, Artificial
  probe
  misc_feature (1)..(25): SEQ ID NO: 3197; WAN024D9O_at; Start 461; Stop 485
tatttgcaaacaccacgatattgtc

SEQ ID NO: 149139 - DNA, 25 bp, Artificial
  probe
  misc_feature (1)..(25): SEQ ID NO: 3197; WAN024D9O_at; Start 131; Stop 155
ggttgcggtcatgttatcagcccag

SEQ ID NO: 149140 - DNA, 25 bp, Artificial
  probe
  misc_feature (1)..(25): SEQ ID NO: 3197; WAN024D9O_at; Start 82; Stop 106
tcccagatgccaagcctagtcttga

SEQ ID NO: 149141 - DNA, 25 bp, Artificial
  probe
  misc_feature (1)..(25): SEQ ID NO: 3197; WAN024D9O_at; Start 486; Stop 510
aaaaaatcagcgacgccacttgagg

SEQ ID NO: 149142 - DNA, 25 bp, Artificial
  probe
  misc_feature (1)..(25): SEQ ID NO: 3197; WAN024D9O_at; Start 336; Stop 360
ggtcaagtccctcagacacgtgaag

SEQ ID NO: 149143 - DNA, 25 bp, Artificial
  probe
  misc_feature (1)..(25): SEQ ID NO: 3197; WAN024D9O_at; Start 216; Stop 240
caagctatgtctgtagcgacagaga

SEQ ID NO: 149144 - DNA, 25 bp, Artificial
  probe
  misc_feature (1)..(25): SEQ ID NO: 3197; WAN024D9O_at; Start 435; Stop 459
tttgcagtggatactcatgtggagc

SEQ ID NO: 149145 - DNA, 25 bp, Artificial
  probe
  misc_feature (1)..(25): SEQ ID NO: 3197; WAN024D9O_at; Start 117; Stop 141
cattttgaactcctggttgcggtca

SEQ ID NO: 149146 - DNA, 25 bp, Artificial
  probe
  misc_feature (1)..(25): SEQ ID NO: 3197; WAN024D9O_at; Start 576; Stop 600
tattttggaagagccatttgccatc

SEQ ID NO: 149147 - DNA, 25 bp, Artificial
  probe
  misc_feature (1)..(25): SEQ ID NO: 966; WAN024D9P_at; Start 173; Stop 197
aactatcttataccattgttcttgc

SEQ ID NO: 149148 - DNA, 25 bp, Artificial
  probe
  misc_feature (1)..(25): SEQ ID NO: 966; WAN024D9P_at; Start 238; Stop 262
tatccagtcacggaagttttcatgg

SEQ ID NO: 149149 - DNA, 25 bp, Artificial
  probe
  misc_feature (1)..(25): SEQ ID NO: 966; WAN024D9P_at; Start 301; Stop 325
gatgacttggtcttgcccatcgaaa

SEQ ID NO: 149150 - DNA, 25 bp, Artificial
  probe
  misc_feature (1)..(25): SEQ ID NO: 966; WAN024D9P_at; Start 294; Stop 318
tttagatgatgacttggtcttgccc

SEQ ID NO: 149151 - DNA, 25 bp, Artificial
  probe
  misc_feature (1)..(25): SEQ ID NO: 966; WAN024D9P_at; Start 435; Stop 459
tgactggcaaatcatgacagaggaa

SEQ ID NO: 149152 - DNA, 25 bp, Artificial
  probe
  misc_feature (1)..(25): SEQ ID NO: 966; WAN024D9P_at; Start 346; Stop 370
gagagtgtatcagacaatatcctgc

SEQ ID NO: 149153 - DNA, 25 bp, Artificial
  probe
  misc_feature (1)..(25): SEQ ID NO: 966; WAN024D9P_at; Start 490; Stop 514
gaagaaaacagtccttttgctggct

SEQ ID NO: 149154 - DNA, 25 bp, Artificial
  probe
  misc_feature (1)..(25): SEQ ID NO: 966; WAN024D9P_at; Start 73; Stop 97
gatgacctgcgtgcacgtaatcaag

SEQ ID NO: 149155 - DNA, 25 bp, Artificial
  probe
  misc_feature (1)..(25): SEQ ID NO: 966; WAN024D9P_at; Start 28; Stop 52
aagcagtctgaaggtttgaactttg

SEQ ID NO: 149156 - DNA, 25 bp, Artificial
  probe
  misc_feature (1)..(25): SEQ ID NO: 966; WAN024D9P_at; Start 166; Stop 190
gattatcaactatcttataccattg

SEQ ID NO: 149157 - DNA, 25 bp, Artificial
  probe
  misc_feature (1)..(25): SEQ ID NO: 966; WAN024D9P_at; Start 425; Stop 449
tctcaggaaatgactggcaaatcat

SEQ ID NO: 149158 - DNA, 25 bp, Artificial
  probe
  misc_feature (1)..(25): SEQ ID NO: 966; WAN024D9P_at; Start 496; Stop 520
aacagtccttttgctggcttacaag

SEQ ID NO: 149159 - DNA, 25 bp, Artificial
  probe
  misc_feature (1)..(25): SEQ ID NO: 966; WAN024D9P_at; Start 78; Stop 102
cctgcgtgcacgtaatcaagaaatt

SEQ ID NO: 149160 - DNA, 25 bp, Artificial
  probe
  misc_feature (1)..(25): SEQ ID NO: 966; WAN024D9P_at; Start 129; Stop 153
tgggaaagtacaatatgaagaccgt

SEQ ID NO: 149161 - DNA, 25 bp, Artificial
  probe
  misc_feature (1)..(25): SEQ ID NO: 966; WAN024D9P_at; Start 358; Stop 382
gacaatatcctgctaaacattccta

SEQ ID NO: 149162 - DNA, 25 bp, Artificial
  probe
  misc_feature (1)..(25): SEQ ID NO: 966; WAN024D9P_at; Start 306; Stop 330
cttggtcttgcccatcgaaaatggg

SEQ ID NO: 149163 - DNA, 25 bp, Artificial
  probe
  misc_feature (1)..(25): SEQ ID NO: 966; WAN024D9P_at; Start 115; Stop 139
gatatccttgcagttgggaaagtac

SEQ ID NO: 149164 - DNA, 25 bp, Artificial
  probe
  misc_feature (1)..(25): SEQ ID NO: 966; WAN024D9P_at; Start 227; Stop 251
tagttgaatcttatccagtcacgga

SEQ ID NO: 149165 - DNA, 25 bp, Artificial
  probe
  misc_feature (1)..(25): SEQ ID NO: 966; WAN024D9P_at; Start 246; Stop 270
cacggaagttttcatggaaggcgca

SEQ ID NO: 149166 - DNA, 25 bp, Artificial
  probe
  misc_feature (1)..(25): SEQ ID NO: 966; WAN024D9P_at; Start 387; Stop 411
ggtcttgacggctgaagaagaagct

SEQ ID NO: 149167 - DNA, 25 bp, Artificial
  probe
  misc_feature (1)..(25): SEQ ID NO: 966; WAN024D9P_at; Start 253; Stop 277
gttttcatggaaggcgcaactaacc

SEQ ID NO: 149168 - DNA, 25 bp, Artificial
  probe
  misc_feature (1)..(25): SEQ ID NO: 966; WAN024D9P_at; Start 55; Stop 79
caaacgttagatttagttgatgacc

SEQ ID NO: 149169 - DNA, 25 bp, Artificial
  probe
  misc_feature (1)..(25): SEQ ID NO: 966; WAN024D9P_at; Start 82; Stop 106
cgtgcacgtaatcaagaaattttag

SEQ ID NO: 149170 - DNA, 25 bp, Artificial
  probe
  misc_feature (1)..(25): SEQ ID NO: 966; WAN024D9P_at; Start 148; Stop 172
gaccgtatgtatttcttagattatc

SEQ ID NO: 149171 - DNA, 25 bp, Artificial
  probe
  misc_feature (1)..(25): SEQ ID NO: 966; WAN024D9P_at; Start 442; Stop 466
caaatcatgacagaggaagaatacc

SEQ ID NO: 149172 - DNA, 25 bp, Artificial
  probe
  misc_feature (1)..(25): SEQ ID NO: 966; WAN024D9P_at; Start 12; Stop 36
tattcaagaaattcgtaagcagtct

SEQ ID NO: 149173 - DNA, 25 bp, Artificial
  probe
  misc_feature (1)..(25): SEQ ID NO: 966; WAN024D9P_at; Start 333; Stop 357
gcttgaccttgctgagagtgtatca

SEQ ID NO: 149174 - DNA, 25 bp, Artificial
  probe
  misc_feature (1)..(25): SEQ ID NO: 966; WAN024D9P_at; Start 507; Stop 531
tgctggcttacaaggactatttgac

SEQ ID NO: 149175 - DNA, 25 bp, Artificial
  probe
  misc_feature (1)..(25): SEQ ID NO: 966; WAN024D9P_at; Start 212; Stop 236
tggagccagttgagttagttgaatc

SEQ ID NO: 149176 - DNA, 25 bp, Artificial
  probe
  misc_feature (1)..(25): SEQ ID NO: 966; WAN024D9P_at; Start 64; Stop 88
gatttagttgatgacctgcgtgcac

SEQ ID NO: 149177 - DNA, 25 bp, Artificial
  probe
  misc_feature (1)..(25): SEQ ID NO: 966; WAN024D9P_at; Start 381; Stop 405
tatcaaggtcttgacggctgaagaa

SEQ ID NO: 149178 - DNA, 25 bp, Artificial
  probe
  misc_feature (1)..(25): SEQ ID NO: 966; WAN024D9P_at; Start 372; Stop 396
aaacattcctatcaaggtcttgacg

SEQ ID NO: 149179 - DNA, 25 bp, Artificial
  probe
  misc_feature (1)..(25): SEQ ID NO: 966; WAN024D9P_at; Start 24; Stop 48
tcgtaagcagtctgaaggtttgaac

SEQ ID NO: 149180 - DNA, 25 bp, Artificial
  probe
  misc_feature (1)..(25): SEQ ID NO: 966; WAN024D9P_at; Start 199; Stop 223
tcgagtcgcagtatggagccagttg

SEQ ID NO: 149181 - DNA, 25 bp, Artificial
  probe
  misc_feature (1)..(25): SEQ ID NO: 698; WAN024D9Q_at; Start 29; Stop 53
tgaccgtcaaacgagcgattacgcg

SEQ ID NO: 149182 - DNA, 25 bp, Artificial
  probe
  misc_feature (1)..(25): SEQ ID NO: 698; WAN024D9Q_at; Start 323; Stop 347
ctgctattgataatattgtcggtca

SEQ ID NO: 149183 - DNA, 25 bp, Artificial
  probe
  misc_feature (1)..(25): SEQ ID NO: 698; WAN024D9Q_at; Start 495; Stop 519
cagagttctgattactgaagaagct

SEQ ID NO: 149184 - DNA, 25 bp, Artificial
  probe
  misc_feature (1)..(25): SEQ ID NO: 698; WAN024D9Q_at; Start 57; Stop 81
tacttatgagattatcgaacgcaac

SEQ ID NO: 149185 - DNA, 25 bp, Artificial
  probe
  misc_feature (1)..(25): SEQ ID NO: 698; WAN024D9Q_at; Start 255; Stop 279
tgtcgatgtgacagaccgcgaagtt

SEQ ID NO: 149186 - DNA, 25 bp, Artificial
  probe
  misc_feature (1)..(25): SEQ ID NO: 698; WAN024D9Q_at; Start 132; Stop 156
tattgcccaccgaatccaagaacgt

SEQ ID NO: 149187 - DNA, 25 bp, Artificial
  probe
  misc_feature (1)..(25): SEQ ID NO: 698; WAN024D9Q_at; Start 383; Stop 407
tcgatcgtggacatagagaattgcc

SEQ ID NO: 149188 - DNA, 25 bp, Artificial
  probe
  misc_feature (1)..(25): SEQ ID NO: 698; WAN024D9Q_at; Start 101; Stop 125
tcttggctggtattaaaactcgtgg

SEQ ID NO: 149189 - DNA, 25 bp, Artificial
  probe
  misc_feature (1)..(25): SEQ ID NO: 698; WAN024D9Q_at; Start 13; Stop 37
gaagttgtagacgaattgaccgtca

SEQ ID NO: 149190 - DNA, 25 bp, Artificial
  probe
  misc_feature (1)..(25): SEQ ID NO: 698; WAN024D9Q_at; Start 266; Stop 290
cagaccgcgaagttatcttggtgga

SEQ ID NO: 149191 - DNA, 25 bp, Artificial
  probe
  misc_feature (1)..(25): SEQ ID NO: 698; WAN024D9Q_at; Start 466; Stop 490
gtagagatgacagaacttgatgacc

SEQ ID NO: 149192 - DNA, 25 bp, Artificial
  probe
  misc_feature (1)..(25): SEQ ID NO: 698; WAN024D9Q_at; Start 358; Stop 382
gcgcgtgtgagtttagcagttctag

SEQ ID NO: 149193 - DNA, 25 bp, Artificial
  probe
  misc_feature (1)..(25): SEQ ID NO: 698; WAN024D9Q_at; Start 213; Stop 237
ccgtgatgatgttaaaagtggagaa

SEQ ID NO: 149194 - DNA, 25 bp, Artificial
  probe
  misc_feature (1)..(25): SEQ ID NO: 698; WAN024D9Q_at; Start 447; Stop 471
tcgttctgaagaaatcatcgtagag

SEQ ID NO: 149195 - DNA, 25 bp, Artificial
  probe
  misc_feature (1)..(25): SEQ ID NO: 698; WAN024D9Q_at; Start 371; Stop 395
tagcagttctagtcgatcgtggaca

SEQ ID NO: 149196 - DNA, 25 bp, Artificial
  probe
  misc_feature (1)..(25): SEQ ID NO: 698; WAN024D9Q_at; Start 281; Stop 305
tcttggtggatgatgtgctctatac

SEQ ID NO: 149197 - DNA, 25 bp, Artificial
  probe
  misc_feature (1)..(25): SEQ ID NO: 698; WAN024D9Q_at; Start 222; Stop 246
tgttaaaagtggagaagatacttct

SEQ ID NO: 149198 - DNA, 25 bp, Artificial
  probe
  misc_feature (1)..(25): SEQ ID NO: 698; WAN024D9Q_at; Start 310; Stop 334
cgtaccatccgtgctgctattgata

SEQ ID NO: 149199 - DNA, 25 bp, Artificial
  probe
  misc_feature (1)..(25): SEQ ID NO: 698; WAN024D9Q_at; Start 336; Stop 360
tattgtcggtcatggtcgtcctgcg

SEQ ID NO: 149200 - DNA, 25 bp, Artificial
  probe
  misc_feature (1)..(25): SEQ ID NO: 698; WAN024D9Q_at; Start 301; Stop 325
tatacaggtcgtaccatccgtgctg

SEQ ID NO: 149201 - DNA, 25 bp, Artificial
  probe
  misc_feature (1)..(25): SEQ ID NO: 698; WAN024D9Q_at; Start 66; Stop 90
gattatcgaacgcaacaaagatttg

SEQ ID NO: 149202 - DNA, 25 bp, Artificial
  probe
  misc_feature (1)..(25): SEQ ID NO: 698; WAN024D9Q_at; Start 407; Stop 431
caatccgtccagattacgttggaaa

SEQ ID NO: 149203 - DNA, 25 bp, Artificial
  probe
  misc_feature (1)..(25): SEQ ID NO: 698; WAN024D9Q_at; Start 199; Stop 223
gatactaaacctttccgtgatgatg

SEQ ID NO: 149204 - DNA, 25 bp, Artificial
  probe
  misc_feature (1)..(25): SEQ ID NO: 698; WAN024D9Q_at; Start 481; Stop 505
cttgatgaccaagacagagttctga

SEQ ID NO: 149205 - DNA, 25 bp, Artificial
  probe
  misc_feature (1)..(25): SEQ ID NO: 698; WAN024D9Q_at; Start 116; Stop 140
aaactcgtggtgtctttattgccca

SEQ ID NO: 149206 - DNA, 25 bp, Artificial
  probe
  misc_feature (1)..(25): SEQ ID NO: 698; WAN024D9Q_at; Start 184; Stop 208
cctgttgtggaattggatactaaac

SEQ ID NO: 149207 - DNA, 25 bp, Artificial
  probe
  misc_feature (1)..(25): SEQ ID NO: 698; WAN024D9Q_at; Start 396; Stop 420
tagagaattgccaatccgtccagat

SEQ ID NO: 149208 - DNA, 25 bp, Artificial
  probe
  misc_feature (1)..(25): SEQ ID NO: 698; WAN024D9Q_at; Start 431; Stop 455
aaaatatcccaaccagtcgttctga

SEQ ID NO: 149209 - DNA, 25 bp, Artificial
  probe
  misc_feature (1)..(25): SEQ ID NO: 698; WAN024D9Q_at; Start 147; Stop 171
ccaagaacgtttgaagcagttagaa

SEQ ID NO: 149210 - DNA, 25 bp, Artificial
  probe
  misc_feature (1)..(25): SEQ ID NO: 698; WAN024D9Q_at; Start 238; Stop 262
gatacttctttggtttctgtcgatg

SEQ ID NO: 149211 - DNA, 25 bp, Artificial
  probe
  misc_feature (1)..(25): SEQ ID NO: 698; WAN024D9Q_at; Start 43; Stop 67
gcgattacgcgtattacttatgaga

SEQ ID NO: 149212 - DNA, 25 bp, Artificial
  probe
  misc_feature (1)..(25): SEQ ID NO: 698; WAN024D9Q_at; Start 169; Stop 193
gaaaatctttcagttcctgttgtgg

SEQ ID NO: 149213 - DNA, 25 bp, Artificial
  probe
  misc_feature (1)..(25): SEQ ID NO: 698; WAN024D9Q_at; Start 346; Stop 370
catggtcgtcctgcgcgtgtgagtt

SEQ ID NO: 149214 - DNA, 25 bp, Artificial
  probe
  misc_feature (1)..(25): SEQ ID NO: 698; WAN024D9Q_at; Start 292; Stop 316
gatgtgctctatacaggtcgtacca

SEQ ID NO: 149215 - DNA, 25 bp, Artificial
  probe
  misc_feature (1)..(25): SEQ ID NO: 2858; WAN024D9R_at; Start 782; Stop 806
cagctccaatcaatcgtgatgtaga

SEQ ID NO: 149216 - DNA, 25 bp, Artificial
  probe
  misc_feature (1)..(25): SEQ ID NO: 2858; WAN024D9R_at; Start 551; Stop 575
aactctttttcgctggacctgagga

SEQ ID NO: 149217 - DNA, 25 bp, Artificial
  probe
  misc_feature (1)..(25): SEQ ID NO: 2858; WAN024D9R_at; Start 505; Stop 529
cgcgttgccaaatccaatatgcaga

SEQ ID NO: 149218 - DNA, 25 bp, Artificial
  probe
  misc_feature (1)..(25): SEQ ID NO: 2858; WAN024D9R_at; Start 198; Stop 222
taaacttggattggaacgacttgac

SEQ ID NO: 149219 - DNA, 25 bp, Artificial
  probe
  misc_feature (1)..(25): SEQ ID NO: 2858; WAN024D9R_at; Start 715; Stop 739
catgcccaacatggcttgactcaag

SEQ ID NO: 149220 - DNA, 25 bp, Artificial
  probe
  misc_feature (1)..(25): SEQ ID NO: 2858; WAN024D9R_at; Start 307; Stop 331
tgtgtgattcgccatccagaggtcg

SEQ ID NO: 149221 - DNA, 25 bp, Artificial
  probe
  misc_feature (1)..(25): SEQ ID NO: 2858; WAN024D9R_at; Start 347; Stop 371
tgattgctagtccaacgattacgac

SEQ ID NO: 149222 - DNA, 25 bp, Artificial
  probe
  misc_feature (1)..(25): SEQ ID NO: 2858; WAN024D9R_at; Start 16; Stop 40
caagcattgaaccatgtggtgtcca

SEQ ID NO: 149223 - DNA, 25 bp, Artificial
  probe
  misc_feature (1)..(25): SEQ ID NO: 2858; WAN024D9R_at; Start 149; Stop 173
tctttgaggattctacacggacaca

SEQ ID NO: 149224 - DNA, 25 bp, Artificial
  probe
  misc_feature (1)..(25): SEQ ID NO: 2858; WAN024D9R_at; Start 799; Stop 823
gatgtagaaatagcagaccacttgg

SEQ ID NO: 149225 - DNA, 25 bp, Artificial
  probe
  misc_feature (1)..(25): SEQ ID NO: 2858; WAN024D9R_at; Start 86; Stop 110
gaattgagtttaaaaatggagccca

SEQ ID NO: 149226 - DNA, 25 bp, Artificial
  probe
  misc_feature (1)..(25): SEQ ID NO: 2858; WAN024D9R_at; Start 172; Stop 196
cataagtcctttgaagtcgcagaga

SEQ ID NO: 149227 - DNA, 25 bp, Artificial
  probe
  misc_feature (1)..(25): SEQ ID NO: 2858; WAN024D9R_at; Start 697; Stop 721
ttttcaaaagaagactaccatgccc

SEQ ID NO: 149228 - DNA, 25 bp, Artificial
  probe
  misc_feature (1)..(25): SEQ ID NO: 2858; WAN024D9R_at; Start 32; Stop 56
tggtgtccatggaagacctcactgt

SEQ ID NO: 149229 - DNA, 25 bp, Artificial
  probe
  misc_feature (1)..(25): SEQ ID NO: 2858; WAN024D9R_at; Start 435; Stop 459
gaccatttatgaggaatttggccac

SEQ ID NO: 149230 - DNA, 25 bp, Artificial
  probe
  misc_feature (1)..(25): SEQ ID NO: 2858; WAN024D9R_at; Start 647; Stop 671
tcatgatgtttctccgtgtgcaaca

SEQ ID NO: 149231 - DNA, 25 bp, Artificial
  probe
  misc_feature (1)..(25): SEQ ID NO: 2858; WAN024D9R_at; Start 861; Stop 885
caatggtgtctttgttcgaatggca

SEQ ID NO: 149232 - DNA, 25 bp, Artificial
  probe
  misc_feature (1)..(25): SEQ ID NO: 2858; WAN024D9R_at; Start 415; Stop 439
cagagcttgcttgatttgatgacca

SEQ ID NO: 149233 - DNA, 25 bp, Artificial
  probe
  misc_feature (1)..(25): SEQ ID NO: 2858; WAN024D9R_at; Start 842; Stop 866
ggattgtccaacaaatgaccaatgg

SEQ ID NO: 149234 - DNA, 25 bp, Artificial
  probe
  misc_feature (1)..(25): SEQ ID NO: 2858; WAN024D9R_at; Start 902; Stop 926
tagcgagtagaaacgccaactaact

SEQ ID NO: 149235 - DNA, 25 bp, Artificial
  probe
  misc_feature (1)..(25): SEQ ID NO: 2858; WAN024D9R_at; Start 282; Stop 306
tctgtctgctttaggagtggatgtc

SEQ ID NO: 149236 - DNA, 25 bp, Artificial
  probe
  misc_feature (1)..(25): SEQ ID NO: 2858; WAN024D9R_at; Start 366; Stop 390
tacgacttccatcatcaatggtgga

SEQ ID NO: 149237 - DNA, 25 bp, Artificial
  probe
  misc_feature (1)..(25): SEQ ID NO: 2858; WAN024D9R_at; Start 728; Stop 752
gcttgactcaagaacgttacgatcg

SEQ ID NO: 149238 - DNA, 25 bp, Artificial
  probe
  misc_feature (1)..(25): SEQ ID NO: 2858; WAN024D9R_at; Start 566; Stop 590
gacctgaggaatggagaagtcaaga

SEQ ID NO: 149239 - DNA, 25 bp, Artificial
  probe
  misc_feature (1)..(25): SEQ ID NO: 2858; WAN024D9R_at; Start 663; Stop 687
tgtgcaacacgaacgccatgatagt

SEQ ID NO: 149240 - DNA, 25 bp, Artificial
  probe
  misc_feature (1)..(25): SEQ ID NO: 2858; WAN024D9R_at; Start 882; Stop 906
ggcaatcttagaatccgtactagcg

SEQ ID NO: 149241 - DNA, 25 bp, Artificial
  probe
  misc_feature (1)..(25): SEQ ID NO: 2858; WAN024D9R_at; Start 760; Stop 784
gaaacagcaatcctcatgcacccag

SEQ ID NO: 149242 - DNA, 25 bp, Artificial
  probe
  misc_feature (1)..(25): SEQ ID NO: 2858; WAN024D9R_at; Start 678; Stop 702
ccatgatagtggagctgtattttca

SEQ ID NO: 149243 - DNA, 25 bp, Artificial
  probe
  misc_feature (1)..(25): SEQ ID NO: 2858; WAN024D9R_at; Start 114; Stop 138
tccctatgaagaccatccgattgtt

SEQ ID NO: 149244 - DNA, 25 bp, Artificial
  probe
  misc_feature (1)..(25): SEQ ID NO: 2858; WAN024D9R_at; Start 522; Stop 546
tatgcagattttgaaacgcttggga

SEQ ID NO: 149245 - DNA, 25 bp, Artificial
  probe
  misc_feature (1)..(25): SEQ ID NO: 2858; WAN024D9R_at; Start 214; Stop 238
cgacttgactttgatgtgaagacta

SEQ ID NO: 149246 - DNA, 25 bp, Artificial
  probe
  misc_feature (1)..(25): SEQ ID NO: 2858; WAN024D9R_at; Start 823; Stop 847
gttgaagcaccaaaatcacggattg

SEQ ID NO: 149247 - DNA, 25 bp, Artificial
  probe
  misc_feature (1)..(25): SEQ ID NO: 2858; WAN024D9R_at; Start 319; Stop 343
catccagaggtcgactactatagag

SEQ ID NO: 149248 - DNA, 25 bp, Artificial
  probe
  misc_feature (1)..(25): SEQ ID NO: 2858; WAN024D9R_at; Start 468; Stop 492
tcttaaagttgctattgcaggtgac

SEQ ID NO: 149249 - DNA, 25 bp, Artificial
  probe
  misc_feature (1)..(25): SEQ ID NO: 1858; WAN024D9S_at; Start 374; Stop 398
cctttgatgaactaagtgatgaaga

SEQ ID NO: 149250 - DNA, 25 bp, Artificial
  probe
  misc_feature (1)..(25): SEQ ID NO: 1858; WAN024D9S_at; Start 9; Stop 33
cgaattttgtgctgaaaatgtgact

SEQ ID NO: 149251 - DNA, 25 bp, Artificial
  probe
  misc_feature (1)..(25): SEQ ID NO: 1858; WAN024D9S_at; Start 301; Stop 325
aaaaagttggataagcctaatctgg

SEQ ID NO: 149252 - DNA, 25 bp, Artificial
  probe
  misc_feature (1)..(25): SEQ ID NO: 1858; WAN024D9S_at; Start 154; Stop 178
tacgatacaaccatcatgaccatga

SEQ ID NO: 149253 - DNA, 25 bp, Artificial
  probe
  misc_feature (1)..(25): SEQ ID NO: 1858; WAN024D9S_at; Start 202; Stop 226
gtctataatgacctagaaattgcta

SEQ ID NO: 149254 - DNA, 25 bp, Artificial
  probe
  misc_feature (1)..(25): SEQ ID NO: 1858; WAN024D9S_at; Start 217; Stop 241
gaaattgctatcatgctagaagaca

SEQ ID NO: 149255 - DNA, 25 bp, Artificial
  probe
  misc_feature (1)..(25): SEQ ID NO: 1858; WAN024D9S_at; Start 184; Stop 208
ccacgtggtggtgactttgtctata

SEQ ID NO: 149256 - DNA, 25 bp, Artificial
  probe
  misc_feature (1)..(25): SEQ ID NO: 1858; WAN024D9S_at; Start 355; Stop 379
gaaattgtctttcacatggcctttg

SEQ ID NO: 149257 - DNA, 25 bp, Artificial
  probe
  misc_feature (1)..(25): SEQ ID NO: 1858; WAN024D9S_at; Start 193; Stop 217
ggtgactttgtctataatgacctag

SEQ ID NO: 149258 - DNA, 25 bp, Artificial
  probe
  misc_feature (1)..(25): SEQ ID NO: 1858; WAN024D9S_at; Start 321; Stop 345
tctggaaaagttaattgctgcatca

SEQ ID NO: 149259 - DNA, 25 bp, Artificial
  probe
  misc_feature (1)..(25): SEQ ID NO: 1858; WAN024D9S_at; Start 447; Stop 471
cctaactcgtgctggtgtgtctggc

SEQ ID NO: 149260 - DNA, 25 bp, Artificial
  probe
  misc_feature (1)..(25): SEQ ID NO: 1858; WAN024D9S_at; Start 596; Stop 620
gggtaacacaattgcatggtactaa

SEQ ID NO: 149261 - DNA, 25 bp, Artificial
  probe
  misc_feature (1)..(25): SEQ ID NO: 1858; WAN024D9S_at; Start 286; Stop 310
gctttaactgctgataaaaagttgg

SEQ ID NO: 149262 - DNA, 25 bp, Artificial
  probe
  misc_feature (1)..(25): SEQ ID NO: 1858; WAN024D9S_at; Start 512; Stop 536
tggagtacgctaaaggtaaaattga

SEQ ID NO: 149263 - DNA, 25 bp, Artificial
  probe
  misc_feature (1)..(25): SEQ ID NO: 1858; WAN024D9S_at; Start 19; Stop 43
gctgaaaatgtgactttacttgaaa

SEQ ID NO: 149264 - DNA, 25 bp, Artificial
  probe
  misc_feature (1)..(25): SEQ ID NO: 1858; WAN024D9S_at; Start 167; Stop 191
tcatgaccatgattcggccacgtgg

SEQ ID NO: 149265 - DNA, 25 bp, Artificial
  probe
  misc_feature (1)..(25): SEQ ID NO: 1858; WAN024D9S_at; Start 308; Stop 332
tggataagcctaatctggaaaagtt

SEQ ID NO: 149266 - DNA, 25 bp, Artificial
  probe
  misc_feature (1)..(25): SEQ ID NO: 1858; WAN024D9S_at; Start 427; Stop 451
caagccggtgtcactcgtatcctaa

SEQ ID NO: 149267 - DNA, 25 bp, Artificial
  probe
  misc_feature (1)..(25): SEQ ID NO: 1858; WAN024D9S_at; Start 332; Stop 356
taattgctgcatcaaaaggaatgga

SEQ ID NO: 149268 - DNA, 25 bp, Artificial
  probe
  misc_feature (1)..(25): SEQ ID NO: 1858; WAN024D9S_at; Start 492; Stop 516
tgttcactatcacagaattttggag

SEQ ID NO: 149269 - DNA, 25 bp, Artificial
  probe
  misc_feature (1)..(25): SEQ ID NO: 1858; WAN024D9S_at; Start 245; Stop 269
gtttgactgctcaggctggaagtca

SEQ ID NO: 149270 - DNA, 25 bp, Artificial
  probe
  misc_feature (1)..(25): SEQ ID NO: 1858; WAN024D9S_at; Start 604; Stop 628
caattgcatggtactaaggttgttt

SEQ ID NO: 149271 - DNA, 25 bp, Artificial
  probe
  misc_feature (1)..(25): SEQ ID NO: 1858; WAN024D9S_at; Start 433; Stop 457
ggtgtcactcgtatcctaactcgtg

SEQ ID NO: 149272 - DNA, 25 bp, Artificial
  probe
  misc_feature (1)..(25): SEQ ID NO: 1858; WAN024D9S_at; Start 481; Stop 505
gaaaaacgttttgttcactatcaca

SEQ ID NO: 149273 - DNA, 25 bp, Artificial
  probe
  misc_feature (1)..(25): SEQ ID NO: 1858; WAN024D9S_at; Start 502; Stop 526
cacagaattttggagtacgctaaag

SEQ ID NO: 149274 - DNA, 25 bp, Artificial
  probe
  misc_feature (1)..(25): SEQ ID NO: 1858; WAN024D9S_at; Start 367; Stop 391
cacatggcctttgatgaactaagtg

SEQ ID NO: 149275 - DNA, 25 bp, Artificial
  probe
  misc_feature (1)..(25): SEQ ID NO: 1858; WAN024D9S_at; Start 422; Stop 446
tcagtcaagccggtgtcactcgtat

SEQ ID NO: 149276 - DNA, 25 bp, Artificial
  probe
  misc_feature (1)..(25): SEQ ID NO: 1858; WAN024D9S_at; Start 415; Stop 439
gactggctcagtcaagccggtgtca

SEQ ID NO: 149277 - DNA, 25 bp, Artificial
  probe
  misc_feature (1)..(25): SEQ ID NO: 1858; WAN024D9S_at; Start 340; Stop 364
gcatcaaaaggaatggaaattgtct

SEQ ID NO: 149278 - DNA, 25 bp, Artificial
  probe
  misc_feature (1)..(25): SEQ ID NO: 1858; WAN024D9S_at; Start 404; Stop 428
cggaagctattgactggctcagtca

SEQ ID NO: 149279 - DNA, 25 bp, Artificial
  probe
  misc_feature (1)..(25): SEQ ID NO: 1858; WAN024D9S_at; Start 275; Stop 299
ttgtatttggagctttaactgctga

SEQ ID NO: 149280 - DNA, 25 bp, Artificial
  probe
  misc_feature (1)..(25): SEQ ID NO: 1858; WAN024D9S_at; Start 174; Stop 198
catgattcggccacgtggtggtgac

SEQ ID NO: 149281 - DNA, 25 bp, Artificial
  probe
  misc_feature (1)..(25): SEQ ID NO: 1858; WAN024D9S_at; Start 439; Stop 463
actcgtatcctaactcgtgctggtg

SEQ ID NO: 149282 - DNA, 25 bp, Artificial
  probe
  misc_feature (1)..(25): SEQ ID NO: 1858; WAN024D9S_at; Start 126; Stop 150
taaggcagcggttgaactggcagct

SEQ ID NO: 149283 - DNA, 25 bp, Artificial
  probe
  misc_feature (1)..(25): SEQ ID NO: 2733; WAN024D9T_at; Start 335; Stop 359
aacgaccagcctactggcaggatta

SEQ ID NO: 149284 - DNA, 25 bp, Artificial
  probe
  misc_feature (1)..(25): SEQ ID NO: 2733; WAN024D9T_at; Start 148; Stop 172
gagaaactagcccagctaaaaccaa

SEQ ID NO: 149285 - DNA, 25 bp, Artificial
  probe
  misc_feature (1)..(25): SEQ ID NO: 2733; WAN024D9T_at; Start 130; Stop 154
cagcctagagaggttagagagaaac

SEQ ID NO: 149286 - DNA, 25 bp, Artificial
  probe
  misc_feature (1)..(25): SEQ ID NO: 2733; WAN024D9T_at; Start 178; Stop 202
caggtaactgtggacttggaacaac

SEQ ID NO: 149287 - DNA, 25 bp, Artificial
  probe
  misc_feature (1)..(25): SEQ ID NO: 2733; WAN024D9T_at; Start 217; Stop 241
ccagttgaagaattcaccttcgaga

SEQ ID NO: 149288 - DNA, 25 bp, Artificial
  probe
  misc_feature (1)..(25): SEQ ID NO: 2733; WAN024D9T_at; Start 296; Stop 320
ccttgcagtatgaagagttgattgc

SEQ ID NO: 149289 - DNA, 25 bp, Artificial
  probe
  misc_feature (1)..(25): SEQ ID NO: 2733; WAN024D9T_at; Start 210; Stop 234
catctcaccagttgaagaattcacc

SEQ ID NO: 149290 - DNA, 25 bp, Artificial
  probe
  misc_feature (1)..(25): SEQ ID NO: 2733; WAN024D9T_at; Start 307; Stop 331
gaagagttgattgctgcttatgaaa

SEQ ID NO: 149291 - DNA, 25 bp, Artificial
  probe
  misc_feature (1)..(25): SEQ ID NO: 2733; WAN024D9T_at; Start 36; Stop 60
tctagcggactatggttttaaggtc

SEQ ID NO: 149292 - DNA, 25 bp, Artificial
  probe
  misc_feature (1)..(25): SEQ ID NO: 2733; WAN024D9T_at; Start 54; Stop 78
taaggtcgtgattgcaggatctttc

SEQ ID NO: 149293 - DNA, 25 bp, Artificial
  probe
  misc_feature (1)..(25): SEQ ID NO: 2733; WAN024D9T_at; Start 141; Stop 165
ggttagagagaaactagcccagcta

SEQ ID NO: 149294 - DNA, 25 bp, Artificial
  probe
  misc_feature (1)..(25): SEQ ID NO: 2733; WAN024D9T_at; Start 60; Stop 84
cgtgattgcaggatctttcggtgac

SEQ ID NO: 149295 - DNA, 25 bp, Artificial
  probe
  misc_feature (1)..(25): SEQ ID NO: 2733; WAN024D9T_at; Start 174; Stop 198
cgaccaggtaactgtggacttggaa

SEQ ID NO: 149296 - DNA, 25 bp, Artificial
  probe
  misc_feature (1)..(25): SEQ ID NO: 2733; WAN024D9T_at; Start 116; Stop 140
tgttgccaatcgttcagcctagaga

SEQ ID NO: 149297 - DNA, 25 bp, Artificial
  probe
  misc_feature (1)..(25): SEQ ID NO: 2733; WAN024D9T_at; Start 119; Stop 143
tgccaatcgttcagcctagagaggt

SEQ ID NO: 149298 - DNA, 25 bp, Artificial
  probe
  misc_feature (1)..(25): SEQ ID NO: 2733; WAN024D9T_at; Start 251; Stop 275
agtggaaacataaactcctaaatag

SEQ ID NO: 149299 - DNA, 25 bp, Artificial
  probe
  misc_feature (1)..(25): SEQ ID NO: 2733; WAN024D9T_at; Start 273; Stop 297
tagtttggatgatatcggtattacc

SEQ ID NO: 149300 - DNA, 25 bp, Artificial
  probe
  misc_feature (1)..(25): SEQ ID NO: 2733; WAN024D9T_at; Start 66; Stop 90
tgcaggatctttcggtgacattcat

SEQ ID NO: 149301 - DNA, 25 bp, Artificial
  probe
  misc_feature (1)..(25): SEQ ID NO: 2733; WAN024D9T_at; Start 169; Stop 193
ccaaccgaccaggtaactgtggact

SEQ ID NO: 149302 - DNA, 25 bp, Artificial
  probe
  misc_feature (1)..(25): SEQ ID NO: 2733; WAN024D9T_at; Start 45; Stop 69
ctatggttttaaggtcgtgattgca

SEQ ID NO: 149303 - DNA, 25 bp, Artificial
  probe
  misc_feature (1)..(25): SEQ ID NO: 2733; WAN024D9T_at; Start 266; Stop 290
tcctaaatagtttggatgatatcgg

SEQ ID NO: 149304 - DNA, 25 bp, Artificial
  probe
  misc_feature (1)..(25): SEQ ID NO: 2733; WAN024D9T_at; Start 288; Stop 312
cggtattaccttgcagtatgaagag

SEQ ID NO: 149305 - DNA, 25 bp, Artificial
  probe
  misc_feature (1)..(25): SEQ ID NO: 2733; WAN024D9T_at; Start 186; Stop 210
tgtggacttggaacaacaaaaaatc

SEQ ID NO: 149306 - DNA, 25 bp, Artificial
  probe
  misc_feature (1)..(25): SEQ ID NO: 2733; WAN024D9T_at; Start 225; Stop 249
agaattcaccttcgagatagatagc

SEQ ID NO: 149307 - DNA, 25 bp, Artificial
  probe
  misc_feature (1)..(25): SEQ ID NO: 2733; WAN024D9T_at; Start 202; Stop 226
caaaaaatcatctcaccagttgaag

SEQ ID NO: 149308 - DNA, 25 bp, Artificial
  probe
  misc_feature (1)..(25): SEQ ID NO: 2733; WAN024D9T_at; Start 70; Stop 94
ggatctttcggtgacattcattaca

SEQ ID NO: 149309 - DNA, 25 bp, Artificial
  probe
  misc_feature (1)..(25): SEQ ID NO: 2733; WAN024D9T_at; Start 137; Stop 161
gagaggttagagagaaactagccca

SEQ ID NO: 149310 - DNA, 25 bp, Artificial
  probe
  misc_feature (1)..(25): SEQ ID NO: 2733; WAN024D9T_at; Start 77; Stop 101
tcggtgacattcattacaataatga

SEQ ID NO: 149311 - DNA, 25 bp, Artificial
  probe
  misc_feature (1)..(25): SEQ ID NO: 2733; WAN024D9T_at; Start 327; Stop 351
tgaaaaacaacgaccagcctactgg

SEQ ID NO: 149312 - DNA, 25 bp, Artificial
  probe
  misc_feature (1)..(25): SEQ ID NO: 2733; WAN024D9T_at; Start 321; Stop 345
tgcttatgaaaaacaacgaccagcc

SEQ ID NO: 149313 - DNA, 25 bp, Artificial
  probe
  misc_feature (1)..(25): SEQ ID NO: 2733; WAN024D9T_at; Start 279; Stop 303
ggatgatatcggtattaccttgcag

SEQ ID NO: 149314 - DNA, 25 bp, Artificial
  probe
  misc_feature (1)..(25): SEQ ID NO: 2733; WAN024D9T_at; Start 194; Stop 218
tggaacaacaaaaaatcatctcacc

SEQ ID NO: 149315 - DNA, 25 bp, Artificial
  probe
  misc_feature (1)..(25): SEQ ID NO: 2733; WAN024D9T_at; Start 125; Stop 149
tcgttcagcctagagaggttagaga

SEQ ID NO: 149316 - DNA, 25 bp, Artificial
  probe
  misc_feature (1)..(25): SEQ ID NO: 2733; WAN024D9T_at; Start 314; Stop 338
tgattgctgcttatgaaaaacaacg

SEQ ID NO: 149317 - DNA, 25 bp, Artificial
  probe
  misc_feature (1)..(25): SEQ ID NO: 3485; WAN024D9U_at; Start 62; Stop 86
aattggctgccaagctttgggaaga

SEQ ID NO: 149318 - DNA, 25 bp, Artificial
  probe
  misc_feature (1)..(25): SEQ ID NO: 3485; WAN024D9U_at; Start 61; Stop 85
caattggctgccaagctttgggaag

SEQ ID NO: 149319 - DNA, 25 bp, Artificial
  probe
  misc_feature (1)..(25): SEQ ID NO: 3485; WAN024D9U_at; Start 35; Stop 59
ttatcaagtttggaaaagcaggtga

SEQ ID NO: 149320 - DNA, 25 bp, Artificial
  probe
  misc_feature (1)..(25): SEQ ID NO: 3485; WAN024D9U_at; Start 12; Stop 36
tgtacgtggtactagctgttttgtt

SEQ ID NO: 149321 - DNA, 25 bp, Artificial
  probe
  misc_feature (1)..(25): SEQ ID NO: 3485; WAN024D9U_at; Start 85; Stop 109
gaaggtaaaatggtctacgcctcat

SEQ ID NO: 149322 - DNA, 25 bp, Artificial
  probe
  misc_feature (1)..(25): SEQ ID NO: 3485; WAN024D9U_at; Start 123; Stop 147
aaaacgattgaaactcgctatgagc

SEQ ID NO: 149323 - DNA, 25 bp, Artificial
  probe
  misc_feature (1)..(25): SEQ ID NO: 3485; WAN024D9U_at; Start 57; Stop 81
tgaacaattggctgccaagctttgg

SEQ ID NO: 149324 - DNA, 25 bp, Artificial
  probe
  misc_feature (1)..(25): SEQ ID NO: 3485; WAN024D9U_at; Start 49; Stop 73
aaagcaggtgaacaattggctgcca

SEQ ID NO: 149325 - DNA, 25 bp, Artificial
  probe
  misc_feature (1)..(25): SEQ ID NO: 3485; WAN024D9U_at; Start 38; Stop 62
tcaagtttggaaaagcaggtgaaca

SEQ ID NO: 149326 - DNA, 25 bp, Artificial
  probe
  misc_feature (1)..(25): SEQ ID NO: 3485; WAN024D9U_at; Start 33; Stop 57
tgttatcaagtttggaaaagcaggt

SEQ ID NO: 149327 - DNA, 25 bp, Artificial
  probe
  misc_feature (1)..(25): SEQ ID NO: 3485; WAN024D9U_at; Start 128; Stop 152
gattgaaactcgctatgagcaaggt

SEQ ID NO: 149328 - DNA, 25 bp, Artificial
  probe
  misc_feature (1)..(25): SEQ ID NO: 3485; WAN024D9U_at; Start 39; Stop 63
caagtttggaaaagcaggtgaacaa

SEQ ID NO: 149329 - DNA, 25 bp, Artificial
  probe
  misc_feature (1)..(25): SEQ ID NO: 3485; WAN024D9U_at; Start 6; Stop 30
gactgatgtacgtggtactagctgt

SEQ ID NO: 149330 - DNA, 25 bp, Artificial
  probe
  misc_feature (1)..(25): SEQ ID NO: 3485; WAN024D9U_at; Start 46; Stop 70
ggaaaagcaggtgaacaattggctg

SEQ ID NO: 149331 - DNA, 25 bp, Artificial
  probe
  misc_feature (1)..(25): SEQ ID NO: 3485; WAN024D9U_at; Start 53; Stop 77
caggtgaacaattggctgccaagct

SEQ ID NO: 149332 - DNA, 25 bp, Artificial
  probe
  misc_feature (1)..(25): SEQ ID NO: 3485; WAN024D9U_at; Start 130; Stop 154
ttgaaactcgctatgagcaaggtgt

SEQ ID NO: 149333 - DNA, 25 bp, Artificial
  probe
  misc_feature (1)..(25): SEQ ID NO: 3485; WAN024D9U_at; Start 51; Stop 75
agcaggtgaacaattggctgccaag

SEQ ID NO: 149334 - DNA, 25 bp, Artificial
  probe
  misc_feature (1)..(25): SEQ ID NO: 3485; WAN024D9U_at; Start 67; Stop 91
gctgccaagctttgggaagaaggta

SEQ ID NO: 149335 - DNA, 25 bp, Artificial
  probe
  misc_feature (1)..(25): SEQ ID NO: 3485; WAN024D9U_at; Start 84; Stop 108
agaaggtaaaatggtctacgcctca

SEQ ID NO: 149336 - DNA, 25 bp, Artificial
  probe
  misc_feature (1)..(25): SEQ ID NO: 3485; WAN024D9U_at; Start 68; Stop 92
ctgccaagctttgggaagaaggtaa

SEQ ID NO: 149337 - DNA, 25 bp, Artificial
  probe
  misc_feature (1)..(25): SEQ ID NO: 3485; WAN024D9U_at; Start 19; Stop 43
ggtactagctgttttgttatcaagt

SEQ ID NO: 149338 - DNA, 25 bp, Artificial
  probe
  misc_feature (1)..(25): SEQ ID NO: 3485; WAN024D9U_at; Start 16; Stop 40
cgtggtactagctgttttgttatca

SEQ ID NO: 149339 - DNA, 25 bp, Artificial
  probe
  misc_feature (1)..(25): SEQ ID NO: 3485; WAN024D9U_at; Start 42; Stop 66
gtttggaaaagcaggtgaacaattg

SEQ ID NO: 149340 - DNA, 25 bp, Artificial
  probe
  misc_feature (1)..(25): SEQ ID NO: 3485; WAN024D9U_at; Start 133; Stop 157
aaactcgctatgagcaaggtgtaat

SEQ ID NO: 149341 - DNA, 25 bp, Artificial
  probe
  misc_feature (1)..(25): SEQ ID NO: 3485; WAN024D9U_at; Start 125; Stop 149
aacgattgaaactcgctatgagcaa

SEQ ID NO: 149342 - DNA, 25 bp, Artificial
  probe
  misc_feature (1)..(25): SEQ ID NO: 3485; WAN024D9U_at; Start 44; Stop 68
ttggaaaagcaggtgaacaattggc

SEQ ID NO: 149343 - DNA, 25 bp, Artificial
  probe
  misc_feature (1)..(25): SEQ ID NO: 3485; WAN024D9U_at; Start 3; Stop 27
tatgactgatgtacgtggtactagc

SEQ ID NO: 149344 - DNA, 25 bp, Artificial
  probe
  misc_feature (1)..(25): SEQ ID NO: 3485; WAN024D9U_at; Start 48; Stop 72
aaaagcaggtgaacaattggctgcc

SEQ ID NO: 149345 - DNA, 25 bp, Artificial
  probe
  misc_feature (1)..(25): SEQ ID NO: 3485; WAN024D9U_at; Start 25; Stop 49
agctgttttgttatcaagtttggaa

SEQ ID NO: 149346 - DNA, 25 bp, Artificial
  probe
  misc_feature (1)..(25): SEQ ID NO: 3485; WAN024D9U_at; Start 72; Stop 96
caagctttgggaagaaggtaaaatg

SEQ ID NO: 149347 - DNA, 25 bp, Artificial
  probe
  misc_feature (1)..(25): SEQ ID NO: 3485; WAN024D9U_at; Start 58; Stop 82
gaacaattggctgccaagctttggg

SEQ ID NO: 149348 - DNA, 25 bp, Artificial
  probe
  misc_feature (1)..(25): SEQ ID NO: 3485; WAN024D9U_at; Start 132; Stop 156
gaaactcgctatgagcaaggtgtaa

SEQ ID NO: 149349 - DNA, 25 bp, Artificial
  probe
  misc_feature (1)..(25): SEQ ID NO: 3485; WAN024D9U_at; Start 10; Stop 34
gatgtacgtggtactagctgttttg

SEQ ID NO: 149350 - DNA, 25 bp, Artificial
  probe
  misc_feature (1)..(25): SEQ ID NO: 3485; WAN024D9U_at; Start 1; Stop 25
cttatgactgatgtacgtggtacta

SEQ ID NO: 149351 - DNA, 25 bp, Artificial
  probe
  misc_feature (1)..(25): SEQ ID NO: 2683; WAN024D9V_at; Start 29; Stop 53
aactcatcccagaacaaggaggagc

SEQ ID NO: 149352 - DNA, 25 bp, Artificial
  probe
  misc_feature (1)..(25): SEQ ID NO: 2683; WAN024D9V_at; Start 16; Stop 40
gataaggacggcaaactcatcccag

SEQ ID NO: 149353 - DNA, 25 bp, Artificial
  probe
  misc_feature (1)..(25): SEQ ID NO: 2683; WAN024D9V_at; Start 35; Stop 59
tcccagaacaaggaggagcacgttc

SEQ ID NO: 149354 - DNA, 25 bp, Artificial
  probe
  misc_feature (1)..(25): SEQ ID NO: 2683; WAN024D9V_at; Start 79; Stop 103
gtgatccgtaaagggcttgacattg

SEQ ID NO: 149355 - DNA, 25 bp, Artificial
  probe
  misc_feature (1)..(25): SEQ ID NO: 2683; WAN024D9V_at; Start 124; Stop 148
tcagatacttttaactcatgggact

SEQ ID NO: 149356 - DNA, 25 bp, Artificial
  probe
  misc_feature (1)..(25): SEQ ID NO: 2683; WAN024D9V_at; Start 24; Stop 48
cggcaaactcatcccagaacaagga

SEQ ID NO: 149357 - DNA, 25 bp, Artificial
  probe
  misc_feature (1)..(25): SEQ ID NO: 2683; WAN024D9V_at; Start 12; Stop 36
ggtcgataaggacggcaaactcatc

SEQ ID NO: 149358 - DNA, 25 bp, Artificial
  probe
  misc_feature (1)..(25): SEQ ID NO: 2683; WAN024D9V_at; Start 127; Stop 151
gatacttttaactcatgggactacc

SEQ ID NO: 149359 - DNA, 25 bp, Artificial
  probe
  misc_feature (1)..(25): SEQ ID NO: 2683; WAN024D9V_at; Start 46; Stop 70
ggaggagcacgttcaacttcaccag

SEQ ID NO: 149360 - DNA, 25 bp, Artificial
  probe
  misc_feature (1)..(25): SEQ ID NO: 2683; WAN024D9V_at; Start 76; Stop 100
gttgtgatccgtaaagggcttgaca

SEQ ID NO: 149361 - DNA, 25 bp, Artificial
  probe
  misc_feature (1)..(25): SEQ ID NO: 2683; WAN024D9V_at; Start 41; Stop 65
aacaaggaggagcacgttcaacttc

SEQ ID NO: 149362 - DNA, 25 bp, Artificial
  probe
  misc_feature (1)..(25): SEQ ID NO: 2683; WAN024D9V_at; Start 146; Stop 170
actaccgtcaggttgagtattatta

SEQ ID NO: 149363 - DNA, 25 bp, Artificial
  probe
  misc_feature (1)..(25): SEQ ID NO: 2683; WAN024D9V_at; Start 26; Stop 50
gcaaactcatcccagaacaaggagg

SEQ ID NO: 149364 - DNA, 25 bp, Artificial
  probe
  misc_feature (1)..(25): SEQ ID NO: 2683; WAN024D9V_at; Start 143; Stop 167
gggactaccgtcaggttgagtatta

SEQ ID NO: 149365 - DNA, 25 bp, Artificial
  probe
  misc_feature (1)..(25): SEQ ID NO: 2683; WAN024D9V_at; Start 74; Stop 98
cagttgtgatccgtaaagggcttga

SEQ ID NO: 149366 - DNA, 25 bp, Artificial
  probe
  misc_feature (1)..(25): SEQ ID NO: 2683; WAN024D9V_at; Start 43; Stop 67
caaggaggagcacgttcaacttcac

SEQ ID NO: 149367 - DNA, 25 bp, Artificial
  probe
  misc_feature (1)..(25): SEQ ID NO: 2683; WAN024D9V_at; Start 133; Stop 157
tttaactcatgggactaccgtcagg

SEQ ID NO: 149368 - DNA, 25 bp, Artificial
  probe
  misc_feature (1)..(25): SEQ ID NO: 2683; WAN024D9V_at; Start 128; Stop 152
atacttttaactcatgggactaccg

SEQ ID NO: 149369 - DNA, 25 bp, Artificial
  probe
  misc_feature (1)..(25): SEQ ID NO: 2683; WAN024D9V_at; Start 137; Stop 161
actcatgggactaccgtcaggttga

SEQ ID NO: 149370 - DNA, 25 bp, Artificial
  probe
  misc_feature (1)..(25): SEQ ID NO: 2683; WAN024D9V_at; Start 116; Stop 140
tgcacctgtcagatacttttaactc

SEQ ID NO: 149371 - DNA, 25 bp, Artificial
  probe
  misc_feature (1)..(25): SEQ ID NO: 2683; WAN024D9V_at; Start 27; Stop 51
caaactcatcccagaacaaggagga

SEQ ID NO: 149372 - DNA, 25 bp, Artificial
  probe
  misc_feature (1)..(25): SEQ ID NO: 2683; WAN024D9V_at; Start 9; Stop 33
tatggtcgataaggacggcaaactc

SEQ ID NO: 149373 - DNA, 25 bp, Artificial
  probe
  misc_feature (1)..(25): SEQ ID NO: 2683; WAN024D9V_at; Start 36; Stop 60
cccagaacaaggaggagcacgttca

SEQ ID NO: 149374 - DNA, 25 bp, Artificial
  probe
  misc_feature (1)..(25): SEQ ID NO: 2683; WAN024D9V_at; Start 7; Stop 31
tctatggtcgataaggacggcaaac

SEQ ID NO: 149375 - DNA, 25 bp, Artificial
  probe
  misc_feature (1)..(25): SEQ ID NO: 2683; WAN024D9V_at; Start 131; Stop 155
cttttaactcatgggactaccgtca

SEQ ID NO: 149376 - DNA, 25 bp, Artificial
  probe
  misc_feature (1)..(25): SEQ ID NO: 2683; WAN024D9V_at; Start 47; Stop 71
gaggagcacgttcaacttcaccagc

SEQ ID NO: 149377 - DNA, 25 bp, Artificial
  probe
  misc_feature (1)..(25): SEQ ID NO: 2683; WAN024D9V_at; Start 33; Stop 57
catcccagaacaaggaggagcacgt

SEQ ID NO: 149378 - DNA, 25 bp, Artificial
  probe
  misc_feature (1)..(25): SEQ ID NO: 2683; WAN024D9V_at; Start 38; Stop 62
cagaacaaggaggagcacgttcaac

SEQ ID NO: 149379 - DNA, 25 bp, Artificial
  probe
  misc_feature (1)..(25): SEQ ID NO: 2683; WAN024D9V_at; Start 18; Stop 42
taaggacggcaaactcatcccagaa

SEQ ID NO: 149380 - DNA, 25 bp, Artificial
  probe
  misc_feature (1)..(25): SEQ ID NO: 2683; WAN024D9V_at; Start 135; Stop 159
taactcatgggactaccgtcaggtt

SEQ ID NO: 149381 - DNA, 25 bp, Artificial
  probe
  misc_feature (1)..(25): SEQ ID NO: 2683; WAN024D9V_at; Start 140; Stop 164
catgggactaccgtcaggttgagta

SEQ ID NO: 149382 - DNA, 25 bp, Artificial
  probe
  misc_feature (1)..(25): SEQ ID NO: 2683; WAN024D9V_at; Start 122; Stop 146
tgtcagatacttttaactcatggga

SEQ ID NO: 149383 - DNA, 25 bp, Artificial
  probe
  misc_feature (1)..(25): SEQ ID NO: 2683; WAN024D9V_at; Start 32; Stop 56
tcatcccagaacaaggaggagcacg

SEQ ID NO: 149384 - DNA, 25 bp, Artificial
  probe
  misc_feature (1)..(25): SEQ ID NO: 2683; WAN024D9V_at; Start 22; Stop 46
gacggcaaactcatcccagaacaag

SEQ ID NO: 149385 - DNA, 25 bp, Artificial
  probe
  misc_feature (1)..(25): SEQ ID NO: 2429; WAN024D9W_at; Start 187; Stop 211
caggaagatgagtataccattactt

SEQ ID NO: 149386 - DNA, 25 bp, Artificial
  probe
  misc_feature (1)..(25): SEQ ID NO: 2429; WAN024D9W_at; Start 92; Stop 116
aagctgcgcgtgatcgtggtatcaa

SEQ ID NO: 149387 - DNA, 25 bp, Artificial
  probe
  misc_feature (1)..(25): SEQ ID NO: 2429; WAN024D9W_at; Start 526; Stop 550
caatatgaaatctttaaatcacgtg

SEQ ID NO: 149388 - DNA, 25 bp, Artificial
  probe
  misc_feature (1)..(25): SEQ ID NO: 2429; WAN024D9W_at; Start 54; Stop 78
tgataaaaggctgacggatcgtacc

SEQ ID NO: 149389 - DNA, 25 bp, Artificial
  probe
  misc_feature (1)..(25): SEQ ID NO: 2429; WAN024D9W_at; Start 64; Stop 88
ctgacggatcgtaccaaggaaacct

SEQ ID NO: 149390 - DNA, 25 bp, Artificial
  probe
  misc_feature (1)..(25): SEQ ID NO: 2429; WAN024D9W_at; Start 45; Stop 69
gctgactactgataaaaggctgacg

SEQ ID NO: 149391 - DNA, 25 bp, Artificial
  probe
  misc_feature (1)..(25): SEQ ID NO: 2429; WAN024D9W_at; Start 799; Stop 823
tatgtgctaaaggagaactaactaa

SEQ ID NO: 149392 - DNA, 25 bp, Artificial
  probe
  misc_feature (1)..(25): SEQ ID NO: 2429; WAN024D9W_at; Start 772; Stop 796
gaagctgtcgcctgggctatcgaag

SEQ ID NO: 149393 - DNA, 25 bp, Artificial
  probe
  misc_feature (1)..(25): SEQ ID NO: 2429; WAN024D9W_at; Start 539; Stop 563
ttaaatcacgtgaaatgttgctaga

SEQ ID NO: 149394 - DNA, 25 bp, Artificial
  probe
  misc_feature (1)..(25): SEQ ID NO: 2429; WAN024D9W_at; Start 34; Stop 58
gacgggaccttgctgactactgata

SEQ ID NO: 149395 - DNA, 25 bp, Artificial
  probe
  misc_feature (1)..(25): SEQ ID NO: 2429; WAN024D9W_at; Start 113; Stop 137
tcaaggtcgtattgacaactggtcg

SEQ ID NO: 149396 - DNA, 25 bp, Artificial
  probe
  misc_feature (1)..(25): SEQ ID NO: 2429; WAN024D9W_at; Start 23; Stop 47
cattggacttggacgggaccttgct

SEQ ID NO: 149397 - DNA, 25 bp, Artificial
  probe
  misc_feature (1)..(25): SEQ ID NO: 2429; WAN024D9W_at; Start 358; Stop 382
caatcggaccaagaaagtctttatg

SEQ ID NO: 149398 - DNA, 25 bp, Artificial
  probe
  misc_feature (1)..(25): SEQ ID NO: 2429; WAN024D9W_at; Start 474; Stop 498
tcaagaacccttggatgcagccatt

SEQ ID NO: 149399 - DNA, 25 bp, Artificial
  probe
  misc_feature (1)..(25): SEQ ID NO: 2429; WAN024D9W_at; Start 28; Stop 52
gacttggacgggaccttgctgacta

SEQ ID NO: 149400 - DNA, 25 bp, Artificial
  probe
  misc_feature (1)..(25): SEQ ID NO: 2429; WAN024D9W_at; Start 587; Stop 611
aagcaacaggtttggcaaaactaat

SEQ ID NO: 149401 - DNA, 25 bp, Artificial
  probe
  misc_feature (1)..(25): SEQ ID NO: 2429; WAN024D9W_at; Start 379; Stop 403
tatgccaaattcaatccagctttga

SEQ ID NO: 149402 - DNA, 25 bp, Artificial
  probe
  misc_feature (1)..(25): SEQ ID NO: 2429; WAN024D9W_at; Start 125; Stop 149
tgacaactggtcgtcccttaaaagc

SEQ ID NO: 149403 - DNA, 25 bp, Artificial
  probe
  misc_feature (1)..(25): SEQ ID NO: 2429; WAN024D9W_at; Start 367; Stop 391
caagaaagtctttatgccaaattca

SEQ ID NO: 149404 - DNA, 25 bp, Artificial
  probe
  misc_feature (1)..(25): SEQ ID NO: 2429; WAN024D9W_at; Start 263; Stop 287
tcttttcatatgatgatgtggcacg

SEQ ID NO: 149405 - DNA, 25 bp, Artificial
  probe
  misc_feature (1)..(25): SEQ ID NO: 2429; WAN024D9W_at; Start 466; Stop 490
gcctttgctcaagaacccttggatg

SEQ ID NO: 149406 - DNA, 25 bp, Artificial
  probe
  misc_feature (1)..(25): SEQ ID NO: 2429; WAN024D9W_at; Start 792; Stop 816
cgaagaatatgtgctaaaggagaac

SEQ ID NO: 149407 - DNA, 25 bp, Artificial
  probe
  misc_feature (1)..(25): SEQ ID NO: 2429; WAN024D9W_at; Start 180; Stop 204
tgacggtcaggaagatgagtatacc

SEQ ID NO: 149408 - DNA, 25 bp, Artificial
  probe
  misc_feature (1)..(25): SEQ ID NO: 2429; WAN024D9W_at; Start 782; Stop 806
cctgggctatcgaagaatatgtgct

SEQ ID NO: 149409 - DNA, 25 bp, Artificial
  probe
  misc_feature (1)..(25): SEQ ID NO: 2429; WAN024D9W_at; Start 99; Stop 123
gcgtgatcgtggtatcaaggtcgta

SEQ ID NO: 149410 - DNA, 25 bp, Artificial
  probe
  misc_feature (1)..(25): SEQ ID NO: 2429; WAN024D9W_at; Start 579; Stop 603
tgttcataaagcaacaggtttggca

SEQ ID NO: 149411 - DNA, 25 bp, Artificial
  probe
  misc_feature (1)..(25): SEQ ID NO: 2429; WAN024D9W_at; Start 511; Stop 535
ccagaattgtttgaccaatatgaaa

SEQ ID NO: 149412 - DNA, 25 bp, Artificial
  probe
  misc_feature (1)..(25): SEQ ID NO: 2429; WAN024D9W_at; Start 478; Stop 502
gaacccttggatgcagccattcaga

SEQ ID NO: 149413 - DNA, 25 bp, Artificial
  probe
  misc_feature (1)..(25): SEQ ID NO: 2429; WAN024D9W_at; Start 438; Stop 462
tcaaatgacctacaacaaatgcgtg

SEQ ID NO: 149414 - DNA, 25 bp, Artificial
  probe
  misc_feature (1)..(25): SEQ ID NO: 2429; WAN024D9W_at; Start 290; Stop 314
tgtatgaagaaacagagaaattatc

SEQ ID NO: 149415 - DNA, 25 bp, Artificial
  probe
  misc_feature (1)..(25): SEQ ID NO: 2429; WAN024D9W_at; Start 490; Stop 514
gcagccattcagaagatttctccag

SEQ ID NO: 149416 - DNA, 25 bp, Artificial
  probe
  misc_feature (1)..(25): SEQ ID NO: 2429; WAN024D9W_at; Start 302; Stop 326
cagagaaattatcactgcctcttga

SEQ ID NO: 149417 - DNA, 25 bp, Artificial
  probe
  misc_feature (1)..(25): SEQ ID NO: 2429; WAN024D9W_at; Start 504; Stop 528
gatttctccagaattgtttgaccaa

SEQ ID NO: 149418 - DNA, 25 bp, Artificial
  probe
  misc_feature (1)..(25): SEQ ID NO: 2429; WAN024D9W_at; Start 566; Stop 590
ggtcaccaaagaatgttcataaagc

SEQ ID NO: 149419 - DNA, 25 bp, Artificial
  probe
  misc_feature (1)..(25): SEQ ID NO: 1862; WAN024D9X_at; Start 286; Stop 310
aaattctggaacactggtattggga

SEQ ID NO: 149420 - DNA, 25 bp, Artificial
  probe
  misc_feature (1)..(25): SEQ ID NO: 1862; WAN024D9X_at; Start 294; Stop 318
gaacactggtattgggaaagttgct

SEQ ID NO: 149421 - DNA, 25 bp, Artificial
  probe
  misc_feature (1)..(25): SEQ ID NO: 1862; WAN024D9X_at; Start 28; Stop 52
gaagatttgatgtctttatgggaaa

SEQ ID NO: 149422 - DNA, 25 bp, Artificial
  probe
  misc_feature (1)..(25): SEQ ID NO: 1862; WAN024D9X_at; Start 215; Stop 239
ggactgtttcgcgttattgggtatg

SEQ ID NO: 149423 - DNA, 25 bp, Artificial
  probe
  misc_feature (1)..(25): SEQ ID NO: 1862; WAN024D9X_at; Start 245; Stop 269
aaacaagatggatggaattgggaat

SEQ ID NO: 149424 - DNA, 25 bp, Artificial
  probe
  misc_feature (1)..(25): SEQ ID NO: 1862; WAN024D9X_at; Start 181; Stop 205
cgccttggtatttttgttgatgata

SEQ ID NO: 149425 - DNA, 25 bp, Artificial
  probe
  misc_feature (1)..(25): SEQ ID NO: 1862; WAN024D9X_at; Start 428; Stop 452
gaatgaaaaaagaagctcatattcc

SEQ ID NO: 149426 - DNA, 25 bp, Artificial
  probe
  misc_feature (1)..(25): SEQ ID NO: 1862; WAN024D9X_at; Start 346; Stop 370
caggattacttggagttggagcatc

SEQ ID NO: 149427 - DNA, 25 bp, Artificial
  probe
  misc_feature (1)..(25): SEQ ID NO: 1862; WAN024D9X_at; Start 400; Stop 424
ggtatgatgaaacttgctgaaaaat

SEQ ID NO: 149428 - DNA, 25 bp, Artificial
  probe
  misc_feature (1)..(25): SEQ ID NO: 1862; WAN024D9X_at; Start 259; Stop 283
gaattgggaattggtatttatgata

SEQ ID NO: 149429 - DNA, 25 bp, Artificial
  probe
  misc_feature (1)..(25): SEQ ID NO: 1862; WAN024D9X_at; Start 140; Stop 164
tcgaactacaaaaatcagaatccat

SEQ ID NO: 149430 - DNA, 25 bp, Artificial
  probe
  misc_feature (1)..(25): SEQ ID NO: 1862; WAN024D9X_at; Start 279; Stop 303
tgataaaaaattctggaacactggt

SEQ ID NO: 149431 - DNA, 25 bp, Artificial
  probe
  misc_feature (1)..(25): SEQ ID NO: 1862; WAN024D9X_at; Start 40; Stop 64
tctttatgggaaatggcttattcac

SEQ ID NO: 149432 - DNA, 25 bp, Artificial
  probe
  misc_feature (1)..(25): SEQ ID NO: 1862; WAN024D9X_at; Start 492; Stop 516
taaatatggtattttgagagaagac

SEQ ID NO: 149433 - DNA, 25 bp, Artificial
  probe
  misc_feature (1)..(25): SEQ ID NO: 1862; WAN024D9X_at; Start 154; Stop 178
tcagaatccattttaagcaactcaa

SEQ ID NO: 149434 - DNA, 25 bp, Artificial
  probe
  misc_feature (1)..(25): SEQ ID NO: 1862; WAN024D9X_at; Start 133; Stop 157
aaagaattcgaactacaaaaatcag

SEQ ID NO: 149435 - DNA, 25 bp, Artificial
  probe
  misc_feature (1)..(25): SEQ ID NO: 1862; WAN024D9X_at; Start 318; Stop 342
tatgttgcagtggatagataggacg

SEQ ID NO: 149436 - DNA, 25 bp, Artificial
  probe
  misc_feature (1)..(25): SEQ ID NO: 1862; WAN024D9X_at; Start 325; Stop 349
cagtggatagataggacgtttcagg

SEQ ID NO: 149437 - DNA, 25 bp, Artificial
  probe
  misc_feature (1)..(25): SEQ ID NO: 1862; WAN024D9X_at; Start 164; Stop 188
ttttaagcaactcaaatcgccttgg

SEQ ID NO: 149438 - DNA, 25 bp, Artificial
  probe
  misc_feature (1)..(25): SEQ ID NO: 1862; WAN024D9X_at; Start 202; Stop 226
gataaactagttgggactgtttcgc

SEQ ID NO: 149439 - DNA, 25 bp, Artificial
  probe
  misc_feature (1)..(25): SEQ ID NO: 1862; WAN024D9X_at; Start 448; Stop 472
attccaaaagttcgttattatcaag

SEQ ID NO: 149440 - DNA, 25 bp, Artificial
  probe
  misc_feature (1)..(25): SEQ ID NO: 1862; WAN024D9X_at; Start 167; Stop 191
taagcaactcaaatcgccttggtat

SEQ ID NO: 149441 - DNA, 25 bp, Artificial
  probe
  misc_feature (1)..(25): SEQ ID NO: 1862; WAN024D9X_at; Start 93; Stop 117
tgctccctattatgatgattatcag

SEQ ID NO: 149442 - DNA, 25 bp, Artificial
  probe
  misc_feature (1)..(25): SEQ ID NO: 1862; WAN024D9X_at; Start 408; Stop 432
gaaacttgctgaaaaattaagaatg

SEQ ID NO: 149443 - DNA, 25 bp, Artificial
  probe
  misc_feature (1)..(25): SEQ ID NO: 1862; WAN024D9X_at; Start 334; Stop 358
gataggacgtttcaggattacttgg

SEQ ID NO: 149444 - DNA, 25 bp, Artificial
  probe
  misc_feature (1)..(25): SEQ ID NO: 1862; WAN024D9X_at; Start 501; Stop 525
tattttgagagaagactgggagaaa

SEQ ID NO: 149445 - DNA, 25 bp, Artificial
  probe
  misc_feature (1)..(25): SEQ ID NO: 1862; WAN024D9X_at; Start 516; Stop 540
ctgggagaaaataaatgacggttat

SEQ ID NO: 149446 - DNA, 25 bp, Artificial
  probe
  misc_feature (1)..(25): SEQ ID NO: 1862; WAN024D9X_at; Start 439; Stop 463
gaagctcatattccaaaagttcgtt

SEQ ID NO: 149447 - DNA, 25 bp, Artificial
  probe
  misc_feature (1)..(25): SEQ ID NO: 1862; WAN024D9X_at; Start 303; Stop 327
tattgggaaagttgctatgttgcag

SEQ ID NO: 149448 - DNA, 25 bp, Artificial
  probe
  misc_feature (1)..(25): SEQ ID NO: 1862; WAN024D9X_at; Start 195; Stop 219
tgttgatgataaactagttgggact

SEQ ID NO: 149449 - DNA, 25 bp, Artificial
  probe
  misc_feature (1)..(25): SEQ ID NO: 1862; WAN024D9X_at; Start 349; Stop 373
gattacttggagttggagcatctgg

SEQ ID NO: 149450 - DNA, 25 bp, Artificial
  probe
  misc_feature (1)..(25): SEQ ID NO: 1862; WAN024D9X_at; Start 512; Stop 536
aagactgggagaaaataaatgacgg

SEQ ID NO: 149451 - DNA, 25 bp, Artificial
  probe
  misc_feature (1)..(25): SEQ ID NO: 1862; WAN024D9X_at; Start 73; Stop 97
ccagtttggaaacagtatgatgctc

SEQ ID NO: 149452 - DNA, 25 bp, Artificial
  probe
  misc_feature (1)..(25): SEQ ID NO: 1862; WAN024D9X_at; Start 81; Stop 105
gaaacagtatgatgctccctattat

SEQ ID NO: 149453 - DNA, 25 bp, Artificial
  probe
  misc_feature (1)..(25): SEQ ID NO: 1427; WAN024D9Y_at; Start 159; Stop 183
tccagaaaatacattgattgcgatg

SEQ ID NO: 149454 - DNA, 25 bp, Artificial
  probe
  misc_feature (1)..(25): SEQ ID NO: 1427; WAN024D9Y_at; Start 90; Stop 114
tgaccttttgcctgcggaatttcag

SEQ ID NO: 149455 - DNA, 25 bp, Artificial
  probe
  misc_feature (1)..(25): SEQ ID NO: 1427; WAN024D9Y_at; Start 229; Stop 253
gatgagactattcaagctggtgaaa

SEQ ID NO: 149456 - DNA, 25 bp, Artificial
  probe
  misc_feature (1)..(25): SEQ ID NO: 1427; WAN024D9Y_at; Start 228; Stop 252
tgatgagactattcaagctggtgaa

SEQ ID NO: 149457 - DNA, 25 bp, Artificial
  probe
  misc_feature (1)..(25): SEQ ID NO: 1427; WAN024D9Y_at; Start 84; Stop 108
ttatgatgaccttttgcctgcggaa

SEQ ID NO: 149458 - DNA, 25 bp, Artificial
  probe
  misc_feature (1)..(25): SEQ ID NO: 1427; WAN024D9Y_at; Start 226; Stop 250
cgtgatgagactattcaagctggtg

SEQ ID NO: 149459 - DNA, 25 bp, Artificial
  probe
  misc_feature (1)..(25): SEQ ID NO: 1427; WAN024D9Y_at; Start 161; Stop 185
cagaaaatacattgattgcgatgga

SEQ ID NO: 149460 - DNA, 25 bp, Artificial
  probe
  misc_feature (1)..(25): SEQ ID NO: 1427; WAN024D9Y_at; Start 156; Stop 180
gtatccagaaaatacattgattgcg

SEQ ID NO: 149461 - DNA, 25 bp, Artificial
  probe
  misc_feature (1)..(25): SEQ ID NO: 1427; WAN024D9Y_at; Start 380; Stop 404
gcgccattgctttctatcaaaaaat

SEQ ID NO: 149462 - DNA, 25 bp, Artificial
  probe
  misc_feature (1)..(25): SEQ ID NO: 1427; WAN024D9Y_at; Start 413; Stop 437
cttttgatggacaagaaaaaatact

SEQ ID NO: 149463 - DNA, 25 bp, Artificial
  probe
  misc_feature (1)..(25): SEQ ID NO: 1427; WAN024D9Y_at; Start 237; Stop 261
tattcaagctggtgaaattattgct

SEQ ID NO: 149464 - DNA, 25 bp, Artificial
  probe
  misc_feature (1)..(25): SEQ ID NO: 1427; WAN024D9Y_at; Start 415; Stop 439
tttgatggacaagaaaaaatacttg

SEQ ID NO: 149465 - DNA, 25 bp, Artificial
  probe
  misc_feature (1)..(25): SEQ ID NO: 1427; WAN024D9Y_at; Start 225; Stop 249
tcgtgatgagactattcaagctggt

SEQ ID NO: 149466 - DNA, 25 bp, Artificial
  probe
  misc_feature (1)..(25): SEQ ID NO: 1427; WAN024D9Y_at; Start 337; Stop 361
catttttctgaaattttcttatggg

SEQ ID NO: 149467 - DNA, 25 bp, Artificial
  probe
  misc_feature (1)..(25): SEQ ID NO: 1427; WAN024D9Y_at; Start 378; Stop 402
gcgcgccattgctttctatcaaaaa

SEQ ID NO: 149468 - DNA, 25 bp, Artificial
  probe
  misc_feature (1)..(25): SEQ ID NO: 1427; WAN024D9Y_at; Start 239; Stop 263
ttcaagctggtgaaattattgcttt

SEQ ID NO: 149469 - DNA, 25 bp, Artificial
  probe
  misc_feature (1)..(25): SEQ ID NO: 1427; WAN024D9Y_at; Start 431; Stop 455
aaatacttgaacttggaaagcctat

SEQ ID NO: 149470 - DNA, 25 bp, Artificial
  probe
  misc_feature (1)..(25): SEQ ID NO: 1427; WAN024D9Y_at; Start 91; Stop 115
gaccttttgcctgcggaatttcagg

SEQ ID NO: 149471 - DNA, 25 bp, Artificial
  probe
  misc_feature (1)..(25): SEQ ID NO: 1427; WAN024D9Y_at; Start 436; Stop 460
cttgaacttggaaagcctataaagg

SEQ ID NO: 149472 - DNA, 25 bp, Artificial
  probe
  misc_feature (1)..(25): SEQ ID NO: 1427; WAN024D9Y_at; Start 164; Stop 188
aaaatacattgattgcgatggatgg

SEQ ID NO: 149473 - DNA, 25 bp, Artificial
  probe
  misc_feature (1)..(25): SEQ ID NO: 1427; WAN024D9Y_at; Start 255; Stop 279
tattgctttatatgttttaaaagac

SEQ ID NO: 149474 - DNA, 25 bp, Artificial
  probe
  misc_feature (1)..(25): SEQ ID NO: 1427; WAN024D9Y_at; Start 85; Stop 109
tatgatgaccttttgcctgcggaat

SEQ ID NO: 149475 - DNA, 25 bp, Artificial
  probe
  misc_feature (1)..(25): SEQ ID NO: 1427; WAN024D9Y_at; Start 87; Stop 111
tgatgaccttttgcctgcggaattt

SEQ ID NO: 149476 - DNA, 25 bp, Artificial
  probe
  misc_feature (1)..(25): SEQ ID NO: 1427; WAN024D9Y_at; Start 434; Stop 458
tacttgaacttggaaagcctataaa

SEQ ID NO: 149477 - DNA, 25 bp, Artificial
  probe
  misc_feature (1)..(25): SEQ ID NO: 1427; WAN024D9Y_at; Start 244; Stop 268
gctggtgaaattattgctttatatg

SEQ ID NO: 149478 - DNA, 25 bp, Artificial
  probe
  misc_feature (1)..(25): SEQ ID NO: 1427; WAN024D9Y_at; Start 438; Stop 462
tgaacttggaaagcctataaaggaa

SEQ ID NO: 149479 - DNA, 25 bp, Artificial
  probe
  misc_feature (1)..(25): SEQ ID NO: 1427; WAN024D9Y_at; Start 143; Stop 167
tctttagtcaaaagtatccagaaaa

SEQ ID NO: 149480 - DNA, 25 bp, Artificial
  probe
  misc_feature (1)..(25): SEQ ID NO: 1427; WAN024D9Y_at; Start 232; Stop 256
gagactattcaagctggtgaaatta

SEQ ID NO: 149481 - DNA, 25 bp, Artificial
  probe
  misc_feature (1)..(25): SEQ ID NO: 1427; WAN024D9Y_at; Start 344; Stop 368
ctgaaattttcttatgggtattgaa

SEQ ID NO: 149482 - DNA, 25 bp, Artificial
  probe
  misc_feature (1)..(25): SEQ ID NO: 1427; WAN024D9Y_at; Start 418; Stop 442
gatggacaagaaaaaatacttgaac

SEQ ID NO: 149483 - DNA, 25 bp, Artificial
  probe
  misc_feature (1)..(25): SEQ ID NO: 1427; WAN024D9Y_at; Start 83; Stop 107
cttatgatgaccttttgcctgcgga

SEQ ID NO: 149484 - DNA, 25 bp, Artificial
  probe
  misc_feature (1)..(25): SEQ ID NO: 1427; WAN024D9Y_at; Start 377; Stop 401
agcgcgccattgctttctatcaaaa

SEQ ID NO: 149485 - DNA, 25 bp, Artificial
  probe
  misc_feature (1)..(25): SEQ ID NO: 1427; WAN024D9Y_at; Start 375; Stop 399
caagcgcgccattgctttctatcaa

SEQ ID NO: 149486 - DNA, 25 bp, Artificial
  probe
  misc_feature (1)..(25): SEQ ID NO: 1427; WAN024D9Y_at; Start 147; Stop 171
tagtcaaaagtatccagaaaataca

SEQ ID NO: 149487 - DNA, 25 bp, Artificial
  probe
  misc_feature (1)..(25): SEQ ID NO: 2891; WAN024D9Z_at; Start 388; Stop 412
gaaatgatggaagctcccgacaagt

SEQ ID NO: 149488 - DNA, 25 bp, Artificial
  probe
  misc_feature (1)..(25): SEQ ID NO: 2891; WAN024D9Z_at; Start 356; Stop 380
taaatctggcctatgatatgctacc

SEQ ID NO: 149489 - DNA, 25 bp, Artificial
  probe
  misc_feature (1)..(25): SEQ ID NO: 2891; WAN024D9Z_at; Start 157; Stop 181
gagtctgtcattcgtgaaatctacg

SEQ ID NO: 149490 - DNA, 25 bp, Artificial
  probe
  misc_feature (1)..(25): SEQ ID NO: 2891; WAN024D9Z_at; Start 380; Stop 404
cattgatggaaatgatggaagctcc

SEQ ID NO: 149491 - DNA, 25 bp, Artificial
  probe
  misc_feature (1)..(25): SEQ ID NO: 2891; WAN024D9Z_at; Start 103; Stop 127
tggtctggttatgcctttcctggag

SEQ ID NO: 149492 - DNA, 25 bp, Artificial
  probe
  misc_feature (1)..(25): SEQ ID NO: 2891; WAN024D9Z_at; Start 225; Stop 249
taaaaattggccactagatacaggt

SEQ ID NO: 149493 - DNA, 25 bp, Artificial
  probe
  misc_feature (1)..(25): SEQ ID NO: 2891; WAN024D9Z_at; Start 236; Stop 260
cactagatacaggtgggcgctatat

SEQ ID NO: 149494 - DNA, 25 bp, Artificial
  probe
  misc_feature (1)..(25): SEQ ID NO: 2891; WAN024D9Z_at; Start 45; Stop 69
tgaagacctcgaaactcagcgcgtg

SEQ ID NO: 149495 - DNA, 25 bp, Artificial
  probe
  misc_feature (1)..(25): SEQ ID NO: 2891; WAN024D9Z_at; Start 365; Stop 389
cctatgatatgctaccattgatgga

SEQ ID NO: 149496 - DNA, 25 bp, Artificial
  probe
  misc_feature (1)..(25): SEQ ID NO: 2891; WAN024D9Z_at; Start 395; Stop 419
tggaagctcccgacaagtcagagtt

SEQ ID NO: 149497 - DNA, 25 bp, Artificial
  probe
  misc_feature (1)..(25): SEQ ID NO: 2891; WAN024D9Z_at; Start 145; Stop 169
gaggcttttgcggagtctgtcattc

SEQ ID NO: 149498 - DNA, 25 bp, Artificial
  probe
  misc_feature (1)..(25): SEQ ID NO: 2891; WAN024D9Z_at; Start 305; Stop 329
cttcagaagagggagaagtttcttg

SEQ ID NO: 149499 - DNA, 25 bp, Artificial
  probe
  misc_feature (1)..(25): SEQ ID NO: 2891; WAN024D9Z_at; Start 137; Stop 161
aaaatgatgaggcttttgcggagtc

SEQ ID NO: 149500 - DNA, 25 bp, Artificial
  probe
  misc_feature (1)..(25): SEQ ID NO: 2891; WAN024D9Z_at; Start 268; Stop 292
tgttataaggcgactgagttctctg

SEQ ID NO: 149501 - DNA, 25 bp, Artificial
  probe
  misc_feature (1)..(25): SEQ ID NO: 2891; WAN024D9Z_at; Start 114; Stop 138
tgcctttcctggaggtcatgtagaa

SEQ ID NO: 149502 - DNA, 25 bp, Artificial
  probe
  misc_feature (1)..(25): SEQ ID NO: 2891; WAN024D9Z_at; Start 332; Stop 356
tgcaaaaagaccagattccaaactt

SEQ ID NO: 149503 - DNA, 25 bp, Artificial
  probe
  misc_feature (1)..(25): SEQ ID NO: 2891; WAN024D9Z_at; Start 178; Stop 202
tacgaagaaacagggttgactatcc

SEQ ID NO: 149504 - DNA, 25 bp, Artificial
  probe
  misc_feature (1)..(25): SEQ ID NO: 2891; WAN024D9Z_at; Start 437; Stop 461
cagaagacgattgggaaaagaaaat

SEQ ID NO: 149505 - DNA, 25 bp, Artificial
  probe
  misc_feature (1)..(25): SEQ ID NO: 2891; WAN024D9Z_at; Start 427; Stop 451
cctcgccgtacagaagacgattggg

SEQ ID NO: 149506 - DNA, 25 bp, Artificial
  probe
  misc_feature (1)..(25): SEQ ID NO: 2891; WAN024D9Z_at; Start 278; Stop 302
cgactgagttctctggtacccttca

SEQ ID NO: 149507 - DNA, 25 bp, Artificial
  probe
  misc_feature (1)..(25): SEQ ID NO: 2891; WAN024D9Z_at; Start 121; Stop 145
cctggaggtcatgtagaaaatgatg

SEQ ID NO: 149508 - DNA, 25 bp, Artificial
  probe
  misc_feature (1)..(25): SEQ ID NO: 2891; WAN024D9Z_at; Start 70; Stop 94
gtgatgcagtatcgcgcccctgaaa

SEQ ID NO: 149509 - DNA, 25 bp, Artificial
  probe
  misc_feature (1)..(25): SEQ ID NO: 2891; WAN024D9Z_at; Start 198; Stop 222
tatccaaaatcctcaacttgtcggc

SEQ ID NO: 149510 - DNA, 25 bp, Artificial
  probe
  misc_feature (1)..(25): SEQ ID NO: 2891; WAN024D9Z_at; Start 326; Stop 350
cttgggtgcaaaaagaccagattcc

SEQ ID NO: 149511 - DNA, 25 bp, Artificial
  probe
  misc_feature (1)..(25): SEQ ID NO: 2891; WAN024D9Z_at; Start 345; Stop 369
gattccaaacttaaatctggcctat

SEQ ID NO: 149512 - DNA, 25 bp, Artificial
  probe
  misc_feature (1)..(25): SEQ ID NO: 2891; WAN024D9Z_at; Start 188; Stop 212
cagggttgactatccaaaatcctca

SEQ ID NO: 149513 - DNA, 25 bp, Artificial
  probe
  misc_feature (1)..(25): SEQ ID NO: 2891; WAN024D9Z_at; Start 211; Stop 235
caacttgtcggcattaaaaattggc

SEQ ID NO: 149514 - DNA, 25 bp, Artificial
  probe
  misc_feature (1)..(25): SEQ ID NO: 2891; WAN024D9Z_at; Start 94; Stop 118
aacaatcgctggtctggttatgcct

SEQ ID NO: 149515 - DNA, 25 bp, Artificial
  probe
  misc_feature (1)..(25): SEQ ID NO: 2891; WAN024D9Z_at; Start 55; Stop 79
gaaactcagcgcgtggtgatgcagt

SEQ ID NO: 149516 - DNA, 25 bp, Artificial
  probe
  misc_feature (1)..(25): SEQ ID NO: 2891; WAN024D9Z_at; Start 400; Stop 424
gctcccgacaagtcagagtttttct

SEQ ID NO: 149517 - DNA, 25 bp, Artificial
  probe
  misc_feature (1)..(25): SEQ ID NO: 2891; WAN024D9Z_at; Start 321; Stop 345
agtttcttgggtgcaaaaagaccag

SEQ ID NO: 149518 - DNA, 25 bp, Artificial
  probe
  misc_feature (1)..(25): SEQ ID NO: 2891; WAN024D9Z_at; Start 37; Stop 61
tgtctgattgaagacctcgaaactc

SEQ ID NO: 149519 - DNA, 25 bp, Artificial
  probe
  misc_feature (1)..(25): SEQ ID NO: 2891; WAN024D9Z_at; Start 171; Stop 195
tgaaatctacgaagaaacagggttg

SEQ ID NO: 149520 - DNA, 25 bp, Artificial
  probe
  misc_feature (1)..(25): SEQ ID NO: 2891; WAN024D9Z_at; Start 85; Stop 109
gcccctgaaaacaatcgctggtctg

SEQ ID NO: 149521 - DNA, 25 bp, Artificial
  probe
  misc_feature (1)..(25): SEQ ID NO: 1307; WAN024DA2_at; Start 60; Stop 84
caatggccaaagattagctgagcac

SEQ ID NO: 149522 - DNA, 25 bp, Artificial
  probe
  misc_feature (1)..(25): SEQ ID NO: 1307; WAN024DA2_at; Start 379; Stop 403
gttgaacgttctgactttaagccaa

SEQ ID NO: 149523 - DNA, 25 bp, Artificial
  probe
  misc_feature (1)..(25): SEQ ID NO: 1307; WAN024DA2_at; Start 157; Stop 181
accaatcgtggttatatctataaag

SEQ ID NO: 149524 - DNA, 25 bp, Artificial
  probe
  misc_feature (1)..(25): SEQ ID NO: 1307; WAN024DA2_at; Start 259; Stop 283
gctatcgtagataatggtggtcgcg

SEQ ID NO: 149525 - DNA, 25 bp, Artificial
  probe
  misc_feature (1)..(25): SEQ ID NO: 1307; WAN024DA2_at; Start 144; Stop 168
tccaattctatctaccaatcgtggt

SEQ ID NO: 149526 - DNA, 25 bp, Artificial
  probe
  misc_feature (1)..(25): SEQ ID NO: 1307; WAN024DA2_at; Start 313; Stop 337
tatggagagattgaaaccttactaa

SEQ ID NO: 149527 - DNA, 25 bp, Artificial
  probe
  misc_feature (1)..(25): SEQ ID NO: 1307; WAN024DA2_at; Start 205; Stop 229
cacaaattatttaaggtcaagcatg

SEQ ID NO: 149528 - DNA, 25 bp, Artificial
  probe
  misc_feature (1)..(25): SEQ ID NO: 1307; WAN024DA2_at; Start 112; Stop 136
caagatattgcaattttaagagctg

SEQ ID NO: 149529 - DNA, 25 bp, Artificial
  probe
  misc_feature (1)..(25): SEQ ID NO: 1307; WAN024DA2_at; Start 426; Stop 450
tcattatcacctagttgaagccgag

SEQ ID NO: 149530 - DNA, 25 bp, Artificial
  probe
  misc_feature (1)..(25): SEQ ID NO: 1307; WAN024DA2_at; Start 173; Stop 197
tctataaagatgctaatgcaaatac

SEQ ID NO: 149531 - DNA, 25 bp, Artificial
  probe
  misc_feature (1)..(25): SEQ ID NO: 1307; WAN024DA2_at; Start 78; Stop 102
tgagcactttcatgtcactcgacaa

SEQ ID NO: 149532 - DNA, 25 bp, Artificial
  probe
  misc_feature (1)..(25): SEQ ID NO: 1307; WAN024DA2_at; Start 332; Stop 356
tactaaaactgacctgtcgccgcga

SEQ ID NO: 149533 - DNA, 25 bp, Artificial
  probe
  misc_feature (1)..(25): SEQ ID NO: 1307; WAN024DA2_at; Start 319; Stop 343
gagattgaaaccttactaaaactga

SEQ ID NO: 149534 - DNA, 25 bp, Artificial
  probe
  misc_feature (1)..(25): SEQ ID NO: 1307; WAN024DA2_at; Start 238; Stop 262
gaaattggacgagaattacttgcta

SEQ ID NO: 149535 - DNA, 25 bp, Artificial
  probe
  misc_feature (1)..(25): SEQ ID NO: 1307; WAN024DA2_at; Start 216; Stop 240
taaggtcaagcatgaagttgaagaa

SEQ ID NO: 149536 - DNA, 25 bp, Artificial
  probe
  misc_feature (1)..(25): SEQ ID NO: 1307; WAN024DA2_at; Start 399; Stop 423
gccaatttctgagttaacagatggt

SEQ ID NO: 149537 - DNA, 25 bp, Artificial
  probe
  misc_feature (1)..(25): SEQ ID NO: 1307; WAN024DA2_at; Start 387; Stop 411
ttctgactttaagccaatttctgag

SEQ ID NO: 149538 - DNA, 25 bp, Artificial
  probe
  misc_feature (1)..(25): SEQ ID NO: 1307; WAN024DA2_at; Start 413; Stop 437
taacagatggtattcattatcacct

SEQ ID NO: 149539 - DNA, 25 bp, Artificial
  probe
  misc_feature (1)..(25): SEQ ID NO: 1307; WAN024DA2_at; Start 264; Stop 288
cgtagataatggtggtcgcgttcaa

SEQ ID NO: 149540 - DNA, 25 bp, Artificial
  probe
  misc_feature (1)..(25): SEQ ID NO: 1307; WAN024DA2_at; Start 369; Stop 393
tctagaacaagttgaacgttctgac

SEQ ID NO: 149541 - DNA, 25 bp, Artificial
  probe
  misc_feature (1)..(25): SEQ ID NO: 1307; WAN024DA2_at; Start 247; Stop 271
cgagaattacttgctatcgtagata

SEQ ID NO: 149542 - DNA, 25 bp, Artificial
  probe
  misc_feature (1)..(25): SEQ ID NO: 1307; WAN024DA2_at; Start 136; Stop 160
gatggatctccaattctatctacca

SEQ ID NO: 149543 - DNA, 25 bp, Artificial
  probe
  misc_feature (1)..(25): SEQ ID NO: 1307; WAN024DA2_at; Start 228; Stop 252
tgaagttgaagaaattggacgagaa

SEQ ID NO: 149544 - DNA, 25 bp, Artificial
  probe
  misc_feature (1)..(25): SEQ ID NO: 1307; WAN024DA2_at; Start 297; Stop 321
gattgatcatcctgtttatggagag

SEQ ID NO: 149545 - DNA, 25 bp, Artificial
  probe
  misc_feature (1)..(25): SEQ ID NO: 1307; WAN024DA2_at; Start 273; Stop 297
tggtggtcgcgttcaaaatatcttg

SEQ ID NO: 149546 - DNA, 25 bp, Artificial
  probe
  misc_feature (1)..(25): SEQ ID NO: 1307; WAN024DA2_at; Start 432; Stop 456
tcacctagttgaagccgagacacaa

SEQ ID NO: 149547 - DNA, 25 bp, Artificial
  probe
  misc_feature (1)..(25): SEQ ID NO: 1307; WAN024DA2_at; Start 74; Stop 98
tagctgagcactttcatgtcactcg

SEQ ID NO: 149548 - DNA, 25 bp, Artificial
  probe
  misc_feature (1)..(25): SEQ ID NO: 1307; WAN024DA2_at; Start 184; Stop 208
gctaatgcaaatacttatcatcaca

SEQ ID NO: 149549 - DNA, 25 bp, Artificial
  probe
  misc_feature (1)..(25): SEQ ID NO: 1307; WAN024DA2_at; Start 122; Stop 146
caattttaagagctgatggatctcc

SEQ ID NO: 149550 - DNA, 25 bp, Artificial
  probe
  misc_feature (1)..(25): SEQ ID NO: 1307; WAN024DA2_at; Start 100; Stop 124
caagttattgttcaagatattgcaa

SEQ ID NO: 149551 - DNA, 25 bp, Artificial
  probe
  misc_feature (1)..(25): SEQ ID NO: 1307; WAN024DA2_at; Start 91; Stop 115
gtcactcgacaagttattgttcaag

SEQ ID NO: 149552 - DNA, 25 bp, Artificial
  probe
  misc_feature (1)..(25): SEQ ID NO: 1307; WAN024DA2_at; Start 348; Stop 372
tcgccgcgacgtgcaacattttcta

SEQ ID NO: 149553 - DNA, 25 bp, Artificial
  probe
  misc_feature (1)..(25): SEQ ID NO: 1307; WAN024DA2_at; Start 51; Stop 75
taaagccctcaatggccaaagatta

SEQ ID NO: 149554 - DNA, 25 bp, Artificial
  probe
  misc_feature (1)..(25): SEQ ID NO: 1307; WAN024DA2_at; Start 286; Stop 310
caaaatatcttgattgatcatcctg

SEQ ID NO: 149555 - DNA, 25 bp, Artificial
  probe
  misc_feature (1)..(25): SEQ ID NO: 1308; WAN024DA3_at; Start 100; Stop 124
caggtcattgtgcaggacattgcaa

SEQ ID NO: 149556 - DNA, 25 bp, Artificial
  probe
  misc_feature (1)..(25): SEQ ID NO: 1308; WAN024DA3_at; Start 216; Stop 240
caaagtgaaacatgaagttgaagaa

SEQ ID NO: 149557 - DNA, 25 bp, Artificial
  probe
  misc_feature (1)..(25): SEQ ID NO: 1308; WAN024DA3_at; Start 205; Stop 229
cacaaacttttcaaagtgaaacatg

SEQ ID NO: 149558 - DNA, 25 bp, Artificial
  probe
  misc_feature (1)..(25): SEQ ID NO: 1308; WAN024DA3_at; Start 126; Stop 150
tttgagagccgatggcgctcctatc

SEQ ID NO: 149559 - DNA, 25 bp, Artificial
  probe
  misc_feature (1)..(25): SEQ ID NO: 1308; WAN024DA3_at; Start 59; Stop 83
ttaatggccaaagtttggcggaaca

SEQ ID NO: 149560 - DNA, 25 bp, Artificial
  probe
  misc_feature (1)..(25): SEQ ID NO: 1308; WAN024DA3_at; Start 348; Stop 372
tcgcagagatgtgcaacattttcta

SEQ ID NO: 149561 - DNA, 25 bp, Artificial
  probe
  misc_feature (1)..(25): SEQ ID NO: 1308; WAN024DA3_at; Start 313; Stop 337
tatggagaaattgaaaccttgctta

SEQ ID NO: 149562 - DNA, 25 bp, Artificial
  probe
  misc_feature (1)..(25): SEQ ID NO: 1308; WAN024DA3_at; Start 93; Stop 117
cacacgtcaggtcattgtgcaggac

SEQ ID NO: 149563 - DNA, 25 bp, Artificial
  probe
  misc_feature (1)..(25): SEQ ID NO: 1308; WAN024DA3_at; Start 278; Stop 302
ggcatgtccagaataccttgattga

SEQ ID NO: 149564 - DNA, 25 bp, Artificial
  probe
  misc_feature (1)..(25): SEQ ID NO: 1308; WAN024DA3_at; Start 288; Stop 312
gaataccttgattgaccatcccgtt

SEQ ID NO: 149565 - DNA, 25 bp, Artificial
  probe
  misc_feature (1)..(25): SEQ ID NO: 1308; WAN024DA3_at; Start 427; Stop 451
cattaccacctagtcgaagccgaaa

SEQ ID NO: 149566 - DNA, 25 bp, Artificial
  probe
  misc_feature (1)..(25): SEQ ID NO: 1308; WAN024DA3_at; Start 301; Stop 325
gaccatcccgtttatggagaaattg

SEQ ID NO: 149567 - DNA, 25 bp, Artificial
  probe
  misc_feature (1)..(25): SEQ ID NO: 1308; WAN024DA3_at; Start 432; Stop 456
ccacctagtcgaagccgaaacacaa

SEQ ID NO: 149568 - DNA, 25 bp, Artificial
  probe
  misc_feature (1)..(25): SEQ ID NO: 1308; WAN024DA3_at; Start 248; Stop 272
aggaactccttgctattgtcgataa

SEQ ID NO: 149569 - DNA, 25 bp, Artificial
  probe
  misc_feature (1)..(25): SEQ ID NO: 1308; WAN024DA3_at; Start 394; Stop 418
tttagacctctatctgaattgacag

SEQ ID NO: 149570 - DNA, 25 bp, Artificial
  probe
  misc_feature (1)..(25): SEQ ID NO: 1308; WAN024DA3_at; Start 343; Stop 367
tcttgtcgcagagatgtgcaacatt

SEQ ID NO: 149571 - DNA, 25 bp, Artificial
  probe
  misc_feature (1)..(25): SEQ ID NO: 1308; WAN024DA3_at; Start 67; Stop 91
caaagtttggcggaacattttcatg

SEQ ID NO: 149572 - DNA, 25 bp, Artificial
  probe
  misc_feature (1)..(25): SEQ ID NO: 1308; WAN024DA3_at; Start 131; Stop 155
gagccgatggcgctcctatcctatc

SEQ ID NO: 149573 - DNA, 25 bp, Artificial
  probe
  misc_feature (1)..(25): SEQ ID NO: 1308; WAN024DA3_at; Start 337; Stop 361
aaactgtcttgtcgcagagatgtgc

SEQ ID NO: 149574 - DNA, 25 bp, Artificial
  probe
  misc_feature (1)..(25): SEQ ID NO: 1308; WAN024DA3_at; Start 111; Stop 135
gcaggacattgcaattttgagagcc

SEQ ID NO: 149575 - DNA, 25 bp, Artificial
  probe
  misc_feature (1)..(25): SEQ ID NO: 1308; WAN024DA3_at; Start 256; Stop 280
cttgctattgtcgataatggtgggc

SEQ ID NO: 149576 - DNA, 25 bp, Artificial
  probe
  misc_feature (1)..(25): SEQ ID NO: 1308; WAN024DA3_at; Start 381; Stop 405
cgagcattctgactttagacctcta

SEQ ID NO: 149577 - DNA, 25 bp, Artificial
  probe
  misc_feature (1)..(25): SEQ ID NO: 1308; WAN024DA3_at; Start 233; Stop 257
ttgaagaaatcggtcaggaactcct

SEQ ID NO: 149578 - DNA, 25 bp, Artificial
  probe
  misc_feature (1)..(25): SEQ ID NO: 1308; WAN024DA3_at; Start 366; Stop 390
ttttctagaacaagtcgagcattct

SEQ ID NO: 149579 - DNA, 25 bp, Artificial
  probe
  misc_feature (1)..(25): SEQ ID NO: 1308; WAN024DA3_at; Start 159; Stop 183
caatcgtggctacatctataagcaa

SEQ ID NO: 149580 - DNA, 25 bp, Artificial
  probe
  misc_feature (1)..(25): SEQ ID NO: 1308; WAN024DA3_at; Start 173; Stop 197
tctataagcaaattgataccaatcc

SEQ ID NO: 149581 - DNA, 25 bp, Artificial
  probe
  misc_feature (1)..(25): SEQ ID NO: 1308; WAN024DA3_at; Start 421; Stop 445
ggcatccattaccacctagtcgaag

SEQ ID NO: 149582 - DNA, 25 bp, Artificial
  probe
  misc_feature (1)..(25): SEQ ID NO: 1308; WAN024DA3_at; Start 406; Stop 430
tctgaattgacagatggcatccatt

SEQ ID NO: 149583 - DNA, 25 bp, Artificial
  probe
  misc_feature (1)..(25): SEQ ID NO: 1308; WAN024DA3_at; Start 79; Stop 103
gaacattttcatgtcacacgtcagg

SEQ ID NO: 149584 - DNA, 25 bp, Artificial
  probe
  misc_feature (1)..(25): SEQ ID NO: 1308; WAN024DA3_at; Start 270; Stop 294
taatggtgggcatgtccagaatacc

SEQ ID NO: 149585 - DNA, 25 bp, Artificial
  probe
  misc_feature (1)..(25): SEQ ID NO: 1308; WAN024DA3_at; Start 147; Stop 171
tatcctatccaccaatcgtggctac

SEQ ID NO: 149586 - DNA, 25 bp, Artificial
  probe
  misc_feature (1)..(25): SEQ ID NO: 1308; WAN024DA3_at; Start 119; Stop 143
ttgcaattttgagagccgatggcgc

SEQ ID NO: 149587 - DNA, 25 bp, Artificial
  probe
  misc_feature (1)..(25): SEQ ID NO: 1308; WAN024DA3_at; Start 187; Stop 211
gataccaatccttatgttcacaaac

SEQ ID NO: 149588 - DNA, 25 bp, Artificial
  probe
  misc_feature (1)..(25): SEQ ID NO: 1308; WAN024DA3_at; Start 326; Stop 350
aaaccttgcttaaactgtcttgtcg

SEQ ID NO: 149589 - DNA, 25 bp, Artificial
  probe
  misc_feature (1)..(25): SEQ ID NO: 5745; WAN024DA4_at; Start 304; Stop 328
catatatcttttggtgctttaggag

SEQ ID NO: 149590 - DNA, 25 bp, Artificial
  probe
  misc_feature (1)..(25): SEQ ID NO: 5745; WAN024DA4_at; Start 152; Stop 176
ttccacctgcttcctatactttggg

SEQ ID NO: 149591 - DNA, 25 bp, Artificial
  probe
  misc_feature (1)..(25): SEQ ID NO: 5745; WAN024DA4_at; Start 292; Stop 316
cgggctttttcccatatatcttttg

SEQ ID NO: 149592 - DNA, 25 bp, Artificial
  probe
  misc_feature (1)..(25): SEQ ID NO: 5745; WAN024DA4_at; Start 357; Stop 381
cctagataaaccaaaatcttcctgg

SEQ ID NO: 149593 - DNA, 25 bp, Artificial
  probe
  misc_feature (1)..(25): SEQ ID NO: 5745; WAN024DA4_at; Start 532; Stop 556
gactatacattagcactagctgtct

SEQ ID NO: 149594 - DNA, 25 bp, Artificial
  probe
  misc_feature (1)..(25): SEQ ID NO: 5745; WAN024DA4_at; Start 81; Stop 105
tatgacaatgacagcccttttaacg

SEQ ID NO: 149595 - DNA, 25 bp, Artificial
  probe
  misc_feature (1)..(25): SEQ ID NO: 5745; WAN024DA4_at; Start 134; Stop 158
tgcctttcaagattgtcattccacc

SEQ ID NO: 149596 - DNA, 25 bp, Artificial
  probe
  misc_feature (1)..(25): SEQ ID NO: 5745; WAN024DA4_at; Start 261; Stop 285
gatggctggctatcccatggttatc

SEQ ID NO: 149597 - DNA, 25 bp, Artificial
  probe
  misc_feature (1)..(25): SEQ ID NO: 5745; WAN024DA4_at; Start 144; Stop 168
gattgtcattccacctgcttcctat

SEQ ID NO: 149598 - DNA, 25 bp, Artificial
  probe
  misc_feature (1)..(25): SEQ ID NO: 5745; WAN024DA4_at; Start 72; Stop 96
gacacaatttatgacaatgacagcc

SEQ ID NO: 149599 - DNA, 25 bp, Artificial
  probe
  misc_feature (1)..(25): SEQ ID NO: 5745; WAN024DA4_at; Start 403; Stop 427
gttgttcatgcccttgctgaagtat

SEQ ID NO: 149600 - DNA, 25 bp, Artificial
  probe
  misc_feature (1)..(25): SEQ ID NO: 5745; WAN024DA4_at; Start 29; Stop 53
tatatgcagttaaaaaggagattct

SEQ ID NO: 149601 - DNA, 25 bp, Artificial
  probe
  misc_feature (1)..(25): SEQ ID NO: 5745; WAN024DA4_at; Start 246; Stop 270
tagttttggatttttgatggctggc

SEQ ID NO: 149602 - DNA, 25 bp, Artificial
  probe
  misc_feature (1)..(25): SEQ ID NO: 5745; WAN024DA4_at; Start 14; Stop 38
tgtaccatactagtgtatatgcagt

SEQ ID NO: 149603 - DNA, 25 bp, Artificial
  probe
  misc_feature (1)..(25): SEQ ID NO: 5745; WAN024DA4_at; Start 43; Stop 67
aaggagattcttgtgaatacacgga

SEQ ID NO: 149604 - DNA, 25 bp, Artificial
  probe
  misc_feature (1)..(25): SEQ ID NO: 5745; WAN024DA4_at; Start 192; Stop 216
ttttatagccatgttcttgtcgccc

SEQ ID NO: 149605 - DNA, 25 bp, Artificial
  probe
  misc_feature (1)..(25): SEQ ID NO: 5745; WAN024DA4_at; Start 231; Stop 255
tgtcatcctagcctctagttttgga

SEQ ID NO: 149606 - DNA, 25 bp, Artificial
  probe
  misc_feature (1)..(25): SEQ ID NO: 5745; WAN024DA4_at; Start 212; Stop 236
cgcccttgatggcagtttttgtcat

SEQ ID NO: 149607 - DNA, 25 bp, Artificial
  probe
  misc_feature (1)..(25): SEQ ID NO: 5745; WAN024DA4_at; Start 4; Stop 28
tctggtttattgtaccatactagtg

SEQ ID NO: 149608 - DNA, 25 bp, Artificial
  probe
  misc_feature (1)..(25): SEQ ID NO: 5745; WAN024DA4_at; Start 102; Stop 126
aacggctattgcgattttgattcca

SEQ ID NO: 149609 - DNA, 25 bp, Artificial
  probe
  misc_feature (1)..(25): SEQ ID NO: 5745; WAN024DA4_at; Start 60; Stop 84
tacacggaaaaagacacaatttatg

SEQ ID NO: 149610 - DNA, 25 bp, Artificial
  probe
  misc_feature (1)..(25): SEQ ID NO: 5745; WAN024DA4_at; Start 224; Stop 248
cagtttttgtcatcctagcctctag

SEQ ID NO: 149611 - DNA, 25 bp, Artificial
  probe
  misc_feature (1)..(25): SEQ ID NO: 5745; WAN024DA4_at; Start 52; Stop 76
cttgtgaatacacggaaaaagacac

SEQ ID NO: 149612 - DNA, 25 bp, Artificial
  probe
  misc_feature (1)..(25): SEQ ID NO: 5745; WAN024DA4_at; Start 90; Stop 114
gacagcccttttaacggctattgcg

SEQ ID NO: 149613 - DNA, 25 bp, Artificial
  probe
  misc_feature (1)..(25): SEQ ID NO: 5745; WAN024DA4_at; Start 527; Stop 551
tggtagactatacattagcactagc

SEQ ID NO: 149614 - DNA, 25 bp, Artificial
  probe
  misc_feature (1)..(25): SEQ ID NO: 5745; WAN024DA4_at; Start 270; Stop 294
ctatcccatggttatcgtttttcgg

SEQ ID NO: 149615 - DNA, 25 bp, Artificial
  probe
  misc_feature (1)..(25): SEQ ID NO: 5745; WAN024DA4_at; Start 512; Stop 536
caattatccatagtatggtagacta

SEQ ID NO: 149616 - DNA, 25 bp, Artificial
  probe
  misc_feature (1)..(25): SEQ ID NO: 5745; WAN024DA4_at; Start 198; Stop 222
agccatgttcttgtcgcccttgatg

SEQ ID NO: 149617 - DNA, 25 bp, Artificial
  probe
  misc_feature (1)..(25): SEQ ID NO: 5745; WAN024DA4_at; Start 176; Stop 200
ggagccacatcgctatttttatagc

SEQ ID NO: 149618 - DNA, 25 bp, Artificial
  probe
  misc_feature (1)..(25): SEQ ID NO: 5745; WAN024DA4_at; Start 545; Stop 569
cactagctgtctataaagtgcttcg

SEQ ID NO: 149619 - DNA, 25 bp, Artificial
  probe
  misc_feature (1)..(25): SEQ ID NO: 5745; WAN024DA4_at; Start 319; Stop 343
gctttaggagctctttacctacaaa

SEQ ID NO: 149620 - DNA, 25 bp, Artificial
  probe
  misc_feature (1)..(25): SEQ ID NO: 5745; WAN024DA4_at; Start 555; Stop 579
ctataaagtgcttcgaaaacgccgt

SEQ ID NO: 149621 - DNA, 25 bp, Artificial
  probe
  misc_feature (1)..(25): SEQ ID NO: 5745; WAN024DA4_at; Start 395; Stop 419
ttttggctgttgttcatgcccttgc

SEQ ID NO: 149622 - DNA, 25 bp, Artificial
  probe
  misc_feature (1)..(25): SEQ ID NO: 5745; WAN024DA4_at; Start 120; Stop 144
gattccaattgttatgcctttcaag

SEQ ID NO: 149623 - DNA, 25 bp, Artificial
  probe
  misc_feature (1)..(25): SEQ ID NO: 635; WAN024DA5_at; Start 106; Stop 130
aaaccgaccattgttcatattcctg

SEQ ID NO: 149624 - DNA, 25 bp, Artificial
  probe
  misc_feature (1)..(25): SEQ ID NO: 635; WAN024DA5_at; Start 68; Stop 92
tgagctcacttatctttaacctttt

SEQ ID NO: 149625 - DNA, 25 bp, Artificial
  probe
  misc_feature (1)..(25): SEQ ID NO: 635; WAN024DA5_at; Start 448; Stop 472
ggaaatatccaacttcttctggcaa

SEQ ID NO: 149626 - DNA, 25 bp, Artificial
  probe
  misc_feature (1)..(25): SEQ ID NO: 635; WAN024DA5_at; Start 168; Stop 192
ggttacacttggatttttgatggga

SEQ ID NO: 149627 - DNA, 25 bp, Artificial
  probe
  misc_feature (1)..(25): SEQ ID NO: 635; WAN024DA5_at; Start 322; Stop 346
ccttacttagtctataaactgatga

SEQ ID NO: 149628 - DNA, 25 bp, Artificial
  probe
  misc_feature (1)..(25): SEQ ID NO: 635; WAN024DA5_at; Start 121; Stop 145
catattcctgtcattattgccagca

SEQ ID NO: 149629 - DNA, 25 bp, Artificial
  probe
  misc_feature (1)..(25): SEQ ID NO: 635; WAN024DA5_at; Start 394; Stop 418
aatactatctttgtccttggaggaa

SEQ ID NO: 149630 - DNA, 25 bp, Artificial
  probe
  misc_feature (1)..(25): SEQ ID NO: 635; WAN024DA5_at; Start 403; Stop 427
tttgtccttggaggaatcttcttcc

SEQ ID NO: 149631 - DNA, 25 bp, Artificial
  probe
  misc_feature (1)..(25): SEQ ID NO: 635; WAN024DA5_at; Start 265; Stop 289
ggaaacatctactcagctatcattg

SEQ ID NO: 149632 - DNA, 25 bp, Artificial
  probe
  misc_feature (1)..(25): SEQ ID NO: 635; WAN024DA5_at; Start 254; Stop 278
tcgtaccaaacggaaacatctactc

SEQ ID NO: 149633 - DNA, 25 bp, Artificial
  probe
  misc_feature (1)..(25): SEQ ID NO: 635; WAN024DA5_at; Start 222; Stop 246
gattctaccgacaagctacctcttc

SEQ ID NO: 149634 - DNA, 25 bp, Artificial
  probe
  misc_feature (1)..(25): SEQ ID NO: 635; WAN024DA5_at; Start 506; Stop 530
tcatttctgcaattctaaccctagc

SEQ ID NO: 149635 - DNA, 25 bp, Artificial
  probe
  misc_feature (1)..(25): SEQ ID NO: 635; WAN024DA5_at; Start 91; Stop 115
tttccatttccaatcaaaccgacca

SEQ ID NO: 149636 - DNA, 25 bp, Artificial
  probe
  misc_feature (1)..(25): SEQ ID NO: 635; WAN024DA5_at; Start 144; Stop 168
cattatttatggtccacgagttggg

SEQ ID NO: 149637 - DNA, 25 bp, Artificial
  probe
  misc_feature (1)..(25): SEQ ID NO: 635; WAN024DA5_at; Start 491; Stop 515
caattgctgaattggtcatttctgc

SEQ ID NO: 149638 - DNA, 25 bp, Artificial
  probe
  misc_feature (1)..(25): SEQ ID NO: 635; WAN024DA5_at; Start 183; Stop 207
tttgatgggattacttagcttgacg

SEQ ID NO: 149639 - DNA, 25 bp, Artificial
  probe
  misc_feature (1)..(25): SEQ ID NO: 635; WAN024DA5_at; Start 534; Stop 558
tgttccacgactacaaaccttgaaa

SEQ ID NO: 149640 - DNA, 25 bp, Artificial
  probe
  misc_feature (1)..(25): SEQ ID NO: 635; WAN024DA5_at; Start 213; Stop 237
cacgattacgattctaccgacaagc

SEQ ID NO: 149641 - DNA, 25 bp, Artificial
  probe
  misc_feature (1)..(25): SEQ ID NO: 635; WAN024DA5_at; Start 56; Stop 80
tgatacactttctgagctcacttat

SEQ ID NO: 149642 - DNA, 25 bp, Artificial
  probe
  misc_feature (1)..(25): SEQ ID NO: 635; WAN024DA5_at; Start 413; Stop 437
gaggaatcttcttcctatttggaaa

SEQ ID NO: 149643 - DNA, 25 bp, Artificial
  probe
  misc_feature (1)..(25): SEQ ID NO: 635; WAN024DA5_at; Start 379; Stop 403
cttggttccttgacaaatactatct

SEQ ID NO: 149644 - DNA, 25 bp, Artificial
  probe
  misc_feature (1)..(25): SEQ ID NO: 635; WAN024DA5_at; Start 31; Stop 55
gctatcttttttgctaccatgctcg

SEQ ID NO: 149645 - DNA, 25 bp, Artificial
  probe
  misc_feature (1)..(25): SEQ ID NO: 635; WAN024DA5_at; Start 198; Stop 222
tagcttgacggttaacacgattacg

SEQ ID NO: 149646 - DNA, 25 bp, Artificial
  probe
  misc_feature (1)..(25): SEQ ID NO: 635; WAN024DA5_at; Start 47; Stop 71
ccatgctcgtgatacactttctgag

SEQ ID NO: 149647 - DNA, 25 bp, Artificial
  probe
  misc_feature (1)..(25): SEQ ID NO: 635; WAN024DA5_at; Start 465; Stop 489
tctggcaaccgttatctcaacaaat

SEQ ID NO: 149648 - DNA, 25 bp, Artificial
  probe
  misc_feature (1)..(25): SEQ ID NO: 635; WAN024DA5_at; Start 11; Stop 35
gctctaatattgcacccattgctat

SEQ ID NO: 149649 - DNA, 25 bp, Artificial
  probe
  misc_feature (1)..(25): SEQ ID NO: 635; WAN024DA5_at; Start 138; Stop 162
tgccagcattatttatggtccacga

SEQ ID NO: 149650 - DNA, 25 bp, Artificial
  probe
  misc_feature (1)..(25): SEQ ID NO: 635; WAN024DA5_at; Start 3; Stop 27
gaaaaaacgctctaatattgcaccc

SEQ ID NO: 149651 - DNA, 25 bp, Artificial
  probe
  misc_feature (1)..(25): SEQ ID NO: 635; WAN024DA5_at; Start 350; Stop 374
acaagactggtctgattttagctgg

SEQ ID NO: 149652 - DNA, 25 bp, Artificial
  probe
  misc_feature (1)..(25): SEQ ID NO: 635; WAN024DA5_at; Start 453; Stop 477
tatccaacttcttctggcaaccgtt

SEQ ID NO: 149653 - DNA, 25 bp, Artificial
  probe
  misc_feature (1)..(25): SEQ ID NO: 635; WAN024DA5_at; Start 521; Stop 545
taaccctagccattgttccacgact

SEQ ID NO: 149654 - DNA, 25 bp, Artificial
  probe
  misc_feature (1)..(25): SEQ ID NO: 635; WAN024DA5_at; Start 339; Stop 363
actgatgaaaaacaagactggtctg

SEQ ID NO: 149655 - DNA, 25 bp, Artificial
  probe
  misc_feature (1)..(25): SEQ ID NO: 635; WAN024DA5_at; Start 39; Stop 63
ttttgctaccatgctcgtgatacac

SEQ ID NO: 149656 - DNA, 25 bp, Artificial
  probe
  misc_feature (1)..(25): SEQ ID NO: 635; WAN024DA5_at; Start 475; Stop 499
gttatctcaacaaattcaattgctg

SEQ ID NO: 149657 - DNA, 25 bp, Artificial
  probe
  misc_feature (1)..(25): SEQ ID NO: 7379; WAN024DA6_at; Start 20; Stop 44
tcattcttagaaaggaaaactatgg

SEQ ID NO: 149658 - DNA, 25 bp, Artificial
  probe
  misc_feature (1)..(25): SEQ ID NO: 7379; WAN024DA6_at; Start 23; Stop 47
ttcttagaaaggaaaactatggcaa

SEQ ID NO: 149659 - DNA, 25 bp, Artificial
  probe
  misc_feature (1)..(25): SEQ ID NO: 7379; WAN024DA6_at; Start 30; Stop 54
aaaggaaaactatggcaaacattct

SEQ ID NO: 149660 - DNA, 25 bp, Artificial
  probe
  misc_feature (1)..(25): SEQ ID NO: 7379; WAN024DA6_at; Start 17; Stop 41
ctatcattcttagaaaggaaaacta

SEQ ID NO: 149661 - DNA, 25 bp, Artificial
  probe
  misc_feature (1)..(25): SEQ ID NO: 7379; WAN024DA6_at; Start 27; Stop 51
tagaaaggaaaactatggcaaacat

SEQ ID NO: 149662 - DNA, 25 bp, Artificial
  probe
  misc_feature (1)..(25): SEQ ID NO: 7379; WAN024DA6_at; Start 19; Stop 43
atcattcttagaaaggaaaactatg

SEQ ID NO: 149663 - DNA, 25 bp, Artificial
  probe
  misc_feature (1)..(25): SEQ ID NO: 7379; WAN024DA6_at; Start 16; Stop 40
cctatcattcttagaaaggaaaact

SEQ ID NO: 149664 - DNA, 25 bp, Artificial
  probe
  misc_feature (1)..(25): SEQ ID NO: 7379; WAN024DA6_at; Start 15; Stop 39
gcctatcattcttagaaaggaaaac

SEQ ID NO: 149665 - DNA, 25 bp, Artificial
  probe
  misc_feature (1)..(25): SEQ ID NO: 7379; WAN024DA6_at; Start 14; Stop 38
agcctatcattcttagaaaggaaaa

SEQ ID NO: 149666 - DNA, 25 bp, Artificial
  probe
  misc_feature (1)..(25): SEQ ID NO: 7379; WAN024DA6_at; Start 31; Stop 55
aaggaaaactatggcaaacattctc

SEQ ID NO: 149667 - DNA, 25 bp, Artificial
  probe
  misc_feature (1)..(25): SEQ ID NO: 7379; WAN024DA6_at; Start 22; Stop 46
attcttagaaaggaaaactatggca

SEQ ID NO: 149668 - DNA, 25 bp, Artificial
  probe
  misc_feature (1)..(25): SEQ ID NO: 7379; WAN024DA6_at; Start 24; Stop 48
tcttagaaaggaaaactatggcaaa

SEQ ID NO: 149669 - DNA, 25 bp, Artificial
  probe
  misc_feature (1)..(25): SEQ ID NO: 7379; WAN024DA6_at; Start 29; Stop 53
gaaaggaaaactatggcaaacattc

SEQ ID NO: 149670 - DNA, 25 bp, Artificial
  probe
  misc_feature (1)..(25): SEQ ID NO: 7379; WAN024DA6_at; Start 26; Stop 50
ttagaaaggaaaactatggcaaaca

SEQ ID NO: 149671 - DNA, 25 bp, Artificial
  probe
  misc_feature (1)..(25): SEQ ID NO: 7379; WAN024DA6_at; Start 18; Stop 42
tatcattcttagaaaggaaaactat

SEQ ID NO: 149672 - DNA, 25 bp, Artificial
  probe
  misc_feature (1)..(25): SEQ ID NO: 7379; WAN024DA6_at; Start 21; Stop 45
cattcttagaaaggaaaactatggc

SEQ ID NO: 149673 - DNA, 25 bp, Artificial
  probe
  misc_feature (1)..(25): SEQ ID NO: 7379; WAN024DA6_at; Start 28; Stop 52
agaaaggaaaactatggcaaacatt

SEQ ID NO: 149674 - DNA, 25 bp, Artificial
  probe
  misc_feature (1)..(25): SEQ ID NO: 2387; WAN024DA7_at; Start 354; Stop 378
agctcctgctatgaatacaaaaatg

SEQ ID NO: 149675 - DNA, 25 bp, Artificial
  probe
  misc_feature (1)..(25): SEQ ID NO: 2387; WAN024DA7_at; Start 432; Stop 456
tcagctgattgctcctaaggaatcc

SEQ ID NO: 149676 - DNA, 25 bp, Artificial
  probe
  misc_feature (1)..(25): SEQ ID NO: 2387; WAN024DA7_at; Start 250; Stop 274
gtacctgcaactgctaacactattg

SEQ ID NO: 149677 - DNA, 25 bp, Artificial
  probe
  misc_feature (1)..(25): SEQ ID NO: 2387; WAN024DA7_at; Start 405; Stop 429
tctgaaaacattagaaacctacggc

SEQ ID NO: 149678 - DNA, 25 bp, Artificial
  probe
  misc_feature (1)..(25): SEQ ID NO: 2387; WAN024DA7_at; Start 447; Stop 471
taaggaatccctactagcttgtgga

SEQ ID NO: 149679 - DNA, 25 bp, Artificial
  probe
  misc_feature (1)..(25): SEQ ID NO: 2387; WAN024DA7_at; Start 96; Stop 120
tgtcttaatgactcaggctgctaca

SEQ ID NO: 149680 - DNA, 25 bp, Artificial
  probe
  misc_feature (1)..(25): SEQ ID NO: 2387; WAN024DA7_at; Start 319; Stop 343
gctctagccctaccaagtcatattc

SEQ ID NO: 149681 - DNA, 25 bp, Artificial
  probe
  misc_feature (1)..(25): SEQ ID NO: 2387; WAN024DA7_at; Start 239; Stop 263
tatttatcgtggtacctgcaactgc

SEQ ID NO: 149682 - DNA, 25 bp, Artificial
  probe
  misc_feature (1)..(25): SEQ ID NO: 2387; WAN024DA7_at; Start 82; Stop 106
ggccatcaagtcactgtcttaatga

SEQ ID NO: 149683 - DNA, 25 bp, Artificial
  probe
  misc_feature (1)..(25): SEQ ID NO: 2387; WAN024DA7_at; Start 458; Stop 482
tactagcttgtggagaccacggacg

SEQ ID NO: 149684 - DNA, 25 bp, Artificial
  probe
  misc_feature (1)..(25): SEQ ID NO: 2387; WAN024DA7_at; Start 371; Stop 395
caaaaatgtatgaccatccagtaac

SEQ ID NO: 149685 - DNA, 25 bp, Artificial
  probe
  misc_feature (1)..(25): SEQ ID NO: 2387; WAN024DA7_at; Start 108; Stop 132
tcaggctgctacagagtttatccaa

SEQ ID NO: 149686 - DNA, 25 bp, Artificial
  probe
  misc_feature (1)..(25): SEQ ID NO: 2387; WAN024DA7_at; Start 169; Stop 193
cacttggatgtcatgaaggaaccct

SEQ ID NO: 149687 - DNA, 25 bp, Artificial
  probe
  misc_feature (1)..(25): SEQ ID NO: 2387; WAN024DA7_at; Start 472; Stop 496
gaccacggacgaggagctttagctg

SEQ ID NO: 149688 - DNA, 25 bp, Artificial
  probe
  misc_feature (1)..(25): SEQ ID NO: 2387; WAN024DA7_at; Start 525; Stop 549
ggaaactatcgatgaaaaaacgctc

SEQ ID NO: 149689 - DNA, 25 bp, Artificial
  probe
  misc_feature (1)..(25): SEQ ID NO: 2387; WAN024DA7_at; Start 290; Stop 314
gatttgcggacaacatggtaaccag

SEQ ID NO: 149690 - DNA, 25 bp, Artificial
  probe
  misc_feature (1)..(25): SEQ ID NO: 2387; WAN024DA7_at; Start 46; Stop 70
aagtcggcagatttagtcagttctc

SEQ ID NO: 149691 - DNA, 25 bp, Artificial
  probe
  misc_feature (1)..(25): SEQ ID NO: 2387; WAN024DA7_at; Start 384; Stop 408
ccatccagtaactcagaataatctg

SEQ ID NO: 149692 - DNA, 25 bp, Artificial
  probe
  misc_feature (1)..(25): SEQ ID NO: 2387; WAN024DA7_at; Start 73; Stop 97
aaaaaacaaggccatcaagtcactg

SEQ ID NO: 149693 - DNA, 25 bp, Artificial
  probe
  misc_feature (1)..(25): SEQ ID NO: 2387; WAN024DA7_at; Start 183; Stop 207
gaaggaaccctatcctgatcaggtc

SEQ ID NO: 149694 - DNA, 25 bp, Artificial
  probe
  misc_feature (1)..(25): SEQ ID NO: 2387; WAN024DA7_at; Start 493; Stop 517
gctgacctcacaattattttagaaa

SEQ ID NO: 149695 - DNA, 25 bp, Artificial
  probe
  misc_feature (1)..(25): SEQ ID NO: 2387; WAN024DA7_at; Start 305; Stop 329
tggtaaccagtacagctctagccct

SEQ ID NO: 149696 - DNA, 25 bp, Artificial
  probe
  misc_feature (1)..(25): SEQ ID NO: 2387; WAN024DA7_at; Start 418; Stop 442
gaaacctacggctatcagctgattg

SEQ ID NO: 149697 - DNA, 25 bp, Artificial
  probe
  misc_feature (1)..(25): SEQ ID NO: 2387; WAN024DA7_at; Start 276; Stop 300
aaaactagctcacggatttgcggac

SEQ ID NO: 149698 - DNA, 25 bp, Artificial
  probe
  misc_feature (1)..(25): SEQ ID NO: 2387; WAN024DA7_at; Start 123; Stop 147
gtttatccaacctttgacactacag

SEQ ID NO: 149699 - DNA, 25 bp, Artificial
  probe
  misc_feature (1)..(25): SEQ ID NO: 2387; WAN024DA7_at; Start 267; Stop 291
cactattgcaaaactagctcacgga

SEQ ID NO: 149700 - DNA, 25 bp, Artificial
  probe
  misc_feature (1)..(25): SEQ ID NO: 2387; WAN024DA7_at; Start 204; Stop 228
ggtcaatcatatcgaacttggaaaa

SEQ ID NO: 149701 - DNA, 25 bp, Artificial
  probe
  misc_feature (1)..(25): SEQ ID NO: 2387; WAN024DA7_at; Start 484; Stop 508
ggagctttagctgacctcacaatta

SEQ ID NO: 149702 - DNA, 25 bp, Artificial
  probe
  misc_feature (1)..(25): SEQ ID NO: 2387; WAN024DA7_at; Start 339; Stop 363
tattcccaaactaatagctcctgct

SEQ ID NO: 149703 - DNA, 25 bp, Artificial
  probe
  misc_feature (1)..(25): SEQ ID NO: 2387; WAN024DA7_at; Start 514; Stop 538
gaaagaataaaggaaactatcgatg

SEQ ID NO: 149704 - DNA, 25 bp, Artificial
  probe
  misc_feature (1)..(25): SEQ ID NO: 2387; WAN024DA7_at; Start 193; Stop 217
tatcctgatcaggtcaatcatatcg

SEQ ID NO: 149705 - DNA, 25 bp, Artificial
  probe
  misc_feature (1)..(25): SEQ ID NO: 2387; WAN024DA7_at; Start 154; Stop 178
tcacagaatcctgtccacttggatg

SEQ ID NO: 149706 - DNA, 25 bp, Artificial
  probe
  misc_feature (1)..(25): SEQ ID NO: 2387; WAN024DA7_at; Start 138; Stop 162
gacactacaggtactctcacagaat

SEQ ID NO: 149707 - DNA, 25 bp, Artificial
  probe
  misc_feature (1)..(25): SEQ ID NO: 2387; WAN024DA7_at; Start 31; Stop 55
tcaatcgcctcttataagtcggcag

SEQ ID NO: 149708 - DNA, 25 bp, Artificial
  probe
  misc_feature (1)..(25): SEQ ID NO: 4241; WAN024DA8_at; Start 523; Stop 547
gacattgcacgaaaaagtcttatca

SEQ ID NO: 149709 - DNA, 25 bp, Artificial
  probe
  misc_feature (1)..(25): SEQ ID NO: 4241; WAN024DA8_at; Start 45; Stop 69
cagtgaagctatcgatagcgtccgc

SEQ ID NO: 149710 - DNA, 25 bp, Artificial
  probe
  misc_feature (1)..(25): SEQ ID NO: 4241; WAN024DA8_at; Start 573; Stop 597
gaatgacctgactcaaatttcagca

SEQ ID NO: 149711 - DNA, 25 bp, Artificial
  probe
  misc_feature (1)..(25): SEQ ID NO: 4241; WAN024DA8_at; Start 471; Stop 495
tcatctgattggtttcaaactgctg

SEQ ID NO: 149712 - DNA, 25 bp, Artificial
  probe
  misc_feature (1)..(25): SEQ ID NO: 4241; WAN024DA8_at; Start 601; Stop 625
cagcaccgagctatatttgttgaga

SEQ ID NO: 149713 - DNA, 25 bp, Artificial
  probe
  misc_feature (1)..(25): SEQ ID NO: 4241; WAN024DA8_at; Start 155; Stop 179
cgacaaaacgagctctgaagccaga

SEQ ID NO: 149714 - DNA, 25 bp, Artificial
  probe
  misc_feature (1)..(25): SEQ ID NO: 4241; WAN024DA8_at; Start 100; Stop 124
gggaaaattatcacagagactttgc

SEQ ID NO: 149715 - DNA, 25 bp, Artificial
  probe
  misc_feature (1)..(25): SEQ ID NO: 4241; WAN024DA8_at; Start 549; Stop 573
gaatcaagcagatttaatcatcgcg

SEQ ID NO: 149716 - DNA, 25 bp, Artificial
  probe
  misc_feature (1)..(25): SEQ ID NO: 4241; WAN024DA8_at; Start 325; Stop 349
gaagttcaggctagctccaatctaa

SEQ ID NO: 149717 - DNA, 25 bp, Artificial
  probe
  misc_feature (1)..(25): SEQ ID NO: 4241; WAN024DA8_at; Start 216; Stop 240
taccaaggaccttctaatagaaatg

SEQ ID NO: 149718 - DNA, 25 bp, Artificial
  probe
  misc_feature (1)..(25): SEQ ID NO: 4241; WAN024DA8_at; Start 229; Stop 253
ctaatagaaatgcaagaacgtgttc

SEQ ID NO: 149719 - DNA, 25 bp, Artificial
  probe
  misc_feature (1)..(25): SEQ ID NO: 4241; WAN024DA8_at; Start 183; Stop 207
tcatcctaacctaagtattcgagaa

SEQ ID NO: 149720 - DNA, 25 bp, Artificial
  probe
  misc_feature (1)..(25): SEQ ID NO: 4241; WAN024DA8_at; Start 111; Stop 135
cacagagactttgctttctgcaggg

SEQ ID NO: 149721 - DNA, 25 bp, Artificial
  probe
  misc_feature (1)..(25): SEQ ID NO: 4241; WAN024DA8_at; Start 30; Stop 54
tacatcgggcggtaccagtgaagct

SEQ ID NO: 149722 - DNA, 25 bp, Artificial
  probe
  misc_feature (1)..(25): SEQ ID NO: 4241; WAN024DA8_at; Start 379; Stop 403
gccaagatttcttcaactgatgagg

SEQ ID NO: 149723 - DNA, 25 bp, Artificial
  probe
  misc_feature (1)..(25): SEQ ID NO: 4241; WAN024DA8_at; Start 309; Stop 333
tatgacagggcttgaggaagttcag

SEQ ID NO: 149724 - DNA, 25 bp, Artificial
  probe
  misc_feature (1)..(25): SEQ ID NO: 4241; WAN024DA8_at; Start 60; Stop 84
tagcgtccgctctatcactaaccat

SEQ ID NO: 149725 - DNA, 25 bp, Artificial
  probe
  misc_feature (1)..(25): SEQ ID NO: 4241; WAN024DA8_at; Start 274; Stop 298
cactcaatggctgtttctgactaca

SEQ ID NO: 149726 - DNA, 25 bp, Artificial
  probe
  misc_feature (1)..(25): SEQ ID NO: 4241; WAN024DA8_at; Start 624; Stop 648
gaaaaatcagcttcaaacagtccag

SEQ ID NO: 149727 - DNA, 25 bp, Artificial
  probe
  misc_feature (1)..(25): SEQ ID NO: 4241; WAN024DA8_at; Start 77; Stop 101
ctaaccattctacaggtcacttggg

SEQ ID NO: 149728 - DNA, 25 bp, Artificial
  probe
  misc_feature (1)..(25): SEQ ID NO: 4241; WAN024DA8_at; Start 394; Stop 418
actgatgaggttcaggttttgttcc

SEQ ID NO: 149729 - DNA, 25 bp, Artificial
  probe
  misc_feature (1)..(25): SEQ ID NO: 4241; WAN024DA8_at; Start 424; Stop 448
aagacacccaaaatcatatccctag

SEQ ID NO: 149730 - DNA, 25 bp, Artificial
  probe
  misc_feature (1)..(25): SEQ ID NO: 4241; WAN024DA8_at; Start 511; Stop 535
gatcatctggttgacattgcacgaa

SEQ ID NO: 149731 - DNA, 25 bp, Artificial
  probe
  misc_feature (1)..(25): SEQ ID NO: 4241; WAN024DA8_at; Start 295; Stop 319
tacactcctgtttatatgacagggc

SEQ ID NO: 149732 - DNA, 25 bp, Artificial
  probe
  misc_feature (1)..(25): SEQ ID NO: 4241; WAN024DA8_at; Start 440; Stop 464
tatccctagtcaaggaatggaatcc

SEQ ID NO: 149733 - DNA, 25 bp, Artificial
  probe
  misc_feature (1)..(25): SEQ ID NO: 4241; WAN024DA8_at; Start 641; Stop 665
cagtccagactaaagaagaaattgc

SEQ ID NO: 149734 - DNA, 25 bp, Artificial
  probe
  misc_feature (1)..(25): SEQ ID NO: 4241; WAN024DA8_at; Start 497; Stop 521
ttgatgttaccgaagatcatctggt

SEQ ID NO: 149735 - DNA, 25 bp, Artificial
  probe
  misc_feature (1)..(25): SEQ ID NO: 4241; WAN024DA8_at; Start 147; Stop 171
tttaattacgacaaaacgagctctg

SEQ ID NO: 149736 - DNA, 25 bp, Artificial
  probe
  misc_feature (1)..(25): SEQ ID NO: 4241; WAN024DA8_at; Start 170; Stop 194
tgaagccagagcctcatcctaacct

SEQ ID NO: 149737 - DNA, 25 bp, Artificial
  probe
  misc_feature (1)..(25): SEQ ID NO: 4241; WAN024DA8_at; Start 658; Stop 682
gaaattgcagaactcctccttgaaa

SEQ ID NO: 149738 - DNA, 25 bp, Artificial
  probe
  misc_feature (1)..(25): SEQ ID NO: 4241; WAN024DA8_at; Start 259; Stop 283
tatcaggtcttgatccactcaatgg

SEQ ID NO: 149739 - DNA, 25 bp, Artificial
  probe
  misc_feature (1)..(25): SEQ ID NO: 4241; WAN024DA8_at; Start 244; Stop 268
gaacgtgttcaggattatcaggtct

SEQ ID NO: 149740 - DNA, 25 bp, Artificial
  probe
  misc_feature (1)..(25): SEQ ID NO: 4241; WAN024DA8_at; Start 563; Stop 587
taatcatcgcgaatgacctgactca

SEQ ID NO: 149741 - DNA, 25 bp, Artificial
  probe
  misc_feature (1)..(25): SEQ ID NO: 4241; WAN024DA8_at; Start 15; Stop 39
tatgaaaattttagttacatcgggc

SEQ ID NO: 149742 - DNA, 25 bp, Artificial
  probe
  misc_feature (1)..(25): SEQ ID NO: 1190; WAN024DA9_at; Start 196; Stop 220
gtacaaattgtagatgatgaattag

SEQ ID NO: 149743 - DNA, 25 bp, Artificial
  probe
  misc_feature (1)..(25): SEQ ID NO: 1190; WAN024DA9_at; Start 41; Stop 65
tcaagcaattgaaaaaattggaccg

SEQ ID NO: 149744 - DNA, 25 bp, Artificial
  probe
  misc_feature (1)..(25): SEQ ID NO: 1190; WAN024DA9_at; Start 114; Stop 138
agacccaagacgacacggaaaggct

SEQ ID NO: 149745 - DNA, 25 bp, Artificial
  probe
  misc_feature (1)..(25): SEQ ID NO: 1190; WAN024DA9_at; Start 61; Stop 85
gaccgttatacgcagaagctaatta

SEQ ID NO: 149746 - DNA, 25 bp, Artificial
  probe
  misc_feature (1)..(25): SEQ ID NO: 1190; WAN024DA9_at; Start 117; Stop 141
cccaagacgacacggaaaggctttg

SEQ ID NO: 149747 - DNA, 25 bp, Artificial
  probe
  misc_feature (1)..(25): SEQ ID NO: 1190; WAN024DA9_at; Start 11; Stop 35
tgtataaattagttccaacaagacg

SEQ ID NO: 149748 - DNA, 25 bp, Artificial
  probe
  misc_feature (1)..(25): SEQ ID NO: 1190; WAN024DA9_at; Start 109; Stop 133
ttggaagacccaagacgacacggaa

SEQ ID NO: 149749 - DNA, 25 bp, Artificial
  probe
  misc_feature (1)..(25): SEQ ID NO: 1190; WAN024DA9_at; Start 233; Stop 257
tagaagttggtcatcggagagatat

SEQ ID NO: 149750 - DNA, 25 bp, Artificial
  probe
  misc_feature (1)..(25): SEQ ID NO: 1190; WAN024DA9_at; Start 102; Stop 126
caatgttttggaagacccaagacga

SEQ ID NO: 149751 - DNA, 25 bp, Artificial
  probe
  misc_feature (1)..(25): SEQ ID NO: 1190; WAN024DA9_at; Start 223; Stop 247
gttgctactctagaagttggtcatc

SEQ ID NO: 149752 - DNA, 25 bp, Artificial
  probe
  misc_feature (1)..(25): SEQ ID NO: 1190; WAN024DA9_at; Start 67; Stop 91
tatacgcagaagctaattacaaact

SEQ ID NO: 149753 - DNA, 25 bp, Artificial
  probe
  misc_feature (1)..(25): SEQ ID NO: 1190; WAN024DA9_at; Start 231; Stop 255
tctagaagttggtcatcggagagat

SEQ ID NO: 149754 - DNA, 25 bp, Artificial
  probe
  misc_feature (1)..(25): SEQ ID NO: 1190; WAN024DA9_at; Start 108; Stop 132
tttggaagacccaagacgacacgga

SEQ ID NO: 149755 - DNA, 25 bp, Artificial
  probe
  misc_feature (1)..(25): SEQ ID NO: 1190; WAN024DA9_at; Start 59; Stop 83
tggaccgttatacgcagaagctaat

SEQ ID NO: 149756 - DNA, 25 bp, Artificial
  probe
  misc_feature (1)..(25): SEQ ID NO: 1190; WAN024DA9_at; Start 56; Stop 80
aattggaccgttatacgcagaagct

SEQ ID NO: 149757 - DNA, 25 bp, Artificial
  probe
  misc_feature (1)..(25): SEQ ID NO: 1190; WAN024DA9_at; Start 54; Stop 78
aaaattggaccgttatacgcagaag

SEQ ID NO: 149758 - DNA, 25 bp, Artificial
  probe
  misc_feature (1)..(25): SEQ ID NO: 1190; WAN024DA9_at; Start 119; Stop 143
caagacgacacggaaaggctttggt

SEQ ID NO: 149759 - DNA, 25 bp, Artificial
  probe
  misc_feature (1)..(25): SEQ ID NO: 1190; WAN024DA9_at; Start 105; Stop 129
tgttttggaagacccaagacgacac

SEQ ID NO: 149760 - DNA, 25 bp, Artificial
  probe
  misc_feature (1)..(25): SEQ ID NO: 1190; WAN024DA9_at; Start 121; Stop 145
agacgacacggaaaggctttggttg

SEQ ID NO: 149761 - DNA, 25 bp, Artificial
  probe
  misc_feature (1)..(25): SEQ ID NO: 1190; WAN024DA9_at; Start 166; Stop 190
cgctatagaattggtaattatcgag

SEQ ID NO: 149762 - DNA, 25 bp, Artificial
  probe
  misc_feature (1)..(25): SEQ ID NO: 1190; WAN024DA9_at; Start 226; Stop 250
gctactctagaagttggtcatcgga

SEQ ID NO: 149763 - DNA, 25 bp, Artificial
  probe
  misc_feature (1)..(25): SEQ ID NO: 1190; WAN024DA9_at; Start 69; Stop 93
tacgcagaagctaattacaaactat

SEQ ID NO: 149764 - DNA, 25 bp, Artificial
  probe
  misc_feature (1)..(25): SEQ ID NO: 1190; WAN024DA9_at; Start 50; Stop 74
tgaaaaaattggaccgttatacgca

SEQ ID NO: 149765 - DNA, 25 bp, Artificial
  probe
  misc_feature (1)..(25): SEQ ID NO: 1190; WAN024DA9_at; Start 228; Stop 252
tactctagaagttggtcatcggaga

SEQ ID NO: 149766 - DNA, 25 bp, Artificial
  probe
  misc_feature (1)..(25): SEQ ID NO: 1190; WAN024DA9_at; Start 101; Stop 125
ccaatgttttggaagacccaagacg

SEQ ID NO: 149767 - DNA, 25 bp, Artificial
  probe
  misc_feature (1)..(25): SEQ ID NO: 1190; WAN024DA9_at; Start 71; Stop 95
cgcagaagctaattacaaactattt

SEQ ID NO: 149768 - DNA, 25 bp, Artificial
  probe
  misc_feature (1)..(25): SEQ ID NO: 1190; WAN024DA9_at; Start 237; Stop 261
agttggtcatcggagagatatttat

SEQ ID NO: 149769 - DNA, 25 bp, Artificial
  probe
  misc_feature (1)..(25): SEQ ID NO: 1190; WAN024DA9_at; Start 169; Stop 193
tatagaattggtaattatcgagtta

SEQ ID NO: 149770 - DNA, 25 bp, Artificial
  probe
  misc_feature (1)..(25): SEQ ID NO: 1190; WAN024DA9_at; Start 75; Stop 99
gaagctaattacaaactatttacaa

SEQ ID NO: 149771 - DNA, 25 bp, Artificial
  probe
  misc_feature (1)..(25): SEQ ID NO: 1190; WAN024DA9_at; Start 158; Stop 182
gtcaatggcgctatagaattggtaa

SEQ ID NO: 149772 - DNA, 25 bp, Artificial
  probe
  misc_feature (1)..(25): SEQ ID NO: 1190; WAN024DA9_at; Start 160; Stop 184
caatggcgctatagaattggtaatt

SEQ ID NO: 149773 - DNA, 25 bp, Artificial
  probe
  misc_feature (1)..(25): SEQ ID NO: 1190; WAN024DA9_at; Start 110; Stop 134
tggaagacccaagacgacacggaaa

SEQ ID NO: 149774 - DNA, 25 bp, Artificial
  probe
  misc_feature (1)..(25): SEQ ID NO: 1190; WAN024DA9_at; Start 82; Stop 106
attacaaactatttacaaaccaatg

SEQ ID NO: 149775 - DNA, 25 bp, Artificial
  probe
  misc_feature (1)..(25): SEQ ID NO: 1190; WAN024DA9_at; Start 63; Stop 87
ccgttatacgcagaagctaattaca

SEQ ID NO: 149776 - DNA, 25 bp, Artificial
  probe
  misc_feature (1)..(25): SEQ ID NO: 1479; WAN024DAA_at; Start 111; Stop 135
tatcgaaattccacaattgcatgaa

SEQ ID NO: 149777 - DNA, 25 bp, Artificial
  probe
  misc_feature (1)..(25): SEQ ID NO: 1479; WAN024DAA_at; Start 787; Stop 811
ttccaagaaggtcaatacggagttg

SEQ ID NO: 149778 - DNA, 25 bp, Artificial
  probe
  misc_feature (1)..(25): SEQ ID NO: 1479; WAN024DAA_at; Start 19; Stop 43
cacaaaaaagttatccttgtcggtg

SEQ ID NO: 149779 - DNA, 25 bp, Artificial
  probe
  misc_feature (1)..(25): SEQ ID NO: 1479; WAN024DAA_at; Start 892; Stop 916
gaaactcaaaaaatgcaagcatctg

SEQ ID NO: 149780 - DNA, 25 bp, Artificial
  probe
  misc_feature (1)..(25): SEQ ID NO: 1479; WAN024DAA_at; Start 139; Stop 163
gctgttggtgatgcgcttgacctta

SEQ ID NO: 149781 - DNA, 25 bp, Artificial
  probe
  misc_feature (1)..(25): SEQ ID NO: 1479; WAN024DAA_at; Start 45; Stop 69
tggtgctgtaggttcatcttacgct

SEQ ID NO: 149782 - DNA, 25 bp, Artificial
  probe
  misc_feature (1)..(25): SEQ ID NO: 1479; WAN024DAA_at; Start 260; Stop 284
ctcaaaaaccaggtgaaactcgtct

SEQ ID NO: 149783 - DNA, 25 bp, Artificial
  probe
  misc_feature (1)..(25): SEQ ID NO: 1479; WAN024DAA_at; Start 460; Stop 484
gactcagctcgtttccgtcaagcac

SEQ ID NO: 149784 - DNA, 25 bp, Artificial
  probe
  misc_feature (1)..(25): SEQ ID NO: 1479; WAN024DAA_at; Start 544; Stop 568
ggtgactctgagttcgctgtttggt

SEQ ID NO: 149785 - DNA, 25 bp, Artificial
  probe
  misc_feature (1)..(25): SEQ ID NO: 1479; WAN024DAA_at; Start 214; Stop 238
tctgactgtgcagacgctgaccttg

SEQ ID NO: 149786 - DNA, 25 bp, Artificial
  probe
  misc_feature (1)..(25): SEQ ID NO: 1479; WAN024DAA_at; Start 94; Stop 118
gcacaagagcttggaattatcgaaa

SEQ ID NO: 149787 - DNA, 25 bp, Artificial
  probe
  misc_feature (1)..(25): SEQ ID NO: 1479; WAN024DAA_at; Start 30; Stop 54
tatccttgtcggtgatggtgctgta

SEQ ID NO: 149788 - DNA, 25 bp, Artificial
  probe
  misc_feature (1)..(25): SEQ ID NO: 1479; WAN024DAA_at; Start 199; Stop 223
tatgcagctcaatactctgactgtg

SEQ ID NO: 149789 - DNA, 25 bp, Artificial
  probe
  misc_feature (1)..(25): SEQ ID NO: 1479; WAN024DAA_at; Start 655; Stop 679
gaaggtgttcgtgatgcagcctaca

SEQ ID NO: 149790 - DNA, 25 bp, Artificial
  probe
  misc_feature (1)..(25): SEQ ID NO: 1479; WAN024DAA_at; Start 124; Stop 148
caattgcatgaaaaagctgttggtg

SEQ ID NO: 149791 - DNA, 25 bp, Artificial
  probe
  misc_feature (1)..(25): SEQ ID NO: 1479; WAN024DAA_at; Start 817; Stop 841
gtctttatcggtcaaccagctgttg

SEQ ID NO: 149792 - DNA, 25 bp, Artificial
  probe
  misc_feature (1)..(25): SEQ ID NO: 1479; WAN024DAA_at; Start 320; Stop 344
caatcgtaactcaagttgttgaatc

SEQ ID NO: 149793 - DNA, 25 bp, Artificial
  probe
  misc_feature (1)..(25): SEQ ID NO: 1479; WAN024DAA_at; Start 774; Stop 798
tccactttcagtattccaagaaggt

SEQ ID NO: 149794 - DNA, 25 bp, Artificial
  probe
  misc_feature (1)..(25): SEQ ID NO: 1479; WAN024DAA_at; Start 618; Stop 642
tcaaaatgttcaagaagctgaattg

SEQ ID NO: 149795 - DNA, 25 bp, Artificial
  probe
  misc_feature (1)..(25): SEQ ID NO: 1479; WAN024DAA_at; Start 64; Stop 88
tacgcttttgcacttgttaaccaag

SEQ ID NO: 149796 - DNA, 25 bp, Artificial
  probe
  misc_feature (1)..(25): SEQ ID NO: 1479; WAN024DAA_at; Start 353; Stop 377
aaggtatcttccttgttgctgctaa

SEQ ID NO: 149797 - DNA, 25 bp, Artificial
  probe
  misc_feature (1)..(25): SEQ ID NO: 1479; WAN024DAA_at; Start 832; Stop 856
ccagctgttgttggtgcacatggta

SEQ ID NO: 149798 - DNA, 25 bp, Artificial
  probe
  misc_feature (1)..(25): SEQ ID NO: 1479; WAN024DAA_at; Start 79; Stop 103
gttaaccaaggaattgcacaagagc

SEQ ID NO: 149799 - DNA, 25 bp, Artificial
  probe
  misc_feature (1)..(25): SEQ ID NO: 1479; WAN024DAA_at; Start 475; Stop 499
cgtcaagcacttgctgaaaaattgg

SEQ ID NO: 149800 - DNA, 25 bp, Artificial
  probe
  misc_feature (1)..(25): SEQ ID NO: 1479; WAN024DAA_at; Start 530; Stop 554
tcatgggtgaacacggtgactctga

SEQ ID NO: 149801 - DNA, 25 bp, Artificial
  probe
  misc_feature (1)..(25): SEQ ID NO: 1479; WAN024DAA_at; Start 291; Stop 315
tgtaggtaaaaaccttgctatcaac

SEQ ID NO: 149802 - DNA, 25 bp, Artificial
  probe
  misc_feature (1)..(25): SEQ ID NO: 1479; WAN024DAA_at; Start 730; Stop 754
gctcgtatcactaaagcaatccttg

SEQ ID NO: 149803 - DNA, 25 bp, Artificial
  probe
  misc_feature (1)..(25): SEQ ID NO: 1479; WAN024DAA_at; Start 395; Stop 419
cttactcaacttggaaattctctgg

SEQ ID NO: 149804 - DNA, 25 bp, Artificial
  probe
  misc_feature (1)..(25): SEQ ID NO: 1479; WAN024DAA_at; Start 379; Stop 403
ccagttgacgttttgacttactcaa

SEQ ID NO: 149805 - DNA, 25 bp, Artificial
  probe
  misc_feature (1)..(25): SEQ ID NO: 1479; WAN024DAA_at; Start 958; Stop 982
ccagaattccaagaagcttctaaaa

SEQ ID NO: 149806 - DNA, 25 bp, Artificial
  probe
  misc_feature (1)..(25): SEQ ID NO: 1479; WAN024DAA_at; Start 721; Stop 745
gtagcccttgctcgtatcactaaag

SEQ ID NO: 149807 - DNA, 25 bp, Artificial
  probe
  misc_feature (1)..(25): SEQ ID NO: 1479; WAN024DAA_at; Start 155; Stop 179
ttgaccttagtcacgcccttgcctt

SEQ ID NO: 149808 - DNA, 25 bp, Artificial
  probe
  misc_feature (1)..(25): SEQ ID NO: 1479; WAN024DAA_at; Start 274; Stop 298
gaaactcgtcttgaccttgtaggta

SEQ ID NO: 149809 - DNA, 25 bp, Artificial
  probe
  misc_feature (1)..(25): SEQ ID NO: 1479; WAN024DAA_at; Start 693; Stop 717
aaaaggtgcaacatactacggtatc

SEQ ID NO: 149810 - DNA, 25 bp, Artificial
  probe
  misc_feature (1)..(25): SEQ ID NO: 247; WAN024DAB-3_at; Start 945; Stop 969
caacacctttttaggatttgcgtat

SEQ ID NO: 149811 - DNA, 25 bp, Artificial
  probe
  misc_feature (1)..(25): SEQ ID NO: 247; WAN024DAB-3_at; Start 862; Stop 886
tcagtaacagataccgattataggg

SEQ ID NO: 149812 - DNA, 25 bp, Artificial
  probe
  misc_feature (1)..(25): SEQ ID NO: 247; WAN024DAB-3_at; Start 1501; Stop 1525
gatgacagacgaaatgtattacaac

SEQ ID NO: 149813 - DNA, 25 bp, Artificial
  probe
  misc_feature (1)..(25): SEQ ID NO: 247; WAN024DAB-3_at; Start 328; Stop 352
gagtacgatgaatctagagtattag

SEQ ID NO: 149814 - DNA, 25 bp, Artificial
  probe
  misc_feature (1)..(25): SEQ ID NO: 247; WAN024DAB-3_at; Start 1537; Stop 1561
cagaacaattgtcctcctccagaga

SEQ ID NO: 149815 - DNA, 25 bp, Artificial
  probe
  misc_feature (1)..(25): SEQ ID NO: 247; WAN024DAB-3_at; Start 379; Stop 403
caaagaggttcttcatttttggaag

SEQ ID NO: 149816 - DNA, 25 bp, Artificial
  probe
  misc_feature (1)..(25): SEQ ID NO: 247; WAN024DAB-3_at; Start 1183; Stop 1207
tattctaaagaatggttgggagcat

SEQ ID NO: 149817 - DNA, 25 bp, Artificial
  probe
  misc_feature (1)..(25): SEQ ID NO: 247; WAN024DAB-3_at; Start 875; Stop 899
ccgattatagggagtttgctcaagg

SEQ ID NO: 149818 - DNA, 25 bp, Artificial
  probe
  misc_feature (1)..(25): SEQ ID NO: 247; WAN024DAB-3_at; Start 702; Stop 726
tagtatcaatgtgaatgaactctca

SEQ ID NO: 149819 - DNA, 25 bp, Artificial
  probe
  misc_feature (1)..(25): SEQ ID NO: 247; WAN024DAB-3_at; Start 625; Stop 649
gattctaacgatcggaaattctttg

SEQ ID NO: 149820 - DNA, 25 bp, Artificial
  probe
  misc_feature (1)..(25): SEQ ID NO: 247; WAN024DAB-3_at; Start 616; Stop 640
gaaagttttgattctaacgatcgga

SEQ ID NO: 149821 - DNA, 25 bp, Artificial
  probe
  misc_feature (1)..(25): SEQ ID NO: 247; WAN024DAB-3_at; Start 1552; Stop 1576
cctccagagattgaggaattacaaa

SEQ ID NO: 149822 - DNA, 25 bp, Artificial
  probe
  misc_feature (1)..(25): SEQ ID NO: 247; WAN024DAB-3_at; Start 168; Stop 192
tcactttggagaggaattaaacact

SEQ ID NO: 149823 - DNA, 25 bp, Artificial
  probe
  misc_feature (1)..(25): SEQ ID NO: 247; WAN024DAB-3_at; Start 1412; Stop 1436
tgtttctgaaattaatggagaccga

SEQ ID NO: 149824 - DNA, 25 bp, Artificial
  probe
  misc_feature (1)..(25): SEQ ID NO: 247; WAN024DAB-3_at; Start 984; Stop 1008
tactatcgaagctgcggatgttttc

SEQ ID NO: 149825 - DNA, 25 bp, Artificial
  probe
  misc_feature (1)..(25): SEQ ID NO: 247; WAN024DAB-3_at; Start 347; Stop 371
tattagagatattagtcaacgccga

SEQ ID NO: 149826 - DNA, 25 bp, Artificial
  probe
  misc_feature (1)..(25): SEQ ID NO: 247; WAN024DAB-3_at; Start 997; Stop 1021
gcggatgttttcacagatgtagtaa

SEQ ID NO: 149827 - DNA, 25 bp, Artificial
  probe
  misc_feature (1)..(25): SEQ ID NO: 247; WAN024DAB-3_at; Start 313; Stop 337
caagaaaatcttgtagagtacgatg

SEQ ID NO: 149828 - DNA, 25 bp, Artificial
  probe
  misc_feature (1)..(25): SEQ ID NO: 247; WAN024DAB-3_at; Start 354; Stop 378
gatattagtcaacgccgaaaaggaa

SEQ ID NO: 149829 - DNA, 25 bp, Artificial
  probe
  misc_feature (1)..(25): SEQ ID NO: 247; WAN024DAB-3_at; Start 1200; Stop 1224
gggagcattattcaaatttgactca

SEQ ID NO: 149830 - DNA, 25 bp, Artificial
  probe
  misc_feature (1)..(25): SEQ ID NO: 247; WAN024DAB-3_at; Start 1427; Stop 1451
tggagaccgataaaatagagaatga

SEQ ID NO: 149831 - DNA, 25 bp, Artificial
  probe
  misc_feature (1)..(25): SEQ ID NO: 247; WAN024DAB-3_at; Start 1487; Stop 1511
cattattatctttagatgacagacg

SEQ ID NO: 149832 - DNA, 25 bp, Artificial
  probe
  misc_feature (1)..(25): SEQ ID NO: 247; WAN024DAB-3_at; Start 1146; Stop 1170
gataaacatcatttttacaggagac

SEQ ID NO: 149833 - DNA, 25 bp, Artificial
  probe
  misc_feature (1)..(25): SEQ ID NO: 247; WAN024DAB-3_at; Start 1076; Stop 1100
tagttgctttagagagggtagatcc

SEQ ID NO: 149834 - DNA, 25 bp, Artificial
  probe
  misc_feature (1)..(25): SEQ ID NO: 247; WAN024DAB-3_at; Start 1335; Stop 1359
ccagaaattatctttacgagggatg

SEQ ID NO: 149835 - DNA, 25 bp, Artificial
  probe
  misc_feature (1)..(25): SEQ ID NO: 247; WAN024DAB-3_at; Start 1216; Stop 1240
tttgactcaagtgcaaattatttgg

SEQ ID NO: 149836 - DNA, 25 bp, Artificial
  probe
  misc_feature (1)..(25): SEQ ID NO: 247; WAN024DAB-3_at; Start 398; Stop 422
tggaagaaaagacgataaatgaaac

SEQ ID NO: 149837 - DNA, 25 bp, Artificial
  probe
  misc_feature (1)..(25): SEQ ID NO: 247; WAN024DAB-3_at; Start 908; Stop 932
taaatgaatacaatccaaacagaat

SEQ ID NO: 149838 - DNA, 25 bp, Artificial
  probe
  misc_feature (1)..(25): SEQ ID NO: 247; WAN024DAB-3_at; Start 715; Stop 739
aatgaactctcaacaccaaaaggtg

SEQ ID NO: 149839 - DNA, 25 bp, Artificial
  probe
  misc_feature (1)..(25): SEQ ID NO: 247; WAN024DAB-3_at; Start 257; Stop 281
gaaattggatatcttcactagaagg

SEQ ID NO: 149840 - DNA, 25 bp, Artificial
  probe
  misc_feature (1)..(25): SEQ ID NO: 247; WAN024DAB-3_at; Start 1089; Stop 1113
gagggtagatccaactattgaatca

SEQ ID NO: 149841 - DNA, 25 bp, Artificial
  probe
  misc_feature (1)..(25): SEQ ID NO: 247; WAN024DAB-3_at; Start 1315; Stop 1339
gattacttaacaacttataaccaga

SEQ ID NO: 149842 - DNA, 25 bp, Artificial
  probe
  misc_feature (1)..(25): SEQ ID NO: 247; WAN024DAB-3_at; Start 272; Stop 296
cactagaaggaggttttgtttcaca

SEQ ID NO: 149843 - DNA, 25 bp, Artificial
  probe
  misc_feature (1)..(25): SEQ ID NO: 247; WAN024DAB-3_at; Start 1463; Stop 1487
tagatggcatcaaaagtatactccc

SEQ ID NO: 149844 - DNA, 25 bp, Artificial
  probe
  misc_feature (1)..(25): SEQ ID NO: 2212; WAN024DAB-5_at; Start 1405; Stop 1429
gcttttgaacagcaaaatcgtgatt

SEQ ID NO: 149845 - DNA, 25 bp, Artificial
  probe
  misc_feature (1)..(25): SEQ ID NO: 2212; WAN024DAB-5_at; Start 583; Stop 607
tcatccgcagattattcaaaaacct

SEQ ID NO: 149846 - DNA, 25 bp, Artificial
  probe
  misc_feature (1)..(25): SEQ ID NO: 2212; WAN024DAB-5_at; Start 764; Stop 788
caggtaatcagagagttgatgaaca

SEQ ID NO: 149847 - DNA, 25 bp, Artificial
  probe
  misc_feature (1)..(25): SEQ ID NO: 2212; WAN024DAB-5_at; Start 1302; Stop 1326
taataagcttaatgaactgagagaa

SEQ ID NO: 149848 - DNA, 25 bp, Artificial
  probe
  misc_feature (1)..(25): SEQ ID NO: 2212; WAN024DAB-5_at; Start 526; Stop 550
ggtgatgttctacatatccatggaa

SEQ ID NO: 149849 - DNA, 25 bp, Artificial
  probe
  misc_feature (1)..(25): SEQ ID NO: 2212; WAN024DAB-5_at; Start 1534; Stop 1558
tactctatagagcatcaattaaaag

SEQ ID NO: 149850 - DNA, 25 bp, Artificial
  probe
  misc_feature (1)..(25): SEQ ID NO: 2212; WAN024DAB-5_at; Start 829; Stop 853
catactcagattatttggtacggag

SEQ ID NO: 149851 - DNA, 25 bp, Artificial
  probe
  misc_feature (1)..(25): SEQ ID NO: 2212; WAN024DAB-5_at; Start 1056; Stop 1080
taataatcaactagatcagctaatg

SEQ ID NO: 149852 - DNA, 25 bp, Artificial
  probe
  misc_feature (1)..(25): SEQ ID NO: 2212; WAN024DAB-5_at; Start 849; Stop 873
cggagatgaatttgagaaactacct

SEQ ID NO: 149853 - DNA, 25 bp, Artificial
  probe
  misc_feature (1)..(25): SEQ ID NO: 2212; WAN024DAB-5_at; Start 154; Stop 178
caaggacaagttttatcggtaagtg

SEQ ID NO: 149854 - DNA, 25 bp, Artificial
  probe
  misc_feature (1)..(25): SEQ ID NO: 2212; WAN024DAB-5_at; Start 813; Stop 837
ttttagctcagaaaatcatactcag

SEQ ID NO: 149855 - DNA, 25 bp, Artificial
  probe
  misc_feature (1)..(25): SEQ ID NO: 2212; WAN024DAB-5_at; Start 83; Stop 107
gcgcaggagtttcaattgctcaagg

SEQ ID NO: 149856 - DNA, 25 bp, Artificial
  probe
  misc_feature (1)..(25): SEQ ID NO: 2212; WAN024DAB-5_at; Start 295; Stop 319
gaagattttgaaaagcgacgactag

SEQ ID NO: 149857 - DNA, 25 bp, Artificial
  probe
  misc_feature (1)..(25): SEQ ID NO: 2212; WAN024DAB-5_at; Start 68; Stop 92
tagtaatttttattggcgcaggagt

SEQ ID NO: 149858 - DNA, 25 bp, Artificial
  probe
  misc_feature (1)..(25): SEQ ID NO: 2212; WAN024DAB-5_at; Start 1390; Stop 1414
tactggctagtaagtgcttttgaac

SEQ ID NO: 149859 - DNA, 25 bp, Artificial
  probe
  misc_feature (1)..(25): SEQ ID NO: 2212; WAN024DAB-5_at; Start 568; Stop 592
aagtattttgtaagttcatccgcag

SEQ ID NO: 149860 - DNA, 25 bp, Artificial
  probe
  misc_feature (1)..(25): SEQ ID NO: 2212; WAN024DAB-5_at; Start 542; Stop 566
tccatggaacaccagattgtgatgt

SEQ ID NO: 149861 - DNA, 25 bp, Artificial
  probe
  misc_feature (1)..(25): SEQ ID NO: 2212; WAN024DAB-5_at; Start 369; Stop 393
tcaaacagtagaatctttagcaagt

SEQ ID NO: 149862 - DNA, 25 bp, Artificial
  probe
  misc_feature (1)..(25): SEQ ID NO: 2212; WAN024DAB-5_at; Start 898; Stop 922
gatattaatgaaaaattgggcacac

SEQ ID NO: 149863 - DNA, 25 bp, Artificial
  probe
  misc_feature (1)..(25): SEQ ID NO: 2212; WAN024DAB-5_at; Start 1319; Stop 1343
tgagagaaattatatccaaagatgg

SEQ ID NO: 149864 - DNA, 25 bp, Artificial
  probe
  misc_feature (1)..(25): SEQ ID NO: 2212; WAN024DAB-5_at; Start 1092; Stop 1116
gcttcggagtgaaactctaacagta

SEQ ID NO: 149865 - DNA, 25 bp, Artificial
  probe
  misc_feature (1)..(25): SEQ ID NO: 2212; WAN024DAB-5_at; Start 735; Stop 759
gaactatgccttgatgaagtcagag

SEQ ID NO: 149866 - DNA, 25 bp, Artificial
  probe
  misc_feature (1)..(25): SEQ ID NO: 2212; WAN024DAB-5_at; Start 136; Stop 160
catcttattaagtattggcaaggac

SEQ ID NO: 149867 - DNA, 25 bp, Artificial
  probe
  misc_feature (1)..(25): SEQ ID NO: 2212; WAN024DAB-5_at; Start 309; Stop 333
gcgacgactagattttgaaaaagga

SEQ ID NO: 149868 - DNA, 25 bp, Artificial
  probe
  misc_feature (1)..(25): SEQ ID NO: 2212; WAN024DAB-5_at; Start 504; Stop 528
caagaatgggaaactacaatttggt

SEQ ID NO: 149869 - DNA, 25 bp, Artificial
  probe
  misc_feature (1)..(25): SEQ ID NO: 2212; WAN024DAB-5_at; Start 681; Stop 705
tggagcaggtcttgaagaagatgaa

SEQ ID NO: 149870 - DNA, 25 bp, Artificial
  probe
  misc_feature (1)..(25): SEQ ID NO: 2212; WAN024DAB-5_at; Start 750; Stop 774
gaagtcagagaacacaggtaatcag

SEQ ID NO: 149871 - DNA, 25 bp, Artificial
  probe
  misc_feature (1)..(25): SEQ ID NO: 2212; WAN024DAB-5_at; Start 1076; Stop 1100
taatgttaaatgctctgcttcggag

SEQ ID NO: 149872 - DNA, 25 bp, Artificial
  probe
  misc_feature (1)..(25): SEQ ID NO: 2212; WAN024DAB-5_at; Start 99; Stop 123
tgctcaaggttatcctaattggaac

SEQ ID NO: 149873 - DNA, 25 bp, Artificial
  probe
  misc_feature (1)..(25): SEQ ID NO: 2212; WAN024DAB-5_at; Start 1216; Stop 1240
gaaggctctcaaaattactttatag

SEQ ID NO: 149874 - DNA, 25 bp, Artificial
  probe
  misc_feature (1)..(25): SEQ ID NO: 2212; WAN024DAB-5_at; Start 936; Stop 960
tcagtggaacaatcttttgaatcct

SEQ ID NO: 149875 - DNA, 25 bp, Artificial
  probe
  misc_feature (1)..(25): SEQ ID NO: 2212; WAN024DAB-5_at; Start 1490; Stop 1514
taatgtccatactaaataatccaga

SEQ ID NO: 149876 - DNA, 25 bp, Artificial
  probe
  misc_feature (1)..(25): SEQ ID NO: 2212; WAN024DAB-5_at; Start 29; Stop 53
tgatggatgatgtaaccgaggctat

SEQ ID NO: 149877 - DNA, 25 bp, Artificial
  probe
  misc_feature (1)..(25): SEQ ID NO: 2212; WAN024DAB-5_at; Start 451; Stop 475
cgtttaaagaatgctgtagttacta

SEQ ID NO: 149878 - DNA, 25 bp, Artificial
  probe
  misc_feature (1)..(25): SEQ ID NO: 678; WAN024DAC_at; Start 583; Stop 607
gaaatgcaggtgaagctgaaaactg

SEQ ID NO: 149879 - DNA, 25 bp, Artificial
  probe
  misc_feature (1)..(25): SEQ ID NO: 678; WAN024DAC_at; Start 768; Stop 792
ccaaaccctggatcaagctaatgaa

SEQ ID NO: 149880 - DNA, 25 bp, Artificial
  probe
  misc_feature (1)..(25): SEQ ID NO: 678; WAN024DAC_at; Start 231; Stop 255
gattcacgatgaccttcctgctatg

SEQ ID NO: 149881 - DNA, 25 bp, Artificial
  probe
  misc_feature (1)..(25): SEQ ID NO: 678; WAN024DAC_at; Start 14; Stop 38
aaaaattagctcttgtcgagtcggc

SEQ ID NO: 149882 - DNA, 25 bp, Artificial
  probe
  misc_feature (1)..(25): SEQ ID NO: 678; WAN024DAC_at; Start 516; Stop 540
caataagactgggaagttactagcc

SEQ ID NO: 149883 - DNA, 25 bp, Artificial
  probe
  misc_feature (1)..(25): SEQ ID NO: 678; WAN024DAC_at; Start 140; Stop 164
tgttagaagttctggaagccttgca

SEQ ID NO: 149884 - DNA, 25 bp, Artificial
  probe
  misc_feature (1)..(25): SEQ ID NO: 678; WAN024DAC_at; Start 687; Stop 711
gacacctcaaaaggatctgcaggca

SEQ ID NO: 149885 - DNA, 25 bp, Artificial
  probe
  misc_feature (1)..(25): SEQ ID NO: 678; WAN024DAC_at; Start 641; Stop 665
gagatgatgtactggatgtgacagc

SEQ ID NO: 149886 - DNA, 25 bp, Artificial
  probe
  misc_feature (1)..(25): SEQ ID NO: 678; WAN024DAC_at; Start 61; Stop 85
cagcagtttgcctctagtttacggg

SEQ ID NO: 149887 - DNA, 25 bp, Artificial
  probe
  misc_feature (1)..(25): SEQ ID NO: 678; WAN024DAC_at; Start 280; Stop 304
cggttaaccaatcacaagaaattcg

SEQ ID NO: 149888 - DNA, 25 bp, Artificial
  probe
  misc_feature (1)..(25): SEQ ID NO: 678; WAN024DAC_at; Start 413; Stop 437
tatcccttgcttcaggtagtctggg

SEQ ID NO: 149889 - DNA, 25 bp, Artificial
  probe
  misc_feature (1)..(25): SEQ ID NO: 678; WAN024DAC_at; Start 455; Stop 479
ttttggatatggagggcgaacacca

SEQ ID NO: 149890 - DNA, 25 bp, Artificial
  probe
  misc_feature (1)..(25): SEQ ID NO: 678; WAN024DAC_at; Start 702; Stop 726
tctgcaggcagaaaaatcaacctat

SEQ ID NO: 149891 - DNA, 25 bp, Artificial
  probe
  misc_feature (1)..(25): SEQ ID NO: 678; WAN024DAC_at; Start 735; Stop 759
gttgggcttggaagagtccattgcc

SEQ ID NO: 149892 - DNA, 25 bp, Artificial
  probe
  misc_feature (1)..(25): SEQ ID NO: 678; WAN024DAC_at; Start 659; Stop 683
tgacagctagttttgaggaaatcgg

SEQ ID NO: 149893 - DNA, 25 bp, Artificial
  probe
  misc_feature (1)..(25): SEQ ID NO: 678; WAN024DAC_at; Start 265; Stop 289
gattatcgaagagggcggttaacca

SEQ ID NO: 149894 - DNA, 25 bp, Artificial
  probe
  misc_feature (1)..(25): SEQ ID NO: 678; WAN024DAC_at; Start 246; Stop 270
tcctgctatggatgatgacgattat

SEQ ID NO: 149895 - DNA, 25 bp, Artificial
  probe
  misc_feature (1)..(25): SEQ ID NO: 678; WAN024DAC_at; Start 568; Stop 592
gctgaattgtcacctgaaatgcagg

SEQ ID NO: 149896 - DNA, 25 bp, Artificial
  probe
  misc_feature (1)..(25): SEQ ID NO: 678; WAN024DAC_at; Start 365; Stop 389
cgcaggcagatttgccaagtcagat

SEQ ID NO: 149897 - DNA, 25 bp, Artificial
  probe
  misc_feature (1)..(25): SEQ ID NO: 678; WAN024DAC_at; Start 312; Stop 336
tatggccattttggctggagatgcc

SEQ ID NO: 149898 - DNA, 25 bp, Artificial
  probe
  misc_feature (1)..(25): SEQ ID NO: 678; WAN024DAC_at; Start 532; Stop 556
ttactagcctatcccttccaagcgg

SEQ ID NO: 149899 - DNA, 25 bp, Artificial
  probe
  misc_feature (1)..(25): SEQ ID NO: 678; WAN024DAC_at; Start 601; Stop 625
aaaactgtgggtgaattgattggac

SEQ ID NO: 149900 - DNA, 25 bp, Artificial
  probe
  misc_feature (1)..(25): SEQ ID NO: 678; WAN024DAC_at; Start 216; Stop 240
tcatacagggagcttgattcacgat

SEQ ID NO: 149901 - DNA, 25 bp, Artificial
  probe
  misc_feature (1)..(25): SEQ ID NO: 678; WAN024DAC_at; Start 819; Stop 843
tccctttgaaacagaatcgattgta

SEQ ID NO: 149902 - DNA, 25 bp, Artificial
  probe
  misc_feature (1)..(25): SEQ ID NO: 678; WAN024DAC_at; Start 43; Stop 67
gaagatttttatggagaccagcagt

SEQ ID NO: 149903 - DNA, 25 bp, Artificial
  probe
  misc_feature (1)..(25): SEQ ID NO: 678; WAN024DAC_at; Start 112; Stop 136
ggtggcaagcgtattcggccttttc

SEQ ID NO: 149904 - DNA, 25 bp, Artificial
  probe
  misc_feature (1)..(25): SEQ ID NO: 678; WAN024DAC_at; Start 748; Stop 772
gagtccattgccttttgtaaccaaa

SEQ ID NO: 149905 - DNA, 25 bp, Artificial
  probe
  misc_feature (1)..(25): SEQ ID NO: 678; WAN024DAC_at; Start 294; Stop 318
caagaaattcggtgaagctatggcc

SEQ ID NO: 149906 - DNA, 25 bp, Artificial
  probe
  misc_feature (1)..(25): SEQ ID NO: 678; WAN024DAC_at; Start 393; Stop 417
ggtggacttgattgccaacttatcc

SEQ ID NO: 149907 - DNA, 25 bp, Artificial
  probe
  misc_feature (1)..(25): SEQ ID NO: 678; WAN024DAC_at; Start 173; Stop 197
tcaaacctgctcacgcgcaggtagc

SEQ ID NO: 149908 - DNA, 25 bp, Artificial
  probe
  misc_feature (1)..(25): SEQ ID NO: 678; WAN024DAC_at; Start 350; Stop 374
catatgccttgattgcgcaggcaga

SEQ ID NO: 149909 - DNA, 25 bp, Artificial
  probe
  misc_feature (1)..(25): SEQ ID NO: 678; WAN024DAC_at; Start 853; Stop 877
gaaagtttgagaatcaatggctaac

SEQ ID NO: 149910 - DNA, 25 bp, Artificial
  probe
  misc_feature (1)..(25): SEQ ID NO: 678; WAN024DAC_at; Start 547; Stop 571
ttccaagcggcagctattatagctg

SEQ ID NO: 149911 - DNA, 25 bp, Artificial
  probe
  misc_feature (1)..(25): SEQ ID NO: 678; WAN024DAC_at; Start 97; Stop 121
tattctattcatgctggtggcaagc

SEQ ID NO: 149912 - DNA, 25 bp, Artificial
  probe
  misc_feature (1)..(25): SEQ ID NO: 1158; WAN024DAD_at; Start 264; Stop 288
gatcaatctccaagttattccagga

SEQ ID NO: 149913 - DNA, 25 bp, Artificial
  probe
  misc_feature (1)..(25): SEQ ID NO: 1158; WAN024DAD_at; Start 272; Stop 296
tccaagttattccaggaaatacggc

SEQ ID NO: 149914 - DNA, 25 bp, Artificial
  probe
  misc_feature (1)..(25): SEQ ID NO: 1158; WAN024DAD_at; Start 49; Stop 73
tatcaaatcggcacgcaagaagaaa

SEQ ID NO: 149915 - DNA, 25 bp, Artificial
  probe
  misc_feature (1)..(25): SEQ ID NO: 1158; WAN024DAD_at; Start 44; Stop 68
cagattatcaaatcggcacgcaaga

SEQ ID NO: 149916 - DNA, 25 bp, Artificial
  probe
  misc_feature (1)..(25): SEQ ID NO: 1158; WAN024DAD_at; Start 229; Stop 253
gacaatatcgaatcggctgaattga

SEQ ID NO: 149917 - DNA, 25 bp, Artificial
  probe
  misc_feature (1)..(25): SEQ ID NO: 1158; WAN024DAD_at; Start 296; Stop 320
cttttgtaaaagctcagttaatcga

SEQ ID NO: 149918 - DNA, 25 bp, Artificial
  probe
  misc_feature (1)..(25): SEQ ID NO: 1158; WAN024DAD_at; Start 82; Stop 106
catttgaaagaagcaggtatcactg

SEQ ID NO: 149919 - DNA, 25 bp, Artificial
  probe
  misc_feature (1)..(25): SEQ ID NO: 1158; WAN024DAD_at; Start 138; Stop 162
agagttaggtattgtcaaaattcct

SEQ ID NO: 149920 - DNA, 25 bp, Artificial
  probe
  misc_feature (1)..(25): SEQ ID NO: 1158; WAN024DAD_at; Start 362; Stop 386
gctcgattttagtcattgccagaag

SEQ ID NO: 149921 - DNA, 25 bp, Artificial
  probe
  misc_feature (1)..(25): SEQ ID NO: 1158; WAN024DAD_at; Start 22; Stop 46
gaaaaaattagaagattggtgacag

SEQ ID NO: 149922 - DNA, 25 bp, Artificial
  probe
  misc_feature (1)..(25): SEQ ID NO: 1158; WAN024DAD_at; Start 279; Stop 303
tattccaggaaatacggcttttgta

SEQ ID NO: 149923 - DNA, 25 bp, Artificial
  probe
  misc_feature (1)..(25): SEQ ID NO: 1158; WAN024DAD_at; Start 111; Stop 135
tcaggcgacggtatcccgagatatc

SEQ ID NO: 149924 - DNA, 25 bp, Artificial
  probe
  misc_feature (1)..(25): SEQ ID NO: 1158; WAN024DAD_at; Start 366; Stop 390
gattttagtcattgccagaagtgga

SEQ ID NO: 149925 - DNA, 25 bp, Artificial
  probe
  misc_feature (1)..(25): SEQ ID NO: 1158; WAN024DAD_at; Start 2; Stop 26
tgaataaaaaagagagacttgaaaa

SEQ ID NO: 149926 - DNA, 25 bp, Artificial
  probe
  misc_feature (1)..(25): SEQ ID NO: 1158; WAN024DAD_at; Start 122; Stop 146
tatcccgagatatcaaagagttagg

SEQ ID NO: 149927 - DNA, 25 bp, Artificial
  probe
  misc_feature (1)..(25): SEQ ID NO: 1158; WAN024DAD_at; Start 236; Stop 260
tcgaatcggctgaattgatggataa

SEQ ID NO: 149928 - DNA, 25 bp, Artificial
  probe
  misc_feature (1)..(25): SEQ ID NO: 1158; WAN024DAD_at; Start 167; Stop 191
gagacaacacctatgtctacgaatt

SEQ ID NO: 149929 - DNA, 25 bp, Artificial
  probe
  misc_feature (1)..(25): SEQ ID NO: 1158; WAN024DAD_at; Start 91; Stop 115
gaagcaggtatcactgccactcagg

SEQ ID NO: 149930 - DNA, 25 bp, Artificial
  probe
  misc_feature (1)..(25): SEQ ID NO: 1158; WAN024DAD_at; Start 252; Stop 276
gatggataagatgatcaatctccaa

SEQ ID NO: 149931 - DNA, 25 bp, Artificial
  probe
  misc_feature (1)..(25): SEQ ID NO: 1158; WAN024DAD_at; Start 242; Stop 266
cggctgaattgatggataagatgat

SEQ ID NO: 149932 - DNA, 25 bp, Artificial
  probe
  misc_feature (1)..(25): SEQ ID NO: 1158; WAN024DAD_at; Start 388; Stop 412
ggaagtctagcagaggaaatctttg

SEQ ID NO: 149933 - DNA, 25 bp, Artificial
  probe
  misc_feature (1)..(25): SEQ ID NO: 1158; WAN024DAD_at; Start 159; Stop 183
tcctttgagagacaacacctatgtc

SEQ ID NO: 149934 - DNA, 25 bp, Artificial
  probe
  misc_feature (1)..(25): SEQ ID NO: 1158; WAN024DAD_at; Start 287; Stop 311
gaaatacggcttttgtaaaagctca

SEQ ID NO: 149935 - DNA, 25 bp, Artificial
  probe
  misc_feature (1)..(25): SEQ ID NO: 1158; WAN024DAD_at; Start 223; Stop 247
gctgaagacaatatcgaatcggctg

SEQ ID NO: 149936 - DNA, 25 bp, Artificial
  probe
  misc_feature (1)..(25): SEQ ID NO: 1158; WAN024DAD_at; Start 125; Stop 149
cccgagatatcaaagagttaggtat

SEQ ID NO: 149937 - DNA, 25 bp, Artificial
  probe
  misc_feature (1)..(25): SEQ ID NO: 1158; WAN024DAD_at; Start 67; Stop 91
gaagaaattgtagaacatttgaaag

SEQ ID NO: 149938 - DNA, 25 bp, Artificial
  probe
  misc_feature (1)..(25): SEQ ID NO: 1158; WAN024DAD_at; Start 153; Stop 177
caaaattcctttgagagacaacacc

SEQ ID NO: 149939 - DNA, 25 bp, Artificial
  probe
  misc_feature (1)..(25): SEQ ID NO: 1158; WAN024DAD_at; Start 55; Stop 79
atcggcacgcaagaagaaattgtag

SEQ ID NO: 149940 - DNA, 25 bp, Artificial
  probe
  misc_feature (1)..(25): SEQ ID NO: 1158; WAN024DAD_at; Start 37; Stop 61
ttggtgacagattatcaaatcggca

SEQ ID NO: 149941 - DNA, 25 bp, Artificial
  probe
  misc_feature (1)..(25): SEQ ID NO: 1158; WAN024DAD_at; Start 99; Stop 123
tatcactgccactcaggcgacggta

SEQ ID NO: 149942 - DNA, 25 bp, Artificial
  probe
  misc_feature (1)..(25): SEQ ID NO: 1158; WAN024DAD_at; Start 117; Stop 141
gacggtatcccgagatatcaaagag

SEQ ID NO: 149943 - DNA, 25 bp, Artificial
  probe
  misc_feature (1)..(25): SEQ ID NO: 1158; WAN024DAD_at; Start 217; Stop 241
caactggctgaagacaatatcgaat

SEQ ID NO: 149944 - DNA, 25 bp, Artificial
  probe
  misc_feature (1)..(25): SEQ ID NO: 1158; WAN024DAD_at; Start 380; Stop 404
ccagaagtggaagtctagcagagga

SEQ ID NO: 149945 - DNA, 25 bp, Artificial
  probe
  misc_feature (1)..(25): SEQ ID NO: 1158; WAN024DAD_at; Start 374; Stop 398
tcattgccagaagtggaagtctagc

SEQ ID NO: 149946 - DNA, 25 bp, Artificial
  probe
  misc_feature (1)..(25): SEQ ID NO: 2921; WAN024DAE_at; Start 314; Stop 338
cacaacttgttggtgatgaattggc

SEQ ID NO: 149947 - DNA, 25 bp, Artificial
  probe
  misc_feature (1)..(25): SEQ ID NO: 2921; WAN024DAE_at; Start 126; Stop 150
gactctcgctgttgctgcagaagta

SEQ ID NO: 149948 - DNA, 25 bp, Artificial
  probe
  misc_feature (1)..(25): SEQ ID NO: 2921; WAN024DAE_at; Start 174; Stop 198
tatcgtgattgatgcttatggagct

SEQ ID NO: 149949 - DNA, 25 bp, Artificial
  probe
  misc_feature (1)..(25): SEQ ID NO: 2921; WAN024DAE_at; Start 81; Stop 105
ccaccttgtggatgttacagctgaa

SEQ ID NO: 149950 - DNA, 25 bp, Artificial
  probe
  misc_feature (1)..(25): SEQ ID NO: 2921; WAN024DAE_at; Start 177; Stop 201
cgtgattgatgcttatggagctggt

SEQ ID NO: 149951 - DNA, 25 bp, Artificial
  probe
  misc_feature (1)..(25): SEQ ID NO: 2921; WAN024DAE_at; Start 6; Stop 30
tattgttatcggtgcagatgctgca

SEQ ID NO: 149952 - DNA, 25 bp, Artificial
  probe
  misc_feature (1)..(25): SEQ ID NO: 2921; WAN024DAE_at; Start 20; Stop 44
cagatgctgcaggtttgagattgaa

SEQ ID NO: 149953 - DNA, 25 bp, Artificial
  probe
  misc_feature (1)..(25): SEQ ID NO: 2921; WAN024DAE_at; Start 70; Stop 94
aaagaaaacttccaccttgtggatg

SEQ ID NO: 149954 - DNA, 25 bp, Artificial
  probe
  misc_feature (1)..(25): SEQ ID NO: 2921; WAN024DAE_at; Start 89; Stop 113
tggatgttacagctgaaggtcaaga

SEQ ID NO: 149955 - DNA, 25 bp, Artificial
  probe
  misc_feature (1)..(25): SEQ ID NO: 2921; WAN024DAE_at; Start 256; Stop 280
gaacgttcagcttatatgactcgtg

SEQ ID NO: 149956 - DNA, 25 bp, Artificial
  probe
  misc_feature (1)..(25): SEQ ID NO: 2921; WAN024DAE_at; Start 132; Stop 156
cgctgttgctgcagaagtaaacaaa

SEQ ID NO: 149957 - DNA, 25 bp, Artificial
  probe
  misc_feature (1)..(25): SEQ ID NO: 2921; WAN024DAE_at; Start 287; Stop 311
acaactcacgtatgatcactatggg

SEQ ID NO: 149958 - DNA, 25 bp, Artificial
  probe
  misc_feature (1)..(25): SEQ ID NO: 2921; WAN024DAE_at; Start 224; Stop 248
tcaaaggaatggttgctgcagaagt

SEQ ID NO: 149959 - DNA, 25 bp, Artificial
  probe
  misc_feature (1)..(25): SEQ ID NO: 2921; WAN024DAE_at; Start 268; Stop 292
tatatgactcgtggccacaacaact

SEQ ID NO: 149960 - DNA, 25 bp, Artificial
  probe
  misc_feature (1)..(25): SEQ ID NO: 2921; WAN024DAE_at; Start 94; Stop 118
gttacagctgaaggtcaagactttg

SEQ ID NO: 149961 - DNA, 25 bp, Artificial
  probe
  misc_feature (1)..(25): SEQ ID NO: 2921; WAN024DAE_at; Start 2; Stop 26
tgtctattgttatcggtgcagatgc

SEQ ID NO: 149962 - DNA, 25 bp, Artificial
  probe
  misc_feature (1)..(25): SEQ ID NO: 2921; WAN024DAE_at; Start 161; Stop 185
aacaaaaccttggtatcgtgattga

SEQ ID NO: 149963 - DNA, 25 bp, Artificial
  probe
  misc_feature (1)..(25): SEQ ID NO: 2921; WAN024DAE_at; Start 98; Stop 122
cagctgaaggtcaagactttgttga

SEQ ID NO: 149964 - DNA, 25 bp, Artificial
  probe
  misc_feature (1)..(25): SEQ ID NO: 2921; WAN024DAE_at; Start 12; Stop 36
tatcggtgcagatgctgcaggtttg

SEQ ID NO: 149965 - DNA, 25 bp, Artificial
  probe
  misc_feature (1)..(25): SEQ ID NO: 2921; WAN024DAE_at; Start 36; Stop 60
gagattgaaagaagttgtgaaagac

SEQ ID NO: 149966 - DNA, 25 bp, Artificial
  probe
  misc_feature (1)..(25): SEQ ID NO: 2921; WAN024DAE_at; Start 45; Stop 69
agaagttgtgaaagacttcttagaa

SEQ ID NO: 149967 - DNA, 25 bp, Artificial
  probe
  misc_feature (1)..(25): SEQ ID NO: 2921; WAN024DAE_at; Start 123; Stop 147
tgtgactctcgctgttgctgcagaa

SEQ ID NO: 149968 - DNA, 25 bp, Artificial
  probe
  misc_feature (1)..(25): SEQ ID NO: 2921; WAN024DAE_at; Start 273; Stop 297
gactcgtggccacaacaactcacgt

SEQ ID NO: 149969 - DNA, 25 bp, Artificial
  probe
  misc_feature (1)..(25): SEQ ID NO: 2921; WAN024DAE_at; Start 117; Stop 141
tgttgatgtgactctcgctgttgct

SEQ ID NO: 149970 - DNA, 25 bp, Artificial
  probe
  misc_feature (1)..(25): SEQ ID NO: 2921; WAN024DAE_at; Start 407; Stop 431
tgttgaacaaaatgggctaactaat

SEQ ID NO: 149971 - DNA, 25 bp, Artificial
  probe
  misc_feature (1)..(25): SEQ ID NO: 2921; WAN024DAE_at; Start 403; Stop 427
gacatgttgaacaaaatgggctaac

SEQ ID NO: 149972 - DNA, 25 bp, Artificial
  probe
  misc_feature (1)..(25): SEQ ID NO: 2921; WAN024DAE_at; Start 319; Stop 343
cttgttggtgatgaattggctaaaa

SEQ ID NO: 149973 - DNA, 25 bp, Artificial
  probe
  misc_feature (1)..(25): SEQ ID NO: 2921; WAN024DAE_at; Start 211; Stop 235
gttgcaactaagatcaaaggaatgg

SEQ ID NO: 149974 - DNA, 25 bp, Artificial
  probe
  misc_feature (1)..(25): SEQ ID NO: 2921; WAN024DAE_at; Start 110; Stop 134
aagactttgttgatgtgactctcgc

SEQ ID NO: 149975 - DNA, 25 bp, Artificial
  probe
  misc_feature (1)..(25): SEQ ID NO: 2921; WAN024DAE_at; Start 265; Stop 289
gcttatatgactcgtggccacaaca

SEQ ID NO: 149976 - DNA, 25 bp, Artificial
  probe
  misc_feature (1)..(25): SEQ ID NO: 2921; WAN024DAE_at; Start 25; Stop 49
gctgcaggtttgagattgaaagaag

SEQ ID NO: 149977 - DNA, 25 bp, Artificial
  probe
  misc_feature (1)..(25): SEQ ID NO: 2921; WAN024DAE_at; Start 262; Stop 286
tcagcttatatgactcgtggccaca

SEQ ID NO: 149978 - DNA, 25 bp, Artificial
  probe
  misc_feature (1)..(25): SEQ ID NO: 2921; WAN024DAE_at; Start 139; Stop 163
gctgcagaagtaaacaaagaagaac

SEQ ID NO: 149979 - DNA, 25 bp, Artificial
  probe
  misc_feature (1)..(25): SEQ ID NO: 2921; WAN024DAE_at; Start 279; Stop 303
tggccacaacaactcacgtatgatc

SEQ ID NO: 149980 - DNA, 25 bp, Artificial
  probe
  misc_feature (1)..(25): SEQ ID NO: 2797; WAN024DAF_at; Start 431; Stop 455
tagcagatcattttcctgaggacga

SEQ ID NO: 149981 - DNA, 25 bp, Artificial
  probe
  misc_feature (1)..(25): SEQ ID NO: 2797; WAN024DAF_at; Start 665; Stop 689
gagatgataaccaatcacttctgga

SEQ ID NO: 149982 - DNA, 25 bp, Artificial
  probe
  misc_feature (1)..(25): SEQ ID NO: 2797; WAN024DAF_at; Start 709; Stop 733
caatcctatccaaaagccttcgaga

SEQ ID NO: 149983 - DNA, 25 bp, Artificial
  probe
  misc_feature (1)..(25): SEQ ID NO: 2797; WAN024DAF_at; Start 538; Stop 562
gaaattctcaggaatgttgaagaag

SEQ ID NO: 149984 - DNA, 25 bp, Artificial
  probe
  misc_feature (1)..(25): SEQ ID NO: 2797; WAN024DAF_at; Start 243; Stop 267
gctatcaaagaaatatcattatccg

SEQ ID NO: 149985 - DNA, 25 bp, Artificial
  probe
  misc_feature (1)..(25): SEQ ID NO: 2797; WAN024DAF_at; Start 370; Stop 394
gctaagtatcctgtcgcttttcaaa

SEQ ID NO: 149986 - DNA, 25 bp, Artificial
  probe
  misc_feature (1)..(25): SEQ ID NO: 2797; WAN024DAF_at; Start 422; Stop 446
gtcagaagctagcagatcattttcc

SEQ ID NO: 149987 - DNA, 25 bp, Artificial
  probe
  misc_feature (1)..(25): SEQ ID NO: 2797; WAN024DAF_at; Start 150; Stop 174
gatgaagaccgaagagtccagagaa

SEQ ID NO: 149988 - DNA, 25 bp, Artificial
  probe
  misc_feature (1)..(25): SEQ ID NO: 2797; WAN024DAF_at; Start 259; Stop 283
cattatccgattcaagagtatctct

SEQ ID NO: 149989 - DNA, 25 bp, Artificial
  probe
  misc_feature (1)..(25): SEQ ID NO: 2797; WAN024DAF_at; Start 274; Stop 298
gagtatctctatgtaaccttgacag

SEQ ID NO: 149990 - DNA, 25 bp, Artificial
  probe
  misc_feature (1)..(25): SEQ ID NO: 2797; WAN024DAF_at; Start 497; Stop 521
aaaatgaagtggaacttgtggagtc

SEQ ID NO: 149991 - DNA, 25 bp, Artificial
  probe
  misc_feature (1)..(25): SEQ ID NO: 2797; WAN024DAF_at; Start 301; Stop 325
catatttactgttcttatcaagctc

SEQ ID NO: 149992 - DNA, 25 bp, Artificial
  probe
  misc_feature (1)..(25): SEQ ID NO: 2797; WAN024DAF_at; Start 797; Stop 821
gagtttatctagttctacatatcca

SEQ ID NO: 149993 - DNA, 25 bp, Artificial
  probe
  misc_feature (1)..(25): SEQ ID NO: 2797; WAN024DAF_at; Start 15; Stop 39
aaatccaatgaatcacaatgtctcg

SEQ ID NO: 149994 - DNA, 25 bp, Artificial
  probe
  misc_feature (1)..(25): SEQ ID NO: 2797; WAN024DAF_at; Start 721; Stop 745
aaagccttcgagattggttccaaga

SEQ ID NO: 149995 - DNA, 25 bp, Artificial
  probe
  misc_feature (1)..(25): SEQ ID NO: 2797; WAN024DAF_at; Start 396; Stop 420
cgcaaatgaagcttttgaaatttac

SEQ ID NO: 149996 - DNA, 25 bp, Artificial
  probe
  misc_feature (1)..(25): SEQ ID NO: 2797; WAN024DAF_at; Start 653; Stop 677
tagacagatctagagatgataacca

SEQ ID NO: 149997 - DNA, 25 bp, Artificial
  probe
  misc_feature (1)..(25): SEQ ID NO: 2797; WAN024DAF_at; Start 335; Stop 359
gaaggtacaaggatagtaatctgcc

SEQ ID NO: 149998 - DNA, 25 bp, Artificial
  probe
  misc_feature (1)..(25): SEQ ID NO: 2797; WAN024DAF_at; Start 44; Stop 68
tcagaaatgataagggagaagaggt

SEQ ID NO: 149999 - DNA, 25 bp, Artificial
  probe
  misc_feature (1)..(25): SEQ ID NO: 2797; WAN024DAF_at; Start 522; Stop 546
gattgataagaggaaagaaattctc

SEQ ID NO: 150000 - DNA, 25 bp, Artificial
  probe
  misc_feature (1)..(25): SEQ ID NO: 2797; WAN024DAF_at; Start 30; Stop 54
caatgtctcgcttgtcagaaatgat

SEQ ID NO: 150001 - DNA, 25 bp, Artificial
  probe
  misc_feature (1)..(25): SEQ ID NO: 2797; WAN024DAF_at; Start 740; Stop 764
ccaagatctatgatgtgattacgca

SEQ ID NO: 150002 - DNA, 25 bp, Artificial
  probe
  misc_feature (1)..(25): SEQ ID NO: 2797; WAN024DAF_at; Start 770; Stop 794
cgggtcttgatttgtataaaagtga

SEQ ID NO: 150003 - DNA, 25 bp, Artificial
  probe
  misc_feature (1)..(25): SEQ ID NO: 2797; WAN024DAF_at; Start 319; Stop 343
caagctctaactcaaggaaggtaca

SEQ ID NO: 150004 - DNA, 25 bp, Artificial
  probe
  misc_feature (1)..(25): SEQ ID NO: 2797; WAN024DAF_at; Start 136; Stop 160
gagaaaatctttcggatgaagaccg

SEQ ID NO: 150005 - DNA, 25 bp, Artificial
  probe
  misc_feature (1)..(25): SEQ ID NO: 2797; WAN024DAF_at; Start 180; Stop 204
tatggctcttctcaaagatgttccg

SEQ ID NO: 150006 - DNA, 25 bp, Artificial
  probe
  misc_feature (1)..(25): SEQ ID NO: 2797; WAN024DAF_at; Start 382; Stop 406
gtcgcttttcaaatcgcaaatgaag

SEQ ID NO: 150007 - DNA, 25 bp, Artificial
  probe
  misc_feature (1)..(25): SEQ ID NO: 2797; WAN024DAF_at; Start 508; Stop 532
gaacttgtggagtcgattgataaga

SEQ ID NO: 150008 - DNA, 25 bp, Artificial
  probe
  misc_feature (1)..(25): SEQ ID NO: 2797; WAN024DAF_at; Start 755; Stop 779
tgattacgcaacatacgggtcttga

SEQ ID NO: 150009 - DNA, 25 bp, Artificial
  probe
  misc_feature (1)..(25): SEQ ID NO: 2797; WAN024DAF_at; Start 679; Stop 703
tcacttctggatatggaagatcata

SEQ ID NO: 150010 - DNA, 25 bp, Artificial
  probe
  misc_feature (1)..(25): SEQ ID NO: 2797; WAN024DAF_at; Start 163; Stop 187
gagtccagagaaaactttatggctc

SEQ ID NO: 150011 - DNA, 25 bp, Artificial
  probe
  misc_feature (1)..(25): SEQ ID NO: 2797; WAN024DAF_at; Start 196; Stop 220
gatgttccgcttgattttatcacag

SEQ ID NO: 150012 - DNA, 25 bp, Artificial
  probe
  misc_feature (1)..(25): SEQ ID NO: 2797; WAN024DAF_at; Start 215; Stop 239
tcacagtgacctatgaaatcattga

SEQ ID NO: 150013 - DNA, 25 bp, Artificial
  probe
  misc_feature (1)..(25): SEQ ID NO: 2797; WAN024DAF_at; Start 814; Stop 838
catatccaacgtttattgtcataac

SEQ ID NO: 150014 - DNA, 25 bp, Artificial
  probe
  misc_feature (1)..(25): SEQ ID NO: 1204; WAN024DAG_at; Start 35; Stop 59
aaatcgtagcctatgctggcgatgc

SEQ ID NO: 150015 - DNA, 25 bp, Artificial
  probe
  misc_feature (1)..(25): SEQ ID NO: 1204; WAN024DAG_at; Start 33; Stop 57
tgaaatcgtagcctatgctggcgat

SEQ ID NO: 150016 - DNA, 25 bp, Artificial
  probe
  misc_feature (1)..(25): SEQ ID NO: 1204; WAN024DAG_at; Start 102; Stop 126
tgattttgaaaaagcggacgctctg

SEQ ID NO: 150017 - DNA, 25 bp, Artificial
  probe
  misc_feature (1)..(25): SEQ ID NO: 1204; WAN024DAG_at; Start 111; Stop 135
aaaagcggacgctctggtagaggaa

SEQ ID NO: 150018 - DNA, 25 bp, Artificial
  probe
  misc_feature (1)..(25): SEQ ID NO: 1204; WAN024DAG_at; Start 20; Stop 44
cattgttaggttttgaaatcgtagc

SEQ ID NO: 150019 - DNA, 25 bp, Artificial
  probe
  misc_feature (1)..(25): SEQ ID NO: 1204; WAN024DAG_at; Start 134; Stop 158
aagctggtagctgtattgcagaggc

SEQ ID NO: 150020 - DNA, 25 bp, Artificial
  probe
  misc_feature (1)..(25): SEQ ID NO: 1204; WAN024DAG_at; Start 138; Stop 162
tggtagctgtattgcagaggctcac

SEQ ID NO: 150021 - DNA, 25 bp, Artificial
  probe
  misc_feature (1)..(25): SEQ ID NO: 1204; WAN024DAG_at; Start 49; Stop 73
gctggcgatgctcgttcaaaactat

SEQ ID NO: 150022 - DNA, 25 bp, Artificial
  probe
  misc_feature (1)..(25): SEQ ID NO: 1204; WAN024DAG_at; Start 81; Stop 105
cttgaaggctgctgaagctggtgat

SEQ ID NO: 150023 - DNA, 25 bp, Artificial
  probe
  misc_feature (1)..(25): SEQ ID NO: 1204; WAN024DAG_at; Start 46; Stop 70
tatgctggcgatgctcgttcaaaac

SEQ ID NO: 150024 - DNA, 25 bp, Artificial
  probe
  misc_feature (1)..(25): SEQ ID NO: 1204; WAN024DAG_at; Start 84; Stop 108
gaaggctgctgaagctggtgatttt

SEQ ID NO: 150025 - DNA, 25 bp, Artificial
  probe
  misc_feature (1)..(25): SEQ ID NO: 1204; WAN024DAG_at; Start 88; Stop 112
gctgctgaagctggtgattttgaaa

SEQ ID NO: 150026 - DNA, 25 bp, Artificial
  probe
  misc_feature (1)..(25): SEQ ID NO: 1204; WAN024DAG_at; Start 160; Stop 184
caccacgcgcaaacaagtctattga

SEQ ID NO: 150027 - DNA, 25 bp, Artificial
  probe
  misc_feature (1)..(25): SEQ ID NO: 1204; WAN024DAG_at; Start 173; Stop 197
caagtctattgactaaggaagcttc

SEQ ID NO: 150028 - DNA, 25 bp, Artificial
  probe
  misc_feature (1)..(25): SEQ ID NO: 1204; WAN024DAG_at; Start 53; Stop 77
gcgatgctcgttcaaaactattgga

SEQ ID NO: 150029 - DNA, 25 bp, Artificial
  probe
  misc_feature (1)..(25): SEQ ID NO: 1204; WAN024DAG_at; Start 166; Stop 190
gcgcaaacaagtctattgactaagg

SEQ ID NO: 150030 - DNA, 25 bp, Artificial
  probe
  misc_feature (1)..(25): SEQ ID NO: 1204; WAN024DAG_at; Start 28; Stop 52
ggttttgaaatcgtagcctatgctg

SEQ ID NO: 150031 - DNA, 25 bp, Artificial
  probe
  misc_feature (1)..(25): SEQ ID NO: 1204; WAN024DAG_at; Start 148; Stop 172
attgcagaggctcaccacgcgcaaa

SEQ ID NO: 150032 - DNA, 25 bp, Artificial
  probe
  misc_feature (1)..(25): SEQ ID NO: 1204; WAN024DAG_at; Start 91; Stop 115
gctgaagctggtgattttgaaaaag

SEQ ID NO: 150033 - DNA, 25 bp, Artificial
  probe
  misc_feature (1)..(25): SEQ ID NO: 1204; WAN024DAG_at; Start 38; Stop 62
tcgtagcctatgctggcgatgctcg

SEQ ID NO: 150034 - DNA, 25 bp, Artificial
  probe
  misc_feature (1)..(25): SEQ ID NO: 1204; WAN024DAG_at; Start 144; Stop 168
ctgtattgcagaggctcaccacgcg

SEQ ID NO: 150035 - DNA, 25 bp, Artificial
  probe
  misc_feature (1)..(25): SEQ ID NO: 1204; WAN024DAG_at; Start 61; Stop 85
cgttcaaaactattggaagccttga

SEQ ID NO: 150036 - DNA, 25 bp, Artificial
  probe
  misc_feature (1)..(25): SEQ ID NO: 1204; WAN024DAG_at; Start 163; Stop 187
cacgcgcaaacaagtctattgacta

SEQ ID NO: 150037 - DNA, 25 bp, Artificial
  probe
  misc_feature (1)..(25): SEQ ID NO: 1204; WAN024DAG_at; Start 57; Stop 81
tgctcgttcaaaactattggaagcc

SEQ ID NO: 150038 - DNA, 25 bp, Artificial
  probe
  misc_feature (1)..(25): SEQ ID NO: 1204; WAN024DAG_at; Start 2; Stop 26
tgaatagagaagaagtaacattgtt

SEQ ID NO: 150039 - DNA, 25 bp, Artificial
  probe
  misc_feature (1)..(25): SEQ ID NO: 1204; WAN024DAG_at; Start 6; Stop 30
tagagaagaagtaacattgttaggt

SEQ ID NO: 150040 - DNA, 25 bp, Artificial
  probe
  misc_feature (1)..(25): SEQ ID NO: 1204; WAN024DAG_at; Start 98; Stop 122
ctggtgattttgaaaaagcggacgc

SEQ ID NO: 150041 - DNA, 25 bp, Artificial
  probe
  misc_feature (1)..(25): SEQ ID NO: 1204; WAN024DAG_at; Start 43; Stop 67
gcctatgctggcgatgctcgttcaa

SEQ ID NO: 150042 - DNA, 25 bp, Artificial
  probe
  misc_feature (1)..(25): SEQ ID NO: 1204; WAN024DAG_at; Start 128; Stop 152
tagaggaagctggtagctgtattgc

SEQ ID NO: 150043 - DNA, 25 bp, Artificial
  probe
  misc_feature (1)..(25): SEQ ID NO: 1204; WAN024DAG_at; Start 31; Stop 55
tttgaaatcgtagcctatgctggcg

SEQ ID NO: 150044 - DNA, 25 bp, Artificial
  probe
  misc_feature (1)..(25): SEQ ID NO: 1204; WAN024DAG_at; Start 106; Stop 130
tttgaaaaagcggacgctctggtag

SEQ ID NO: 150045 - DNA, 25 bp, Artificial
  probe
  misc_feature (1)..(25): SEQ ID NO: 1204; WAN024DAG_at; Start 157; Stop 181
gctcaccacgcgcaaacaagtctat

SEQ ID NO: 150046 - DNA, 25 bp, Artificial
  probe
  misc_feature (1)..(25): SEQ ID NO: 1204; WAN024DAG_at; Start 78; Stop 102
agccttgaaggctgctgaagctggt

SEQ ID NO: 150047 - DNA, 25 bp, Artificial
  probe
  misc_feature (1)..(25): SEQ ID NO: 1204; WAN024DAG_at; Start 141; Stop 165
tagctgtattgcagaggctcaccac

SEQ ID NO: 150048 - DNA, 25 bp, Artificial
  probe
  misc_feature (1)..(25): SEQ ID NO: 2150; WAN024DAH_at; Start 691; Stop 715
aatgaagaaggctacacagagagtc

SEQ ID NO: 150049 - DNA, 25 bp, Artificial
  probe
  misc_feature (1)..(25): SEQ ID NO: 2150; WAN024DAH_at; Start 113; Stop 137
caaacgacttggatgactggagaaa

SEQ ID NO: 150050 - DNA, 25 bp, Artificial
  probe
  misc_feature (1)..(25): SEQ ID NO: 2150; WAN024DAH_at; Start 780; Stop 804
tctcatgaacatgggacaagatcca

SEQ ID NO: 150051 - DNA, 25 bp, Artificial
  probe
  misc_feature (1)..(25): SEQ ID NO: 2150; WAN024DAH_at; Start 381; Stop 405
tccttacctacaaaagaaggctgag

SEQ ID NO: 150052 - DNA, 25 bp, Artificial
  probe
  misc_feature (1)..(25): SEQ ID NO: 2150; WAN024DAH_at; Start 904; Stop 928
taccttcttggcgaagttgaagcca

SEQ ID NO: 150053 - DNA, 25 bp, Artificial
  probe
  misc_feature (1)..(25): SEQ ID NO: 2150; WAN024DAH_at; Start 127; Stop 151
gactggagaaagctatctaacaaag

SEQ ID NO: 150054 - DNA, 25 bp, Artificial
  probe
  misc_feature (1)..(25): SEQ ID NO: 2150; WAN024DAH_at; Start 13; Stop 37
tacaaagccattaactggaatgcca

SEQ ID NO: 150055 - DNA, 25 bp, Artificial
  probe
  misc_feature (1)..(25): SEQ ID NO: 2150; WAN024DAH_at; Start 703; Stop 727
tacacagagagtctttatgacggtg

SEQ ID NO: 150056 - DNA, 25 bp, Artificial
  probe
  misc_feature (1)..(25): SEQ ID NO: 2150; WAN024DAH_at; Start 651; Stop 675
caaagaatggatgtacgacctactc

SEQ ID NO: 150057 - DNA, 25 bp, Artificial
  probe
  misc_feature (1)..(25): SEQ ID NO: 2150; WAN024DAH_at; Start 242; Stop 266
tccgtacaccacatgaggaagctgt

SEQ ID NO: 150058 - DNA, 25 bp, Artificial
  probe
  misc_feature (1)..(25): SEQ ID NO: 2150; WAN024DAH_at; Start 628; Stop 652
cctgaagaagagcaagaaaaactca

SEQ ID NO: 150059 - DNA, 25 bp, Artificial
  probe
  misc_feature (1)..(25): SEQ ID NO: 2150; WAN024DAH_at; Start 797; Stop 821
aagatccacttttcccagattcagc

SEQ ID NO: 150060 - DNA, 25 bp, Artificial
  probe
  misc_feature (1)..(25): SEQ ID NO: 2150; WAN024DAH_at; Start 761; Stop 785
gctacaatgccaataaagctctcat

SEQ ID NO: 150061 - DNA, 25 bp, Artificial
  probe
  misc_feature (1)..(25): SEQ ID NO: 2150; WAN024DAH_at; Start 467; Stop 491
tcgaaaccttcctcttctactctgg

SEQ ID NO: 150062 - DNA, 25 bp, Artificial
  probe
  misc_feature (1)..(25): SEQ ID NO: 2150; WAN024DAH_at; Start 142; Stop 166
tctaacaaagagaaagacttggtcg

SEQ ID NO: 150063 - DNA, 25 bp, Artificial
  probe
  misc_feature (1)..(25): SEQ ID NO: 2150; WAN024DAH_at; Start 425; Stop 449
taaacggcagcccacttgaaaagaa

SEQ ID NO: 150064 - DNA, 25 bp, Artificial
  probe
  misc_feature (1)..(25): SEQ ID NO: 2150; WAN024DAH_at; Start 532; Stop 556
gccaacgttgcagaaatcattaaat

SEQ ID NO: 150065 - DNA, 25 bp, Artificial
  probe
  misc_feature (1)..(25): SEQ ID NO: 2150; WAN024DAH_at; Start 396; Stop 420
gaaggctgagattgtcaacgaaatc

SEQ ID NO: 150066 - DNA, 25 bp, Artificial
  probe
  misc_feature (1)..(25): SEQ ID NO: 2150; WAN024DAH_at; Start 288; Stop 312
ggaatctgtccacgctaaatcttac

SEQ ID NO: 150067 - DNA, 25 bp, Artificial
  probe
  misc_feature (1)..(25): SEQ ID NO: 2150; WAN024DAH_at; Start 448; Stop 472
aaagttgccagcgtcttcctcgaaa

SEQ ID NO: 150068 - DNA, 25 bp, Artificial
  probe
  misc_feature (1)..(25): SEQ ID NO: 2150; WAN024DAH_at; Start 843; Stop 867
tatgaacggtatttcaacaggaact

SEQ ID NO: 150069 - DNA, 25 bp, Artificial
  probe
  misc_feature (1)..(25): SEQ ID NO: 2150; WAN024DAH_at; Start 181; Stop 205
ggtttaacccttcttgacactatgc

SEQ ID NO: 150070 - DNA, 25 bp, Artificial
  probe
  misc_feature (1)..(25): SEQ ID NO: 2150; WAN024DAH_at; Start 28; Stop 52
tggaatgccatcgaagatgtcatcg

SEQ ID NO: 150071 - DNA, 25 bp, Artificial
  probe
  misc_feature (1)..(25): SEQ ID NO: 2150; WAN024DAH_at; Start 814; Stop 838
gattcagctgaagatgtcaacccaa

SEQ ID NO: 150072 - DNA, 25 bp, Artificial
  probe
  misc_feature (1)..(25): SEQ ID NO: 2150; WAN024DAH_at; Start 568; Stop 592
gacgagtctgttcacggaacctaca

SEQ ID NO: 150073 - DNA, 25 bp, Artificial
  probe
  misc_feature (1)..(25): SEQ ID NO: 2150; WAN024DAH_at; Start 100; Stop 124
cgtattcccttatcaaacgacttgg

SEQ ID NO: 150074 - DNA, 25 bp, Artificial
  probe
  misc_feature (1)..(25): SEQ ID NO: 2150; WAN024DAH_at; Start 79; Stop 103
gagcaattttggctcgatacacgta

SEQ ID NO: 150075 - DNA, 25 bp, Artificial
  probe
  misc_feature (1)..(25): SEQ ID NO: 2150; WAN024DAH_at; Start 747; Stop 771
taaaaccttccttcgctacaatgcc

SEQ ID NO: 150076 - DNA, 25 bp, Artificial
  probe
  misc_feature (1)..(25): SEQ ID NO: 2150; WAN024DAH_at; Start 59; Stop 83
caacttgggaaaaactgacggagca

SEQ ID NO: 150077 - DNA, 25 bp, Artificial
  probe
  misc_feature (1)..(25): SEQ ID NO: 2150; WAN024DAH_at; Start 43; Stop 67
gatgtcatcgacaaatcaacttggg

SEQ ID NO: 150078 - DNA, 25 bp, Artificial
  probe
  misc_feature (1)..(25): SEQ ID NO: 2150; WAN024DAH_at; Start 884; Stop 908
tctctcaagtcggaaatggttacct

SEQ ID NO: 150079 - DNA, 25 bp, Artificial
  probe
  misc_feature (1)..(25): SEQ ID NO: 2150; WAN024DAH_at; Start 355; Stop 379
gaaattttcgaatggaccaatacca

SEQ ID NO: 150080 - DNA, 25 bp, Artificial
  probe
  misc_feature (1)..(25): SEQ ID NO: 2150; WAN024DAH_at; Start 860; Stop 884
caggaacttccaaccatgacttctt

SEQ ID NO: 150081 - DNA, 25 bp, Artificial
  probe
  misc_feature (1)..(25): SEQ ID NO: 2150; WAN024DAH_at; Start 411; Stop 435
caacgaaatctacctaaacggcagc

SEQ ID NO: 150082 - DNA, 25 bp, Artificial
  probe
  misc_feature (1)..(25): SEQ ID NO: 4948; WAN024DAI_at; Start 149; Stop 173
agctcggttttagcgcagctcctgt

SEQ ID NO: 150083 - DNA, 25 bp, Artificial
  probe
  misc_feature (1)..(25): SEQ ID NO: 4948; WAN024DAI_at; Start 146; Stop 170
aagagctcggttttagcgcagctcc

SEQ ID NO: 150084 - DNA, 25 bp, Artificial
  probe
  misc_feature (1)..(25): SEQ ID NO: 4948; WAN024DAI_at; Start 153; Stop 177
cggttttagcgcagctcctgttatc

SEQ ID NO: 150085 - DNA, 25 bp, Artificial
  probe
  misc_feature (1)..(25): SEQ ID NO: 4948; WAN024DAI_at; Start 211; Stop 235
ccaggaaaactgaaacaattagcat

SEQ ID NO: 150086 - DNA, 25 bp, Artificial
  probe
  misc_feature (1)..(25): SEQ ID NO: 4948; WAN024DAI_at; Start 63; Stop 87
gaccaagcgtttcttggacagtaat

SEQ ID NO: 150087 - DNA, 25 bp, Artificial
  probe
  misc_feature (1)..(25): SEQ ID NO: 4948; WAN024DAI_at; Start 51; Stop 75
ccaatgtaaaatgaccaagcgtttc

SEQ ID NO: 150088 - DNA, 25 bp, Artificial
  probe
  misc_feature (1)..(25): SEQ ID NO: 4948; WAN024DAI_at; Start 199; Stop 223
tcaggtttccaaccaggaaaactga

SEQ ID NO: 150089 - DNA, 25 bp, Artificial
  probe
  misc_feature (1)..(25): SEQ ID NO: 4948; WAN024DAI_at; Start 42; Stop 66
caattgtgtccaatgtaaaatgacc

SEQ ID NO: 150090 - DNA, 25 bp, Artificial
  probe
  misc_feature (1)..(25): SEQ ID NO: 4948; WAN024DAI_at; Start 143; Stop 167
ttaaagagctcggttttagcgcagc

SEQ ID NO: 150091 - DNA, 25 bp, Artificial
  probe
  misc_feature (1)..(25): SEQ ID NO: 4948; WAN024DAI_at; Start 103; Stop 127
gaaatcaatcttgatgagcaacctg

SEQ ID NO: 150092 - DNA, 25 bp, Artificial
  probe
  misc_feature (1)..(25): SEQ ID NO: 4948; WAN024DAI_at; Start 189; Stop 213
tgaagtcttttcaggtttccaacca

SEQ ID NO: 150093 - DNA, 25 bp, Artificial
  probe
  misc_feature (1)..(25): SEQ ID NO: 4948; WAN024DAI_at; Start 155; Stop 179
gttttagcgcagctcctgttatcca

SEQ ID NO: 150094 - DNA, 25 bp, Artificial
  probe
  misc_feature (1)..(25): SEQ ID NO: 4948; WAN024DAI_at; Start 97; Stop 121
tatcgtgaaatcaatcttgatgagc

SEQ ID NO: 150095 - DNA, 25 bp, Artificial
  probe
  misc_feature (1)..(25): SEQ ID NO: 4948; WAN024DAI_at; Start 71; Stop 95
gtttcttggacagtaataatgtctc

SEQ ID NO: 150096 - DNA, 25 bp, Artificial
  probe
  misc_feature (1)..(25): SEQ ID NO: 4948; WAN024DAI_at; Start 66; Stop 90
caagcgtttcttggacagtaataat

SEQ ID NO: 150097 - DNA, 25 bp, Artificial
  probe
  misc_feature (1)..(25): SEQ ID NO: 4948; WAN024DAI_at; Start 59; Stop 83
aaatgaccaagcgtttcttggacag

SEQ ID NO: 150098 - DNA, 25 bp, Artificial
  probe
  misc_feature (1)..(25): SEQ ID NO: 4948; WAN024DAI_at; Start 48; Stop 72
tgtccaatgtaaaatgaccaagcgt

SEQ ID NO: 150099 - DNA, 25 bp, Artificial
  probe
  misc_feature (1)..(25): SEQ ID NO: 4948; WAN024DAI_at; Start 159; Stop 183
tagcgcagctcctgttatccaaaca

SEQ ID NO: 150100 - DNA, 25 bp, Artificial
  probe
  misc_feature (1)..(25): SEQ ID NO: 4948; WAN024DAI_at; Start 13; Stop 37
tacacaatggtaaccgtttattcta

SEQ ID NO: 150101 - DNA, 25 bp, Artificial
  probe
  misc_feature (1)..(25): SEQ ID NO: 4948; WAN024DAI_at; Start 163; Stop 187
gcagctcctgttatccaaacaccaa

SEQ ID NO: 150102 - DNA, 25 bp, Artificial
  probe
  misc_feature (1)..(25): SEQ ID NO: 4948; WAN024DAI_at; Start 92; Stop 116
tctcttatcgtgaaatcaatcttga

SEQ ID NO: 150103 - DNA, 25 bp, Artificial
  probe
  misc_feature (1)..(25): SEQ ID NO: 4948; WAN024DAI_at; Start 134; Stop 158
tcgatcaagttaaagagctcggttt

SEQ ID NO: 150104 - DNA, 25 bp, Artificial
  probe
  misc_feature (1)..(25): SEQ ID NO: 4948; WAN024DAI_at; Start 215; Stop 239
gaaaactgaaacaattagcataact

SEQ ID NO: 150105 - DNA, 25 bp, Artificial
  probe
  misc_feature (1)..(25): SEQ ID NO: 4948; WAN024DAI_at; Start 29; Stop 53
tttattctaaaaacaattgtgtcca

SEQ ID NO: 150106 - DNA, 25 bp, Artificial
  probe
  misc_feature (1)..(25): SEQ ID NO: 4948; WAN024DAI_at; Start 132; Stop 156
cgtcgatcaagttaaagagctcggt

SEQ ID NO: 150107 - DNA, 25 bp, Artificial
  probe
  misc_feature (1)..(25): SEQ ID NO: 4948; WAN024DAI_at; Start 174; Stop 198
tatccaaacaccaactgaagtcttt

SEQ ID NO: 150108 - DNA, 25 bp, Artificial
  probe
  misc_feature (1)..(25): SEQ ID NO: 4948; WAN024DAI_at; Start 106; Stop 130
atcaatcttgatgagcaacctgagt

SEQ ID NO: 150109 - DNA, 25 bp, Artificial
  probe
  misc_feature (1)..(25): SEQ ID NO: 4948; WAN024DAI_at; Start 179; Stop 203
aaacaccaactgaagtcttttcagg

SEQ ID NO: 150110 - DNA, 25 bp, Artificial
  probe
  misc_feature (1)..(25): SEQ ID NO: 4948; WAN024DAI_at; Start 171; Stop 195
tgttatccaaacaccaactgaagtc

SEQ ID NO: 150111 - DNA, 25 bp, Artificial
  probe
  misc_feature (1)..(25): SEQ ID NO: 4948; WAN024DAI_at; Start 4; Stop 28
aagaggagttacacaatggtaaccg

SEQ ID NO: 150112 - DNA, 25 bp, Artificial
  probe
  misc_feature (1)..(25): SEQ ID NO: 4948; WAN024DAI_at; Start 55; Stop 79
tgtaaaatgaccaagcgtttcttgg

SEQ ID NO: 150113 - DNA, 25 bp, Artificial
  probe
  misc_feature (1)..(25): SEQ ID NO: 4948; WAN024DAI_at; Start 87; Stop 111
taatgtctcttatcgtgaaatcaat

SEQ ID NO: 150114 - DNA, 25 bp, Artificial
  probe
  misc_feature (1)..(25): SEQ ID NO: 4948; WAN024DAI_at; Start 138; Stop 162
tcaagttaaagagctcggttttagc

SEQ ID NO: 150115 - DNA, 25 bp, Artificial
  probe
  misc_feature (1)..(25): SEQ ID NO: 4948; WAN024DAI_at; Start 79; Stop 103
gacagtaataatgtctcttatcgtg

SEQ ID NO: 150116 - DNA, 25 bp, Artificial
  probe
  misc_feature (1)..(25): SEQ ID NO: 2513; WAN024DAJ_at; Start 33; Stop 57
aacaggtattcacgcacgtccagca

SEQ ID NO: 150117 - DNA, 25 bp, Artificial
  probe
  misc_feature (1)..(25): SEQ ID NO: 2513; WAN024DAJ_at; Start 13; Stop 37
gatttccacgtagtggcagaaacag

SEQ ID NO: 150118 - DNA, 25 bp, Artificial
  probe
  misc_feature (1)..(25): SEQ ID NO: 2513; WAN024DAJ_at; Start 42; Stop 66
tcacgcacgtccagcaacattgttg

SEQ ID NO: 150119 - DNA, 25 bp, Artificial
  probe
  misc_feature (1)..(25): SEQ ID NO: 2513; WAN024DAJ_at; Start 65; Stop 89
tggtacaaactgctagcaaatttgc

SEQ ID NO: 150120 - DNA, 25 bp, Artificial
  probe
  misc_feature (1)..(25): SEQ ID NO: 2513; WAN024DAJ_at; Start 6; Stop 30
ttctaaagatttccacgtagtggca

SEQ ID NO: 150121 - DNA, 25 bp, Artificial
  probe
  misc_feature (1)..(25): SEQ ID NO: 2513; WAN024DAJ_at; Start 23; Stop 47
tagtggcagaaacaggtattcacgc

SEQ ID NO: 150122 - DNA, 25 bp, Artificial
  probe
  misc_feature (1)..(25): SEQ ID NO: 2513; WAN024DAJ_at; Start 226; Stop 250
gcaatctcagaaacaatggaaaaag

SEQ ID NO: 150123 - DNA, 25 bp, Artificial
  probe
  misc_feature (1)..(25): SEQ ID NO: 2513; WAN024DAJ_at; Start 1; Stop 25
atggcttctaaagatttccacgtag

SEQ ID NO: 150124 - DNA, 25 bp, Artificial
  probe
  misc_feature (1)..(25): SEQ ID NO: 2513; WAN024DAJ_at; Start 214; Stop 238
gacgctatcgctgcaatctcagaaa

SEQ ID NO: 150125 - DNA, 25 bp, Artificial
  probe
  misc_feature (1)..(25): SEQ ID NO: 2513; WAN024DAJ_at; Start 59; Stop 83
cattgttggtacaaactgctagcaa

SEQ ID NO: 150126 - DNA, 25 bp, Artificial
  probe
  misc_feature (1)..(25): SEQ ID NO: 2513; WAN024DAJ_at; Start 53; Stop 77
cagcaacattgttggtacaaactgc

SEQ ID NO: 150127 - DNA, 25 bp, Artificial
  probe
  misc_feature (1)..(25): SEQ ID NO: 2513; WAN024DAJ_at; Start 177; Stop 201
tgacgtaactatctcagctgaaggt

SEQ ID NO: 150128 - DNA, 25 bp, Artificial
  probe
  misc_feature (1)..(25): SEQ ID NO: 2513; WAN024DAJ_at; Start 31; Stop 55
gaaacaggtattcacgcacgtccag

SEQ ID NO: 150129 - DNA, 25 bp, Artificial
  probe
  misc_feature (1)..(25): SEQ ID NO: 2513; WAN024DAJ_at; Start 232; Stop 256
tcagaaacaatggaaaaagaaggat

SEQ ID NO: 150130 - DNA, 25 bp, Artificial
  probe
  misc_feature (1)..(25): SEQ ID NO: 2513; WAN024DAJ_at; Start 212; Stop 236
atgacgctatcgctgcaatctcaga

SEQ ID NO: 150131 - DNA, 25 bp, Artificial
  probe
  misc_feature (1)..(25): SEQ ID NO: 2513; WAN024DAJ_at; Start 182; Stop 206
taactatctcagctgaaggtgcaga

SEQ ID NO: 150132 - DNA, 25 bp, Artificial
  probe
  misc_feature (1)..(25): SEQ ID NO: 2513; WAN024DAJ_at; Start 180; Stop 204
cgtaactatctcagctgaaggtgca

SEQ ID NO: 150133 - DNA, 25 bp, Artificial
  probe
  misc_feature (1)..(25): SEQ ID NO: 2513; WAN024DAJ_at; Start 186; Stop 210
tatctcagctgaaggtgcagatgca

SEQ ID NO: 150134 - DNA, 25 bp, Artificial
  probe
  misc_feature (1)..(25): SEQ ID NO: 2513; WAN024DAJ_at; Start 219; Stop 243
tatcgctgcaatctcagaaacaatg

SEQ ID NO: 150135 - DNA, 25 bp, Artificial
  probe
  misc_feature (1)..(25): SEQ ID NO: 2513; WAN024DAJ_at; Start 122; Stop 146
cagttaaccttaaatcaattatggg

SEQ ID NO: 150136 - DNA, 25 bp, Artificial
  probe
  misc_feature (1)..(25): SEQ ID NO: 2513; WAN024DAJ_at; Start 82; Stop 106
aaatttgcttcagatatcactcttg

SEQ ID NO: 150137 - DNA, 25 bp, Artificial
  probe
  misc_feature (1)..(25): SEQ ID NO: 2513; WAN024DAJ_at; Start 28; Stop 52
gcagaaacaggtattcacgcacgtc

SEQ ID NO: 150138 - DNA, 25 bp, Artificial
  probe
  misc_feature (1)..(25): SEQ ID NO: 2513; WAN024DAJ_at; Start 26; Stop 50
tggcagaaacaggtattcacgcacg

SEQ ID NO: 150139 - DNA, 25 bp, Artificial
  probe
  misc_feature (1)..(25): SEQ ID NO: 2513; WAN024DAJ_at; Start 9; Stop 33
taaagatttccacgtagtggcagaa

SEQ ID NO: 150140 - DNA, 25 bp, Artificial
  probe
  misc_feature (1)..(25): SEQ ID NO: 2513; WAN024DAJ_at; Start 169; Stop 193
caaggtgctgacgtaactatctcag

SEQ ID NO: 150141 - DNA, 25 bp, Artificial
  probe
  misc_feature (1)..(25): SEQ ID NO: 2513; WAN024DAJ_at; Start 19; Stop 43
cacgtagtggcagaaacaggtattc

SEQ ID NO: 150142 - DNA, 25 bp, Artificial
  probe
  misc_feature (1)..(25): SEQ ID NO: 2513; WAN024DAJ_at; Start 242; Stop 266
tggaaaaagaaggattggcataact

SEQ ID NO: 150143 - DNA, 25 bp, Artificial
  probe
  misc_feature (1)..(25): SEQ ID NO: 2513; WAN024DAJ_at; Start 37; Stop 61
ggtattcacgcacgtccagcaacat

SEQ ID NO: 150144 - DNA, 25 bp, Artificial
  probe
  misc_feature (1)..(25): SEQ ID NO: 2513; WAN024DAJ_at; Start 45; Stop 69
cgcacgtccagcaacattgttggta

SEQ ID NO: 150145 - DNA, 25 bp, Artificial
  probe
  misc_feature (1)..(25): SEQ ID NO: 2513; WAN024DAJ_at; Start 80; Stop 104
gcaaatttgcttcagatatcactct

SEQ ID NO: 150146 - DNA, 25 bp, Artificial
  probe
  misc_feature (1)..(25): SEQ ID NO: 2513; WAN024DAJ_at; Start 70; Stop 94
caaactgctagcaaatttgcttcag

SEQ ID NO: 150147 - DNA, 25 bp, Artificial
  probe
  misc_feature (1)..(25): SEQ ID NO: 2513; WAN024DAJ_at; Start 223; Stop 247
gctgcaatctcagaaacaatggaaa

SEQ ID NO: 150148 - DNA, 25 bp, Artificial
  probe
  misc_feature (1)..(25): SEQ ID NO: 2513; WAN024DAJ_at; Start 136; Stop 160
tcaattatgggtgttatgagtcttg

SEQ ID NO: 150149 - DNA, 25 bp, Artificial
  probe
  misc_feature (1)..(25): SEQ ID NO: 2513; WAN024DAJ_at; Start 17; Stop 41
tccacgtagtggcagaaacaggtat

SEQ ID NO: 150150 - DNA, 25 bp, Artificial
  probe
  misc_feature (1)..(25): SEQ ID NO: 5227; WAN024DAK_at; Start 316; Stop 340
caggctggtgcagaactgtcagtta

SEQ ID NO: 150151 - DNA, 25 bp, Artificial
  probe
  misc_feature (1)..(25): SEQ ID NO: 5227; WAN024DAK_at; Start 343; Stop 367
caaacacagttagcggagcttgaaa

SEQ ID NO: 150152 - DNA, 25 bp, Artificial
  probe
  misc_feature (1)..(25): SEQ ID NO: 5227; WAN024DAK_at; Start 335; Stop 359
cagttattcaaacacagttagcgga

SEQ ID NO: 150153 - DNA, 25 bp, Artificial
  probe
  misc_feature (1)..(25): SEQ ID NO: 5227; WAN024DAK_at; Start 16; Stop 40
ggtcttgttatcgtttcacattcca

SEQ ID NO: 150154 - DNA, 25 bp, Artificial
  probe
  misc_feature (1)..(25): SEQ ID NO: 5227; WAN024DAK_at; Start 72; Stop 96
tagtaaagtagctaaagatgttccg

SEQ ID NO: 150155 - DNA, 25 bp, Artificial
  probe
  misc_feature (1)..(25): SEQ ID NO: 5227; WAN024DAK_at; Start 116; Stop 140
ccgagggcggaggaattggaacgag

SEQ ID NO: 150156 - DNA, 25 bp, Artificial
  probe
  misc_feature (1)..(25): SEQ ID NO: 5227; WAN024DAK_at; Start 284; Stop 308
tagaaggtgcctataatgcagctgc

SEQ ID NO: 150157 - DNA, 25 bp, Artificial
  probe
  misc_feature (1)..(25): SEQ ID NO: 5227; WAN024DAK_at; Start 255; Stop 279
aagtatcatcatcaacagggttcca

SEQ ID NO: 150158 - DNA, 25 bp, Artificial
  probe
  misc_feature (1)..(25): SEQ ID NO: 5227; WAN024DAK_at; Start 193; Stop 217
gccttttttgacctaggttctgcta

SEQ ID NO: 150159 - DNA, 25 bp, Artificial
  probe
  misc_feature (1)..(25): SEQ ID NO: 5227; WAN024DAK_at; Start 297; Stop 321
taatgcagctgctcttcttcaggct

SEQ ID NO: 150160 - DNA, 25 bp, Artificial
  probe
  misc_feature (1)..(25): SEQ ID NO: 5227; WAN024DAK_at; Start 264; Stop 288
catcaacagggttccaattgtagaa

SEQ ID NO: 150161 - DNA, 25 bp, Artificial
  probe
  misc_feature (1)..(25): SEQ ID NO: 5227; WAN024DAK_at; Start 10; Stop 34
agtattggtcttgttatcgtttcac

SEQ ID NO: 150162 - DNA, 25 bp, Artificial
  probe
  misc_feature (1)..(25): SEQ ID NO: 5227; WAN024DAK_at; Start 270; Stop 294
cagggttccaattgtagaaggtgcc

SEQ ID NO: 150163 - DNA, 25 bp, Artificial
  probe
  misc_feature (1)..(25): SEQ ID NO: 5227; WAN024DAK_at; Start 250; Stop 274
gataaaagtatcatcatcaacaggg

SEQ ID NO: 150164 - DNA, 25 bp, Artificial
  probe
  misc_feature (1)..(25): SEQ ID NO: 5227; WAN024DAK_at; Start 43; Stop 67
cacattgcagaaggtgttgttgaac

SEQ ID NO: 150165 - DNA, 25 bp, Artificial
  probe
  misc_feature (1)..(25): SEQ ID NO: 5227; WAN024DAK_at; Start 237; Stop 261
gactgatttcagtgataaaagtatc

SEQ ID NO: 150166 - DNA, 25 bp, Artificial
  probe
  misc_feature (1)..(25): SEQ ID NO: 5227; WAN024DAK_at; Start 28; Stop 52
gtttcacattccaaacacattgcag

SEQ ID NO: 150167 - DNA, 25 bp, Artificial
  probe
  misc_feature (1)..(25): SEQ ID NO: 5227; WAN024DAK_at; Start 312; Stop 336
tcttcaggctggtgcagaactgtca

SEQ ID NO: 150168 - DNA, 25 bp, Artificial
  probe
  misc_feature (1)..(25): SEQ ID NO: 5227; WAN024DAK_at; Start 162; Stop 186
tgtttccgaaaatccagcagatact

SEQ ID NO: 150169 - DNA, 25 bp, Artificial
  probe
  misc_feature (1)..(25): SEQ ID NO: 5227; WAN024DAK_at; Start 326; Stop 350
cagaactgtcagttattcaaacaca

SEQ ID NO: 150170 - DNA, 25 bp, Artificial
  probe
  misc_feature (1)..(25): SEQ ID NO: 5227; WAN024DAK_at; Start 347; Stop 371
cacagttagcggagcttgaaatcaa

SEQ ID NO: 150171 - DNA, 25 bp, Artificial
  probe
  misc_feature (1)..(25): SEQ ID NO: 5227; WAN024DAK_at; Start 224; Stop 248
acttaaaaatggtgactgatttcag

SEQ ID NO: 150172 - DNA, 25 bp, Artificial
  probe
  misc_feature (1)..(25): SEQ ID NO: 5227; WAN024DAK_at; Start 289; Stop 313
ggtgcctataatgcagctgctcttc

SEQ ID NO: 150173 - DNA, 25 bp, Artificial
  probe
  misc_feature (1)..(25): SEQ ID NO: 5227; WAN024DAK_at; Start 198; Stop 222
ttttgacctaggttctgctaaaatg

SEQ ID NO: 150174 - DNA, 25 bp, Artificial
  probe
  misc_feature (1)..(25): SEQ ID NO: 5227; WAN024DAK_at; Start 157; Stop 181
agggttgtttccgaaaatccagcag

SEQ ID NO: 150175 - DNA, 25 bp, Artificial
  probe
  misc_feature (1)..(25): SEQ ID NO: 5227; WAN024DAK_at; Start 339; Stop 363
tattcaaacacagttagcggagctt

SEQ ID NO: 150176 - DNA, 25 bp, Artificial
  probe
  misc_feature (1)..(25): SEQ ID NO: 5227; WAN024DAK_at; Start 179; Stop 203
cagatactttacttgccttttttga

SEQ ID NO: 150177 - DNA, 25 bp, Artificial
  probe
  misc_feature (1)..(25): SEQ ID NO: 5227; WAN024DAK_at; Start 303; Stop 327
agctgctcttcttcaggctggtgca

SEQ ID NO: 150178 - DNA, 25 bp, Artificial
  probe
  misc_feature (1)..(25): SEQ ID NO: 5227; WAN024DAK_at; Start 171; Stop 195
aaatccagcagatactttacttgcc

SEQ ID NO: 150179 - DNA, 25 bp, Artificial
  probe
  misc_feature (1)..(25): SEQ ID NO: 5227; WAN024DAK_at; Start 34; Stop 58
cattccaaacacattgcagaaggtg

SEQ ID NO: 150180 - DNA, 25 bp, Artificial
  probe
  misc_feature (1)..(25): SEQ ID NO: 5227; WAN024DAK_at; Start 306; Stop 330
tgctcttcttcaggctggtgcagaa

SEQ ID NO: 150181 - DNA, 25 bp, Artificial
  probe
  misc_feature (1)..(25): SEQ ID NO: 5227; WAN024DAK_at; Start 274; Stop 298
gttccaattgtagaaggtgcctata

SEQ ID NO: 150182 - DNA, 25 bp, Artificial
  probe
  misc_feature (1)..(25): SEQ ID NO: 5227; WAN024DAK_at; Start 75; Stop 99
taaagtagctaaagatgttccgatt

SEQ ID NO: 150183 - DNA, 25 bp, Artificial
  probe
  misc_feature (1)..(25): SEQ ID NO: 5227; WAN024DAK_at; Start 355; Stop 379
gcggagcttgaaatcaataaataac

SEQ ID NO: 150184 - DNA, 25 bp, Artificial
  probe
  misc_feature (1)..(25): SEQ ID NO: 1445; WAN024DAL_at; Start 297; Stop 321
tagcctcaatatgaatcgtaatggc

SEQ ID NO: 150185 - DNA, 25 bp, Artificial
  probe
  misc_feature (1)..(25): SEQ ID NO: 1445; WAN024DAL_at; Start 364; Stop 388
gatcatgtagcaaaatatgcctacg

SEQ ID NO: 150186 - DNA, 25 bp, Artificial
  probe
  misc_feature (1)..(25): SEQ ID NO: 1445; WAN024DAL_at; Start 518; Stop 542
tatggcaagtttctaaagaaactcc

SEQ ID NO: 150187 - DNA, 25 bp, Artificial
  probe
  misc_feature (1)..(25): SEQ ID NO: 1445; WAN024DAL_at; Start 227; Stop 251
gggattcacaagtagataatcttag

SEQ ID NO: 150188 - DNA, 25 bp, Artificial
  probe
  misc_feature (1)..(25): SEQ ID NO: 1445; WAN024DAL_at; Start 31; Stop 55
gaagagtacattgaaatgtctgaag

SEQ ID NO: 150189 - DNA, 25 bp, Artificial
  probe
  misc_feature (1)..(25): SEQ ID NO: 1445; WAN024DAL_at; Start 47; Stop 71
tgtctgaagttgattttaatgaagc

SEQ ID NO: 150190 - DNA, 25 bp, Artificial
  probe
  misc_feature (1)..(25): SEQ ID NO: 1445; WAN024DAL_at; Start 425; Stop 449
taaaaagagcgattttacaccaaga

SEQ ID NO: 150191 - DNA, 25 bp, Artificial
  probe
  misc_feature (1)..(25): SEQ ID NO: 1445; WAN024DAL_at; Start 379; Stop 403
tatgcctacgaacaaaaagttaata

SEQ ID NO: 150192 - DNA, 25 bp, Artificial
  probe
  misc_feature (1)..(25): SEQ ID NO: 1445; WAN024DAL_at; Start 109; Stop 133
gcaaatagtatttatcaatctcttt

SEQ ID NO: 150193 - DNA, 25 bp, Artificial
  probe
  misc_feature (1)..(25): SEQ ID NO: 1445; WAN024DAL_at; Start 279; Stop 303
tcttactaatcgaaaatatagcctc

SEQ ID NO: 150194 - DNA, 25 bp, Artificial
  probe
  misc_feature (1)..(25): SEQ ID NO: 1445; WAN024DAL_at; Start 159; Stop 183
ctctggcgatttaatttttacttgg

SEQ ID NO: 150195 - DNA, 25 bp, Artificial
  probe
  misc_feature (1)..(25): SEQ ID NO: 1445; WAN024DAL_at; Start 66; Stop 90
tgaagctgttaattatgaatttaca

SEQ ID NO: 150196 - DNA, 25 bp, Artificial
  probe
  misc_feature (1)..(25): SEQ ID NO: 1445; WAN024DAL_at; Start 182; Stop 206
ggaaatctccatcattagtcaaaga

SEQ ID NO: 150197 - DNA, 25 bp, Artificial
  probe
  misc_feature (1)..(25): SEQ ID NO: 1445; WAN024DAL_at; Start 360; Stop 384
cctagatcatgtagcaaaatatgcc

SEQ ID NO: 150198 - DNA, 25 bp, Artificial
  probe
  misc_feature (1)..(25): SEQ ID NO: 1445; WAN024DAL_at; Start 444; Stop 468
ccaagagaatgcattgtattttcga

SEQ ID NO: 150199 - DNA, 25 bp, Artificial
  probe
  misc_feature (1)..(25): SEQ ID NO: 1445; WAN024DAL_at; Start 52; Stop 76
gaagttgattttaatgaagctgtta

SEQ ID NO: 150200 - DNA, 25 bp, Artificial
  probe
  misc_feature (1)..(25): SEQ ID NO: 1445; WAN024DAL_at; Start 597; Stop 621
cgaaagaggtagtaaaatgcttaat

SEQ ID NO: 150201 - DNA, 25 bp, Artificial
  probe
  misc_feature (1)..(25): SEQ ID NO: 1445; WAN024DAL_at; Start 94; Stop 118
gacacttgtcaattagcaaatagta

SEQ ID NO: 150202 - DNA, 25 bp, Artificial
  probe
  misc_feature (1)..(25): SEQ ID NO: 1445; WAN024DAL_at; Start 583; Stop 607
gaaaagataatcttcgaaagaggta

SEQ ID NO: 150203 - DNA, 25 bp, Artificial
  probe
  misc_feature (1)..(25): SEQ ID NO: 1445; WAN024DAL_at; Start 147; Stop 171
taagaaaaatttctctggcgattta

SEQ ID NO: 150204 - DNA, 25 bp, Artificial
  probe
  misc_feature (1)..(25): SEQ ID NO: 1445; WAN024DAL_at; Start 231; Stop 255
ttcacaagtagataatcttagagta

SEQ ID NO: 150205 - DNA, 25 bp, Artificial
  probe
  misc_feature (1)..(25): SEQ ID NO: 1445; WAN024DAL_at; Start 502; Stop 526
aattatttaaagactatatggcaag

SEQ ID NO: 150206 - DNA, 25 bp, Artificial
  probe
  misc_feature (1)..(25): SEQ ID NO: 1445; WAN024DAL_at; Start 170; Stop 194
taatttttacttggaaatctccatc

SEQ ID NO: 150207 - DNA, 25 bp, Artificial
  probe
  misc_feature (1)..(25): SEQ ID NO: 1445; WAN024DAL_at; Start 373; Stop 397
gcaaaatatgcctacgaacaaaaag

SEQ ID NO: 150208 - DNA, 25 bp, Artificial
  probe
  misc_feature (1)..(25): SEQ ID NO: 1445; WAN024DAL_at; Start 412; Stop 436
gagtattatcctttaaaaagagcga

SEQ ID NO: 150209 - DNA, 25 bp, Artificial
  probe
  misc_feature (1)..(25): SEQ ID NO: 1445; WAN024DAL_at; Start 302; Stop 326
tcaatatgaatcgtaatggctgtat

SEQ ID NO: 150210 - DNA, 25 bp, Artificial
  probe
  misc_feature (1)..(25): SEQ ID NO: 1445; WAN024DAL_at; Start 435; Stop 459
gattttacaccaagagaatgcattg

SEQ ID NO: 150211 - DNA, 25 bp, Artificial
  probe
  misc_feature (1)..(25): SEQ ID NO: 1445; WAN024DAL_at; Start 16; Stop 40
gctaatattactattgaagagtaca

SEQ ID NO: 150212 - DNA, 25 bp, Artificial
  probe
  misc_feature (1)..(25): SEQ ID NO: 1445; WAN024DAL_at; Start 513; Stop 537
gactatatggcaagtttctaaagaa

SEQ ID NO: 150213 - DNA, 25 bp, Artificial
  probe
  misc_feature (1)..(25): SEQ ID NO: 1445; WAN024DAL_at; Start 142; Stop 166
tttgataagaaaaatttctctggcg

SEQ ID NO: 150214 - DNA, 25 bp, Artificial
  probe
  misc_feature (1)..(25): SEQ ID NO: 1445; WAN024DAL_at; Start 431; Stop 455
gagcgattttacaccaagagaatgc

SEQ ID NO: 150215 - DNA, 25 bp, Artificial
  probe
  misc_feature (1)..(25): SEQ ID NO: 1445; WAN024DAL_at; Start 593; Stop 617
tcttcgaaagaggtagtaaaatgct

SEQ ID NO: 150216 - DNA, 25 bp, Artificial
  probe
  misc_feature (1)..(25): SEQ ID NO: 1445; WAN024DAL_at; Start 290; Stop 314
gaaaatatagcctcaatatgaatcg

SEQ ID NO: 150217 - DNA, 25 bp, Artificial
  probe
  misc_feature (1)..(25): SEQ ID NO: 1445; WAN024DAL_at; Start 79; Stop 103
tatgaatttacatctgacacttgtc

SEQ ID NO: 150218 - DNA, 25 bp, Artificial
  probe
  misc_feature (1)..(25): SEQ ID NO: 7631; WAN024DAM_at; Start 71; Stop 95
ataaaccgacaaaggacttggatgg

SEQ ID NO: 150219 - DNA, 25 bp, Artificial
  probe
  misc_feature (1)..(25): SEQ ID NO: 7631; WAN024DAM_at; Start 4; Stop 28
gctcttgtcctgtctcttttaagaa

SEQ ID NO: 150220 - DNA, 25 bp, Artificial
  probe
  misc_feature (1)..(25): SEQ ID NO: 7631; WAN024DAM_at; Start 69; Stop 93
ctataaaccgacaaaggacttggat

SEQ ID NO: 150221 - DNA, 25 bp, Artificial
  probe
  misc_feature (1)..(25): SEQ ID NO: 7631; WAN024DAM_at; Start 28; Stop 52
atgcattggccttggaaaagggctt

SEQ ID NO: 150222 - DNA, 25 bp, Artificial
  probe
  misc_feature (1)..(25): SEQ ID NO: 7631; WAN024DAM_at; Start 60; Stop 84
caaaatcctctataaaccgacaaag

SEQ ID NO: 150223 - DNA, 25 bp, Artificial
  probe
  misc_feature (1)..(25): SEQ ID NO: 7631; WAN024DAM_at; Start 76; Stop 100
ccgacaaaggacttggatgggctga

SEQ ID NO: 150224 - DNA, 25 bp, Artificial
  probe
  misc_feature (1)..(25): SEQ ID NO: 7631; WAN024DAM_at; Start 78; Stop 102
gacaaaggacttggatgggctgatt

SEQ ID NO: 150225 - DNA, 25 bp, Artificial
  probe
  misc_feature (1)..(25): SEQ ID NO: 7631; WAN024DAM_at; Start 66; Stop 90
cctctataaaccgacaaaggacttg

SEQ ID NO: 150226 - DNA, 25 bp, Artificial
  probe
  misc_feature (1)..(25): SEQ ID NO: 7631; WAN024DAM_at; Start 80; Stop 104
caaaggacttggatgggctgattcg

SEQ ID NO: 150227 - DNA, 25 bp, Artificial
  probe
  misc_feature (1)..(25): SEQ ID NO: 7631; WAN024DAM_at; Start 23; Stop 47
taagaatgcattggccttggaaaag

SEQ ID NO: 150228 - DNA, 25 bp, Artificial
  probe
  misc_feature (1)..(25): SEQ ID NO: 7631; WAN024DAM_at; Start 79; Stop 103
acaaaggacttggatgggctgattc

SEQ ID NO: 150229 - DNA, 25 bp, Artificial
  probe
  misc_feature (1)..(25): SEQ ID NO: 7631; WAN024DAM_at; Start 19; Stop 43
cttttaagaatgcattggccttgga

SEQ ID NO: 150230 - DNA, 25 bp, Artificial
  probe
  misc_feature (1)..(25): SEQ ID NO: 7631; WAN024DAM_at; Start 81; Stop 105
aaaggacttggatgggctgattcga

SEQ ID NO: 150231 - DNA, 25 bp, Artificial
  probe
  misc_feature (1)..(25): SEQ ID NO: 7631; WAN024DAM_at; Start 68; Stop 92
tctataaaccgacaaaggacttgga

SEQ ID NO: 150232 - DNA, 25 bp, Artificial
  probe
  misc_feature (1)..(25): SEQ ID NO: 7631; WAN024DAM_at; Start 21; Stop 45
tttaagaatgcattggccttggaaa

SEQ ID NO: 150233 - DNA, 25 bp, Artificial
  probe
  misc_feature (1)..(25): SEQ ID NO: 7631; WAN024DAM_at; Start 12; Stop 36
cctgtctcttttaagaatgcattgg

SEQ ID NO: 150234 - DNA, 25 bp, Artificial
  probe
  misc_feature (1)..(25): SEQ ID NO: 7631; WAN024DAM_at; Start 14; Stop 38
tgtctcttttaagaatgcattggcc

SEQ ID NO: 150235 - DNA, 25 bp, Artificial
  probe
  misc_feature (1)..(25): SEQ ID NO: 7631; WAN024DAM_at; Start 31; Stop 55
cattggccttggaaaagggcttgga

SEQ ID NO: 150236 - DNA, 25 bp, Artificial
  probe
  misc_feature (1)..(25): SEQ ID NO: 7631; WAN024DAM_at; Start 49; Stop 73
gcttggaaccccaaaatcctctata

SEQ ID NO: 150237 - DNA, 25 bp, Artificial
  probe
  misc_feature (1)..(25): SEQ ID NO: 7631; WAN024DAM_at; Start 2; Stop 26
tggctcttgtcctgtctcttttaag

SEQ ID NO: 150238 - DNA, 25 bp, Artificial
  probe
  misc_feature (1)..(25): SEQ ID NO: 7631; WAN024DAM_at; Start 18; Stop 42
tcttttaagaatgcattggccttgg

SEQ ID NO: 150239 - DNA, 25 bp, Artificial
  probe
  misc_feature (1)..(25): SEQ ID NO: 7631; WAN024DAM_at; Start 3; Stop 27
ggctcttgtcctgtctcttttaaga

SEQ ID NO: 150240 - DNA, 25 bp, Artificial
  probe
  misc_feature (1)..(25): SEQ ID NO: 7631; WAN024DAM_at; Start 17; Stop 41
ctcttttaagaatgcattggccttg

SEQ ID NO: 150241 - DNA, 25 bp, Artificial
  probe
  misc_feature (1)..(25): SEQ ID NO: 7631; WAN024DAM_at; Start 15; Stop 39
gtctcttttaagaatgcattggcct

SEQ ID NO: 150242 - DNA, 25 bp, Artificial
  probe
  misc_feature (1)..(25): SEQ ID NO: 7631; WAN024DAM_at; Start 9; Stop 33
tgtcctgtctcttttaagaatgcat

SEQ ID NO: 150243 - DNA, 25 bp, Artificial
  probe
  misc_feature (1)..(25): SEQ ID NO: 7631; WAN024DAM_at; Start 27; Stop 51
aatgcattggccttggaaaagggct

SEQ ID NO: 150244 - DNA, 25 bp, Artificial
  probe
  misc_feature (1)..(25): SEQ ID NO: 7631; WAN024DAM_at; Start 74; Stop 98
aaccgacaaaggacttggatgggct

SEQ ID NO: 150245 - DNA, 25 bp, Artificial
  probe
  misc_feature (1)..(25): SEQ ID NO: 7631; WAN024DAM_at; Start 20; Stop 44
ttttaagaatgcattggccttggaa

SEQ ID NO: 150246 - DNA, 25 bp, Artificial
  probe
  misc_feature (1)..(25): SEQ ID NO: 7631; WAN024DAM_at; Start 70; Stop 94
tataaaccgacaaaggacttggatg

SEQ ID NO: 150247 - DNA, 25 bp, Artificial
  probe
  misc_feature (1)..(25): SEQ ID NO: 7631; WAN024DAM_at; Start 67; Stop 91
ctctataaaccgacaaaggacttgg

SEQ ID NO: 150248 - DNA, 25 bp, Artificial
  probe
  misc_feature (1)..(25): SEQ ID NO: 7631; WAN024DAM_at; Start 16; Stop 40
tctcttttaagaatgcattggcctt

SEQ ID NO: 150249 - DNA, 25 bp, Artificial
  probe
  misc_feature (1)..(25): SEQ ID NO: 7631; WAN024DAM_at; Start 29; Stop 53
tgcattggccttggaaaagggcttg

SEQ ID NO: 150250 - DNA, 25 bp, Artificial
  probe
  misc_feature (1)..(25): SEQ ID NO: 7631; WAN024DAM_at; Start 6; Stop 30
tcttgtcctgtctcttttaagaatg

SEQ ID NO: 150251 - DNA, 25 bp, Artificial
  probe
  misc_feature (1)..(25): SEQ ID NO: 7631; WAN024DAM_at; Start 77; Stop 101
cgacaaaggacttggatgggctgat

SEQ ID NO: 150252 - DNA, 25 bp, Artificial
  probe
  misc_feature (1)..(25): SEQ ID NO: 7223; WAN024DAN_at; Start 330; Stop 354
caaaatggaaatcagcagaacaact

SEQ ID NO: 150253 - DNA, 25 bp, Artificial
  probe
  misc_feature (1)..(25): SEQ ID NO: 7223; WAN024DAN_at; Start 101; Stop 125
caagccccaagtggattgacgtcaa

SEQ ID NO: 150254 - DNA, 25 bp, Artificial
  probe
  misc_feature (1)..(25): SEQ ID NO: 7223; WAN024DAN_at; Start 192; Stop 216
catagaacaggatactaaagaggtt

SEQ ID NO: 150255 - DNA, 25 bp, Artificial
  probe
  misc_feature (1)..(25): SEQ ID NO: 7223; WAN024DAN_at; Start 78; Stop 102
cgagcttgaggcaggtttgctctca

SEQ ID NO: 150256 - DNA, 25 bp, Artificial
  probe
  misc_feature (1)..(25): SEQ ID NO: 7223; WAN024DAN_at; Start 347; Stop 371
gaacaactttctacacttggcggaa

SEQ ID NO: 150257 - DNA, 25 bp, Artificial
  probe
  misc_feature (1)..(25): SEQ ID NO: 7223; WAN024DAN_at; Start 114; Stop 138
gattgacgtcaaagtccaaggtggt

SEQ ID NO: 150258 - DNA, 25 bp, Artificial
  probe
  misc_feature (1)..(25): SEQ ID NO: 7223; WAN024DAN_at; Start 42; Stop 66
ggacatggacattcaaagccgtata

SEQ ID NO: 150259 - DNA, 25 bp, Artificial
  probe
  misc_feature (1)..(25): SEQ ID NO: 7223; WAN024DAN_at; Start 154; Stop 178
gatgatgtctatactcagcttgtcg

SEQ ID NO: 150260 - DNA, 25 bp, Artificial
  probe
  misc_feature (1)..(25): SEQ ID NO: 7223; WAN024DAN_at; Start 91; Stop 115
ggtttgctctcaagccccaagtgga

SEQ ID NO: 150261 - DNA, 25 bp, Artificial
  probe
  misc_feature (1)..(25): SEQ ID NO: 7223; WAN024DAN_at; Start 182; Stop 206
tgaaagaggccatagaacaggatac

SEQ ID NO: 150262 - DNA, 25 bp, Artificial
  probe
  misc_feature (1)..(25): SEQ ID NO: 7223; WAN024DAN_at; Start 306; Stop 330
gatgtatgttgatgatatttgtgac

SEQ ID NO: 150263 - DNA, 25 bp, Artificial
  probe
  misc_feature (1)..(25): SEQ ID NO: 7223; WAN024DAN_at; Start 260; Stop 284
aaaatccaaagagcaggtctattct

SEQ ID NO: 150264 - DNA, 25 bp, Artificial
  probe
  misc_feature (1)..(25): SEQ ID NO: 7223; WAN024DAN_at; Start 275; Stop 299
ggtctattctcagggtgacttacat

SEQ ID NO: 150265 - DNA, 25 bp, Artificial
  probe
  misc_feature (1)..(25): SEQ ID NO: 7223; WAN024DAN_at; Start 215; Stop 239
ttatcaacagaaagcttgagcttgg

SEQ ID NO: 150266 - DNA, 25 bp, Artificial
  probe
  misc_feature (1)..(25): SEQ ID NO: 7223; WAN024DAN_at; Start 19; Stop 43
ctattgaaagagttgcagaatctgg

SEQ ID NO: 150267 - DNA, 25 bp, Artificial
  probe
  misc_feature (1)..(25): SEQ ID NO: 7223; WAN024DAN_at; Start 394; Stop 418
gaggttttggagagaatggaactaa

SEQ ID NO: 150268 - DNA, 25 bp, Artificial
  probe
  misc_feature (1)..(25): SEQ ID NO: 7223; WAN024DAN_at; Start 380; Stop 404
tctctgaactgaatgaggttttgga

SEQ ID NO: 150269 - DNA, 25 bp, Artificial
  probe
  misc_feature (1)..(25): SEQ ID NO: 7223; WAN024DAN_at; Start 228; Stop 252
gcttgagcttggtaggttgattaac

SEQ ID NO: 150270 - DNA, 25 bp, Artificial
  probe
  misc_feature (1)..(25): SEQ ID NO: 7223; WAN024DAN_at; Start 368; Stop 392
ggaatatggctatctctgaactgaa

SEQ ID NO: 150271 - DNA, 25 bp, Artificial
  probe
  misc_feature (1)..(25): SEQ ID NO: 7223; WAN024DAN_at; Start 139; Stop 163
caagctagaaaagttgatgatgtct

SEQ ID NO: 150272 - DNA, 25 bp, Artificial
  probe
  misc_feature (1)..(25): SEQ ID NO: 7223; WAN024DAN_at; Start 206; Stop 230
ctaaagaggttatcaacagaaagct

SEQ ID NO: 150273 - DNA, 25 bp, Artificial
  probe
  misc_feature (1)..(25): SEQ ID NO: 7223; WAN024DAN_at; Start 285; Stop 309
cagggtgacttacattactaagatg

SEQ ID NO: 150274 - DNA, 25 bp, Artificial
  probe
  misc_feature (1)..(25): SEQ ID NO: 7223; WAN024DAN_at; Start 321; Stop 345
tatttgtgacaaaatggaaatcagc

SEQ ID NO: 150275 - DNA, 25 bp, Artificial
  probe
  misc_feature (1)..(25): SEQ ID NO: 7223; WAN024DAN_at; Start 2; Stop 26
tgaacaaggctaaagaactattgaa

SEQ ID NO: 150276 - DNA, 25 bp, Artificial
  probe
  misc_feature (1)..(25): SEQ ID NO: 7223; WAN024DAN_at; Start 255; Stop 279
gctgaaaaatccaaagagcaggtct

SEQ ID NO: 150277 - DNA, 25 bp, Artificial
  probe
  misc_feature (1)..(25): SEQ ID NO: 7223; WAN024DAN_at; Start 67; Stop 91
gatgaaattaacgagcttgaggcag

SEQ ID NO: 150278 - DNA, 25 bp, Artificial
  probe
  misc_feature (1)..(25): SEQ ID NO: 7223; WAN024DAN_at; Start 169; Stop 193
cagcttgtcgtgatgaaagaggcca

SEQ ID NO: 150279 - DNA, 25 bp, Artificial
  probe
  misc_feature (1)..(25): SEQ ID NO: 7223; WAN024DAN_at; Start 128; Stop 152
tccaaggtggtcaagctagaaaagt

SEQ ID NO: 150280 - DNA, 25 bp, Artificial
  probe
  misc_feature (1)..(25): SEQ ID NO: 7223; WAN024DAN_at; Start 242; Stop 266
ggttgattaacaagctgaaaaatcc

SEQ ID NO: 150281 - DNA, 25 bp, Artificial
  probe
  misc_feature (1)..(25): SEQ ID NO: 7223; WAN024DAN_at; Start 85; Stop 109
gaggcaggtttgctctcaagcccca

SEQ ID NO: 150282 - DNA, 25 bp, Artificial
  probe
  misc_feature (1)..(25): SEQ ID NO: 7223; WAN024DAN_at; Start 54; Stop 78
tcaaagccgtatagatgaaattaac

SEQ ID NO: 150283 - DNA, 25 bp, Artificial
  probe
  misc_feature (1)..(25): SEQ ID NO: 7223; WAN024DAN_at; Start 120; Stop 144
cgtcaaagtccaaggtggtcaagct

SEQ ID NO: 150284 - DNA, 25 bp, Artificial
  probe
  misc_feature (1)..(25): SEQ ID NO: 7223; WAN024DAN_at; Start 32; Stop 56
tgcagaatctggacatggacattca

SEQ ID NO: 150285 - DNA, 25 bp, Artificial
  probe
  misc_feature (1)..(25): SEQ ID NO: 7223; WAN024DAN_at; Start 360; Stop 384
cacttggcggaatatggctatctct

SEQ ID NO: 150286 - DNA, 25 bp, Artificial
  probe
  misc_feature (1)..(25): SEQ ID NO: 1124; WAN024DAO_at; Start 377; Stop 401
tgactgttcctgctggacaggccaa

SEQ ID NO: 150287 - DNA, 25 bp, Artificial
  probe
  misc_feature (1)..(25): SEQ ID NO: 1124; WAN024DAO_at; Start 260; Stop 284
cagctccaccatccttgcaaaatat

SEQ ID NO: 150288 - DNA, 25 bp, Artificial
  probe
  misc_feature (1)..(25): SEQ ID NO: 1124; WAN024DAO_at; Start 75; Stop 99
gaaaatcaatcagtttatggagcag

SEQ ID NO: 150289 - DNA, 25 bp, Artificial
  probe
  misc_feature (1)..(25): SEQ ID NO: 1124; WAN024DAO_at; Start 161; Stop 185
cactgcttgaagaagttaaggtggt

SEQ ID NO: 150290 - DNA, 25 bp, Artificial
  probe
  misc_feature (1)..(25): SEQ ID NO: 1124; WAN024DAO_at; Start 192; Stop 216
agggcaagacccctatcacggacca

SEQ ID NO: 150291 - DNA, 25 bp, Artificial
  probe
  misc_feature (1)..(25): SEQ ID NO: 1124; WAN024DAO_at; Start 649; Stop 673
ccaatcgattggcttagataactaa

SEQ ID NO: 150292 - DNA, 25 bp, Artificial
  probe
  misc_feature (1)..(25): SEQ ID NO: 1124; WAN024DAO_at; Start 454; Stop 478
gtcaatcatctagatagaccagtcg

SEQ ID NO: 150293 - DNA, 25 bp, Artificial
  probe
  misc_feature (1)..(25): SEQ ID NO: 1124; WAN024DAO_at; Start 177; Stop 201
taaggtggtaattctagggcaagac

SEQ ID NO: 150294 - DNA, 25 bp, Artificial
  probe
  misc_feature (1)..(25): SEQ ID NO: 1124; WAN024DAO_at; Start 28; Stop 52
tcttggcatgctttgattaaggcgc

SEQ ID NO: 150295 - DNA, 25 bp, Artificial
  probe
  misc_feature (1)..(25): SEQ ID NO: 1124; WAN024DAO_at; Start 41; Stop 65
tgattaaggcgcaattacctgaggg

SEQ ID NO: 150296 - DNA, 25 bp, Artificial
  probe
  misc_feature (1)..(25): SEQ ID NO: 1124; WAN024DAO_at; Start 10; Stop 34
tcggctatggaacactcgtcttggc

SEQ ID NO: 150297 - DNA, 25 bp, Artificial
  probe
  misc_feature (1)..(25): SEQ ID NO: 1124; WAN024DAO_at; Start 521; Stop 545
tagttaccaatcctcatcacttgat

SEQ ID NO: 150298 - DNA, 25 bp, Artificial
  probe
  misc_feature (1)..(25): SEQ ID NO: 1124; WAN024DAO_at; Start 432; Stop 456
tactgatgctgtgattcaggtggtc

SEQ ID NO: 150299 - DNA, 25 bp, Artificial
  probe
  misc_feature (1)..(25): SEQ ID NO: 1124; WAN024DAO_at; Start 416; Stop 440
aaatctgggagccttttactgatgc

SEQ ID NO: 150300 - DNA, 25 bp, Artificial
  probe
  misc_feature (1)..(25): SEQ ID NO: 1124; WAN024DAO_at; Start 469; Stop 493
agaccagtcgtttttgtactctggg

SEQ ID NO: 150301 - DNA, 25 bp, Artificial
  probe
  misc_feature (1)..(25): SEQ ID NO: 1124; WAN024DAO_at; Start 269; Stop 293
catccttgcaaaatatcttgaaaga

SEQ ID NO: 150302 - DNA, 25 bp, Artificial
  probe
  misc_feature (1)..(25): SEQ ID NO: 1124; WAN024DAO_at; Start 349; Stop 373
caaggagtcttgcttcttaatgctt

SEQ ID NO: 150303 - DNA, 25 bp, Artificial
  probe
  misc_feature (1)..(25): SEQ ID NO: 1124; WAN024DAO_at; Start 304; Stop 328
gatatcggagttaagaaatctcatg

SEQ ID NO: 150304 - DNA, 25 bp, Artificial
  probe
  misc_feature (1)..(25): SEQ ID NO: 1124; WAN024DAO_at; Start 626; Stop 650
tcttaaaagagacaggacaagagcc

SEQ ID NO: 150305 - DNA, 25 bp, Artificial
  probe
  misc_feature (1)..(25): SEQ ID NO: 1124; WAN024DAO_at; Start 50; Stop 74
cgcaattacctgagggttatttcgg

SEQ ID NO: 150306 - DNA, 25 bp, Artificial
  probe
  misc_feature (1)..(25): SEQ ID NO: 1124; WAN024DAO_at; Start 2; Stop 26
tgaaggagtcggctatggaacactc

SEQ ID NO: 150307 - DNA, 25 bp, Artificial
  probe
  misc_feature (1)..(25): SEQ ID NO: 1124; WAN024DAO_at; Start 365; Stop 389
ttaatgcttgtttgactgttcctgc

SEQ ID NO: 150308 - DNA, 25 bp, Artificial
  probe
  misc_feature (1)..(25): SEQ ID NO: 1124; WAN024DAO_at; Start 494; Stop 518
gagcttatgcacgtaagaagaaggc

SEQ ID NO: 150309 - DNA, 25 bp, Artificial
  probe
  misc_feature (1)..(25): SEQ ID NO: 1124; WAN024DAO_at; Start 19; Stop 43
gaacactcgtcttggcatgctttga

SEQ ID NO: 150310 - DNA, 25 bp, Artificial
  probe
  misc_feature (1)..(25): SEQ ID NO: 1124; WAN024DAO_at; Start 133; Stop 157
gaaaaggtttttcaggctctcttga

SEQ ID NO: 150311 - DNA, 25 bp, Artificial
  probe
  misc_feature (1)..(25): SEQ ID NO: 1124; WAN024DAO_at; Start 402; Stop 426
tggtcatgctggtcaaatctgggag

SEQ ID NO: 150312 - DNA, 25 bp, Artificial
  probe
  misc_feature (1)..(25): SEQ ID NO: 1124; WAN024DAO_at; Start 147; Stop 171
ggctctcttgacaacactgcttgaa

SEQ ID NO: 150313 - DNA, 25 bp, Artificial
  probe
  misc_feature (1)..(25): SEQ ID NO: 1124; WAN024DAO_at; Start 443; Stop 467
tgattcaggtggtcaatcatctaga

SEQ ID NO: 150314 - DNA, 25 bp, Artificial
  probe
  misc_feature (1)..(25): SEQ ID NO: 1124; WAN024DAO_at; Start 387; Stop 411
tgctggacaggccaatggtcatgct

SEQ ID NO: 150315 - DNA, 25 bp, Artificial
  probe
  misc_feature (1)..(25): SEQ ID NO: 1124; WAN024DAO_at; Start 335; Stop 359
cagcttgggctgagcaaggagtctt

SEQ ID NO: 150316 - DNA, 25 bp, Artificial
  probe
  misc_feature (1)..(25): SEQ ID NO: 1124; WAN024DAO_at; Start 289; Stop 313
aaagaattgtcagatgatatcggag

SEQ ID NO: 150317 - DNA, 25 bp, Artificial
  probe
  misc_feature (1)..(25): SEQ ID NO: 1124; WAN024DAO_at; Start 636; Stop 660
gacaggacaagagccaatcgattgg

SEQ ID NO: 150318 - DNA, 25 bp, Artificial
  probe
  misc_feature (1)..(25): SEQ ID NO: 1124; WAN024DAO_at; Start 320; Stop 344
aatctcatgatttgacagcttgggc

SEQ ID NO: 150319 - DNA, 25 bp, Artificial
  probe
  misc_feature (1)..(25): SEQ ID NO: 1124; WAN024DAO_at; Start 84; Stop 108
tcagtttatggagcaggtctattct

SEQ ID NO: 150320 - DNA, 25 bp, Artificial
  probe
  misc_feature (1)..(25): SEQ ID NO: 850; WAN024DAP_at; Start 33; Stop 57
caaactaaaacaactcatgccctgg

SEQ ID NO: 150321 - DNA, 25 bp, Artificial
  probe
  misc_feature (1)..(25): SEQ ID NO: 850; WAN024DAP_at; Start 830; Stop 854
gaggtgttcctaatcgtatcgatgc

SEQ ID NO: 150322 - DNA, 25 bp, Artificial
  probe
  misc_feature (1)..(25): SEQ ID NO: 850; WAN024DAP_at; Start 130; Stop 154
gaatatgaccgatttttcagctggg

SEQ ID NO: 150323 - DNA, 25 bp, Artificial
  probe
  misc_feature (1)..(25): SEQ ID NO: 850; WAN024DAP_at; Start 599; Stop 623
ttattgcccttctcttggcatctgg

SEQ ID NO: 150324 - DNA, 25 bp, Artificial
  probe
  misc_feature (1)..(25): SEQ ID NO: 850; WAN024DAP_at; Start 2; Stop 26
tgaaacgtgagattttactggaacg

SEQ ID NO: 150325 - DNA, 25 bp, Artificial
  probe
  misc_feature (1)..(25): SEQ ID NO: 850; WAN024DAP_at; Start 867; Stop 891
gaaaatggttgctaaatactcagag

SEQ ID NO: 150326 - DNA, 25 bp, Artificial
  probe
  misc_feature (1)..(25): SEQ ID NO: 850; WAN024DAP_at; Start 905; Stop 929
gtgtaacaccccataaactgcgcca

SEQ ID NO: 150327 - DNA, 25 bp, Artificial
  probe
  misc_feature (1)..(25): SEQ ID NO: 850; WAN024DAP_at; Start 346; Stop 370
ctttacaagtatctaaccgaggagg

SEQ ID NO: 150328 - DNA, 25 bp, Artificial
  probe
  misc_feature (1)..(25): SEQ ID NO: 850; WAN024DAP_at; Start 221; Stop 245
tgtctaagaaagacatggaatcctt

SEQ ID NO: 150329 - DNA, 25 bp, Artificial
  probe
  misc_feature (1)..(25): SEQ ID NO: 850; WAN024DAP_at; Start 615; Stop 639
ggcatctggtgttcgcttatctgaa

SEQ ID NO: 150330 - DNA, 25 bp, Artificial
  probe
  misc_feature (1)..(25): SEQ ID NO: 850; WAN024DAP_at; Start 708; Stop 732
caaacgtgactcagtcaatgtcgct

SEQ ID NO: 150331 - DNA, 25 bp, Artificial
  probe
  misc_feature (1)..(25): SEQ ID NO: 850; WAN024DAP_at; Start 48; Stop 72
catgccctggtatgttctggaatac

SEQ ID NO: 150332 - DNA, 25 bp, Artificial
  probe
  misc_feature (1)..(25): SEQ ID NO: 850; WAN024DAP_at; Start 436; Stop 460
aagaaagaaacccttgctgccagag

SEQ ID NO: 150333 - DNA, 25 bp, Artificial
  probe
  misc_feature (1)..(25): SEQ ID NO: 850; WAN024DAP_at; Start 752; Stop 776
tagagaattatctggccattcggaa

SEQ ID NO: 150334 - DNA, 25 bp, Artificial
  probe
  misc_feature (1)..(25): SEQ ID NO: 850; WAN024DAP_at; Start 158; Stop 182
tggagtctggtatttcaaacgctga

SEQ ID NO: 150335 - DNA, 25 bp, Artificial
  probe
  misc_feature (1)..(25): SEQ ID NO: 850; WAN024DAP_at; Start 259; Stop 283
cgtgaacgtcccttgctgaatgcta

SEQ ID NO: 150336 - DNA, 25 bp, Artificial
  probe
  misc_feature (1)..(25): SEQ ID NO: 850; WAN024DAP_at; Start 295; Stop 319
caaggtgtttcacagacaactatca

SEQ ID NO: 150337 - DNA, 25 bp, Artificial
  probe
  misc_feature (1)..(25): SEQ ID NO: 850; WAN024DAP_at; Start 115; Stop 139
tacgaataccttaaggaatatgacc

SEQ ID NO: 150338 - DNA, 25 bp, Artificial
  probe
  misc_feature (1)..(25): SEQ ID NO: 850; WAN024DAP_at; Start 637; Stop 661
gaagctgttaatctagatctaagag

SEQ ID NO: 150339 - DNA, 25 bp, Artificial
  probe
  misc_feature (1)..(25): SEQ ID NO: 850; WAN024DAP_at; Start 517; Stop 541
tatatcgatcaagagcacccacaac

SEQ ID NO: 150340 - DNA, 25 bp, Artificial
  probe
  misc_feature (1)..(25): SEQ ID NO: 850; WAN024DAP_at; Start 1009; Stop 1033
gtcactgacctctatacccatattg

SEQ ID NO: 150341 - DNA, 25 bp, Artificial
  probe
  misc_feature (1)..(25): SEQ ID NO: 850; WAN024DAP_at; Start 815; Stop 839
ttttaactctctacagaggtgttcc

SEQ ID NO: 150342 - DNA, 25 bp, Artificial
  probe
  misc_feature (1)..(25): SEQ ID NO: 850; WAN024DAP_at; Start 532; Stop 556
cacccacaacagctttcaaatcgag

SEQ ID NO: 150343 - DNA, 25 bp, Artificial
  probe
  misc_feature (1)..(25): SEQ ID NO: 850; WAN024DAP_at; Start 846; Stop 870
tatcgatgcttctagcgttgagaaa

SEQ ID NO: 150344 - DNA, 25 bp, Artificial
  probe
  misc_feature (1)..(25): SEQ ID NO: 850; WAN024DAP_at; Start 450; Stop 474
tgctgccagagctgaaaatatcaag

SEQ ID NO: 150345 - DNA, 25 bp, Artificial
  probe
  misc_feature (1)..(25): SEQ ID NO: 850; WAN024DAP_at; Start 474; Stop 498
gcaaaaactctttctaggtgatgaa

SEQ ID NO: 150346 - DNA, 25 bp, Artificial
  probe
  misc_feature (1)..(25): SEQ ID NO: 850; WAN024DAP_at; Start 961; Stop 985
aaatcacaagttttagtcagtcacc

SEQ ID NO: 150347 - DNA, 25 bp, Artificial
  probe
  misc_feature (1)..(25): SEQ ID NO: 850; WAN024DAP_at; Start 723; Stop 747
caatgtcgctgcttttgctaaacct

SEQ ID NO: 150348 - DNA, 25 bp, Artificial
  probe
  misc_feature (1)..(25): SEQ ID NO: 850; WAN024DAP_at; Start 771; Stop 795
tcggaatcaacgctataaaacggaa

SEQ ID NO: 150349 - DNA, 25 bp, Artificial
  probe
  misc_feature (1)..(25): SEQ ID NO: 850; WAN024DAP_at; Start 17; Stop 41
tactggaacgaatcgacaaactaaa

SEQ ID NO: 150350 - DNA, 25 bp, Artificial
  probe
  misc_feature (1)..(25): SEQ ID NO: 850; WAN024DAP_at; Start 360; Stop 384
aaccgaggaggttgaaaacgatcag

SEQ ID NO: 150351 - DNA, 25 bp, Artificial
  probe
  misc_feature (1)..(25): SEQ ID NO: 850; WAN024DAP_at; Start 387; Stop 411
ggaaccttatttctatcgtaatgta

SEQ ID NO: 150352 - DNA, 25 bp, Artificial
  probe
  misc_feature (1)..(25): SEQ ID NO: 850; WAN024DAP_at; Start 974; Stop 998
tagtcagtcaccaactaggacatgc

SEQ ID NO: 150353 - DNA, 25 bp, Artificial
  probe
  misc_feature (1)..(25): SEQ ID NO: 850; WAN024DAP_at; Start 553; Stop 577
cgagctctctcatcattcaacaaaa

SEQ ID NO: 150354 - DNA, 25 bp, Artificial
  probe
  misc_feature (1)..(25): SEQ ID NO: 2399; WAN024DAQ_at; Start 327; Stop 351
tcctaaaaagaaacatctggagatt

SEQ ID NO: 150355 - DNA, 25 bp, Artificial
  probe
  misc_feature (1)..(25): SEQ ID NO: 2399; WAN024DAQ_at; Start 644; Stop 668
gctatgatttcgctactaatgcagg

SEQ ID NO: 150356 - DNA, 25 bp, Artificial
  probe
  misc_feature (1)..(25): SEQ ID NO: 2399; WAN024DAQ_at; Start 163; Stop 187
gaatccatgctttcttatgaaaaag

SEQ ID NO: 150357 - DNA, 25 bp, Artificial
  probe
  misc_feature (1)..(25): SEQ ID NO: 2399; WAN024DAQ_at; Start 251; Stop 275
ctggtcctgtagtcgctgcggccgt

SEQ ID NO: 150358 - DNA, 25 bp, Artificial
  probe
  misc_feature (1)..(25): SEQ ID NO: 2399; WAN024DAQ_at; Start 634; Stop 658
cagttccctggctatgatttcgcta

SEQ ID NO: 150359 - DNA, 25 bp, Artificial
  probe
  misc_feature (1)..(25): SEQ ID NO: 2399; WAN024DAQ_at; Start 668; Stop 692
gatatggcacagctaaacatctgga

SEQ ID NO: 150360 - DNA, 25 bp, Artificial
  probe
  misc_feature (1)..(25): SEQ ID NO: 2399; WAN024DAQ_at; Start 430; Stop 454
tatgaagcaaccaaactagccatgc

SEQ ID NO: 150361 - DNA, 25 bp, Artificial
  probe
  misc_feature (1)..(25): SEQ ID NO: 2399; WAN024DAQ_at; Start 238; Stop 262
cgtggtcctcttgctggtcctgtag

SEQ ID NO: 150362 - DNA, 25 bp, Artificial
  probe
  misc_feature (1)..(25): SEQ ID NO: 2399; WAN024DAQ_at; Start 733; Stop 757
agctttgaacccgttaaatcactgg

SEQ ID NO: 150363 - DNA, 25 bp, Artificial
  probe
  misc_feature (1)..(25): SEQ ID NO: 2399; WAN024DAQ_at; Start 308; Stop 332
tcaacgacagcaagaaaattcctaa

SEQ ID NO: 150364 - DNA, 25 bp, Artificial
  probe
  misc_feature (1)..(25): SEQ ID NO: 2399; WAN024DAQ_at; Start 222; Stop 246
tattgatgaggttggtcgtggtcct

SEQ ID NO: 150365 - DNA, 25 bp, Artificial
  probe
  misc_feature (1)..(25): SEQ ID NO: 2399; WAN024DAQ_at; Start 570; Stop 594
tatcgcagcagcatctatagtagcc

SEQ ID NO: 150366 - DNA, 25 bp, Artificial
  probe
  misc_feature (1)..(25): SEQ ID NO: 2399; WAN024DAQ_at; Start 2; Stop 26
tggcaacgattaaagaaatcaaaga

SEQ ID NO: 150367 - DNA, 25 bp, Artificial
  probe
  misc_feature (1)..(25): SEQ ID NO: 2399; WAN024DAQ_at; Start 538; Stop 562
tccattatcaaaggagatgccaact

SEQ ID NO: 150368 - DNA, 25 bp, Artificial
  probe
  misc_feature (1)..(25): SEQ ID NO: 2399; WAN024DAQ_at; Start 681; Stop 705
taaacatctggaaggcctcacaaaa

SEQ ID NO: 150369 - DNA, 25 bp, Artificial
  probe
  misc_feature (1)..(25): SEQ ID NO: 2399; WAN024DAQ_at; Start 187; Stop 211
gaactttataagcaaggattgacct

SEQ ID NO: 150370 - DNA, 25 bp, Artificial
  probe
  misc_feature (1)..(25): SEQ ID NO: 2399; WAN024DAQ_at; Start 550; Stop 574
ggagatgccaactccctctctatcg

SEQ ID NO: 150371 - DNA, 25 bp, Artificial
  probe
  misc_feature (1)..(25): SEQ ID NO: 2399; WAN024DAQ_at; Start 501; Stop 525
tgatgccatgaaactggacttgccc

SEQ ID NO: 150372 - DNA, 25 bp, Artificial
  probe
  misc_feature (1)..(25): SEQ ID NO: 2399; WAN024DAQ_at; Start 345; Stop 369
ggagattttccaagccgttcaagac

SEQ ID NO: 150373 - DNA, 25 bp, Artificial
  probe
  misc_feature (1)..(25): SEQ ID NO: 2399; WAN024DAQ_at; Start 107; Stop 131
aaatcagcaagcgtaaaagagccat

SEQ ID NO: 150374 - DNA, 25 bp, Artificial
  probe
  misc_feature (1)..(25): SEQ ID NO: 2399; WAN024DAQ_at; Start 148; Stop 172
gaaaatttgcgcttggaatccatgc

SEQ ID NO: 150375 - DNA, 25 bp, Artificial
  probe
  misc_feature (1)..(25): SEQ ID NO: 2399; WAN024DAQ_at; Start 657; Stop 681
tactaatgcaggatatggcacagct

SEQ ID NO: 150376 - DNA, 25 bp, Artificial
  probe
  misc_feature (1)..(25): SEQ ID NO: 2399; WAN024DAQ_at; Start 358; Stop 382
gccgttcaagaccaagccttgtcga

SEQ ID NO: 150377 - DNA, 25 bp, Artificial
  probe
  misc_feature (1)..(25): SEQ ID NO: 2399; WAN024DAQ_at; Start 691; Stop 715
gaaggcctcacaaaactaggagtta

SEQ ID NO: 150378 - DNA, 25 bp, Artificial
  probe
  misc_feature (1)..(25): SEQ ID NO: 2399; WAN024DAQ_at; Start 396; Stop 420
catagataatcaggtcatcgaccaa

SEQ ID NO: 150379 - DNA, 25 bp, Artificial
  probe
  misc_feature (1)..(25): SEQ ID NO: 2399; WAN024DAQ_at; Start 35; Stop 59
tgacagtcaaggagttagaaagccc

SEQ ID NO: 150380 - DNA, 25 bp, Artificial
  probe
  misc_feature (1)..(25): SEQ ID NO: 2399; WAN024DAQ_at; Start 294; Stop 318
taagattaaaggtctcaacgacagc

SEQ ID NO: 150381 - DNA, 25 bp, Artificial
  probe
  misc_feature (1)..(25): SEQ ID NO: 2399; WAN024DAQ_at; Start 76; Stop 100
gaaaaggataatcgctcaggagttc

SEQ ID NO: 150382 - DNA, 25 bp, Artificial
  probe
  misc_feature (1)..(25): SEQ ID NO: 2399; WAN024DAQ_at; Start 452; Stop 476
tgcaagaagcaatctcccagctcag

SEQ ID NO: 150383 - DNA, 25 bp, Artificial
  probe
  misc_feature (1)..(25): SEQ ID NO: 2399; WAN024DAQ_at; Start 587; Stop 611
tagtagccaaggtaacacgtgatga

SEQ ID NO: 150384 - DNA, 25 bp, Artificial
  probe
  misc_feature (1)..(25): SEQ ID NO: 2399; WAN024DAQ_at; Start 441; Stop 465
caaactagccatgcaagaagcaatc

SEQ ID NO: 150385 - DNA, 25 bp, Artificial
  probe
  misc_feature (1)..(25): SEQ ID NO: 2399; WAN024DAQ_at; Start 622; Stop 646
gaatacgatcagcagttccctggct

SEQ ID NO: 150386 - DNA, 25 bp, Artificial
  probe
  misc_feature (1)..(25): SEQ ID NO: 2399; WAN024DAQ_at; Start 373; Stop 397
gccttgtcgattggaattggtatca

SEQ ID NO: 150387 - DNA, 25 bp, Artificial
  probe
  misc_feature (1)..(25): SEQ ID NO: 2399; WAN024DAQ_at; Start 515; Stop 539
tggacttgcccatttcacaaacctc

SEQ ID NO: 150388 - DNA, 25 bp, Artificial
  probe
  misc_feature (1)..(25): SEQ ID NO: 1370; WAN024DAR_at; Start 121; Stop 145
gacacagcaaatagccctcagttag

SEQ ID NO: 150389 - DNA, 25 bp, Artificial
  probe
  misc_feature (1)..(25): SEQ ID NO: 1370; WAN024DAR_at; Start 202; Stop 226
gtgaagatttcaccaactatcgaat

SEQ ID NO: 150390 - DNA, 25 bp, Artificial
  probe
  misc_feature (1)..(25): SEQ ID NO: 1370; WAN024DAR_at; Start 310; Stop 334
ccttttggcctggttattcatagca

SEQ ID NO: 150391 - DNA, 25 bp, Artificial
  probe
  misc_feature (1)..(25): SEQ ID NO: 1370; WAN024DAR_at; Start 17; Stop 41
aacaattacttgaaaaagctcatgg

SEQ ID NO: 150392 - DNA, 25 bp, Artificial
  probe
  misc_feature (1)..(25): SEQ ID NO: 1370; WAN024DAR_at; Start 128; Stop 152
caaatagccctcagttagaaaaagg

SEQ ID NO: 150393 - DNA, 25 bp, Artificial
  probe
  misc_feature (1)..(25): SEQ ID NO: 1370; WAN024DAR_at; Start 71; Stop 95
gacgctatcttggtacttttgagga

SEQ ID NO: 150394 - DNA, 25 bp, Artificial
  probe
  misc_feature (1)..(25): SEQ ID NO: 1370; WAN024DAR_at; Start 350; Stop 374
tagaagaaaaagaccttcgacttgc

SEQ ID NO: 150395 - DNA, 25 bp, Artificial
  probe
  misc_feature (1)..(25): SEQ ID NO: 1370; WAN024DAR_at; Start 246; Stop 270
cttaaaagaagcaaaagaaactgat

SEQ ID NO: 150396 - DNA, 25 bp, Artificial
  probe
  misc_feature (1)..(25): SEQ ID NO: 1370; WAN024DAR_at; Start 298; Stop 322
catattacttctccttttggcctgg

SEQ ID NO: 150397 - DNA, 25 bp, Artificial
  probe
  misc_feature (1)..(25): SEQ ID NO: 1370; WAN024DAR_at; Start 277; Stop 301
gccaccatagtatctgaagagcata

SEQ ID NO: 150398 - DNA, 25 bp, Artificial
  probe
  misc_feature (1)..(25): SEQ ID NO: 1370; WAN024DAR_at; Start 317; Stop 341
gcctggttattcatagcaatgcacc

SEQ ID NO: 150399 - DNA, 25 bp, Artificial
  probe
  misc_feature (1)..(25): SEQ ID NO: 1370; WAN024DAR_at; Start 84; Stop 108
tacttttgaggaaagagttcttgga

SEQ ID NO: 150400 - DNA, 25 bp, Artificial
  probe
  misc_feature (1)..(25): SEQ ID NO: 1370; WAN024DAR_at; Start 330; Stop 354
tagcaatgcaccagttcaagtagaa

SEQ ID NO: 150401 - DNA, 25 bp, Artificial
  probe
  misc_feature (1)..(25): SEQ ID NO: 1370; WAN024DAR_at; Start 51; Stop 75
aataaatccggatgagcaaagacgc

SEQ ID NO: 150402 - DNA, 25 bp, Artificial
  probe
  misc_feature (1)..(25): SEQ ID NO: 1370; WAN024DAR_at; Start 234; Stop 258
gcaagttttctacttaaaagaagca

SEQ ID NO: 150403 - DNA, 25 bp, Artificial
  probe
  misc_feature (1)..(25): SEQ ID NO: 1370; WAN024DAR_at; Start 191; Stop 215
agccactatttgtgaagatttcacc

SEQ ID NO: 150404 - DNA, 25 bp, Artificial
  probe
  misc_feature (1)..(25): SEQ ID NO: 1370; WAN024DAR_at; Start 345; Stop 369
tcaagtagaagaaaaagaccttcga

SEQ ID NO: 150405 - DNA, 25 bp, Artificial
  probe
  misc_feature (1)..(25): SEQ ID NO: 1370; WAN024DAR_at; Start 102; Stop 126
tcttggatatgtagatattgacaca

SEQ ID NO: 150406 - DNA, 25 bp, Artificial
  probe
  misc_feature (1)..(25): SEQ ID NO: 1370; WAN024DAR_at; Start 402; Stop 426
ggaagaaccagccaaaacatcctta

SEQ ID NO: 150407 - DNA, 25 bp, Artificial
  probe
  misc_feature (1)..(25): SEQ ID NO: 1370; WAN024DAR_at; Start 23; Stop 47
tacttgaaaaagctcatggtgggtt

SEQ ID NO: 150408 - DNA, 25 bp, Artificial
  probe
  misc_feature (1)..(25): SEQ ID NO: 1370; WAN024DAR_at; Start 44; Stop 68
ggttaaaaataaatccggatgagca

SEQ ID NO: 150409 - DNA, 25 bp, Artificial
  probe
  misc_feature (1)..(25): SEQ ID NO: 1370; WAN024DAR_at; Start 257; Stop 281
caaaagaaactgatagtcaagccac

SEQ ID NO: 150410 - DNA, 25 bp, Artificial
  probe
  misc_feature (1)..(25): SEQ ID NO: 1370; WAN024DAR_at; Start 287; Stop 311
tatctgaagagcatattacttctcc

SEQ ID NO: 150411 - DNA, 25 bp, Artificial
  probe
  misc_feature (1)..(25): SEQ ID NO: 1370; WAN024DAR_at; Start 117; Stop 141
tattgacacagcaaatagccctcag

SEQ ID NO: 150412 - DNA, 25 bp, Artificial
  probe
  misc_feature (1)..(25): SEQ ID NO: 1370; WAN024DAR_at; Start 262; Stop 286
gaaactgatagtcaagccaccatag

SEQ ID NO: 150413 - DNA, 25 bp, Artificial
  probe
  misc_feature (1)..(25): SEQ ID NO: 1370; WAN024DAR_at; Start 270; Stop 294
tagtcaagccaccatagtatctgaa

SEQ ID NO: 150414 - DNA, 25 bp, Artificial
  probe
  misc_feature (1)..(25): SEQ ID NO: 1370; WAN024DAR_at; Start 212; Stop 236
caccaactatcgaatttgataagca

SEQ ID NO: 150415 - DNA, 25 bp, Artificial
  probe
  misc_feature (1)..(25): SEQ ID NO: 1370; WAN024DAR_at; Start 414; Stop 438
caaaacatccttatggaagaaatgg

SEQ ID NO: 150416 - DNA, 25 bp, Artificial
  probe
  misc_feature (1)..(25): SEQ ID NO: 1370; WAN024DAR_at; Start 222; Stop 246
cgaatttgataagcaagttttctac

SEQ ID NO: 150417 - DNA, 25 bp, Artificial
  probe
  misc_feature (1)..(25): SEQ ID NO: 1370; WAN024DAR_at; Start 2; Stop 26
tgacagatttatcaaaacaattact

SEQ ID NO: 150418 - DNA, 25 bp, Artificial
  probe
  misc_feature (1)..(25): SEQ ID NO: 1370; WAN024DAR_at; Start 34; Stop 58
gctcatggtgggttaaaaataaatc

SEQ ID NO: 150419 - DNA, 25 bp, Artificial
  probe
  misc_feature (1)..(25): SEQ ID NO: 1370; WAN024DAR_at; Start 63; Stop 87
tgagcaaagacgctatcttggtact

SEQ ID NO: 150420 - DNA, 25 bp, Artificial
  probe
  misc_feature (1)..(25): SEQ ID NO: 1370; WAN024DAR_at; Start 427; Stop 451
tggaagaaatggtttagctaactaa

SEQ ID NO: 150421 - DNA, 25 bp, Artificial
  probe
  misc_feature (1)..(25): SEQ ID NO: 1370; WAN024DAR_at; Start 57; Stop 81
tccggatgagcaaagacgctatctt

SEQ ID NO: 150422 - DNA, 25 bp, Artificial
  probe
  misc_feature (1)..(25): SEQ ID NO: 5018; WAN024DAS_at; Start 1077; Stop 1101
gccagtgctttttgaccaagttaca

SEQ ID NO: 150423 - DNA, 25 bp, Artificial
  probe
  misc_feature (1)..(25): SEQ ID NO: 5018; WAN024DAS_at; Start 82; Stop 106
gaagaattgggtacagttccagcca

SEQ ID NO: 150424 - DNA, 25 bp, Artificial
  probe
  misc_feature (1)..(25): SEQ ID NO: 5018; WAN024DAS_at; Start 284; Stop 308
cagcaattggagaagtagtgcgtac

SEQ ID NO: 150425 - DNA, 25 bp, Artificial
  probe
  misc_feature (1)..(25): SEQ ID NO: 5018; WAN024DAS_at; Start 1115; Stop 1139
tggcatgggaagagccatttggtcc

SEQ ID NO: 150426 - DNA, 25 bp, Artificial
  probe
  misc_feature (1)..(25): SEQ ID NO: 5018; WAN024DAS_at; Start 828; Stop 852
tagctactcaggacaacgttgcacg

SEQ ID NO: 150427 - DNA, 25 bp, Artificial
  probe
  misc_feature (1)..(25): SEQ ID NO: 5018; WAN024DAS_at; Start 584; Stop 608
cagggattccggcaggtgttttcaa

SEQ ID NO: 150428 - DNA, 25 bp, Artificial
  probe
  misc_feature (1)..(25): SEQ ID NO: 5018; WAN024DAS_at; Start 763; Stop 787
gcagctcttgtactagaagatgcag

SEQ ID NO: 150429 - DNA, 25 bp, Artificial
  probe
  misc_feature (1)..(25): SEQ ID NO: 5018; WAN024DAS_at; Start 108; Stop 132
gactcagactgaagctgatgaggct

SEQ ID NO: 150430 - DNA, 25 bp, Artificial
  probe
  misc_feature (1)..(25): SEQ ID NO: 5018; WAN024DAS_at; Start 1264; Stop 1288
aaacttgaagtaggtacagtccaca

SEQ ID NO: 150431 - DNA, 25 bp, Artificial
  probe
  misc_feature (1)..(25): SEQ ID NO: 5018; WAN024DAS_at; Start 746; Stop 770
aacttggtgggaaagatgcagctct

SEQ ID NO: 150432 - DNA, 25 bp, Artificial
  probe
  misc_feature (1)..(25): SEQ ID NO: 5018; WAN024DAS_at; Start 715; Stop 739
cgtttagctggtatgcgtcctatca

SEQ ID NO: 150433 - DNA, 25 bp, Artificial
  probe
  misc_feature (1)..(25): SEQ ID NO: 5018; WAN024DAS_at; Start 1041; Stop 1065
tcttacaccaatcaaacgtgagggc

SEQ ID NO: 150434 - DNA, 25 bp, Artificial
  probe
  misc_feature (1)..(25): SEQ ID NO: 5018; WAN024DAS_at; Start 299; Stop 323
tagtgcgtacagcagacttgattcg

SEQ ID NO: 150435 - DNA, 25 bp, Artificial
  probe
  misc_feature (1)..(25): SEQ ID NO: 5018; WAN024DAS_at; Start 123; Stop 147
tgatgaggctatgcaagctgcgcgt

SEQ ID NO: 150436 - DNA, 25 bp, Artificial
  probe
  misc_feature (1)..(25): SEQ ID NO: 5018; WAN024DAS_at; Start 572; Stop 596
catttgaagaagcagggattccggc

SEQ ID NO: 150437 - DNA, 25 bp, Artificial
  probe
  misc_feature (1)..(25): SEQ ID NO: 5018; WAN024DAS_at; Start 866; Stop 890
tcattgttctcgaaagtgtagcaga

SEQ ID NO: 150438 - DNA, 25 bp, Artificial
  probe
  misc_feature (1)..(25): SEQ ID NO: 5018; WAN024DAS_at; Start 421; Stop 445
gaaccagttggtatcgtgctagcga

SEQ ID NO: 150439 - DNA, 25 bp, Artificial
  probe
  misc_feature (1)..(25): SEQ ID NO: 5018; WAN024DAS_at; Start 478; Stop 502
gcttctaaaattgcacctgccttga

SEQ ID NO: 150440 - DNA, 25 bp, Artificial
  probe
  misc_feature (1)..(25): SEQ ID NO: 5018; WAN024DAS_at; Start 314; Stop 338
acttgattcgttatgctgctgagga

SEQ ID NO: 150441 - DNA, 25 bp, Artificial
  probe
  misc_feature (1)..(25): SEQ ID NO: 5018; WAN024DAS_at; Start 211; Stop 235
gcagctattttagaacgcgataagg

SEQ ID NO: 150442 - DNA, 25 bp, Artificial
  probe
  misc_feature (1)..(25): SEQ ID NO: 5018; WAN024DAS_at; Start 256; Stop 280
gccaaagaagtagcaaaagggatta

SEQ ID NO: 150443 - DNA, 25 bp, Artificial
  probe
  misc_feature (1)..(25): SEQ ID NO: 5018; WAN024DAS_at; Start 785; Stop 809
cagatttggaacatgctgccaagca

SEQ ID NO: 150444 - DNA, 25 bp, Artificial
  probe
  misc_feature (1)..(25): SEQ ID NO: 5018; WAN024DAS_at; Start 1201; Stop 1225
gaattcggccttcaatcatcagtct

SEQ ID NO: 150445 - DNA, 25 bp, Artificial
  probe
  misc_feature (1)..(25): SEQ ID NO: 5018; WAN024DAS_at; Start 399; Stop 423
caaactggctgttgtccgtcgtgaa

SEQ ID NO: 150446 - DNA, 25 bp, Artificial
  probe
  misc_feature (1)..(25): SEQ ID NO: 5018; WAN024DAS_at; Start 1173; Stop 1197
ggaagctattgcctttgccaacgaa

SEQ ID NO: 150447 - DNA, 25 bp, Artificial
  probe
  misc_feature (1)..(25): SEQ ID NO: 5018; WAN024DAS_at; Start 599; Stop 623
gtgttttcaacaccattacaggtcg

SEQ ID NO: 150448 - DNA, 25 bp, Artificial
  probe
  misc_feature (1)..(25): SEQ ID NO: 5018; WAN024DAS_at; Start 615; Stop 639
tacaggtcgtggttcagaaattggg

SEQ ID NO: 150449 - DNA, 25 bp, Artificial
  probe
  misc_feature (1)..(25): SEQ ID NO: 5018; WAN024DAS_at; Start 809; Stop 833
aaattgttgcgggagcctttagcta

SEQ ID NO: 150450 - DNA, 25 bp, Artificial
  probe
  misc_feature (1)..(25): SEQ ID NO: 5018; WAN024DAS_at; Start 893; Stop 917
aattagctactttgcttcaggaaga

SEQ ID NO: 150451 - DNA, 25 bp, Artificial
  probe
  misc_feature (1)..(25): SEQ ID NO: 5018; WAN024DAS_at; Start 844; Stop 868
cgttgcacggccattaaacgtgtca

SEQ ID NO: 150452 - DNA, 25 bp, Artificial
  probe
  misc_feature (1)..(25): SEQ ID NO: 5018; WAN024DAS_at; Start 345; Stop 369
ccgtatcactggacaagcaatggaa

SEQ ID NO: 150453 - DNA, 25 bp, Artificial
  probe
  misc_feature (1)..(25): SEQ ID NO: 5018; WAN024DAS_at; Start 1148; Stop 1172
caatcattcgtgtggctagtgtaga

SEQ ID NO: 150454 - DNA, 25 bp, Artificial
  probe
  misc_feature (1)..(25): SEQ ID NO: 5018; WAN024DAS_at; Start 969; Stop 993
tgttattgacaatgcttcagccgac

SEQ ID NO: 150455 - DNA, 25 bp, Artificial
  probe
  misc_feature (1)..(25): SEQ ID NO: 5018; WAN024DAS_at; Start 546; Stop 570
catttctggactcttgttggctaaa

SEQ ID NO: 150456 - DNA, 25 bp, Artificial
  probe
  misc_feature (1)..(25): SEQ ID NO: 1785; WAN024DAT_at; Start 120; Stop 144
ctacgtcaaggcgaggctaatgtgg

SEQ ID NO: 150457 - DNA, 25 bp, Artificial
  probe
  misc_feature (1)..(25): SEQ ID NO: 1785; WAN024DAT_at; Start 9; Stop 33
gatatattttaccaaattttcagaa

SEQ ID NO: 150458 - DNA, 25 bp, Artificial
  probe
  misc_feature (1)..(25): SEQ ID NO: 1785; WAN024DAT_at; Start 125; Stop 149
tcaaggcgaggctaatgtggtttga

SEQ ID NO: 150459 - DNA, 25 bp, Artificial
  probe
  misc_feature (1)..(25): SEQ ID NO: 1785; WAN024DAT_at; Start 117; Stop 141
ccactacgtcaaggcgaggctaatg

SEQ ID NO: 150460 - DNA, 25 bp, Artificial
  probe
  misc_feature (1)..(25): SEQ ID NO: 1785; WAN024DAT_at; Start 148; Stop 172
gaagaaattttcgaagagcgtgaat

SEQ ID NO: 150461 - DNA, 25 bp, Artificial
  probe
  misc_feature (1)..(25): SEQ ID NO: 1785; WAN024DAT_at; Start 114; Stop 138
aatccactacgtcaaggcgaggcta

SEQ ID NO: 150462 - DNA, 25 bp, Artificial
  probe
  misc_feature (1)..(25): SEQ ID NO: 1785; WAN024DAT_at; Start 74; Stop 98
caagcttgatttttcaaagtatact

SEQ ID NO: 150463 - DNA, 25 bp, Artificial
  probe
  misc_feature (1)..(25): SEQ ID NO: 1785; WAN024DAT_at; Start 126; Stop 150
caaggcgaggctaatgtggtttgaa

SEQ ID NO: 150464 - DNA, 25 bp, Artificial
  probe
  misc_feature (1)..(25): SEQ ID NO: 1785; WAN024DAT_at; Start 28; Stop 52
tcagaaaataacaaccctttttgca

SEQ ID NO: 150465 - DNA, 25 bp, Artificial
  probe
  misc_feature (1)..(25): SEQ ID NO: 1785; WAN024DAT_at; Start 58; Stop 82
tttgagattattttcacaagcttga

SEQ ID NO: 150466 - DNA, 25 bp, Artificial
  probe
  misc_feature (1)..(25): SEQ ID NO: 1785; WAN024DAT_at; Start 111; Stop 135
aaaaatccactacgtcaaggcgagg

SEQ ID NO: 150467 - DNA, 25 bp, Artificial
  probe
  misc_feature (1)..(25): SEQ ID NO: 1785; WAN024DAT_at; Start 70; Stop 94
ttcacaagcttgatttttcaaagta

SEQ ID NO: 150468 - DNA, 25 bp, Artificial
  probe
  misc_feature (1)..(25): SEQ ID NO: 1785; WAN024DAT_at; Start 110; Stop 134
aaaaaatccactacgtcaaggcgag

SEQ ID NO: 150469 - DNA, 25 bp, Artificial
  probe
  misc_feature (1)..(25): SEQ ID NO: 1785; WAN024DAT_at; Start 2; Stop 26
tgattaagatatattttaccaaatt

SEQ ID NO: 150470 - DNA, 25 bp, Artificial
  probe
  misc_feature (1)..(25): SEQ ID NO: 1785; WAN024DAT_at; Start 112; Stop 136
aaaatccactacgtcaaggcgaggc

SEQ ID NO: 150471 - DNA, 25 bp, Artificial
  probe
  misc_feature (1)..(25): SEQ ID NO: 1785; WAN024DAT_at; Start 116; Stop 140
tccactacgtcaaggcgaggctaat

SEQ ID NO: 150472 - DNA, 25 bp, Artificial
  probe
  misc_feature (1)..(25): SEQ ID NO: 1785; WAN024DAT_at; Start 60; Stop 84
tgagattattttcacaagcttgatt

SEQ ID NO: 150473 - DNA, 25 bp, Artificial
  probe
  misc_feature (1)..(25): SEQ ID NO: 1785; WAN024DAT_at; Start 76; Stop 100
agcttgatttttcaaagtatactca

SEQ ID NO: 150474 - DNA, 25 bp, Artificial
  probe
  misc_feature (1)..(25): SEQ ID NO: 1785; WAN024DAT_at; Start 122; Stop 146
acgtcaaggcgaggctaatgtggtt

SEQ ID NO: 150475 - DNA, 25 bp, Artificial
  probe
  misc_feature (1)..(25): SEQ ID NO: 1785; WAN024DAT_at; Start 61; Stop 85
gagattattttcacaagcttgattt

SEQ ID NO: 150476 - DNA, 25 bp, Artificial
  probe
  misc_feature (1)..(25): SEQ ID NO: 1785; WAN024DAT_at; Start 54; Stop 78
aatttttgagattattttcacaagc

SEQ ID NO: 150477 - DNA, 25 bp, Artificial
  probe
  misc_feature (1)..(25): SEQ ID NO: 1785; WAN024DAT_at; Start 115; Stop 139
atccactacgtcaaggcgaggctaa

SEQ ID NO: 150478 - DNA, 25 bp, Artificial
  probe
  misc_feature (1)..(25): SEQ ID NO: 1785; WAN024DAT_at; Start 81; Stop 105
gatttttcaaagtatactcaataaa

SEQ ID NO: 150479 - DNA, 25 bp, Artificial
  probe
  misc_feature (1)..(25): SEQ ID NO: 1785; WAN024DAT_at; Start 59; Stop 83
ttgagattattttcacaagcttgat

SEQ ID NO: 150480 - DNA, 25 bp, Artificial
  probe
  misc_feature (1)..(25): SEQ ID NO: 1785; WAN024DAT_at; Start 113; Stop 137
aaatccactacgtcaaggcgaggct

SEQ ID NO: 150481 - DNA, 25 bp, Artificial
  probe
  misc_feature (1)..(25): SEQ ID NO: 1785; WAN024DAT_at; Start 121; Stop 145
tacgtcaaggcgaggctaatgtggt

SEQ ID NO: 150482 - DNA, 25 bp, Artificial
  probe
  misc_feature (1)..(25): SEQ ID NO: 1785; WAN024DAT_at; Start 72; Stop 96
cacaagcttgatttttcaaagtata

SEQ ID NO: 150483 - DNA, 25 bp, Artificial
  probe
  misc_feature (1)..(25): SEQ ID NO: 1785; WAN024DAT_at; Start 149; Stop 173
aagaaattttcgaagagcgtgaatg

SEQ ID NO: 150484 - DNA, 25 bp, Artificial
  probe
  misc_feature (1)..(25): SEQ ID NO: 1785; WAN024DAT_at; Start 150; Stop 174
agaaattttcgaagagcgtgaatga

SEQ ID NO: 150485 - DNA, 25 bp, Artificial
  probe
  misc_feature (1)..(25): SEQ ID NO: 1785; WAN024DAT_at; Start 50; Stop 74
gcaaaatttttgagattattttcac

SEQ ID NO: 150486 - DNA, 25 bp, Artificial
  probe
  misc_feature (1)..(25): SEQ ID NO: 1785; WAN024DAT_at; Start 68; Stop 92
ttttcacaagcttgatttttcaaag

SEQ ID NO: 150487 - DNA, 25 bp, Artificial
  probe
  misc_feature (1)..(25): SEQ ID NO: 1785; WAN024DAT_at; Start 87; Stop 111
tcaaagtatactcaataaaaataaa

SEQ ID NO: 150488 - DNA, 25 bp, Artificial
  probe
  misc_feature (1)..(25): SEQ ID NO: 1785; WAN024DAT_at; Start 129; Stop 153
ggcgaggctaatgtggtttgaagaa

SEQ ID NO: 150489 - DNA, 25 bp, Artificial
  probe
  misc_feature (1)..(25): SEQ ID NO: 1785; WAN024DAT_at; Start 66; Stop 90
tattttcacaagcttgatttttcaa

SEQ ID NO: 150490 - DNA, 25 bp, Artificial
  probe
  misc_feature (1)..(25): SEQ ID NO: 1160; WAN024DAU_at; Start 944; Stop 968
ttgactggacagttggccgtaccgg

SEQ ID NO: 150491 - DNA, 25 bp, Artificial
  probe
  misc_feature (1)..(25): SEQ ID NO: 1160; WAN024DAU_at; Start 1226; Stop 1250
tggccctacgttgtatcaatccgcg

SEQ ID NO: 150492 - DNA, 25 bp, Artificial
  probe
  misc_feature (1)..(25): SEQ ID NO: 1160; WAN024DAU_at; Start 1094; Stop 1118
tatataaggctggtgacatcatccc

SEQ ID NO: 150493 - DNA, 25 bp, Artificial
  probe
  misc_feature (1)..(25): SEQ ID NO: 1160; WAN024DAU_at; Start 1120; Stop 1144
gccgttttacgtgtggtagagtcca

SEQ ID NO: 150494 - DNA, 25 bp, Artificial
  probe
  misc_feature (1)..(25): SEQ ID NO: 1160; WAN024DAU_at; Start 285; Stop 309
tcgtaaggaagtggctcatccgacc

SEQ ID NO: 150495 - DNA, 25 bp, Artificial
  probe
  misc_feature (1)..(25): SEQ ID NO: 1160; WAN024DAU_at; Start 570; Stop 594
tcgtaatgcggcagcaggaactctg

SEQ ID NO: 150496 - DNA, 25 bp, Artificial
  probe
  misc_feature (1)..(25): SEQ ID NO: 1160; WAN024DAU_at; Start 1248; Stop 1272
gcgttgccctgctcaaatcatggaa

SEQ ID NO: 150497 - DNA, 25 bp, Artificial
  probe
  misc_feature (1)..(25): SEQ ID NO: 1160; WAN024DAU_at; Start 488; Stop 512
gggaatgttacatgccacgcgcttc

SEQ ID NO: 150498 - DNA, 25 bp, Artificial
  probe
  misc_feature (1)..(25): SEQ ID NO: 1160; WAN024DAU_at; Start 263; Stop 287
tagatgcttttgatgcgcgtgttcg

SEQ ID NO: 150499 - DNA, 25 bp, Artificial
  probe
  misc_feature (1)..(25): SEQ ID NO: 1160; WAN024DAU_at; Start 441; Stop 465
ggacatccctttgactttgccagaa

SEQ ID NO: 150500 - DNA, 25 bp, Artificial
  probe
  misc_feature (1)..(25): SEQ ID NO: 1160; WAN024DAU_at; Start 43; Stop 67
tatgcgactgagtactataccagcg

SEQ ID NO: 150501 - DNA, 25 bp, Artificial
  probe
  misc_feature (1)..(25): SEQ ID NO: 1160; WAN024DAU_at; Start 1907; Stop 1931
cacaagaacttggtatccaggtcag

SEQ ID NO: 150502 - DNA, 25 bp, Artificial
  probe
  misc_feature (1)..(25): SEQ ID NO: 1160; WAN024DAU_at; Start 1711; Stop 1735
tataaaggacagacggtagtagcgg

SEQ ID NO: 150503 - DNA, 25 bp, Artificial
  probe
  misc_feature (1)..(25): SEQ ID NO: 1160; WAN024DAU_at; Start 1809; Stop 1833
taaactcgaaagtctgggtgccaaa

SEQ ID NO: 150504 - DNA, 25 bp, Artificial
  probe
  misc_feature (1)..(25): SEQ ID NO: 1160; WAN024DAU_at; Start 94; Stop 118
tatgaccgcctttaccgtgagttgg

SEQ ID NO: 150505 - DNA, 25 bp, Artificial
  probe
  misc_feature (1)..(25): SEQ ID NO: 1160; WAN024DAU_at; Start 142; Stop 166
gagcaagtgctagcagacagtccga

SEQ ID NO: 150506 - DNA, 25 bp, Artificial
  probe
  misc_feature (1)..(25): SEQ ID NO: 1160; WAN024DAU_at; Start 1211; Stop 1235
actttgaagatgaagtggccctacg

SEQ ID NO: 150507 - DNA, 25 bp, Artificial
  probe
  misc_feature (1)..(25): SEQ ID NO: 1160; WAN024DAU_at; Start 1001; Stop 1025
tacaacttgccggtacgactgttag

SEQ ID NO: 150508 - DNA, 25 bp, Artificial
  probe
  misc_feature (1)..(25): SEQ ID NO: 1160; WAN024DAU_at; Start 664; Stop 688
tcaactcgtgatagccaagaaaagg

SEQ ID NO: 150509 - DNA, 25 bp, Artificial
  probe
  misc_feature (1)..(25): SEQ ID NO: 1160; WAN024DAU_at; Start 604; Stop 628
gatacagcagtagttgccaagcgta

SEQ ID NO: 150510 - DNA, 25 bp, Artificial
  probe
  misc_feature (1)..(25): SEQ ID NO: 1160; WAN024DAU_at; Start 1618; Stop 1642
ggcgtgattgccaaaagtcttcaga

SEQ ID NO: 150511 - DNA, 25 bp, Artificial
  probe
  misc_feature (1)..(25): SEQ ID NO: 1160; WAN024DAU_at; Start 162; Stop 186
tccgactcatcgtgttggtggcaag

SEQ ID NO: 150512 - DNA, 25 bp, Artificial
  probe
  misc_feature (1)..(25): SEQ ID NO: 1160; WAN024DAU_at; Start 1772; Stop 1796
gaaaattggaacgactcaagcgctc

SEQ ID NO: 150513 - DNA, 25 bp, Artificial
  probe
  misc_feature (1)..(25): SEQ ID NO: 1160; WAN024DAU_at; Start 556; Stop 580
gaatttgctaatcctcgtaatgcgg

SEQ ID NO: 150514 - DNA, 25 bp, Artificial
  probe
  misc_feature (1)..(25): SEQ ID NO: 1160; WAN024DAU_at; Start 876; Stop 900
taaggctccaaagtgggcagtagcc

SEQ ID NO: 150515 - DNA, 25 bp, Artificial
  probe
  misc_feature (1)..(25): SEQ ID NO: 1160; WAN024DAU_at; Start 1922; Stop 1946
tccaggtcagagatgaggcatggct

SEQ ID NO: 150516 - DNA, 25 bp, Artificial
  probe
  misc_feature (1)..(25): SEQ ID NO: 1160; WAN024DAU_at; Start 1447; Stop 1471
tatcaggctatccaagcatcaaagg

SEQ ID NO: 150517 - DNA, 25 bp, Artificial
  probe
  misc_feature (1)..(25): SEQ ID NO: 1160; WAN024DAU_at; Start 1302; Stop 1326
tatgaatattacaggccttggtcca

SEQ ID NO: 150518 - DNA, 25 bp, Artificial
  probe
  misc_feature (1)..(25): SEQ ID NO: 1160; WAN024DAU_at; Start 1503; Stop 1527
gggaattcgtcatgtcggaagcaag

SEQ ID NO: 150519 - DNA, 25 bp, Artificial
  probe
  misc_feature (1)..(25): SEQ ID NO: 1160; WAN024DAU_at; Start 1575; Stop 1599
tcaggcagattcagaggaagtggct

SEQ ID NO: 150520 - DNA, 25 bp, Artificial
  probe
  misc_feature (1)..(25): SEQ ID NO: 1160; WAN024DAU_at; Start 1874; Stop 1898
taggtgcagacgctggaagtaaact

SEQ ID NO: 150521 - DNA, 25 bp, Artificial
  probe
  misc_feature (1)..(25): SEQ ID NO: 1160; WAN024DAU_at; Start 771; Stop 795
tatccaagaagtaggacaggaacgg

SEQ ID NO: 150522 - DNA, 25 bp, Artificial
  probe
  misc_feature (1)..(25): SEQ ID NO: 1160; WAN024DAU_at; Start 819; Stop 843
tggagtggtaatcaaggtcaacgac

SEQ ID NO: 150523 - DNA, 25 bp, Artificial
  probe
  misc_feature (1)..(25): SEQ ID NO: 1160; WAN024DAU_at; Start 587; Stop 611
gaactctgcgtcagttggatacagc

SEQ ID NO: 150524 - DNA, 25 bp, Artificial
  probe
  misc_feature (1)..(25): SEQ ID NO: 1808; WAN024DAV_at; Start 34; Stop 58
gatattggcacaccatctgattcag

SEQ ID NO: 150525 - DNA, 25 bp, Artificial
  probe
  misc_feature (1)..(25): SEQ ID NO: 1808; WAN024DAV_at; Start 353; Stop 377
tgaatgccaaaattattgttgcagg

SEQ ID NO: 150526 - DNA, 25 bp, Artificial
  probe
  misc_feature (1)..(25): SEQ ID NO: 1808; WAN024DAV_at; Start 649; Stop 673
tatatgccagcagatggcgtttatg

SEQ ID NO: 150527 - DNA, 25 bp, Artificial
  probe
  misc_feature (1)..(25): SEQ ID NO: 1808; WAN024DAV_at; Start 638; Stop 662
tagaccgtacttatatgccagcaga

SEQ ID NO: 150528 - DNA, 25 bp, Artificial
  probe
  misc_feature (1)..(25): SEQ ID NO: 1808; WAN024DAV_at; Start 748; Stop 772
gaagaagcacgttttgaagtcaata

SEQ ID NO: 150529 - DNA, 25 bp, Artificial
  probe
  misc_feature (1)..(25): SEQ ID NO: 1808; WAN024DAV_at; Start 881; Stop 905
taaaggctgatgaagaagtaactcg

SEQ ID NO: 150530 - DNA, 25 bp, Artificial
  probe
  misc_feature (1)..(25): SEQ ID NO: 1808; WAN024DAV_at; Start 521; Stop 545
gaaatgtgaaagaagcaggaaaact

SEQ ID NO: 150531 - DNA, 25 bp, Artificial
  probe
  misc_feature (1)..(25): SEQ ID NO: 1808; WAN024DAV_at; Start 169; Stop 193
aatgaatctccaaagatcgctttag

SEQ ID NO: 150532 - DNA, 25 bp, Artificial
  probe
  misc_feature (1)..(25): SEQ ID NO: 1808; WAN024DAV_at; Start 311; Stop 335
gtctcactgcacaagaattctttgc

SEQ ID NO: 150533 - DNA, 25 bp, Artificial
  probe
  misc_feature (1)..(25): SEQ ID NO: 1808; WAN024DAV_at; Start 222; Stop 246
tattttgaaccctgctgaacgtgaa

SEQ ID NO: 150534 - DNA, 25 bp, Artificial
  probe
  misc_feature (1)..(25): SEQ ID NO: 1808; WAN024DAV_at; Start 479; Stop 503
gaaagattagttcaactcgtatccg

SEQ ID NO: 150535 - DNA, 25 bp, Artificial
  probe
  misc_feature (1)..(25): SEQ ID NO: 1808; WAN024DAV_at; Start 715; Stop 739
gctagtgtcgggaaaaatgtgacct

SEQ ID NO: 150536 - DNA, 25 bp, Artificial
  probe
  misc_feature (1)..(25): SEQ ID NO: 1808; WAN024DAV_at; Start 254; Stop 278
taaagcgcgaaggtgtagaagaatt

SEQ ID NO: 150537 - DNA, 25 bp, Artificial
  probe
  misc_feature (1)..(25): SEQ ID NO: 1808; WAN024DAV_at; Start 687; Stop 711
gattcaaagacagaagtatcgtgct

SEQ ID NO: 150538 - DNA, 25 bp, Artificial
  probe
  misc_feature (1)..(25): SEQ ID NO: 1808; WAN024DAV_at; Start 610; Stop 634
ggttatccgacagcgaatttagtgc

SEQ ID NO: 150539 - DNA, 25 bp, Artificial
  probe
  misc_feature (1)..(25): SEQ ID NO: 1808; WAN024DAV_at; Start 622; Stop 646
gcgaatttagtgcttttagaccgta

SEQ ID NO: 150540 - DNA, 25 bp, Artificial
  probe
  misc_feature (1)..(25): SEQ ID NO: 1808; WAN024DAV_at; Start 595; Stop 619
cgtggtcgtacaattggttatccga

SEQ ID NO: 150541 - DNA, 25 bp, Artificial
  probe
  misc_feature (1)..(25): SEQ ID NO: 1808; WAN024DAV_at; Start 66; Stop 90
tctcggctattttgatggcatacat

SEQ ID NO: 150542 - DNA, 25 bp, Artificial
  probe
  misc_feature (1)..(25): SEQ ID NO: 1808; WAN024DAV_at; Start 118; Stop 142
gccaacaaggctgcgagaaaggatt

SEQ ID NO: 150543 - DNA, 25 bp, Artificial
  probe
  misc_feature (1)..(25): SEQ ID NO: 1808; WAN024DAV_at; Start 864; Stop 888
ccaattagtggatcagttaaaggct

SEQ ID NO: 150544 - DNA, 25 bp, Artificial
  probe
  misc_feature (1)..(25): SEQ ID NO: 1808; WAN024DAV_at; Start 700; Stop 724
aagtatcgtgctatggctagtgtcg

SEQ ID NO: 150545 - DNA, 25 bp, Artificial
  probe
  misc_feature (1)..(25): SEQ ID NO: 1808; WAN024DAV_at; Start 382; Stop 406
gattatacatttggttctgacaaaa

SEQ ID NO: 150546 - DNA, 25 bp, Artificial
  probe
  misc_feature (1)..(25): SEQ ID NO: 1808; WAN024DAV_at; Start 551; Stop 575
gggcaccgcttccatcaagaggtat

SEQ ID NO: 150547 - DNA, 25 bp, Artificial
  probe
  misc_feature (1)..(25): SEQ ID NO: 1808; WAN024DAV_at; Start 456; Stop 480
tccacctgtagaagatgagaaagga

SEQ ID NO: 150548 - DNA, 25 bp, Artificial
  probe
  misc_feature (1)..(25): SEQ ID NO: 1808; WAN024DAV_at; Start 146; Stop 170
tgcctatcgtcgttatgacctttaa

SEQ ID NO: 150549 - DNA, 25 bp, Artificial
  probe
  misc_feature (1)..(25): SEQ ID NO: 1808; WAN024DAV_at; Start 808; Stop 832
gtcatggtttattggcttgatcgca

SEQ ID NO: 150550 - DNA, 25 bp, Artificial
  probe
  misc_feature (1)..(25): SEQ ID NO: 1808; WAN024DAV_at; Start 50; Stop 74
ctgattcagtcgttgttctcggcta

SEQ ID NO: 150551 - DNA, 25 bp, Artificial
  probe
  misc_feature (1)..(25): SEQ ID NO: 1808; WAN024DAV_at; Start 439; Stop 463
ggagaagttatcattgttccacctg

SEQ ID NO: 150552 - DNA, 25 bp, Artificial
  probe
  misc_feature (1)..(25): SEQ ID NO: 1808; WAN024DAV_at; Start 296; Stop 320
gtagtcaattcgctagtctcactgc

SEQ ID NO: 150553 - DNA, 25 bp, Artificial
  probe
  misc_feature (1)..(25): SEQ ID NO: 1808; WAN024DAV_at; Start 103; Stop 127
gaattatttcgtgttgccaacaagg

SEQ ID NO: 150554 - DNA, 25 bp, Artificial
  probe
  misc_feature (1)..(25): SEQ ID NO: 1808; WAN024DAV_at; Start 335; Stop 359
caacttatatcaaggctatgaatgc

SEQ ID NO: 150555 - DNA, 25 bp, Artificial
  probe
  misc_feature (1)..(25): SEQ ID NO: 1808; WAN024DAV_at; Start 582; Stop 606
tcatggtaatgctcgtggtcgtaca

SEQ ID NO: 150556 - DNA, 25 bp, Artificial
  probe
  misc_feature (1)..(25): SEQ ID NO: 1808; WAN024DAV_at; Start 493; Stop 517
actcgtatccgtcaagctattttag

SEQ ID NO: 150557 - DNA, 25 bp, Artificial
  probe
  misc_feature (1)..(25): SEQ ID NO: 1808; WAN024DAV_at; Start 843; Stop 867
gaccaaatttgactcagttgaccaa

SEQ ID NO: 150558 - DNA, 25 bp, Artificial
  probe
  misc_feature (1)..(25): SEQ ID NO: 2977; WAN024DAW_at; Start 106; Stop 130
gcagctgacggacaaactgtaacag

SEQ ID NO: 150559 - DNA, 25 bp, Artificial
  probe
  misc_feature (1)..(25): SEQ ID NO: 2977; WAN024DAW_at; Start 163; Stop 187
cacatctatccaggtgtaaacgttg

SEQ ID NO: 150560 - DNA, 25 bp, Artificial
  probe
  misc_feature (1)..(25): SEQ ID NO: 2977; WAN024DAW_at; Start 223; Stop 247
gaaggcgtagtacgctttgaacgta

SEQ ID NO: 150561 - DNA, 25 bp, Artificial
  probe
  misc_feature (1)..(25): SEQ ID NO: 2977; WAN024DAW_at; Start 49; Stop 73
ggtggaggttctacatcaaacggac

SEQ ID NO: 150562 - DNA, 25 bp, Artificial
  probe
  misc_feature (1)..(25): SEQ ID NO: 2977; WAN024DAW_at; Start 21; Stop 45
caacttgcaacttttcgcccacaaa

SEQ ID NO: 150563 - DNA, 25 bp, Artificial
  probe
  misc_feature (1)..(25): SEQ ID NO: 2977; WAN024DAW_at; Start 118; Stop 142
caaactgtaacaggtggatcaatcc

SEQ ID NO: 150564 - DNA, 25 bp, Artificial
  probe
  misc_feature (1)..(25): SEQ ID NO: 2977; WAN024DAW_at; Start 236; Stop 260
gctttgaacgtaaaggacgcgataa

SEQ ID NO: 150565 - DNA, 25 bp, Artificial
  probe
  misc_feature (1)..(25): SEQ ID NO: 2977; WAN024DAW_at; Start 154; Stop 178
cgtggtacacacatctatccaggtg

SEQ ID NO: 150566 - DNA, 25 bp, Artificial
  probe
  misc_feature (1)..(25): SEQ ID NO: 2977; WAN024DAW_at; Start 17; Stop 41
ttaacaacttgcaacttttcgccca

SEQ ID NO: 150567 - DNA, 25 bp, Artificial
  probe
  misc_feature (1)..(25): SEQ ID NO: 2977; WAN024DAW_at; Start 40; Stop 64
cacaaaaaaggtggaggttctacat

SEQ ID NO: 150568 - DNA, 25 bp, Artificial
  probe
  misc_feature (1)..(25): SEQ ID NO: 2977; WAN024DAW_at; Start 53; Stop 77
gaggttctacatcaaacggacgtga

SEQ ID NO: 150569 - DNA, 25 bp, Artificial
  probe
  misc_feature (1)..(25): SEQ ID NO: 2977; WAN024DAW_at; Start 204; Stop 228
tactttgttcgctaaagttgaaggc

SEQ ID NO: 150570 - DNA, 25 bp, Artificial
  probe
  misc_feature (1)..(25): SEQ ID NO: 2977; WAN024DAW_at; Start 55; Stop 79
ggttctacatcaaacggacgtgatt

SEQ ID NO: 150571 - DNA, 25 bp, Artificial
  probe
  misc_feature (1)..(25): SEQ ID NO: 2977; WAN024DAW_at; Start 100; Stop 124
gctaaagcagctgacggacaaactg

SEQ ID NO: 150572 - DNA, 25 bp, Artificial
  probe
  misc_feature (1)..(25): SEQ ID NO: 2977; WAN024DAW_at; Start 76; Stop 100
gattcacaagcaaaacgtcttggag

SEQ ID NO: 150573 - DNA, 25 bp, Artificial
  probe
  misc_feature (1)..(25): SEQ ID NO: 2977; WAN024DAW_at; Start 5; Stop 29
taaaaatgactcttaacaacttgca

SEQ ID NO: 150574 - DNA, 25 bp, Artificial
  probe
  misc_feature (1)..(25): SEQ ID NO: 2977; WAN024DAW_at; Start 233; Stop 257
tacgctttgaacgtaaaggacgcga

SEQ ID NO: 150575 - DNA, 25 bp, Artificial
  probe
  misc_feature (1)..(25): SEQ ID NO: 2977; WAN024DAW_at; Start 140; Stop 164
tcctttaccgtcaacgtggtacaca

SEQ ID NO: 150576 - DNA, 25 bp, Artificial
  probe
  misc_feature (1)..(25): SEQ ID NO: 2977; WAN024DAW_at; Start 209; Stop 233
tgttcgctaaagttgaaggcgtagt

SEQ ID NO: 150577 - DNA, 25 bp, Artificial
  probe
  misc_feature (1)..(25): SEQ ID NO: 2977; WAN024DAW_at; Start 214; Stop 238
gctaaagttgaaggcgtagtacgct

SEQ ID NO: 150578 - DNA, 25 bp, Artificial
  probe
  misc_feature (1)..(25): SEQ ID NO: 2977; WAN024DAW_at; Start 86; Stop 110
caaaacgtcttggagctaaagcagc

SEQ ID NO: 150579 - DNA, 25 bp, Artificial
  probe
  misc_feature (1)..(25): SEQ ID NO: 2977; WAN024DAW_at; Start 73; Stop 97
cgtgattcacaagcaaaacgtcttg

SEQ ID NO: 150580 - DNA, 25 bp, Artificial
  probe
  misc_feature (1)..(25): SEQ ID NO: 2977; WAN024DAW_at; Start 62; Stop 86
catcaaacggacgtgattcacaagc

SEQ ID NO: 150581 - DNA, 25 bp, Artificial
  probe
  misc_feature (1)..(25): SEQ ID NO: 2977; WAN024DAW_at; Start 131; Stop 155
gtggatcaatcctttaccgtcaacg

SEQ ID NO: 150582 - DNA, 25 bp, Artificial
  probe
  misc_feature (1)..(25): SEQ ID NO: 2977; WAN024DAW_at; Start 110; Stop 134
ctgacggacaaactgtaacaggtgg

SEQ ID NO: 150583 - DNA, 25 bp, Artificial
  probe
  misc_feature (1)..(25): SEQ ID NO: 2977; WAN024DAW_at; Start 94; Stop 118
cttggagctaaagcagctgacggac

SEQ ID NO: 150584 - DNA, 25 bp, Artificial
  probe
  misc_feature (1)..(25): SEQ ID NO: 2977; WAN024DAW_at; Start 145; Stop 169
taccgtcaacgtggtacacacatct

SEQ ID NO: 150585 - DNA, 25 bp, Artificial
  probe
  misc_feature (1)..(25): SEQ ID NO: 2977; WAN024DAW_at; Start 42; Stop 66
caaaaaaggtggaggttctacatca

SEQ ID NO: 150586 - DNA, 25 bp, Artificial
  probe
  misc_feature (1)..(25): SEQ ID NO: 2977; WAN024DAW_at; Start 125; Stop 149
taacaggtggatcaatcctttaccg

SEQ ID NO: 150587 - DNA, 25 bp, Artificial
  probe
  misc_feature (1)..(25): SEQ ID NO: 2977; WAN024DAW_at; Start 90; Stop 114
acgtcttggagctaaagcagctgac

SEQ ID NO: 150588 - DNA, 25 bp, Artificial
  probe
  misc_feature (1)..(25): SEQ ID NO: 2977; WAN024DAW_at; Start 169; Stop 193
tatccaggtgtaaacgttggtcgtg

SEQ ID NO: 150589 - DNA, 25 bp, Artificial
  probe
  misc_feature (1)..(25): SEQ ID NO: 2977; WAN024DAW_at; Start 65; Stop 89
caaacggacgtgattcacaagcaaa

SEQ ID NO: 150590 - DNA, 25 bp, Artificial
  probe
  misc_feature (1)..(25): SEQ ID NO: 2977; WAN024DAW_at; Start 134; Stop 158
gatcaatcctttaccgtcaacgtgg

SEQ ID NO: 150591 - DNA, 25 bp, Artificial
  probe
  misc_feature (1)..(25): SEQ ID NO: 2977; WAN024DAW_at; Start 80; Stop 104
cacaagcaaaacgtcttggagctaa

SEQ ID NO: 150592 - DNA, 25 bp, Artificial
  probe
  misc_feature (1)..(25): SEQ ID NO: 1687; WAN024DAX_at; Start 135; Stop 159
caattctattgagaaatttgcaggc

SEQ ID NO: 150593 - DNA, 25 bp, Artificial
  probe
  misc_feature (1)..(25): SEQ ID NO: 1687; WAN024DAX_at; Start 220; Stop 244
aaagatcttccttcacaccagagag

SEQ ID NO: 150594 - DNA, 25 bp, Artificial
  probe
  misc_feature (1)..(25): SEQ ID NO: 1687; WAN024DAX_at; Start 121; Stop 145
gccattaactttatcaattctattg

SEQ ID NO: 150595 - DNA, 25 bp, Artificial
  probe
  misc_feature (1)..(25): SEQ ID NO: 1687; WAN024DAX_at; Start 265; Stop 289
gaatcatttttcttaggtatggcaa

SEQ ID NO: 150596 - DNA, 25 bp, Artificial
  probe
  misc_feature (1)..(25): SEQ ID NO: 1687; WAN024DAX_at; Start 175; Stop 199
gaattaaacgaagatgaaggtggct

SEQ ID NO: 150597 - DNA, 25 bp, Artificial
  probe
  misc_feature (1)..(25): SEQ ID NO: 1687; WAN024DAX_at; Start 231; Stop 255
ttcacaccagagagaaatgacccag

SEQ ID NO: 150598 - DNA, 25 bp, Artificial
  probe
  misc_feature (1)..(25): SEQ ID NO: 1687; WAN024DAX_at; Start 12; Stop 36
agtctttgagagagccgaagatggc

SEQ ID NO: 150599 - DNA, 25 bp, Artificial
  probe
  misc_feature (1)..(25): SEQ ID NO: 1687; WAN024DAX_at; Start 275; Stop 299
tcttaggtatggcaaacttatcgga

SEQ ID NO: 150600 - DNA, 25 bp, Artificial
  probe
  misc_feature (1)..(25): SEQ ID NO: 1687; WAN024DAX_at; Start 54; Stop 78
aattactggacacgccgagagtggc

SEQ ID NO: 150601 - DNA, 25 bp, Artificial
  probe
  misc_feature (1)..(25): SEQ ID NO: 1687; WAN024DAX_at; Start 48; Stop 72
tgcggaaattactggacacgccgag

SEQ ID NO: 150602 - DNA, 25 bp, Artificial
  probe
  misc_feature (1)..(25): SEQ ID NO: 1687; WAN024DAX_at; Start 145; Stop 169
gagaaatttgcaggctatgaaccaa

SEQ ID NO: 150603 - DNA, 25 bp, Artificial
  probe
  misc_feature (1)..(25): SEQ ID NO: 1687; WAN024DAX_at; Start 69; Stop 93
cgagagtggcgaatacggcttagat

SEQ ID NO: 150604 - DNA, 25 bp, Artificial
  probe
  misc_feature (1)..(25): SEQ ID NO: 1687; WAN024DAX_at; Start 78; Stop 102
cgaatacggcttagatgtcgtgtgt

SEQ ID NO: 150605 - DNA, 25 bp, Artificial
  probe
  misc_feature (1)..(25): SEQ ID NO: 1687; WAN024DAX_at; Start 2; Stop 26
tgatacaggcagtctttgagagagc

SEQ ID NO: 150606 - DNA, 25 bp, Artificial
  probe
  misc_feature (1)..(25): SEQ ID NO: 1687; WAN024DAX_at; Start 151; Stop 175
tttgcaggctatgaaccaatcctag

SEQ ID NO: 150607 - DNA, 25 bp, Artificial
  probe
  misc_feature (1)..(25): SEQ ID NO: 1687; WAN024DAX_at; Start 326; Stop 350
gagttatcacagaaaactaactaat

SEQ ID NO: 150608 - DNA, 25 bp, Artificial
  probe
  misc_feature (1)..(25): SEQ ID NO: 1687; WAN024DAX_at; Start 36; Stop 60
cgagctgaggagtgcggaaattact

SEQ ID NO: 150609 - DNA, 25 bp, Artificial
  probe
  misc_feature (1)..(25): SEQ ID NO: 1687; WAN024DAX_at; Start 310; Stop 334
gagttcgtccaaaccagagttatca

SEQ ID NO: 150610 - DNA, 25 bp, Artificial
  probe
  misc_feature (1)..(25): SEQ ID NO: 1687; WAN024DAX_at; Start 7; Stop 31
caggcagtctttgagagagccgaag

SEQ ID NO: 150611 - DNA, 25 bp, Artificial
  probe
  misc_feature (1)..(25): SEQ ID NO: 1687; WAN024DAX_at; Start 104; Stop 128
catcggtttctacgcttgccattaa

SEQ ID NO: 150612 - DNA, 25 bp, Artificial
  probe
  misc_feature (1)..(25): SEQ ID NO: 1687; WAN024DAX_at; Start 280; Stop 304
ggtatggcaaacttatcggagaact

SEQ ID NO: 150613 - DNA, 25 bp, Artificial
  probe
  misc_feature (1)..(25): SEQ ID NO: 1687; WAN024DAX_at; Start 60; Stop 84
tggacacgccgagagtggcgaatac

SEQ ID NO: 150614 - DNA, 25 bp, Artificial
  probe
  misc_feature (1)..(25): SEQ ID NO: 1687; WAN024DAX_at; Start 235; Stop 259
caccagagagaaatgacccagttat

SEQ ID NO: 150615 - DNA, 25 bp, Artificial
  probe
  misc_feature (1)..(25): SEQ ID NO: 1687; WAN024DAX_at; Start 306; Stop 330
ttctgagttcgtccaaaccagagtt

SEQ ID NO: 150616 - DNA, 25 bp, Artificial
  probe
  misc_feature (1)..(25): SEQ ID NO: 1687; WAN024DAX_at; Start 112; Stop 136
tctacgcttgccattaactttatca

SEQ ID NO: 150617 - DNA, 25 bp, Artificial
  probe
  misc_feature (1)..(25): SEQ ID NO: 1687; WAN024DAX_at; Start 244; Stop 268
gaaatgacccagttattctttgaat

SEQ ID NO: 150618 - DNA, 25 bp, Artificial
  probe
  misc_feature (1)..(25): SEQ ID NO: 1687; WAN024DAX_at; Start 194; Stop 218
gtggctatctgatggttgaaatacc

SEQ ID NO: 150619 - DNA, 25 bp, Artificial
  probe
  misc_feature (1)..(25): SEQ ID NO: 1687; WAN024DAX_at; Start 206; Stop 230
tggttgaaataccaaaagatcttcc

SEQ ID NO: 150620 - DNA, 25 bp, Artificial
  probe
  misc_feature (1)..(25): SEQ ID NO: 1687; WAN024DAX_at; Start 86; Stop 110
gcttagatgtcgtgtgtgcatcggt

SEQ ID NO: 150621 - DNA, 25 bp, Artificial
  probe
  misc_feature (1)..(25): SEQ ID NO: 1687; WAN024DAX_at; Start 160; Stop 184
tatgaaccaatcctagaattaaacg

SEQ ID NO: 150622 - DNA, 25 bp, Artificial
  probe
  misc_feature (1)..(25): SEQ ID NO: 1687; WAN024DAX_at; Start 179; Stop 203
taaacgaagatgaaggtggctatct

SEQ ID NO: 150623 - DNA, 25 bp, Artificial
  probe
  misc_feature (1)..(25): SEQ ID NO: 1687; WAN024DAX_at; Start 95; Stop 119
tcgtgtgtgcatcggtttctacgct

SEQ ID NO: 150624 - DNA, 25 bp, Artificial
  probe
  misc_feature (1)..(25): SEQ ID NO: 1687; WAN024DAX_at; Start 318; Stop 342
ccaaaccagagttatcacagaaaac

SEQ ID NO: 150625 - DNA, 25 bp, Artificial
  probe
  misc_feature (1)..(25): SEQ ID NO: 1687; WAN024DAX_at; Start 225; Stop 249
tcttccttcacaccagagagaaatg

SEQ ID NO: 150626 - DNA, 25 bp, Artificial
  probe
  misc_feature (1)..(25): SEQ ID NO: 5709; WAN024DAY_at; Start 438; Stop 462
ttctggttacagatatgttggttac

SEQ ID NO: 150627 - DNA, 25 bp, Artificial
  probe
  misc_feature (1)..(25): SEQ ID NO: 5709; WAN024DAY_at; Start 392; Stop 416
tgaatgctaacatccatgagtctgg

SEQ ID NO: 150628 - DNA, 25 bp, Artificial
  probe
  misc_feature (1)..(25): SEQ ID NO: 5709; WAN024DAY_at; Start 161; Stop 185
tcaaacaaggtagacctgatgaatc

SEQ ID NO: 150629 - DNA, 25 bp, Artificial
  probe
  misc_feature (1)..(25): SEQ ID NO: 5709; WAN024DAY_at; Start 460; Stop 484
tacttggagcttgatgataaaactg

SEQ ID NO: 150630 - DNA, 25 bp, Artificial
  probe
  misc_feature (1)..(25): SEQ ID NO: 5709; WAN024DAY_at; Start 529; Stop 553
cccaaagttgtaacagagaaaggcg

SEQ ID NO: 150631 - DNA, 25 bp, Artificial
  probe
  misc_feature (1)..(25): SEQ ID NO: 5709; WAN024DAY_at; Start 137; Stop 161
tgacacaaactgaacgtgatcaact

SEQ ID NO: 150632 - DNA, 25 bp, Artificial
  probe
  misc_feature (1)..(25): SEQ ID NO: 5709; WAN024DAY_at; Start 107; Stop 131
cgacttatcattacttagattatag

SEQ ID NO: 150633 - DNA, 25 bp, Artificial
  probe
  misc_feature (1)..(25): SEQ ID NO: 5709; WAN024DAY_at; Start 371; Stop 395
caactgcttcagcacttaatttgaa

SEQ ID NO: 150634 - DNA, 25 bp, Artificial
  probe
  misc_feature (1)..(25): SEQ ID NO: 5709; WAN024DAY_at; Start 553; Stop 577
gaaccggaagttcatgagaagcctg

SEQ ID NO: 150635 - DNA, 25 bp, Artificial
  probe
  misc_feature (1)..(25): SEQ ID NO: 5709; WAN024DAY_at; Start 536; Stop 560
ttgtaacagagaaaggcgaaccgga

SEQ ID NO: 150636 - DNA, 25 bp, Artificial
  probe
  misc_feature (1)..(25): SEQ ID NO: 5709; WAN024DAY_at; Start 399; Stop 423
taacatccatgagtctggacgtgat

SEQ ID NO: 150637 - DNA, 25 bp, Artificial
  probe
  misc_feature (1)..(25): SEQ ID NO: 5709; WAN024DAY_at; Start 224; Stop 248
taccaaacacaggaagttctcaatc

SEQ ID NO: 150638 - DNA, 25 bp, Artificial
  probe
  misc_feature (1)..(25): SEQ ID NO: 5709; WAN024DAY_at; Start 483; Stop 507
tgtttcgtcggtttctccagcatca

SEQ ID NO: 150639 - DNA, 25 bp, Artificial
  probe
  misc_feature (1)..(25): SEQ ID NO: 5709; WAN024DAY_at; Start 445; Stop 469
tacagatatgttggttacttggagc

SEQ ID NO: 150640 - DNA, 25 bp, Artificial
  probe
  misc_feature (1)..(25): SEQ ID NO: 5709; WAN024DAY_at; Start 516; Stop 540
gccagttgagcaacccaaagttgta

SEQ ID NO: 150641 - DNA, 25 bp, Artificial
  probe
  misc_feature (1)..(25): SEQ ID NO: 5709; WAN024DAY_at; Start 557; Stop 581
cggaagttcatgagaagcctgacta

SEQ ID NO: 150642 - DNA, 25 bp, Artificial
  probe
  misc_feature (1)..(25): SEQ ID NO: 5709; WAN024DAY_at; Start 271; Stop 295
ttagctatcgggagtcttattgtga

SEQ ID NO: 150643 - DNA, 25 bp, Artificial
  probe
  misc_feature (1)..(25): SEQ ID NO: 5709; WAN024DAY_at; Start 507; Stop 531
aactgtttcgccagttgagcaaccc

SEQ ID NO: 150644 - DNA, 25 bp, Artificial
  probe
  misc_feature (1)..(25): SEQ ID NO: 5709; WAN024DAY_at; Start 576; Stop 600
tgactatacgcaaccaataggtgca

SEQ ID NO: 150645 - DNA, 25 bp, Artificial
  probe
  misc_feature (1)..(25): SEQ ID NO: 5709; WAN024DAY_at; Start 492; Stop 516
ggtttctccagcatcaactgtttcg

SEQ ID NO: 150646 - DNA, 25 bp, Artificial
  probe
  misc_feature (1)..(25): SEQ ID NO: 5709; WAN024DAY_at; Start 382; Stop 406
gcacttaatttgaatgctaacatcc

SEQ ID NO: 150647 - DNA, 25 bp, Artificial
  probe
  misc_feature (1)..(25): SEQ ID NO: 5709; WAN024DAY_at; Start 359; Stop 383
tagttacactatcaactgcttcagc

SEQ ID NO: 150648 - DNA, 25 bp, Artificial
  probe
  misc_feature (1)..(25): SEQ ID NO: 5709; WAN024DAY_at; Start 423; Stop 447
tggtgtgttgcaaatttctggttac

SEQ ID NO: 150649 - DNA, 25 bp, Artificial
  probe
  misc_feature (1)..(25): SEQ ID NO: 5709; WAN024DAY_at; Start 412; Stop 436
tctggacgtgatggtgtgttgcaaa

SEQ ID NO: 150650 - DNA, 25 bp, Artificial
  probe
  misc_feature (1)..(25): SEQ ID NO: 5709; WAN024DAY_at; Start 262; Stop 286
ttgggtttgttagctatcgggagtc

SEQ ID NO: 150651 - DNA, 25 bp, Artificial
  probe
  misc_feature (1)..(25): SEQ ID NO: 5709; WAN024DAY_at; Start 235; Stop 259
ggaagttctcaatctattatgactg

SEQ ID NO: 150652 - DNA, 25 bp, Artificial
  probe
  misc_feature (1)..(25): SEQ ID NO: 5709; WAN024DAY_at; Start 468; Stop 492
gcttgatgataaaactgtttcgtcg

SEQ ID NO: 150653 - DNA, 25 bp, Artificial
  probe
  misc_feature (1)..(25): SEQ ID NO: 5709; WAN024DAY_at; Start 347; Stop 371
gggcgacaggtttagttacactatc

SEQ ID NO: 150654 - DNA, 25 bp, Artificial
  probe
  misc_feature (1)..(25): SEQ ID NO: 5709; WAN024DAY_at; Start 279; Stop 303
cgggagtcttattgtgattatcaca

SEQ ID NO: 150655 - DNA, 25 bp, Artificial
  probe
  misc_feature (1)..(25): SEQ ID NO: 5709; WAN024DAY_at; Start 324; Stop 348
aatagctacatttttgattgtaggg

SEQ ID NO: 150656 - DNA, 25 bp, Artificial
  probe
  misc_feature (1)..(25): SEQ ID NO: 5709; WAN024DAY_at; Start 147; Stop 171
tgaacgtgatcaactcaaacaaggt

SEQ ID NO: 150657 - DNA, 25 bp, Artificial
  probe
  misc_feature (1)..(25): SEQ ID NO: 5709; WAN024DAY_at; Start 567; Stop 591
tgagaagcctgactatacgcaacca

SEQ ID NO: 150658 - DNA, 25 bp, Artificial
  probe
  misc_feature (1)..(25): SEQ ID NO: 5709; WAN024DAY_at; Start 542; Stop 566
cagagaaaggcgaaccggaagttca

SEQ ID NO: 150659 - DNA, 25 bp, Artificial
  probe
  misc_feature (1)..(25): SEQ ID NO: 5709; WAN024DAY_at; Start 154; Stop 178
gatcaactcaaacaaggtagacctg

SEQ ID NO: 150660 - DNA, 25 bp, Artificial
  probe
  misc_feature (1)..(25): SEQ ID NO: 2555; WAN024DAZ_at; Start 578; Stop 602
cagcctatttgacgattttctatca

SEQ ID NO: 150661 - DNA, 25 bp, Artificial
  probe
  misc_feature (1)..(25): SEQ ID NO: 2555; WAN024DAZ_at; Start 560; Stop 584
tccttggcgttgtcttttcagccta

SEQ ID NO: 150662 - DNA, 25 bp, Artificial
  probe
  misc_feature (1)..(25): SEQ ID NO: 2555; WAN024DAZ_at; Start 130; Stop 154
gtagctggacaaactggaaatgttg

SEQ ID NO: 150663 - DNA, 25 bp, Artificial
  probe
  misc_feature (1)..(25): SEQ ID NO: 2555; WAN024DAZ_at; Start 543; Stop 567
cctgcttagtagttttgtccttggc

SEQ ID NO: 150664 - DNA, 25 bp, Artificial
  probe
  misc_feature (1)..(25): SEQ ID NO: 2555; WAN024DAZ_at; Start 651; Stop 675
cagcatgctttttgcctcttggcag

SEQ ID NO: 150665 - DNA, 25 bp, Artificial
  probe
  misc_feature (1)..(25): SEQ ID NO: 2555; WAN024DAZ_at; Start 468; Stop 492
gaccatgctggcttttggagattat

SEQ ID NO: 150666 - DNA, 25 bp, Artificial
  probe
  misc_feature (1)..(25): SEQ ID NO: 2555; WAN024DAZ_at; Start 38; Stop 62
tatcacgtcagtctaaaaggttagc

SEQ ID NO: 150667 - DNA, 25 bp, Artificial
  probe
  misc_feature (1)..(25): SEQ ID NO: 2555; WAN024DAZ_at; Start 213; Stop 237
caccttgctagcgtttatgatggga

SEQ ID NO: 150668 - DNA, 25 bp, Artificial
  probe
  misc_feature (1)..(25): SEQ ID NO: 2555; WAN024DAZ_at; Start 354; Stop 378
taatatctatctagtgccgcccttg

SEQ ID NO: 150669 - DNA, 25 bp, Artificial
  probe
  misc_feature (1)..(25): SEQ ID NO: 2555; WAN024DAZ_at; Start 616; Stop 640
cttggtgttcctattatgatgagcg

SEQ ID NO: 150670 - DNA, 25 bp, Artificial
  probe
  misc_feature (1)..(25): SEQ ID NO: 2555; WAN024DAZ_at; Start 336; Stop 360
tgtgccgcaaactgtggataatatc

SEQ ID NO: 150671 - DNA, 25 bp, Artificial
  probe
  misc_feature (1)..(25): SEQ ID NO: 2555; WAN024DAZ_at; Start 633; Stop 657
gatgagcgttttttacctcagcatg

SEQ ID NO: 150672 - DNA, 25 bp, Artificial
  probe
  misc_feature (1)..(25): SEQ ID NO: 2555; WAN024DAZ_at; Start 100; Stop 124
tacacttttattgttcgcgggaata

SEQ ID NO: 150673 - DNA, 25 bp, Artificial
  probe
  misc_feature (1)..(25): SEQ ID NO: 2555; WAN024DAZ_at; Start 433; Stop 457
tataataacgcttttatgacaggga

SEQ ID NO: 150674 - DNA, 25 bp, Artificial
  probe
  misc_feature (1)..(25): SEQ ID NO: 2555; WAN024DAZ_at; Start 663; Stop 687
tgcctcttggcagaaaaaagtaaaa

SEQ ID NO: 150675 - DNA, 25 bp, Artificial
  probe
  misc_feature (1)..(25): SEQ ID NO: 2555; WAN024DAZ_at; Start 456; Stop 480
gaatatcaaacggaccatgctggct

SEQ ID NO: 150676 - DNA, 25 bp, Artificial
  probe
  misc_feature (1)..(25): SEQ ID NO: 2555; WAN024DAZ_at; Start 81; Stop 105
tgctggatatgtggatgcttacact

SEQ ID NO: 150677 - DNA, 25 bp, Artificial
  probe
  misc_feature (1)..(25): SEQ ID NO: 2555; WAN024DAZ_at; Start 181; Stop 205
aataatgtttcggatgttagggaca

SEQ ID NO: 150678 - DNA, 25 bp, Artificial
  probe
  misc_feature (1)..(25): SEQ ID NO: 2555; WAN024DAZ_at; Start 383; Stop 407
tctgtatgggactggtgacaactgc

SEQ ID NO: 150679 - DNA, 25 bp, Artificial
  probe
  misc_feature (1)..(25): SEQ ID NO: 2555; WAN024DAZ_at; Start 320; Stop 344
caatcattattgcttttgtgccgca

SEQ ID NO: 150680 - DNA, 25 bp, Artificial
  probe
  misc_feature (1)..(25): SEQ ID NO: 2555; WAN024DAZ_at; Start 401; Stop 425
caactgcttttggagaagtgtcggg

SEQ ID NO: 150681 - DNA, 25 bp, Artificial
  probe
  misc_feature (1)..(25): SEQ ID NO: 2555; WAN024DAZ_at; Start 369; Stop 393
gccgcccttggccttctgtatggga

SEQ ID NO: 150682 - DNA, 25 bp, Artificial
  probe
  misc_feature (1)..(25): SEQ ID NO: 2555; WAN024DAZ_at; Start 193; Stop 217
gatgttagggacaaggttctcacct

SEQ ID NO: 150683 - DNA, 25 bp, Artificial
  probe
  misc_feature (1)..(25): SEQ ID NO: 2555; WAN024DAZ_at; Start 502; Stop 526
aagcacactccttttttgcgtgaag

SEQ ID NO: 150684 - DNA, 25 bp, Artificial
  probe
  misc_feature (1)..(25): SEQ ID NO: 2555; WAN024DAZ_at; Start 483; Stop 507
tggagattatttccgaaccaagcac

SEQ ID NO: 150685 - DNA, 25 bp, Artificial
  probe
  misc_feature (1)..(25): SEQ ID NO: 2555; WAN024DAZ_at; Start 116; Stop 140
gcgggaatacccttgtagctggaca

SEQ ID NO: 150686 - DNA, 25 bp, Artificial
  probe
  misc_feature (1)..(25): SEQ ID NO: 2555; WAN024DAZ_at; Start 288; Stop 312
tattctgtccttgattcccttggca

SEQ ID NO: 150687 - DNA, 25 bp, Artificial
  probe
  misc_feature (1)..(25): SEQ ID NO: 2555; WAN024DAZ_at; Start 228; Stop 252
tatgatgggagtctttttattaacg

SEQ ID NO: 150688 - DNA, 25 bp, Artificial
  probe
  misc_feature (1)..(25): SEQ ID NO: 2555; WAN024DAZ_at; Start 598; Stop 622
tatcatgaaaagaccattcttggtg

SEQ ID NO: 150689 - DNA, 25 bp, Artificial
  probe
  misc_feature (1)..(25): SEQ ID NO: 2555; WAN024DAZ_at; Start 272; Stop 296
gaattgtgaaaaaacctattctgtc

SEQ ID NO: 150690 - DNA, 25 bp, Artificial
  probe
  misc_feature (1)..(25): SEQ ID NO: 2555; WAN024DAZ_at; Start 447; Stop 471
tatgacagggaatatcaaacggacc

SEQ ID NO: 150691 - DNA, 25 bp, Artificial
  probe
  misc_feature (1)..(25): SEQ ID NO: 2555; WAN024DAZ_at; Start 413; Stop 437
gagaagtgtcgggtattgcctataa

SEQ ID NO: 150692 - DNA, 25 bp, Artificial
  probe
  misc_feature (1)..(25): SEQ ID NO: 2555; WAN024DAZ_at; Start 527; Stop 551
gattcatatttgttagcctgcttag

SEQ ID NO: 150693 - DNA, 25 bp, Artificial
  probe
  misc_feature (1)..(25): SEQ ID NO: 2555; WAN024DAZ_at; Start 146; Stop 170
gaaatgttgtctttctttcagtaga

SEQ ID NO: 150694 - DNA, 25 bp, Artificial
  probe
  misc_feature (1)..(25): SEQ ID NO: 4104; WAN024DB2_at; Start 62; Stop 86
caaaggctaagaaaggtgcaaaaat

SEQ ID NO: 150695 - DNA, 25 bp, Artificial
  probe
  misc_feature (1)..(25): SEQ ID NO: 4104; WAN024DB2_at; Start 44; Stop 68
aacaatgcttgtcgataacaaaggc

SEQ ID NO: 150696 - DNA, 25 bp, Artificial
  probe
  misc_feature (1)..(25): SEQ ID NO: 4104; WAN024DB2_at; Start 39; Stop 63
gctagaacaatgcttgtcgataaca

SEQ ID NO: 150697 - DNA, 25 bp, Artificial
  probe
  misc_feature (1)..(25): SEQ ID NO: 4104; WAN024DB2_at; Start 40; Stop 64
ctagaacaatgcttgtcgataacaa

SEQ ID NO: 150698 - DNA, 25 bp, Artificial
  probe
  misc_feature (1)..(25): SEQ ID NO: 4104; WAN024DB2_at; Start 33; Stop 57
caaggagctagaacaatgcttgtcg

SEQ ID NO: 150699 - DNA, 25 bp, Artificial
  probe
  misc_feature (1)..(25): SEQ ID NO: 4104; WAN024DB2_at; Start 47; Stop 71
aatgcttgtcgataacaaaggctaa

SEQ ID NO: 150700 - DNA, 25 bp, Artificial
  probe
  misc_feature (1)..(25): SEQ ID NO: 4104; WAN024DB2_at; Start 35; Stop 59
aggagctagaacaatgcttgtcgat

SEQ ID NO: 150701 - DNA, 25 bp, Artificial
  probe
  misc_feature (1)..(25): SEQ ID NO: 4104; WAN024DB2_at; Start 51; Stop 75
cttgtcgataacaaaggctaagaaa

SEQ ID NO: 150702 - DNA, 25 bp, Artificial
  probe
  misc_feature (1)..(25): SEQ ID NO: 4104; WAN024DB2_at; Start 29; Stop 53
aaaacaaggagctagaacaatgctt

SEQ ID NO: 150703 - DNA, 25 bp, Artificial
  probe
  misc_feature (1)..(25): SEQ ID NO: 4104; WAN024DB2_at; Start 68; Stop 92
ctaagaaaggtgcaaaaatgactct

SEQ ID NO: 150704 - DNA, 25 bp, Artificial
  probe
  misc_feature (1)..(25): SEQ ID NO: 4104; WAN024DB2_at; Start 66; Stop 90
ggctaagaaaggtgcaaaaatgact

SEQ ID NO: 150705 - DNA, 25 bp, Artificial
  probe
  misc_feature (1)..(25): SEQ ID NO: 4104; WAN024DB2_at; Start 50; Stop 74
gcttgtcgataacaaaggctaagaa

SEQ ID NO: 150706 - DNA, 25 bp, Artificial
  probe
  misc_feature (1)..(25): SEQ ID NO: 4104; WAN024DB2_at; Start 31; Stop 55
aacaaggagctagaacaatgcttgt

SEQ ID NO: 150707 - DNA, 25 bp, Artificial
  probe
  misc_feature (1)..(25): SEQ ID NO: 4104; WAN024DB2_at; Start 41; Stop 65
tagaacaatgcttgtcgataacaaa

SEQ ID NO: 150708 - DNA, 25 bp, Artificial
  probe
  misc_feature (1)..(25): SEQ ID NO: 4104; WAN024DB2_at; Start 53; Stop 77
tgtcgataacaaaggctaagaaagg

SEQ ID NO: 150709 - DNA, 25 bp, Artificial
  probe
  misc_feature (1)..(25): SEQ ID NO: 4104; WAN024DB2_at; Start 59; Stop 83
taacaaaggctaagaaaggtgcaaa

SEQ ID NO: 150710 - DNA, 25 bp, Artificial
  probe
  misc_feature (1)..(25): SEQ ID NO: 4104; WAN024DB2_at; Start 69; Stop 93
taagaaaggtgcaaaaatgactcta

SEQ ID NO: 150711 - DNA, 25 bp, Artificial
  probe
  misc_feature (1)..(25): SEQ ID NO: 4104; WAN024DB2_at; Start 64; Stop 88
aaggctaagaaaggtgcaaaaatga

SEQ ID NO: 150712 - DNA, 25 bp, Artificial
  probe
  misc_feature (1)..(25): SEQ ID NO: 4104; WAN024DB2_at; Start 49; Stop 73
tgcttgtcgataacaaaggctaaga

SEQ ID NO: 150713 - DNA, 25 bp, Artificial
  probe
  misc_feature (1)..(25): SEQ ID NO: 4104; WAN024DB2_at; Start 57; Stop 81
gataacaaaggctaagaaaggtgca

SEQ ID NO: 150714 - DNA, 25 bp, Artificial
  probe
  misc_feature (1)..(25): SEQ ID NO: 4104; WAN024DB2_at; Start 27; Stop 51
taaaaacaaggagctagaacaatgc

SEQ ID NO: 150715 - DNA, 25 bp, Artificial
  probe
  misc_feature (1)..(25): SEQ ID NO: 4104; WAN024DB2_at; Start 37; Stop 61
gagctagaacaatgcttgtcgataa

SEQ ID NO: 150716 - DNA, 25 bp, Artificial
  probe
  misc_feature (1)..(25): SEQ ID NO: 4104; WAN024DB2_at; Start 45; Stop 69
acaatgcttgtcgataacaaaggct

SEQ ID NO: 150717 - DNA, 25 bp, Artificial
  probe
  misc_feature (1)..(25): SEQ ID NO: 4104; WAN024DB2_at; Start 43; Stop 67
gaacaatgcttgtcgataacaaagg

SEQ ID NO: 150718 - DNA, 25 bp, Artificial
  probe
  misc_feature (1)..(25): SEQ ID NO: 4104; WAN024DB2_at; Start 28; Stop 52
aaaaacaaggagctagaacaatgct

SEQ ID NO: 150719 - DNA, 25 bp, Artificial
  probe
  misc_feature (1)..(25): SEQ ID NO: 4104; WAN024DB2_at; Start 36; Stop 60
ggagctagaacaatgcttgtcgata

SEQ ID NO: 150720 - DNA, 25 bp, Artificial
  probe
  misc_feature (1)..(25): SEQ ID NO: 4104; WAN024DB2_at; Start 56; Stop 80
cgataacaaaggctaagaaaggtgc

SEQ ID NO: 150721 - DNA, 25 bp, Artificial
  probe
  misc_feature (1)..(25): SEQ ID NO: 4104; WAN024DB2_at; Start 34; Stop 58
aaggagctagaacaatgcttgtcga

SEQ ID NO: 150722 - DNA, 25 bp, Artificial
  probe
  misc_feature (1)..(25): SEQ ID NO: 4104; WAN024DB2_at; Start 23; Stop 47
tttctaaaaacaaggagctagaaca

SEQ ID NO: 150723 - DNA, 25 bp, Artificial
  probe
  misc_feature (1)..(25): SEQ ID NO: 4104; WAN024DB2_at; Start 46; Stop 70
caatgcttgtcgataacaaaggcta

SEQ ID NO: 150724 - DNA, 25 bp, Artificial
  probe
  misc_feature (1)..(25): SEQ ID NO: 4104; WAN024DB2_at; Start 30; Stop 54
aaacaaggagctagaacaatgcttg

SEQ ID NO: 150725 - DNA, 25 bp, Artificial
  probe
  misc_feature (1)..(25): SEQ ID NO: 4104; WAN024DB2_at; Start 67; Stop 91
gctaagaaaggtgcaaaaatgactc

SEQ ID NO: 150726 - DNA, 25 bp, Artificial
  probe
  misc_feature (1)..(25): SEQ ID NO: 4104; WAN024DB2_at; Start 25; Stop 49
tctaaaaacaaggagctagaacaat

SEQ ID NO: 150727 - DNA, 25 bp, Artificial
  probe
  misc_feature (1)..(25): SEQ ID NO: 4104; WAN024DB2_at; Start 58; Stop 82
ataacaaaggctaagaaaggtgcaa

SEQ ID NO: 150728 - DNA, 25 bp, Artificial
  probe
  misc_feature (1)..(25): SEQ ID NO: 1738; WAN024DB3_at; Start 102; Stop 126
tgctcaagatcttgtccaagcgacc

SEQ ID NO: 150729 - DNA, 25 bp, Artificial
  probe
  misc_feature (1)..(25): SEQ ID NO: 1738; WAN024DB3_at; Start 76; Stop 100
gctgctatgcaatttgttggcaaat

SEQ ID NO: 150730 - DNA, 25 bp, Artificial
  probe
  misc_feature (1)..(25): SEQ ID NO: 1738; WAN024DB3_at; Start 129; Stop 153
aactggcgataagaaagttgtcagc

SEQ ID NO: 150731 - DNA, 25 bp, Artificial
  probe
  misc_feature (1)..(25): SEQ ID NO: 1738; WAN024DB3_at; Start 109; Stop 133
gatcttgtccaagcgaccttaactg

SEQ ID NO: 150732 - DNA, 25 bp, Artificial
  probe
  misc_feature (1)..(25): SEQ ID NO: 1738; WAN024DB3_at; Start 258; Stop 282
caagaaaaaactgggtgctttcgct

SEQ ID NO: 150733 - DNA, 25 bp, Artificial
  probe
  misc_feature (1)..(25): SEQ ID NO: 1738; WAN024DB3_at; Start 143; Stop 167
aagttgtcagcattgatttcaatcc

SEQ ID NO: 150734 - DNA, 25 bp, Artificial
  probe
  misc_feature (1)..(25): SEQ ID NO: 1738; WAN024DB3_at; Start 193; Stop 217
gagactctttctgatatgaccgttc

SEQ ID NO: 150735 - DNA, 25 bp, Artificial
  probe
  misc_feature (1)..(25): SEQ ID NO: 1738; WAN024DB3_at; Start 91; Stop 115
gttggcaaatctgctcaagatcttg

SEQ ID NO: 150736 - DNA, 25 bp, Artificial
  probe
  misc_feature (1)..(25): SEQ ID NO: 1738; WAN024DB3_at; Start 239; Stop 263
aacaaatcgatgaaactaccaagaa

SEQ ID NO: 150737 - DNA, 25 bp, Artificial
  probe
  misc_feature (1)..(25): SEQ ID NO: 1738; WAN024DB3_at; Start 167; Stop 191
cagctgtcgttgacccagaggacct

SEQ ID NO: 150738 - DNA, 25 bp, Artificial
  probe
  misc_feature (1)..(25): SEQ ID NO: 1738; WAN024DB3_at; Start 246; Stop 270
cgatgaaactaccaagaaaaaactg

SEQ ID NO: 150739 - DNA, 25 bp, Artificial
  probe
  misc_feature (1)..(25): SEQ ID NO: 1738; WAN024DB3_at; Start 198; Stop 222
tctttctgatatgaccgttcaagcc

SEQ ID NO: 150740 - DNA, 25 bp, Artificial
  probe
  misc_feature (1)..(25): SEQ ID NO: 1738; WAN024DB3_at; Start 175; Stop 199
gttgacccagaggaccttgagactc

SEQ ID NO: 150741 - DNA, 25 bp, Artificial
  probe
  misc_feature (1)..(25): SEQ ID NO: 1738; WAN024DB3_at; Start 134; Stop 158
gcgataagaaagttgtcagcattga

SEQ ID NO: 150742 - DNA, 25 bp, Artificial
  probe
  misc_feature (1)..(25): SEQ ID NO: 1738; WAN024DB3_at; Start 49; Stop 73
caaatggaacaaagccaagctgaac

SEQ ID NO: 150743 - DNA, 25 bp, Artificial
  probe
  misc_feature (1)..(25): SEQ ID NO: 1738; WAN024DB3_at; Start 184; Stop 208
gaggaccttgagactctttctgata

SEQ ID NO: 150744 - DNA, 25 bp, Artificial
  probe
  misc_feature (1)..(25): SEQ ID NO: 1738; WAN024DB3_at; Start 11; Stop 35
tgcaaaacatgatgcgtcaagcaca

SEQ ID NO: 150745 - DNA, 25 bp, Artificial
  probe
  misc_feature (1)..(25): SEQ ID NO: 1738; WAN024DB3_at; Start 2; Stop 26
tgatgaacatgcaaaacatgatgcg

SEQ ID NO: 150746 - DNA, 25 bp, Artificial
  probe
  misc_feature (1)..(25): SEQ ID NO: 1738; WAN024DB3_at; Start 228; Stop 252
ctctgctcttgaacaaatcgatgaa

SEQ ID NO: 150747 - DNA, 25 bp, Artificial
  probe
  misc_feature (1)..(25): SEQ ID NO: 1738; WAN024DB3_at; Start 24; Stop 48
gcgtcaagcacaaaaacttcaaaaa

SEQ ID NO: 150748 - DNA, 25 bp, Artificial
  probe
  misc_feature (1)..(25): SEQ ID NO: 1738; WAN024DB3_at; Start 162; Stop 186
caatccagctgtcgttgacccagag

SEQ ID NO: 150749 - DNA, 25 bp, Artificial
  probe
  misc_feature (1)..(25): SEQ ID NO: 1738; WAN024DB3_at; Start 171; Stop 195
tgtcgttgacccagaggaccttgag

SEQ ID NO: 150750 - DNA, 25 bp, Artificial
  probe
  misc_feature (1)..(25): SEQ ID NO: 1738; WAN024DB3_at; Start 64; Stop 88
caagctgaacttgctgctatgcaat

SEQ ID NO: 150751 - DNA, 25 bp, Artificial
  probe
  misc_feature (1)..(25): SEQ ID NO: 1738; WAN024DB3_at; Start 118; Stop 142
caagcgaccttaactggcgataaga

SEQ ID NO: 150752 - DNA, 25 bp, Artificial
  probe
  misc_feature (1)..(25): SEQ ID NO: 1738; WAN024DB3_at; Start 205; Stop 229
gatatgaccgttcaagccatcaact

SEQ ID NO: 150753 - DNA, 25 bp, Artificial
  probe
  misc_feature (1)..(25): SEQ ID NO: 1738; WAN024DB3_at; Start 260; Stop 284
agaaaaaactgggtgctttcgctgg

SEQ ID NO: 150754 - DNA, 25 bp, Artificial
  probe
  misc_feature (1)..(25): SEQ ID NO: 1738; WAN024DB3_at; Start 152; Stop 176
gcattgatttcaatccagctgtcgt

SEQ ID NO: 150755 - DNA, 25 bp, Artificial
  probe
  misc_feature (1)..(25): SEQ ID NO: 1738; WAN024DB3_at; Start 220; Stop 244
gccatcaactctgctcttgaacaaa

SEQ ID NO: 150756 - DNA, 25 bp, Artificial
  probe
  misc_feature (1)..(25): SEQ ID NO: 1738; WAN024DB3_at; Start 210; Stop 234
gaccgttcaagccatcaactctgct

SEQ ID NO: 150757 - DNA, 25 bp, Artificial
  probe
  misc_feature (1)..(25): SEQ ID NO: 1738; WAN024DB3_at; Start 41; Stop 65
ttcaaaaacaaatggaacaaagcca

SEQ ID NO: 150758 - DNA, 25 bp, Artificial
  probe
  misc_feature (1)..(25): SEQ ID NO: 1738; WAN024DB3_at; Start 58; Stop 82
caaagccaagctgaacttgctgcta

SEQ ID NO: 150759 - DNA, 25 bp, Artificial
  probe
  misc_feature (1)..(25): SEQ ID NO: 1738; WAN024DB3_at; Start 85; Stop 109
caatttgttggcaaatctgctcaag

SEQ ID NO: 150760 - DNA, 25 bp, Artificial
  probe
  misc_feature (1)..(25): SEQ ID NO: 1738; WAN024DB3_at; Start 20; Stop 44
tgatgcgtcaagcacaaaaacttca

SEQ ID NO: 150761 - DNA, 25 bp, Artificial
  probe
  misc_feature (1)..(25): SEQ ID NO: 1738; WAN024DB3_at; Start 114; Stop 138
tgtccaagcgaccttaactggcgat

SEQ ID NO: 150762 - DNA, 25 bp, Artificial
  probe
  misc_feature (1)..(25): SEQ ID NO: 827; WAN024DB4_at; Start 126; Stop 150
tgaactgcgagaaaagaaagtcgct

SEQ ID NO: 150763 - DNA, 25 bp, Artificial
  probe
  misc_feature (1)..(25): SEQ ID NO: 827; WAN024DB4_at; Start 520; Stop 544
aaagctccttcaaaattggttcgat

SEQ ID NO: 150764 - DNA, 25 bp, Artificial
  probe
  misc_feature (1)..(25): SEQ ID NO: 827; WAN024DB4_at; Start 454; Stop 478
gaaaatcatgagcaaggcaaacagg

SEQ ID NO: 150765 - DNA, 25 bp, Artificial
  probe
  misc_feature (1)..(25): SEQ ID NO: 827; WAN024DB4_at; Start 259; Stop 283
tatctgagtaaggaagaacttcctc

SEQ ID NO: 150766 - DNA, 25 bp, Artificial
  probe
  misc_feature (1)..(25): SEQ ID NO: 827; WAN024DB4_at; Start 204; Stop 228
gagtgttggaaacatggaatacaac

SEQ ID NO: 150767 - DNA, 25 bp, Artificial
  probe
  misc_feature (1)..(25): SEQ ID NO: 827; WAN024DB4_at; Start 192; Stop 216
caaagtcccgcagagtgttggaaac

SEQ ID NO: 150768 - DNA, 25 bp, Artificial
  probe
  misc_feature (1)..(25): SEQ ID NO: 827; WAN024DB4_at; Start 180; Stop 204
tgagttgacactcaaagtcccgcag

SEQ ID NO: 150769 - DNA, 25 bp, Artificial
  probe
  misc_feature (1)..(25): SEQ ID NO: 827; WAN024DB4_at; Start 57; Stop 81
tctaaaagaccagttcacaggtgtc

SEQ ID NO: 150770 - DNA, 25 bp, Artificial
  probe
  misc_feature (1)..(25): SEQ ID NO: 827; WAN024DB4_at; Start 346; Stop 370
ggttgtctaacaacgcttcgctatg

SEQ ID NO: 150771 - DNA, 25 bp, Artificial
  probe
  misc_feature (1)..(25): SEQ ID NO: 827; WAN024DB4_at; Start 530; Stop 554
caaaattggttcgatttgtcaaaag

SEQ ID NO: 150772 - DNA, 25 bp, Artificial
  probe
  misc_feature (1)..(25): SEQ ID NO: 827; WAN024DB4_at; Start 156; Stop 180
cattcgaacctttgaagactgggct

SEQ ID NO: 150773 - DNA, 25 bp, Artificial
  probe
  misc_feature (1)..(25): SEQ ID NO: 827; WAN024DB4_at; Start 360; Stop 384
gcttcgctatgaaatgaaaacagct

SEQ ID NO: 150774 - DNA, 25 bp, Artificial
  probe
  misc_feature (1)..(25): SEQ ID NO: 827; WAN024DB4_at; Start 218; Stop 242
tggaatacaaccaaaaattgcaact

SEQ ID NO: 150775 - DNA, 25 bp, Artificial
  probe
  misc_feature (1)..(25): SEQ ID NO: 827; WAN024DB4_at; Start 231; Stop 255
aaaattgcaactaaaagatgctgag

SEQ ID NO: 150776 - DNA, 25 bp, Artificial
  probe
  misc_feature (1)..(25): SEQ ID NO: 827; WAN024DB4_at; Start 320; Stop 344
tccaaagtaagaactggcaggttct

SEQ ID NO: 150777 - DNA, 25 bp, Artificial
  probe
  misc_feature (1)..(25): SEQ ID NO: 827; WAN024DB4_at; Start 289; Stop 313
ctagtactggatgaattggcgaaac

SEQ ID NO: 150778 - DNA, 25 bp, Artificial
  probe
  misc_feature (1)..(25): SEQ ID NO: 827; WAN024DB4_at; Start 298; Stop 322
gatgaattggcgaaacatggtatcc

SEQ ID NO: 150779 - DNA, 25 bp, Artificial
  probe
  misc_feature (1)..(25): SEQ ID NO: 827; WAN024DB4_at; Start 398; Stop 422
cactggatcagagccgatactttga

SEQ ID NO: 150780 - DNA, 25 bp, Artificial
  probe
  misc_feature (1)..(25): SEQ ID NO: 827; WAN024DB4_at; Start 22; Stop 46
ttgaaaacactattgaaaaaagatg

SEQ ID NO: 150781 - DNA, 25 bp, Artificial
  probe
  misc_feature (1)..(25): SEQ ID NO: 827; WAN024DB4_at; Start 64; Stop 88
gaccagttcacaggtgtcactcctg

SEQ ID NO: 150782 - DNA, 25 bp, Artificial
  probe
  misc_feature (1)..(25): SEQ ID NO: 827; WAN024DB4_at; Start 168; Stop 192
tgaagactgggctgagttgacactc

SEQ ID NO: 150783 - DNA, 25 bp, Artificial
  probe
  misc_feature (1)..(25): SEQ ID NO: 827; WAN024DB4_at; Start 141; Stop 165
gaaagtcgctatgcgcattcgaacc

SEQ ID NO: 150784 - DNA, 25 bp, Artificial
  probe
  misc_feature (1)..(25): SEQ ID NO: 827; WAN024DB4_at; Start 274; Stop 298
gaacttcctcaagggctagtactgg

SEQ ID NO: 150785 - DNA, 25 bp, Artificial
  probe
  misc_feature (1)..(25): SEQ ID NO: 827; WAN024DB4_at; Start 335; Stop 359
ggcaggttcttggttgtctaacaac

SEQ ID NO: 150786 - DNA, 25 bp, Artificial
  probe
  misc_feature (1)..(25): SEQ ID NO: 827; WAN024DB4_at; Start 72; Stop 96
cacaggtgtcactcctgttcttcaa

SEQ ID NO: 150787 - DNA, 25 bp, Artificial
  probe
  misc_feature (1)..(25): SEQ ID NO: 827; WAN024DB4_at; Start 94; Stop 118
caaacaaattactacatcgacacgc

SEQ ID NO: 150788 - DNA, 25 bp, Artificial
  probe
  misc_feature (1)..(25): SEQ ID NO: 827; WAN024DB4_at; Start 375; Stop 399
gaaaacagctattggtctcatggca

SEQ ID NO: 150789 - DNA, 25 bp, Artificial
  probe
  misc_feature (1)..(25): SEQ ID NO: 827; WAN024DB4_at; Start 390; Stop 414
tctcatggcactggatcagagccga

SEQ ID NO: 150790 - DNA, 25 bp, Artificial
  probe
  misc_feature (1)..(25): SEQ ID NO: 827; WAN024DB4_at; Start 247; Stop 271
gatgctgagaactatctgagtaagg

SEQ ID NO: 150791 - DNA, 25 bp, Artificial
  probe
  misc_feature (1)..(25): SEQ ID NO: 827; WAN024DB4_at; Start 313; Stop 337
catggtatccaaagtaagaactggc

SEQ ID NO: 150792 - DNA, 25 bp, Artificial
  probe
  misc_feature (1)..(25): SEQ ID NO: 827; WAN024DB4_at; Start 43; Stop 67
gatgaatacaatcgtctaaaagacc

SEQ ID NO: 150793 - DNA, 25 bp, Artificial
  probe
  misc_feature (1)..(25): SEQ ID NO: 827; WAN024DB4_at; Start 384; Stop 408
tattggtctcatggcactggatcag

SEQ ID NO: 150794 - DNA, 25 bp, Artificial
  probe
  misc_feature (1)..(25): SEQ ID NO: 827; WAN024DB4_at; Start 442; Stop 466
gagcttgaagtggaaaatcatgagc

SEQ ID NO: 150795 - DNA, 25 bp, Artificial
  probe
  misc_feature (1)..(25): SEQ ID NO: 827; WAN024DB4_at; Start 7; Stop 31
catttagaaattgaattgaaaacac

SEQ ID NO: 150796 - DNA, 25 bp, Artificial
  probe
  misc_feature (1)..(25): SEQ ID NO: 3973; WAN024DB5_at; Start 339; Stop 363
aaagttggccaagaagatgcagcag

SEQ ID NO: 150797 - DNA, 25 bp, Artificial
  probe
  misc_feature (1)..(25): SEQ ID NO: 3973; WAN024DB5_at; Start 73; Stop 97
gaaggagttgaagcgcttagtaacc

SEQ ID NO: 150798 - DNA, 25 bp, Artificial
  probe
  misc_feature (1)..(25): SEQ ID NO: 3973; WAN024DB5_at; Start 661; Stop 685
tactttagttatcgtgaaaagacag

SEQ ID NO: 150799 - DNA, 25 bp, Artificial
  probe
  misc_feature (1)..(25): SEQ ID NO: 3973; WAN024DB5_at; Start 414; Stop 438
tcaaaatcaaatcatccatcagcag

SEQ ID NO: 150800 - DNA, 25 bp, Artificial
  probe
  misc_feature (1)..(25): SEQ ID NO: 3973; WAN024DB5_at; Start 246; Stop 270
tgttaaggccatagaattacaagct

SEQ ID NO: 150801 - DNA, 25 bp, Artificial
  probe
  misc_feature (1)..(25): SEQ ID NO: 3973; WAN024DB5_at; Start 115; Stop 139
ttactcaggacaggaacacgtcaag

SEQ ID NO: 150802 - DNA, 25 bp, Artificial
  probe
  misc_feature (1)..(25): SEQ ID NO: 3973; WAN024DB5_at; Start 500; Stop 524
caatcaagcatatggcgacttctct

SEQ ID NO: 150803 - DNA, 25 bp, Artificial
  probe
  misc_feature (1)..(25): SEQ ID NO: 3973; WAN024DB5_at; Start 428; Stop 452
tccatcagcagaccatttttatcgg

SEQ ID NO: 150804 - DNA, 25 bp, Artificial
  probe
  misc_feature (1)..(25): SEQ ID NO: 3973; WAN024DB5_at; Start 541; Stop 565
catccttcaggagcggtagcgccta

SEQ ID NO: 150805 - DNA, 25 bp, Artificial
  probe
  misc_feature (1)..(25): SEQ ID NO: 3973; WAN024DB5_at; Start 214; Stop 238
caggaattgcagagtttgtctggta

SEQ ID NO: 150806 - DNA, 25 bp, Artificial
  probe
  misc_feature (1)..(25): SEQ ID NO: 3973; WAN024DB5_at; Start 34; Stop 58
caagaagattcactattaccaagag

SEQ ID NO: 150807 - DNA, 25 bp, Artificial
  probe
  misc_feature (1)..(25): SEQ ID NO: 3973; WAN024DB5_at; Start 170; Stop 194
tgaacaatctttcaagcctaacgga

SEQ ID NO: 150808 - DNA, 25 bp, Artificial
  probe
  misc_feature (1)..(25): SEQ ID NO: 3973; WAN024DB5_at; Start 309; Stop 333
tcttgaaatggaaagtattctcagc

SEQ ID NO: 150809 - DNA, 25 bp, Artificial
  probe
  misc_feature (1)..(25): SEQ ID NO: 3973; WAN024DB5_at; Start 629; Stop 653
tcttggaccatttgattgtctctca

SEQ ID NO: 150810 - DNA, 25 bp, Artificial
  probe
  misc_feature (1)..(25): SEQ ID NO: 3973; WAN024DB5_at; Start 200; Stop 224
aaaaaatgaccctgcaggaattgca

SEQ ID NO: 150811 - DNA, 25 bp, Artificial
  probe
  misc_feature (1)..(25): SEQ ID NO: 3973; WAN024DB5_at; Start 484; Stop 508
gagattcttcactatgcaatcaagc

SEQ ID NO: 150812 - DNA, 25 bp, Artificial
  probe
  misc_feature (1)..(25): SEQ ID NO: 3973; WAN024DB5_at; Start 150; Stop 174
tgaaattgcccaaaaagtcttgaac

SEQ ID NO: 150813 - DNA, 25 bp, Artificial
  probe
  misc_feature (1)..(25): SEQ ID NO: 3973; WAN024DB5_at; Start 393; Stop 417
ggtggcactctatctcaatactcaa

SEQ ID NO: 150814 - DNA, 25 bp, Artificial
  probe
  misc_feature (1)..(25): SEQ ID NO: 3973; WAN024DB5_at; Start 49; Stop 73
ttaccaagagaaaggctggccaagg

SEQ ID NO: 150815 - DNA, 25 bp, Artificial
  probe
  misc_feature (1)..(25): SEQ ID NO: 3973; WAN024DB5_at; Start 588; Stop 612
taaacttgttaaagaagcctgcgaa

SEQ ID NO: 150816 - DNA, 25 bp, Artificial
  probe
  misc_feature (1)..(25): SEQ ID NO: 3973; WAN024DB5_at; Start 324; Stop 348
tattctcagcagtcaaaagttggcc

SEQ ID NO: 150817 - DNA, 25 bp, Artificial
  probe
  misc_feature (1)..(25): SEQ ID NO: 3973; WAN024DB5_at; Start 17; Stop 41
tgtacagtatttcattccaagaaga

SEQ ID NO: 150818 - DNA, 25 bp, Artificial
  probe
  misc_feature (1)..(25): SEQ ID NO: 3973; WAN024DB5_at; Start 105; Stop 129
gctagctattttactcaggacagga

SEQ ID NO: 150819 - DNA, 25 bp, Artificial
  probe
  misc_feature (1)..(25): SEQ ID NO: 3973; WAN024DB5_at; Start 233; Stop 257
ctggtattgggcgtgttaaggccat

SEQ ID NO: 150820 - DNA, 25 bp, Artificial
  probe
  misc_feature (1)..(25): SEQ ID NO: 3973; WAN024DB5_at; Start 375; Stop 399
taaaaaacaagagcacctggtggca

SEQ ID NO: 150821 - DNA, 25 bp, Artificial
  probe
  misc_feature (1)..(25): SEQ ID NO: 3973; WAN024DB5_at; Start 283; Stop 307
gggcatcgtattcacaaacacgaga

SEQ ID NO: 150822 - DNA, 25 bp, Artificial
  probe
  misc_feature (1)..(25): SEQ ID NO: 3973; WAN024DB5_at; Start 260; Stop 284
aattacaagctatgattgaactggg

SEQ ID NO: 150823 - DNA, 25 bp, Artificial
  probe
  misc_feature (1)..(25): SEQ ID NO: 3973; WAN024DB5_at; Start 574; Stop 598
gatgatcatgtcactaaacttgtta

SEQ ID NO: 150824 - DNA, 25 bp, Artificial
  probe
  misc_feature (1)..(25): SEQ ID NO: 3973; WAN024DB5_at; Start 470; Stop 494
tcgctgaaccgcgagagattcttca

SEQ ID NO: 150825 - DNA, 25 bp, Artificial
  probe
  misc_feature (1)..(25): SEQ ID NO: 3973; WAN024DB5_at; Start 557; Stop 581
tagcgcctagccaaaatgatgatca

SEQ ID NO: 150826 - DNA, 25 bp, Artificial
  probe
  misc_feature (1)..(25): SEQ ID NO: 3973; WAN024DB5_at; Start 87; Stop 111
gcttagtaaccaagagttgctagct

SEQ ID NO: 150827 - DNA, 25 bp, Artificial
  probe
  misc_feature (1)..(25): SEQ ID NO: 3973; WAN024DB5_at; Start 458; Stop 482
taactcgtagtatcgctgaaccgcg

SEQ ID NO: 150828 - DNA, 25 bp, Artificial
  probe
  misc_feature (1)..(25): SEQ ID NO: 3973; WAN024DB5_at; Start 297; Stop 321
caaacacgagactcttgaaatggaa

SEQ ID NO: 150829 - DNA, 25 bp, Artificial
  probe
  misc_feature (1)..(25): SEQ ID NO: 3973; WAN024DB5_at; Start 527; Stop 551
tcttggtccacaatcatccttcagg

SEQ ID NO: 150830 - DNA, 25 bp, Artificial
  probe
  misc_feature (1)..(25): SEQ ID NO: 1677; WAN024DB6_at; Start 584; Stop 608
atttggttggtcatggtgttggccc

SEQ ID NO: 150831 - DNA, 25 bp, Artificial
  probe
  misc_feature (1)..(25): SEQ ID NO: 1677; WAN024DB6_at; Start 611; Stop 635
ctatgcacgaagaaccaatggttcc

SEQ ID NO: 150832 - DNA, 25 bp, Artificial
  probe
  misc_feature (1)..(25): SEQ ID NO: 1677; WAN024DB6_at; Start 747; Stop 771
ttgggcgcataagaccattgacggt

SEQ ID NO: 150833 - DNA, 25 bp, Artificial
  probe
  misc_feature (1)..(25): SEQ ID NO: 1677; WAN024DB6_at; Start 179; Stop 203
ttgacggtgccatgatggactatcc

SEQ ID NO: 150834 - DNA, 25 bp, Artificial
  probe
  misc_feature (1)..(25): SEQ ID NO: 1677; WAN024DB6_at; Start 115; Stop 139
gaagttgaagaatatgtccgccgtc

SEQ ID NO: 150835 - DNA, 25 bp, Artificial
  probe
  misc_feature (1)..(25): SEQ ID NO: 1677; WAN024DB6_at; Start 233; Stop 257
aagtggctcacgctttccctcgtca

SEQ ID NO: 150836 - DNA, 25 bp, Artificial
  probe
  misc_feature (1)..(25): SEQ ID NO: 1677; WAN024DB6_at; Start 710; Stop 734
caggcgattgggaaattgatacaga

SEQ ID NO: 150837 - DNA, 25 bp, Artificial
  probe
  misc_feature (1)..(25): SEQ ID NO: 1677; WAN024DB6_at; Start 220; Stop 244
tctcttaacgatgaagtggctcacg

SEQ ID NO: 150838 - DNA, 25 bp, Artificial
  probe
  misc_feature (1)..(25): SEQ ID NO: 1677; WAN024DB6_at; Start 192; Stop 216
gatggactatccttatgctacctgt

SEQ ID NO: 150839 - DNA, 25 bp, Artificial
  probe
  misc_feature (1)..(25): SEQ ID NO: 1677; WAN024DB6_at; Start 598; Stop 622
ggtgttggcccaactatgcacgaag

SEQ ID NO: 150840 - DNA, 25 bp, Artificial
  probe
  misc_feature (1)..(25): SEQ ID NO: 1677; WAN024DB6_at; Start 62; Stop 86
caagtattcatataggcttacgtga

SEQ ID NO: 150841 - DNA, 25 bp, Artificial
  probe
  misc_feature (1)..(25): SEQ ID NO: 1677; WAN024DB6_at; Start 129; Stop 153
tgtccgccgtcgttgtaaagaagaa

SEQ ID NO: 150842 - DNA, 25 bp, Artificial
  probe
  misc_feature (1)..(25): SEQ ID NO: 1677; WAN024DB6_at; Start 449; Stop 473
tcaaaaacttgatggatgtaaccaa

SEQ ID NO: 150843 - DNA, 25 bp, Artificial
  probe
  misc_feature (1)..(25): SEQ ID NO: 1677; WAN024DB6_at; Start 799; Stop 823
tttgtcattacgaaagatggacctg

SEQ ID NO: 150844 - DNA, 25 bp, Artificial
  probe
  misc_feature (1)..(25): SEQ ID NO: 1677; WAN024DB6_at; Start 543; Stop 567
tcaagaatacgctgaaagtcgtggt

SEQ ID NO: 150845 - DNA, 25 bp, Artificial
  probe
  misc_feature (1)..(25): SEQ ID NO: 1677; WAN024DB6_at; Start 24; Stop 48
tgaaatcgaagctatggacaaggct

SEQ ID NO: 150846 - DNA, 25 bp, Artificial
  probe
  misc_feature (1)..(25): SEQ ID NO: 1677; WAN024DB6_at; Start 205; Stop 229
tatgctacctgttgctctcttaacg

SEQ ID NO: 150847 - DNA, 25 bp, Artificial
  probe
  misc_feature (1)..(25): SEQ ID NO: 1677; WAN024DB6_at; Start 637; Stop 661
aactatggtattgcaggtcgtggac

SEQ ID NO: 150848 - DNA, 25 bp, Artificial
  probe
  misc_feature (1)..(25): SEQ ID NO: 1677; WAN024DB6_at; Start 289; Stop 313
gttgatatggttttgggaggtccca

SEQ ID NO: 150849 - DNA, 25 bp, Artificial
  probe
  misc_feature (1)..(25): SEQ ID NO: 1677; WAN024DB6_at; Start 11; Stop 35
taaaatcagctcgtgaaatcgaagc

SEQ ID NO: 150850 - DNA, 25 bp, Artificial
  probe
  misc_feature (1)..(25): SEQ ID NO: 1677; WAN024DB6_at; Start 761; Stop 785
ccattgacggtggattgtcatgtca

SEQ ID NO: 150851 - DNA, 25 bp, Artificial
  probe
  misc_feature (1)..(25): SEQ ID NO: 1677; WAN024DB6_at; Start 693; Stop 717
tgaaccaatgatcaatacaggcgat

SEQ ID NO: 150852 - DNA, 25 bp, Artificial
  probe
  misc_feature (1)..(25): SEQ ID NO: 1677; WAN024DB6_at; Start 426; Stop 450
tgttggtacaccgtccgaagaagtc

SEQ ID NO: 150853 - DNA, 25 bp, Artificial
  probe
  misc_feature (1)..(25): SEQ ID NO: 1677; WAN024DB6_at; Start 482; Stop 506
tgtacaagggtattgagcaagctgt

SEQ ID NO: 150854 - DNA, 25 bp, Artificial
  probe
  misc_feature (1)..(25): SEQ ID NO: 1677; WAN024DB6_at; Start 395; Stop 419
gtggtttagcagactcatgttgggc

SEQ ID NO: 150855 - DNA, 25 bp, Artificial
  probe
  misc_feature (1)..(25): SEQ ID NO: 1677; WAN024DB6_at; Start 513; Stop 537
aaatcgtatcggtgatatcggtgcg

SEQ ID NO: 150856 - DNA, 25 bp, Artificial
  probe
  misc_feature (1)..(25): SEQ ID NO: 1677; WAN024DB6_at; Start 153; Stop 177
aaatttccttccacttcagattggg

SEQ ID NO: 150857 - DNA, 25 bp, Artificial
  probe
  misc_feature (1)..(25): SEQ ID NO: 1677; WAN024DB6_at; Start 40; Stop 64
gacaaggctggtgattttctagcaa

SEQ ID NO: 150858 - DNA, 25 bp, Artificial
  probe
  misc_feature (1)..(25): SEQ ID NO: 1677; WAN024DB6_at; Start 731; Stop 755
cagatatgaaaactggttgggcgca

SEQ ID NO: 150859 - DNA, 25 bp, Artificial
  probe
  misc_feature (1)..(25): SEQ ID NO: 1677; WAN024DB6_at; Start 467; Stop 491
taaccaaagaagctatgtacaaggg

SEQ ID NO: 150860 - DNA, 25 bp, Artificial
  probe
  misc_feature (1)..(25): SEQ ID NO: 1677; WAN024DB6_at; Start 651; Stop 675
aggtcgtggactccgtcttcgtgaa

SEQ ID NO: 150861 - DNA, 25 bp, Artificial
  probe
  misc_feature (1)..(25): SEQ ID NO: 1677; WAN024DB6_at; Start 781; Stop 805
tgtcagtatgaacaccaatttgtca

SEQ ID NO: 150862 - DNA, 25 bp, Artificial
  probe
  misc_feature (1)..(25): SEQ ID NO: 1677; WAN024DB6_at; Start 528; Stop 552
tatcggtgcggctattcaagaatac

SEQ ID NO: 150863 - DNA, 25 bp, Artificial
  probe
  misc_feature (1)..(25): SEQ ID NO: 1677; WAN024DB6_at; Start 410; Stop 434
catgttgggcttatgctgttggtac

SEQ ID NO: 150864 - DNA, 25 bp, Artificial
  probe
  misc_feature (1)..(25): SEQ ID NO: 1602; WAN024DB7_at; Start 1156; Stop 1180
gatatattgcgcattcaggcacgga

SEQ ID NO: 150865 - DNA, 25 bp, Artificial
  probe
  misc_feature (1)..(25): SEQ ID NO: 1602; WAN024DB7_at; Start 361; Stop 385
gaccgaacccgtattcagttgctag

SEQ ID NO: 150866 - DNA, 25 bp, Artificial
  probe
  misc_feature (1)..(25): SEQ ID NO: 1602; WAN024DB7_at; Start 672; Stop 696
tgttatcaatcaacatcaggtcgtt

SEQ ID NO: 150867 - DNA, 25 bp, Artificial
  probe
  misc_feature (1)..(25): SEQ ID NO: 1602; WAN024DB7_at; Start 813; Stop 837
tcaacggatgatcgcagaagacttt

SEQ ID NO: 150868 - DNA, 25 bp, Artificial
  probe
  misc_feature (1)..(25): SEQ ID NO: 1602; WAN024DB7_at; Start 146; Stop 170
tggagacccgtcctagaagtggaac

SEQ ID NO: 150869 - DNA, 25 bp, Artificial
  probe
  misc_feature (1)..(25): SEQ ID NO: 1602; WAN024DB7_at; Start 84; Stop 108
tctaggagttagtgatggaacagcc

SEQ ID NO: 150870 - DNA, 25 bp, Artificial
  probe
  misc_feature (1)..(25): SEQ ID NO: 1602; WAN024DB7_at; Start 486; Stop 510
taagcatgatacctttaccgtcgcg

SEQ ID NO: 150871 - DNA, 25 bp, Artificial
  probe
  misc_feature (1)..(25): SEQ ID NO: 1602; WAN024DB7_at; Start 236; Stop 260
cttcttctgaggttctggctgggca

SEQ ID NO: 150872 - DNA, 25 bp, Artificial
  probe
  misc_feature (1)..(25): SEQ ID NO: 1602; WAN024DB7_at; Start 795; Stop 819
aaatattgccaatgtgagtcaacgg

SEQ ID NO: 150873 - DNA, 25 bp, Artificial
  probe
  misc_feature (1)..(25): SEQ ID NO: 1602; WAN024DB7_at; Start 1182; Stop 1206
tattcatcatacgagacggtcagct

SEQ ID NO: 150874 - DNA, 25 bp, Artificial
  probe
  misc_feature (1)..(25): SEQ ID NO: 1602; WAN024DB7_at; Start 575; Stop 599
tttatcgccctagtcatgagtatgg

SEQ ID NO: 150875 - DNA, 25 bp, Artificial
  probe
  misc_feature (1)..(25): SEQ ID NO: 1602; WAN024DB7_at; Start 501; Stop 525
taccgtcgcgaccatgatcaataaa

SEQ ID NO: 150876 - DNA, 25 bp, Artificial
  probe
  misc_feature (1)..(25): SEQ ID NO: 1602; WAN024DB7_at; Start 51; Stop 75
taaaagggtcagtgttcgtagcatt

SEQ ID NO: 150877 - DNA, 25 bp, Artificial
  probe
  misc_feature (1)..(25): SEQ ID NO: 1602; WAN024DB7_at; Start 67; Stop 91
cgtagcatttcgaatcatctaggag

SEQ ID NO: 150878 - DNA, 25 bp, Artificial
  probe
  misc_feature (1)..(25): SEQ ID NO: 1602; WAN024DB7_at; Start 648; Stop 672
taagaatcgtagcagccgtttccct

SEQ ID NO: 150879 - DNA, 25 bp, Artificial
  probe
  misc_feature (1)..(25): SEQ ID NO: 1602; WAN024DB7_at; Start 116; Stop 140
ctattaaagaagctgaaaaccgtgg

SEQ ID NO: 150880 - DNA, 25 bp, Artificial
  probe
  misc_feature (1)..(25): SEQ ID NO: 1602; WAN024DB7_at; Start 985; Stop 1009
gaagtagtcattacagtggaaccct

SEQ ID NO: 150881 - DNA, 25 bp, Artificial
  probe
  misc_feature (1)..(25): SEQ ID NO: 1602; WAN024DB7_at; Start 297; Stop 321
tggtgccatgactgaacaaaatatc

SEQ ID NO: 150882 - DNA, 25 bp, Artificial
  probe
  misc_feature (1)..(25): SEQ ID NO: 1602; WAN024DB7_at; Start 865; Stop 889
caaactttgcttggcgttgtgacgc

SEQ ID NO: 150883 - DNA, 25 bp, Artificial
  probe
  misc_feature (1)..(25): SEQ ID NO: 1602; WAN024DB7_at; Start 887; Stop 911
cgcgacgagatgtcatggagaagat

SEQ ID NO: 150884 - DNA, 25 bp, Artificial
  probe
  misc_feature (1)..(25): SEQ ID NO: 1602; WAN024DB7_at; Start 710; Stop 734
ccatgagagacgctggtgataaatc

SEQ ID NO: 150885 - DNA, 25 bp, Artificial
  probe
  misc_feature (1)..(25): SEQ ID NO: 1602; WAN024DB7_at; Start 432; Stop 456
tcatgatgatgtgcttaaactggcc

SEQ ID NO: 150886 - DNA, 25 bp, Artificial
  probe
  misc_feature (1)..(25): SEQ ID NO: 1602; WAN024DB7_at; Start 838; Stop 862
gaaatggtaccagttgttcgaagca

SEQ ID NO: 150887 - DNA, 25 bp, Artificial
  probe
  misc_feature (1)..(25): SEQ ID NO: 1602; WAN024DB7_at; Start 175; Stop 199
cgtgttaaatcccagaaagttgcta

SEQ ID NO: 150888 - DNA, 25 bp, Artificial
  probe
  misc_feature (1)..(25): SEQ ID NO: 1602; WAN024DB7_at; Start 1228; Stop 1252
catggtcaccagattgtttcaaaag

SEQ ID NO: 150889 - DNA, 25 bp, Artificial
  probe
  misc_feature (1)..(25): SEQ ID NO: 1602; WAN024DB7_at; Start 1061; Stop 1085
tgacccacatgacccaagatttagt

SEQ ID NO: 150890 - DNA, 25 bp, Artificial
  probe
  misc_feature (1)..(25): SEQ ID NO: 1602; WAN024DB7_at; Start 344; Stop 368
ggctcttgattgtcggagaccgaac

SEQ ID NO: 150891 - DNA, 25 bp, Artificial
  probe
  misc_feature (1)..(25): SEQ ID NO: 1602; WAN024DB7_at; Start 1092; Stop 1116
tagtggtcgcaatctcattatcgag

SEQ ID NO: 150892 - DNA, 25 bp, Artificial
  probe
  misc_feature (1)..(25): SEQ ID NO: 1602; WAN024DB7_at; Start 1125; Stop 1149
gatctactttttgcaggctgttcag

SEQ ID NO: 150893 - DNA, 25 bp, Artificial
  probe
  misc_feature (1)..(25): SEQ ID NO: 1602; WAN024DB7_at; Start 560; Stop 584
tgacagttgagaaactttatcgccc

SEQ ID NO: 150894 - DNA, 25 bp, Artificial
  probe
  misc_feature (1)..(25): SEQ ID NO: 1602; WAN024DB7_at; Start 381; Stop 405
gctagccttggaaaatgaaaatgca

SEQ ID NO: 150895 - DNA, 25 bp, Artificial
  probe
  misc_feature (1)..(25): SEQ ID NO: 1602; WAN024DB7_at; Start 727; Stop 751
gataaatcaccaagcacgacaattg

SEQ ID NO: 150896 - DNA, 25 bp, Artificial
  probe
  misc_feature (1)..(25): SEQ ID NO: 1602; WAN024DB7_at; Start 129; Stop 153
tgaaaaccgtggaattgtggagacc

SEQ ID NO: 150897 - DNA, 25 bp, Artificial
  probe
  misc_feature (1)..(25): SEQ ID NO: 1602; WAN024DB7_at; Start 452; Stop 476
tggccaatcaaaaagggattcctgt

SEQ ID NO: 150898 - DNA, 25 bp, Artificial
  probe
  misc_feature (1)..(25): SEQ ID NO: 4319; WAN024DB8_at; Start 200; Stop 224
cccctttgggagtgtgggcaatttg

SEQ ID NO: 150899 - DNA, 25 bp, Artificial
  probe
  misc_feature (1)..(25): SEQ ID NO: 4319; WAN024DB8_at; Start 160; Stop 184
gaagaaagtcaatatgcactggcca

SEQ ID NO: 150900 - DNA, 25 bp, Artificial
  probe
  misc_feature (1)..(25): SEQ ID NO: 4319; WAN024DB8_at; Start 429; Stop 453
agctagccaaagagttgctcttaag

SEQ ID NO: 150901 - DNA, 25 bp, Artificial
  probe
  misc_feature (1)..(25): SEQ ID NO: 4319; WAN024DB8_at; Start 131; Stop 155
aatttattttcccaacgcaggcaag

SEQ ID NO: 150902 - DNA, 25 bp, Artificial
  probe
  misc_feature (1)..(25): SEQ ID NO: 4319; WAN024DB8_at; Start 192; Stop 216
tatgaagtcccctttgggagtgtgg

SEQ ID NO: 150903 - DNA, 25 bp, Artificial
  probe
  misc_feature (1)..(25): SEQ ID NO: 4319; WAN024DB8_at; Start 103; Stop 127
gagatagcttcaaatccagaaaatc

SEQ ID NO: 150904 - DNA, 25 bp, Artificial
  probe
  misc_feature (1)..(25): SEQ ID NO: 4319; WAN024DB8_at; Start 16; Stop 40
tggaccaaattagcaatgttttctt

SEQ ID NO: 150905 - DNA, 25 bp, Artificial
  probe
  misc_feature (1)..(25): SEQ ID NO: 4319; WAN024DB8_at; Start 46; Stop 70
gaaacggatcgcttgtatttgcgtc

SEQ ID NO: 150906 - DNA, 25 bp, Artificial
  probe
  misc_feature (1)..(25): SEQ ID NO: 4319; WAN024DB8_at; Start 440; Stop 464
gagttgctcttaagtctggatttag

SEQ ID NO: 150907 - DNA, 25 bp, Artificial
  probe
  misc_feature (1)..(25): SEQ ID NO: 4319; WAN024DB8_at; Start 238; Stop 262
caacaaatgattggttctattaaat

SEQ ID NO: 150908 - DNA, 25 bp, Artificial
  probe
  misc_feature (1)..(25): SEQ ID NO: 4319; WAN024DB8_at; Start 307; Stop 331
tttttgagaaaagatgcttggtcgc

SEQ ID NO: 150909 - DNA, 25 bp, Artificial
  probe
  misc_feature (1)..(25): SEQ ID NO: 4319; WAN024DB8_at; Start 359; Stop 383
aaatttgtcagctttcttttgagga

SEQ ID NO: 150910 - DNA, 25 bp, Artificial
  probe
  misc_feature (1)..(25): SEQ ID NO: 4319; WAN024DB8_at; Start 329; Stop 353
cgcaaggatttatgacagaggttgt

SEQ ID NO: 150911 - DNA, 25 bp, Artificial
  probe
  misc_feature (1)..(25): SEQ ID NO: 4319; WAN024DB8_at; Start 536; Stop 560
taaaaggagagttcaatgagtaact

SEQ ID NO: 150912 - DNA, 25 bp, Artificial
  probe
  misc_feature (1)..(25): SEQ ID NO: 4319; WAN024DB8_at; Start 79; Stop 103
tttagtgatagtcaggacttccgcg

SEQ ID NO: 150913 - DNA, 25 bp, Artificial
  probe
  misc_feature (1)..(25): SEQ ID NO: 4319; WAN024DB8_at; Start 344; Stop 368
cagaggttgttagaaaaatttgtca

SEQ ID NO: 150914 - DNA, 25 bp, Artificial
  probe
  misc_feature (1)..(25): SEQ ID NO: 4319; WAN024DB8_at; Start 522; Stop 546
tgaatttcggtatgtaaaaggagag

SEQ ID NO: 150915 - DNA, 25 bp, Artificial
  probe
  misc_feature (1)..(25): SEQ ID NO: 4319; WAN024DB8_at; Start 277; Stop 301
gaaatcaaaaaagaagctgagcttg

SEQ ID NO: 150916 - DNA, 25 bp, Artificial
  probe
  misc_feature (1)..(25): SEQ ID NO: 4319; WAN024DB8_at; Start 507; Stop 531
aatgcgggattatcttgaatttcgg

SEQ ID NO: 150917 - DNA, 25 bp, Artificial
  probe
  misc_feature (1)..(25): SEQ ID NO: 4319; WAN024DB8_at; Start 146; Stop 170
cgcaggcaagtctggaagaaagtca

SEQ ID NO: 150918 - DNA, 25 bp, Artificial
  probe
  misc_feature (1)..(25): SEQ ID NO: 4319; WAN024DB8_at; Start 492; Stop 516
tcgttacacaagaaaaatgcgggat

SEQ ID NO: 150919 - DNA, 25 bp, Artificial
  probe
  misc_feature (1)..(25): SEQ ID NO: 4319; WAN024DB8_at; Start 292; Stop 316
gctgagcttggctattttttgagaa

SEQ ID NO: 150920 - DNA, 25 bp, Artificial
  probe
  misc_feature (1)..(25): SEQ ID NO: 4319; WAN024DB8_at; Start 91; Stop 115
caggacttccgcgagatagcttcaa

SEQ ID NO: 150921 - DNA, 25 bp, Artificial
  probe
  misc_feature (1)..(25): SEQ ID NO: 4319; WAN024DB8_at; Start 470; Stop 494
tccgtcagtttaagggaagtgatcg

SEQ ID NO: 150922 - DNA, 25 bp, Artificial
  probe
  misc_feature (1)..(25): SEQ ID NO: 4319; WAN024DB8_at; Start 214; Stop 238
tgggcaatttgtgaccagaaaaatc

SEQ ID NO: 150923 - DNA, 25 bp, Artificial
  probe
  misc_feature (1)..(25): SEQ ID NO: 4319; WAN024DB8_at; Start 480; Stop 504
taagggaagtgatcgttacacaaga

SEQ ID NO: 150924 - DNA, 25 bp, Artificial
  probe
  misc_feature (1)..(25): SEQ ID NO: 4319; WAN024DB8_at; Start 174; Stop 198
tgcactggccaattactttatgaag

SEQ ID NO: 150925 - DNA, 25 bp, Artificial
  probe
  misc_feature (1)..(25): SEQ ID NO: 4319; WAN024DB8_at; Start 366; Stop 390
tcagctttcttttgaggaatttggc

SEQ ID NO: 150926 - DNA, 25 bp, Artificial
  probe
  misc_feature (1)..(25): SEQ ID NO: 4319; WAN024DB8_at; Start 321; Stop 345
tgcttggtcgcaaggatttatgaca

SEQ ID NO: 150927 - DNA, 25 bp, Artificial
  probe
  misc_feature (1)..(25): SEQ ID NO: 4319; WAN024DB8_at; Start 378; Stop 402
tgaggaatttggcttaaaacaatta

SEQ ID NO: 150928 - DNA, 25 bp, Artificial
  probe
  misc_feature (1)..(25): SEQ ID NO: 4319; WAN024DB8_at; Start 454; Stop 478
tctggatttagtttgttccgtcagt

SEQ ID NO: 150929 - DNA, 25 bp, Artificial
  probe
  misc_feature (1)..(25): SEQ ID NO: 4319; WAN024DB8_at; Start 1; Stop 25
gtgtttatgaatatttggaccaaat

SEQ ID NO: 150930 - DNA, 25 bp, Artificial
  probe
  misc_feature (1)..(25): SEQ ID NO: 4319; WAN024DB8_at; Start 223; Stop 247
tgtgaccagaaaaatcaacaaatga

SEQ ID NO: 150931 - DNA, 25 bp, Artificial
  probe
  misc_feature (1)..(25): SEQ ID NO: 4319; WAN024DB8_at; Start 65; Stop 89
tgcgtcctttcttttttagtgatag

SEQ ID NO: 150932 - DNA, 25 bp, Artificial
  probe
  misc_feature (1)..(25): SEQ ID NO: 2552; WAN024DB9_at; Start 140; Stop 164
aggaaaatccatctcagtaactaat

SEQ ID NO: 150933 - DNA, 25 bp, Artificial
  probe
  misc_feature (1)..(25): SEQ ID NO: 2552; WAN024DB9_at; Start 85; Stop 109
gaactatttaatcgtctcaatccaa

SEQ ID NO: 150934 - DNA, 25 bp, Artificial
  probe
  misc_feature (1)..(25): SEQ ID NO: 2552; WAN024DB9_at; Start 52; Stop 76
gccgcagacgtttggaatgaaaaga

SEQ ID NO: 150935 - DNA, 25 bp, Artificial
  probe
  misc_feature (1)..(25): SEQ ID NO: 2552; WAN024DB9_at; Start 47; Stop 71
tttccgccgcagacgtttggaatga

SEQ ID NO: 150936 - DNA, 25 bp, Artificial
  probe
  misc_feature (1)..(25): SEQ ID NO: 2552; WAN024DB9_at; Start 7; Stop 31
gataaaccgatatctttccgagatg

SEQ ID NO: 150937 - DNA, 25 bp, Artificial
  probe
  misc_feature (1)..(25): SEQ ID NO: 2552; WAN024DB9_at; Start 24; Stop 48
ccgagatgcggatggtaattttgtt

SEQ ID NO: 150938 - DNA, 25 bp, Artificial
  probe
  misc_feature (1)..(25): SEQ ID NO: 2552; WAN024DB9_at; Start 36; Stop 60
tggtaattttgtttccgccgcagac

SEQ ID NO: 150939 - DNA, 25 bp, Artificial
  probe
  misc_feature (1)..(25): SEQ ID NO: 2552; WAN024DB9_at; Start 3; Stop 27
gggagataaaccgatatctttccga

SEQ ID NO: 150940 - DNA, 25 bp, Artificial
  probe
  misc_feature (1)..(25): SEQ ID NO: 2552; WAN024DB9_at; Start 45; Stop 69
tgtttccgccgcagacgtttggaat

SEQ ID NO: 150941 - DNA, 25 bp, Artificial
  probe
  misc_feature (1)..(25): SEQ ID NO: 2552; WAN024DB9_at; Start 138; Stop 162
aaaggaaaatccatctcagtaacta

SEQ ID NO: 150942 - DNA, 25 bp, Artificial
  probe
  misc_feature (1)..(25): SEQ ID NO: 2552; WAN024DB9_at; Start 105; Stop 129
tccaaatcgtgccttgagattggca

SEQ ID NO: 150943 - DNA, 25 bp, Artificial
  probe
  misc_feature (1)..(25): SEQ ID NO: 2552; WAN024DB9_at; Start 19; Stop 43
tctttccgagatgcggatggtaatt

SEQ ID NO: 150944 - DNA, 25 bp, Artificial
  probe
  misc_feature (1)..(25): SEQ ID NO: 2552; WAN024DB9_at; Start 11; Stop 35
aaccgatatctttccgagatgcgga

SEQ ID NO: 150945 - DNA, 25 bp, Artificial
  probe
  misc_feature (1)..(25): SEQ ID NO: 2552; WAN024DB9_at; Start 112; Stop 136
cgtgccttgagattggcacgaacta

SEQ ID NO: 150946 - DNA, 25 bp, Artificial
  probe
  misc_feature (1)..(25): SEQ ID NO: 2552; WAN024DB9_at; Start 9; Stop 33
taaaccgatatctttccgagatgcg

SEQ ID NO: 150947 - DNA, 25 bp, Artificial
  probe
  misc_feature (1)..(25): SEQ ID NO: 2552; WAN024DB9_at; Start 50; Stop 74
ccgccgcagacgtttggaatgaaaa

SEQ ID NO: 150948 - DNA, 25 bp, Artificial
  probe
  misc_feature (1)..(25): SEQ ID NO: 2552; WAN024DB9_at; Start 93; Stop 117
taatcgtctcaatccaaatcgtgcc

SEQ ID NO: 150949 - DNA, 25 bp, Artificial
  probe
  misc_feature (1)..(25): SEQ ID NO: 2552; WAN024DB9_at; Start 107; Stop 131
caaatcgtgccttgagattggcacg

SEQ ID NO: 150950 - DNA, 25 bp, Artificial
  probe
  misc_feature (1)..(25): SEQ ID NO: 2552; WAN024DB9_at; Start 98; Stop 122
gtctcaatccaaatcgtgccttgag

SEQ ID NO: 150951 - DNA, 25 bp, Artificial
  probe
  misc_feature (1)..(25): SEQ ID NO: 2552; WAN024DB9_at; Start 49; Stop 73
tccgccgcagacgtttggaatgaaa

SEQ ID NO: 150952 - DNA, 25 bp, Artificial
  probe
  misc_feature (1)..(25): SEQ ID NO: 2552; WAN024DB9_at; Start 17; Stop 41
tatctttccgagatgcggatggtaa

SEQ ID NO: 150953 - DNA, 25 bp, Artificial
  probe
  misc_feature (1)..(25): SEQ ID NO: 2552; WAN024DB9_at; Start 5; Stop 29
gagataaaccgatatctttccgaga

SEQ ID NO: 150954 - DNA, 25 bp, Artificial
  probe
  misc_feature (1)..(25): SEQ ID NO: 2552; WAN024DB9_at; Start 54; Stop 78
cgcagacgtttggaatgaaaagaaa

SEQ ID NO: 150955 - DNA, 25 bp, Artificial
  probe
  misc_feature (1)..(25): SEQ ID NO: 2552; WAN024DB9_at; Start 80; Stop 104
tggaagaactatttaatcgtctcaa

SEQ ID NO: 150956 - DNA, 25 bp, Artificial
  probe
  misc_feature (1)..(25): SEQ ID NO: 2552; WAN024DB9_at; Start 14; Stop 38
cgatatctttccgagatgcggatgg

SEQ ID NO: 150957 - DNA, 25 bp, Artificial
  probe
  misc_feature (1)..(25): SEQ ID NO: 2552; WAN024DB9_at; Start 34; Stop 58
gatggtaattttgtttccgccgcag

SEQ ID NO: 150958 - DNA, 25 bp, Artificial
  probe
  misc_feature (1)..(25): SEQ ID NO: 2552; WAN024DB9_at; Start 91; Stop 115
tttaatcgtctcaatccaaatcgtg

SEQ ID NO: 150959 - DNA, 25 bp, Artificial
  probe
  misc_feature (1)..(25): SEQ ID NO: 2552; WAN024DB9_at; Start 64; Stop 88
tggaatgaaaagaaattggaagaac

SEQ ID NO: 150960 - DNA, 25 bp, Artificial
  probe
  misc_feature (1)..(25): SEQ ID NO: 2552; WAN024DB9_at; Start 66; Stop 90
gaatgaaaagaaattggaagaacta

SEQ ID NO: 150961 - DNA, 25 bp, Artificial
  probe
  misc_feature (1)..(25): SEQ ID NO: 2552; WAN024DB9_at; Start 44; Stop 68
ttgtttccgccgcagacgtttggaa

SEQ ID NO: 150962 - DNA, 25 bp, Artificial
  probe
  misc_feature (1)..(25): SEQ ID NO: 2552; WAN024DB9_at; Start 103; Stop 127
aatccaaatcgtgccttgagattgg

SEQ ID NO: 150963 - DNA, 25 bp, Artificial
  probe
  misc_feature (1)..(25): SEQ ID NO: 2552; WAN024DB9_at; Start 56; Stop 80
cagacgtttggaatgaaaagaaatt

SEQ ID NO: 150964 - DNA, 25 bp, Artificial
  probe
  misc_feature (1)..(25): SEQ ID NO: 2552; WAN024DB9_at; Start 96; Stop 120
tcgtctcaatccaaatcgtgccttg

SEQ ID NO: 150965 - DNA, 25 bp, Artificial
  probe
  misc_feature (1)..(25): SEQ ID NO: 2552; WAN024DB9_at; Start 101; Stop 125
tcaatccaaatcgtgccttgagatt

SEQ ID NO: 150966 - DNA, 25 bp, Artificial
  probe
  misc_feature (1)..(25): SEQ ID NO: 1510; WAN024DBA_at; Start 140; Stop 164
ttttatggattatcgcaccagtagc

SEQ ID NO: 150967 - DNA, 25 bp, Artificial
  probe
  misc_feature (1)..(25): SEQ ID NO: 1510; WAN024DBA_at; Start 58; Stop 82
ctggatatggatccgactatcgttc

SEQ ID NO: 150968 - DNA, 25 bp, Artificial
  probe
  misc_feature (1)..(25): SEQ ID NO: 1510; WAN024DBA_at; Start 143; Stop 167
tatggattatcgcaccagtagcaac

SEQ ID NO: 150969 - DNA, 25 bp, Artificial
  probe
  misc_feature (1)..(25): SEQ ID NO: 1510; WAN024DBA_at; Start 146; Stop 170
ggattatcgcaccagtagcaactga

SEQ ID NO: 150970 - DNA, 25 bp, Artificial
  probe
  misc_feature (1)..(25): SEQ ID NO: 1510; WAN024DBA_at; Start 104; Stop 128
cttgctgttacggagctggaattgt

SEQ ID NO: 150971 - DNA, 25 bp, Artificial
  probe
  misc_feature (1)..(25): SEQ ID NO: 1510; WAN024DBA_at; Start 108; Stop 132
ctgttacggagctggaattgtagct

SEQ ID NO: 150972 - DNA, 25 bp, Artificial
  probe
  misc_feature (1)..(25): SEQ ID NO: 1510; WAN024DBA_at; Start 118; Stop 142
gctggaattgtagcttacattattt

SEQ ID NO: 150973 - DNA, 25 bp, Artificial
  probe
  misc_feature (1)..(25): SEQ ID NO: 1510; WAN024DBA_at; Start 7; Stop 31
agcggtcgtgataaaaagattgcgg

SEQ ID NO: 150974 - DNA, 25 bp, Artificial
  probe
  misc_feature (1)..(25): SEQ ID NO: 1510; WAN024DBA_at; Start 99; Stop 123
tcttacttgctgttacggagctgga

SEQ ID NO: 150975 - DNA, 25 bp, Artificial
  probe
  misc_feature (1)..(25): SEQ ID NO: 1510; WAN024DBA_at; Start 100; Stop 124
cttacttgctgttacggagctggaa

SEQ ID NO: 150976 - DNA, 25 bp, Artificial
  probe
  misc_feature (1)..(25): SEQ ID NO: 1510; WAN024DBA_at; Start 9; Stop 33
cggtcgtgataaaaagattgcgggt

SEQ ID NO: 150977 - DNA, 25 bp, Artificial
  probe
  misc_feature (1)..(25): SEQ ID NO: 1510; WAN024DBA_at; Start 115; Stop 139
ggagctggaattgtagcttacatta

SEQ ID NO: 150978 - DNA, 25 bp, Artificial
  probe
  misc_feature (1)..(25): SEQ ID NO: 1510; WAN024DBA_at; Start 106; Stop 130
tgctgttacggagctggaattgtag

SEQ ID NO: 150979 - DNA, 25 bp, Artificial
  probe
  misc_feature (1)..(25): SEQ ID NO: 1510; WAN024DBA_at; Start 55; Stop 79
tatctggatatggatccgactatcg

SEQ ID NO: 150980 - DNA, 25 bp, Artificial
  probe
  misc_feature (1)..(25): SEQ ID NO: 1510; WAN024DBA_at; Start 47; Stop 71
tggcccattatctggatatggatcc

SEQ ID NO: 150981 - DNA, 25 bp, Artificial
  probe
  misc_feature (1)..(25): SEQ ID NO: 1510; WAN024DBA_at; Start 93; Stop 117
gggtgttcttacttgctgttacgga

SEQ ID NO: 150982 - DNA, 25 bp, Artificial
  probe
  misc_feature (1)..(25): SEQ ID NO: 1510; WAN024DBA_at; Start 44; Stop 68
gggtggcccattatctggatatgga

SEQ ID NO: 150983 - DNA, 25 bp, Artificial
  probe
  misc_feature (1)..(25): SEQ ID NO: 1510; WAN024DBA_at; Start 112; Stop 136
tacggagctggaattgtagcttaca

SEQ ID NO: 150984 - DNA, 25 bp, Artificial
  probe
  misc_feature (1)..(25): SEQ ID NO: 1510; WAN024DBA_at; Start 52; Stop 76
cattatctggatatggatccgacta

SEQ ID NO: 150985 - DNA, 25 bp, Artificial
  probe
  misc_feature (1)..(25): SEQ ID NO: 1510; WAN024DBA_at; Start 2; Stop 26
tgagaagcggtcgtgataaaaagat

SEQ ID NO: 150986 - DNA, 25 bp, Artificial
  probe
  misc_feature (1)..(25): SEQ ID NO: 1510; WAN024DBA_at; Start 57; Stop 81
tctggatatggatccgactatcgtt

SEQ ID NO: 150987 - DNA, 25 bp, Artificial
  probe
  misc_feature (1)..(25): SEQ ID NO: 1510; WAN024DBA_at; Start 150; Stop 174
tatcgcaccagtagcaactgactat

SEQ ID NO: 150988 - DNA, 25 bp, Artificial
  probe
  misc_feature (1)..(25): SEQ ID NO: 1510; WAN024DBA_at; Start 135; Stop 159
cattattttatggattatcgcacca

SEQ ID NO: 150989 - DNA, 25 bp, Artificial
  probe
  misc_feature (1)..(25): SEQ ID NO: 1510; WAN024DBA_at; Start 16; Stop 40
gataaaaagattgcgggtgtttgtg

SEQ ID NO: 150990 - DNA, 25 bp, Artificial
  probe
  misc_feature (1)..(25): SEQ ID NO: 1510; WAN024DBA_at; Start 5; Stop 29
gaagcggtcgtgataaaaagattgc

SEQ ID NO: 150991 - DNA, 25 bp, Artificial
  probe
  misc_feature (1)..(25): SEQ ID NO: 1510; WAN024DBA_at; Start 96; Stop 120
tgttcttacttgctgttacggagct

SEQ ID NO: 150992 - DNA, 25 bp, Artificial
  probe
  misc_feature (1)..(25): SEQ ID NO: 1510; WAN024DBA_at; Start 102; Stop 126
tacttgctgttacggagctggaatt

SEQ ID NO: 150993 - DNA, 25 bp, Artificial
  probe
  misc_feature (1)..(25): SEQ ID NO: 1510; WAN024DBA_at; Start 51; Stop 75
ccattatctggatatggatccgact

SEQ ID NO: 150994 - DNA, 25 bp, Artificial
  probe
  misc_feature (1)..(25): SEQ ID NO: 1510; WAN024DBA_at; Start 145; Stop 169
tggattatcgcaccagtagcaactg

SEQ ID NO: 150995 - DNA, 25 bp, Artificial
  probe
  misc_feature (1)..(25): SEQ ID NO: 1510; WAN024DBA_at; Start 147; Stop 171
gattatcgcaccagtagcaactgac

SEQ ID NO: 150996 - DNA, 25 bp, Artificial
  probe
  misc_feature (1)..(25): SEQ ID NO: 1510; WAN024DBA_at; Start 49; Stop 73
gcccattatctggatatggatccga

SEQ ID NO: 150997 - DNA, 25 bp, Artificial
  probe
  misc_feature (1)..(25): SEQ ID NO: 1510; WAN024DBA_at; Start 12; Stop 36
tcgtgataaaaagattgcgggtgtt

SEQ ID NO: 150998 - DNA, 25 bp, Artificial
  probe
  misc_feature (1)..(25): SEQ ID NO: 1510; WAN024DBA_at; Start 13; Stop 37
cgtgataaaaagattgcgggtgttt

SEQ ID NO: 150999 - DNA, 25 bp, Artificial
  probe
  misc_feature (1)..(25): SEQ ID NO: 1510; WAN024DBA_at; Start 94; Stop 118
ggtgttcttacttgctgttacggag

SEQ ID NO: 151000 - DNA, 25 bp, Artificial
  probe
  misc_feature (1)..(25): SEQ ID NO: 3969; WAN024DBB_at; Start 642; Stop 666
tatccgtctggctgaggaattgcct

SEQ ID NO: 151001 - DNA, 25 bp, Artificial
  probe
  misc_feature (1)..(25): SEQ ID NO: 3969; WAN024DBB_at; Start 939; Stop 963
aaattatcgggcgacagcgggtaga

SEQ ID NO: 151002 - DNA, 25 bp, Artificial
  probe
  misc_feature (1)..(25): SEQ ID NO: 3969; WAN024DBB_at; Start 281; Stop 305
ccttccaaaagaaacgctcagggag

SEQ ID NO: 151003 - DNA, 25 bp, Artificial
  probe
  misc_feature (1)..(25): SEQ ID NO: 3969; WAN024DBB_at; Start 886; Stop 910
gaggctcctattatgttgcgtgatt

SEQ ID NO: 151004 - DNA, 25 bp, Artificial
  probe
  misc_feature (1)..(25): SEQ ID NO: 3969; WAN024DBB_at; Start 523; Stop 547
tggcatcctctaccacaagaagagg

SEQ ID NO: 151005 - DNA, 25 bp, Artificial
  probe
  misc_feature (1)..(25): SEQ ID NO: 3969; WAN024DBB_at; Start 134; Stop 158
caggacagggagtttcaggtgctta

SEQ ID NO: 151006 - DNA, 25 bp, Artificial
  probe
  misc_feature (1)..(25): SEQ ID NO: 3969; WAN024DBB_at; Start 669; Stop 693
gattacctttatctgggctggtggc

SEQ ID NO: 151007 - DNA, 25 bp, Artificial
  probe
  misc_feature (1)..(25): SEQ ID NO: 3969; WAN024DBB_at; Start 181; Stop 205
caccgtgctgccaaggaccaattga

SEQ ID NO: 151008 - DNA, 25 bp, Artificial
  probe
  misc_feature (1)..(25): SEQ ID NO: 3969; WAN024DBB_at; Start 403; Stop 427
ttttacaaccggatggagcacttgg

SEQ ID NO: 151009 - DNA, 25 bp, Artificial
  probe
  misc_feature (1)..(25): SEQ ID NO: 3969; WAN024DBB_at; Start 554; Stop 578
gactgcgcacagatcttggtcttag

SEQ ID NO: 151010 - DNA, 25 bp, Artificial
  probe
  misc_feature (1)..(25): SEQ ID NO: 3969; WAN024DBB_at; Start 773; Stop 797
caggcattgtatcgccagagcggat

SEQ ID NO: 151011 - DNA, 25 bp, Artificial
  probe
  misc_feature (1)..(25): SEQ ID NO: 3969; WAN024DBB_at; Start 856; Stop 880
cctatgactattttagaagctgcga

SEQ ID NO: 151012 - DNA, 25 bp, Artificial
  probe
  misc_feature (1)..(25): SEQ ID NO: 3969; WAN024DBB_at; Start 118; Stop 142
tcaagtgagaaagtagcaggacagg

SEQ ID NO: 151013 - DNA, 25 bp, Artificial
  probe
  misc_feature (1)..(25): SEQ ID NO: 3969; WAN024DBB_at; Start 295; Stop 319
cgctcagggagaaagattggctatg

SEQ ID NO: 151014 - DNA, 25 bp, Artificial
  probe
  misc_feature (1)..(25): SEQ ID NO: 3969; WAN024DBB_at; Start 163; Stop 187
gaattagttcgtcttcttcaccgtg

SEQ ID NO: 151015 - DNA, 25 bp, Artificial
  probe
  misc_feature (1)..(25): SEQ ID NO: 3969; WAN024DBB_at; Start 463; Stop 487
gcagctggtattccacgtgaaaaag

SEQ ID NO: 151016 - DNA, 25 bp, Artificial
  probe
  misc_feature (1)..(25): SEQ ID NO: 3969; WAN024DBB_at; Start 210; Stop 234
tacagaaaatcttccaatcgaggca

SEQ ID NO: 151017 - DNA, 25 bp, Artificial
  probe
  misc_feature (1)..(25): SEQ ID NO: 3969; WAN024DBB_at; Start 599; Stop 623
taggtgctgggcaagttcagaaacg

SEQ ID NO: 151018 - DNA, 25 bp, Artificial
  probe
  misc_feature (1)..(25): SEQ ID NO: 3969; WAN024DBB_at; Start 368; Stop 392
tcttaaagggaattgtgaaacgcta

SEQ ID NO: 151019 - DNA, 25 bp, Artificial
  probe
  misc_feature (1)..(25): SEQ ID NO: 3969; WAN024DBB_at; Start 1065; Stop 1089
gcatctgttacaaatctggttggac

SEQ ID NO: 151020 - DNA, 25 bp, Artificial
  probe
  misc_feature (1)..(25): SEQ ID NO: 3969; WAN024DBB_at; Start 871; Stop 895
gaagctgcgagttgtgaggctccta

SEQ ID NO: 151021 - DNA, 25 bp, Artificial
  probe
  misc_feature (1)..(25): SEQ ID NO: 3969; WAN024DBB_at; Start 815; Stop 839
tagcggatcttttcttgttgcctag

SEQ ID NO: 151022 - DNA, 25 bp, Artificial
  probe
  misc_feature (1)..(25): SEQ ID NO: 3969; WAN024DBB_at; Start 792; Stop 816
gcggatgcgcgaattgtatgctcta

SEQ ID NO: 151023 - DNA, 25 bp, Artificial
  probe
  misc_feature (1)..(25): SEQ ID NO: 3969; WAN024DBB_at; Start 149; Stop 173
caggtgcttaccgtgaattagttcg

SEQ ID NO: 151024 - DNA, 25 bp, Artificial
  probe
  misc_feature (1)..(25): SEQ ID NO: 3969; WAN024DBB_at; Start 506; Stop 530
ttgtcaacaaggaaaaatggcatcc

SEQ ID NO: 151025 - DNA, 25 bp, Artificial
  probe
  misc_feature (1)..(25): SEQ ID NO: 3969; WAN024DBB_at; Start 1090; Stop 1114
ttttatgagaaacaagccgctttag

SEQ ID NO: 151026 - DNA, 25 bp, Artificial
  probe
  misc_feature (1)..(25): SEQ ID NO: 3969; WAN024DBB_at; Start 447; Stop 471
tattgaggatttggtagcagctggt

SEQ ID NO: 151027 - DNA, 25 bp, Artificial
  probe
  misc_feature (1)..(25): SEQ ID NO: 3969; WAN024DBB_at; Start 316; Stop 340
tatgtgcatttcttgccagctacac

SEQ ID NO: 151028 - DNA, 25 bp, Artificial
  probe
  misc_feature (1)..(25): SEQ ID NO: 3969; WAN024DBB_at; Start 985; Stop 1009
ttggaatatcaagcaaatcctgctg

SEQ ID NO: 151029 - DNA, 25 bp, Artificial
  probe
  misc_feature (1)..(25): SEQ ID NO: 3969; WAN024DBB_at; Start 582; Stop 606
caatcagtttatcgtagtaggtgct

SEQ ID NO: 151030 - DNA, 25 bp, Artificial
  probe
  misc_feature (1)..(25): SEQ ID NO: 3969; WAN024DBB_at; Start 223; Stop 247
ccaatcgaggcagatgtgactcact

SEQ ID NO: 151031 - DNA, 25 bp, Artificial
  probe
  misc_feature (1)..(25): SEQ ID NO: 3969; WAN024DBB_at; Start 1045; Stop 1069
tccagagagtattctgaagagcatc

SEQ ID NO: 151032 - DNA, 25 bp, Artificial
  probe
  misc_feature (1)..(25): SEQ ID NO: 3969; WAN024DBB_at; Start 685; Stop 709
gctggtggcttctcttttggtggta

SEQ ID NO: 151033 - DNA, 25 bp, Artificial
  probe
  misc_feature (1)..(25): SEQ ID NO: 3969; WAN024DBB_at; Start 418; Stop 442
gagcacttggttgtggtcaatccta

SEQ ID NO: 151034 - DNA, 25 bp, Artificial
  probe
  misc_feature (1)..(25): SEQ ID NO: 4037; WAN024DBC_at; Start 223; Stop 247
gaccttttgacagaccagatttatg

SEQ ID NO: 151035 - DNA, 25 bp, Artificial
  probe
  misc_feature (1)..(25): SEQ ID NO: 4037; WAN024DBC_at; Start 98; Stop 122
tcatcgaccctgagttgggaatcga

SEQ ID NO: 151036 - DNA, 25 bp, Artificial
  probe
  misc_feature (1)..(25): SEQ ID NO: 4037; WAN024DBC_at; Start 288; Stop 312
taaattagtctggtatccagcctgg

SEQ ID NO: 151037 - DNA, 25 bp, Artificial
  probe
  misc_feature (1)..(25): SEQ ID NO: 4037; WAN024DBC_at; Start 319; Stop 343
gaaaaaatgagtcgctatgcccgca

SEQ ID NO: 151038 - DNA, 25 bp, Artificial
  probe
  misc_feature (1)..(25): SEQ ID NO: 4037; WAN024DBC_at; Start 93; Stop 117
agaagtcatcgaccctgagttggga

SEQ ID NO: 151039 - DNA, 25 bp, Artificial
  probe
  misc_feature (1)..(25): SEQ ID NO: 4037; WAN024DBC_at; Start 165; Stop 189
tgacacagggcaaacagagattgac

SEQ ID NO: 151040 - DNA, 25 bp, Artificial
  probe
  misc_feature (1)..(25): SEQ ID NO: 4037; WAN024DBC_at; Start 215; Stop 239
ccttagcagaccttttgacagacca

SEQ ID NO: 151041 - DNA, 25 bp, Artificial
  probe
  misc_feature (1)..(25): SEQ ID NO: 4037; WAN024DBC_at; Start 8; Stop 32
tattgaagactaagagtgaggaaaa

SEQ ID NO: 151042 - DNA, 25 bp, Artificial
  probe
  misc_feature (1)..(25): SEQ ID NO: 4037; WAN024DBC_at; Start 202; Stop 226
actatgggttgtcccttagcagacc

SEQ ID NO: 151043 - DNA, 25 bp, Artificial
  probe
  misc_feature (1)..(25): SEQ ID NO: 4037; WAN024DBC_at; Start 305; Stop 329
cagcctggacagttgaaaaaatgag

SEQ ID NO: 151044 - DNA, 25 bp, Artificial
  probe
  misc_feature (1)..(25): SEQ ID NO: 4037; WAN024DBC_at; Start 24; Stop 48
tgaggaaaatatggcttatacagaa

SEQ ID NO: 151045 - DNA, 25 bp, Artificial
  probe
  misc_feature (1)..(25): SEQ ID NO: 4037; WAN024DBC_at; Start 179; Stop 203
cagagattgacatgactttgacaac

SEQ ID NO: 151046 - DNA, 25 bp, Artificial
  probe
  misc_feature (1)..(25): SEQ ID NO: 4037; WAN024DBC_at; Start 148; Stop 172
gagattcgttttgacggtgacacag

SEQ ID NO: 151047 - DNA, 25 bp, Artificial
  probe
  misc_feature (1)..(25): SEQ ID NO: 4037; WAN024DBC_at; Start 185; Stop 209
ttgacatgactttgacaactatggg

SEQ ID NO: 151048 - DNA, 25 bp, Artificial
  probe
  misc_feature (1)..(25): SEQ ID NO: 4037; WAN024DBC_at; Start 332; Stop 356
gctatgcccgcattgccctaggcat

SEQ ID NO: 151049 - DNA, 25 bp, Artificial
  probe
  misc_feature (1)..(25): SEQ ID NO: 4037; WAN024DBC_at; Start 237; Stop 261
ccagatttatgatgctatgatagag

SEQ ID NO: 151050 - DNA, 25 bp, Artificial
  probe
  misc_feature (1)..(25): SEQ ID NO: 4037; WAN024DBC_at; Start 292; Stop 316
ttagtctggtatccagcctggacag

SEQ ID NO: 151051 - DNA, 25 bp, Artificial
  probe
  misc_feature (1)..(25): SEQ ID NO: 4037; WAN024DBC_at; Start 275; Stop 299
cggatactgaggttaaattagtctg

SEQ ID NO: 151052 - DNA, 25 bp, Artificial
  probe
  misc_feature (1)..(25): SEQ ID NO: 4037; WAN024DBC_at; Start 339; Stop 363
ccgcattgccctaggcattaagtaa

SEQ ID NO: 151053 - DNA, 25 bp, Artificial
  probe
  misc_feature (1)..(25): SEQ ID NO: 4037; WAN024DBC_at; Start 105; Stop 129
ccctgagttgggaatcgatattgtc

SEQ ID NO: 151054 - DNA, 25 bp, Artificial
  probe
  misc_feature (1)..(25): SEQ ID NO: 4037; WAN024DBC_at; Start 140; Stop 164
tgatctatgagattcgttttgacgg

SEQ ID NO: 151055 - DNA, 25 bp, Artificial
  probe
  misc_feature (1)..(25): SEQ ID NO: 4037; WAN024DBC_at; Start 192; Stop 216
gactttgacaactatgggttgtccc

SEQ ID NO: 151056 - DNA, 25 bp, Artificial
  probe
  misc_feature (1)..(25): SEQ ID NO: 4037; WAN024DBC_at; Start 153; Stop 177
tcgttttgacggtgacacagggcaa

SEQ ID NO: 151057 - DNA, 25 bp, Artificial
  probe
  misc_feature (1)..(25): SEQ ID NO: 4037; WAN024DBC_at; Start 218; Stop 242
tagcagaccttttgacagaccagat

SEQ ID NO: 151058 - DNA, 25 bp, Artificial
  probe
  misc_feature (1)..(25): SEQ ID NO: 4037; WAN024DBC_at; Start 301; Stop 325
tatccagcctggacagttgaaaaaa

SEQ ID NO: 151059 - DNA, 25 bp, Artificial
  probe
  misc_feature (1)..(25): SEQ ID NO: 4037; WAN024DBC_at; Start 344; Stop 368
ttgccctaggcattaagtaactaat

SEQ ID NO: 151060 - DNA, 25 bp, Artificial
  probe
  misc_feature (1)..(25): SEQ ID NO: 4037; WAN024DBC_at; Start 113; Stop 137
tgggaatcgatattgtcaatcttgg

SEQ ID NO: 151061 - DNA, 25 bp, Artificial
  probe
  misc_feature (1)..(25): SEQ ID NO: 4037; WAN024DBC_at; Start 158; Stop 182
ttgacggtgacacagggcaaacaga

SEQ ID NO: 151062 - DNA, 25 bp, Artificial
  probe
  misc_feature (1)..(25): SEQ ID NO: 4037; WAN024DBC_at; Start 170; Stop 194
cagggcaaacagagattgacatgac

SEQ ID NO: 151063 - DNA, 25 bp, Artificial
  probe
  misc_feature (1)..(25): SEQ ID NO: 4037; WAN024DBC_at; Start 324; Stop 348
aatgagtcgctatgcccgcattgcc

SEQ ID NO: 151064 - DNA, 25 bp, Artificial
  probe
  misc_feature (1)..(25): SEQ ID NO: 4037; WAN024DBC_at; Start 246; Stop 270
tgatgctatgatagaggttccagaa

SEQ ID NO: 151065 - DNA, 25 bp, Artificial
  probe
  misc_feature (1)..(25): SEQ ID NO: 4037; WAN024DBC_at; Start 208; Stop 232
ggttgtcccttagcagaccttttga

SEQ ID NO: 151066 - DNA, 25 bp, Artificial
  probe
  misc_feature (1)..(25): SEQ ID NO: 4037; WAN024DBC_at; Start 231; Stop 255
gacagaccagatttatgatgctatg

SEQ ID NO: 151067 - DNA, 25 bp, Artificial
  probe
  misc_feature (1)..(25): SEQ ID NO: 4037; WAN024DBC_at; Start 127; Stop 151
gtcaatcttggtttgatctatgaga

SEQ ID NO: 151068 - DNA, 25 bp, Artificial
  probe
  misc_feature (1)..(25): SEQ ID NO: 7388; WAN024DBD_at; Start 477; Stop 501
taagctacttgggatacatggtgtt

SEQ ID NO: 151069 - DNA, 25 bp, Artificial
  probe
  misc_feature (1)..(25): SEQ ID NO: 7388; WAN024DBD_at; Start 1077; Stop 1101
gccagttgggtctggatttttctca

SEQ ID NO: 151070 - DNA, 25 bp, Artificial
  probe
  misc_feature (1)..(25): SEQ ID NO: 7388; WAN024DBD_at; Start 128; Stop 152
tggttgcagtatatcagtcactaga

SEQ ID NO: 151071 - DNA, 25 bp, Artificial
  probe
  misc_feature (1)..(25): SEQ ID NO: 7388; WAN024DBD_at; Start 513; Stop 537
tggattctcatttctaattgctgca

SEQ ID NO: 151072 - DNA, 25 bp, Artificial
  probe
  misc_feature (1)..(25): SEQ ID NO: 7388; WAN024DBD_at; Start 570; Stop 594
cgaagtggtcacaaaggataaaatg

SEQ ID NO: 151073 - DNA, 25 bp, Artificial
  probe
  misc_feature (1)..(25): SEQ ID NO: 7388; WAN024DBD_at; Start 857; Stop 881
taatggtcttcttatcatgttcagg

SEQ ID NO: 151074 - DNA, 25 bp, Artificial
  probe
  misc_feature (1)..(25): SEQ ID NO: 7388; WAN024DBD_at; Start 885; Stop 909
gatgttaatgctatcaacgccactc

SEQ ID NO: 151075 - DNA, 25 bp, Artificial
  probe
  misc_feature (1)..(25): SEQ ID NO: 7388; WAN024DBD_at; Start 76; Stop 100
gactttgcgaataatacctttcttg

SEQ ID NO: 151076 - DNA, 25 bp, Artificial
  probe
  misc_feature (1)..(25): SEQ ID NO: 7388; WAN024DBD_at; Start 825; Stop 849
tgttataaataaaaccttgtcaagc

SEQ ID NO: 151077 - DNA, 25 bp, Artificial
  probe
  misc_feature (1)..(25): SEQ ID NO: 7388; WAN024DBD_at; Start 25; Stop 49
gctttccttattgtaagtagaggca

SEQ ID NO: 151078 - DNA, 25 bp, Artificial
  probe
  misc_feature (1)..(25): SEQ ID NO: 7388; WAN024DBD_at; Start 286; Stop 310
cagtggatggtctttgcaattgtca

SEQ ID NO: 151079 - DNA, 25 bp, Artificial
  probe
  misc_feature (1)..(25): SEQ ID NO: 7388; WAN024DBD_at; Start 1012; Stop 1036
gaagttgatactgagtttctcggta

SEQ ID NO: 151080 - DNA, 25 bp, Artificial
  probe
  misc_feature (1)..(25): SEQ ID NO: 7388; WAN024DBD_at; Start 40; Stop 64
agtagaggcatatctcgaattggag

SEQ ID NO: 151081 - DNA, 25 bp, Artificial
  probe
  misc_feature (1)..(25): SEQ ID NO: 7388; WAN024DBD_at; Start 273; Stop 297
catatcacaagagcagtggatggtc

SEQ ID NO: 151082 - DNA, 25 bp, Artificial
  probe
  misc_feature (1)..(25): SEQ ID NO: 7388; WAN024DBD_at; Start 740; Stop 764
tgtttggagaaatttcagatgggct

SEQ ID NO: 151083 - DNA, 25 bp, Artificial
  probe
  misc_feature (1)..(25): SEQ ID NO: 7388; WAN024DBD_at; Start 192; Stop 216
cattgcagatagtttcaagcggaaa

SEQ ID NO: 151084 - DNA, 25 bp, Artificial
  probe
  misc_feature (1)..(25): SEQ ID NO: 7388; WAN024DBD_at; Start 175; Stop 199
aatttatttggtggagtcattgcag

SEQ ID NO: 151085 - DNA, 25 bp, Artificial
  probe
  misc_feature (1)..(25): SEQ ID NO: 7388; WAN024DBD_at; Start 498; Stop 522
tgttttactattggatggattctca

SEQ ID NO: 151086 - DNA, 25 bp, Artificial
  probe
  misc_feature (1)..(25): SEQ ID NO: 7388; WAN024DBD_at; Start 440; Stop 464
ttaaagtaacaataccaatggtagc

SEQ ID NO: 151087 - DNA, 25 bp, Artificial
  probe
  misc_feature (1)..(25): SEQ ID NO: 7388; WAN024DBD_at; Start 333; Stop 357
tatgagtgctttttctggaccgtcc

SEQ ID NO: 151088 - DNA, 25 bp, Artificial
  probe
  misc_feature (1)..(25): SEQ ID NO: 7388; WAN024DBD_at; Start 1029; Stop 1053
tctcggtagagtctttggaatcatc

SEQ ID NO: 151089 - DNA, 25 bp, Artificial
  probe
  misc_feature (1)..(25): SEQ ID NO: 7388; WAN024DBD_at; Start 555; Stop 579
tgtacccgttaatgacgaagtggtc

SEQ ID NO: 151090 - DNA, 25 bp, Artificial
  probe
  misc_feature (1)..(25): SEQ ID NO: 7388; WAN024DBD_at; Start 146; Stop 170
cactagaaagtgtgataggtgttct

SEQ ID NO: 151091 - DNA, 25 bp, Artificial
  probe
  misc_feature (1)..(25): SEQ ID NO: 7388; WAN024DBD_at; Start 930; Stop 954
cattattctagccttttctccggca

SEQ ID NO: 151092 - DNA, 25 bp, Artificial
  probe
  misc_feature (1)..(25): SEQ ID NO: 7388; WAN024DBD_at; Start 769; Stop 793
ggtgtttttctaactgcggaagcaa

SEQ ID NO: 151093 - DNA, 25 bp, Artificial
  probe
  misc_feature (1)..(25): SEQ ID NO: 7388; WAN024DBD_at; Start 594; Stop 618
gacaataggaggagttttaaatgac

SEQ ID NO: 151094 - DNA, 25 bp, Artificial
  probe
  misc_feature (1)..(25): SEQ ID NO: 7388; WAN024DBD_at; Start 412; Stop 436
tcattgctagagataacaagtacta

SEQ ID NO: 151095 - DNA, 25 bp, Artificial
  probe
  misc_feature (1)..(25): SEQ ID NO: 7388; WAN024DBD_at; Start 61; Stop 85
ggagatattatgtttgactttgcga

SEQ ID NO: 151096 - DNA, 25 bp, Artificial
  probe
  misc_feature (1)..(25): SEQ ID NO: 7388; WAN024DBD_at; Start 781; Stop 805
actgcggaagcaattggaggattta

SEQ ID NO: 151097 - DNA, 25 bp, Artificial
  probe
  misc_feature (1)..(25): SEQ ID NO: 7388; WAN024DBD_at; Start 754; Stop 778
tcagatgggctttatggtgtttttc

SEQ ID NO: 151098 - DNA, 25 bp, Artificial
  probe
  misc_feature (1)..(25): SEQ ID NO: 7388; WAN024DBD_at; Start 90; Stop 114
tacctttcttgcaggattaaatcca

SEQ ID NO: 151099 - DNA, 25 bp, Artificial
  probe
  misc_feature (1)..(25): SEQ ID NO: 7388; WAN024DBD_at; Start 112; Stop 136
ccaacatctttatcattggttgcag

SEQ ID NO: 151100 - DNA, 25 bp, Artificial
  probe
  misc_feature (1)..(25): SEQ ID NO: 7388; WAN024DBD_at; Start 348; Stop 372
tggaccgtcctataaagcatttaca

SEQ ID NO: 151101 - DNA, 25 bp, Artificial
  probe
  misc_feature (1)..(25): SEQ ID NO: 7388; WAN024DBD_at; Start 538; Stop 562
tcactgatttcctttattgtacccg

SEQ ID NO: 151102 - DNA, 25 bp, Artificial
  probe
  misc_feature (1)..(25): SEQ ID NO: 7583; WAN024DBE_at; Start 504; Stop 528
gttccgcaacgtcattattttagcc

SEQ ID NO: 151103 - DNA, 25 bp, Artificial
  probe
  misc_feature (1)..(25): SEQ ID NO: 7583; WAN024DBE_at; Start 412; Stop 436
tttatcaataaatccttgtcaagca

SEQ ID NO: 151104 - DNA, 25 bp, Artificial
  probe
  misc_feature (1)..(25): SEQ ID NO: 7583; WAN024DBE_at; Start 468; Stop 492
tttgatgttaatgctaacagcgccg

SEQ ID NO: 151105 - DNA, 25 bp, Artificial
  probe
  misc_feature (1)..(25): SEQ ID NO: 7583; WAN024DBE_at; Start 104; Stop 128
tatcgtttttaattgctgcctcact

SEQ ID NO: 151106 - DNA, 25 bp, Artificial
  probe
  misc_feature (1)..(25): SEQ ID NO: 7583; WAN024DBE_at; Start 491; Stop 515
cgatctattatatgttccgcaacgt

SEQ ID NO: 151107 - DNA, 25 bp, Artificial
  probe
  misc_feature (1)..(25): SEQ ID NO: 7583; WAN024DBE_at; Start 27; Stop 51
taaagtaacaattcctatgattgca

SEQ ID NO: 151108 - DNA, 25 bp, Artificial
  probe
  misc_feature (1)..(25): SEQ ID NO: 7583; WAN024DBE_at; Start 393; Stop 417
tggtgcgatattaagtggatttatc

SEQ ID NO: 151109 - DNA, 25 bp, Artificial
  probe
  misc_feature (1)..(25): SEQ ID NO: 7583; WAN024DBE_at; Start 11; Stop 35
caacaagtactgtgattaaagtaac

SEQ ID NO: 151110 - DNA, 25 bp, Artificial
  probe
  misc_feature (1)..(25): SEQ ID NO: 7583; WAN024DBE_at; Start 118; Stop 142
gctgcctcactaattttcttcatta

SEQ ID NO: 151111 - DNA, 25 bp, Artificial
  probe
  misc_feature (1)..(25): SEQ ID NO: 7583; WAN024DBE_at; Start 212; Stop 236
taggatttacgtatgtatatagtca

SEQ ID NO: 151112 - DNA, 25 bp, Artificial
  probe
  misc_feature (1)..(25): SEQ ID NO: 7583; WAN024DBE_at; Start 174; Stop 198
gaatatgacgataagaggaatcttt

SEQ ID NO: 151113 - DNA, 25 bp, Artificial
  probe
  misc_feature (1)..(25): SEQ ID NO: 7583; WAN024DBE_at; Start 1; Stop 25
ttgctagaaacaacaagtactgtga

SEQ ID NO: 151114 - DNA, 25 bp, Artificial
  probe
  misc_feature (1)..(25): SEQ ID NO: 7583; WAN024DBE_at; Start 306; Stop 330
gctgccatacagtaatcaaatgttt

SEQ ID NO: 151115 - DNA, 25 bp, Artificial
  probe
  misc_feature (1)..(25): SEQ ID NO: 7583; WAN024DBE_at; Start 326; Stop 350
tgtttggaagtatttcaagtgggct

SEQ ID NO: 151116 - DNA, 25 bp, Artificial
  probe
  misc_feature (1)..(25): SEQ ID NO: 7583; WAN024DBE_at; Start 363; Stop 387
tttaacagccgaagcgattggtggc

SEQ ID NO: 151117 - DNA, 25 bp, Artificial
  probe
  misc_feature (1)..(25): SEQ ID NO: 7583; WAN024DBE_at; Start 245; Stop 269
ttctcactataattgccctttcagc

SEQ ID NO: 151118 - DNA, 25 bp, Artificial
  probe
  misc_feature (1)..(25): SEQ ID NO: 7583; WAN024DBE_at; Start 144; Stop 168
tcctgtaaatgaggaggtggataca

SEQ ID NO: 151119 - DNA, 25 bp, Artificial
  probe
  misc_feature (1)..(25): SEQ ID NO: 7583; WAN024DBE_at; Start 615; Stop 639
tcttggcagagtatttggaatcatc

SEQ ID NO: 151120 - DNA, 25 bp, Artificial
  probe
  misc_feature (1)..(25): SEQ ID NO: 7583; WAN024DBE_at; Start 350; Stop 374
tatatggaacctttttaacagccga

SEQ ID NO: 151121 - DNA, 25 bp, Artificial
  probe
  misc_feature (1)..(25): SEQ ID NO: 7583; WAN024DBE_at; Start 63; Stop 87
taagttacttggaatacatggtgtg

SEQ ID NO: 151122 - DNA, 25 bp, Artificial
  probe
  misc_feature (1)..(25): SEQ ID NO: 7583; WAN024DBE_at; Start 588; Stop 612
tgttcaaagagacgtagataatgag

SEQ ID NO: 151123 - DNA, 25 bp, Artificial
  probe
  misc_feature (1)..(25): SEQ ID NO: 7583; WAN024DBE_at; Start 227; Stop 251
tatatagtcataaacaaattctcac

SEQ ID NO: 151124 - DNA, 25 bp, Artificial
  probe
  misc_feature (1)..(25): SEQ ID NO: 7583; WAN024DBE_at; Start 340; Stop 364
tcaagtgggctatatggaacctttt

SEQ ID NO: 151125 - DNA, 25 bp, Artificial
  probe
  misc_feature (1)..(25): SEQ ID NO: 7583; WAN024DBE_at; Start 480; Stop 504
gctaacagcgccgatctattatatg

SEQ ID NO: 151126 - DNA, 25 bp, Artificial
  probe
  misc_feature (1)..(25): SEQ ID NO: 7583; WAN024DBE_at; Start 255; Stop 279
aattgccctttcagcacttgttaac

SEQ ID NO: 151127 - DNA, 25 bp, Artificial
  probe
  misc_feature (1)..(25): SEQ ID NO: 7583; WAN024DBE_at; Start 519; Stop 543
tattttagcctttactccagcatta

SEQ ID NO: 151128 - DNA, 25 bp, Artificial
  probe
  misc_feature (1)..(25): SEQ ID NO: 7583; WAN024DBE_at; Start 378; Stop 402
gattggtggctttattggtgcgata

SEQ ID NO: 151129 - DNA, 25 bp, Artificial
  probe
  misc_feature (1)..(25): SEQ ID NO: 7583; WAN024DBE_at; Start 79; Stop 103
catggtgtgttattactagatggat

SEQ ID NO: 151130 - DNA, 25 bp, Artificial
  probe
  misc_feature (1)..(25): SEQ ID NO: 7583; WAN024DBE_at; Start 292; Stop 316
gcctataatttgttgctgccataca

SEQ ID NO: 151131 - DNA, 25 bp, Artificial
  probe
  misc_feature (1)..(25): SEQ ID NO: 7583; WAN024DBE_at; Start 273; Stop 297
tgttaactttttcctagcagcctat

SEQ ID NO: 151132 - DNA, 25 bp, Artificial
  probe
  misc_feature (1)..(25): SEQ ID NO: 7583; WAN024DBE_at; Start 447; Stop 471
gctctttttagcatattcaggtttg

SEQ ID NO: 151133 - DNA, 25 bp, Artificial
  probe
  misc_feature (1)..(25): SEQ ID NO: 7583; WAN024DBE_at; Start 654; Stop 678
tctttttatgccactaggtactgtt

SEQ ID NO: 151134 - DNA, 25 bp, Artificial
  probe
  misc_feature (1)..(25): SEQ ID NO: 7583; WAN024DBE_at; Start 159; Stop 183
ggtggatacaaaagagaatatgacg

SEQ ID NO: 151135 - DNA, 25 bp, Artificial
  probe
  misc_feature (1)..(25): SEQ ID NO: 7583; WAN024DBE_at; Start 604; Stop 628
gataatgagtttcttggcagagtat

SEQ ID NO: 151136 - DNA, 25 bp, Artificial
  probe
  misc_feature (1)..(25): SEQ ID NO: 6324; WAN024DBF_at; Start 602; Stop 626
catatcacgcttgtttagtaaaggc

SEQ ID NO: 151137 - DNA, 25 bp, Artificial
  probe
  misc_feature (1)..(25): SEQ ID NO: 6324; WAN024DBF_at; Start 1051; Stop 1075
gaaattcaagaaataacgactgttc

SEQ ID NO: 151138 - DNA, 25 bp, Artificial
  probe
  misc_feature (1)..(25): SEQ ID NO: 6324; WAN024DBF_at; Start 855; Stop 879
taaatctgatttaaagcagtctgac

SEQ ID NO: 151139 - DNA, 25 bp, Artificial
  probe
  misc_feature (1)..(25): SEQ ID NO: 6324; WAN024DBF_at; Start 79; Stop 103
tctacagcttaccactttgcattgg

SEQ ID NO: 151140 - DNA, 25 bp, Artificial
  probe
  misc_feature (1)..(25): SEQ ID NO: 6324; WAN024DBF_at; Start 350; Stop 374
taacaacagtatctgaacaactagt

SEQ ID NO: 151141 - DNA, 25 bp, Artificial
  probe
  misc_feature (1)..(25): SEQ ID NO: 6324; WAN024DBF_at; Start 828; Stop 852
ggagttacctatgctgagggagtca

SEQ ID NO: 151142 - DNA, 25 bp, Artificial
  probe
  misc_feature (1)..(25): SEQ ID NO: 6324; WAN024DBF_at; Start 840; Stop 864
gctgagggagtcagttaaatctgat

SEQ ID NO: 151143 - DNA, 25 bp, Artificial
  probe
  misc_feature (1)..(25): SEQ ID NO: 6324; WAN024DBF_at; Start 250; Stop 274
catgctgatacatattctgatgaga

SEQ ID NO: 151144 - DNA, 25 bp, Artificial
  probe
  misc_feature (1)..(25): SEQ ID NO: 6324; WAN024DBF_at; Start 674; Stop 698
tgatgagagcatttccaagatataa

SEQ ID NO: 151145 - DNA, 25 bp, Artificial
  probe
  misc_feature (1)..(25): SEQ ID NO: 6324; WAN024DBF_at; Start 150; Stop 174
gaatttacttgaaggaaatctgcca

SEQ ID NO: 151146 - DNA, 25 bp, Artificial
  probe
  misc_feature (1)..(25): SEQ ID NO: 6324; WAN024DBF_at; Start 62; Stop 86
caggatatataggtctatctacagc

SEQ ID NO: 151147 - DNA, 25 bp, Artificial
  probe
  misc_feature (1)..(25): SEQ ID NO: 6324; WAN024DBF_at; Start 742; Stop 766
ccttattatcatccgtcaattggaa

SEQ ID NO: 151148 - DNA, 25 bp, Artificial
  probe
  misc_feature (1)..(25): SEQ ID NO: 6324; WAN024DBF_at; Start 757; Stop 781
tcaattggaattggagggtactgtc

SEQ ID NO: 151149 - DNA, 25 bp, Artificial
  probe
  misc_feature (1)..(25): SEQ ID NO: 6324; WAN024DBF_at; Start 1129; Stop 1153
gctacctcacataaaagctatgatg

SEQ ID NO: 151150 - DNA, 25 bp, Artificial
  probe
  misc_feature (1)..(25): SEQ ID NO: 6324; WAN024DBF_at; Start 902; Stop 926
gctataactgtcaaaaagtaggagt

SEQ ID NO: 151151 - DNA, 25 bp, Artificial
  probe
  misc_feature (1)..(25): SEQ ID NO: 6324; WAN024DBF_at; Start 465; Stop 489
gagagactggtttttagagactgga

SEQ ID NO: 151152 - DNA, 25 bp, Artificial
  probe
  misc_feature (1)..(25): SEQ ID NO: 6324; WAN024DBF_at; Start 624; Stop 648
ggcggttgaaaattctatacgctat

SEQ ID NO: 151153 - DNA, 25 bp, Artificial
  probe
  misc_feature (1)..(25): SEQ ID NO: 6324; WAN024DBF_at; Start 501; Stop 525
aacacttcctcgagttattggtaca

SEQ ID NO: 151154 - DNA, 25 bp, Artificial
  probe
  misc_feature (1)..(25): SEQ ID NO: 6324; WAN024DBF_at; Start 940; Stop 964
tatgctccggagactaaaatttgga

SEQ ID NO: 151155 - DNA, 25 bp, Artificial
  probe
  misc_feature (1)..(25): SEQ ID NO: 6324; WAN024DBF_at; Start 1114; Stop 1138
gatatactggtaattgctacctcac

SEQ ID NO: 151156 - DNA, 25 bp, Artificial
  probe
  misc_feature (1)..(25): SEQ ID NO: 6324; WAN024DBF_at; Start 587; Stop 611
ttgaggtaactgatgcatatcacgc

SEQ ID NO: 151157 - DNA, 25 bp, Artificial
  probe
  misc_feature (1)..(25): SEQ ID NO: 6324; WAN024DBF_at; Start 659; Stop 683
tatttgctaatgaaatgatgagagc

SEQ ID NO: 151158 - DNA, 25 bp, Artificial
  probe
  misc_feature (1)..(25): SEQ ID NO: 6324; WAN024DBF_at; Start 1027; Stop 1051
aatgatccatatttctctagtgaag

SEQ ID NO: 151159 - DNA, 25 bp, Artificial
  probe
  misc_feature (1)..(25): SEQ ID NO: 6324; WAN024DBF_at; Start 97; Stop 121
gcattggtaggtttccgcgtcaaaa

SEQ ID NO: 151160 - DNA, 25 bp, Artificial
  probe
  misc_feature (1)..(25): SEQ ID NO: 6324; WAN024DBF_at; Start 233; Stop 257
taccagaagttgtagaacatgctga

SEQ ID NO: 151161 - DNA, 25 bp, Artificial
  probe
  misc_feature (1)..(25): SEQ ID NO: 6324; WAN024DBF_at; Start 812; Stop 836
cagtcaatgatagtgaggagttacc

SEQ ID NO: 151162 - DNA, 25 bp, Artificial
  probe
  misc_feature (1)..(25): SEQ ID NO: 6324; WAN024DBF_at; Start 926; Stop 950
tattaggtctaagttatgctccgga

SEQ ID NO: 151163 - DNA, 25 bp, Artificial
  probe
  misc_feature (1)..(25): SEQ ID NO: 6324; WAN024DBF_at; Start 570; Stop 594
gctttctgatgttgtgattgaggta

SEQ ID NO: 151164 - DNA, 25 bp, Artificial
  probe
  misc_feature (1)..(25): SEQ ID NO: 6324; WAN024DBF_at; Start 302; Stop 326
gaaatggagtacctattagtagacc

SEQ ID NO: 151165 - DNA, 25 bp, Artificial
  probe
  misc_feature (1)..(25): SEQ ID NO: 6324; WAN024DBF_at; Start 520; Stop 544
ggtacattgggatcaaattatcgta

SEQ ID NO: 151166 - DNA, 25 bp, Artificial
  probe
  misc_feature (1)..(25): SEQ ID NO: 6324; WAN024DBF_at; Start 793; Stop 817
cctaaatatattttggatgcagtca

SEQ ID NO: 151167 - DNA, 25 bp, Artificial
  probe
  misc_feature (1)..(25): SEQ ID NO: 6324; WAN024DBF_at; Start 445; Stop 469
tatctaacagttgctcctaggagag

SEQ ID NO: 151168 - DNA, 25 bp, Artificial
  probe
  misc_feature (1)..(25): SEQ ID NO: 6324; WAN024DBF_at; Start 714; Stop 738
tgatgctgcttcaactaagtggaat

SEQ ID NO: 151169 - DNA, 25 bp, Artificial
  probe
  misc_feature (1)..(25): SEQ ID NO: 6324; WAN024DBF_at; Start 772; Stop 796
gggtactgtcttccgttagctccta

SEQ ID NO: 151170 - DNA, 25 bp, Artificial
  probe
  misc_feature (1)..(25): SEQ ID NO: 7411; WAN024DBG_at; Start 524; Stop 548
gtcaagtgaatcaaaagtcatatcc

SEQ ID NO: 151171 - DNA, 25 bp, Artificial
  probe
  misc_feature (1)..(25): SEQ ID NO: 7411; WAN024DBG_at; Start 32; Stop 56
taggagataaagtgaaaaaagcatt

SEQ ID NO: 151172 - DNA, 25 bp, Artificial
  probe
  misc_feature (1)..(25): SEQ ID NO: 7411; WAN024DBG_at; Start 154; Stop 178
tcagttccagaagataaaacgagga

SEQ ID NO: 151173 - DNA, 25 bp, Artificial
  probe
  misc_feature (1)..(25): SEQ ID NO: 7411; WAN024DBG_at; Start 177; Stop 201
gattttagaagcaggaaagtctgca

SEQ ID NO: 151174 - DNA, 25 bp, Artificial
  probe
  misc_feature (1)..(25): SEQ ID NO: 7411; WAN024DBG_at; Start 168; Stop 192
taaaacgaggattttagaagcagga

SEQ ID NO: 151175 - DNA, 25 bp, Artificial
  probe
  misc_feature (1)..(25): SEQ ID NO: 7411; WAN024DBG_at; Start 509; Stop 533
ttgaattccatagaagtcaagtgaa

SEQ ID NO: 151176 - DNA, 25 bp, Artificial
  probe
  misc_feature (1)..(25): SEQ ID NO: 7411; WAN024DBG_at; Start 383; Stop 407
cctctagtaggtgtcattcgtttac

SEQ ID NO: 151177 - DNA, 25 bp, Artificial
  probe
  misc_feature (1)..(25): SEQ ID NO: 7411; WAN024DBG_at; Start 370; Stop 394
aaagctgtgcagtcctctagtaggt

SEQ ID NO: 151178 - DNA, 25 bp, Artificial
  probe
  misc_feature (1)..(25): SEQ ID NO: 7411; WAN024DBG_at; Start 483; Stop 507
caatattgagaaaaagttgagggct

SEQ ID NO: 151179 - DNA, 25 bp, Artificial
  probe
  misc_feature (1)..(25): SEQ ID NO: 7411; WAN024DBG_at; Start 291; Stop 315
cgaaattgaggaatttgatccatct

SEQ ID NO: 151180 - DNA, 25 bp, Artificial
  probe
  misc_feature (1)..(25): SEQ ID NO: 7411; WAN024DBG_at; Start 324; Stop 348
tacacattgggaaaatgatgcccat

SEQ ID NO: 151181 - DNA, 25 bp, Artificial
  probe
  misc_feature (1)..(25): SEQ ID NO: 7411; WAN024DBG_at; Start 52; Stop 76
gcattaataattactgcccatccag

SEQ ID NO: 151182 - DNA, 25 bp, Artificial
  probe
  misc_feature (1)..(25): SEQ ID NO: 7411; WAN024DBG_at; Start 221; Stop 245
taaaaatagttggtgacaaatctca

SEQ ID NO: 151183 - DNA, 25 bp, Artificial
  probe
  misc_feature (1)..(25): SEQ ID NO: 7411; WAN024DBG_at; Start 496; Stop 520
aagttgagggctattgaattccata

SEQ ID NO: 151184 - DNA, 25 bp, Artificial
  probe
  misc_feature (1)..(25): SEQ ID NO: 7411; WAN024DBG_at; Start 610; Stop 634
gagggatttatactgattagacaca

SEQ ID NO: 151185 - DNA, 25 bp, Artificial
  probe
  misc_feature (1)..(25): SEQ ID NO: 7411; WAN024DBG_at; Start 553; Stop 577
gatggacctaaagttcaatctgtct

SEQ ID NO: 151186 - DNA, 25 bp, Artificial
  probe
  misc_feature (1)..(25): SEQ ID NO: 7411; WAN024DBG_at; Start 311; Stop 335
catcttatgtttttacacattggga

SEQ ID NO: 151187 - DNA, 25 bp, Artificial
  probe
  misc_feature (1)..(25): SEQ ID NO: 7411; WAN024DBG_at; Start 231; Stop 255
tggtgacaaatctcaagtttctcag

SEQ ID NO: 151188 - DNA, 25 bp, Artificial
  probe
  misc_feature (1)..(25): SEQ ID NO: 7411; WAN024DBG_at; Start 357; Stop 381
tcgaataatatttaaagctgtgcag

SEQ ID NO: 151189 - DNA, 25 bp, Artificial
  probe
  misc_feature (1)..(25): SEQ ID NO: 7411; WAN024DBG_at; Start 340; Stop 364
gatgcccataaagatcatcgaataa

SEQ ID NO: 151190 - DNA, 25 bp, Artificial
  probe
  misc_feature (1)..(25): SEQ ID NO: 7411; WAN024DBG_at; Start 623; Stop 647
tgattagacacatagatagaaagtg

SEQ ID NO: 151191 - DNA, 25 bp, Artificial
  probe
  misc_feature (1)..(25): SEQ ID NO: 7411; WAN024DBG_at; Start 593; Stop 617
taggagtagattatgcagagggatt

SEQ ID NO: 151192 - DNA, 25 bp, Artificial
  probe
  misc_feature (1)..(25): SEQ ID NO: 7411; WAN024DBG_at; Start 415; Stop 439
tcgttttctcctcctaatatatatg

SEQ ID NO: 151193 - DNA, 25 bp, Artificial
  probe
  misc_feature (1)..(25): SEQ ID NO: 7411; WAN024DBG_at; Start 138; Stop 162
caaactactggttttatcagttcca

SEQ ID NO: 151194 - DNA, 25 bp, Artificial
  probe
  misc_feature (1)..(25): SEQ ID NO: 7411; WAN024DBG_at; Start 81; Stop 105
tgctgaaatttctatgggtggacat

SEQ ID NO: 151195 - DNA, 25 bp, Artificial
  probe
  misc_feature (1)..(25): SEQ ID NO: 7411; WAN024DBG_at; Start 578; Stop 602
tatttggtaaacatataggagtaga

SEQ ID NO: 151196 - DNA, 25 bp, Artificial
  probe
  misc_feature (1)..(25): SEQ ID NO: 7411; WAN024DBG_at; Start 568; Stop 592
caatctgtcttatttggtaaacata

SEQ ID NO: 151197 - DNA, 25 bp, Artificial
  probe
  misc_feature (1)..(25): SEQ ID NO: 7411; WAN024DBG_at; Start 432; Stop 456
tatatatgttagcaatgctttgcag

SEQ ID NO: 151198 - DNA, 25 bp, Artificial
  probe
  misc_feature (1)..(25): SEQ ID NO: 7411; WAN024DBG_at; Start 190; Stop 214
ggaaagtctgcagaatttctaggga

SEQ ID NO: 151199 - DNA, 25 bp, Artificial
  probe
  misc_feature (1)..(25): SEQ ID NO: 7411; WAN024DBG_at; Start 124; Stop 148
aatggttattatgtcaaactactgg

SEQ ID NO: 151200 - DNA, 25 bp, Artificial
  probe
  misc_feature (1)..(25): SEQ ID NO: 7411; WAN024DBG_at; Start 244; Stop 268
caagtttctcagtttagttcaagtg

SEQ ID NO: 151201 - DNA, 25 bp, Artificial
  probe
  misc_feature (1)..(25): SEQ ID NO: 7411; WAN024DBG_at; Start 538; Stop 562
aagtcatatccaatagatggaccta

SEQ ID NO: 151202 - DNA, 25 bp, Artificial
  probe
  misc_feature (1)..(25): SEQ ID NO: 7411; WAN024DBG_at; Start 443; Stop 467
gcaatgctttgcagtttgttccaaa

SEQ ID NO: 151203 - DNA, 25 bp, Artificial
  probe
  misc_feature (1)..(25): SEQ ID NO: 7411; WAN024DBG_at; Start 66; Stop 90
tgcccatccagatgatgctgaaatt

SEQ ID NO: 151204 - DNA, 25 bp, Artificial
  probe
  misc_feature (1)..(25): SEQ ID NO: 2642; WAN024DBH_at; Start 1054; Stop 1078
taccatgctttccaagaagaacgag

SEQ ID NO: 151205 - DNA, 25 bp, Artificial
  probe
  misc_feature (1)..(25): SEQ ID NO: 2642; WAN024DBH_at; Start 516; Stop 540
tgagaaacgttattcttatcgaggt

SEQ ID NO: 151206 - DNA, 25 bp, Artificial
  probe
  misc_feature (1)..(25): SEQ ID NO: 2642; WAN024DBH_at; Start 349; Stop 373
aagtttatcgtagcaactcacacag

SEQ ID NO: 151207 - DNA, 25 bp, Artificial
  probe
  misc_feature (1)..(25): SEQ ID NO: 2642; WAN024DBH_at; Start 404; Stop 428
tcaacgctattgaccgcaattcaga

SEQ ID NO: 151208 - DNA, 25 bp, Artificial
  probe
  misc_feature (1)..(25): SEQ ID NO: 2642; WAN024DBH_at; Start 444; Stop 468
gaactatgccttggaacgaaacctc

SEQ ID NO: 151209 - DNA, 25 bp, Artificial
  probe
  misc_feature (1)..(25): SEQ ID NO: 2642; WAN024DBH_at; Start 461; Stop 485
gaaacctccgtatgatttcagaccg

SEQ ID NO: 151210 - DNA, 25 bp, Artificial
  probe
  misc_feature (1)..(25): SEQ ID NO: 2642; WAN024DBH_at; Start 1072; Stop 1096
gaacgagataaggataaagtatcca

SEQ ID NO: 151211 - DNA, 25 bp, Artificial
  probe
  misc_feature (1)..(25): SEQ ID NO: 2642; WAN024DBH_at; Start 141; Stop 165
ccatacagaaatggtagaaatgtac

SEQ ID NO: 151212 - DNA, 25 bp, Artificial
  probe
  misc_feature (1)..(25): SEQ ID NO: 2642; WAN024DBH_at; Start 1086; Stop 1110
taaagtatccactgaagagattgag

SEQ ID NO: 151213 - DNA, 25 bp, Artificial
  probe
  misc_feature (1)..(25): SEQ ID NO: 2642; WAN024DBH_at; Start 268; Stop 292
tctcctgaagataatctgacacctg

SEQ ID NO: 151214 - DNA, 25 bp, Artificial
  probe
  misc_feature (1)..(25): SEQ ID NO: 2642; WAN024DBH_at; Start 628; Stop 652
tttttagagaaagcaaagcagttgc

SEQ ID NO: 151215 - DNA, 25 bp, Artificial
  probe
  misc_feature (1)..(25): SEQ ID NO: 2642; WAN024DBH_at; Start 361; Stop 385
gcaactcacacagacaaagatcatg

SEQ ID NO: 151216 - DNA, 25 bp, Artificial
  probe
  misc_feature (1)..(25): SEQ ID NO: 2642; WAN024DBH_at; Start 9; Stop 33
tactaaacactttgcgacgcacgga

SEQ ID NO: 151217 - DNA, 25 bp, Artificial
  probe
  misc_feature (1)..(25): SEQ ID NO: 2642; WAN024DBH_at; Start 641; Stop 665
caaagcagttgcatgttcagattga

SEQ ID NO: 151218 - DNA, 25 bp, Artificial
  probe
  misc_feature (1)..(25): SEQ ID NO: 2642; WAN024DBH_at; Start 730; Stop 754
cgccaactcagcaaacgagatctat

SEQ ID NO: 151219 - DNA, 25 bp, Artificial
  probe
  misc_feature (1)..(25): SEQ ID NO: 2642; WAN024DBH_at; Start 1038; Stop 1062
gaatttacaggaacagtaccatgct

SEQ ID NO: 151220 - DNA, 25 bp, Artificial
  probe
  misc_feature (1)..(25): SEQ ID NO: 2642; WAN024DBH_at; Start 282; Stop 306
tctgacacctgaagaaattaaccgc

SEQ ID NO: 151221 - DNA, 25 bp, Artificial
  probe
  misc_feature (1)..(25): SEQ ID NO: 2642; WAN024DBH_at; Start 297; Stop 321
aattaaccgcattggttatgagacc

SEQ ID NO: 151222 - DNA, 25 bp, Artificial
  probe
  misc_feature (1)..(25): SEQ ID NO: 2642; WAN024DBH_at; Start 210; Stop 234
tgaccgacaagaaaaacaccaacaa

SEQ ID NO: 151223 - DNA, 25 bp, Artificial
  probe
  misc_feature (1)..(25): SEQ ID NO: 2642; WAN024DBH_at; Start 1149; Stop 1173
aaggaaaaatgagataccgttcgtg

SEQ ID NO: 151224 - DNA, 25 bp, Artificial
  probe
  misc_feature (1)..(25): SEQ ID NO: 2642; WAN024DBH_at; Start 196; Stop 220
tacgagtccagaaatgaccgacaag

SEQ ID NO: 151225 - DNA, 25 bp, Artificial
  probe
  misc_feature (1)..(25): SEQ ID NO: 2642; WAN024DBH_at; Start 1163; Stop 1187
taccgttcgtgaatttgaagtggaa

SEQ ID NO: 151226 - DNA, 25 bp, Artificial
  probe
  misc_feature (1)..(25): SEQ ID NO: 2642; WAN024DBH_at; Start 1179; Stop 1203
gaagtggaacttgcagagaaccaaa

SEQ ID NO: 151227 - DNA, 25 bp, Artificial
  probe
  misc_feature (1)..(25): SEQ ID NO: 2642; WAN024DBH_at; Start 771; Stop 795
tagaacgcattttgctaagcaagag

SEQ ID NO: 151228 - DNA, 25 bp, Artificial
  probe
  misc_feature (1)..(25): SEQ ID NO: 2642; WAN024DBH_at; Start 320; Stop 344
ccatgatggaattgacaggaggtcg

SEQ ID NO: 151229 - DNA, 25 bp, Artificial
  probe
  misc_feature (1)..(25): SEQ ID NO: 2642; WAN024DBH_at; Start 783; Stop 807
tgctaagcaagagattgaaagtcgt

SEQ ID NO: 151230 - DNA, 25 bp, Artificial
  probe
  misc_feature (1)..(25): SEQ ID NO: 2642; WAN024DBH_at; Start 388; Stop 412
cataatcacatcctaatcaacgcta

SEQ ID NO: 151231 - DNA, 25 bp, Artificial
  probe
  misc_feature (1)..(25): SEQ ID NO: 2642; WAN024DBH_at; Start 183; Stop 207
taacgacaagttgtacgagtccaga

SEQ ID NO: 151232 - DNA, 25 bp, Artificial
  probe
  misc_feature (1)..(25): SEQ ID NO: 2642; WAN024DBH_at; Start 479; Stop 503
cagaccgtatttctaaaatggctgg

SEQ ID NO: 151233 - DNA, 25 bp, Artificial
  probe
  misc_feature (1)..(25): SEQ ID NO: 2642; WAN024DBH_at; Start 1021; Stop 1045
gcttcagaaggattagagaatttac

SEQ ID NO: 151234 - DNA, 25 bp, Artificial
  probe
  misc_feature (1)..(25): SEQ ID NO: 2642; WAN024DBH_at; Start 61; Stop 85
tatatcctcaatccagataaaacag

SEQ ID NO: 151235 - DNA, 25 bp, Artificial
  probe
  misc_feature (1)..(25): SEQ ID NO: 2642; WAN024DBH_at; Start 43; Stop 67
cgtaggcgtttgattaaatatatcc

SEQ ID NO: 151236 - DNA, 25 bp, Artificial
  probe
  misc_feature (1)..(25): SEQ ID NO: 2642; WAN024DBH_at; Start 495; Stop 519
aatggctggtgcaaaaattattgag

SEQ ID NO: 151237 - DNA, 25 bp, Artificial
  probe
  misc_feature (1)..(25): SEQ ID NO: 2642; WAN024DBH_at; Start 126; Stop 150
cttagattttcctagccatacagaa

SEQ ID NO: 151238 - DNA, 25 bp, Artificial
  probe
  misc_feature (1)..(25): SEQ ID NO: 2722; WAN024DBI_at; Start 300; Stop 324
taaggaagtggacaaagaatttcaa

SEQ ID NO: 151239 - DNA, 25 bp, Artificial
  probe
  misc_feature (1)..(25): SEQ ID NO: 2722; WAN024DBI_at; Start 253; Stop 277
tctcaggaccaattacaagaattga

SEQ ID NO: 151240 - DNA, 25 bp, Artificial
  probe
  misc_feature (1)..(25): SEQ ID NO: 2722; WAN024DBI_at; Start 143; Stop 167
catttgtcacgattaacactgatac

SEQ ID NO: 151241 - DNA, 25 bp, Artificial
  probe
  misc_feature (1)..(25): SEQ ID NO: 2722; WAN024DBI_at; Start 28; Stop 52
aaaaaagtatttctaactgatccag

SEQ ID NO: 151242 - DNA, 25 bp, Artificial
  probe
  misc_feature (1)..(25): SEQ ID NO: 2722; WAN024DBI_at; Start 103; Stop 127
tcagtctatgccagaaaagttttgc

SEQ ID NO: 151243 - DNA, 25 bp, Artificial
  probe
  misc_feature (1)..(25): SEQ ID NO: 2722; WAN024DBI_at; Start 172; Stop 196
gaccagttagtttttgaattgagac

SEQ ID NO: 151244 - DNA, 25 bp, Artificial
  probe
  misc_feature (1)..(25): SEQ ID NO: 2722; WAN024DBI_at; Start 210; Stop 234
catcaatcaaattgcgcgtgcgatt

SEQ ID NO: 151245 - DNA, 25 bp, Artificial
  probe
  misc_feature (1)..(25): SEQ ID NO: 2722; WAN024DBI_at; Start 65; Stop 89
tgaatgaacggattgctaagagcaa

SEQ ID NO: 151246 - DNA, 25 bp, Artificial
  probe
  misc_feature (1)..(25): SEQ ID NO: 2722; WAN024DBI_at; Start 135; Stop 159
caatatgtcatttgtcacgattaac

SEQ ID NO: 151247 - DNA, 25 bp, Artificial
  probe
  misc_feature (1)..(25): SEQ ID NO: 2722; WAN024DBI_at; Start 226; Stop 250
cgtgcgattaatcaaagccatctga

SEQ ID NO: 151248 - DNA, 25 bp, Artificial
  probe
  misc_feature (1)..(25): SEQ ID NO: 2722; WAN024DBI_at; Start 306; Stop 330
agtggacaaagaatttcaagtgtag

SEQ ID NO: 151249 - DNA, 25 bp, Artificial
  probe
  misc_feature (1)..(25): SEQ ID NO: 2722; WAN024DBI_at; Start 194; Stop 218
gacgtattggaaataacatcaatca

SEQ ID NO: 151250 - DNA, 25 bp, Artificial
  probe
  misc_feature (1)..(25): SEQ ID NO: 2722; WAN024DBI_at; Start 120; Stop 144
agttttgcttaatcccaatatgtca

SEQ ID NO: 151251 - DNA, 25 bp, Artificial
  probe
  misc_feature (1)..(25): SEQ ID NO: 2722; WAN024DBI_at; Start 289; Stop 313
ggagagttaattaaggaagtggaca

SEQ ID NO: 151252 - DNA, 25 bp, Artificial
  probe
  misc_feature (1)..(25): SEQ ID NO: 2722; WAN024DBI_at; Start 186; Stop 210
tgaattgagacgtattggaaataac

SEQ ID NO: 151253 - DNA, 25 bp, Artificial
  probe
  misc_feature (1)..(25): SEQ ID NO: 2722; WAN024DBI_at; Start 219; Stop 243
aattgcgcgtgcgattaatcaaagc

SEQ ID NO: 151254 - DNA, 25 bp, Artificial
  probe
  misc_feature (1)..(25): SEQ ID NO: 2722; WAN024DBI_at; Start 78; Stop 102
tgctaagagcaattgtcaaaatttt

SEQ ID NO: 151255 - DNA, 25 bp, Artificial
  probe
  misc_feature (1)..(25): SEQ ID NO: 2722; WAN024DBI_at; Start 159; Stop 183
cactgatacttatgaccagttagtt

SEQ ID NO: 151256 - DNA, 25 bp, Artificial
  probe
  misc_feature (1)..(25): SEQ ID NO: 2722; WAN024DBI_at; Start 43; Stop 67
actgatccagaattacaccaattga

SEQ ID NO: 151257 - DNA, 25 bp, Artificial
  probe
  misc_feature (1)..(25): SEQ ID NO: 2722; WAN024DBI_at; Start 52; Stop 76
gaattacaccaattgaatgaacgga

SEQ ID NO: 151258 - DNA, 25 bp, Artificial
  probe
  misc_feature (1)..(25): SEQ ID NO: 2722; WAN024DBI_at; Start 248; Stop 272
tgatttctcaggaccaattacaaga

SEQ ID NO: 151259 - DNA, 25 bp, Artificial
  probe
  misc_feature (1)..(25): SEQ ID NO: 2722; WAN024DBI_at; Start 268; Stop 292
caagaattgagtaaaggagtcggag

SEQ ID NO: 151260 - DNA, 25 bp, Artificial
  probe
  misc_feature (1)..(25): SEQ ID NO: 2722; WAN024DBI_at; Start 3; Stop 27
ggtttatcgctatcgtaccaatctc

SEQ ID NO: 151261 - DNA, 25 bp, Artificial
  probe
  misc_feature (1)..(25): SEQ ID NO: 2722; WAN024DBI_at; Start 58; Stop 82
caccaattgaatgaacggattgcta

SEQ ID NO: 151262 - DNA, 25 bp, Artificial
  probe
  misc_feature (1)..(25): SEQ ID NO: 2722; WAN024DBI_at; Start 73; Stop 97
cggattgctaagagcaattgtcaaa

SEQ ID NO: 151263 - DNA, 25 bp, Artificial
  probe
  misc_feature (1)..(25): SEQ ID NO: 2722; WAN024DBI_at; Start 223; Stop 247
gcgcgtgcgattaatcaaagccatc

SEQ ID NO: 151264 - DNA, 25 bp, Artificial
  probe
  misc_feature (1)..(25): SEQ ID NO: 2722; WAN024DBI_at; Start 129; Stop 153
taatcccaatatgtcatttgtcacg

SEQ ID NO: 151265 - DNA, 25 bp, Artificial
  probe
  misc_feature (1)..(25): SEQ ID NO: 2722; WAN024DBI_at; Start 275; Stop 299
tgagtaaaggagtcggagagttaat

SEQ ID NO: 151266 - DNA, 25 bp, Artificial
  probe
  misc_feature (1)..(25): SEQ ID NO: 2722; WAN024DBI_at; Start 11; Stop 35
gctatcgtaccaatctcaaaaaagt

SEQ ID NO: 151267 - DNA, 25 bp, Artificial
  probe
  misc_feature (1)..(25): SEQ ID NO: 2722; WAN024DBI_at; Start 93; Stop 117
tcaaaatttttcagtctatgccaga

SEQ ID NO: 151268 - DNA, 25 bp, Artificial
  probe
  misc_feature (1)..(25): SEQ ID NO: 2722; WAN024DBI_at; Start 112; Stop 136
gccagaaaagttttgcttaatccca

SEQ ID NO: 151269 - DNA, 25 bp, Artificial
  probe
  misc_feature (1)..(25): SEQ ID NO: 2722; WAN024DBI_at; Start 239; Stop 263
aaagccatctgatttctcaggacca

SEQ ID NO: 151270 - DNA, 25 bp, Artificial
  probe
  misc_feature (1)..(25): SEQ ID NO: 2722; WAN024DBI_at; Start 207; Stop 231
taacatcaatcaaattgcgcgtgcg

SEQ ID NO: 151271 - DNA, 25 bp, Artificial
  probe
  misc_feature (1)..(25): SEQ ID NO: 2722; WAN024DBI_at; Start 153; Stop 177
gattaacactgatacttatgaccag

SEQ ID NO: 151272 - DNA, 25 bp, Artificial
  probe
  misc_feature (1)..(25): SEQ ID NO: 2544; WAN024DBJ_at; Start 141; Stop 165
tcaggatagaatttttgaaagttgg

SEQ ID NO: 151273 - DNA, 25 bp, Artificial
  probe
  misc_feature (1)..(25): SEQ ID NO: 2544; WAN024DBJ_at; Start 308; Stop 332
tgaatcaagtacagccactcagtcg

SEQ ID NO: 151274 - DNA, 25 bp, Artificial
  probe
  misc_feature (1)..(25): SEQ ID NO: 2544; WAN024DBJ_at; Start 125; Stop 149
tattgaaaaagaattatcaggatag

SEQ ID NO: 151275 - DNA, 25 bp, Artificial
  probe
  misc_feature (1)..(25): SEQ ID NO: 2544; WAN024DBJ_at; Start 23; Stop 47
tccgtaagcaatttagaatcacgag

SEQ ID NO: 151276 - DNA, 25 bp, Artificial
  probe
  misc_feature (1)..(25): SEQ ID NO: 2544; WAN024DBJ_at; Start 201; Stop 225
tagtcgagatgtgtatgaagttctg

SEQ ID NO: 151277 - DNA, 25 bp, Artificial
  probe
  misc_feature (1)..(25): SEQ ID NO: 2544; WAN024DBJ_at; Start 250; Stop 274
gtgactcaagagcacgtctcaatct

SEQ ID NO: 151278 - DNA, 25 bp, Artificial
  probe
  misc_feature (1)..(25): SEQ ID NO: 2544; WAN024DBJ_at; Start 172; Stop 196
ctttggcagtctcaaaagtttgaac

SEQ ID NO: 151279 - DNA, 25 bp, Artificial
  probe
  misc_feature (1)..(25): SEQ ID NO: 2544; WAN024DBJ_at; Start 30; Stop 54
gcaatttagaatcacgagacaagaa

SEQ ID NO: 151280 - DNA, 25 bp, Artificial
  probe
  misc_feature (1)..(25): SEQ ID NO: 2544; WAN024DBJ_at; Start 312; Stop 336
tcaagtacagccactcagtcgtgag

SEQ ID NO: 151281 - DNA, 25 bp, Artificial
  probe
  misc_feature (1)..(25): SEQ ID NO: 2544; WAN024DBJ_at; Start 61; Stop 85
cagataaaagaaatgatgagggaac

SEQ ID NO: 151282 - DNA, 25 bp, Artificial
  probe
  misc_feature (1)..(25): SEQ ID NO: 2544; WAN024DBJ_at; Start 161; Stop 185
gttggttctccctttggcagtctca

SEQ ID NO: 151283 - DNA, 25 bp, Artificial
  probe
  misc_feature (1)..(25): SEQ ID NO: 2544; WAN024DBJ_at; Start 333; Stop 357
tgagtttcgtgaaaaatatatgggt

SEQ ID NO: 151284 - DNA, 25 bp, Artificial
  probe
  misc_feature (1)..(25): SEQ ID NO: 2544; WAN024DBJ_at; Start 279; Stop 303
gacttgcgttcaagaattgattgca

SEQ ID NO: 151285 - DNA, 25 bp, Artificial
  probe
  misc_feature (1)..(25): SEQ ID NO: 2544; WAN024DBJ_at; Start 196; Stop 220
cagattagtcgagatgtgtatgaag

SEQ ID NO: 151286 - DNA, 25 bp, Artificial
  probe
  misc_feature (1)..(25): SEQ ID NO: 2544; WAN024DBJ_at; Start 96; Stop 120
tagtttctcagaatttcttcgtcaa

SEQ ID NO: 151287 - DNA, 25 bp, Artificial
  probe
  misc_feature (1)..(25): SEQ ID NO: 2544; WAN024DBJ_at; Start 269; Stop 293
caatcttattgacttgcgttcaaga

SEQ ID NO: 151288 - DNA, 25 bp, Artificial
  probe
  misc_feature (1)..(25): SEQ ID NO: 2544; WAN024DBJ_at; Start 184; Stop 208
caaaagtttgaacagattagtcgag

SEQ ID NO: 151289 - DNA, 25 bp, Artificial
  probe
  misc_feature (1)..(25): SEQ ID NO: 2544; WAN024DBJ_at; Start 15; Stop 39
taagttaatccgtaagcaatttaga

SEQ ID NO: 151290 - DNA, 25 bp, Artificial
  probe
  misc_feature (1)..(25): SEQ ID NO: 2544; WAN024DBJ_at; Start 82; Stop 106
gaacaaaaagtggatagtttctcag

SEQ ID NO: 151291 - DNA, 25 bp, Artificial
  probe
  misc_feature (1)..(25): SEQ ID NO: 2544; WAN024DBJ_at; Start 257; Stop 281
aagagcacgtctcaatcttattgac

SEQ ID NO: 151292 - DNA, 25 bp, Artificial
  probe
  misc_feature (1)..(25): SEQ ID NO: 2544; WAN024DBJ_at; Start 106; Stop 130
gaatttcttcgtcaaaatttattga

SEQ ID NO: 151293 - DNA, 25 bp, Artificial
  probe
  misc_feature (1)..(25): SEQ ID NO: 2544; WAN024DBJ_at; Start 222; Stop 246
tctggttgtcgcaagagaaaatcat

SEQ ID NO: 151294 - DNA, 25 bp, Artificial
  probe
  misc_feature (1)..(25): SEQ ID NO: 2544; WAN024DBJ_at; Start 317; Stop 341
tacagccactcagtcgtgagtttcg

SEQ ID NO: 151295 - DNA, 25 bp, Artificial
  probe
  misc_feature (1)..(25): SEQ ID NO: 2544; WAN024DBJ_at; Start 323; Stop 347
cactcagtcgtgagtttcgtgaaaa

SEQ ID NO: 151296 - DNA, 25 bp, Artificial
  probe
  misc_feature (1)..(25): SEQ ID NO: 2544; WAN024DBJ_at; Start 238; Stop 262
gaaaatcatcaagtgactcaagagc

SEQ ID NO: 151297 - DNA, 25 bp, Artificial
  probe
  misc_feature (1)..(25): SEQ ID NO: 2544; WAN024DBJ_at; Start 299; Stop 323
ttgcagaagtgaatcaagtacagcc

SEQ ID NO: 151298 - DNA, 25 bp, Artificial
  probe
  misc_feature (1)..(25): SEQ ID NO: 2544; WAN024DBJ_at; Start 156; Stop 180
tgaaagttggttctccctttggcag

SEQ ID NO: 151299 - DNA, 25 bp, Artificial
  probe
  misc_feature (1)..(25): SEQ ID NO: 2544; WAN024DBJ_at; Start 44; Stop 68
cgagacaagaagaaaaacagataaa

SEQ ID NO: 151300 - DNA, 25 bp, Artificial
  probe
  misc_feature (1)..(25): SEQ ID NO: 2544; WAN024DBJ_at; Start 214; Stop 238
tatgaagttctggttgtcgcaagag

SEQ ID NO: 151301 - DNA, 25 bp, Artificial
  probe
  misc_feature (1)..(25): SEQ ID NO: 2544; WAN024DBJ_at; Start 70; Stop 94
gaaatgatgagggaacaaaaagtgg

SEQ ID NO: 151302 - DNA, 25 bp, Artificial
  probe
  misc_feature (1)..(25): SEQ ID NO: 2544; WAN024DBJ_at; Start 41; Stop 65
tcacgagacaagaagaaaaacagat

SEQ ID NO: 151303 - DNA, 25 bp, Artificial
  probe
  misc_feature (1)..(25): SEQ ID NO: 2544; WAN024DBJ_at; Start 288; Stop 312
tcaagaattgattgcagaagtgaat

SEQ ID NO: 151304 - DNA, 25 bp, Artificial
  probe
  misc_feature (1)..(25): SEQ ID NO: 2544; WAN024DBJ_at; Start 243; Stop 267
tcatcaagtgactcaagagcacgtc

SEQ ID NO: 151305 - DNA, 25 bp, Artificial
  probe
  misc_feature (1)..(25): SEQ ID NO: 2544; WAN024DBJ_at; Start 228; Stop 252
tgtcgcaagagaaaatcatcaagtg

SEQ ID NO: 151306 - DNA, 25 bp, Artificial
  probe
  misc_feature (1)..(25): SEQ ID NO: 5555; WAN024DBK_at; Start 101; Stop 125
tagacaatcgttatatttacaggca

SEQ ID NO: 151307 - DNA, 25 bp, Artificial
  probe
  misc_feature (1)..(25): SEQ ID NO: 5555; WAN024DBK_at; Start 242; Stop 266
gagttaacggatggattgaatcaca

SEQ ID NO: 151308 - DNA, 25 bp, Artificial
  probe
  misc_feature (1)..(25): SEQ ID NO: 5555; WAN024DBK_at; Start 120; Stop 144
caggcatttagttcagcagtttaga

SEQ ID NO: 151309 - DNA, 25 bp, Artificial
  probe
  misc_feature (1)..(25): SEQ ID NO: 5555; WAN024DBK_at; Start 5; Stop 29
gacaaaaagttgtagccatgcttga

SEQ ID NO: 151310 - DNA, 25 bp, Artificial
  probe
  misc_feature (1)..(25): SEQ ID NO: 5555; WAN024DBK_at; Start 316; Stop 340
gagggaggaaaagattccttcaagc

SEQ ID NO: 151311 - DNA, 25 bp, Artificial
  probe
  misc_feature (1)..(25): SEQ ID NO: 5555; WAN024DBK_at; Start 55; Stop 79
tctaaagacttcagaccattgatta

SEQ ID NO: 151312 - DNA, 25 bp, Artificial
  probe
  misc_feature (1)..(25): SEQ ID NO: 5555; WAN024DBK_at; Start 81; Stop 105
tgatcagcctgaagacaatctagac

SEQ ID NO: 151313 - DNA, 25 bp, Artificial
  probe
  misc_feature (1)..(25): SEQ ID NO: 5555; WAN024DBK_at; Start 48; Stop 72
tgattattctaaagacttcagacca

SEQ ID NO: 151314 - DNA, 25 bp, Artificial
  probe
  misc_feature (1)..(25): SEQ ID NO: 5555; WAN024DBK_at; Start 154; Stop 178
gctcaacgtcaaattattttagcaa

SEQ ID NO: 151315 - DNA, 25 bp, Artificial
  probe
  misc_feature (1)..(25): SEQ ID NO: 5555; WAN024DBK_at; Start 353; Stop 377
tatatgagacggctttatcagagta

SEQ ID NO: 151316 - DNA, 25 bp, Artificial
  probe
  misc_feature (1)..(25): SEQ ID NO: 5555; WAN024DBK_at; Start 133; Stop 157
cagcagtttagagatgtgaaagctc

SEQ ID NO: 151317 - DNA, 25 bp, Artificial
  probe
  misc_feature (1)..(25): SEQ ID NO: 5555; WAN024DBK_at; Start 298; Stop 322
catatcatcaatcaattagagggag

SEQ ID NO: 151318 - DNA, 25 bp, Artificial
  probe
  misc_feature (1)..(25): SEQ ID NO: 5555; WAN024DBK_at; Start 40; Stop 64
gcatatagtgattattctaaagact

SEQ ID NO: 151319 - DNA, 25 bp, Artificial
  probe
  misc_feature (1)..(25): SEQ ID NO: 5555; WAN024DBK_at; Start 114; Stop 138
tatttacaggcatttagttcagcag

SEQ ID NO: 151320 - DNA, 25 bp, Artificial
  probe
  misc_feature (1)..(25): SEQ ID NO: 5555; WAN024DBK_at; Start 191; Stop 215
caattgtaacaaattctatgacaga

SEQ ID NO: 151321 - DNA, 25 bp, Artificial
  probe
  misc_feature (1)..(25): SEQ ID NO: 5555; WAN024DBK_at; Start 328; Stop 352
gattccttcaagcataaaatgtcta

SEQ ID NO: 151322 - DNA, 25 bp, Artificial
  probe
  misc_feature (1)..(25): SEQ ID NO: 5555; WAN024DBK_at; Start 87; Stop 111
gcctgaagacaatctagacaatcgt

SEQ ID NO: 151323 - DNA, 25 bp, Artificial
  probe
  misc_feature (1)..(25): SEQ ID NO: 5555; WAN024DBK_at; Start 309; Stop 333
tcaattagagggaggaaaagattcc

SEQ ID NO: 151324 - DNA, 25 bp, Artificial
  probe
  misc_feature (1)..(25): SEQ ID NO: 5555; WAN024DBK_at; Start 322; Stop 346
ggaaaagattccttcaagcataaaa

SEQ ID NO: 151325 - DNA, 25 bp, Artificial
  probe
  misc_feature (1)..(25): SEQ ID NO: 5555; WAN024DBK_at; Start 175; Stop 199
gcaacacataatgctacaattgtaa

SEQ ID NO: 151326 - DNA, 25 bp, Artificial
  probe
  misc_feature (1)..(25): SEQ ID NO: 5555; WAN024DBK_at; Start 139; Stop 163
tttagagatgtgaaagctcaacgtc

SEQ ID NO: 151327 - DNA, 25 bp, Artificial
  probe
  misc_feature (1)..(25): SEQ ID NO: 5555; WAN024DBK_at; Start 228; Stop 252
tatggagtcagatggagttaacgga

SEQ ID NO: 151328 - DNA, 25 bp, Artificial
  probe
  misc_feature (1)..(25): SEQ ID NO: 5555; WAN024DBK_at; Start 235; Stop 259
tcagatggagttaacggatggattg

SEQ ID NO: 151329 - DNA, 25 bp, Artificial
  probe
  misc_feature (1)..(25): SEQ ID NO: 5555; WAN024DBK_at; Start 145; Stop 169
gatgtgaaagctcaacgtcaaatta

SEQ ID NO: 151330 - DNA, 25 bp, Artificial
  probe
  misc_feature (1)..(25): SEQ ID NO: 5555; WAN024DBK_at; Start 197; Stop 221
taacaaattctatgacagatcaagt

SEQ ID NO: 151331 - DNA, 25 bp, Artificial
  probe
  misc_feature (1)..(25): SEQ ID NO: 5555; WAN024DBK_at; Start 263; Stop 287
cacagggatatgttagtgaaaaata

SEQ ID NO: 151332 - DNA, 25 bp, Artificial
  probe
  misc_feature (1)..(25): SEQ ID NO: 5555; WAN024DBK_at; Start 212; Stop 236
cagatcaagttgttattatggagtc

SEQ ID NO: 151333 - DNA, 25 bp, Artificial
  probe
  misc_feature (1)..(25): SEQ ID NO: 5555; WAN024DBK_at; Start 168; Stop 192
tattttagcaacacataatgctaca

SEQ ID NO: 151334 - DNA, 25 bp, Artificial
  probe
  misc_feature (1)..(25): SEQ ID NO: 5555; WAN024DBK_at; Start 254; Stop 278
ggattgaatcacagggatatgttag

SEQ ID NO: 151335 - DNA, 25 bp, Artificial
  probe
  misc_feature (1)..(25): SEQ ID NO: 5555; WAN024DBK_at; Start 16; Stop 40
gtagccatgcttgattttttattag

SEQ ID NO: 151336 - DNA, 25 bp, Artificial
  probe
  misc_feature (1)..(25): SEQ ID NO: 5555; WAN024DBK_at; Start 246; Stop 270
taacggatggattgaatcacaggga

SEQ ID NO: 151337 - DNA, 25 bp, Artificial
  probe
  misc_feature (1)..(25): SEQ ID NO: 5555; WAN024DBK_at; Start 342; Stop 366
taaaatgtctatatatgagacggct

SEQ ID NO: 151338 - DNA, 25 bp, Artificial
  probe
  misc_feature (1)..(25): SEQ ID NO: 5555; WAN024DBK_at; Start 1; Stop 25
ttgggacaaaaagttgtagccatgc

SEQ ID NO: 151339 - DNA, 25 bp, Artificial
  probe
  misc_feature (1)..(25): SEQ ID NO: 5555; WAN024DBK_at; Start 68; Stop 92
gaccattgattattgatcagcctga

SEQ ID NO: 151340 - DNA, 25 bp, Artificial
  probe
  misc_feature (1)..(25): SEQ ID NO: 1541; WAN024DBL_at; Start 599; Stop 623
tagttaactatattgctcatttcaa

SEQ ID NO: 151341 - DNA, 25 bp, Artificial
  probe
  misc_feature (1)..(25): SEQ ID NO: 1541; WAN024DBL_at; Start 747; Stop 771
gatattctctataaagaagttggtg

SEQ ID NO: 151342 - DNA, 25 bp, Artificial
  probe
  misc_feature (1)..(25): SEQ ID NO: 1541; WAN024DBL_at; Start 99; Stop 123
tacacctgtttcttatgattacaag

SEQ ID NO: 151343 - DNA, 25 bp, Artificial
  probe
  misc_feature (1)..(25): SEQ ID NO: 1541; WAN024DBL_at; Start 630; Stop 654
tgacattttgaaaaaaggttctcac

SEQ ID NO: 151344 - DNA, 25 bp, Artificial
  probe
  misc_feature (1)..(25): SEQ ID NO: 1541; WAN024DBL_at; Start 658; Stop 682
tcaggtgcatataaacgaaaaattt

SEQ ID NO: 151345 - DNA, 25 bp, Artificial
  probe
  misc_feature (1)..(25): SEQ ID NO: 1541; WAN024DBL_at; Start 452; Stop 476
cagcagataaattgcatattgtatg

SEQ ID NO: 151346 - DNA, 25 bp, Artificial
  probe
  misc_feature (1)..(25): SEQ ID NO: 1541; WAN024DBL_at; Start 442; Stop 466
gaaattagtgcagcagataaattgc

SEQ ID NO: 151347 - DNA, 25 bp, Artificial
  probe
  misc_feature (1)..(25): SEQ ID NO: 1541; WAN024DBL_at; Start 533; Stop 557
taagtgagaaagatggaagttatca

SEQ ID NO: 151348 - DNA, 25 bp, Artificial
  probe
  misc_feature (1)..(25): SEQ ID NO: 1541; WAN024DBL_at; Start 60; Stop 84
gaaattcggtagctttcacaagact

SEQ ID NO: 151349 - DNA, 25 bp, Artificial
  probe
  misc_feature (1)..(25): SEQ ID NO: 1541; WAN024DBL_at; Start 49; Stop 73
aattccaaagagaaattcggtagct

SEQ ID NO: 151350 - DNA, 25 bp, Artificial
  probe
  misc_feature (1)..(25): SEQ ID NO: 1541; WAN024DBL_at; Start 23; Stop 47
taaagtctgtttatcaagaactaac

SEQ ID NO: 151351 - DNA, 25 bp, Artificial
  probe
  misc_feature (1)..(25): SEQ ID NO: 1541; WAN024DBL_at; Start 562; Stop 586
tcactgactataatgaaggatttca

SEQ ID NO: 151352 - DNA, 25 bp, Artificial
  probe
  misc_feature (1)..(25): SEQ ID NO: 1541; WAN024DBL_at; Start 547; Stop 571
ggaagttatcaacattcactgacta

SEQ ID NO: 151353 - DNA, 25 bp, Artificial
  probe
  misc_feature (1)..(25): SEQ ID NO: 1541; WAN024DBL_at; Start 613; Stop 637
gctcatttcaatagttatgacattt

SEQ ID NO: 151354 - DNA, 25 bp, Artificial
  probe
  misc_feature (1)..(25): SEQ ID NO: 1541; WAN024DBL_at; Start 736; Stop 760
cgcaacaacttgatattctctataa

SEQ ID NO: 151355 - DNA, 25 bp, Artificial
  probe
  misc_feature (1)..(25): SEQ ID NO: 1541; WAN024DBL_at; Start 400; Stop 424
tatccgatttatgatatacatcctc

SEQ ID NO: 151356 - DNA, 25 bp, Artificial
  probe
  misc_feature (1)..(25): SEQ ID NO: 1541; WAN024DBL_at; Start 374; Stop 398
tggcagtctcaatcataatgaaaaa

SEQ ID NO: 151357 - DNA, 25 bp, Artificial
  probe
  misc_feature (1)..(25): SEQ ID NO: 1541; WAN024DBL_at; Start 2; Stop 26
tgagagggtttaataacaagataaa

SEQ ID NO: 151358 - DNA, 25 bp, Artificial
  probe
  misc_feature (1)..(25): SEQ ID NO: 1541; WAN024DBL_at; Start 276; Stop 300
tagttttcttatgttagcagaggca

SEQ ID NO: 151359 - DNA, 25 bp, Artificial
  probe
  misc_feature (1)..(25): SEQ ID NO: 1541; WAN024DBL_at; Start 642; Stop 666
aaaaggttctcacttatcaggtgca

SEQ ID NO: 151360 - DNA, 25 bp, Artificial
  probe
  misc_feature (1)..(25): SEQ ID NO: 1541; WAN024DBL_at; Start 686; Stop 710
ctaaagaaaatacacgattttggag

SEQ ID NO: 151361 - DNA, 25 bp, Artificial
  probe
  misc_feature (1)..(25): SEQ ID NO: 1541; WAN024DBL_at; Start 290; Stop 314
tagcagaggcaatcataaaaaatgg

SEQ ID NO: 151362 - DNA, 25 bp, Artificial
  probe
  misc_feature (1)..(25): SEQ ID NO: 1541; WAN024DBL_at; Start 359; Stop 383
ttaaaaagttacaaatggcagtctc

SEQ ID NO: 151363 - DNA, 25 bp, Artificial
  probe
  misc_feature (1)..(25): SEQ ID NO: 1541; WAN024DBL_at; Start 123; Stop 147
gctattttctaattggactgcaacg

SEQ ID NO: 151364 - DNA, 25 bp, Artificial
  probe
  misc_feature (1)..(25): SEQ ID NO: 1541; WAN024DBL_at; Start 66; Stop 90
cggtagctttcacaagactttaatt

SEQ ID NO: 151365 - DNA, 25 bp, Artificial
  probe
  misc_feature (1)..(25): SEQ ID NO: 1541; WAN024DBL_at; Start 36; Stop 60
tcaagaactaacaaattccaaagag

SEQ ID NO: 151366 - DNA, 25 bp, Artificial
  probe
  misc_feature (1)..(25): SEQ ID NO: 1541; WAN024DBL_at; Start 81; Stop 105
gactttaattcatttgcatacacct

SEQ ID NO: 151367 - DNA, 25 bp, Artificial
  probe
  misc_feature (1)..(25): SEQ ID NO: 1541; WAN024DBL_at; Start 418; Stop 442
catcctcatattttacatggagtag

SEQ ID NO: 151368 - DNA, 25 bp, Artificial
  probe
  misc_feature (1)..(25): SEQ ID NO: 1541; WAN024DBL_at; Start 332; Stop 356
taactgatcataatactaccaaagg

SEQ ID NO: 151369 - DNA, 25 bp, Artificial
  probe
  misc_feature (1)..(25): SEQ ID NO: 1541; WAN024DBL_at; Start 136; Stop 160
tggactgcaacgaaatatagaaaaa

SEQ ID NO: 151370 - DNA, 25 bp, Artificial
  probe
  misc_feature (1)..(25): SEQ ID NO: 1541; WAN024DBL_at; Start 317; Stop 341
tagaaatagttgtagtaactgatca

SEQ ID NO: 151371 - DNA, 25 bp, Artificial
  probe
  misc_feature (1)..(25): SEQ ID NO: 1541; WAN024DBL_at; Start 493; Stop 517
caagaatcatgggttaatcaatggt

SEQ ID NO: 151372 - DNA, 25 bp, Artificial
  probe
  misc_feature (1)..(25): SEQ ID NO: 1541; WAN024DBL_at; Start 431; Stop 455
tacatggagtagaaattagtgcagc

SEQ ID NO: 151373 - DNA, 25 bp, Artificial
  probe
  misc_feature (1)..(25): SEQ ID NO: 1541; WAN024DBL_at; Start 481; Stop 505
tatgattatgaacaagaatcatggg

SEQ ID NO: 151374 - DNA, 25 bp, Artificial
  probe
  misc_feature (1)..(25): SEQ ID NO: 2961; WAN024DBM_at; Start 169; Stop 193
ggctacagagcggataacgatatta

SEQ ID NO: 151375 - DNA, 25 bp, Artificial
  probe
  misc_feature (1)..(25): SEQ ID NO: 2961; WAN024DBM_at; Start 147; Stop 171
aactctgactgagatgattaatggc

SEQ ID NO: 151376 - DNA, 25 bp, Artificial
  probe
  misc_feature (1)..(25): SEQ ID NO: 2961; WAN024DBM_at; Start 25; Stop 49
gctaagccggatacacctttattta

SEQ ID NO: 151377 - DNA, 25 bp, Artificial
  probe
  misc_feature (1)..(25): SEQ ID NO: 2961; WAN024DBM_at; Start 12; Stop 36
tattttatggaatgctaagccggat

SEQ ID NO: 151378 - DNA, 25 bp, Artificial
  probe
  misc_feature (1)..(25): SEQ ID NO: 2961; WAN024DBM_at; Start 176; Stop 200
gagcggataacgatattagagatga

SEQ ID NO: 151379 - DNA, 25 bp, Artificial
  probe
  misc_feature (1)..(25): SEQ ID NO: 2961; WAN024DBM_at; Start 165; Stop 189
taatggctacagagcggataacgat

SEQ ID NO: 151380 - DNA, 25 bp, Artificial
  probe
  misc_feature (1)..(25): SEQ ID NO: 2961; WAN024DBM_at; Start 77; Stop 101
aaacatatgagccttttgaaagcag

SEQ ID NO: 151381 - DNA, 25 bp, Artificial
  probe
  misc_feature (1)..(25): SEQ ID NO: 2961; WAN024DBM_at; Start 253; Stop 277
caaggaaatacaatggaatcttact

SEQ ID NO: 151382 - DNA, 25 bp, Artificial
  probe
  misc_feature (1)..(25): SEQ ID NO: 2961; WAN024DBM_at; Start 179; Stop 203
cggataacgatattagagatgaaat

SEQ ID NO: 151383 - DNA, 25 bp, Artificial
  probe
  misc_feature (1)..(25): SEQ ID NO: 2961; WAN024DBM_at; Start 22; Stop 46
aatgctaagccggatacacctttat

SEQ ID NO: 151384 - DNA, 25 bp, Artificial
  probe
  misc_feature (1)..(25): SEQ ID NO: 2961; WAN024DBM_at; Start 162; Stop 186
gattaatggctacagagcggataac

SEQ ID NO: 151385 - DNA, 25 bp, Artificial
  probe
  misc_feature (1)..(25): SEQ ID NO: 2961; WAN024DBM_at; Start 140; Stop 164
aagggaaaactctgactgagatgat

SEQ ID NO: 151386 - DNA, 25 bp, Artificial
  probe
  misc_feature (1)..(25): SEQ ID NO: 2961; WAN024DBM_at; Start 135; Stop 159
tagtaaagggaaaactctgactgag

SEQ ID NO: 151387 - DNA, 25 bp, Artificial
  probe
  misc_feature (1)..(25): SEQ ID NO: 2961; WAN024DBM_at; Start 156; Stop 180
tgagatgattaatggctacagagcg

SEQ ID NO: 151388 - DNA, 25 bp, Artificial
  probe
  misc_feature (1)..(25): SEQ ID NO: 2961; WAN024DBM_at; Start 249; Stop 273
ccaacaaggaaatacaatggaatct

SEQ ID NO: 151389 - DNA, 25 bp, Artificial
  probe
  misc_feature (1)..(25): SEQ ID NO: 2961; WAN024DBM_at; Start 172; Stop 196
tacagagcggataacgatattagag

SEQ ID NO: 151390 - DNA, 25 bp, Artificial
  probe
  misc_feature (1)..(25): SEQ ID NO: 2961; WAN024DBM_at; Start 17; Stop 41
tatggaatgctaagccggatacacc

SEQ ID NO: 151391 - DNA, 25 bp, Artificial
  probe
  misc_feature (1)..(25): SEQ ID NO: 2961; WAN024DBM_at; Start 258; Stop 282
aaatacaatggaatcttacttttag

SEQ ID NO: 151392 - DNA, 25 bp, Artificial
  probe
  misc_feature (1)..(25): SEQ ID NO: 2961; WAN024DBM_at; Start 138; Stop 162
taaagggaaaactctgactgagatg

SEQ ID NO: 151393 - DNA, 25 bp, Artificial
  probe
  misc_feature (1)..(25): SEQ ID NO: 2961; WAN024DBM_at; Start 150; Stop 174
tctgactgagatgattaatggctac

SEQ ID NO: 151394 - DNA, 25 bp, Artificial
  probe
  misc_feature (1)..(25): SEQ ID NO: 2961; WAN024DBM_at; Start 9; Stop 33
gattattttatggaatgctaagccg

SEQ ID NO: 151395 - DNA, 25 bp, Artificial
  probe
  misc_feature (1)..(25): SEQ ID NO: 2961; WAN024DBM_at; Start 119; Stop 143
ctactataaagaatggtagtaaagg

SEQ ID NO: 151396 - DNA, 25 bp, Artificial
  probe
  misc_feature (1)..(25): SEQ ID NO: 2961; WAN024DBM_at; Start 186; Stop 210
cgatattagagatgaaatttgtaac

SEQ ID NO: 151397 - DNA, 25 bp, Artificial
  probe
  misc_feature (1)..(25): SEQ ID NO: 2961; WAN024DBM_at; Start 159; Stop 183
gatgattaatggctacagagcggat

SEQ ID NO: 151398 - DNA, 25 bp, Artificial
  probe
  misc_feature (1)..(25): SEQ ID NO: 2961; WAN024DBM_at; Start 174; Stop 198
cagagcggataacgatattagagat

SEQ ID NO: 151399 - DNA, 25 bp, Artificial
  probe
  misc_feature (1)..(25): SEQ ID NO: 2961; WAN024DBM_at; Start 80; Stop 104
catatgagccttttgaaagcagtat

SEQ ID NO: 151400 - DNA, 25 bp, Artificial
  probe
  misc_feature (1)..(25): SEQ ID NO: 2961; WAN024DBM_at; Start 14; Stop 38
ttttatggaatgctaagccggatac

SEQ ID NO: 151401 - DNA, 25 bp, Artificial
  probe
  misc_feature (1)..(25): SEQ ID NO: 2961; WAN024DBM_at; Start 199; Stop 223
gaaatttgtaactttaatattctga

SEQ ID NO: 151402 - DNA, 25 bp, Artificial
  probe
  misc_feature (1)..(25): SEQ ID NO: 2961; WAN024DBM_at; Start 68; Stop 92
ttaagtataaaacatatgagccttt

SEQ ID NO: 151403 - DNA, 25 bp, Artificial
  probe
  misc_feature (1)..(25): SEQ ID NO: 2961; WAN024DBM_at; Start 110; Stop 134
gagtaaatactactataaagaatgg

SEQ ID NO: 151404 - DNA, 25 bp, Artificial
  probe
  misc_feature (1)..(25): SEQ ID NO: 2961; WAN024DBM_at; Start 82; Stop 106
tatgagccttttgaaagcagtataa

SEQ ID NO: 151405 - DNA, 25 bp, Artificial
  probe
  misc_feature (1)..(25): SEQ ID NO: 2961; WAN024DBM_at; Start 143; Stop 167
ggaaaactctgactgagatgattaa

SEQ ID NO: 151406 - DNA, 25 bp, Artificial
  probe
  misc_feature (1)..(25): SEQ ID NO: 2961; WAN024DBM_at; Start 93; Stop 117
tgaaagcagtataaaaagagtaaat

SEQ ID NO: 151407 - DNA, 25 bp, Artificial
  probe
  misc_feature (1)..(25): SEQ ID NO: 2961; WAN024DBM_at; Start 219; Stop 243
tctgaaaaataaaattcgtgatatg

SEQ ID NO: 151408 - DNA, 25 bp, Artificial
  probe
  misc_feature (1)..(25): SEQ ID NO: 1272; WAN024DBN_at; Start 165; Stop 189
caagaaggaagttattcagtgttgc

SEQ ID NO: 151409 - DNA, 25 bp, Artificial
  probe
  misc_feature (1)..(25): SEQ ID NO: 1272; WAN024DBN_at; Start 79; Stop 103
ttagcaaatcaacaaaaacatagtg

SEQ ID NO: 151410 - DNA, 25 bp, Artificial
  probe
  misc_feature (1)..(25): SEQ ID NO: 1272; WAN024DBN_at; Start 176; Stop 200
ttattcagtgttgcatgggtgcggc

SEQ ID NO: 151411 - DNA, 25 bp, Artificial
  probe
  misc_feature (1)..(25): SEQ ID NO: 1272; WAN024DBN_at; Start 238; Stop 262
cctctttttaatccgcttgtaggtg

SEQ ID NO: 151412 - DNA, 25 bp, Artificial
  probe
  misc_feature (1)..(25): SEQ ID NO: 1272; WAN024DBN_at; Start 294; Stop 318
caatacagggagtggaaatttataa

SEQ ID NO: 151413 - DNA, 25 bp, Artificial
  probe
  misc_feature (1)..(25): SEQ ID NO: 1272; WAN024DBN_at; Start 289; Stop 313
tatgacaatacagggagtggaaatt

SEQ ID NO: 151414 - DNA, 25 bp, Artificial
  probe
  misc_feature (1)..(25): SEQ ID NO: 1272; WAN024DBN_at; Start 35; Stop 59
ttgttagagattttgaagttcagcc

SEQ ID NO: 151415 - DNA, 25 bp, Artificial
  probe
  misc_feature (1)..(25): SEQ ID NO: 1272; WAN024DBN_at; Start 153; Stop 177
taaaattgatggcaagaaggaagtt

SEQ ID NO: 151416 - DNA, 25 bp, Artificial
  probe
  misc_feature (1)..(25): SEQ ID NO: 1272; WAN024DBN_at; Start 144; Stop 168
cgctgagagtaaaattgatggcaag

SEQ ID NO: 151417 - DNA, 25 bp, Artificial
  probe
  misc_feature (1)..(25): SEQ ID NO: 1272; WAN024DBN_at; Start 92; Stop 116
aaaaacatagtgatgcaggagcaac

SEQ ID NO: 151418 - DNA, 25 bp, Artificial
  probe
  misc_feature (1)..(25): SEQ ID NO: 1272; WAN024DBN_at; Start 88; Stop 112
caacaaaaacatagtgatgcaggag

SEQ ID NO: 151419 - DNA, 25 bp, Artificial
  probe
  misc_feature (1)..(25): SEQ ID NO: 1272; WAN024DBN_at; Start 173; Stop 197
aagttattcagtgttgcatgggtgc

SEQ ID NO: 151420 - DNA, 25 bp, Artificial
  probe
  misc_feature (1)..(25): SEQ ID NO: 1272; WAN024DBN_at; Start 283; Stop 307
caagaatatgacaatacagggagtg

SEQ ID NO: 151421 - DNA, 25 bp, Artificial
  probe
  misc_feature (1)..(25): SEQ ID NO: 1272; WAN024DBN_at; Start 262; Stop 286
gattctcatgtaaataatagacaag

SEQ ID NO: 151422 - DNA, 25 bp, Artificial
  probe
  misc_feature (1)..(25): SEQ ID NO: 1272; WAN024DBN_at; Start 99; Stop 123
tagtgatgcaggagcaactattgaa

SEQ ID NO: 151423 - DNA, 25 bp, Artificial
  probe
  misc_feature (1)..(25): SEQ ID NO: 1272; WAN024DBN_at; Start 40; Stop 64
agagattttgaagttcagcctaaag

SEQ ID NO: 151424 - DNA, 25 bp, Artificial
  probe
  misc_feature (1)..(25): SEQ ID NO: 1272; WAN024DBN_at; Start 247; Stop 271
aatccgcttgtaggtgattctcatg

SEQ ID NO: 151425 - DNA, 25 bp, Artificial
  probe
  misc_feature (1)..(25): SEQ ID NO: 1272; WAN024DBN_at; Start 141; Stop 165
tatcgctgagagtaaaattgatggc

SEQ ID NO: 151426 - DNA, 25 bp, Artificial
  probe
  misc_feature (1)..(25): SEQ ID NO: 1272; WAN024DBN_at; Start 250; Stop 274
ccgcttgtaggtgattctcatgtaa

SEQ ID NO: 151427 - DNA, 25 bp, Artificial
  probe
  misc_feature (1)..(25): SEQ ID NO: 1272; WAN024DBN_at; Start 13; Stop 37
ggacatgaaacaagacaaagaattg

SEQ ID NO: 151428 - DNA, 25 bp, Artificial
  probe
  misc_feature (1)..(25): SEQ ID NO: 1272; WAN024DBN_at; Start 299; Stop 323
cagggagtggaaatttataactaat

SEQ ID NO: 151429 - DNA, 25 bp, Artificial
  probe
  misc_feature (1)..(25): SEQ ID NO: 1272; WAN024DBN_at; Start 19; Stop 43
gaaacaagacaaagaattgttagag

SEQ ID NO: 151430 - DNA, 25 bp, Artificial
  probe
  misc_feature (1)..(25): SEQ ID NO: 1272; WAN024DBN_at; Start 67; Stop 91
catattaagctgttagcaaatcaac

SEQ ID NO: 151431 - DNA, 25 bp, Artificial
  probe
  misc_feature (1)..(25): SEQ ID NO: 1272; WAN024DBN_at; Start 107; Stop 131
caggagcaactattgaagatgaata

SEQ ID NO: 151432 - DNA, 25 bp, Artificial
  probe
  misc_feature (1)..(25): SEQ ID NO: 1272; WAN024DBN_at; Start 178; Stop 202
attcagtgttgcatgggtgcggcaa

SEQ ID NO: 151433 - DNA, 25 bp, Artificial
  probe
  misc_feature (1)..(25): SEQ ID NO: 1272; WAN024DBN_at; Start 8; Stop 32
gtagaggacatgaaacaagacaaag

SEQ ID NO: 151434 - DNA, 25 bp, Artificial
  probe
  misc_feature (1)..(25): SEQ ID NO: 1272; WAN024DBN_at; Start 205; Stop 229
gattttttagaactaattaatcaca

SEQ ID NO: 151435 - DNA, 25 bp, Artificial
  probe
  misc_feature (1)..(25): SEQ ID NO: 1272; WAN024DBN_at; Start 188; Stop 212
gcatgggtgcggcaagggatttttt

SEQ ID NO: 151436 - DNA, 25 bp, Artificial
  probe
  misc_feature (1)..(25): SEQ ID NO: 1272; WAN024DBN_at; Start 127; Stop 151
gaatattatgtatttatcgctgaga

SEQ ID NO: 151437 - DNA, 25 bp, Artificial
  probe
  misc_feature (1)..(25): SEQ ID NO: 1272; WAN024DBN_at; Start 159; Stop 183
tgatggcaagaaggaagttattcag

SEQ ID NO: 151438 - DNA, 25 bp, Artificial
  probe
  misc_feature (1)..(25): SEQ ID NO: 1272; WAN024DBN_at; Start 2; Stop 26
tgaattgtagaggacatgaaacaag

SEQ ID NO: 151439 - DNA, 25 bp, Artificial
  probe
  misc_feature (1)..(25): SEQ ID NO: 1272; WAN024DBN_at; Start 103; Stop 127
gatgcaggagcaactattgaagatg

SEQ ID NO: 151440 - DNA, 25 bp, Artificial
  probe
  misc_feature (1)..(25): SEQ ID NO: 1272; WAN024DBN_at; Start 112; Stop 136
gcaactattgaagatgaatattatg

SEQ ID NO: 151441 - DNA, 25 bp, Artificial
  probe
  misc_feature (1)..(25): SEQ ID NO: 1272; WAN024DBN_at; Start 279; Stop 303
tagacaagaatatgacaatacaggg

SEQ ID NO: 151442 - DNA, 25 bp, Artificial
  probe
  misc_feature (1)..(25): SEQ ID NO: 5321; WAN024DBO_at; Start 681; Stop 705
caaggacggctatgccaacattttg

SEQ ID NO: 151443 - DNA, 25 bp, Artificial
  probe
  misc_feature (1)..(25): SEQ ID NO: 5321; WAN024DBO_at; Start 254; Stop 278
gaactgtcaatgaagtcatttcagg

SEQ ID NO: 151444 - DNA, 25 bp, Artificial
  probe
  misc_feature (1)..(25): SEQ ID NO: 5321; WAN024DBO_at; Start 549; Stop 573
gaagtctgtcatgacagatcaggtc

SEQ ID NO: 151445 - DNA, 25 bp, Artificial
  probe
  misc_feature (1)..(25): SEQ ID NO: 5321; WAN024DBO_at; Start 582; Stop 606
taaggttgagacagaaaatggaaat

SEQ ID NO: 151446 - DNA, 25 bp, Artificial
  probe
  misc_feature (1)..(25): SEQ ID NO: 5321; WAN024DBO_at; Start 602; Stop 626
gaaattatgttggtgaagctagcca

SEQ ID NO: 151447 - DNA, 25 bp, Artificial
  probe
  misc_feature (1)..(25): SEQ ID NO: 5321; WAN024DBO_at; Start 349; Stop 373
cttttggaaatcaatcaagacatcg

SEQ ID NO: 151448 - DNA, 25 bp, Artificial
  probe
  misc_feature (1)..(25): SEQ ID NO: 5321; WAN024DBO_at; Start 239; Stop 263
tgtttggtggagatggaactgtcaa

SEQ ID NO: 151449 - DNA, 25 bp, Artificial
  probe
  misc_feature (1)..(25): SEQ ID NO: 5321; WAN024DBO_at; Start 274; Stop 298
tcaggtattgatgagagagactaca

SEQ ID NO: 151450 - DNA, 25 bp, Artificial
  probe
  misc_feature (1)..(25): SEQ ID NO: 5321; WAN024DBO_at; Start 459; Stop 483
tagtatcggttctctgcctgaggcg

SEQ ID NO: 151451 - DNA, 25 bp, Artificial
  probe
  misc_feature (1)..(25): SEQ ID NO: 5321; WAN024DBO_at; Start 90; Stop 114
tggcgagaaggctttggattacaaa

SEQ ID NO: 151452 - DNA, 25 bp, Artificial
  probe
  misc_feature (1)..(25): SEQ ID NO: 5321; WAN024DBO_at; Start 621; Stop 645
tagccatgttttggtccttttgaca

SEQ ID NO: 151453 - DNA, 25 bp, Artificial
  probe
  misc_feature (1)..(25): SEQ ID NO: 5321; WAN024DBO_at; Start 534; Stop 558
tgctgtaaataccatgaagtctgtc

SEQ ID NO: 151454 - DNA, 25 bp, Artificial
  probe
  misc_feature (1)..(25): SEQ ID NO: 5321; WAN024DBO_at; Start 636; Stop 660
ccttttgacaaattacttcgctgat

SEQ ID NO: 151455 - DNA, 25 bp, Artificial
  probe
  misc_feature (1)..(25): SEQ ID NO: 5321; WAN024DBO_at; Start 196; Stop 220
tttgctgaagaagcttctcgtgagc

SEQ ID NO: 151456 - DNA, 25 bp, Artificial
  probe
  misc_feature (1)..(25): SEQ ID NO: 5321; WAN024DBO_at; Start 711; Stop 735
gaaagatgcctctatattctccaaa

SEQ ID NO: 151457 - DNA, 25 bp, Artificial
  probe
  misc_feature (1)..(25): SEQ ID NO: 5321; WAN024DBO_at; Start 783; Stop 807
taatatcgagtatatcaaagcgcgt

SEQ ID NO: 151458 - DNA, 25 bp, Artificial
  probe
  misc_feature (1)..(25): SEQ ID NO: 5321; WAN024DBO_at; Start 180; Stop 204
gctggatgcaacacattttgctgaa

SEQ ID NO: 151459 - DNA, 25 bp, Artificial
  probe
  misc_feature (1)..(25): SEQ ID NO: 5321; WAN024DBO_at; Start 741; Stop 765
cgtcattcctgatttattaaaaggg

SEQ ID NO: 151460 - DNA, 25 bp, Artificial
  probe
  misc_feature (1)..(25): SEQ ID NO: 5321; WAN024DBO_at; Start 842; Stop 866
cagatgttgacggagataaatcaga

SEQ ID NO: 151461 - DNA, 25 bp, Artificial
  probe
  misc_feature (1)..(25): SEQ ID NO: 5321; WAN024DBO_at; Start 288; Stop 312
gagagactacattcctaagttaggg

SEQ ID NO: 151462 - DNA, 25 bp, Artificial
  probe
  misc_feature (1)..(25): SEQ ID NO: 5321; WAN024DBO_at; Start 895; Stop 919
gctcagcgagtagaagtattttcaa

SEQ ID NO: 151463 - DNA, 25 bp, Artificial
  probe
  misc_feature (1)..(25): SEQ ID NO: 5321; WAN024DBO_at; Start 364; Stop 388
caagacatcgatggcgcaattgacg

SEQ ID NO: 151464 - DNA, 25 bp, Artificial
  probe
  misc_feature (1)..(25): SEQ ID NO: 5321; WAN024DBO_at; Start 668; Stop 692
tctttgaagaaaacaaggacggcta

SEQ ID NO: 151465 - DNA, 25 bp, Artificial
  probe
  misc_feature (1)..(25): SEQ ID NO: 5321; WAN024DBO_at; Start 818; Stop 842
tctcttcagatagtgaattggagtc

SEQ ID NO: 151466 - DNA, 25 bp, Artificial
  probe
  misc_feature (1)..(25): SEQ ID NO: 5321; WAN024DBO_at; Start 102; Stop 126
tttggattacaaagaaaagctggag

SEQ ID NO: 151467 - DNA, 25 bp, Artificial
  probe
  misc_feature (1)..(25): SEQ ID NO: 5321; WAN024DBO_at; Start 880; Stop 904
gaaatcaaagtcctagctcagcgag

SEQ ID NO: 151468 - DNA, 25 bp, Artificial
  probe
  misc_feature (1)..(25): SEQ ID NO: 5321; WAN024DBO_at; Start 301; Stop 325
cctaagttagggattatcccaggcg

SEQ ID NO: 151469 - DNA, 25 bp, Artificial
  probe
  misc_feature (1)..(25): SEQ ID NO: 5321; WAN024DBO_at; Start 856; Stop 880
gataaatcagataacctacctgtag

SEQ ID NO: 151470 - DNA, 25 bp, Artificial
  probe
  misc_feature (1)..(25): SEQ ID NO: 5321; WAN024DBO_at; Start 649; Stop 673
tacttcgctgataagaaaatctttg

SEQ ID NO: 151471 - DNA, 25 bp, Artificial
  probe
  misc_feature (1)..(25): SEQ ID NO: 5321; WAN024DBO_at; Start 696; Stop 720
caacattttgattctgaaagatgcc

SEQ ID NO: 151472 - DNA, 25 bp, Artificial
  probe
  misc_feature (1)..(25): SEQ ID NO: 5321; WAN024DBO_at; Start 797; Stop 821
tcaaagcgcgtaatattaaaatctc

SEQ ID NO: 151473 - DNA, 25 bp, Artificial
  probe
  misc_feature (1)..(25): SEQ ID NO: 5321; WAN024DBO_at; Start 211; Stop 235
tctcgtgagcagtatgatgcagtgg

SEQ ID NO: 151474 - DNA, 25 bp, Artificial
  probe
  misc_feature (1)..(25): SEQ ID NO: 5321; WAN024DBO_at; Start 474; Stop 498
gcctgaggcgattcacaatgttgaa

SEQ ID NO: 151475 - DNA, 25 bp, Artificial
  probe
  misc_feature (1)..(25): SEQ ID NO: 5321; WAN024DBO_at; Start 72; Stop 96
tatcaaccctacttctggtggcgag

SEQ ID NO: 151476 - DNA, 25 bp, Artificial
  probe
  misc_feature (1)..(25): SEQ ID NO: 3367; WAN024DBP_at; Start 829; Stop 853
cgatgggaaaatagaataaaagcgt

SEQ ID NO: 151477 - DNA, 25 bp, Artificial
  probe
  misc_feature (1)..(25): SEQ ID NO: 3367; WAN024DBP_at; Start 202; Stop 226
tatccgaatgctgattacggtgctc

SEQ ID NO: 151478 - DNA, 25 bp, Artificial
  probe
  misc_feature (1)..(25): SEQ ID NO: 3367; WAN024DBP_at; Start 699; Stop 723
acttggtggcgacagtgatactctc

SEQ ID NO: 151479 - DNA, 25 bp, Artificial
  probe
  misc_feature (1)..(25): SEQ ID NO: 3367; WAN024DBP_at; Start 581; Stop 605
tagatgaaatccgtcctaactatcg

SEQ ID NO: 151480 - DNA, 25 bp, Artificial
  probe
  misc_feature (1)..(25): SEQ ID NO: 3367; WAN024DBP_at; Start 49; Stop 73
tggaacaatatcaaaacaaaggact

SEQ ID NO: 151481 - DNA, 25 bp, Artificial
  probe
  misc_feature (1)..(25): SEQ ID NO: 3367; WAN024DBP_at; Start 808; Stop 832
cccttaaaggatgtagttaggcgat

SEQ ID NO: 151482 - DNA, 25 bp, Artificial
  probe
  misc_feature (1)..(25): SEQ ID NO: 3367; WAN024DBP_at; Start 401; Stop 425
atcatccagaaggtgtcaaaggcgc

SEQ ID NO: 151483 - DNA, 25 bp, Artificial
  probe
  misc_feature (1)..(25): SEQ ID NO: 3367; WAN024DBP_at; Start 388; Stop 412
gaggtaactcataatcatccagaag

SEQ ID NO: 151484 - DNA, 25 bp, Artificial
  probe
  misc_feature (1)..(25): SEQ ID NO: 3367; WAN024DBP_at; Start 746; Stop 770
cagaggcagcttacggtattcctga

SEQ ID NO: 151485 - DNA, 25 bp, Artificial
  probe
  misc_feature (1)..(25): SEQ ID NO: 3367; WAN024DBP_at; Start 715; Stop 739
gatactctcgcagcaatcacttgta

SEQ ID NO: 151486 - DNA, 25 bp, Artificial
  probe
  misc_feature (1)..(25): SEQ ID NO: 3367; WAN024DBP_at; Start 190; Stop 214
tatggcagaatgtatccgaatgctg

SEQ ID NO: 151487 - DNA, 25 bp, Artificial
  probe
  misc_feature (1)..(25): SEQ ID NO: 3367; WAN024DBP_at; Start 766; Stop 790
cctgattggatcaaggataaggcct

SEQ ID NO: 151488 - DNA, 25 bp, Artificial
  probe
  misc_feature (1)..(25): SEQ ID NO: 3367; WAN024DBP_at; Start 267; Stop 291
taatagctttgggaatggatcagct

SEQ ID NO: 151489 - DNA, 25 bp, Artificial
  probe
  misc_feature (1)..(25): SEQ ID NO: 3367; WAN024DBP_at; Start 32; Stop 56
tcggttctgtttacgaatggaacaa

SEQ ID NO: 151490 - DNA, 25 bp, Artificial
  probe
  misc_feature (1)..(25): SEQ ID NO: 3367; WAN024DBP_at; Start 683; Stop 707
taagaaatgccatctcacttggtgg

SEQ ID NO: 151491 - DNA, 25 bp, Artificial
  probe
  misc_feature (1)..(25): SEQ ID NO: 3367; WAN024DBP_at; Start 372; Stop 396
tacgagtctttctgcagaggtaact

SEQ ID NO: 151492 - DNA, 25 bp, Artificial
  probe
  misc_feature (1)..(25): SEQ ID NO: 3367; WAN024DBP_at; Start 284; Stop 308
gatcagctatgcgtatttctccatg

SEQ ID NO: 151493 - DNA, 25 bp, Artificial
  probe
  misc_feature (1)..(25): SEQ ID NO: 3367; WAN024DBP_at; Start 786; Stop 810
ggcctattcttacttggatgaaccc

SEQ ID NO: 151494 - DNA, 25 bp, Artificial
  probe
  misc_feature (1)..(25): SEQ ID NO: 3367; WAN024DBP_at; Start 429; Stop 453
ggctacagctgatgctatctttcta

SEQ ID NO: 151495 - DNA, 25 bp, Artificial
  probe
  misc_feature (1)..(25): SEQ ID NO: 3367; WAN024DBP_at; Start 134; Stop 158
cagaagcaattatgaatggtggaca

SEQ ID NO: 151496 - DNA, 25 bp, Artificial
  probe
  misc_feature (1)..(25): SEQ ID NO: 3367; WAN024DBP_at; Start 117; Stop 141
tatgacctgtgctgttgcagaagca

SEQ ID NO: 151497 - DNA, 25 bp, Artificial
  probe
  misc_feature (1)..(25): SEQ ID NO: 3367; WAN024DBP_at; Start 353; Stop 377
ggccatcatctagaggacttacgag

SEQ ID NO: 151498 - DNA, 25 bp, Artificial
  probe
  misc_feature (1)..(25): SEQ ID NO: 3367; WAN024DBP_at; Start 609; Stop 633
taacgaaacatgtcaggaaactgtc

SEQ ID NO: 151499 - DNA, 25 bp, Artificial
  probe
  misc_feature (1)..(25): SEQ ID NO: 3367; WAN024DBP_at; Start 234; Stop 258
tgcatggctaaacagcgataaccgt

SEQ ID NO: 151500 - DNA, 25 bp, Artificial
  probe
  misc_feature (1)..(25): SEQ ID NO: 3367; WAN024DBP_at; Start 217; Stop 241
tacggtgctcggtttaatgcatggc

SEQ ID NO: 151501 - DNA, 25 bp, Artificial
  probe
  misc_feature (1)..(25): SEQ ID NO: 3367; WAN024DBP_at; Start 625; Stop 649
gaaactgtccctcaagccattatcg

SEQ ID NO: 151502 - DNA, 25 bp, Artificial
  probe
  misc_feature (1)..(25): SEQ ID NO: 3367; WAN024DBP_at; Start 669; Stop 693
cttcgaagatgcgataagaaatgcc

SEQ ID NO: 151503 - DNA, 25 bp, Artificial
  probe
  misc_feature (1)..(25): SEQ ID NO: 3367; WAN024DBP_at; Start 249; Stop 273
cgataaccgtgagccttataatagc

SEQ ID NO: 151504 - DNA, 25 bp, Artificial
  probe
  misc_feature (1)..(25): SEQ ID NO: 3367; WAN024DBP_at; Start 104; Stop 128
cagatgacacggttatgacctgtgc

SEQ ID NO: 151505 - DNA, 25 bp, Artificial
  probe
  misc_feature (1)..(25): SEQ ID NO: 3367; WAN024DBP_at; Start 649; Stop 673
gcctttcttgaaagtagagacttcg

SEQ ID NO: 151506 - DNA, 25 bp, Artificial
  probe
  misc_feature (1)..(25): SEQ ID NO: 3367; WAN024DBP_at; Start 507; Stop 531
caatcctacagagtgtaaaagacga

SEQ ID NO: 151507 - DNA, 25 bp, Artificial
  probe
  misc_feature (1)..(25): SEQ ID NO: 3367; WAN024DBP_at; Start 731; Stop 755
tcacttgtagcatagcagaggcagc

SEQ ID NO: 151508 - DNA, 25 bp, Artificial
  probe
  misc_feature (1)..(25): SEQ ID NO: 3367; WAN024DBP_at; Start 305; Stop 329
catgtgcttggatcatggactgtgg

SEQ ID NO: 151509 - DNA, 25 bp, Artificial
  probe
  misc_feature (1)..(25): SEQ ID NO: 3367; WAN024DBP_at; Start 87; Stop 111
gaaggactgcttttttacagatgac

SEQ ID NO: 151510 - DNA, 25 bp, Artificial
  probe
  misc_feature (1)..(25): SEQ ID NO: 2719; WAN024DBQ_at; Start 312; Stop 336
taagcctaaagctggttcaaaagtc

SEQ ID NO: 151511 - DNA, 25 bp, Artificial
  probe
  misc_feature (1)..(25): SEQ ID NO: 2719; WAN024DBQ_at; Start 455; Stop 479
tagatggtcgcgtattagatgttcg

SEQ ID NO: 151512 - DNA, 25 bp, Artificial
  probe
  misc_feature (1)..(25): SEQ ID NO: 2719; WAN024DBQ_at; Start 226; Stop 250
gagcttaaagagttttatggtcgaa

SEQ ID NO: 151513 - DNA, 25 bp, Artificial
  probe
  misc_feature (1)..(25): SEQ ID NO: 2719; WAN024DBQ_at; Start 394; Stop 418
gactatcctatatggattagtgagg

SEQ ID NO: 151514 - DNA, 25 bp, Artificial
  probe
  misc_feature (1)..(25): SEQ ID NO: 2719; WAN024DBQ_at; Start 631; Stop 655
gcattgggaaattatggcctatctc

SEQ ID NO: 151515 - DNA, 25 bp, Artificial
  probe
  misc_feature (1)..(25): SEQ ID NO: 2719; WAN024DBQ_at; Start 585; Stop 609
tactcgcgatggcagaacacttgtt

SEQ ID NO: 151516 - DNA, 25 bp, Artificial
  probe
  misc_feature (1)..(25): SEQ ID NO: 2719; WAN024DBQ_at; Start 442; Stop 466
cgttgttttgtgttagatggtcgcg

SEQ ID NO: 151517 - DNA, 25 bp, Artificial
  probe
  misc_feature (1)..(25): SEQ ID NO: 2719; WAN024DBQ_at; Start 768; Stop 792
ggtagataaccaatataaaaagcat

SEQ ID NO: 151518 - DNA, 25 bp, Artificial
  probe
  misc_feature (1)..(25): SEQ ID NO: 2719; WAN024DBQ_at; Start 422; Stop 446
tagaattcatagctgaatggcgttg

SEQ ID NO: 151519 - DNA, 25 bp, Artificial
  probe
  misc_feature (1)..(25): SEQ ID NO: 2719; WAN024DBQ_at; Start 550; Stop 574
gatgcgccaatagcttatggactag

SEQ ID NO: 151520 - DNA, 25 bp, Artificial
  probe
  misc_feature (1)..(25): SEQ ID NO: 2719; WAN024DBQ_at; Start 665; Stop 689
caatcaattttcatagagctaggtg

SEQ ID NO: 151521 - DNA, 25 bp, Artificial
  probe
  misc_feature (1)..(25): SEQ ID NO: 2719; WAN024DBQ_at; Start 171; Stop 195
tagagcattactaaaaatgatgggc

SEQ ID NO: 151522 - DNA, 25 bp, Artificial
  probe
  misc_feature (1)..(25): SEQ ID NO: 2719; WAN024DBQ_at; Start 410; Stop 434
ttagtgaggttgtagaattcatagc

SEQ ID NO: 151523 - DNA, 25 bp, Artificial
  probe
  misc_feature (1)..(25): SEQ ID NO: 2719; WAN024DBQ_at; Start 596; Stop 620
gcagaacacttgttgttgaagtaaa

SEQ ID NO: 151524 - DNA, 25 bp, Artificial
  probe
  misc_feature (1)..(25): SEQ ID NO: 2719; WAN024DBQ_at; Start 569; Stop 593
gactagatatcggtgttactcgcga

SEQ ID NO: 151525 - DNA, 25 bp, Artificial
  probe
  misc_feature (1)..(25): SEQ ID NO: 2719; WAN024DBQ_at; Start 68; Stop 92
taggtgcctacttacaaggagaaga

SEQ ID NO: 151526 - DNA, 25 bp, Artificial
  probe
  misc_feature (1)..(25): SEQ ID NO: 2719; WAN024DBQ_at; Start 790; Stop 814
catcaaaatgaacaaggaggaatct

SEQ ID NO: 151527 - DNA, 25 bp, Artificial
  probe
  misc_feature (1)..(25): SEQ ID NO: 2719; WAN024DBQ_at; Start 467; Stop 491
tattagatgttcgaccctatacagg

SEQ ID NO: 151528 - DNA, 25 bp, Artificial
  probe
  misc_feature (1)..(25): SEQ ID NO: 2719; WAN024DBQ_at; Start 15; Stop 39
tagacaaagtaaattaccaagtgag

SEQ ID NO: 151529 - DNA, 25 bp, Artificial
  probe
  misc_feature (1)..(25): SEQ ID NO: 2719; WAN024DBQ_at; Start 259; Stop 283
gctggtattttaggagagattgtga

SEQ ID NO: 151530 - DNA, 25 bp, Artificial
  probe
  misc_feature (1)..(25): SEQ ID NO: 2719; WAN024DBQ_at; Start 154; Stop 178
gattatataatggagactagagcat

SEQ ID NO: 151531 - DNA, 25 bp, Artificial
  probe
  misc_feature (1)..(25): SEQ ID NO: 2719; WAN024DBQ_at; Start 479; Stop 503
gaccctatacaggtgattatcatgc

SEQ ID NO: 151532 - DNA, 25 bp, Artificial
  probe
  misc_feature (1)..(25): SEQ ID NO: 2719; WAN024DBQ_at; Start 328; Stop 352
tcaaaagtctttactggaagagttg

SEQ ID NO: 151533 - DNA, 25 bp, Artificial
  probe
  misc_feature (1)..(25): SEQ ID NO: 2719; WAN024DBQ_at; Start 534; Stop 558
gatatcatgttggaaagatgcgcca

SEQ ID NO: 151534 - DNA, 25 bp, Artificial
  probe
  misc_feature (1)..(25): SEQ ID NO: 2719; WAN024DBQ_at; Start 213; Stop 237
tgactatcctattgagcttaaagag

SEQ ID NO: 151535 - DNA, 25 bp, Artificial
  probe
  misc_feature (1)..(25): SEQ ID NO: 2719; WAN024DBQ_at; Start 680; Stop 704
gagctaggtggaaagaaatggtaaa

SEQ ID NO: 151536 - DNA, 25 bp, Artificial
  probe
  misc_feature (1)..(25): SEQ ID NO: 2719; WAN024DBQ_at; Start 31; Stop 55
ccaagtgaggtttcaattaataaat

SEQ ID NO: 151537 - DNA, 25 bp, Artificial
  probe
  misc_feature (1)..(25): SEQ ID NO: 2719; WAN024DBQ_at; Start 515; Stop 539
caagtgtaattgatgaagcgatatc

SEQ ID NO: 151538 - DNA, 25 bp, Artificial
  probe
  misc_feature (1)..(25): SEQ ID NO: 2719; WAN024DBQ_at; Start 496; Stop 520
tatcatgcacaatttgatgcaagtg

SEQ ID NO: 151539 - DNA, 25 bp, Artificial
  probe
  misc_feature (1)..(25): SEQ ID NO: 2719; WAN024DBQ_at; Start 115; Stop 139
tctgaaataaaagagttaacaagtg

SEQ ID NO: 151540 - DNA, 25 bp, Artificial
  probe
  misc_feature (1)..(25): SEQ ID NO: 2719; WAN024DBQ_at; Start 362; Stop 386
cccatgatttaataggtattggtct

SEQ ID NO: 151541 - DNA, 25 bp, Artificial
  probe
  misc_feature (1)..(25): SEQ ID NO: 2719; WAN024DBQ_at; Start 241; Stop 265
tatggtcgaaagatttatgctggta

SEQ ID NO: 151542 - DNA, 25 bp, Artificial
  probe
  misc_feature (1)..(25): SEQ ID NO: 2719; WAN024DBQ_at; Start 643; Stop 667
tatggcctatctcctttaaaatcaa

SEQ ID NO: 151543 - DNA, 25 bp, Artificial
  probe
  misc_feature (1)..(25): SEQ ID NO: 2719; WAN024DBQ_at; Start 378; Stop 402
tattggtctacctttcgactatcct

SEQ ID NO: 151544 - DNA, 25 bp, Artificial
  probe
  misc_feature (1)..(25): SEQ ID NO: 7515; WAN024DBR_at; Start 36; Stop 60
tcaaaaaaataagagcaaaattgct

SEQ ID NO: 151545 - DNA, 25 bp, Artificial
  probe
  misc_feature (1)..(25): SEQ ID NO: 7515; WAN024DBR_at; Start 44; Stop 68
ataagagcaaaattgctattatttt

SEQ ID NO: 151546 - DNA, 25 bp, Artificial
  probe
  misc_feature (1)..(25): SEQ ID NO: 7515; WAN024DBR_at; Start 38; Stop 62
aaaaaaataagagcaaaattgctat

SEQ ID NO: 151547 - DNA, 25 bp, Artificial
  probe
  misc_feature (1)..(25): SEQ ID NO: 7515; WAN024DBR_at; Start 41; Stop 65
aaaataagagcaaaattgctattat

SEQ ID NO: 151548 - DNA, 25 bp, Artificial
  probe
  misc_feature (1)..(25): SEQ ID NO: 7515; WAN024DBR_at; Start 45; Stop 69
taagagcaaaattgctattattttt

SEQ ID NO: 151549 - DNA, 25 bp, Artificial
  probe
  misc_feature (1)..(25): SEQ ID NO: 7515; WAN024DBR_at; Start 47; Stop 71
agagcaaaattgctattatttttta

SEQ ID NO: 151550 - DNA, 25 bp, Artificial
  probe
  misc_feature (1)..(25): SEQ ID NO: 7515; WAN024DBR_at; Start 35; Stop 59
ctcaaaaaaataagagcaaaattgc

SEQ ID NO: 151551 - DNA, 25 bp, Artificial
  probe
  misc_feature (1)..(25): SEQ ID NO: 7515; WAN024DBR_at; Start 46; Stop 70
aagagcaaaattgctattatttttt

SEQ ID NO: 151552 - DNA, 25 bp, Artificial
  probe
  misc_feature (1)..(25): SEQ ID NO: 7515; WAN024DBR_at; Start 48; Stop 72
gagcaaaattgctattattttttac

SEQ ID NO: 151553 - DNA, 25 bp, Artificial
  probe
  misc_feature (1)..(25): SEQ ID NO: 7515; WAN024DBR_at; Start 39; Stop 63
aaaaaataagagcaaaattgctatt

SEQ ID NO: 151554 - DNA, 25 bp, Artificial
  probe
  misc_feature (1)..(25): SEQ ID NO: 7515; WAN024DBR_at; Start 43; Stop 67
aataagagcaaaattgctattattt

SEQ ID NO: 151555 - DNA, 25 bp, Artificial
  probe
  misc_feature (1)..(25): SEQ ID NO: 7515; WAN024DBR_at; Start 37; Stop 61
caaaaaaataagagcaaaattgcta

SEQ ID NO: 151556 - DNA, 25 bp, Artificial
  probe
  misc_feature (1)..(25): SEQ ID NO: 7515; WAN024DBR_at; Start 50; Stop 74
gcaaaattgctattattttttacaa

SEQ ID NO: 151557 - DNA, 25 bp, Artificial
  probe
  misc_feature (1)..(25): SEQ ID NO: 7515; WAN024DBR_at; Start 40; Stop 64
aaaaataagagcaaaattgctatta

SEQ ID NO: 151558 - DNA, 25 bp, Artificial
  probe
  misc_feature (1)..(25): SEQ ID NO: 7515; WAN024DBR_at; Start 42; Stop 66
aaataagagcaaaattgctattatt

SEQ ID NO: 151559 - DNA, 25 bp, Artificial
  probe
  misc_feature (1)..(25): SEQ ID NO: 7515; WAN024DBR_at; Start 49; Stop 73
agcaaaattgctattattttttaca

SEQ ID NO: 151560 - DNA, 25 bp, Artificial
  probe
  misc_feature (1)..(25): SEQ ID NO: 7515; WAN024DBR_at; Start 34; Stop 58
actcaaaaaaataagagcaaaattg

SEQ ID NO: 151561 - DNA, 25 bp, Artificial
  probe
  misc_feature (1)..(25): SEQ ID NO: 4004; WAN024DBS_at; Start 112; Stop 136
ctaacaaagtcccaggttattgaat

SEQ ID NO: 151562 - DNA, 25 bp, Artificial
  probe
  misc_feature (1)..(25): SEQ ID NO: 4004; WAN024DBS_at; Start 2; Stop 26
tgatgaaaatggcaaccgataaaaa

SEQ ID NO: 151563 - DNA, 25 bp, Artificial
  probe
  misc_feature (1)..(25): SEQ ID NO: 4004; WAN024DBS_at; Start 5; Stop 29
tgaaaatggcaaccgataaaaatag

SEQ ID NO: 151564 - DNA, 25 bp, Artificial
  probe
  misc_feature (1)..(25): SEQ ID NO: 4004; WAN024DBS_at; Start 132; Stop 156
tgaattactcctaaataccgttgat

SEQ ID NO: 151565 - DNA, 25 bp, Artificial
  probe
  misc_feature (1)..(25): SEQ ID NO: 4004; WAN024DBS_at; Start 102; Stop 126
gggaatgcgactaacaaagtcccag

SEQ ID NO: 151566 - DNA, 25 bp, Artificial
  probe
  misc_feature (1)..(25): SEQ ID NO: 4004; WAN024DBS_at; Start 131; Stop 155
ttgaattactcctaaataccgttga

SEQ ID NO: 151567 - DNA, 25 bp, Artificial
  probe
  misc_feature (1)..(25): SEQ ID NO: 4004; WAN024DBS_at; Start 44; Stop 68
tggatgataaaaatctagagaaact

SEQ ID NO: 151568 - DNA, 25 bp, Artificial
  probe
  misc_feature (1)..(25): SEQ ID NO: 4004; WAN024DBS_at; Start 59; Stop 83
tagagaaacttgaaaatttagtaga

SEQ ID NO: 151569 - DNA, 25 bp, Artificial
  probe
  misc_feature (1)..(25): SEQ ID NO: 4004; WAN024DBS_at; Start 29; Stop 53
gaataatgattagcttggatgataa

SEQ ID NO: 151570 - DNA, 25 bp, Artificial
  probe
  misc_feature (1)..(25): SEQ ID NO: 4004; WAN024DBS_at; Start 36; Stop 60
gattagcttggatgataaaaatcta

SEQ ID NO: 151571 - DNA, 25 bp, Artificial
  probe
  misc_feature (1)..(25): SEQ ID NO: 4004; WAN024DBS_at; Start 142; Stop 166
ctaaataccgttgattatttcgatg

SEQ ID NO: 151572 - DNA, 25 bp, Artificial
  probe
  misc_feature (1)..(25): SEQ ID NO: 4004; WAN024DBS_at; Start 121; Stop 145
tcccaggttattgaattactcctaa

SEQ ID NO: 151573 - DNA, 25 bp, Artificial
  probe
  misc_feature (1)..(25): SEQ ID NO: 4004; WAN024DBS_at; Start 46; Stop 70
gatgataaaaatctagagaaacttg

SEQ ID NO: 151574 - DNA, 25 bp, Artificial
  probe
  misc_feature (1)..(25): SEQ ID NO: 4004; WAN024DBS_at; Start 23; Stop 47
aaaatagaataatgattagcttgga

SEQ ID NO: 151575 - DNA, 25 bp, Artificial
  probe
  misc_feature (1)..(25): SEQ ID NO: 4004; WAN024DBS_at; Start 107; Stop 131
tgcgactaacaaagtcccaggttat

SEQ ID NO: 151576 - DNA, 25 bp, Artificial
  probe
  misc_feature (1)..(25): SEQ ID NO: 4004; WAN024DBS_at; Start 3; Stop 27
gatgaaaatggcaaccgataaaaat

SEQ ID NO: 151577 - DNA, 25 bp, Artificial
  probe
  misc_feature (1)..(25): SEQ ID NO: 4004; WAN024DBS_at; Start 38; Stop 62
ttagcttggatgataaaaatctaga

SEQ ID NO: 151578 - DNA, 25 bp, Artificial
  probe
  misc_feature (1)..(25): SEQ ID NO: 4004; WAN024DBS_at; Start 116; Stop 140
caaagtcccaggttattgaattact

SEQ ID NO: 151579 - DNA, 25 bp, Artificial
  probe
  misc_feature (1)..(25): SEQ ID NO: 4004; WAN024DBS_at; Start 55; Stop 79
aatctagagaaacttgaaaatttag

SEQ ID NO: 151580 - DNA, 25 bp, Artificial
  probe
  misc_feature (1)..(25): SEQ ID NO: 4004; WAN024DBS_at; Start 140; Stop 164
tcctaaataccgttgattatttcga

SEQ ID NO: 151581 - DNA, 25 bp, Artificial
  probe
  misc_feature (1)..(25): SEQ ID NO: 4004; WAN024DBS_at; Start 135; Stop 159
attactcctaaataccgttgattat

SEQ ID NO: 151582 - DNA, 25 bp, Artificial
  probe
  misc_feature (1)..(25): SEQ ID NO: 4004; WAN024DBS_at; Start 105; Stop 129
aatgcgactaacaaagtcccaggtt

SEQ ID NO: 151583 - DNA, 25 bp, Artificial
  probe
  misc_feature (1)..(25): SEQ ID NO: 4004; WAN024DBS_at; Start 32; Stop 56
taatgattagcttggatgataaaaa

SEQ ID NO: 151584 - DNA, 25 bp, Artificial
  probe
  misc_feature (1)..(25): SEQ ID NO: 4004; WAN024DBS_at; Start 49; Stop 73
gataaaaatctagagaaacttgaaa

SEQ ID NO: 151585 - DNA, 25 bp, Artificial
  probe
  misc_feature (1)..(25): SEQ ID NO: 4004; WAN024DBS_at; Start 109; Stop 133
cgactaacaaagtcccaggttattg

SEQ ID NO: 151586 - DNA, 25 bp, Artificial
  probe
  misc_feature (1)..(25): SEQ ID NO: 4004; WAN024DBS_at; Start 110; Stop 134
gactaacaaagtcccaggttattga

SEQ ID NO: 151587 - DNA, 25 bp, Artificial
  probe
  misc_feature (1)..(25): SEQ ID NO: 4004; WAN024DBS_at; Start 104; Stop 128
gaatgcgactaacaaagtcccaggt

SEQ ID NO: 151588 - DNA, 25 bp, Artificial
  probe
  misc_feature (1)..(25): SEQ ID NO: 4004; WAN024DBS_at; Start 8; Stop 32
aaatggcaaccgataaaaatagaat

SEQ ID NO: 151589 - DNA, 25 bp, Artificial
  probe
  misc_feature (1)..(25): SEQ ID NO: 4004; WAN024DBS_at; Start 130; Stop 154
attgaattactcctaaataccgttg

SEQ ID NO: 151590 - DNA, 25 bp, Artificial
  probe
  misc_feature (1)..(25): SEQ ID NO: 4004; WAN024DBS_at; Start 103; Stop 127
ggaatgcgactaacaaagtcccagg

SEQ ID NO: 151591 - DNA, 25 bp, Artificial
  probe
  misc_feature (1)..(25): SEQ ID NO: 4004; WAN024DBS_at; Start 119; Stop 143
agtcccaggttattgaattactcct

SEQ ID NO: 151592 - DNA, 25 bp, Artificial
  probe
  misc_feature (1)..(25): SEQ ID NO: 4004; WAN024DBS_at; Start 41; Stop 65
gcttggatgataaaaatctagagaa

SEQ ID NO: 151593 - DNA, 25 bp, Artificial
  probe
  misc_feature (1)..(25): SEQ ID NO: 4004; WAN024DBS_at; Start 92; Stop 116
gagatagaaggggaatgcgactaac

SEQ ID NO: 151594 - DNA, 25 bp, Artificial
  probe
  misc_feature (1)..(25): SEQ ID NO: 4004; WAN024DBS_at; Start 123; Stop 147
ccaggttattgaattactcctaaat

SEQ ID NO: 151595 - DNA, 25 bp, Artificial
  probe
  misc_feature (1)..(25): SEQ ID NO: 6940; WAN024DBT_at; Start 53; Stop 77
aaaatctttatactttgtgccatct

SEQ ID NO: 151596 - DNA, 25 bp, Artificial
  probe
  misc_feature (1)..(25): SEQ ID NO: 6940; WAN024DBT_at; Start 14; Stop 38
acctcttatcatctgcctatgttta

SEQ ID NO: 151597 - DNA, 25 bp, Artificial
  probe
  misc_feature (1)..(25): SEQ ID NO: 6940; WAN024DBT_at; Start 21; Stop 45
atcatctgcctatgtttacaaccat

SEQ ID NO: 151598 - DNA, 25 bp, Artificial
  probe
  misc_feature (1)..(25): SEQ ID NO: 6940; WAN024DBT_at; Start 54; Stop 78
aaatctttatactttgtgccatctt

SEQ ID NO: 151599 - DNA, 25 bp, Artificial
  probe
  misc_feature (1)..(25): SEQ ID NO: 6940; WAN024DBT_at; Start 56; Stop 80
atctttatactttgtgccatctttc

SEQ ID NO: 151600 - DNA, 25 bp, Artificial
  probe
  misc_feature (1)..(25): SEQ ID NO: 6940; WAN024DBT_at; Start 12; Stop 36
tgacctcttatcatctgcctatgtt

SEQ ID NO: 151601 - DNA, 25 bp, Artificial
  probe
  misc_feature (1)..(25): SEQ ID NO: 6940; WAN024DBT_at; Start 57; Stop 81
tctttatactttgtgccatctttct

SEQ ID NO: 151602 - DNA, 25 bp, Artificial
  probe
  misc_feature (1)..(25): SEQ ID NO: 6940; WAN024DBT_at; Start 63; Stop 87
tactttgtgccatctttctttttct

SEQ ID NO: 151603 - DNA, 25 bp, Artificial
  probe
  misc_feature (1)..(25): SEQ ID NO: 6940; WAN024DBT_at; Start 29; Stop 53
cctatgtttacaaccatagtaataa

SEQ ID NO: 151604 - DNA, 25 bp, Artificial
  probe
  misc_feature (1)..(25): SEQ ID NO: 6940; WAN024DBT_at; Start 58; Stop 82
ctttatactttgtgccatctttctt

SEQ ID NO: 151605 - DNA, 25 bp, Artificial
  probe
  misc_feature (1)..(25): SEQ ID NO: 6940; WAN024DBT_at; Start 26; Stop 50
ctgcctatgtttacaaccatagtaa

SEQ ID NO: 151606 - DNA, 25 bp, Artificial
  probe
  misc_feature (1)..(25): SEQ ID NO: 6940; WAN024DBT_at; Start 23; Stop 47
catctgcctatgtttacaaccatag

SEQ ID NO: 151607 - DNA, 25 bp, Artificial
  probe
  misc_feature (1)..(25): SEQ ID NO: 6940; WAN024DBT_at; Start 11; Stop 35
atgacctcttatcatctgcctatgt

SEQ ID NO: 151608 - DNA, 25 bp, Artificial
  probe
  misc_feature (1)..(25): SEQ ID NO: 6940; WAN024DBT_at; Start 2; Stop 26
tgtacacttatgacctcttatcatc

SEQ ID NO: 151609 - DNA, 25 bp, Artificial
  probe
  misc_feature (1)..(25): SEQ ID NO: 6940; WAN024DBT_at; Start 15; Stop 39
cctcttatcatctgcctatgtttac

SEQ ID NO: 151610 - DNA, 25 bp, Artificial
  probe
  misc_feature (1)..(25): SEQ ID NO: 6940; WAN024DBT_at; Start 20; Stop 44
tatcatctgcctatgtttacaacca

SEQ ID NO: 151611 - DNA, 25 bp, Artificial
  probe
  misc_feature (1)..(25): SEQ ID NO: 6940; WAN024DBT_at; Start 28; Stop 52
gcctatgtttacaaccatagtaata

SEQ ID NO: 151612 - DNA, 25 bp, Artificial
  probe
  misc_feature (1)..(25): SEQ ID NO: 6940; WAN024DBT_at; Start 16; Stop 40
ctcttatcatctgcctatgtttaca

SEQ ID NO: 151613 - DNA, 25 bp, Artificial
  probe
  misc_feature (1)..(25): SEQ ID NO: 6940; WAN024DBT_at; Start 6; Stop 30
cacttatgacctcttatcatctgcc

SEQ ID NO: 151614 - DNA, 25 bp, Artificial
  probe
  misc_feature (1)..(25): SEQ ID NO: 6940; WAN024DBT_at; Start 22; Stop 46
tcatctgcctatgtttacaaccata

SEQ ID NO: 151615 - DNA, 25 bp, Artificial
  probe
  misc_feature (1)..(25): SEQ ID NO: 6940; WAN024DBT_at; Start 10; Stop 34
tatgacctcttatcatctgcctatg

SEQ ID NO: 151616 - DNA, 25 bp, Artificial
  probe
  misc_feature (1)..(25): SEQ ID NO: 6940; WAN024DBT_at; Start 7; Stop 31
acttatgacctcttatcatctgcct

SEQ ID NO: 151617 - DNA, 25 bp, Artificial
  probe
  misc_feature (1)..(25): SEQ ID NO: 6940; WAN024DBT_at; Start 52; Stop 76
aaaaatctttatactttgtgccatc

SEQ ID NO: 151618 - DNA, 25 bp, Artificial
  probe
  misc_feature (1)..(25): SEQ ID NO: 6940; WAN024DBT_at; Start 5; Stop 29
acacttatgacctcttatcatctgc

SEQ ID NO: 151619 - DNA, 25 bp, Artificial
  probe
  misc_feature (1)..(25): SEQ ID NO: 6940; WAN024DBT_at; Start 27; Stop 51
tgcctatgtttacaaccatagtaat

SEQ ID NO: 151620 - DNA, 25 bp, Artificial
  probe
  misc_feature (1)..(25): SEQ ID NO: 6940; WAN024DBT_at; Start 19; Stop 43
ttatcatctgcctatgtttacaacc

SEQ ID NO: 151621 - DNA, 25 bp, Artificial
  probe
  misc_feature (1)..(25): SEQ ID NO: 6940; WAN024DBT_at; Start 51; Stop 75
taaaaatctttatactttgtgccat

SEQ ID NO: 151622 - DNA, 25 bp, Artificial
  probe
  misc_feature (1)..(25): SEQ ID NO: 6940; WAN024DBT_at; Start 25; Stop 49
tctgcctatgtttacaaccatagta

SEQ ID NO: 151623 - DNA, 25 bp, Artificial
  probe
  misc_feature (1)..(25): SEQ ID NO: 6940; WAN024DBT_at; Start 18; Stop 42
cttatcatctgcctatgtttacaac

SEQ ID NO: 151624 - DNA, 25 bp, Artificial
  probe
  misc_feature (1)..(25): SEQ ID NO: 6940; WAN024DBT_at; Start 61; Stop 85
tatactttgtgccatctttcttttt

SEQ ID NO: 151625 - DNA, 25 bp, Artificial
  probe
  misc_feature (1)..(25): SEQ ID NO: 6940; WAN024DBT_at; Start 4; Stop 28
tacacttatgacctcttatcatctg

SEQ ID NO: 151626 - DNA, 25 bp, Artificial
  probe
  misc_feature (1)..(25): SEQ ID NO: 6940; WAN024DBT_at; Start 31; Stop 55
tatgtttacaaccatagtaataaaa

SEQ ID NO: 151627 - DNA, 25 bp, Artificial
  probe
  misc_feature (1)..(25): SEQ ID NO: 6940; WAN024DBT_at; Start 13; Stop 37
gacctcttatcatctgcctatgttt

SEQ ID NO: 151628 - DNA, 25 bp, Artificial
  probe
  misc_feature (1)..(25): SEQ ID NO: 6940; WAN024DBT_at; Start 8; Stop 32
cttatgacctcttatcatctgccta

SEQ ID NO: 151629 - DNA, 25 bp, Artificial
  probe
  misc_feature (1)..(25): SEQ ID NO: 3141; WAN024DBU_at; Start 1128; Stop 1152
gatgctgttgcagaggtgattgtca

SEQ ID NO: 151630 - DNA, 25 bp, Artificial
  probe
  misc_feature (1)..(25): SEQ ID NO: 3141; WAN024DBU_at; Start 494; Stop 518
gaatggtggctttgctccgtatgga

SEQ ID NO: 151631 - DNA, 25 bp, Artificial
  probe
  misc_feature (1)..(25): SEQ ID NO: 3141; WAN024DBU_at; Start 372; Stop 396
tcatctaaagatgctgggaaactaa

SEQ ID NO: 151632 - DNA, 25 bp, Artificial
  probe
  misc_feature (1)..(25): SEQ ID NO: 3141; WAN024DBU_at; Start 870; Stop 894
gctgctcaggttaagctaaaatctc

SEQ ID NO: 151633 - DNA, 25 bp, Artificial
  probe
  misc_feature (1)..(25): SEQ ID NO: 3141; WAN024DBU_at; Start 609; Stop 633
ggagccaatgggatatctaaatact

SEQ ID NO: 151634 - DNA, 25 bp, Artificial
  probe
  misc_feature (1)..(25): SEQ ID NO: 3141; WAN024DBU_at; Start 947; Stop 971
gctttctggaattgtaaaatgcccg

SEQ ID NO: 151635 - DNA, 25 bp, Artificial
  probe
  misc_feature (1)..(25): SEQ ID NO: 3141; WAN024DBU_at; Start 545; Stop 569
tataaatgaggaagaggcagttgca

SEQ ID NO: 151636 - DNA, 25 bp, Artificial
  probe
  misc_feature (1)..(25): SEQ ID NO: 3141; WAN024DBU_at; Start 1569; Stop 1593
gaaaaacaatctaacggacaatggc

SEQ ID NO: 151637 - DNA, 25 bp, Artificial
  probe
  misc_feature (1)..(25): SEQ ID NO: 3141; WAN024DBU_at; Start 531; Stop 555
gacggcaagctgtttataaatgagg

SEQ ID NO: 151638 - DNA, 25 bp, Artificial
  probe
  misc_feature (1)..(25): SEQ ID NO: 3141; WAN024DBU_at; Start 512; Stop 536
gtatggatataaacttgaagacggc

SEQ ID NO: 151639 - DNA, 25 bp, Artificial
  probe
  misc_feature (1)..(25): SEQ ID NO: 3141; WAN024DBU_at; Start 638; Stop 662
gaatcatggaattagaaaaatccca

SEQ ID NO: 151640 - DNA, 25 bp, Artificial
  probe
  misc_feature (1)..(25): SEQ ID NO: 3141; WAN024DBU_at; Start 674; Stop 698
taagaatcctttgtttgatgcaggt

SEQ ID NO: 151641 - DNA, 25 bp, Artificial
  probe
  misc_feature (1)..(25): SEQ ID NO: 3141; WAN024DBU_at; Start 342; Stop 366
aatcttatctgcgttgaagatggca

SEQ ID NO: 151642 - DNA, 25 bp, Artificial
  probe
  misc_feature (1)..(25): SEQ ID NO: 3141; WAN024DBU_at; Start 1326; Stop 1350
cattataagagaaggaaacaggatt

SEQ ID NO: 151643 - DNA, 25 bp, Artificial
  probe
  misc_feature (1)..(25): SEQ ID NO: 3141; WAN024DBU_at; Start 412; Stop 436
cagctgtggctgaaatagaaagaga

SEQ ID NO: 151644 - DNA, 25 bp, Artificial
  probe
  misc_feature (1)..(25): SEQ ID NO: 3141; WAN024DBU_at; Start 658; Stop 682
tcccaagacagaatggtaagaatcc

SEQ ID NO: 151645 - DNA, 25 bp, Artificial
  probe
  misc_feature (1)..(25): SEQ ID NO: 3141; WAN024DBU_at; Start 560; Stop 584
ggcagttgcaataagaacgattttc

SEQ ID NO: 151646 - DNA, 25 bp, Artificial
  probe
  misc_feature (1)..(25): SEQ ID NO: 3141; WAN024DBU_at; Start 1199; Stop 1223
caacatgaaggtggatacctctgaa

SEQ ID NO: 151647 - DNA, 25 bp, Artificial
  probe
  misc_feature (1)..(25): SEQ ID NO: 3141; WAN024DBU_at; Start 1516; Stop 1540
tagagcgtaggcagttaatttcagc

SEQ ID NO: 151648 - DNA, 25 bp, Artificial
  probe
  misc_feature (1)..(25): SEQ ID NO: 3141; WAN024DBU_at; Start 1440; Stop 1464
gctgaaaagcttacaggagataaca

SEQ ID NO: 151649 - DNA, 25 bp, Artificial
  probe
  misc_feature (1)..(25): SEQ ID NO: 3141; WAN024DBU_at; Start 1504; Stop 1528
tcatgaatgatgtagagcgtaggca

SEQ ID NO: 151650 - DNA, 25 bp, Artificial
  probe
  misc_feature (1)..(25): SEQ ID NO: 3141; WAN024DBU_at; Start 916; Stop 940
tgaataaaggaaaagatacacgcac

SEQ ID NO: 151651 - DNA, 25 bp, Artificial
  probe
  misc_feature (1)..(25): SEQ ID NO: 3141; WAN024DBU_at; Start 290; Stop 314
aaatgccgctgatgttctttctaca

SEQ ID NO: 151652 - DNA, 25 bp, Artificial
  probe
  misc_feature (1)..(25): SEQ ID NO: 3141; WAN024DBU_at; Start 961; Stop 985
taaaatgcccgatatgtggagtggg

SEQ ID NO: 151653 - DNA, 25 bp, Artificial
  probe
  misc_feature (1)..(25): SEQ ID NO: 3141; WAN024DBU_at; Start 595; Stop 619
taaatactacgataggagccaatgg

SEQ ID NO: 151654 - DNA, 25 bp, Artificial
  probe
  misc_feature (1)..(25): SEQ ID NO: 3141; WAN024DBU_at; Start 274; Stop 298
tatcaagatttgcaagaaatgccgc

SEQ ID NO: 151655 - DNA, 25 bp, Artificial
  probe
  misc_feature (1)..(25): SEQ ID NO: 3141; WAN024DBU_at; Start 53; Stop 77
tacacgagtatctacgtcaatacag

SEQ ID NO: 151656 - DNA, 25 bp, Artificial
  probe
  misc_feature (1)..(25): SEQ ID NO: 3141; WAN024DBU_at; Start 98; Stop 122
ggcacaaaaatcacgaatgaaagct

SEQ ID NO: 151657 - DNA, 25 bp, Artificial
  probe
  misc_feature (1)..(25): SEQ ID NO: 3141; WAN024DBU_at; Start 825; Stop 849
tctgaagggatacatgaagctatag

SEQ ID NO: 151658 - DNA, 25 bp, Artificial
  probe
  misc_feature (1)..(25): SEQ ID NO: 3141; WAN024DBU_at; Start 797; Stop 821
gcaggttgaacaagatgaatatcta

SEQ ID NO: 151659 - DNA, 25 bp, Artificial
  probe
  misc_feature (1)..(25): SEQ ID NO: 3141; WAN024DBU_at; Start 932; Stop 956
tacacgcacacacttgctttctgga

SEQ ID NO: 151660 - DNA, 25 bp, Artificial
  probe
  misc_feature (1)..(25): SEQ ID NO: 3141; WAN024DBU_at; Start 1410; Stop 1434
gatgcgaaagcaaagaaacagacta

SEQ ID NO: 151661 - DNA, 25 bp, Artificial
  probe
  misc_feature (1)..(25): SEQ ID NO: 3141; WAN024DBU_at; Start 1245; Stop 1269
taccaaaaggaattgagaaagagtc

SEQ ID NO: 151662 - DNA, 25 bp, Artificial
  probe
  misc_feature (1)..(25): SEQ ID NO: 3141; WAN024DBU_at; Start 574; Stop 598
gaacgattttcgaccagtatgtaaa

SEQ ID NO: 151663 - DNA, 25 bp, Artificial
  probe
  misc_feature (1)..(25): SEQ ID NO: 6854; WAN024DBV_at; Start 77; Stop 101
ggagaatatctggaggagataccta

SEQ ID NO: 151664 - DNA, 25 bp, Artificial
  probe
  misc_feature (1)..(25): SEQ ID NO: 6854; WAN024DBV_at; Start 326; Stop 350
cagaaacagcctgggcagagaaaaa

SEQ ID NO: 151665 - DNA, 25 bp, Artificial
  probe
  misc_feature (1)..(25): SEQ ID NO: 6854; WAN024DBV_at; Start 435; Stop 459
tatagagatagataaagagagagag

SEQ ID NO: 151666 - DNA, 25 bp, Artificial
  probe
  misc_feature (1)..(25): SEQ ID NO: 6854; WAN024DBV_at; Start 268; Stop 292
gaagttgtaacagaaaatgatgaat

SEQ ID NO: 151667 - DNA, 25 bp, Artificial
  probe
  misc_feature (1)..(25): SEQ ID NO: 6854; WAN024DBV_at; Start 280; Stop 304
gaaaatgatgaatactacctaactg

SEQ ID NO: 151668 - DNA, 25 bp, Artificial
  probe
  misc_feature (1)..(25): SEQ ID NO: 6854; WAN024DBV_at; Start 393; Stop 417
gagtccaacccatgtccgacaagag

SEQ ID NO: 151669 - DNA, 25 bp, Artificial
  probe
  misc_feature (1)..(25): SEQ ID NO: 6854; WAN024DBV_at; Start 317; Stop 341
taatcggatcagaaacagcctgggc

SEQ ID NO: 151670 - DNA, 25 bp, Artificial
  probe
  misc_feature (1)..(25): SEQ ID NO: 6854; WAN024DBV_at; Start 160; Stop 184
tatgacggagtagaaagtgatttta

SEQ ID NO: 151671 - DNA, 25 bp, Artificial
  probe
  misc_feature (1)..(25): SEQ ID NO: 6854; WAN024DBV_at; Start 190; Stop 214
gagttagcactaaccatagatgaaa

SEQ ID NO: 151672 - DNA, 25 bp, Artificial
  probe
  misc_feature (1)..(25): SEQ ID NO: 6854; WAN024DBV_at; Start 203; Stop 227
ccatagatgaaacagacgatgatgt

SEQ ID NO: 151673 - DNA, 25 bp, Artificial
  probe
  misc_feature (1)..(25): SEQ ID NO: 6854; WAN024DBV_at; Start 244; Stop 268
tatttaatcaatcaaggcttattag

SEQ ID NO: 151674 - DNA, 25 bp, Artificial
  probe
  misc_feature (1)..(25): SEQ ID NO: 6854; WAN024DBV_at; Start 320; Stop 344
tcggatcagaaacagcctgggcaga

SEQ ID NO: 151675 - DNA, 25 bp, Artificial
  probe
  misc_feature (1)..(25): SEQ ID NO: 6854; WAN024DBV_at; Start 461; Stop 485
gagagatagataaaaagtccacccc

SEQ ID NO: 151676 - DNA, 25 bp, Artificial
  probe
  misc_feature (1)..(25): SEQ ID NO: 6854; WAN024DBV_at; Start 408; Stop 432
ccgacaagagatagagatagagaaa

SEQ ID NO: 151677 - DNA, 25 bp, Artificial
  probe
  misc_feature (1)..(25): SEQ ID NO: 6854; WAN024DBV_at; Start 402; Stop 426
ccatgtccgacaagagatagagata

SEQ ID NO: 151678 - DNA, 25 bp, Artificial
  probe
  misc_feature (1)..(25): SEQ ID NO: 6854; WAN024DBV_at; Start 85; Stop 109
tctggaggagatacctatacgataa

SEQ ID NO: 151679 - DNA, 25 bp, Artificial
  probe
  misc_feature (1)..(25): SEQ ID NO: 6854; WAN024DBV_at; Start 289; Stop 313
gaatactacctaactgaaataccaa

SEQ ID NO: 151680 - DNA, 25 bp, Artificial
  probe
  misc_feature (1)..(25): SEQ ID NO: 6854; WAN024DBV_at; Start 256; Stop 280
caaggcttattagaagttgtaacag

SEQ ID NO: 151681 - DNA, 25 bp, Artificial
  probe
  misc_feature (1)..(25): SEQ ID NO: 6854; WAN024DBV_at; Start 383; Stop 407
tgtccttaatgagtccaacccatgt

SEQ ID NO: 151682 - DNA, 25 bp, Artificial
  probe
  misc_feature (1)..(25): SEQ ID NO: 6854; WAN024DBV_at; Start 304; Stop 328
gaaataccaaacttaatcggatcag

SEQ ID NO: 151683 - DNA, 25 bp, Artificial
  probe
  misc_feature (1)..(25): SEQ ID NO: 6854; WAN024DBV_at; Start 375; Stop 399
gaggacattgtccttaatgagtcca

SEQ ID NO: 151684 - DNA, 25 bp, Artificial
  probe
  misc_feature (1)..(25): SEQ ID NO: 6854; WAN024DBV_at; Start 196; Stop 220
gcactaaccatagatgaaacagacg

SEQ ID NO: 151685 - DNA, 25 bp, Artificial
  probe
  misc_feature (1)..(25): SEQ ID NO: 6854; WAN024DBV_at; Start 3; Stop 27
ggcaacaaacaaaagatactattgg

SEQ ID NO: 151686 - DNA, 25 bp, Artificial
  probe
  misc_feature (1)..(25): SEQ ID NO: 6854; WAN024DBV_at; Start 419; Stop 443
tagagatagagaaagatatagagat

SEQ ID NO: 151687 - DNA, 25 bp, Artificial
  probe
  misc_feature (1)..(25): SEQ ID NO: 6854; WAN024DBV_at; Start 125; Stop 149
tactactaagcctaaaagatgaggg

SEQ ID NO: 151688 - DNA, 25 bp, Artificial
  probe
  misc_feature (1)..(25): SEQ ID NO: 6854; WAN024DBV_at; Start 105; Stop 129
gataatctacctaaaacttctacta

SEQ ID NO: 151689 - DNA, 25 bp, Artificial
  probe
  misc_feature (1)..(25): SEQ ID NO: 6854; WAN024DBV_at; Start 92; Stop 116
gagatacctatacgataatctacct

SEQ ID NO: 151690 - DNA, 25 bp, Artificial
  probe
  misc_feature (1)..(25): SEQ ID NO: 6854; WAN024DBV_at; Start 134; Stop 158
gcctaaaagatgagggcaaactcta

SEQ ID NO: 151691 - DNA, 25 bp, Artificial
  probe
  misc_feature (1)..(25): SEQ ID NO: 6854; WAN024DBV_at; Start 40; Stop 64
gaagaatttttcacagacaaaagga

SEQ ID NO: 151692 - DNA, 25 bp, Artificial
  probe
  misc_feature (1)..(25): SEQ ID NO: 6854; WAN024DBV_at; Start 215; Stop 239
cagacgatgatgtaatggtaacagt

SEQ ID NO: 151693 - DNA, 25 bp, Artificial
  probe
  misc_feature (1)..(25): SEQ ID NO: 6854; WAN024DBV_at; Start 178; Stop 202
gattttataaaagagttagcactaa

SEQ ID NO: 151694 - DNA, 25 bp, Artificial
  probe
  misc_feature (1)..(25): SEQ ID NO: 6854; WAN024DBV_at; Start 67; Stop 91
aaaaggttaaggagaatatctggag

SEQ ID NO: 151695 - DNA, 25 bp, Artificial
  probe
  misc_feature (1)..(25): SEQ ID NO: 6854; WAN024DBV_at; Start 485; Stop 509
ccattttttatggagaattcaaaat

SEQ ID NO: 151696 - DNA, 25 bp, Artificial
  probe
  misc_feature (1)..(25): SEQ ID NO: 6854; WAN024DBV_at; Start 145; Stop 169
gagggcaaactctattatgacggag

SEQ ID NO: 151697 - DNA, 25 bp, Artificial
  probe
  misc_feature (1)..(25): SEQ ID NO: 783; WAN024DBW_at; Start 100; Stop 124
tataaagatcaaatatctagcacag

SEQ ID NO: 151698 - DNA, 25 bp, Artificial
  probe
  misc_feature (1)..(25): SEQ ID NO: 783; WAN024DBW_at; Start 122; Stop 146
cagtattgccagatatcaaaattaa

SEQ ID NO: 151699 - DNA, 25 bp, Artificial
  probe
  misc_feature (1)..(25): SEQ ID NO: 783; WAN024DBW_at; Start 162; Stop 186
tagaggtactccagattggaattac

SEQ ID NO: 151700 - DNA, 25 bp, Artificial
  probe
  misc_feature (1)..(25): SEQ ID NO: 783; WAN024DBW_at; Start 106; Stop 130
gatcaaatatctagcacagtattgc

SEQ ID NO: 151701 - DNA, 25 bp, Artificial
  probe
  misc_feature (1)..(25): SEQ ID NO: 783; WAN024DBW_at; Start 119; Stop 143
gcacagtattgccagatatcaaaat

SEQ ID NO: 151702 - DNA, 25 bp, Artificial
  probe
  misc_feature (1)..(25): SEQ ID NO: 783; WAN024DBW_at; Start 180; Stop 204
gaattacatggaaagatatagagat

SEQ ID NO: 151703 - DNA, 25 bp, Artificial
  probe
  misc_feature (1)..(25): SEQ ID NO: 783; WAN024DBW_at; Start 129; Stop 153
gccagatatcaaaattaaattaccg

SEQ ID NO: 151704 - DNA, 25 bp, Artificial
  probe
  misc_feature (1)..(25): SEQ ID NO: 783; WAN024DBW_at; Start 159; Stop 183
cagtagaggtactccagattggaat

SEQ ID NO: 151705 - DNA, 25 bp, Artificial
  probe
  misc_feature (1)..(25): SEQ ID NO: 783; WAN024DBW_at; Start 172; Stop 196
ccagattggaattacatggaaagat

SEQ ID NO: 151706 - DNA, 25 bp, Artificial
  probe
  misc_feature (1)..(25): SEQ ID NO: 783; WAN024DBW_at; Start 46; Stop 70
gaagtagcattctatttaacttcaa

SEQ ID NO: 151707 - DNA, 25 bp, Artificial
  probe
  misc_feature (1)..(25): SEQ ID NO: 783; WAN024DBW_at; Start 168; Stop 192
tactccagattggaattacatggaa

SEQ ID NO: 151708 - DNA, 25 bp, Artificial
  probe
  misc_feature (1)..(25): SEQ ID NO: 783; WAN024DBW_at; Start 86; Stop 110
taaaaaatactgaatataaagatca

SEQ ID NO: 151709 - DNA, 25 bp, Artificial
  probe
  misc_feature (1)..(25): SEQ ID NO: 783; WAN024DBW_at; Start 151; Stop 175
ccgatagacagtagaggtactccag

SEQ ID NO: 151710 - DNA, 25 bp, Artificial
  probe
  misc_feature (1)..(25): SEQ ID NO: 783; WAN024DBW_at; Start 155; Stop 179
tagacagtagaggtactccagattg

SEQ ID NO: 151711 - DNA, 25 bp, Artificial
  probe
  misc_feature (1)..(25): SEQ ID NO: 783; WAN024DBW_at; Start 75; Stop 99
taggcaagctttaaaaaatactgaa

SEQ ID NO: 151712 - DNA, 25 bp, Artificial
  probe
  misc_feature (1)..(25): SEQ ID NO: 783; WAN024DBW_at; Start 30; Stop 54
taaagaattgaataaagaagtagca

SEQ ID NO: 151713 - DNA, 25 bp, Artificial
  probe
  misc_feature (1)..(25): SEQ ID NO: 783; WAN024DBW_at; Start 178; Stop 202
tggaattacatggaaagatatagag

SEQ ID NO: 151714 - DNA, 25 bp, Artificial
  probe
  misc_feature (1)..(25): SEQ ID NO: 783; WAN024DBW_at; Start 144; Stop 168
taaattaccgatagacagtagaggt

SEQ ID NO: 151715 - DNA, 25 bp, Artificial
  probe
  misc_feature (1)..(25): SEQ ID NO: 783; WAN024DBW_at; Start 175; Stop 199
gattggaattacatggaaagatata

SEQ ID NO: 151716 - DNA, 25 bp, Artificial
  probe
  misc_feature (1)..(25): SEQ ID NO: 783; WAN024DBW_at; Start 146; Stop 170
aattaccgatagacagtagaggtac

SEQ ID NO: 151717 - DNA, 25 bp, Artificial
  probe
  misc_feature (1)..(25): SEQ ID NO: 783; WAN024DBW_at; Start 153; Stop 177
gatagacagtagaggtactccagat

SEQ ID NO: 151718 - DNA, 25 bp, Artificial
  probe
  misc_feature (1)..(25): SEQ ID NO: 783; WAN024DBW_at; Start 166; Stop 190
ggtactccagattggaattacatgg

SEQ ID NO: 151719 - DNA, 25 bp, Artificial
  probe
  misc_feature (1)..(25): SEQ ID NO: 783; WAN024DBW_at; Start 115; Stop 139
tctagcacagtattgccagatatca

SEQ ID NO: 151720 - DNA, 25 bp, Artificial
  probe
  misc_feature (1)..(25): SEQ ID NO: 783; WAN024DBW_at; Start 59; Stop 83
atttaacttcaattattaggcaagc

SEQ ID NO: 151721 - DNA, 25 bp, Artificial
  probe
  misc_feature (1)..(25): SEQ ID NO: 783; WAN024DBW_at; Start 149; Stop 173
taccgatagacagtagaggtactcc

SEQ ID NO: 151722 - DNA, 25 bp, Artificial
  probe
  misc_feature (1)..(25): SEQ ID NO: 783; WAN024DBW_at; Start 157; Stop 181
gacagtagaggtactccagattgga

SEQ ID NO: 151723 - DNA, 25 bp, Artificial
  probe
  misc_feature (1)..(25): SEQ ID NO: 783; WAN024DBW_at; Start 143; Stop 167
ttaaattaccgatagacagtagagg

SEQ ID NO: 151724 - DNA, 25 bp, Artificial
  probe
  misc_feature (1)..(25): SEQ ID NO: 783; WAN024DBW_at; Start 117; Stop 141
tagcacagtattgccagatatcaaa

SEQ ID NO: 151725 - DNA, 25 bp, Artificial
  probe
  misc_feature (1)..(25): SEQ ID NO: 783; WAN024DBW_at; Start 138; Stop 162
caaaattaaattaccgatagacagt

SEQ ID NO: 151726 - DNA, 25 bp, Artificial
  probe
  misc_feature (1)..(25): SEQ ID NO: 783; WAN024DBW_at; Start 65; Stop 89
cttcaattattaggcaagctttaaa

SEQ ID NO: 151727 - DNA, 25 bp, Artificial
  probe
  misc_feature (1)..(25): SEQ ID NO: 783; WAN024DBW_at; Start 111; Stop 135
aatatctagcacagtattgccagat

SEQ ID NO: 151728 - DNA, 25 bp, Artificial
  probe
  misc_feature (1)..(25): SEQ ID NO: 783; WAN024DBW_at; Start 77; Stop 101
ggcaagctttaaaaaatactgaata

SEQ ID NO: 151729 - DNA, 25 bp, Artificial
  probe
  misc_feature (1)..(25): SEQ ID NO: 783; WAN024DBW_at; Start 109; Stop 133
caaatatctagcacagtattgccag

SEQ ID NO: 151730 - DNA, 25 bp, Artificial
  probe
  misc_feature (1)..(25): SEQ ID NO: 783; WAN024DBW_at; Start 34; Stop 58
gaattgaataaagaagtagcattct

SEQ ID NO: 151731 - DNA, 25 bp, Artificial
  probe
  misc_feature (1)..(25): SEQ ID NO: 6695; WAN024DBX_at; Start 45; Stop 69
tatatcaggacttgcaagaggattt

SEQ ID NO: 151732 - DNA, 25 bp, Artificial
  probe
  misc_feature (1)..(25): SEQ ID NO: 6695; WAN024DBX_at; Start 5; Stop 29
aaaagaccgctgcaatagatgaaga

SEQ ID NO: 151733 - DNA, 25 bp, Artificial
  probe
  misc_feature (1)..(25): SEQ ID NO: 6695; WAN024DBX_at; Start 34; Stop 58
gtgacaccgattatatcaggacttg

SEQ ID NO: 151734 - DNA, 25 bp, Artificial
  probe
  misc_feature (1)..(25): SEQ ID NO: 6695; WAN024DBX_at; Start 24; Stop 48
tgaagaacttgtgacaccgattata

SEQ ID NO: 151735 - DNA, 25 bp, Artificial
  probe
  misc_feature (1)..(25): SEQ ID NO: 6695; WAN024DBX_at; Start 41; Stop 65
cgattatatcaggacttgcaagagg

SEQ ID NO: 151736 - DNA, 25 bp, Artificial
  probe
  misc_feature (1)..(25): SEQ ID NO: 6695; WAN024DBX_at; Start 44; Stop 68
ttatatcaggacttgcaagaggatt

SEQ ID NO: 151737 - DNA, 25 bp, Artificial
  probe
  misc_feature (1)..(25): SEQ ID NO: 6695; WAN024DBX_at; Start 11; Stop 35
ccgctgcaatagatgaagaacttgt

SEQ ID NO: 151738 - DNA, 25 bp, Artificial
  probe
  misc_feature (1)..(25): SEQ ID NO: 6695; WAN024DBX_at; Start 42; Stop 66
gattatatcaggacttgcaagagga

SEQ ID NO: 151739 - DNA, 25 bp, Artificial
  probe
  misc_feature (1)..(25): SEQ ID NO: 6695; WAN024DBX_at; Start 52; Stop 76
ggacttgcaagaggatttcttaaca

SEQ ID NO: 151740 - DNA, 25 bp, Artificial
  probe
  misc_feature (1)..(25): SEQ ID NO: 6695; WAN024DBX_at; Start 6; Stop 30
aaagaccgctgcaatagatgaagaa

SEQ ID NO: 151741 - DNA, 25 bp, Artificial
  probe
  misc_feature (1)..(25): SEQ ID NO: 6695; WAN024DBX_at; Start 22; Stop 46
gatgaagaacttgtgacaccgatta

SEQ ID NO: 151742 - DNA, 25 bp, Artificial
  probe
  misc_feature (1)..(25): SEQ ID NO: 6695; WAN024DBX_at; Start 4; Stop 28
caaaagaccgctgcaatagatgaag

SEQ ID NO: 151743 - DNA, 25 bp, Artificial
  probe
  misc_feature (1)..(25): SEQ ID NO: 6695; WAN024DBX_at; Start 49; Stop 73
tcaggacttgcaagaggatttctta

SEQ ID NO: 151744 - DNA, 25 bp, Artificial
  probe
  misc_feature (1)..(25): SEQ ID NO: 6695; WAN024DBX_at; Start 47; Stop 71
tatcaggacttgcaagaggatttct

SEQ ID NO: 151745 - DNA, 25 bp, Artificial
  probe
  misc_feature (1)..(25): SEQ ID NO: 6695; WAN024DBX_at; Start 35; Stop 59
tgacaccgattatatcaggacttgc

SEQ ID NO: 151746 - DNA, 25 bp, Artificial
  probe
  misc_feature (1)..(25): SEQ ID NO: 6695; WAN024DBX_at; Start 2; Stop 26
tgcaaaagaccgctgcaatagatga

SEQ ID NO: 151747 - DNA, 25 bp, Artificial
  probe
  misc_feature (1)..(25): SEQ ID NO: 6695; WAN024DBX_at; Start 9; Stop 33
gaccgctgcaatagatgaagaactt

SEQ ID NO: 151748 - DNA, 25 bp, Artificial
  probe
  misc_feature (1)..(25): SEQ ID NO: 6695; WAN024DBX_at; Start 17; Stop 41
caatagatgaagaacttgtgacacc

SEQ ID NO: 151749 - DNA, 25 bp, Artificial
  probe
  misc_feature (1)..(25): SEQ ID NO: 6695; WAN024DBX_at; Start 57; Stop 81
tgcaagaggatttcttaacatagtt

SEQ ID NO: 151750 - DNA, 25 bp, Artificial
  probe
  misc_feature (1)..(25): SEQ ID NO: 6695; WAN024DBX_at; Start 12; Stop 36
cgctgcaatagatgaagaacttgtg

SEQ ID NO: 151751 - DNA, 25 bp, Artificial
  probe
  misc_feature (1)..(25): SEQ ID NO: 6695; WAN024DBX_at; Start 14; Stop 38
ctgcaatagatgaagaacttgtgac

SEQ ID NO: 151752 - DNA, 25 bp, Artificial
  probe
  misc_feature (1)..(25): SEQ ID NO: 6695; WAN024DBX_at; Start 38; Stop 62
caccgattatatcaggacttgcaag

SEQ ID NO: 151753 - DNA, 25 bp, Artificial
  probe
  misc_feature (1)..(25): SEQ ID NO: 6695; WAN024DBX_at; Start 50; Stop 74
caggacttgcaagaggatttcttaa

SEQ ID NO: 151754 - DNA, 25 bp, Artificial
  probe
  misc_feature (1)..(25): SEQ ID NO: 6695; WAN024DBX_at; Start 25; Stop 49
gaagaacttgtgacaccgattatat

SEQ ID NO: 151755 - DNA, 25 bp, Artificial
  probe
  misc_feature (1)..(25): SEQ ID NO: 6695; WAN024DBX_at; Start 28; Stop 52
gaacttgtgacaccgattatatcag

SEQ ID NO: 151756 - DNA, 25 bp, Artificial
  probe
  misc_feature (1)..(25): SEQ ID NO: 6695; WAN024DBX_at; Start 40; Stop 64
ccgattatatcaggacttgcaagag

SEQ ID NO: 151757 - DNA, 25 bp, Artificial
  probe
  misc_feature (1)..(25): SEQ ID NO: 6695; WAN024DBX_at; Start 30; Stop 54
acttgtgacaccgattatatcagga

SEQ ID NO: 151758 - DNA, 25 bp, Artificial
  probe
  misc_feature (1)..(25): SEQ ID NO: 6695; WAN024DBX_at; Start 18; Stop 42
aatagatgaagaacttgtgacaccg

SEQ ID NO: 151759 - DNA, 25 bp, Artificial
  probe
  misc_feature (1)..(25): SEQ ID NO: 6695; WAN024DBX_at; Start 36; Stop 60
gacaccgattatatcaggacttgca

SEQ ID NO: 151760 - DNA, 25 bp, Artificial
  probe
  misc_feature (1)..(25): SEQ ID NO: 6695; WAN024DBX_at; Start 31; Stop 55
cttgtgacaccgattatatcaggac

SEQ ID NO: 151761 - DNA, 25 bp, Artificial
  probe
  misc_feature (1)..(25): SEQ ID NO: 6695; WAN024DBX_at; Start 20; Stop 44
tagatgaagaacttgtgacaccgat

SEQ ID NO: 151762 - DNA, 25 bp, Artificial
  probe
  misc_feature (1)..(25): SEQ ID NO: 6695; WAN024DBX_at; Start 7; Stop 31
aagaccgctgcaatagatgaagaac

SEQ ID NO: 151763 - DNA, 25 bp, Artificial
  probe
  misc_feature (1)..(25): SEQ ID NO: 6695; WAN024DBX_at; Start 33; Stop 57
tgtgacaccgattatatcaggactt

SEQ ID NO: 151764 - DNA, 25 bp, Artificial
  probe
  misc_feature (1)..(25): SEQ ID NO: 6695; WAN024DBX_at; Start 53; Stop 77
gacttgcaagaggatttcttaacat

SEQ ID NO: 151765 - DNA, 25 bp, Artificial
  probe
  misc_feature (1)..(25): SEQ ID NO: 2934; WAN024DBY_at; Start 293; Stop 317
gaggtatgtcatctaactttgtaaa

SEQ ID NO: 151766 - DNA, 25 bp, Artificial
  probe
  misc_feature (1)..(25): SEQ ID NO: 2934; WAN024DBY_at; Start 282; Stop 306
tattagaacaagaggtatgtcatct

SEQ ID NO: 151767 - DNA, 25 bp, Artificial
  probe
  misc_feature (1)..(25): SEQ ID NO: 2934; WAN024DBY_at; Start 68; Stop 92
tatttaaggctatgggaccagctaa

SEQ ID NO: 151768 - DNA, 25 bp, Artificial
  probe
  misc_feature (1)..(25): SEQ ID NO: 2934; WAN024DBY_at; Start 390; Stop 414
ggtgcctgctcttgtgacagcttga

SEQ ID NO: 151769 - DNA, 25 bp, Artificial
  probe
  misc_feature (1)..(25): SEQ ID NO: 2934; WAN024DBY_at; Start 94; Stop 118
aaagatatacaagctattggtcctg

SEQ ID NO: 151770 - DNA, 25 bp, Artificial
  probe
  misc_feature (1)..(25): SEQ ID NO: 2934; WAN024DBY_at; Start 33; Stop 57
caatccagctaatattgggcttctt

SEQ ID NO: 151771 - DNA, 25 bp, Artificial
  probe
  misc_feature (1)..(25): SEQ ID NO: 2934; WAN024DBY_at; Start 173; Stop 197
ttgaaagctcgggatttgctccaag

SEQ ID NO: 151772 - DNA, 25 bp, Artificial
  probe
  misc_feature (1)..(25): SEQ ID NO: 2934; WAN024DBY_at; Start 197; Stop 221
gtccgattgctatttcttcaccaag

SEQ ID NO: 151773 - DNA, 25 bp, Artificial
  probe
  misc_feature (1)..(25): SEQ ID NO: 2934; WAN024DBY_at; Start 48; Stop 72
tgggcttcttttcttgccaatattt

SEQ ID NO: 151774 - DNA, 25 bp, Artificial
  probe
  misc_feature (1)..(25): SEQ ID NO: 2934; WAN024DBY_at; Start 184; Stop 208
ggatttgctccaagtccgattgcta

SEQ ID NO: 151775 - DNA, 25 bp, Artificial
  probe
  misc_feature (1)..(25): SEQ ID NO: 2934; WAN024DBY_at; Start 355; Stop 379
aattcatatcttgctactttcaaca

SEQ ID NO: 151776 - DNA, 25 bp, Artificial
  probe
  misc_feature (1)..(25): SEQ ID NO: 2934; WAN024DBY_at; Start 114; Stop 138
tcctgtaattgaagtagaaaaagca

SEQ ID NO: 151777 - DNA, 25 bp, Artificial
  probe
  misc_feature (1)..(25): SEQ ID NO: 2934; WAN024DBY_at; Start 27; Stop 51
tccaaccaatccagctaatattggg

SEQ ID NO: 151778 - DNA, 25 bp, Artificial
  probe
  misc_feature (1)..(25): SEQ ID NO: 2934; WAN024DBY_at; Start 332; Stop 356
tgagccatctcataacttcttgtaa

SEQ ID NO: 151779 - DNA, 25 bp, Artificial
  probe
  misc_feature (1)..(25): SEQ ID NO: 2934; WAN024DBY_at; Start 147; Stop 171
tacagcgcaaaaaattaaaacaagc

SEQ ID NO: 151780 - DNA, 25 bp, Artificial
  probe
  misc_feature (1)..(25): SEQ ID NO: 2934; WAN024DBY_at; Start 272; Stop 296
taatacttactattagaacaagagg

SEQ ID NO: 151781 - DNA, 25 bp, Artificial
  probe
  misc_feature (1)..(25): SEQ ID NO: 2934; WAN024DBY_at; Start 162; Stop 186
taaaacaagccttgaaagctcggga

SEQ ID NO: 151782 - DNA, 25 bp, Artificial
  probe
  misc_feature (1)..(25): SEQ ID NO: 2934; WAN024DBY_at; Start 74; Stop 98
aggctatgggaccagctaaaaaaga

SEQ ID NO: 151783 - DNA, 25 bp, Artificial
  probe
  misc_feature (1)..(25): SEQ ID NO: 2934; WAN024DBY_at; Start 385; Stop 409
aatgaggtgcctgctcttgtgacag

SEQ ID NO: 151784 - DNA, 25 bp, Artificial
  probe
  misc_feature (1)..(25): SEQ ID NO: 2934; WAN024DBY_at; Start 319; Stop 343
gataaagagccactgagccatctca

SEQ ID NO: 151785 - DNA, 25 bp, Artificial
  probe
  misc_feature (1)..(25): SEQ ID NO: 2934; WAN024DBY_at; Start 18; Stop 42
tagtaaaattccaaccaatccagct

SEQ ID NO: 151786 - DNA, 25 bp, Artificial
  probe
  misc_feature (1)..(25): SEQ ID NO: 2934; WAN024DBY_at; Start 371; Stop 395
ctttcaacaataaaaatgaggtgcc

SEQ ID NO: 151787 - DNA, 25 bp, Artificial
  probe
  misc_feature (1)..(25): SEQ ID NO: 2934; WAN024DBY_at; Start 375; Stop 399
caacaataaaaatgaggtgcctgct

SEQ ID NO: 151788 - DNA, 25 bp, Artificial
  probe
  misc_feature (1)..(25): SEQ ID NO: 2934; WAN024DBY_at; Start 325; Stop 349
gagccactgagccatctcataactt

SEQ ID NO: 151789 - DNA, 25 bp, Artificial
  probe
  misc_feature (1)..(25): SEQ ID NO: 2934; WAN024DBY_at; Start 62; Stop 86
tgccaatatttaaggctatgggacc

SEQ ID NO: 151790 - DNA, 25 bp, Artificial
  probe
  misc_feature (1)..(25): SEQ ID NO: 2934; WAN024DBY_at; Start 123; Stop 147
tgaagtagaaaaagcagttaaagat

SEQ ID NO: 151791 - DNA, 25 bp, Artificial
  probe
  misc_feature (1)..(25): SEQ ID NO: 2934; WAN024DBY_at; Start 167; Stop 191
caagccttgaaagctcgggatttgc

SEQ ID NO: 151792 - DNA, 25 bp, Artificial
  probe
  misc_feature (1)..(25): SEQ ID NO: 2934; WAN024DBY_at; Start 103; Stop 127
caagctattggtcctgtaattgaag

SEQ ID NO: 151793 - DNA, 25 bp, Artificial
  probe
  misc_feature (1)..(25): SEQ ID NO: 2934; WAN024DBY_at; Start 201; Stop 225
gattgctatttcttcaccaagttca

SEQ ID NO: 151794 - DNA, 25 bp, Artificial
  probe
  misc_feature (1)..(25): SEQ ID NO: 2934; WAN024DBY_at; Start 2; Stop 26
tgtctgataacaaaactagtaaaat

SEQ ID NO: 151795 - DNA, 25 bp, Artificial
  probe
  misc_feature (1)..(25): SEQ ID NO: 2934; WAN024DBY_at; Start 215; Stop 239
caccaagttcaataatttctagtct

SEQ ID NO: 151796 - DNA, 25 bp, Artificial
  probe
  misc_feature (1)..(25): SEQ ID NO: 2934; WAN024DBY_at; Start 312; Stop 336
tgtaaaagataaagagccactgagc

SEQ ID NO: 151797 - DNA, 25 bp, Artificial
  probe
  misc_feature (1)..(25): SEQ ID NO: 2934; WAN024DBY_at; Start 257; Stop 281
ctaatatagtagcaataatacttac

SEQ ID NO: 151798 - DNA, 25 bp, Artificial
  probe
  misc_feature (1)..(25): SEQ ID NO: 2934; WAN024DBY_at; Start 344; Stop 368
taacttcttgtaattcatatcttgc

SEQ ID NO: 151799 - DNA, 25 bp, Artificial
  probe
  misc_feature (1)..(25): SEQ ID NO: 1909; WAN024DBZ_at; Start 580; Stop 604
tttacaaagttagatgacatacctc

SEQ ID NO: 151800 - DNA, 25 bp, Artificial
  probe
  misc_feature (1)..(25): SEQ ID NO: 1909; WAN024DBZ_at; Start 487; Stop 511
gctgtcacaagagcaggcacctcat

SEQ ID NO: 151801 - DNA, 25 bp, Artificial
  probe
  misc_feature (1)..(25): SEQ ID NO: 1909; WAN024DBZ_at; Start 502; Stop 526
ggcacctcatttttattgttgaaag

SEQ ID NO: 151802 - DNA, 25 bp, Artificial
  probe
  misc_feature (1)..(25): SEQ ID NO: 1909; WAN024DBZ_at; Start 149; Stop 173
taaatagtgaaactgttcctggagc

SEQ ID NO: 151803 - DNA, 25 bp, Artificial
  probe
  misc_feature (1)..(25): SEQ ID NO: 1909; WAN024DBZ_at; Start 911; Stop 935
ttttaccagctagatatccagtagg

SEQ ID NO: 151804 - DNA, 25 bp, Artificial
  probe
  misc_feature (1)..(25): SEQ ID NO: 1909; WAN024DBZ_at; Start 560; Stop 584
ggctcagtggctctttatcttttac

SEQ ID NO: 151805 - DNA, 25 bp, Artificial
  probe
  misc_feature (1)..(25): SEQ ID NO: 1909; WAN024DBZ_at; Start 595; Stop 619
gacatacctcttgttctaatagtaa

SEQ ID NO: 151806 - DNA, 25 bp, Artificial
  probe
  misc_feature (1)..(25): SEQ ID NO: 1909; WAN024DBZ_at; Start 386; Stop 410
caataacttgtggactaacatcatc

SEQ ID NO: 151807 - DNA, 25 bp, Artificial
  probe
  misc_feature (1)..(25): SEQ ID NO: 1909; WAN024DBZ_at; Start 225; Stop 249
agctggctggtcttttggattggca

SEQ ID NO: 151808 - DNA, 25 bp, Artificial
  probe
  misc_feature (1)..(25): SEQ ID NO: 1909; WAN024DBZ_at; Start 328; Stop 352
gcagcggtcttttgcatattggtat

SEQ ID NO: 151809 - DNA, 25 bp, Artificial
  probe
  misc_feature (1)..(25): SEQ ID NO: 1909; WAN024DBZ_at; Start 272; Stop 296
taagaaatcctcttgcaagtcctga

SEQ ID NO: 151810 - DNA, 25 bp, Artificial
  probe
  misc_feature (1)..(25): SEQ ID NO: 1909; WAN024DBZ_at; Start 312; Stop 336
aagttcttcatctattgcagcggtc

SEQ ID NO: 151811 - DNA, 25 bp, Artificial
  probe
  misc_feature (1)..(25): SEQ ID NO: 1909; WAN024DBZ_at; Start 542; Stop 566
tacaagaagttatgagatggctcag

SEQ ID NO: 151812 - DNA, 25 bp, Artificial
  probe
  misc_feature (1)..(25): SEQ ID NO: 1909; WAN024DBZ_at; Start 436; Stop 460
aaagatggtttttcagcagcaagac

SEQ ID NO: 151813 - DNA, 25 bp, Artificial
  probe
  misc_feature (1)..(25): SEQ ID NO: 1909; WAN024DBZ_at; Start 770; Stop 794
cttcaattacaggaccaatagcttg

SEQ ID NO: 151814 - DNA, 25 bp, Artificial
  probe
  misc_feature (1)..(25): SEQ ID NO: 1909; WAN024DBZ_at; Start 824; Stop 848
taaatattggcaagaaaagaagccc

SEQ ID NO: 151815 - DNA, 25 bp, Artificial
  probe
  misc_feature (1)..(25): SEQ ID NO: 1909; WAN024DBZ_at; Start 942; Stop 966
aactggcttgttaggttcaccatac

SEQ ID NO: 151816 - DNA, 25 bp, Artificial
  probe
  misc_feature (1)..(25): SEQ ID NO: 1909; WAN024DBZ_at; Start 837; Stop 861
gaaaagaagcccaatattagctgga

SEQ ID NO: 151817 - DNA, 25 bp, Artificial
  probe
  misc_feature (1)..(25): SEQ ID NO: 1909; WAN024DBZ_at; Start 95; Stop 119
tcattttacttatcggagatgaaag

SEQ ID NO: 151818 - DNA, 25 bp, Artificial
  probe
  misc_feature (1)..(25): SEQ ID NO: 1909; WAN024DBZ_at; Start 706; Stop 730
gcaaatcccgagctttcaaggcttg

SEQ ID NO: 151819 - DNA, 25 bp, Artificial
  probe
  misc_feature (1)..(25): SEQ ID NO: 1909; WAN024DBZ_at; Start 691; Stop 715
gcaatcggacttggagcaaatcccg

SEQ ID NO: 151820 - DNA, 25 bp, Artificial
  probe
  misc_feature (1)..(25): SEQ ID NO: 1909; WAN024DBZ_at; Start 195; Stop 219
tagattaccaaaattattagcagga

SEQ ID NO: 151821 - DNA, 25 bp, Artificial
  probe
  misc_feature (1)..(25): SEQ ID NO: 1909; WAN024DBZ_at; Start 287; Stop 311
caagtcctgatataatcggtgtcac

SEQ ID NO: 151822 - DNA, 25 bp, Artificial
  probe
  misc_feature (1)..(25): SEQ ID NO: 1909; WAN024DBZ_at; Start 451; Stop 475
gcagcaagactgataatattaggta

SEQ ID NO: 151823 - DNA, 25 bp, Artificial
  probe
  misc_feature (1)..(25): SEQ ID NO: 1909; WAN024DBZ_at; Start 856; Stop 880
gctggattggttggaattttactag

SEQ ID NO: 151824 - DNA, 25 bp, Artificial
  probe
  misc_feature (1)..(25): SEQ ID NO: 1909; WAN024DBZ_at; Start 212; Stop 236
tagcaggaattatagctggctggtc

SEQ ID NO: 151825 - DNA, 25 bp, Artificial
  probe
  misc_feature (1)..(25): SEQ ID NO: 1909; WAN024DBZ_at; Start 676; Stop 700
cttggtgaagaaatagcaatcggac

SEQ ID NO: 151826 - DNA, 25 bp, Artificial
  probe
  misc_feature (1)..(25): SEQ ID NO: 1909; WAN024DBZ_at; Start 165; Stop 189
tcctggagctagtttttcgattatg

SEQ ID NO: 151827 - DNA, 25 bp, Artificial
  probe
  misc_feature (1)..(25): SEQ ID NO: 1909; WAN024DBZ_at; Start 808; Stop 832
gctggtcccatagccttaaatattg

SEQ ID NO: 151828 - DNA, 25 bp, Artificial
  probe
  misc_feature (1)..(25): SEQ ID NO: 1909; WAN024DBZ_at; Start 659; Stop 683
gactagaaattattgaacttggtga

SEQ ID NO: 151829 - DNA, 25 bp, Artificial
  probe
  misc_feature (1)..(25): SEQ ID NO: 1909; WAN024DBZ_at; Start 242; Stop 266
gattggcaggatttatctttcaaac

SEQ ID NO: 151830 - DNA, 25 bp, Artificial
  probe
  misc_feature (1)..(25): SEQ ID NO: 1909; WAN024DBZ_at; Start 527; Stop 551
tagcaagatatgaattacaagaagt

SEQ ID NO: 151831 - DNA, 25 bp, Artificial
  probe
  misc_feature (1)..(25): SEQ ID NO: 1909; WAN024DBZ_at; Start 470; Stop 494
taggtattggttttcaagctgtcac

SEQ ID NO: 151832 - DNA, 25 bp, Artificial
  probe
  misc_feature (1)..(25): SEQ ID NO: 1909; WAN024DBZ_at; Start 925; Stop 949
tatccagtaggtgttgtaactggct

SEQ ID NO: 151833 - DNA, 25 bp, Artificial
  probe
  misc_feature (1)..(25): SEQ ID NO: 2451; WAN024DC2_at; Start 9; Stop 33
taactataaaccattatggatacag

SEQ ID NO: 151834 - DNA, 25 bp, Artificial
  probe
  misc_feature (1)..(25): SEQ ID NO: 2451; WAN024DC2_at; Start 156; Stop 180
ggctttatcttgcactcctaatgat

SEQ ID NO: 151835 - DNA, 25 bp, Artificial
  probe
  misc_feature (1)..(25): SEQ ID NO: 2451; WAN024DC2_at; Start 101; Stop 125
cacaaatgggaaaggataaaccaat

SEQ ID NO: 151836 - DNA, 25 bp, Artificial
  probe
  misc_feature (1)..(25): SEQ ID NO: 2451; WAN024DC2_at; Start 98; Stop 122
tggcacaaatgggaaaggataaacc

SEQ ID NO: 151837 - DNA, 25 bp, Artificial
  probe
  misc_feature (1)..(25): SEQ ID NO: 2451; WAN024DC2_at; Start 75; Stop 99
ggcaggacttacaacaaatgttatg

SEQ ID NO: 151838 - DNA, 25 bp, Artificial
  probe
  misc_feature (1)..(25): SEQ ID NO: 2451; WAN024DC2_at; Start 146; Stop 170
gaatatgtaaggctttatcttgcac

SEQ ID NO: 151839 - DNA, 25 bp, Artificial
  probe
  misc_feature (1)..(25): SEQ ID NO: 2451; WAN024DC2_at; Start 86; Stop 110
caacaaatgttatggcacaaatggg

SEQ ID NO: 151840 - DNA, 25 bp, Artificial
  probe
  misc_feature (1)..(25): SEQ ID NO: 2451; WAN024DC2_at; Start 56; Stop 80
aaacagatgtaatagctatggcagg

SEQ ID NO: 151841 - DNA, 25 bp, Artificial
  probe
  misc_feature (1)..(25): SEQ ID NO: 2451; WAN024DC2_at; Start 44; Stop 68
aaggactaaagaaaacagatgtaat

SEQ ID NO: 151842 - DNA, 25 bp, Artificial
  probe
  misc_feature (1)..(25): SEQ ID NO: 2451; WAN024DC2_at; Start 135; Stop 159
gaatttagaaagaatatgtaaggct

SEQ ID NO: 151843 - DNA, 25 bp, Artificial
  probe
  misc_feature (1)..(25): SEQ ID NO: 2451; WAN024DC2_at; Start 93; Stop 117
tgttatggcacaaatgggaaaggat

SEQ ID NO: 151844 - DNA, 25 bp, Artificial
  probe
  misc_feature (1)..(25): SEQ ID NO: 2451; WAN024DC2_at; Start 72; Stop 96
tatggcaggacttacaacaaatgtt

SEQ ID NO: 151845 - DNA, 25 bp, Artificial
  probe
  misc_feature (1)..(25): SEQ ID NO: 2451; WAN024DC2_at; Start 84; Stop 108
tacaacaaatgttatggcacaaatg

SEQ ID NO: 151846 - DNA, 25 bp, Artificial
  probe
  misc_feature (1)..(25): SEQ ID NO: 2451; WAN024DC2_at; Start 65; Stop 89
taatagctatggcaggacttacaac

SEQ ID NO: 151847 - DNA, 25 bp, Artificial
  probe
  misc_feature (1)..(25): SEQ ID NO: 2451; WAN024DC2_at; Start 91; Stop 115
aatgttatggcacaaatgggaaagg

SEQ ID NO: 151848 - DNA, 25 bp, Artificial
  probe
  misc_feature (1)..(25): SEQ ID NO: 2451; WAN024DC2_at; Start 59; Stop 83
cagatgtaatagctatggcaggact

SEQ ID NO: 151849 - DNA, 25 bp, Artificial
  probe
  misc_feature (1)..(25): SEQ ID NO: 2451; WAN024DC2_at; Start 27; Stop 51
gatacagttagcaaaaaaaggacta

SEQ ID NO: 151850 - DNA, 25 bp, Artificial
  probe
  misc_feature (1)..(25): SEQ ID NO: 2451; WAN024DC2_at; Start 77; Stop 101
caggacttacaacaaatgttatggc

SEQ ID NO: 151851 - DNA, 25 bp, Artificial
  probe
  misc_feature (1)..(25): SEQ ID NO: 2451; WAN024DC2_at; Start 89; Stop 113
caaatgttatggcacaaatgggaaa

SEQ ID NO: 151852 - DNA, 25 bp, Artificial
  probe
  misc_feature (1)..(25): SEQ ID NO: 2451; WAN024DC2_at; Start 68; Stop 92
tagctatggcaggacttacaacaaa

SEQ ID NO: 151853 - DNA, 25 bp, Artificial
  probe
  misc_feature (1)..(25): SEQ ID NO: 2451; WAN024DC2_at; Start 61; Stop 85
gatgtaatagctatggcaggactta

SEQ ID NO: 151854 - DNA, 25 bp, Artificial
  probe
  misc_feature (1)..(25): SEQ ID NO: 2451; WAN024DC2_at; Start 15; Stop 39
taaaccattatggatacagttagca

SEQ ID NO: 151855 - DNA, 25 bp, Artificial
  probe
  misc_feature (1)..(25): SEQ ID NO: 2451; WAN024DC2_at; Start 151; Stop 175
tgtaaggctttatcttgcactccta

SEQ ID NO: 151856 - DNA, 25 bp, Artificial
  probe
  misc_feature (1)..(25): SEQ ID NO: 2451; WAN024DC2_at; Start 164; Stop 188
cttgcactcctaatgatattattag

SEQ ID NO: 151857 - DNA, 25 bp, Artificial
  probe
  misc_feature (1)..(25): SEQ ID NO: 2451; WAN024DC2_at; Start 154; Stop 178
aaggctttatcttgcactcctaatg

SEQ ID NO: 151858 - DNA, 25 bp, Artificial
  probe
  misc_feature (1)..(25): SEQ ID NO: 2451; WAN024DC2_at; Start 195; Stop 219
agataattttagtgacgaggaatag

SEQ ID NO: 151859 - DNA, 25 bp, Artificial
  probe
  misc_feature (1)..(25): SEQ ID NO: 2451; WAN024DC2_at; Start 149; Stop 173
tatgtaaggctttatcttgcactcc

SEQ ID NO: 151860 - DNA, 25 bp, Artificial
  probe
  misc_feature (1)..(25): SEQ ID NO: 2451; WAN024DC2_at; Start 19; Stop 43
ccattatggatacagttagcaaaaa

SEQ ID NO: 151861 - DNA, 25 bp, Artificial
  probe
  misc_feature (1)..(25): SEQ ID NO: 2451; WAN024DC2_at; Start 192; Stop 216
tgaagataattttagtgacgaggaa

SEQ ID NO: 151862 - DNA, 25 bp, Artificial
  probe
  misc_feature (1)..(25): SEQ ID NO: 2451; WAN024DC2_at; Start 106; Stop 130
atgggaaaggataaaccaattacat

SEQ ID NO: 151863 - DNA, 25 bp, Artificial
  probe
  misc_feature (1)..(25): SEQ ID NO: 2451; WAN024DC2_at; Start 122; Stop 146
caattacatttaagaatttagaaag

SEQ ID NO: 151864 - DNA, 25 bp, Artificial
  probe
  misc_feature (1)..(25): SEQ ID NO: 2451; WAN024DC2_at; Start 80; Stop 104
gacttacaacaaatgttatggcaca

SEQ ID NO: 151865 - DNA, 25 bp, Artificial
  probe
  misc_feature (1)..(25): SEQ ID NO: 2451; WAN024DC2_at; Start 70; Stop 94
gctatggcaggacttacaacaaatg

SEQ ID NO: 151866 - DNA, 25 bp, Artificial
  probe
  misc_feature (1)..(25): SEQ ID NO: 2451; WAN024DC2_at; Start 54; Stop 78
gaaaacagatgtaatagctatggca

SEQ ID NO: 151867 - DNA, 25 bp, Artificial
  probe
  misc_feature (1)..(25): SEQ ID NO: 2062; WAN024DC3_at; Start 402; Stop 426
aatgcagaaacggtttattcgcatc

SEQ ID NO: 151868 - DNA, 25 bp, Artificial
  probe
  misc_feature (1)..(25): SEQ ID NO: 2062; WAN024DC3_at; Start 181; Stop 205
cacgctgaagtttacgaatcactct

SEQ ID NO: 151869 - DNA, 25 bp, Artificial
  probe
  misc_feature (1)..(25): SEQ ID NO: 2062; WAN024DC3_at; Start 229; Stop 253
ttagctttagcagtttcacctcaag

SEQ ID NO: 151870 - DNA, 25 bp, Artificial
  probe
  misc_feature (1)..(25): SEQ ID NO: 2062; WAN024DC3_at; Start 335; Stop 359
taaattctgccaatcatcgtctggg

SEQ ID NO: 151871 - DNA, 25 bp, Artificial
  probe
  misc_feature (1)..(25): SEQ ID NO: 2062; WAN024DC3_at; Start 62; Stop 86
tgggttatacttttagtccagagga

SEQ ID NO: 151872 - DNA, 25 bp, Artificial
  probe
  misc_feature (1)..(25): SEQ ID NO: 2062; WAN024DC3_at; Start 94; Stop 118
agccaactagctagactgtctcagg

SEQ ID NO: 151873 - DNA, 25 bp, Artificial
  probe
  misc_feature (1)..(25): SEQ ID NO: 2062; WAN024DC3_at; Start 358; Stop 382
ggtgctcatgcattttatgaaaaag

SEQ ID NO: 151874 - DNA, 25 bp, Artificial
  probe
  misc_feature (1)..(25): SEQ ID NO: 2062; WAN024DC3_at; Start 150; Stop 174
tgcagctaatcatgtcttacttgga

SEQ ID NO: 151875 - DNA, 25 bp, Artificial
  probe
  misc_feature (1)..(25): SEQ ID NO: 2062; WAN024DC3_at; Start 160; Stop 184
catgtcttacttggatatgtccacg

SEQ ID NO: 151876 - DNA, 25 bp, Artificial
  probe
  misc_feature (1)..(25): SEQ ID NO: 2062; WAN024DC3_at; Start 117; Stop 141
ggattcccatcatttcctacttggc

SEQ ID NO: 151877 - DNA, 25 bp, Artificial
  probe
  misc_feature (1)..(25): SEQ ID NO: 2062; WAN024DC3_at; Start 236; Stop 260
tagcagtttcacctcaagcgcaagg

SEQ ID NO: 151878 - DNA, 25 bp, Artificial
  probe
  misc_feature (1)..(25): SEQ ID NO: 2062; WAN024DC3_at; Start 385; Stop 409
ggctatacttgtgataaaatgcaga

SEQ ID NO: 151879 - DNA, 25 bp, Artificial
  probe
  misc_feature (1)..(25): SEQ ID NO: 2062; WAN024DC3_at; Start 217; Stop 241
ggatttaatatcttagctttagcag

SEQ ID NO: 151880 - DNA, 25 bp, Artificial
  probe
  misc_feature (1)..(25): SEQ ID NO: 2062; WAN024DC3_at; Start 105; Stop 129
tagactgtctcaggattcccatcat

SEQ ID NO: 151881 - DNA, 25 bp, Artificial
  probe
  misc_feature (1)..(25): SEQ ID NO: 2062; WAN024DC3_at; Start 345; Stop 369
caatcatcgtctgggtgctcatgca

SEQ ID NO: 151882 - DNA, 25 bp, Artificial
  probe
  misc_feature (1)..(25): SEQ ID NO: 2062; WAN024DC3_at; Start 309; Stop 333
aagatgtggttatgggtttatccgc

SEQ ID NO: 151883 - DNA, 25 bp, Artificial
  probe
  misc_feature (1)..(25): SEQ ID NO: 2062; WAN024DC3_at; Start 173; Stop 197
gatatgtccacgctgaagtttacga

SEQ ID NO: 151884 - DNA, 25 bp, Artificial
  probe
  misc_feature (1)..(25): SEQ ID NO: 2062; WAN024DC3_at; Start 399; Stop 423
taaaatgcagaaacggtttattcgc

SEQ ID NO: 151885 - DNA, 25 bp, Artificial
  probe
  misc_feature (1)..(25): SEQ ID NO: 2062; WAN024DC3_at; Start 167; Stop 191
tacttggatatgtccacgctgaagt

SEQ ID NO: 151886 - DNA, 25 bp, Artificial
  probe
  misc_feature (1)..(25): SEQ ID NO: 2062; WAN024DC3_at; Start 193; Stop 217
tacgaatcactctattccaaagcag

SEQ ID NO: 151887 - DNA, 25 bp, Artificial
  probe
  misc_feature (1)..(25): SEQ ID NO: 2062; WAN024DC3_at; Start 77; Stop 101
gtccagaggaaacggctagccaact

SEQ ID NO: 151888 - DNA, 25 bp, Artificial
  probe
  misc_feature (1)..(25): SEQ ID NO: 2062; WAN024DC3_at; Start 101; Stop 125
tagctagactgtctcaggattccca

SEQ ID NO: 151889 - DNA, 25 bp, Artificial
  probe
  misc_feature (1)..(25): SEQ ID NO: 2062; WAN024DC3_at; Start 390; Stop 414
tacttgtgataaaatgcagaaacgg

SEQ ID NO: 151890 - DNA, 25 bp, Artificial
  probe
  misc_feature (1)..(25): SEQ ID NO: 2062; WAN024DC3_at; Start 352; Stop 376
cgtctgggtgctcatgcattttatg

SEQ ID NO: 151891 - DNA, 25 bp, Artificial
  probe
  misc_feature (1)..(25): SEQ ID NO: 2062; WAN024DC3_at; Start 145; Stop 169
gaggatgcagctaatcatgtcttac

SEQ ID NO: 151892 - DNA, 25 bp, Artificial
  probe
  misc_feature (1)..(25): SEQ ID NO: 2062; WAN024DC3_at; Start 137; Stop 161
ttggctatgaggatgcagctaatca

SEQ ID NO: 151893 - DNA, 25 bp, Artificial
  probe
  misc_feature (1)..(25): SEQ ID NO: 2062; WAN024DC3_at; Start 340; Stop 364
tctgccaatcatcgtctgggtgctc

SEQ ID NO: 151894 - DNA, 25 bp, Artificial
  probe
  misc_feature (1)..(25): SEQ ID NO: 2062; WAN024DC3_at; Start 323; Stop 347
ggtttatccgcttaaattctgccaa

SEQ ID NO: 151895 - DNA, 25 bp, Artificial
  probe
  misc_feature (1)..(25): SEQ ID NO: 2062; WAN024DC3_at; Start 73; Stop 97
tttagtccagaggaaacggctagcc

SEQ ID NO: 151896 - DNA, 25 bp, Artificial
  probe
  misc_feature (1)..(25): SEQ ID NO: 2062; WAN024DC3_at; Start 373; Stop 397
tatgaaaaagttggctatacttgtg

SEQ ID NO: 151897 - DNA, 25 bp, Artificial
  probe
  misc_feature (1)..(25): SEQ ID NO: 2062; WAN024DC3_at; Start 132; Stop 156
cctacttggctatgaggatgcagct

SEQ ID NO: 151898 - DNA, 25 bp, Artificial
  probe
  misc_feature (1)..(25): SEQ ID NO: 2062; WAN024DC3_at; Start 85; Stop 109
gaaacggctagccaactagctagac

SEQ ID NO: 151899 - DNA, 25 bp, Artificial
  probe
  misc_feature (1)..(25): SEQ ID NO: 2062; WAN024DC3_at; Start 200; Stop 224
cactctattccaaagcaggatttaa

SEQ ID NO: 151900 - DNA, 25 bp, Artificial
  probe
  misc_feature (1)..(25): SEQ ID NO: 2062; WAN024DC3_at; Start 209; Stop 233
ccaaagcaggatttaatatcttagc

SEQ ID NO: 151901 - DNA, 25 bp, Artificial
  probe
  misc_feature (1)..(25): SEQ ID NO: 3131; WAN024DC4_at; Start 200; Stop 224
tagcagctcacaagccagctcagta

SEQ ID NO: 151902 - DNA, 25 bp, Artificial
  probe
  misc_feature (1)..(25): SEQ ID NO: 3131; WAN024DC4_at; Start 268; Stop 292
gatgaacgggttttgattcctcgtc

SEQ ID NO: 151903 - DNA, 25 bp, Artificial
  probe
  misc_feature (1)..(25): SEQ ID NO: 3131; WAN024DC4_at; Start 145; Stop 169
caggaggtgacaacagaggaagaaa

SEQ ID NO: 151904 - DNA, 25 bp, Artificial
  probe
  misc_feature (1)..(25): SEQ ID NO: 3131; WAN024DC4_at; Start 92; Stop 116
tctatcgtagtctgaaaaatctatc

SEQ ID NO: 151905 - DNA, 25 bp, Artificial
  probe
  misc_feature (1)..(25): SEQ ID NO: 3131; WAN024DC4_at; Start 721; Stop 745
tgaaattggatacaagcaaggtcaa

SEQ ID NO: 151906 - DNA, 25 bp, Artificial
  probe
  misc_feature (1)..(25): SEQ ID NO: 3131; WAN024DC4_at; Start 617; Stop 641
gagcctcatctagctctctttgcag

SEQ ID NO: 151907 - DNA, 25 bp, Artificial
  probe
  misc_feature (1)..(25): SEQ ID NO: 3131; WAN024DC4_at; Start 557; Stop 581
aatccaccctatatctctcgtgaag

SEQ ID NO: 151908 - DNA, 25 bp, Artificial
  probe
  misc_feature (1)..(25): SEQ ID NO: 3131; WAN024DC4_at; Start 139; Stop 163
ctccagcaggaggtgacaacagagg

SEQ ID NO: 151909 - DNA, 25 bp, Artificial
  probe
  misc_feature (1)..(25): SEQ ID NO: 3131; WAN024DC4_at; Start 377; Stop 401
gagctattgctctcgctctagcaaa

SEQ ID NO: 151910 - DNA, 25 bp, Artificial
  probe
  misc_feature (1)..(25): SEQ ID NO: 3131; WAN024DC4_at; Start 186; Stop 210
tatttaccagcaactagcagctcac

SEQ ID NO: 151911 - DNA, 25 bp, Artificial
  probe
  misc_feature (1)..(25): SEQ ID NO: 3131; WAN024DC4_at; Start 220; Stop 244
cagtacatcattggacaggcagatt

SEQ ID NO: 151912 - DNA, 25 bp, Artificial
  probe
  misc_feature (1)..(25): SEQ ID NO: 3131; WAN024DC4_at; Start 155; Stop 179
caacagaggaagaaaaacaatttgt

SEQ ID NO: 151913 - DNA, 25 bp, Artificial
  probe
  misc_feature (1)..(25): SEQ ID NO: 3131; WAN024DC4_at; Start 77; Stop 101
aaagcctctcttttgtctatcgtag

SEQ ID NO: 151914 - DNA, 25 bp, Artificial
  probe
  misc_feature (1)..(25): SEQ ID NO: 3131; WAN024DC4_at; Start 572; Stop 596
tctcgtgaagatgagtcagaggtag

SEQ ID NO: 151915 - DNA, 25 bp, Artificial
  probe
  misc_feature (1)..(25): SEQ ID NO: 3131; WAN024DC4_at; Start 70; Stop 94
gaagcggaaagcctctcttttgtct

SEQ ID NO: 151916 - DNA, 25 bp, Artificial
  probe
  misc_feature (1)..(25): SEQ ID NO: 3131; WAN024DC4_at; Start 254; Stop 278
tgcatttaaaggtggatgaacgggt

SEQ ID NO: 151917 - DNA, 25 bp, Artificial
  probe
  misc_feature (1)..(25): SEQ ID NO: 3131; WAN024DC4_at; Start 233; Stop 257
gacaggcagatttttatggaatgca

SEQ ID NO: 151918 - DNA, 25 bp, Artificial
  probe
  misc_feature (1)..(25): SEQ ID NO: 3131; WAN024DC4_at; Start 64; Stop 88
ggagaggaagcggaaagcctctctt

SEQ ID NO: 151919 - DNA, 25 bp, Artificial
  probe
  misc_feature (1)..(25): SEQ ID NO: 3131; WAN024DC4_at; Start 124; Stop 148
gactttatttttgccctccagcagg

SEQ ID NO: 151920 - DNA, 25 bp, Artificial
  probe
  misc_feature (1)..(25): SEQ ID NO: 3131; WAN024DC4_at; Start 120; Stop 144
tacagactttatttttgccctccag

SEQ ID NO: 151921 - DNA, 25 bp, Artificial
  probe
  misc_feature (1)..(25): SEQ ID NO: 3131; WAN024DC4_at; Start 195; Stop 219
gcaactagcagctcacaagccagct

SEQ ID NO: 151922 - DNA, 25 bp, Artificial
  probe
  misc_feature (1)..(25): SEQ ID NO: 3131; WAN024DC4_at; Start 129; Stop 153
tatttttgccctccagcaggaggtg

SEQ ID NO: 151923 - DNA, 25 bp, Artificial
  probe
  misc_feature (1)..(25): SEQ ID NO: 3131; WAN024DC4_at; Start 568; Stop 592
tatctctcgtgaagatgagtcagag

SEQ ID NO: 151924 - DNA, 25 bp, Artificial
  probe
  misc_feature (1)..(25): SEQ ID NO: 3131; WAN024DC4_at; Start 37; Stop 61
aattttgaagaagagttgataagac

SEQ ID NO: 151925 - DNA, 25 bp, Artificial
  probe
  misc_feature (1)..(25): SEQ ID NO: 3131; WAN024DC4_at; Start 279; Stop 303
tttgattcctcgtccagaaacagag

SEQ ID NO: 151926 - DNA, 25 bp, Artificial
  probe
  misc_feature (1)..(25): SEQ ID NO: 3131; WAN024DC4_at; Start 364; Stop 388
ggaacaggtagtggagctattgctc

SEQ ID NO: 151927 - DNA, 25 bp, Artificial
  probe
  misc_feature (1)..(25): SEQ ID NO: 3131; WAN024DC4_at; Start 104; Stop 128
tgaaaaatctatcttttacagactt

SEQ ID NO: 151928 - DNA, 25 bp, Artificial
  probe
  misc_feature (1)..(25): SEQ ID NO: 3131; WAN024DC4_at; Start 284; Stop 308
ttcctcgtccagaaacagaggagtt

SEQ ID NO: 151929 - DNA, 25 bp, Artificial
  probe
  misc_feature (1)..(25): SEQ ID NO: 3131; WAN024DC4_at; Start 247; Stop 271
tatggaatgcatttaaaggtggatg

SEQ ID NO: 151930 - DNA, 25 bp, Artificial
  probe
  misc_feature (1)..(25): SEQ ID NO: 3131; WAN024DC4_at; Start 172; Stop 196
caatttgtagaagatatttaccagc

SEQ ID NO: 151931 - DNA, 25 bp, Artificial
  probe
  misc_feature (1)..(25): SEQ ID NO: 3131; WAN024DC4_at; Start 706; Stop 730
tggtaagatttaccttgaaattgga

SEQ ID NO: 151932 - DNA, 25 bp, Artificial
  probe
  misc_feature (1)..(25): SEQ ID NO: 3131; WAN024DC4_at; Start 181; Stop 205
gaagatatttaccagcaactagcag

SEQ ID NO: 151933 - DNA, 25 bp, Artificial
  probe
  misc_feature (1)..(25): SEQ ID NO: 3131; WAN024DC4_at; Start 3; Stop 27
taaacaaataatgaaattagctcaa

SEQ ID NO: 151934 - DNA, 25 bp, Artificial
  probe
  misc_feature (1)..(25): SEQ ID NO: 3131; WAN024DC4_at; Start 215; Stop 239
cagctcagtacatcattggacaggc

SEQ ID NO: 151935 - DNA, 25 bp, Artificial
  probe
  misc_feature (1)..(25): SEQ ID NO: 1338; WAN024DC5_at; Start 326; Stop 350
cagcgccagcaggtttaagcaataa

SEQ ID NO: 151936 - DNA, 25 bp, Artificial
  probe
  misc_feature (1)..(25): SEQ ID NO: 1338; WAN024DC5_at; Start 10; Stop 34
gaactaagagatgttacaatggaaa

SEQ ID NO: 151937 - DNA, 25 bp, Artificial
  probe
  misc_feature (1)..(25): SEQ ID NO: 1338; WAN024DC5_at; Start 43; Stop 67
gatgttttaaatttggatgtcaagg

SEQ ID NO: 151938 - DNA, 25 bp, Artificial
  probe
  misc_feature (1)..(25): SEQ ID NO: 1338; WAN024DC5_at; Start 321; Stop 345
tcgaacagcgccagcaggtttaagc

SEQ ID NO: 151939 - DNA, 25 bp, Artificial
  probe
  misc_feature (1)..(25): SEQ ID NO: 1338; WAN024DC5_at; Start 88; Stop 112
gcaaccaacgcaattagtttagctg

SEQ ID NO: 151940 - DNA, 25 bp, Artificial
  probe
  misc_feature (1)..(25): SEQ ID NO: 1338; WAN024DC5_at; Start 371; Stop 395
cagaaaatgaacaggcaagattttg

SEQ ID NO: 151941 - DNA, 25 bp, Artificial
  probe
  misc_feature (1)..(25): SEQ ID NO: 1338; WAN024DC5_at; Start 316; Stop 340
tatgttcgaacagcgccagcaggtt

SEQ ID NO: 151942 - DNA, 25 bp, Artificial
  probe
  misc_feature (1)..(25): SEQ ID NO: 1338; WAN024DC5_at; Start 425; Stop 449
gggaaatatccgagaatgaagtagt

SEQ ID NO: 151943 - DNA, 25 bp, Artificial
  probe
  misc_feature (1)..(25): SEQ ID NO: 1338; WAN024DC5_at; Start 436; Stop 460
gagaatgaagtagtagcaatctatg

SEQ ID NO: 151944 - DNA, 25 bp, Artificial
  probe
  misc_feature (1)..(25): SEQ ID NO: 1338; WAN024DC5_at; Start 364; Stop 388
tatgaaccagaaaatgaacaggcaa

SEQ ID NO: 151945 - DNA, 25 bp, Artificial
  probe
  misc_feature (1)..(25): SEQ ID NO: 1338; WAN024DC5_at; Start 19; Stop 43
gatgttacaatggaaaattattttg

SEQ ID NO: 151946 - DNA, 25 bp, Artificial
  probe
  misc_feature (1)..(25): SEQ ID NO: 1338; WAN024DC5_at; Start 137; Stop 161
gagattttgtagctccattggcagt

SEQ ID NO: 151947 - DNA, 25 bp, Artificial
  probe
  misc_feature (1)..(25): SEQ ID NO: 1338; WAN024DC5_at; Start 277; Stop 301
caaggatattttaaaccaattatgg

SEQ ID NO: 151948 - DNA, 25 bp, Artificial
  probe
  misc_feature (1)..(25): SEQ ID NO: 1338; WAN024DC5_at; Start 306; Stop 330
agtactagactatgttcgaacagcg

SEQ ID NO: 151949 - DNA, 25 bp, Artificial
  probe
  misc_feature (1)..(25): SEQ ID NO: 1338; WAN024DC5_at; Start 402; Stop 426
cagttatggatttaaagaaactggg

SEQ ID NO: 151950 - DNA, 25 bp, Artificial
  probe
  misc_feature (1)..(25): SEQ ID NO: 1338; WAN024DC5_at; Start 431; Stop 455
tatccgagaatgaagtagtagcaat

SEQ ID NO: 151951 - DNA, 25 bp, Artificial
  probe
  misc_feature (1)..(25): SEQ ID NO: 1338; WAN024DC5_at; Start 241; Stop 265
ctatttcgttttatgattgataaga

SEQ ID NO: 151952 - DNA, 25 bp, Artificial
  probe
  misc_feature (1)..(25): SEQ ID NO: 1338; WAN024DC5_at; Start 102; Stop 126
tagtttagctgaagcatacgtctac

SEQ ID NO: 151953 - DNA, 25 bp, Artificial
  probe
  misc_feature (1)..(25): SEQ ID NO: 1338; WAN024DC5_at; Start 148; Stop 172
gctccattggcagtttatgataatg

SEQ ID NO: 151954 - DNA, 25 bp, Artificial
  probe
  misc_feature (1)..(25): SEQ ID NO: 1338; WAN024DC5_at; Start 451; Stop 475
gcaatctatgatttaacaattgaga

SEQ ID NO: 151955 - DNA, 25 bp, Artificial
  probe
  misc_feature (1)..(25): SEQ ID NO: 1338; WAN024DC5_at; Start 73; Stop 97
caaaaacaattcattgcaaccaacg

SEQ ID NO: 151956 - DNA, 25 bp, Artificial
  probe
  misc_feature (1)..(25): SEQ ID NO: 1338; WAN024DC5_at; Start 177; Stop 201
aattataggttttgtgatgatagct

SEQ ID NO: 151957 - DNA, 25 bp, Artificial
  probe
  misc_feature (1)..(25): SEQ ID NO: 1338; WAN024DC5_at; Start 118; Stop 142
tacgtctacactaaaaatggagatt

SEQ ID NO: 151958 - DNA, 25 bp, Artificial
  probe
  misc_feature (1)..(25): SEQ ID NO: 1338; WAN024DC5_at; Start 333; Stop 357
agcaggtttaagcaataaactttgg

SEQ ID NO: 151959 - DNA, 25 bp, Artificial
  probe
  misc_feature (1)..(25): SEQ ID NO: 1338; WAN024DC5_at; Start 460; Stop 484
gatttaacaattgagaaataactaa

SEQ ID NO: 151960 - DNA, 25 bp, Artificial
  probe
  misc_feature (1)..(25): SEQ ID NO: 1338; WAN024DC5_at; Start 93; Stop 117
caacgcaattagtttagctgaagca

SEQ ID NO: 151961 - DNA, 25 bp, Artificial
  probe
  misc_feature (1)..(25): SEQ ID NO: 1338; WAN024DC5_at; Start 115; Stop 139
gcatacgtctacactaaaaatggag

SEQ ID NO: 151962 - DNA, 25 bp, Artificial
  probe
  misc_feature (1)..(25): SEQ ID NO: 1338; WAN024DC5_at; Start 57; Stop 81
ggatgtcaaggaatatcaaaaacaa

SEQ ID NO: 151963 - DNA, 25 bp, Artificial
  probe
  misc_feature (1)..(25): SEQ ID NO: 1338; WAN024DC5_at; Start 311; Stop 335
tagactatgttcgaacagcgccagc

SEQ ID NO: 151964 - DNA, 25 bp, Artificial
  probe
  misc_feature (1)..(25): SEQ ID NO: 1338; WAN024DC5_at; Start 292; Stop 316
ccaattatggataaagtactagact

SEQ ID NO: 151965 - DNA, 25 bp, Artificial
  probe
  misc_feature (1)..(25): SEQ ID NO: 1338; WAN024DC5_at; Start 207; Stop 231
taaaaagatcggaattagtagtgga

SEQ ID NO: 151966 - DNA, 25 bp, Artificial
  probe
  misc_feature (1)..(25): SEQ ID NO: 1338; WAN024DC5_at; Start 109; Stop 133
gctgaagcatacgtctacactaaaa

SEQ ID NO: 151967 - DNA, 25 bp, Artificial
  probe
  misc_feature (1)..(25): SEQ ID NO: 1338; WAN024DC5_at; Start 2; Stop 26
tgacaattgaactaagagatgttac

SEQ ID NO: 151968 - DNA, 25 bp, Artificial
  probe
  misc_feature (1)..(25): SEQ ID NO: 1338; WAN024DC5_at; Start 194; Stop 218
tgatagcttatgataaaaagatcgg

SEQ ID NO: 151969 - DNA, 25 bp, Artificial
  probe
  misc_feature (1)..(25): SEQ ID NO: 2416; WAN024DC6_at; Start 444; Stop 468
aaaggcgaccatggtgttgcgaaca

SEQ ID NO: 151970 - DNA, 25 bp, Artificial
  probe
  misc_feature (1)..(25): SEQ ID NO: 2416; WAN024DC6_at; Start 167; Stop 191
aacgccctgcccttgcgattgagga

SEQ ID NO: 151971 - DNA, 25 bp, Artificial
  probe
  misc_feature (1)..(25): SEQ ID NO: 2416; WAN024DC6_at; Start 136; Stop 160
gttggctatgtgtcgagtcgaattg

SEQ ID NO: 151972 - DNA, 25 bp, Artificial
  probe
  misc_feature (1)..(25): SEQ ID NO: 2416; WAN024DC6_at; Start 176; Stop 200
cccttgcgattgaggaaacaacgga

SEQ ID NO: 151973 - DNA, 25 bp, Artificial
  probe
  misc_feature (1)..(25): SEQ ID NO: 2416; WAN024DC6_at; Start 435; Stop 459
ttgcaagaaaaaggcgaccatggtg

SEQ ID NO: 151974 - DNA, 25 bp, Artificial
  probe
  misc_feature (1)..(25): SEQ ID NO: 2416; WAN024DC6_at; Start 20; Stop 44
gttatgggaccatgaactctggtaa

SEQ ID NO: 151975 - DNA, 25 bp, Artificial
  probe
  misc_feature (1)..(25): SEQ ID NO: 2416; WAN024DC6_at; Start 494; Stop 518
gagaacagatccagattggtggtaa

SEQ ID NO: 151976 - DNA, 25 bp, Artificial
  probe
  misc_feature (1)..(25): SEQ ID NO: 2416; WAN024DC6_at; Start 16; Stop 40
tatcgttatgggaccatgaactctg

SEQ ID NO: 151977 - DNA, 25 bp, Artificial
  probe
  misc_feature (1)..(25): SEQ ID NO: 2416; WAN024DC6_at; Start 51; Stop 75
tgagattctcaaagtggcctataac

SEQ ID NO: 151978 - DNA, 25 bp, Artificial
  probe
  misc_feature (1)..(25): SEQ ID NO: 2416; WAN024DC6_at; Start 59; Stop 83
tcaaagtggcctataactacgagga

SEQ ID NO: 151979 - DNA, 25 bp, Artificial
  probe
  misc_feature (1)..(25): SEQ ID NO: 2416; WAN024DC6_at; Start 400; Stop 424
gacaagattgacgaaatcaagacca

SEQ ID NO: 151980 - DNA, 25 bp, Artificial
  probe
  misc_feature (1)..(25): SEQ ID NO: 2416; WAN024DC6_at; Start 409; Stop 433
gacgaaatcaagaccatctgtcagt

SEQ ID NO: 151981 - DNA, 25 bp, Artificial
  probe
  misc_feature (1)..(25): SEQ ID NO: 2416; WAN024DC6_at; Start 245; Stop 269
ttttggtcgatgaagcccagtttct

SEQ ID NO: 151982 - DNA, 25 bp, Artificial
  probe
  misc_feature (1)..(25): SEQ ID NO: 2416; WAN024DC6_at; Start 373; Stop 397
ggttccaaatatctcttgcttttag

SEQ ID NO: 151983 - DNA, 25 bp, Artificial
  probe
  misc_feature (1)..(25): SEQ ID NO: 2416; WAN024DC6_at; Start 472; Stop 496
gatggactgcccgtttacgatggag

SEQ ID NO: 151984 - DNA, 25 bp, Artificial
  probe
  misc_feature (1)..(25): SEQ ID NO: 2416; WAN024DC6_at; Start 420; Stop 444
gaccatctgtcagtattgcaagaaa

SEQ ID NO: 151985 - DNA, 25 bp, Artificial
  probe
  misc_feature (1)..(25): SEQ ID NO: 2416; WAN024DC6_at; Start 334; Stop 358
tttggcttgaaaaatgactttcgca

SEQ ID NO: 151986 - DNA, 25 bp, Artificial
  probe
  misc_feature (1)..(25): SEQ ID NO: 2416; WAN024DC6_at; Start 155; Stop 179
gaattggcatgaaacgccctgccct

SEQ ID NO: 151987 - DNA, 25 bp, Artificial
  probe
  misc_feature (1)..(25): SEQ ID NO: 2416; WAN024DC6_at; Start 322; Stop 346
cccgtcatggcttttggcttgaaaa

SEQ ID NO: 151988 - DNA, 25 bp, Artificial
  probe
  misc_feature (1)..(25): SEQ ID NO: 2416; WAN024DC6_at; Start 75; Stop 99
ctacgaggagcaaggaaaaggtgtt

SEQ ID NO: 151989 - DNA, 25 bp, Artificial
  probe
  misc_feature (1)..(25): SEQ ID NO: 2416; WAN024DC6_at; Start 349; Stop 373
gactttcgcaatgaattgttcgaag

SEQ ID NO: 151990 - DNA, 25 bp, Artificial
  probe
  misc_feature (1)..(25): SEQ ID NO: 2416; WAN024DC6_at; Start 481; Stop 505
cccgtttacgatggagaacagatcc

SEQ ID NO: 151991 - DNA, 25 bp, Artificial
  probe
  misc_feature (1)..(25): SEQ ID NO: 2416; WAN024DC6_at; Start 211; Stop 235
tatatccgagacctaccagaaaaac

SEQ ID NO: 151992 - DNA, 25 bp, Artificial
  probe
  misc_feature (1)..(25): SEQ ID NO: 2416; WAN024DC6_at; Start 187; Stop 211
gaggaaacaacggatatctttggct

SEQ ID NO: 151993 - DNA, 25 bp, Artificial
  probe
  misc_feature (1)..(25): SEQ ID NO: 2416; WAN024DC6_at; Start 314; Stop 338
tagacatacccgtcatggcttttgg

SEQ ID NO: 151994 - DNA, 25 bp, Artificial
  probe
  misc_feature (1)..(25): SEQ ID NO: 2416; WAN024DC6_at; Start 199; Stop 223
gatatctttggctatatccgagacc

SEQ ID NO: 151995 - DNA, 25 bp, Artificial
  probe
  misc_feature (1)..(25): SEQ ID NO: 2416; WAN024DC6_at; Start 65; Stop 89
tggcctataactacgaggagcaagg

SEQ ID NO: 151996 - DNA, 25 bp, Artificial
  probe
  misc_feature (1)..(25): SEQ ID NO: 2416; WAN024DC6_at; Start 467; Stop 491
cacaggatggactgcccgtttacga

SEQ ID NO: 151997 - DNA, 25 bp, Artificial
  probe
  misc_feature (1)..(25): SEQ ID NO: 2416; WAN024DC6_at; Start 238; Stop 262
tactgtgttttggtcgatgaagccc

SEQ ID NO: 151998 - DNA, 25 bp, Artificial
  probe
  misc_feature (1)..(25): SEQ ID NO: 2416; WAN024DC6_at; Start 307; Stop 331
gacgagttagacatacccgtcatgg

SEQ ID NO: 151999 - DNA, 25 bp, Artificial
  probe
  misc_feature (1)..(25): SEQ ID NO: 2416; WAN024DC6_at; Start 208; Stop 232
ggctatatccgagacctaccagaaa

SEQ ID NO: 152000 - DNA, 25 bp, Artificial
  probe
  misc_feature (1)..(25): SEQ ID NO: 2416; WAN024DC6_at; Start 365; Stop 389
tgttcgaaggttccaaatatctctt

SEQ ID NO: 152001 - DNA, 25 bp, Artificial
  probe
  misc_feature (1)..(25): SEQ ID NO: 2416; WAN024DC6_at; Start 148; Stop 172
tcgagtcgaattggcatgaaacgcc

SEQ ID NO: 152002 - DNA, 25 bp, Artificial
  probe
  misc_feature (1)..(25): SEQ ID NO: 2416; WAN024DC6_at; Start 458; Stop 482
tgttgcgaacacaggatggactgcc

SEQ ID NO: 152003 - DNA, 25 bp, Artificial
  probe
  misc_feature (1)..(25): SEQ ID NO: 4133; WAN024DC7_at; Start 36; Stop 60
tttatttgaaggacgcacgctcgag

SEQ ID NO: 152004 - DNA, 25 bp, Artificial
  probe
  misc_feature (1)..(25): SEQ ID NO: 4133; WAN024DC7_at; Start 44; Stop 68
aaggacgcacgctcgagcaaaagaa

SEQ ID NO: 152005 - DNA, 25 bp, Artificial
  probe
  misc_feature (1)..(25): SEQ ID NO: 4133; WAN024DC7_at; Start 3; Stop 27
ggaggaagctattatgccatttgta

SEQ ID NO: 152006 - DNA, 25 bp, Artificial
  probe
  misc_feature (1)..(25): SEQ ID NO: 4133; WAN024DC7_at; Start 41; Stop 65
ttgaaggacgcacgctcgagcaaaa

SEQ ID NO: 152007 - DNA, 25 bp, Artificial
  probe
  misc_feature (1)..(25): SEQ ID NO: 4133; WAN024DC7_at; Start 39; Stop 63
atttgaaggacgcacgctcgagcaa

SEQ ID NO: 152008 - DNA, 25 bp, Artificial
  probe
  misc_feature (1)..(25): SEQ ID NO: 4133; WAN024DC7_at; Start 50; Stop 74
gcacgctcgagcaaaagaaagctct

SEQ ID NO: 152009 - DNA, 25 bp, Artificial
  probe
  misc_feature (1)..(25): SEQ ID NO: 4133; WAN024DC7_at; Start 58; Stop 82
gagcaaaagaaagctcttgctaagg

SEQ ID NO: 152010 - DNA, 25 bp, Artificial
  probe
  misc_feature (1)..(25): SEQ ID NO: 4133; WAN024DC7_at; Start 133; Stop 157
catgtcatcatcaacgacatgccag

SEQ ID NO: 152011 - DNA, 25 bp, Artificial
  probe
  misc_feature (1)..(25): SEQ ID NO: 4133; WAN024DC7_at; Start 18; Stop 42
gccatttgtacgcatcgatttattt

SEQ ID NO: 152012 - DNA, 25 bp, Artificial
  probe
  misc_feature (1)..(25): SEQ ID NO: 4133; WAN024DC7_at; Start 37; Stop 61
ttatttgaaggacgcacgctcgagc

SEQ ID NO: 152013 - DNA, 25 bp, Artificial
  probe
  misc_feature (1)..(25): SEQ ID NO: 4133; WAN024DC7_at; Start 15; Stop 39
tatgccatttgtacgcatcgattta

SEQ ID NO: 152014 - DNA, 25 bp, Artificial
  probe
  misc_feature (1)..(25): SEQ ID NO: 4133; WAN024DC7_at; Start 71; Stop 95
ctcttgctaaggaagtaacggaagc

SEQ ID NO: 152015 - DNA, 25 bp, Artificial
  probe
  misc_feature (1)..(25): SEQ ID NO: 4133; WAN024DC7_at; Start 1; Stop 25
gtggaggaagctattatgccatttg

SEQ ID NO: 152016 - DNA, 25 bp, Artificial
  probe
  misc_feature (1)..(25): SEQ ID NO: 4133; WAN024DC7_at; Start 47; Stop 71
gacgcacgctcgagcaaaagaaagc

SEQ ID NO: 152017 - DNA, 25 bp, Artificial
  probe
  misc_feature (1)..(25): SEQ ID NO: 4133; WAN024DC7_at; Start 52; Stop 76
acgctcgagcaaaagaaagctcttg

SEQ ID NO: 152018 - DNA, 25 bp, Artificial
  probe
  misc_feature (1)..(25): SEQ ID NO: 4133; WAN024DC7_at; Start 141; Stop 165
catcaacgacatgccagaaggaact

SEQ ID NO: 152019 - DNA, 25 bp, Artificial
  probe
  misc_feature (1)..(25): SEQ ID NO: 4133; WAN024DC7_at; Start 12; Stop 36
tattatgccatttgtacgcatcgat

SEQ ID NO: 152020 - DNA, 25 bp, Artificial
  probe
  misc_feature (1)..(25): SEQ ID NO: 4133; WAN024DC7_at; Start 26; Stop 50
tacgcatcgatttatttgaaggacg

SEQ ID NO: 152021 - DNA, 25 bp, Artificial
  probe
  misc_feature (1)..(25): SEQ ID NO: 4133; WAN024DC7_at; Start 32; Stop 56
tcgatttatttgaaggacgcacgct

SEQ ID NO: 152022 - DNA, 25 bp, Artificial
  probe
  misc_feature (1)..(25): SEQ ID NO: 4133; WAN024DC7_at; Start 143; Stop 167
tcaacgacatgccagaaggaactta

SEQ ID NO: 152023 - DNA, 25 bp, Artificial
  probe
  misc_feature (1)..(25): SEQ ID NO: 4133; WAN024DC7_at; Start 30; Stop 54
catcgatttatttgaaggacgcacg

SEQ ID NO: 152024 - DNA, 25 bp, Artificial
  probe
  misc_feature (1)..(25): SEQ ID NO: 4133; WAN024DC7_at; Start 46; Stop 70
ggacgcacgctcgagcaaaagaaag

SEQ ID NO: 152025 - DNA, 25 bp, Artificial
  probe
  misc_feature (1)..(25): SEQ ID NO: 4133; WAN024DC7_at; Start 20; Stop 44
catttgtacgcatcgatttatttga

SEQ ID NO: 152026 - DNA, 25 bp, Artificial
  probe
  misc_feature (1)..(25): SEQ ID NO: 4133; WAN024DC7_at; Start 54; Stop 78
gctcgagcaaaagaaagctcttgct

SEQ ID NO: 152027 - DNA, 25 bp, Artificial
  probe
  misc_feature (1)..(25): SEQ ID NO: 4133; WAN024DC7_at; Start 140; Stop 164
tcatcaacgacatgccagaaggaac

SEQ ID NO: 152028 - DNA, 25 bp, Artificial
  probe
  misc_feature (1)..(25): SEQ ID NO: 4133; WAN024DC7_at; Start 137; Stop 161
tcatcatcaacgacatgccagaagg

SEQ ID NO: 152029 - DNA, 25 bp, Artificial
  probe
  misc_feature (1)..(25): SEQ ID NO: 4133; WAN024DC7_at; Start 138; Stop 162
catcatcaacgacatgccagaagga

SEQ ID NO: 152030 - DNA, 25 bp, Artificial
  probe
  misc_feature (1)..(25): SEQ ID NO: 4133; WAN024DC7_at; Start 34; Stop 58
gatttatttgaaggacgcacgctcg

SEQ ID NO: 152031 - DNA, 25 bp, Artificial
  probe
  misc_feature (1)..(25): SEQ ID NO: 4133; WAN024DC7_at; Start 60; Stop 84
gcaaaagaaagctcttgctaaggaa

SEQ ID NO: 152032 - DNA, 25 bp, Artificial
  probe
  misc_feature (1)..(25): SEQ ID NO: 4133; WAN024DC7_at; Start 35; Stop 59
atttatttgaaggacgcacgctcga

SEQ ID NO: 152033 - DNA, 25 bp, Artificial
  probe
  misc_feature (1)..(25): SEQ ID NO: 4133; WAN024DC7_at; Start 28; Stop 52
cgcatcgatttatttgaaggacgca

SEQ ID NO: 152034 - DNA, 25 bp, Artificial
  probe
  misc_feature (1)..(25): SEQ ID NO: 4133; WAN024DC7_at; Start 10; Stop 34
gctattatgccatttgtacgcatcg

SEQ ID NO: 152035 - DNA, 25 bp, Artificial
  probe
  misc_feature (1)..(25): SEQ ID NO: 4133; WAN024DC7_at; Start 24; Stop 48
tgtacgcatcgatttatttgaagga

SEQ ID NO: 152036 - DNA, 25 bp, Artificial
  probe
  misc_feature (1)..(25): SEQ ID NO: 4133; WAN024DC7_at; Start 6; Stop 30
ggaagctattatgccatttgtacgc

SEQ ID NO: 152037 - DNA, 25 bp, Artificial
  probe
  misc_feature (1)..(25): SEQ ID NO: 2559; WAN024DC8_at; Start 485; Stop 509
tgggagcaattcttgagacacaacg

SEQ ID NO: 152038 - DNA, 25 bp, Artificial
  probe
  misc_feature (1)..(25): SEQ ID NO: 2559; WAN024DC8_at; Start 460; Stop 484
tatcaagccgtttcaggtgctggta

SEQ ID NO: 152039 - DNA, 25 bp, Artificial
  probe
  misc_feature (1)..(25): SEQ ID NO: 2559; WAN024DC8_at; Start 446; Stop 470
tcattgtttcaacttatcaagccgt

SEQ ID NO: 152040 - DNA, 25 bp, Artificial
  probe
  misc_feature (1)..(25): SEQ ID NO: 2559; WAN024DC8_at; Start 472; Stop 496
tcaggtgctggtatgggagcaattc

SEQ ID NO: 152041 - DNA, 25 bp, Artificial
  probe
  misc_feature (1)..(25): SEQ ID NO: 2559; WAN024DC8_at; Start 1026; Stop 1050
tgaacgtggattggttcgtccaaca

SEQ ID NO: 152042 - DNA, 25 bp, Artificial
  probe
  misc_feature (1)..(25): SEQ ID NO: 2559; WAN024DC8_at; Start 195; Stop 219
tgatattgctctcttttcagcaggt

SEQ ID NO: 152043 - DNA, 25 bp, Artificial
  probe
  misc_feature (1)..(25): SEQ ID NO: 2559; WAN024DC8_at; Start 46; Stop 70
gctcagatgataaaaatgttggaag

SEQ ID NO: 152044 - DNA, 25 bp, Artificial
  probe
  misc_feature (1)..(25): SEQ ID NO: 2559; WAN024DC8_at; Start 289; Stop 313
tatttccgtcaaaatccagatgttc

SEQ ID NO: 152045 - DNA, 25 bp, Artificial
  probe
  misc_feature (1)..(25): SEQ ID NO: 2559; WAN024DC8_at; Start 496; Stop 520
cttgagacacaacgtgaacttcgtg

SEQ ID NO: 152046 - DNA, 25 bp, Artificial
  probe
  misc_feature (1)..(25): SEQ ID NO: 2559; WAN024DC8_at; Start 32; Stop 56
caggtgctgtcggtgctcagatgat

SEQ ID NO: 152047 - DNA, 25 bp, Artificial
  probe
  misc_feature (1)..(25): SEQ ID NO: 2559; WAN024DC8_at; Start 995; Stop 1019
ggaactcagttcagattgctgaaac

SEQ ID NO: 152048 - DNA, 25 bp, Artificial
  probe
  misc_feature (1)..(25): SEQ ID NO: 2559; WAN024DC8_at; Start 305; Stop 329
cagatgttcctttggttgttccaga

SEQ ID NO: 152049 - DNA, 25 bp, Artificial
  probe
  misc_feature (1)..(25): SEQ ID NO: 2559; WAN024DC8_at; Start 655; Stop 679
tacgaagagatgaagatgaccaagg

SEQ ID NO: 152050 - DNA, 25 bp, Artificial
  probe
  misc_feature (1)..(25): SEQ ID NO: 2559; WAN024DC8_at; Start 319; Stop 343
gttgttccagaggtcaatgctcatg

SEQ ID NO: 152051 - DNA, 25 bp, Artificial
  probe
  misc_feature (1)..(25): SEQ ID NO: 2559; WAN024DC8_at; Start 580; Stop 604
ggtgacaagaaacattatcctatcg

SEQ ID NO: 152052 - DNA, 25 bp, Artificial
  probe
  misc_feature (1)..(25): SEQ ID NO: 2559; WAN024DC8_at; Start 355; Stop 379
cacaacggaatcattgcctgcccta

SEQ ID NO: 152053 - DNA, 25 bp, Artificial
  probe
  misc_feature (1)..(25): SEQ ID NO: 2559; WAN024DC8_at; Start 249; Stop 273
cgcagtaaaagctggcgtggtagta

SEQ ID NO: 152054 - DNA, 25 bp, Artificial
  probe
  misc_feature (1)..(25): SEQ ID NO: 2559; WAN024DC8_at; Start 901; Stop 925
gatacctttgttggtcgtatccgta

SEQ ID NO: 152055 - DNA, 25 bp, Artificial
  probe
  misc_feature (1)..(25): SEQ ID NO: 2559; WAN024DC8_at; Start 936; Stop 960
tgcagaaaaaggaattcacatgtgg

SEQ ID NO: 152056 - DNA, 25 bp, Artificial
  probe
  misc_feature (1)..(25): SEQ ID NO: 2559; WAN024DC8_at; Start 9; Stop 33
tacagttgctgtagtcggcgcgaca

SEQ ID NO: 152057 - DNA, 25 bp, Artificial
  probe
  misc_feature (1)..(25): SEQ ID NO: 2559; WAN024DC8_at; Start 740; Stop 764
cagtcttgtcagctcactctgagtc

SEQ ID NO: 152058 - DNA, 25 bp, Artificial
  probe
  misc_feature (1)..(25): SEQ ID NO: 2559; WAN024DC8_at; Start 97; Stop 121
cgttaccttgcttctgcacgttcag

SEQ ID NO: 152059 - DNA, 25 bp, Artificial
  probe
  misc_feature (1)..(25): SEQ ID NO: 2559; WAN024DC8_at; Start 408; Stop 432
tcttgagccggttcgccaaaaatgg

SEQ ID NO: 152060 - DNA, 25 bp, Artificial
  probe
  misc_feature (1)..(25): SEQ ID NO: 2559; WAN024DC8_at; Start 828; Stop 852
cccaggtgctgttcttgaagatgat

SEQ ID NO: 152061 - DNA, 25 bp, Artificial
  probe
  misc_feature (1)..(25): SEQ ID NO: 2559; WAN024DC8_at; Start 1011; Stop 1035
tgctgaaactcttcatgaacgtgga

SEQ ID NO: 152062 - DNA, 25 bp, Artificial
  probe
  misc_feature (1)..(25): SEQ ID NO: 2559; WAN024DC8_at; Start 432; Stop 456
gggcttggaccgtatcattgtttca

SEQ ID NO: 152063 - DNA, 25 bp, Artificial
  probe
  misc_feature (1)..(25): SEQ ID NO: 2559; WAN024DC8_at; Start 921; Stop 945
ccgtaaagacttggatgcagaaaaa

SEQ ID NO: 152064 - DNA, 25 bp, Artificial
  probe
  misc_feature (1)..(25): SEQ ID NO: 2559; WAN024DC8_at; Start 112; Stop 136
gcacgttcagcaggtaagtcattga

SEQ ID NO: 152065 - DNA, 25 bp, Artificial
  probe
  misc_feature (1)..(25): SEQ ID NO: 2559; WAN024DC8_at; Start 240; Stop 264
tgcaccatacgcagtaaaagctggc

SEQ ID NO: 152066 - DNA, 25 bp, Artificial
  probe
  misc_feature (1)..(25): SEQ ID NO: 2559; WAN024DC8_at; Start 965; Stop 989
tttcagataaccttctcaaaggtgc

SEQ ID NO: 152067 - DNA, 25 bp, Artificial
  probe
  misc_feature (1)..(25): SEQ ID NO: 2559; WAN024DC8_at; Start 951; Stop 975
tcacatgtgggttgtttcagataac

SEQ ID NO: 152068 - DNA, 25 bp, Artificial
  probe
  misc_feature (1)..(25): SEQ ID NO: 2559; WAN024DC8_at; Start 170; Stop 194
cgactgaaacagcttttgaaggagt

SEQ ID NO: 152069 - DNA, 25 bp, Artificial
  probe
  misc_feature (1)..(25): SEQ ID NO: 2559; WAN024DC8_at; Start 980; Stop 1004
tcaaaggtgctgcttggaactcagt

SEQ ID NO: 152070 - DNA, 25 bp, Artificial
  probe
  misc_feature (1)..(25): SEQ ID NO: 2559; WAN024DC8_at; Start 698; Stop 722
aagatgatagcattgcagtatctgc

SEQ ID NO: 152071 - DNA, 25 bp, Artificial
  probe
  misc_feature (1)..(25): SEQ ID NO: 1223; WAN024DC9_at; Start 28; Stop 52
tttcaccaagcatattacacgcgga

SEQ ID NO: 152072 - DNA, 25 bp, Artificial
  probe
  misc_feature (1)..(25): SEQ ID NO: 1223; WAN024DC9_at; Start 249; Stop 273
catcggttgtatgattgctaatttc

SEQ ID NO: 152073 - DNA, 25 bp, Artificial
  probe
  misc_feature (1)..(25): SEQ ID NO: 1223; WAN024DC9_at; Start 322; Stop 346
gtattcctcagtttaggtgtttggc

SEQ ID NO: 152074 - DNA, 25 bp, Artificial
  probe
  misc_feature (1)..(25): SEQ ID NO: 1223; WAN024DC9_at; Start 278; Stop 302
gcttcggactgctagatgtctttgt

SEQ ID NO: 152075 - DNA, 25 bp, Artificial
  probe
  misc_feature (1)..(25): SEQ ID NO: 1223; WAN024DC9_at; Start 193; Stop 217
tcagaaatgatgaactttatggctt

SEQ ID NO: 152076 - DNA, 25 bp, Artificial
  probe
  misc_feature (1)..(25): SEQ ID NO: 1223; WAN024DC9_at; Start 459; Stop 483
tattgtagcagaattaccattcttc

SEQ ID NO: 152077 - DNA, 25 bp, Artificial
  probe
  misc_feature (1)..(25): SEQ ID NO: 1223; WAN024DC9_at; Start 292; Stop 316
gatgtctttgttggtggtggttcaa

SEQ ID NO: 152078 - DNA, 25 bp, Artificial
  probe
  misc_feature (1)..(25): SEQ ID NO: 1223; WAN024DC9_at; Start 517; Stop 541
gcttcattgattattggagcgatta

SEQ ID NO: 152079 - DNA, 25 bp, Artificial
  probe
  misc_feature (1)..(25): SEQ ID NO: 1223; WAN024DC9_at; Start 15; Stop 39
ggtgcttagcttctttcaccaagca

SEQ ID NO: 152080 - DNA, 25 bp, Artificial
  probe
  misc_feature (1)..(25): SEQ ID NO: 1223; WAN024DC9_at; Start 540; Stop 564
tattattggtaaaattggtcgtcga

SEQ ID NO: 152081 - DNA, 25 bp, Artificial
  probe
  misc_feature (1)..(25): SEQ ID NO: 1223; WAN024DC9_at; Start 363; Stop 387
caaggattacctctttaacggattg

SEQ ID NO: 152082 - DNA, 25 bp, Artificial
  probe
  misc_feature (1)..(25): SEQ ID NO: 1223; WAN024DC9_at; Start 2; Stop 26
tgaatcaacccttggtgcttagctt

SEQ ID NO: 152083 - DNA, 25 bp, Artificial
  probe
  misc_feature (1)..(25): SEQ ID NO: 1223; WAN024DC9_at; Start 136; Stop 160
ttgactgtcacaccgcccctaaatg

SEQ ID NO: 152084 - DNA, 25 bp, Artificial
  probe
  misc_feature (1)..(25): SEQ ID NO: 1223; WAN024DC9_at; Start 234; Stop 258
catcatcggagttaccatcggttgt

SEQ ID NO: 152085 - DNA, 25 bp, Artificial
  probe
  misc_feature (1)..(25): SEQ ID NO: 1223; WAN024DC9_at; Start 40; Stop 64
tattacacgcggataaccgccaaag

SEQ ID NO: 152086 - DNA, 25 bp, Artificial
  probe
  misc_feature (1)..(25): SEQ ID NO: 1223; WAN024DC9_at; Start 444; Stop 468
cgctgcagagttaaatattgtagca

SEQ ID NO: 152087 - DNA, 25 bp, Artificial
  probe
  misc_feature (1)..(25): SEQ ID NO: 1223; WAN024DC9_at; Start 307; Stop 331
ggtggttcaaccttagtattcctca

SEQ ID NO: 152088 - DNA, 25 bp, Artificial
  probe
  misc_feature (1)..(25): SEQ ID NO: 1223; WAN024DC9_at; Start 351; Stop 375
tgcaaaatatagcaaggattacctc

SEQ ID NO: 152089 - DNA, 25 bp, Artificial
  probe
  misc_feature (1)..(25): SEQ ID NO: 1223; WAN024DC9_at; Start 123; Stop 147
tatctacgtcgttttgactgtcaca

SEQ ID NO: 152090 - DNA, 25 bp, Artificial
  probe
  misc_feature (1)..(25): SEQ ID NO: 1223; WAN024DC9_at; Start 378; Stop 402
taacggattgattcgaaaagatcat

SEQ ID NO: 152091 - DNA, 25 bp, Artificial
  probe
  misc_feature (1)..(25): SEQ ID NO: 1223; WAN024DC9_at; Start 265; Stop 289
gctaatttctttagcttcggactgc

SEQ ID NO: 152092 - DNA, 25 bp, Artificial
  probe
  misc_feature (1)..(25): SEQ ID NO: 1223; WAN024DC9_at; Start 412; Stop 436
tcaatcctcttttcaatttccatgt

SEQ ID NO: 152093 - DNA, 25 bp, Artificial
  probe
  misc_feature (1)..(25): SEQ ID NO: 1223; WAN024DC9_at; Start 96; Stop 120
tgttgcagatattgcaatcgtcgct

SEQ ID NO: 152094 - DNA, 25 bp, Artificial
  probe
  misc_feature (1)..(25): SEQ ID NO: 1223; WAN024DC9_at; Start 484; Stop 508
cttacttggtttacaacaggaatcg

SEQ ID NO: 152095 - DNA, 25 bp, Artificial
  probe
  misc_feature (1)..(25): SEQ ID NO: 1223; WAN024DC9_at; Start 497; Stop 521
caacaggaatcggtgaatttgcttc

SEQ ID NO: 152096 - DNA, 25 bp, Artificial
  probe
  misc_feature (1)..(25): SEQ ID NO: 1223; WAN024DC9_at; Start 172; Stop 196
ggtgcttatcagtttcgtatttcag

SEQ ID NO: 152097 - DNA, 25 bp, Artificial
  probe
  misc_feature (1)..(25): SEQ ID NO: 1223; WAN024DC9_at; Start 153; Stop 177
cctaaatgccatcagctatggtgct

SEQ ID NO: 152098 - DNA, 25 bp, Artificial
  probe
  misc_feature (1)..(25): SEQ ID NO: 1223; WAN024DC9_at; Start 53; Stop 77
taaccgccaaaggagaaaagatgaa

SEQ ID NO: 152099 - DNA, 25 bp, Artificial
  probe
  misc_feature (1)..(25): SEQ ID NO: 1223; WAN024DC9_at; Start 79; Stop 103
aaattaactattcgtgatgttgcag

SEQ ID NO: 152100 - DNA, 25 bp, Artificial
  probe
  misc_feature (1)..(25): SEQ ID NO: 1223; WAN024DC9_at; Start 220; Stop 244
tacaatcctaagtacatcatcggag

SEQ ID NO: 152101 - DNA, 25 bp, Artificial
  probe
  misc_feature (1)..(25): SEQ ID NO: 1223; WAN024DC9_at; Start 109; Stop 133
gcaatcgtcgctgctatctacgtcg

SEQ ID NO: 152102 - DNA, 25 bp, Artificial
  probe
  misc_feature (1)..(25): SEQ ID NO: 1223; WAN024DC9_at; Start 555; Stop 579
tggtcgtcgaattgatttaagtaaa

SEQ ID NO: 152103 - DNA, 25 bp, Artificial
  probe
  misc_feature (1)..(25): SEQ ID NO: 1223; WAN024DC9_at; Start 330; Stop 354
cagtttaggtgtttggctttttgca

SEQ ID NO: 152104 - DNA, 25 bp, Artificial
  probe
  misc_feature (1)..(25): SEQ ID NO: 1223; WAN024DC9_at; Start 429; Stop 453
ttccatgtttactatcgctgcagag

SEQ ID NO: 152105 - DNA, 25 bp, Artificial
  probe
  misc_feature (1)..(25): SEQ ID NO: 634; WAN024DCA_at; Start 370; Stop 394
gcacaaatattcattattatcatca

SEQ ID NO: 152106 - DNA, 25 bp, Artificial
  probe
  misc_feature (1)..(25): SEQ ID NO: 634; WAN024DCA_at; Start 134; Stop 158
cggccttggcaaatattatcggtat

SEQ ID NO: 152107 - DNA, 25 bp, Artificial
  probe
  misc_feature (1)..(25): SEQ ID NO: 634; WAN024DCA_at; Start 129; Stop 153
tgctacggccttggcaaatattatc

SEQ ID NO: 152108 - DNA, 25 bp, Artificial
  probe
  misc_feature (1)..(25): SEQ ID NO: 634; WAN024DCA_at; Start 212; Stop 236
atagacttatccgtttagtgaaatt

SEQ ID NO: 152109 - DNA, 25 bp, Artificial
  probe
  misc_feature (1)..(25): SEQ ID NO: 634; WAN024DCA_at; Start 351; Stop 375
tgctattgaaacaataattgcacaa

SEQ ID NO: 152110 - DNA, 25 bp, Artificial
  probe
  misc_feature (1)..(25): SEQ ID NO: 634; WAN024DCA_at; Start 284; Stop 308
ttctctttgtaacccaatttcctca

SEQ ID NO: 152111 - DNA, 25 bp, Artificial
  probe
  misc_feature (1)..(25): SEQ ID NO: 634; WAN024DCA_at; Start 322; Stop 346
ttcgtaactgaaaacattgataaga

SEQ ID NO: 152112 - DNA, 25 bp, Artificial
  probe
  misc_feature (1)..(25): SEQ ID NO: 634; WAN024DCA_at; Start 384; Stop 408
tattatcatcaattatatcttgagc

SEQ ID NO: 152113 - DNA, 25 bp, Artificial
  probe
  misc_feature (1)..(25): SEQ ID NO: 634; WAN024DCA_at; Start 27; Stop 51
taacaatgaaatcttagcctatctc

SEQ ID NO: 152114 - DNA, 25 bp, Artificial
  probe
  misc_feature (1)..(25): SEQ ID NO: 634; WAN024DCA_at; Start 35; Stop 59
aaatcttagcctatctcttttttgg

SEQ ID NO: 152115 - DNA, 25 bp, Artificial
  probe
  misc_feature (1)..(25): SEQ ID NO: 634; WAN024DCA_at; Start 166; Stop 190
gcctttatcacaaatgatacgattg

SEQ ID NO: 152116 - DNA, 25 bp, Artificial
  probe
  misc_feature (1)..(25): SEQ ID NO: 634; WAN024DCA_at; Start 163; Stop 187
tttgcctttatcacaaatgatacga

SEQ ID NO: 152117 - DNA, 25 bp, Artificial
  probe
  misc_feature (1)..(25): SEQ ID NO: 634; WAN024DCA_at; Start 122; Stop 146
aactccttgctacggccttggcaaa

SEQ ID NO: 152118 - DNA, 25 bp, Artificial
  probe
  misc_feature (1)..(25): SEQ ID NO: 634; WAN024DCA_at; Start 297; Stop 321
ccaatttcctcacatcatagggcaa

SEQ ID NO: 152119 - DNA, 25 bp, Artificial
  probe
  misc_feature (1)..(25): SEQ ID NO: 634; WAN024DCA_at; Start 119; Stop 143
aggaactccttgctacggccttggc

SEQ ID NO: 152120 - DNA, 25 bp, Artificial
  probe
  misc_feature (1)..(25): SEQ ID NO: 634; WAN024DCA_at; Start 132; Stop 156
tacggccttggcaaatattatcggt

SEQ ID NO: 152121 - DNA, 25 bp, Artificial
  probe
  misc_feature (1)..(25): SEQ ID NO: 634; WAN024DCA_at; Start 181; Stop 205
gatacgattgtatttaagcaaaaaa

SEQ ID NO: 152122 - DNA, 25 bp, Artificial
  probe
  misc_feature (1)..(25): SEQ ID NO: 634; WAN024DCA_at; Start 324; Stop 348
cgtaactgaaaacattgataagata

SEQ ID NO: 152123 - DNA, 25 bp, Artificial
  probe
  misc_feature (1)..(25): SEQ ID NO: 634; WAN024DCA_at; Start 317; Stop 341
ggcaattcgtaactgaaaacattga

SEQ ID NO: 152124 - DNA, 25 bp, Artificial
  probe
  misc_feature (1)..(25): SEQ ID NO: 634; WAN024DCA_at; Start 358; Stop 382
gaaacaataattgcacaaatattca

SEQ ID NO: 152125 - DNA, 25 bp, Artificial
  probe
  misc_feature (1)..(25): SEQ ID NO: 634; WAN024DCA_at; Start 312; Stop 336
catagggcaattcgtaactgaaaac

SEQ ID NO: 152126 - DNA, 25 bp, Artificial
  probe
  misc_feature (1)..(25): SEQ ID NO: 634; WAN024DCA_at; Start 176; Stop 200
caaatgatacgattgtatttaagca

SEQ ID NO: 152127 - DNA, 25 bp, Artificial
  probe
  misc_feature (1)..(25): SEQ ID NO: 634; WAN024DCA_at; Start 221; Stop 245
tccgtttagtgaaattttctcttgc

SEQ ID NO: 152128 - DNA, 25 bp, Artificial
  probe
  misc_feature (1)..(25): SEQ ID NO: 634; WAN024DCA_at; Start 247; Stop 271
cgcctttctacttttctgttagact

SEQ ID NO: 152129 - DNA, 25 bp, Artificial
  probe
  misc_feature (1)..(25): SEQ ID NO: 634; WAN024DCA_at; Start 314; Stop 338
tagggcaattcgtaactgaaaacat

SEQ ID NO: 152130 - DNA, 25 bp, Artificial
  probe
  misc_feature (1)..(25): SEQ ID NO: 634; WAN024DCA_at; Start 304; Stop 328
cctcacatcatagggcaattcgtaa

SEQ ID NO: 152131 - DNA, 25 bp, Artificial
  probe
  misc_feature (1)..(25): SEQ ID NO: 634; WAN024DCA_at; Start 292; Stop 316
gtaacccaatttcctcacatcatag

SEQ ID NO: 152132 - DNA, 25 bp, Artificial
  probe
  misc_feature (1)..(25): SEQ ID NO: 634; WAN024DCA_at; Start 126; Stop 150
ccttgctacggccttggcaaatatt

SEQ ID NO: 152133 - DNA, 25 bp, Artificial
  probe
  misc_feature (1)..(25): SEQ ID NO: 634; WAN024DCA_at; Start 23; Stop 47
tttttaacaatgaaatcttagccta

SEQ ID NO: 152134 - DNA, 25 bp, Artificial
  probe
  misc_feature (1)..(25): SEQ ID NO: 634; WAN024DCA_at; Start 121; Stop 145
gaactccttgctacggccttggcaa

SEQ ID NO: 152135 - DNA, 25 bp, Artificial
  probe
  misc_feature (1)..(25): SEQ ID NO: 634; WAN024DCA_at; Start 340; Stop 364
gataagataaatgctattgaaacaa

SEQ ID NO: 152136 - DNA, 25 bp, Artificial
  probe
  misc_feature (1)..(25): SEQ ID NO: 634; WAN024DCA_at; Start 309; Stop 333
catcatagggcaattcgtaactgaa

SEQ ID NO: 152137 - DNA, 25 bp, Artificial
  probe
  misc_feature (1)..(25): SEQ ID NO: 634; WAN024DCA_at; Start 135; Stop 159
ggccttggcaaatattatcggtatc

SEQ ID NO: 152138 - DNA, 25 bp, Artificial
  probe
  misc_feature (1)..(25): SEQ ID NO: 634; WAN024DCA_at; Start 301; Stop 325
tttcctcacatcatagggcaattcg

SEQ ID NO: 152139 - DNA, 25 bp, Artificial
  probe
  misc_feature (1)..(25): SEQ ID NO: 2976; WAN024DCB_at; Start 82; Stop 106
ggtgctatcgttacttcacttgtaa

SEQ ID NO: 152140 - DNA, 25 bp, Artificial
  probe
  misc_feature (1)..(25): SEQ ID NO: 2976; WAN024DCB_at; Start 325; Stop 349
ccaaccgaattggaagtccttcaag

SEQ ID NO: 152141 - DNA, 25 bp, Artificial
  probe
  misc_feature (1)..(25): SEQ ID NO: 2976; WAN024DCB_at; Start 172; Stop 196
caactttcttggcatggagtcggct

SEQ ID NO: 152142 - DNA, 25 bp, Artificial
  probe
  misc_feature (1)..(25): SEQ ID NO: 2976; WAN024DCB_at; Start 67; Stop 91
attgcctctgcttttggtgctatcg

SEQ ID NO: 152143 - DNA, 25 bp, Artificial
  probe
  misc_feature (1)..(25): SEQ ID NO: 2976; WAN024DCB_at; Start 248; Stop 272
tcttctttattatcaagggcattga

SEQ ID NO: 152144 - DNA, 25 bp, Artificial
  probe
  misc_feature (1)..(25): SEQ ID NO: 2976; WAN024DCB_at; Start 90; Stop 114
cgttacttcacttgtaaacgacatt

SEQ ID NO: 152145 - DNA, 25 bp, Artificial
  probe
  misc_feature (1)..(25): SEQ ID NO: 2976; WAN024DCB_at; Start 41; Stop 65
ttattgaccttgctgtcggtgttgt

SEQ ID NO: 152146 - DNA, 25 bp, Artificial
  probe
  misc_feature (1)..(25): SEQ ID NO: 2976; WAN024DCB_at; Start 175; Stop 199
ctttcttggcatggagtcggctatg

SEQ ID NO: 152147 - DNA, 25 bp, Artificial
  probe
  misc_feature (1)..(25): SEQ ID NO: 2976; WAN024DCB_at; Start 30; Stop 54
tcgaggaaatgttattgaccttgct

SEQ ID NO: 152148 - DNA, 25 bp, Artificial
  probe
  misc_feature (1)..(25): SEQ ID NO: 2976; WAN024DCB_at; Start 221; Stop 245
tcaattttatctttgtgggtaccgc

SEQ ID NO: 152149 - DNA, 25 bp, Artificial
  probe
  misc_feature (1)..(25): SEQ ID NO: 2976; WAN024DCB_at; Start 349; Stop 373
gaaataaaagctctccttgagaaaa

SEQ ID NO: 152150 - DNA, 25 bp, Artificial
  probe
  misc_feature (1)..(25): SEQ ID NO: 2976; WAN024DCB_at; Start 20; Stop 44
cgttcttgcttcgaggaaatgttat

SEQ ID NO: 152151 - DNA, 25 bp, Artificial
  probe
  misc_feature (1)..(25): SEQ ID NO: 2976; WAN024DCB_at; Start 340; Stop 364
gtccttcaagaaataaaagctctcc

SEQ ID NO: 152152 - DNA, 25 bp, Artificial
  probe
  misc_feature (1)..(25): SEQ ID NO: 2976; WAN024DCB_at; Start 75; Stop 99
tgcttttggtgctatcgttacttca

SEQ ID NO: 152153 - DNA, 25 bp, Artificial
  probe
  misc_feature (1)..(25): SEQ ID NO: 2976; WAN024DCB_at; Start 228; Stop 252
tatctttgtgggtaccgccctcttc

SEQ ID NO: 152154 - DNA, 25 bp, Artificial
  probe
  misc_feature (1)..(25): SEQ ID NO: 2976; WAN024DCB_at; Start 179; Stop 203
cttggcatggagtcggctatggtaa

SEQ ID NO: 152155 - DNA, 25 bp, Artificial
  probe
  misc_feature (1)..(25): SEQ ID NO: 2976; WAN024DCB_at; Start 128; Stop 152
ttttaaatcccgctttgaaagctgc

SEQ ID NO: 152156 - DNA, 25 bp, Artificial
  probe
  misc_feature (1)..(25): SEQ ID NO: 2976; WAN024DCB_at; Start 169; Stop 193
gctcaactttcttggcatggagtcg

SEQ ID NO: 152157 - DNA, 25 bp, Artificial
  probe
  misc_feature (1)..(25): SEQ ID NO: 2976; WAN024DCB_at; Start 98; Stop 122
cacttgtaaacgacattatcactcc

SEQ ID NO: 152158 - DNA, 25 bp, Artificial
  probe
  misc_feature (1)..(25): SEQ ID NO: 2976; WAN024DCB_at; Start 14; Stop 38
taaaatcgttcttgcttcgaggaaa

SEQ ID NO: 152159 - DNA, 25 bp, Artificial
  probe
  misc_feature (1)..(25): SEQ ID NO: 2976; WAN024DCB_at; Start 116; Stop 140
tcactcctcttattttaaatcccgc

SEQ ID NO: 152160 - DNA, 25 bp, Artificial
  probe
  misc_feature (1)..(25): SEQ ID NO: 2976; WAN024DCB_at; Start 238; Stop 262
ggtaccgccctcttctttattatca

SEQ ID NO: 152161 - DNA, 25 bp, Artificial
  probe
  misc_feature (1)..(25): SEQ ID NO: 2976; WAN024DCB_at; Start 258; Stop 282
tatcaagggcattgaaaaagcacag

SEQ ID NO: 152162 - DNA, 25 bp, Artificial
  probe
  misc_feature (1)..(25): SEQ ID NO: 2976; WAN024DCB_at; Start 25; Stop 49
ttgcttcgaggaaatgttattgacc

SEQ ID NO: 152163 - DNA, 25 bp, Artificial
  probe
  misc_feature (1)..(25): SEQ ID NO: 2976; WAN024DCB_at; Start 260; Stop 284
tcaagggcattgaaaaagcacagaa

SEQ ID NO: 152164 - DNA, 25 bp, Artificial
  probe
  misc_feature (1)..(25): SEQ ID NO: 2976; WAN024DCB_at; Start 102; Stop 126
tgtaaacgacattatcactcctctt

SEQ ID NO: 152165 - DNA, 25 bp, Artificial
  probe
  misc_feature (1)..(25): SEQ ID NO: 2976; WAN024DCB_at; Start 335; Stop 359
tggaagtccttcaagaaataaaagc

SEQ ID NO: 152166 - DNA, 25 bp, Artificial
  probe
  misc_feature (1)..(25): SEQ ID NO: 2976; WAN024DCB_at; Start 358; Stop 382
gctctccttgagaaaaaataactaa

SEQ ID NO: 152167 - DNA, 25 bp, Artificial
  probe
  misc_feature (1)..(25): SEQ ID NO: 2976; WAN024DCB_at; Start 165; Stop 189
tatcgctcaactttcttggcatgga

SEQ ID NO: 152168 - DNA, 25 bp, Artificial
  probe
  misc_feature (1)..(25): SEQ ID NO: 2976; WAN024DCB_at; Start 160; Stop 184
gaacgtatcgctcaactttcttggc

SEQ ID NO: 152169 - DNA, 25 bp, Artificial
  probe
  misc_feature (1)..(25): SEQ ID NO: 2976; WAN024DCB_at; Start 133; Stop 157
aatcccgctttgaaagctgctaaag

SEQ ID NO: 152170 - DNA, 25 bp, Artificial
  probe
  misc_feature (1)..(25): SEQ ID NO: 2976; WAN024DCB_at; Start 70; Stop 94
gcctctgcttttggtgctatcgtta

SEQ ID NO: 152171 - DNA, 25 bp, Artificial
  probe
  misc_feature (1)..(25): SEQ ID NO: 2976; WAN024DCB_at; Start 37; Stop 61
aatgttattgaccttgctgtcggtg

SEQ ID NO: 152172 - DNA, 25 bp, Artificial
  probe
  misc_feature (1)..(25): SEQ ID NO: 2976; WAN024DCB_at; Start 8; Stop 32
aaaatctaaaatcgttcttgcttcg

SEQ ID NO: 152173 - DNA, 25 bp, Artificial
  probe
  misc_feature (1)..(25): SEQ ID NO: 1476; WAN024DCC_at; Start 526; Stop 550
gaagaaatcggtgttggtgccaata

SEQ ID NO: 152174 - DNA, 25 bp, Artificial
  probe
  misc_feature (1)..(25): SEQ ID NO: 1476; WAN024DCC_at; Start 1022; Stop 1046
ttatggaagatctaggtatcacgcc

SEQ ID NO: 152175 - DNA, 25 bp, Artificial
  probe
  misc_feature (1)..(25): SEQ ID NO: 1476; WAN024DCC_at; Start 420; Stop 444
tgctgatgacaagtcaggaattgct

SEQ ID NO: 152176 - DNA, 25 bp, Artificial
  probe
  misc_feature (1)..(25): SEQ ID NO: 1476; WAN024DCC_at; Start 1161; Stop 1185
tagccttcagactatggaacgtgca

SEQ ID NO: 152177 - DNA, 25 bp, Artificial
  probe
  misc_feature (1)..(25): SEQ ID NO: 1476; WAN024DCC_at; Start 478; Stop 502
catcctgaaattaagcactgtgaga

SEQ ID NO: 152178 - DNA, 25 bp, Artificial
  probe
  misc_feature (1)..(25): SEQ ID NO: 1476; WAN024DCC_at; Start 96; Stop 120
tcaggttgacttcgcaacaaatgtc

SEQ ID NO: 152179 - DNA, 25 bp, Artificial
  probe
  misc_feature (1)..(25): SEQ ID NO: 1476; WAN024DCC_at; Start 697; Stop 721
cagatggtcaatgcccttcagctag

SEQ ID NO: 152180 - DNA, 25 bp, Artificial
  probe
  misc_feature (1)..(25): SEQ ID NO: 1476; WAN024DCC_at; Start 1111; Stop 1135
ccgaatatctttgcaggtggcgaaa

SEQ ID NO: 152181 - DNA, 25 bp, Artificial
  probe
  misc_feature (1)..(25): SEQ ID NO: 1476; WAN024DCC_at; Start 871; Stop 895
gaagcgcgtaaagcatccatgcaat

SEQ ID NO: 152182 - DNA, 25 bp, Artificial
  probe
  misc_feature (1)..(25): SEQ ID NO: 1476; WAN024DCC_at; Start 751; Stop 775
aatgaccgacctgagttaactgaag

SEQ ID NO: 152183 - DNA, 25 bp, Artificial
  probe
  misc_feature (1)..(25): SEQ ID NO: 1476; WAN024DCC_at; Start 584; Stop 608
cctacactgttgatggtggtccact

SEQ ID NO: 152184 - DNA, 25 bp, Artificial
  probe
  misc_feature (1)..(25): SEQ ID NO: 1476; WAN024DCC_at; Start 357; Stop 381
caagagtcttgaaaaatatccagga

SEQ ID NO: 152185 - DNA, 25 bp, Artificial
  probe
  misc_feature (1)..(25): SEQ ID NO: 1476; WAN024DCC_at; Start 11; Stop 35
caaatctcttggaccgcttcttaac

SEQ ID NO: 152186 - DNA, 25 bp, Artificial
  probe
  misc_feature (1)..(25): SEQ ID NO: 1476; WAN024DCC_at; Start 622; Stop 646
tacgagactttctcagccgctggtg

SEQ ID NO: 152187 - DNA, 25 bp, Artificial
  probe
  misc_feature (1)..(25): SEQ ID NO: 1476; WAN024DCC_at; Start 637; Stop 661
gccgctggtgctgaattgcatttcc

SEQ ID NO: 152188 - DNA, 25 bp, Artificial
  probe
  misc_feature (1)..(25): SEQ ID NO: 1476; WAN024DCC_at; Start 856; Stop 880
gaaaaagatgcctttgaagcgcgta

SEQ ID NO: 152189 - DNA, 25 bp, Artificial
  probe
  misc_feature (1)..(25): SEQ ID NO: 1476; WAN024DCC_at; Start 40; Stop 64
gttaaggtcaacacgcgctctgatg

SEQ ID NO: 152190 - DNA, 25 bp, Artificial
  probe
  misc_feature (1)..(25): SEQ ID NO: 1476; WAN024DCC_at; Start 1040; Stop 1064
tcacgcctattatcgaaccaatccg

SEQ ID NO: 152191 - DNA, 25 bp, Artificial
  probe
  misc_feature (1)..(25): SEQ ID NO: 1476; WAN024DCC_at; Start 670; Stop 694
aatgtccaccctggtactgccaaag

SEQ ID NO: 152192 - DNA, 25 bp, Artificial
  probe
  misc_feature (1)..(25): SEQ ID NO: 1476; WAN024DCC_at; Start 1180; Stop 1204
cgtgcagttgataccatcattggca

SEQ ID NO: 152193 - DNA, 25 bp, Artificial
  probe
  misc_feature (1)..(25): SEQ ID NO: 1476; WAN024DCC_at; Start 828; Stop 852
gcgtgcaagctacatcattcgtgat

SEQ ID NO: 152194 - DNA, 25 bp, Artificial
  probe
  misc_feature (1)..(25): SEQ ID NO: 1476; WAN024DCC_at; Start 261; Stop 285
taatgctgaaggagtcaatccacag

SEQ ID NO: 152195 - DNA, 25 bp, Artificial
  probe
  misc_feature (1)..(25): SEQ ID NO: 1476; WAN024DCC_at; Start 234; Stop 258
tatatcgcacatggatactgctgat

SEQ ID NO: 152196 - DNA, 25 bp, Artificial
  probe
  misc_feature (1)..(25): SEQ ID NO: 1476; WAN024DCC_at; Start 127; Stop 151
cctgaaatgaaacgtgttggactgc

SEQ ID NO: 152197 - DNA, 25 bp, Artificial
  probe
  misc_feature (1)..(25): SEQ ID NO: 1476; WAN024DCC_at; Start 320; Stop 344
tagggaattctggtttcaaactcga

SEQ ID NO: 152198 - DNA, 25 bp, Artificial
  probe
  misc_feature (1)..(25): SEQ ID NO: 1476; WAN024DCC_at; Start 1070; Stop 1094
gaacagacggctctaagatttcctt

SEQ ID NO: 152199 - DNA, 25 bp, Artificial
  probe
  misc_feature (1)..(25): SEQ ID NO: 1476; WAN024DCC_at; Start 1145; Stop 1169
gacgttttgaatacgttagccttca

SEQ ID NO: 152200 - DNA, 25 bp, Artificial
  probe
  misc_feature (1)..(25): SEQ ID NO: 1476; WAN024DCC_at; Start 81; Stop 105
tccaagtacacagagtcaggttgac

SEQ ID NO: 152201 - DNA, 25 bp, Artificial
  probe
  misc_feature (1)..(25): SEQ ID NO: 1476; WAN024DCC_at; Start 463; Stop 487
gaatatctaactgctcatcctgaaa

SEQ ID NO: 152202 - DNA, 25 bp, Artificial
  probe
  misc_feature (1)..(25): SEQ ID NO: 1476; WAN024DCC_at; Start 1197; Stop 1221
cattggcatcgtagcttataaaggc

SEQ ID NO: 152203 - DNA, 25 bp, Artificial
  probe
  misc_feature (1)..(25): SEQ ID NO: 1476; WAN024DCC_at; Start 183; Stop 207
tattggaaccttgccagccaacgat

SEQ ID NO: 152204 - DNA, 25 bp, Artificial
  probe
  misc_feature (1)..(25): SEQ ID NO: 1476; WAN024DCC_at; Start 373; Stop 397
tatccaggacaaacgctcatcacaa

SEQ ID NO: 152205 - DNA, 25 bp, Artificial
  probe
  misc_feature (1)..(25): SEQ ID NO: 1476; WAN024DCC_at; Start 1128; Stop 1152
tggcgaaaatatgcacggacgtttt

SEQ ID NO: 152206 - DNA, 25 bp, Artificial
  probe
  misc_feature (1)..(25): SEQ ID NO: 1476; WAN024DCC_at; Start 1095; Stop 1119
tatgggaatcccaactccgaatatc

SEQ ID NO: 152207 - DNA, 25 bp, Artificial
  probe
  misc_feature (1)..(25): SEQ ID NO: 2230; WAN024DCD_at; Start 695; Stop 719
tagttcctgccaacaatgaaagtgc

SEQ ID NO: 152208 - DNA, 25 bp, Artificial
  probe
  misc_feature (1)..(25): SEQ ID NO: 2230; WAN024DCD_at; Start 869; Stop 893
aagctatcatcgctatctgtcgcag

SEQ ID NO: 152209 - DNA, 25 bp, Artificial
  probe
  misc_feature (1)..(25): SEQ ID NO: 2230; WAN024DCD_at; Start 346; Stop 370
cagagcatccttgacaatccagagg

SEQ ID NO: 152210 - DNA, 25 bp, Artificial
  probe
  misc_feature (1)..(25): SEQ ID NO: 2230; WAN024DCD_at; Start 793; Stop 817
gccgtggttaaatcagagaagcatc

SEQ ID NO: 152211 - DNA, 25 bp, Artificial
  probe
  misc_feature (1)..(25): SEQ ID NO: 2230; WAN024DCD_at; Start 276; Stop 300
gacttggtctaaccttcagattgca

SEQ ID NO: 152212 - DNA, 25 bp, Artificial
  probe
  misc_feature (1)..(25): SEQ ID NO: 2230; WAN024DCD_at; Start 839; Stop 863
tcaaactcaagaaacgacgtggtca

SEQ ID NO: 152213 - DNA, 25 bp, Artificial
  probe
  misc_feature (1)..(25): SEQ ID NO: 2230; WAN024DCD_at; Start 543; Stop 567
gaagctcggtcacgaataccaagaa

SEQ ID NO: 152214 - DNA, 25 bp, Artificial
  probe
  misc_feature (1)..(25): SEQ ID NO: 2230; WAN024DCD_at; Start 573; Stop 597
caaactgatccaaactgtgcctggt

SEQ ID NO: 152215 - DNA, 25 bp, Artificial
  probe
  misc_feature (1)..(25): SEQ ID NO: 2230; WAN024DCD_at; Start 448; Stop 472
gaggtgacacctgaacaagctgaga

SEQ ID NO: 152216 - DNA, 25 bp, Artificial
  probe
  misc_feature (1)..(25): SEQ ID NO: 2230; WAN024DCD_at; Start 117; Stop 141
gaaagatgcgcaatggatagccgac

SEQ ID NO: 152217 - DNA, 25 bp, Artificial
  probe
  misc_feature (1)..(25): SEQ ID NO: 2230; WAN024DCD_at; Start 559; Stop 583
taccaagaacaggtcaaactgatcc

SEQ ID NO: 152218 - DNA, 25 bp, Artificial
  probe
  misc_feature (1)..(25): SEQ ID NO: 2230; WAN024DCD_at; Start 638; Stop 662
tcggagctgatatgactgtctttgg

SEQ ID NO: 152219 - DNA, 25 bp, Artificial
  probe
  misc_feature (1)..(25): SEQ ID NO: 2230; WAN024DCD_at; Start 131; Stop 155
ggatagccgacctcttcaagcatga

SEQ ID NO: 152220 - DNA, 25 bp, Artificial
  probe
  misc_feature (1)..(25): SEQ ID NO: 2230; WAN024DCD_at; Start 186; Stop 210
taaaatcagacaactccgagacctt

SEQ ID NO: 152221 - DNA, 25 bp, Artificial
  probe
  misc_feature (1)..(25): SEQ ID NO: 2230; WAN024DCD_at; Start 291; Stop 315
tcagattgcaagtgtcgtttccgac

SEQ ID NO: 152222 - DNA, 25 bp, Artificial
  probe
  misc_feature (1)..(25): SEQ ID NO: 2230; WAN024DCD_at; Start 252; Stop 276
gaaaaatcgttaccagaactgtctg

SEQ ID NO: 152223 - DNA, 25 bp, Artificial
  probe
  misc_feature (1)..(25): SEQ ID NO: 2230; WAN024DCD_at; Start 56; Stop 80
gcaagatttgcttagctcaccctaa

SEQ ID NO: 152224 - DNA, 25 bp, Artificial
  probe
  misc_feature (1)..(25): SEQ ID NO: 2230; WAN024DCD_at; Start 854; Stop 878
gacgtggtcatcgaaaagctatcat

SEQ ID NO: 152225 - DNA, 25 bp, Artificial
  probe
  misc_feature (1)..(25): SEQ ID NO: 2230; WAN024DCD_at; Start 747; Stop 771
gaaaggcggtcactatctcaaacct

SEQ ID NO: 152226 - DNA, 25 bp, Artificial
  probe
  misc_feature (1)..(25): SEQ ID NO: 2230; WAN024DCD_at; Start 623; Stop 647
gaatactctctgaaatcggagctga

SEQ ID NO: 152227 - DNA, 25 bp, Artificial
  probe
  misc_feature (1)..(25): SEQ ID NO: 2230; WAN024DCD_at; Start 202; Stop 226
cgagacctttttcgctatcgcatga

SEQ ID NO: 152228 - DNA, 25 bp, Artificial
  probe
  misc_feature (1)..(25): SEQ ID NO: 2230; WAN024DCD_at; Start 399; Stop 423
caagagaatgaaggataaggtgcaa

SEQ ID NO: 152229 - DNA, 25 bp, Artificial
  probe
  misc_feature (1)..(25): SEQ ID NO: 2230; WAN024DCD_at; Start 711; Stop 735
tgaaagtgcaggaaagaaattctct

SEQ ID NO: 152230 - DNA, 25 bp, Artificial
  probe
  misc_feature (1)..(25): SEQ ID NO: 2230; WAN024DCD_at; Start 731; Stop 755
tctctactcgtatttcgaaaggcgg

SEQ ID NO: 152231 - DNA, 25 bp, Artificial
  probe
  misc_feature (1)..(25): SEQ ID NO: 2230; WAN024DCD_at; Start 808; Stop 832
gagaagcatcctgaactacgaaata

SEQ ID NO: 152232 - DNA, 25 bp, Artificial
  probe
  misc_feature (1)..(25): SEQ ID NO: 2230; WAN024DCD_at; Start 367; Stop 391
gaggacaaaccaaacattgaacagt

SEQ ID NO: 152233 - DNA, 25 bp, Artificial
  probe
  misc_feature (1)..(25): SEQ ID NO: 2230; WAN024DCD_at; Start 233; Stop 257
cacaacttcaagtcagcgagaaaaa

SEQ ID NO: 152234 - DNA, 25 bp, Artificial
  probe
  misc_feature (1)..(25): SEQ ID NO: 2230; WAN024DCD_at; Start 496; Stop 520
tatgatgctcttgccgtctgtaaag

SEQ ID NO: 152235 - DNA, 25 bp, Artificial
  probe
  misc_feature (1)..(25): SEQ ID NO: 2230; WAN024DCD_at; Start 421; Stop 445
caagacttgaaaatcgctattgagg

SEQ ID NO: 152236 - DNA, 25 bp, Artificial
  probe
  misc_feature (1)..(25): SEQ ID NO: 2230; WAN024DCD_at; Start 595; Stop 619
ggtttcaaagaggaactatctgccc

SEQ ID NO: 152237 - DNA, 25 bp, Artificial
  probe
  misc_feature (1)..(25): SEQ ID NO: 2230; WAN024DCD_at; Start 78; Stop 102
taagtatgtcaaggctatcagagga

SEQ ID NO: 152238 - DNA, 25 bp, Artificial
  probe
  misc_feature (1)..(25): SEQ ID NO: 2230; WAN024DCD_at; Start 775; Stop 799
cttgttcaaatagctaatgccgtgg

SEQ ID NO: 152239 - DNA, 25 bp, Artificial
  probe
  misc_feature (1)..(25): SEQ ID NO: 2230; WAN024DCD_at; Start 315; Stop 339
cgtgttcggaaaaagtgctcaggct

SEQ ID NO: 152240 - DNA, 25 bp, Artificial
  probe
  misc_feature (1)..(25): SEQ ID NO: 2230; WAN024DCD_at; Start 527; Stop 551
tagaaaccatgattcggaagctcgg

SEQ ID NO: 152241 - DNA, 25 bp, Artificial
  probe
  misc_feature (1)..(25): SEQ ID NO: 5743; WAN024DCE_at; Start 59; Stop 83
ctttctacttcttccttgctatctg

SEQ ID NO: 152242 - DNA, 25 bp, Artificial
  probe
  misc_feature (1)..(25): SEQ ID NO: 5743; WAN024DCE_at; Start 4; Stop 28
tctgattccttcttcatggatttgt

SEQ ID NO: 152243 - DNA, 25 bp, Artificial
  probe
  misc_feature (1)..(25): SEQ ID NO: 5743; WAN024DCE_at; Start 19; Stop 43
atggatttgttccaagagttgattt

SEQ ID NO: 152244 - DNA, 25 bp, Artificial
  probe
  misc_feature (1)..(25): SEQ ID NO: 5743; WAN024DCE_at; Start 9; Stop 33
ttccttcttcatggatttgttccaa

SEQ ID NO: 152245 - DNA, 25 bp, Artificial
  probe
  misc_feature (1)..(25): SEQ ID NO: 5743; WAN024DCE_at; Start 12; Stop 36
cttcttcatggatttgttccaagag

SEQ ID NO: 152246 - DNA, 25 bp, Artificial
  probe
  misc_feature (1)..(25): SEQ ID NO: 5743; WAN024DCE_at; Start 5; Stop 29
ctgattccttcttcatggatttgtt

SEQ ID NO: 152247 - DNA, 25 bp, Artificial
  probe
  misc_feature (1)..(25): SEQ ID NO: 5743; WAN024DCE_at; Start 65; Stop 89
acttcttccttgctatctgtcgcag

SEQ ID NO: 152248 - DNA, 25 bp, Artificial
  probe
  misc_feature (1)..(25): SEQ ID NO: 5743; WAN024DCE_at; Start 13; Stop 37
ttcttcatggatttgttccaagagt

SEQ ID NO: 152249 - DNA, 25 bp, Artificial
  probe
  misc_feature (1)..(25): SEQ ID NO: 5743; WAN024DCE_at; Start 58; Stop 82
actttctacttcttccttgctatct

SEQ ID NO: 152250 - DNA, 25 bp, Artificial
  probe
  misc_feature (1)..(25): SEQ ID NO: 5743; WAN024DCE_at; Start 60; Stop 84
tttctacttcttccttgctatctgt

SEQ ID NO: 152251 - DNA, 25 bp, Artificial
  probe
  misc_feature (1)..(25): SEQ ID NO: 5743; WAN024DCE_at; Start 7; Stop 31
gattccttcttcatggatttgttcc

SEQ ID NO: 152252 - DNA, 25 bp, Artificial
  probe
  misc_feature (1)..(25): SEQ ID NO: 5743; WAN024DCE_at; Start 10; Stop 34
tccttcttcatggatttgttccaag

SEQ ID NO: 152253 - DNA, 25 bp, Artificial
  probe
  misc_feature (1)..(25): SEQ ID NO: 5743; WAN024DCE_at; Start 64; Stop 88
tacttcttccttgctatctgtcgca

SEQ ID NO: 152254 - DNA, 25 bp, Artificial
  probe
  misc_feature (1)..(25): SEQ ID NO: 5743; WAN024DCE_at; Start 54; Stop 78
aaagactttctacttcttccttgct

SEQ ID NO: 152255 - DNA, 25 bp, Artificial
  probe
  misc_feature (1)..(25): SEQ ID NO: 5743; WAN024DCE_at; Start 18; Stop 42
catggatttgttccaagagttgatt

SEQ ID NO: 152256 - DNA, 25 bp, Artificial
  probe
  misc_feature (1)..(25): SEQ ID NO: 5743; WAN024DCE_at; Start 1; Stop 25
ttgtctgattccttcttcatggatt

SEQ ID NO: 152257 - DNA, 25 bp, Artificial
  probe
  misc_feature (1)..(25): SEQ ID NO: 5743; WAN024DCE_at; Start 57; Stop 81
gactttctacttcttccttgctatc

SEQ ID NO: 152258 - DNA, 25 bp, Artificial
  probe
  misc_feature (1)..(25): SEQ ID NO: 5743; WAN024DCE_at; Start 66; Stop 90
cttcttccttgctatctgtcgcaga

SEQ ID NO: 152259 - DNA, 25 bp, Artificial
  probe
  misc_feature (1)..(25): SEQ ID NO: 5743; WAN024DCE_at; Start 14; Stop 38
tcttcatggatttgttccaagagtt

SEQ ID NO: 152260 - DNA, 25 bp, Artificial
  probe
  misc_feature (1)..(25): SEQ ID NO: 5743; WAN024DCE_at; Start 15; Stop 39
cttcatggatttgttccaagagttg

SEQ ID NO: 152261 - DNA, 25 bp, Artificial
  probe
  misc_feature (1)..(25): SEQ ID NO: 5743; WAN024DCE_at; Start 56; Stop 80
agactttctacttcttccttgctat

SEQ ID NO: 152262 - DNA, 25 bp, Artificial
  probe
  misc_feature (1)..(25): SEQ ID NO: 5743; WAN024DCE_at; Start 11; Stop 35
ccttcttcatggatttgttccaaga

SEQ ID NO: 152263 - DNA, 25 bp, Artificial
  probe
  misc_feature (1)..(25): SEQ ID NO: 5743; WAN024DCE_at; Start 63; Stop 87
ctacttcttccttgctatctgtcgc

SEQ ID NO: 152264 - DNA, 25 bp, Artificial
  probe
  misc_feature (1)..(25): SEQ ID NO: 5743; WAN024DCE_at; Start 8; Stop 32
attccttcttcatggatttgttcca

SEQ ID NO: 152265 - DNA, 25 bp, Artificial
  probe
  misc_feature (1)..(25): SEQ ID NO: 5743; WAN024DCE_at; Start 3; Stop 27
gtctgattccttcttcatggatttg

SEQ ID NO: 152266 - DNA, 25 bp, Artificial
  probe
  misc_feature (1)..(25): SEQ ID NO: 5743; WAN024DCE_at; Start 52; Stop 76
caaaagactttctacttcttccttg

SEQ ID NO: 152267 - DNA, 25 bp, Artificial
  probe
  misc_feature (1)..(25): SEQ ID NO: 5743; WAN024DCE_at; Start 62; Stop 86
tctacttcttccttgctatctgtcg

SEQ ID NO: 152268 - DNA, 25 bp, Artificial
  probe
  misc_feature (1)..(25): SEQ ID NO: 5743; WAN024DCE_at; Start 2; Stop 26
tgtctgattccttcttcatggattt

SEQ ID NO: 152269 - DNA, 25 bp, Artificial
  probe
  misc_feature (1)..(25): SEQ ID NO: 5743; WAN024DCE_at; Start 61; Stop 85
ttctacttcttccttgctatctgtc

SEQ ID NO: 152270 - DNA, 25 bp, Artificial
  probe
  misc_feature (1)..(25): SEQ ID NO: 5743; WAN024DCE_at; Start 6; Stop 30
tgattccttcttcatggatttgttc

SEQ ID NO: 152271 - DNA, 25 bp, Artificial
  probe
  misc_feature (1)..(25): SEQ ID NO: 5743; WAN024DCE_at; Start 55; Stop 79
aagactttctacttcttccttgcta

SEQ ID NO: 152272 - DNA, 25 bp, Artificial
  probe
  misc_feature (1)..(25): SEQ ID NO: 5743; WAN024DCE_at; Start 17; Stop 41
tcatggatttgttccaagagttgat

SEQ ID NO: 152273 - DNA, 25 bp, Artificial
  probe
  misc_feature (1)..(25): SEQ ID NO: 5743; WAN024DCE_at; Start 16; Stop 40
ttcatggatttgttccaagagttga

SEQ ID NO: 152274 - DNA, 25 bp, Artificial
  probe
  misc_feature (1)..(25): SEQ ID NO: 5167; WAN024DCF_at; Start 172; Stop 196
caagaaaaggaaaatgctgagcaag

SEQ ID NO: 152275 - DNA, 25 bp, Artificial
  probe
  misc_feature (1)..(25): SEQ ID NO: 5167; WAN024DCF_at; Start 602; Stop 626
ctggaaatcaagaaaaaccagtaga

SEQ ID NO: 152276 - DNA, 25 bp, Artificial
  probe
  misc_feature (1)..(25): SEQ ID NO: 5167; WAN024DCF_at; Start 452; Stop 476
gtgataacaccagtgctgagaacca

SEQ ID NO: 152277 - DNA, 25 bp, Artificial
  probe
  misc_feature (1)..(25): SEQ ID NO: 5167; WAN024DCF_at; Start 200; Stop 224
ctcagacacttgtactctatcaaaa

SEQ ID NO: 152278 - DNA, 25 bp, Artificial
  probe
  misc_feature (1)..(25): SEQ ID NO: 5167; WAN024DCF_at; Start 304; Stop 328
gcattattagatcaactttctgcta

SEQ ID NO: 152279 - DNA, 25 bp, Artificial
  probe
  misc_feature (1)..(25): SEQ ID NO: 5167; WAN024DCF_at; Start 549; Stop 573
taaacctgctgaatcaacttcagaa

SEQ ID NO: 152280 - DNA, 25 bp, Artificial
  probe
  misc_feature (1)..(25): SEQ ID NO: 5167; WAN024DCF_at; Start 466; Stop 490
gctgagaaccaaccaaacgcaactg

SEQ ID NO: 152281 - DNA, 25 bp, Artificial
  probe
  misc_feature (1)..(25): SEQ ID NO: 5167; WAN024DCF_at; Start 510; Stop 534
tgctagcgacgaaaacaaaccaagc

SEQ ID NO: 152282 - DNA, 25 bp, Artificial
  probe
  misc_feature (1)..(25): SEQ ID NO: 5167; WAN024DCF_at; Start 398; Stop 422
caaaagctagcgcaagtgaagaaac

SEQ ID NO: 152283 - DNA, 25 bp, Artificial
  probe
  misc_feature (1)..(25): SEQ ID NO: 5167; WAN024DCF_at; Start 44; Stop 68
gaatcagacaatccttggcagaaga

SEQ ID NO: 152284 - DNA, 25 bp, Artificial
  probe
  misc_feature (1)..(25): SEQ ID NO: 5167; WAN024DCF_at; Start 32; Stop 56
tccatgaagaaggaatcagacaatc

SEQ ID NO: 152285 - DNA, 25 bp, Artificial
  probe
  misc_feature (1)..(25): SEQ ID NO: 5167; WAN024DCF_at; Start 407; Stop 431
gcgcaagtgaagaaacaagtccagc

SEQ ID NO: 152286 - DNA, 25 bp, Artificial
  probe
  misc_feature (1)..(25): SEQ ID NO: 5167; WAN024DCF_at; Start 118; Stop 142
gaagtaaacagtcaggtaaaagatg

SEQ ID NO: 152287 - DNA, 25 bp, Artificial
  probe
  misc_feature (1)..(25): SEQ ID NO: 5167; WAN024DCF_at; Start 223; Stop 247
aaactctacgatattctcatgtcgc

SEQ ID NO: 152288 - DNA, 25 bp, Artificial
  probe
  misc_feature (1)..(25): SEQ ID NO: 5167; WAN024DCF_at; Start 52; Stop 76
caatccttggcagaagaagtagaaa

SEQ ID NO: 152289 - DNA, 25 bp, Artificial
  probe
  misc_feature (1)..(25): SEQ ID NO: 5167; WAN024DCF_at; Start 471; Stop 495
gaaccaaccaaacgcaactgcagaa

SEQ ID NO: 152290 - DNA, 25 bp, Artificial
  probe
  misc_feature (1)..(25): SEQ ID NO: 5167; WAN024DCF_at; Start 262; Stop 286
gaaagtaataatggatctgatgcgg

SEQ ID NO: 152291 - DNA, 25 bp, Artificial
  probe
  misc_feature (1)..(25): SEQ ID NO: 5167; WAN024DCF_at; Start 352; Stop 376
cttgaatcgacaaaagctattctag

SEQ ID NO: 152292 - DNA, 25 bp, Artificial
  probe
  misc_feature (1)..(25): SEQ ID NO: 5167; WAN024DCF_at; Start 146; Stop 170
tgactcgtatcgctagcgcccttca

SEQ ID NO: 152293 - DNA, 25 bp, Artificial
  probe
  misc_feature (1)..(25): SEQ ID NO: 5167; WAN024DCF_at; Start 520; Stop 544
gaaaacaaaccaagcaatacaagag

SEQ ID NO: 152294 - DNA, 25 bp, Artificial
  probe
  misc_feature (1)..(25): SEQ ID NO: 5167; WAN024DCF_at; Start 277; Stop 301
tctgatgcggactttgataaggtgg

SEQ ID NO: 152295 - DNA, 25 bp, Artificial
  probe
  misc_feature (1)..(25): SEQ ID NO: 5167; WAN024DCF_at; Start 483; Stop 507
cgcaactgcagaatctaacattgaa

SEQ ID NO: 152296 - DNA, 25 bp, Artificial
  probe
  misc_feature (1)..(25): SEQ ID NO: 5167; WAN024DCF_at; Start 387; Stop 411
tcaaatccagtcaaaagctagcgca

SEQ ID NO: 152297 - DNA, 25 bp, Artificial
  probe
  misc_feature (1)..(25): SEQ ID NO: 5167; WAN024DCF_at; Start 157; Stop 181
gctagcgcccttcaacaagaaaagg

SEQ ID NO: 152298 - DNA, 25 bp, Artificial
  probe
  misc_feature (1)..(25): SEQ ID NO: 5167; WAN024DCF_at; Start 535; Stop 559
aatacaagagattctaaacctgctg

SEQ ID NO: 152299 - DNA, 25 bp, Artificial
  probe
  misc_feature (1)..(25): SEQ ID NO: 5167; WAN024DCF_at; Start 422; Stop 446
caagtccagcaagaaatgctgaagc

SEQ ID NO: 152300 - DNA, 25 bp, Artificial
  probe
  misc_feature (1)..(25): SEQ ID NO: 5167; WAN024DCF_at; Start 339; Stop 363
caaaacagctttacttgaatcgaca

SEQ ID NO: 152301 - DNA, 25 bp, Artificial
  probe
  misc_feature (1)..(25): SEQ ID NO: 5167; WAN024DCF_at; Start 589; Stop 613
tcttctacaactactggaaatcaag

SEQ ID NO: 152302 - DNA, 25 bp, Artificial
  probe
  misc_feature (1)..(25): SEQ ID NO: 5167; WAN024DCF_at; Start 20; Stop 44
tcttggaacaaatccatgaagaagg

SEQ ID NO: 152303 - DNA, 25 bp, Artificial
  probe
  misc_feature (1)..(25): SEQ ID NO: 5167; WAN024DCF_at; Start 581; Stop 605
caacagaatcttctacaactactgg

SEQ ID NO: 152304 - DNA, 25 bp, Artificial
  probe
  misc_feature (1)..(25): SEQ ID NO: 5167; WAN024DCF_at; Start 210; Stop 234
tgtactctatcaaaaactctacgat

SEQ ID NO: 152305 - DNA, 25 bp, Artificial
  probe
  misc_feature (1)..(25): SEQ ID NO: 5167; WAN024DCF_at; Start 103; Stop 127
gatgcagacttggatgaagtaaaca

SEQ ID NO: 152306 - DNA, 25 bp, Artificial
  probe
  misc_feature (1)..(25): SEQ ID NO: 5167; WAN024DCF_at; Start 367; Stop 391
gctattctagttttgaatcatcaaa

SEQ ID NO: 152307 - DNA, 25 bp, Artificial
  probe
  misc_feature (1)..(25): SEQ ID NO: 5167; WAN024DCF_at; Start 6; Stop 30
caaggcaaatcaactcttggaacaa

SEQ ID NO: 152308 - DNA, 25 bp, Artificial
  probe
  misc_feature (1)..(25): SEQ ID NO: 5478; WAN024DCG_at; Start 1038; Stop 1062
taaggaactgacgaagactagcaag

SEQ ID NO: 152309 - DNA, 25 bp, Artificial
  probe
  misc_feature (1)..(25): SEQ ID NO: 5478; WAN024DCG_at; Start 128; Stop 152
ttacaatcacaggtactgcagctgc

SEQ ID NO: 152310 - DNA, 25 bp, Artificial
  probe
  misc_feature (1)..(25): SEQ ID NO: 5478; WAN024DCG_at; Start 1183; Stop 1207
gcttatggtctgattcgcttacgga

SEQ ID NO: 152311 - DNA, 25 bp, Artificial
  probe
  misc_feature (1)..(25): SEQ ID NO: 5478; WAN024DCG_at; Start 996; Stop 1020
gatttacagtttagcacgtgacggc

SEQ ID NO: 152312 - DNA, 25 bp, Artificial
  probe
  misc_feature (1)..(25): SEQ ID NO: 5478; WAN024DCG_at; Start 1071; Stop 1095
gaatgctactatcttgacaggtcta

SEQ ID NO: 152313 - DNA, 25 bp, Artificial
  probe
  misc_feature (1)..(25): SEQ ID NO: 5478; WAN024DCG_at; Start 290; Stop 314
taggagaattccctgcctggttggc

SEQ ID NO: 152314 - DNA, 25 bp, Artificial
  probe
  misc_feature (1)..(25): SEQ ID NO: 5478; WAN024DCG_at; Start 1114; Stop 1138
ggaatgttcccactagccagtattg

SEQ ID NO: 152315 - DNA, 25 bp, Artificial
  probe
  misc_feature (1)..(25): SEQ ID NO: 5478; WAN024DCG_at; Start 1209; Stop 1233
agaaaaaggaatgcccaaagctggg

SEQ ID NO: 152316 - DNA, 25 bp, Artificial
  probe
  misc_feature (1)..(25): SEQ ID NO: 5478; WAN024DCG_at; Start 388; Stop 412
ggcttgctctctcaatacgggatag

SEQ ID NO: 152317 - DNA, 25 bp, Artificial
  probe
  misc_feature (1)..(25): SEQ ID NO: 5478; WAN024DCG_at; Start 913; Stop 937
tgggcagccaactatgtgtcattag

SEQ ID NO: 152318 - DNA, 25 bp, Artificial
  probe
  misc_feature (1)..(25): SEQ ID NO: 5478; WAN024DCG_at; Start 334; Stop 358
gagttcatgacagccatatcaggcg

SEQ ID NO: 152319 - DNA, 25 bp, Artificial
  probe
  misc_feature (1)..(25): SEQ ID NO: 5478; WAN024DCG_at; Start 1086; Stop 1110
gacaggtctagcttcagcagtagca

SEQ ID NO: 152320 - DNA, 25 bp, Artificial
  probe
  misc_feature (1)..(25): SEQ ID NO: 5478; WAN024DCG_at; Start 964; Stop 988
tgtatttcgatgacctatgccctat

SEQ ID NO: 152321 - DNA, 25 bp, Artificial
  probe
  misc_feature (1)..(25): SEQ ID NO: 5478; WAN024DCG_at; Start 1101; Stop 1125
agcagtagcagcaggaatgttccca

SEQ ID NO: 152322 - DNA, 25 bp, Artificial
  probe
  misc_feature (1)..(25): SEQ ID NO: 5478; WAN024DCG_at; Start 44; Stop 68
tagataaaacagagatgcataggca

SEQ ID NO: 152323 - DNA, 25 bp, Artificial
  probe
  misc_feature (1)..(25): SEQ ID NO: 5478; WAN024DCG_at; Start 932; Stop 956
cattagtggctatcttgaccttgat

SEQ ID NO: 152324 - DNA, 25 bp, Artificial
  probe
  misc_feature (1)..(25): SEQ ID NO: 5478; WAN024DCG_at; Start 195; Stop 219
tgccttgtgtgtgggattatcagcc

SEQ ID NO: 152325 - DNA, 25 bp, Artificial
  probe
  misc_feature (1)..(25): SEQ ID NO: 5478; WAN024DCG_at; Start 981; Stop 1005
tgccctatcgcgtatgatttacagt

SEQ ID NO: 152326 - DNA, 25 bp, Artificial
  probe
  misc_feature (1)..(25): SEQ ID NO: 5478; WAN024DCG_at; Start 734; Stop 758
tggctgtagatgaagtcaagactcc

SEQ ID NO: 152327 - DNA, 25 bp, Artificial
  probe
  misc_feature (1)..(25): SEQ ID NO: 5478; WAN024DCG_at; Start 348; Stop 372
catatcaggcgtagcttcgggttgg

SEQ ID NO: 152328 - DNA, 25 bp, Artificial
  probe
  misc_feature (1)..(25): SEQ ID NO: 5478; WAN024DCG_at; Start 229; Stop 253
gcagaatttgcctcgcgagtacccg

SEQ ID NO: 152329 - DNA, 25 bp, Artificial
  probe
  misc_feature (1)..(25): SEQ ID NO: 5478; WAN024DCG_at; Start 807; Stop 831
cattctctatgccttggtgaccctt

SEQ ID NO: 152330 - DNA, 25 bp, Artificial
  probe
  misc_feature (1)..(25): SEQ ID NO: 5478; WAN024DCG_at; Start 770; Stop 794
ttcctagagggattgtcttatcgct

SEQ ID NO: 152331 - DNA, 25 bp, Artificial
  probe
  misc_feature (1)..(25): SEQ ID NO: 5478; WAN024DCG_at; Start 861; Stop 885
tttaaatgtcgatgatgccgttgcc

SEQ ID NO: 152332 - DNA, 25 bp, Artificial
  probe
  misc_feature (1)..(25): SEQ ID NO: 5478; WAN024DCG_at; Start 272; Stop 296
gttacctctatgctatcttaggaga

SEQ ID NO: 152333 - DNA, 25 bp, Artificial
  probe
  misc_feature (1)..(25): SEQ ID NO: 5478; WAN024DCG_at; Start 877; Stop 901
gccgttgcctttgcccttcgtagtg

SEQ ID NO: 152334 - DNA, 25 bp, Artificial
  probe
  misc_feature (1)..(25): SEQ ID NO: 5478; WAN024DCG_at; Start 678; Stop 702
tatggctggtgcgtccttgatgttc

SEQ ID NO: 152335 - DNA, 25 bp, Artificial
  probe
  misc_feature (1)..(25): SEQ ID NO: 5478; WAN024DCG_at; Start 643; Stop 667
ggttttggacaaatctatggagcta

SEQ ID NO: 152336 - DNA, 25 bp, Artificial
  probe
  misc_feature (1)..(25): SEQ ID NO: 5478; WAN024DCG_at; Start 828; Stop 852
ccttgttttgactggtgtggttcac

SEQ ID NO: 152337 - DNA, 25 bp, Artificial
  probe
  misc_feature (1)..(25): SEQ ID NO: 5478; WAN024DCG_at; Start 432; Stop 456
tggtacctttaatcctcaagcaggg

SEQ ID NO: 152338 - DNA, 25 bp, Artificial
  probe
  misc_feature (1)..(25): SEQ ID NO: 5478; WAN024DCG_at; Start 209; Stop 233
gattatcagccctcttttttgcaga

SEQ ID NO: 152339 - DNA, 25 bp, Artificial
  probe
  misc_feature (1)..(25): SEQ ID NO: 5478; WAN024DCG_at; Start 248; Stop 272
tacccgctacaggaggtgcctatag

SEQ ID NO: 152340 - DNA, 25 bp, Artificial
  probe
  misc_feature (1)..(25): SEQ ID NO: 5478; WAN024DCG_at; Start 523; Stop 547
aaggcagccttacgctttaattcga

SEQ ID NO: 152341 - DNA, 25 bp, Artificial
  probe
  misc_feature (1)..(25): SEQ ID NO: 5478; WAN024DCG_at; Start 1021; Stop 1045
ttagtgcctgctgcctttaaggaac

SEQ ID NO: 152342 - DNA, 25 bp, Artificial
  probe
  misc_feature (1)..(25): SEQ ID NO: 647; WAN024DCH_at; Start 293; Stop 317
cagatcgtgatttcgaaattcttac

SEQ ID NO: 152343 - DNA, 25 bp, Artificial
  probe
  misc_feature (1)..(25): SEQ ID NO: 647; WAN024DCH_at; Start 463; Stop 487
gaatatttaattgatagccaaggaa

SEQ ID NO: 152344 - DNA, 25 bp, Artificial
  probe
  misc_feature (1)..(25): SEQ ID NO: 647; WAN024DCH_at; Start 318; Stop 342
tgtcattgcaccaggaattcaaggt

SEQ ID NO: 152345 - DNA, 25 bp, Artificial
  probe
  misc_feature (1)..(25): SEQ ID NO: 647; WAN024DCH_at; Start 502; Stop 526
caatttggtgctatcagtaatgcgg

SEQ ID NO: 152346 - DNA, 25 bp, Artificial
  probe
  misc_feature (1)..(25): SEQ ID NO: 647; WAN024DCH_at; Start 407; Stop 431
tttatgataccaaagcaaccacctt

SEQ ID NO: 152347 - DNA, 25 bp, Artificial
  probe
  misc_feature (1)..(25): SEQ ID NO: 647; WAN024DCH_at; Start 81; Stop 105
gactcaagcagcacaacagccaaaa

SEQ ID NO: 152348 - DNA, 25 bp, Artificial
  probe
  misc_feature (1)..(25): SEQ ID NO: 647; WAN024DCH_at; Start 67; Stop 91
gaagaaactaaaaagactcaagcag

SEQ ID NO: 152349 - DNA, 25 bp, Artificial
  probe
  misc_feature (1)..(25): SEQ ID NO: 647; WAN024DCH_at; Start 494; Stop 518
gaaagattcaatttggtgctatcag

SEQ ID NO: 152350 - DNA, 25 bp, Artificial
  probe
  misc_feature (1)..(25): SEQ ID NO: 647; WAN024DCH_at; Start 261; Stop 285
tatgccagagttgatggaactagcg

SEQ ID NO: 152351 - DNA, 25 bp, Artificial
  probe
  misc_feature (1)..(25): SEQ ID NO: 647; WAN024DCH_at; Start 351; Stop 375
tgttgagcaattcccacaatggttc

SEQ ID NO: 152352 - DNA, 25 bp, Artificial
  probe
  misc_feature (1)..(25): SEQ ID NO: 647; WAN024DCH_at; Start 19; Stop 43
gctggcttaagtctcttgtcattag

SEQ ID NO: 152353 - DNA, 25 bp, Artificial
  probe
  misc_feature (1)..(25): SEQ ID NO: 647; WAN024DCH_at; Start 394; Stop 418
gatatcccagttctttatgatacca

SEQ ID NO: 152354 - DNA, 25 bp, Artificial
  probe
  misc_feature (1)..(25): SEQ ID NO: 647; WAN024DCH_at; Start 223; Stop 247
aagttttgggcttcatggtgtggtc

SEQ ID NO: 152355 - DNA, 25 bp, Artificial
  probe
  misc_feature (1)..(25): SEQ ID NO: 647; WAN024DCH_at; Start 379; Stop 403
gaacaaggatataaggatatcccag

SEQ ID NO: 152356 - DNA, 25 bp, Artificial
  probe
  misc_feature (1)..(25): SEQ ID NO: 647; WAN024DCH_at; Start 271; Stop 295
ttgatggaactagcggcgaaaccag

SEQ ID NO: 152357 - DNA, 25 bp, Artificial
  probe
  misc_feature (1)..(25): SEQ ID NO: 647; WAN024DCH_at; Start 412; Stop 436
gataccaaagcaaccaccttccaag

SEQ ID NO: 152358 - DNA, 25 bp, Artificial
  probe
  misc_feature (1)..(25): SEQ ID NO: 647; WAN024DCH_at; Start 448; Stop 472
cgaagcattcctacagaatatttaa

SEQ ID NO: 152359 - DNA, 25 bp, Artificial
  probe
  misc_feature (1)..(25): SEQ ID NO: 647; WAN024DCH_at; Start 38; Stop 62
cattagttgtattgatggcctgtgg

SEQ ID NO: 152360 - DNA, 25 bp, Artificial
  probe
  misc_feature (1)..(25): SEQ ID NO: 647; WAN024DCH_at; Start 307; Stop 331
gaaattcttactgtcattgcaccag

SEQ ID NO: 152361 - DNA, 25 bp, Artificial
  probe
  misc_feature (1)..(25): SEQ ID NO: 647; WAN024DCH_at; Start 246; Stop 270
tccatgcaagaaaagtatgccagag

SEQ ID NO: 152362 - DNA, 25 bp, Artificial
  probe
  misc_feature (1)..(25): SEQ ID NO: 647; WAN024DCH_at; Start 522; Stop 546
tgcggatgcagaagcagcatttaaa

SEQ ID NO: 152363 - DNA, 25 bp, Artificial
  probe
  misc_feature (1)..(25): SEQ ID NO: 647; WAN024DCH_at; Start 91; Stop 115
gcacaacagccaaaacaacaaacga

SEQ ID NO: 152364 - DNA, 25 bp, Artificial
  probe
  misc_feature (1)..(25): SEQ ID NO: 647; WAN024DCH_at; Start 158; Stop 182
cattgcaatccatggatggcaaaga

SEQ ID NO: 152365 - DNA, 25 bp, Artificial
  probe
  misc_feature (1)..(25): SEQ ID NO: 647; WAN024DCH_at; Start 105; Stop 129
acaacaaacgactgtacaacaaatt

SEQ ID NO: 152366 - DNA, 25 bp, Artificial
  probe
  misc_feature (1)..(25): SEQ ID NO: 647; WAN024DCH_at; Start 426; Stop 450
caccttccaagcttatcaaattcga

SEQ ID NO: 152367 - DNA, 25 bp, Artificial
  probe
  misc_feature (1)..(25): SEQ ID NO: 647; WAN024DCH_at; Start 7; Stop 31
aaagtaatgtttgctggcttaagtc

SEQ ID NO: 152368 - DNA, 25 bp, Artificial
  probe
  misc_feature (1)..(25): SEQ ID NO: 647; WAN024DCH_at; Start 281; Stop 305
tagcggcgaaaccagatcgtgattt

SEQ ID NO: 152369 - DNA, 25 bp, Artificial
  probe
  misc_feature (1)..(25): SEQ ID NO: 647; WAN024DCH_at; Start 238; Stop 262
tggtgtggtccatgcaagaaaagta

SEQ ID NO: 152370 - DNA, 25 bp, Artificial
  probe
  misc_feature (1)..(25): SEQ ID NO: 647; WAN024DCH_at; Start 515; Stop 539
tcagtaatgcggatgcagaagcagc

SEQ ID NO: 152371 - DNA, 25 bp, Artificial
  probe
  misc_feature (1)..(25): SEQ ID NO: 647; WAN024DCH_at; Start 439; Stop 463
tatcaaattcgaagcattcctacag

SEQ ID NO: 152372 - DNA, 25 bp, Artificial
  probe
  misc_feature (1)..(25): SEQ ID NO: 647; WAN024DCH_at; Start 325; Stop 349
gcaccaggaattcaaggtgaaaaaa

SEQ ID NO: 152373 - DNA, 25 bp, Artificial
  probe
  misc_feature (1)..(25): SEQ ID NO: 647; WAN024DCH_at; Start 167; Stop 191
ccatggatggcaaagaagttaagtt

SEQ ID NO: 152374 - DNA, 25 bp, Artificial
  probe
  misc_feature (1)..(25): SEQ ID NO: 647; WAN024DCH_at; Start 479; Stop 503
gccaaggaaagattggaaagattca

SEQ ID NO: 152375 - DNA, 25 bp, Artificial
  probe
  misc_feature (1)..(25): SEQ ID NO: 647; WAN024DCH_at; Start 532; Stop 556
gaagcagcatttaaagaaatgaact

SEQ ID NO: 152376 - DNA, 25 bp, Artificial
  probe
  misc_feature (1)..(25): SEQ ID NO: 5430; WAN024DCI_at; Start 671; Stop 695
taggacaagtaaatgttctagctgg

SEQ ID NO: 152377 - DNA, 25 bp, Artificial
  probe
  misc_feature (1)..(25): SEQ ID NO: 5430; WAN024DCI_at; Start 61; Stop 85
ccttgtatttttcctcttctgccag

SEQ ID NO: 152378 - DNA, 25 bp, Artificial
  probe
  misc_feature (1)..(25): SEQ ID NO: 5430; WAN024DCI_at; Start 558; Stop 582
ggcactagcttcaggtctagtcatg

SEQ ID NO: 152379 - DNA, 25 bp, Artificial
  probe
  misc_feature (1)..(25): SEQ ID NO: 5430; WAN024DCI_at; Start 446; Stop 470
cagttttaagttctgttttagcact

SEQ ID NO: 152380 - DNA, 25 bp, Artificial
  probe
  misc_feature (1)..(25): SEQ ID NO: 5430; WAN024DCI_at; Start 622; Stop 646
aagaaaattggtggtttcctcattg

SEQ ID NO: 152381 - DNA, 25 bp, Artificial
  probe
  misc_feature (1)..(25): SEQ ID NO: 5430; WAN024DCI_at; Start 4; Stop 28
gaaacgatagtatttttaatctctg

SEQ ID NO: 152382 - DNA, 25 bp, Artificial
  probe
  misc_feature (1)..(25): SEQ ID NO: 5430; WAN024DCI_at; Start 408; Stop 432
tattacctttagctttggttggaca

SEQ ID NO: 152383 - DNA, 25 bp, Artificial
  probe
  misc_feature (1)..(25): SEQ ID NO: 5430; WAN024DCI_at; Start 464; Stop 488
tagcacttgcggcttctggaggcaa

SEQ ID NO: 152384 - DNA, 25 bp, Artificial
  probe
  misc_feature (1)..(25): SEQ ID NO: 5430; WAN024DCI_at; Start 687; Stop 711
tctagctggaatttttgaataacta

SEQ ID NO: 152385 - DNA, 25 bp, Artificial
  probe
  misc_feature (1)..(25): SEQ ID NO: 5430; WAN024DCI_at; Start 303; Stop 327
tcttcaccagatggaaatttttcat

SEQ ID NO: 152386 - DNA, 25 bp, Artificial
  probe
  misc_feature (1)..(25): SEQ ID NO: 5430; WAN024DCI_at; Start 182; Stop 206
gctttatcgctggtatctctctcat

SEQ ID NO: 152387 - DNA, 25 bp, Artificial
  probe
  misc_feature (1)..(25): SEQ ID NO: 5430; WAN024DCI_at; Start 278; Stop 302
tgggagctattattatcattttggg

SEQ ID NO: 152388 - DNA, 25 bp, Artificial
  probe
  misc_feature (1)..(25): SEQ ID NO: 5430; WAN024DCI_at; Start 431; Stop 455
caccttgtattggtccagttttaag

SEQ ID NO: 152389 - DNA, 25 bp, Artificial
  probe
  misc_feature (1)..(25): SEQ ID NO: 5430; WAN024DCI_at; Start 20; Stop 44
taatctctgtttttctagcaggtgt

SEQ ID NO: 152390 - DNA, 25 bp, Artificial
  probe
  misc_feature (1)..(25): SEQ ID NO: 5430; WAN024DCI_at; Start 170; Stop 194
ttcgaacactttgctttatcgctgg

SEQ ID NO: 152391 - DNA, 25 bp, Artificial
  probe
  misc_feature (1)..(25): SEQ ID NO: 5430; WAN024DCI_at; Start 213; Stop 237
tattctaggctttggtgctggttac

SEQ ID NO: 152392 - DNA, 25 bp, Artificial
  probe
  misc_feature (1)..(25): SEQ ID NO: 5430; WAN024DCI_at; Start 588; Stop 612
ttttagtaaaatcaagcgtcatatg

SEQ ID NO: 152393 - DNA, 25 bp, Artificial
  probe
  misc_feature (1)..(25): SEQ ID NO: 5430; WAN024DCI_at; Start 143; Stop 167
ggagaaaggttctctggtcaggctt

SEQ ID NO: 152394 - DNA, 25 bp, Artificial
  probe
  misc_feature (1)..(25): SEQ ID NO: 5430; WAN024DCI_at; Start 603; Stop 627
gcgtcatatgatgctactaaagaaa

SEQ ID NO: 152395 - DNA, 25 bp, Artificial
  probe
  misc_feature (1)..(25): SEQ ID NO: 5430; WAN024DCI_at; Start 653; Stop 677
tgggaattttgttactattaggaca

SEQ ID NO: 152396 - DNA, 25 bp, Artificial
  probe
  misc_feature (1)..(25): SEQ ID NO: 5430; WAN024DCI_at; Start 421; Stop 445
tttggttggacaccttgtattggtc

SEQ ID NO: 152397 - DNA, 25 bp, Artificial
  probe
  misc_feature (1)..(25): SEQ ID NO: 5430; WAN024DCI_at; Start 228; Stop 252
tgctggttactttggtcatattctc

SEQ ID NO: 152398 - DNA, 25 bp, Artificial
  probe
  misc_feature (1)..(25): SEQ ID NO: 5430; WAN024DCI_at; Start 518; Stop 542
tcatttacactctgggcatggccct

SEQ ID NO: 152399 - DNA, 25 bp, Artificial
  probe
  misc_feature (1)..(25): SEQ ID NO: 5430; WAN024DCI_at; Start 294; Stop 318
cattttgggtcttcaccagatggaa

SEQ ID NO: 152400 - DNA, 25 bp, Artificial
  probe
  misc_feature (1)..(25): SEQ ID NO: 5430; WAN024DCI_at; Start 246; Stop 270
tattctctatgcaaattggtttcga

SEQ ID NO: 152401 - DNA, 25 bp, Artificial
  probe
  misc_feature (1)..(25): SEQ ID NO: 5430; WAN024DCI_at; Start 530; Stop 554
tgggcatggcccttcctttcttggt

SEQ ID NO: 152402 - DNA, 25 bp, Artificial
  probe
  misc_feature (1)..(25): SEQ ID NO: 5430; WAN024DCI_at; Start 376; Stop 400
tctaatcgttattggtcagcttttt

SEQ ID NO: 152403 - DNA, 25 bp, Artificial
  probe
  misc_feature (1)..(25): SEQ ID NO: 5430; WAN024DCI_at; Start 106; Stop 130
gatgatcaagaaagtgcaaaaagct

SEQ ID NO: 152404 - DNA, 25 bp, Artificial
  probe
  misc_feature (1)..(25): SEQ ID NO: 5430; WAN024DCI_at; Start 511; Stop 535
tatactctcatttacactctgggca

SEQ ID NO: 152405 - DNA, 25 bp, Artificial
  probe
  misc_feature (1)..(25): SEQ ID NO: 5430; WAN024DCI_at; Start 493; Stop 517
gcttggcaaggagcgatttatactc

SEQ ID NO: 152406 - DNA, 25 bp, Artificial
  probe
  misc_feature (1)..(25): SEQ ID NO: 5430; WAN024DCI_at; Start 155; Stop 179
tctggtcaggcttgattcgaacact

SEQ ID NO: 152407 - DNA, 25 bp, Artificial
  probe
  misc_feature (1)..(25): SEQ ID NO: 5430; WAN024DCI_at; Start 88; Stop 112
tatgctgggattttattggatgatc

SEQ ID NO: 152408 - DNA, 25 bp, Artificial
  probe
  misc_feature (1)..(25): SEQ ID NO: 5430; WAN024DCI_at; Start 569; Stop 593
caggtctagtcatgccatattttag

SEQ ID NO: 152409 - DNA, 25 bp, Artificial
  probe
  misc_feature (1)..(25): SEQ ID NO: 5430; WAN024DCI_at; Start 73; Stop 97
cctcttctgccagtctatgctggga

SEQ ID NO: 152410 - DNA, 25 bp, Artificial
  probe
  misc_feature (1)..(25): SEQ ID NO: 3103; WAN024DCJ_at; Start 492; Stop 516
tctaggaggacagccttggttgcat

SEQ ID NO: 152411 - DNA, 25 bp, Artificial
  probe
  misc_feature (1)..(25): SEQ ID NO: 3103; WAN024DCJ_at; Start 424; Stop 448
tcacagactctactgcagtatgcag

SEQ ID NO: 152412 - DNA, 25 bp, Artificial
  probe
  misc_feature (1)..(25): SEQ ID NO: 3103; WAN024DCJ_at; Start 15; Stop 39
tttgtcaaggattgctttaagctcc

SEQ ID NO: 152413 - DNA, 25 bp, Artificial
  probe
  misc_feature (1)..(25): SEQ ID NO: 3103; WAN024DCJ_at; Start 47; Stop 71
gtttagtttctgtctctgctgagcc

SEQ ID NO: 152414 - DNA, 25 bp, Artificial
  probe
  misc_feature (1)..(25): SEQ ID NO: 3103; WAN024DCJ_at; Start 559; Stop 583
ggtctaactcttgactcaaggcacg

SEQ ID NO: 152415 - DNA, 25 bp, Artificial
  probe
  misc_feature (1)..(25): SEQ ID NO: 3103; WAN024DCJ_at; Start 28; Stop 52
gctttaagctcctctactagtttag

SEQ ID NO: 152416 - DNA, 25 bp, Artificial
  probe
  misc_feature (1)..(25): SEQ ID NO: 3103; WAN024DCJ_at; Start 502; Stop 526
cagccttggttgcatcgattttcgg

SEQ ID NO: 152417 - DNA, 25 bp, Artificial
  probe
  misc_feature (1)..(25): SEQ ID NO: 3103; WAN024DCJ_at; Start 574; Stop 598
tcaaggcacgaagttcagacttgtc

SEQ ID NO: 152418 - DNA, 25 bp, Artificial
  probe
  misc_feature (1)..(25): SEQ ID NO: 3103; WAN024DCJ_at; Start 442; Stop 466
tatgcagaccttactctgtcaaggc

SEQ ID NO: 152419 - DNA, 25 bp, Artificial
  probe
  misc_feature (1)..(25): SEQ ID NO: 3103; WAN024DCJ_at; Start 456; Stop 480
tctgtcaaggcactatcttccggag

SEQ ID NO: 152420 - DNA, 25 bp, Artificial
  probe
  misc_feature (1)..(25): SEQ ID NO: 3103; WAN024DCJ_at; Start 402; Stop 426
agagtccaaggcagcccagccttca

SEQ ID NO: 152421 - DNA, 25 bp, Artificial
  probe
  misc_feature (1)..(25): SEQ ID NO: 3103; WAN024DCJ_at; Start 299; Stop 323
cagtcatcttatctgaatccttact

SEQ ID NO: 152422 - DNA, 25 bp, Artificial
  probe
  misc_feature (1)..(25): SEQ ID NO: 3103; WAN024DCJ_at; Start 283; Stop 307
ggaactgagtttgtttcagtcatct

SEQ ID NO: 152423 - DNA, 25 bp, Artificial
  probe
  misc_feature (1)..(25): SEQ ID NO: 3103; WAN024DCJ_at; Start 606; Stop 630
tcttgagcttgtgtgctcgttgagc

SEQ ID NO: 152424 - DNA, 25 bp, Artificial
  probe
  misc_feature (1)..(25): SEQ ID NO: 3103; WAN024DCJ_at; Start 64; Stop 88
gctgagccattttcttctttcacga

SEQ ID NO: 152425 - DNA, 25 bp, Artificial
  probe
  misc_feature (1)..(25): SEQ ID NO: 3103; WAN024DCJ_at; Start 150; Stop 174
tgcatctagctgtcctagaaccttg

SEQ ID NO: 152426 - DNA, 25 bp, Artificial
  probe
  misc_feature (1)..(25): SEQ ID NO: 3103; WAN024DCJ_at; Start 337; Stop 361
tgttttgcatccttcttgtcctgtg

SEQ ID NO: 152427 - DNA, 25 bp, Artificial
  probe
  misc_feature (1)..(25): SEQ ID NO: 3103; WAN024DCJ_at; Start 243; Stop 267
gcctaggagggcaagtagactgacc

SEQ ID NO: 152428 - DNA, 25 bp, Artificial
  probe
  misc_feature (1)..(25): SEQ ID NO: 3103; WAN024DCJ_at; Start 86; Stop 110
cgaaatcaagggtttcttggagaag

SEQ ID NO: 152429 - DNA, 25 bp, Artificial
  probe
  misc_feature (1)..(25): SEQ ID NO: 3103; WAN024DCJ_at; Start 531; Stop 555
gatactgttgccaaagctttcaagc

SEQ ID NO: 152430 - DNA, 25 bp, Artificial
  probe
  misc_feature (1)..(25): SEQ ID NO: 3103; WAN024DCJ_at; Start 589; Stop 613
cagacttgtcaacttgctcttgagc

SEQ ID NO: 152431 - DNA, 25 bp, Artificial
  probe
  misc_feature (1)..(25): SEQ ID NO: 3103; WAN024DCJ_at; Start 182; Stop 206
ccgtgcttaattgctggatttctga

SEQ ID NO: 152432 - DNA, 25 bp, Artificial
  probe
  misc_feature (1)..(25): SEQ ID NO: 3103; WAN024DCJ_at; Start 394; Stop 418
tctttgagagagtccaaggcagccc

SEQ ID NO: 152433 - DNA, 25 bp, Artificial
  probe
  misc_feature (1)..(25): SEQ ID NO: 3103; WAN024DCJ_at; Start 229; Stop 253
cagaaggcaatcacgcctaggaggg

SEQ ID NO: 152434 - DNA, 25 bp, Artificial
  probe
  misc_feature (1)..(25): SEQ ID NO: 3103; WAN024DCJ_at; Start 197; Stop 221
ggatttctgactctttcttacggcg

SEQ ID NO: 152435 - DNA, 25 bp, Artificial
  probe
  misc_feature (1)..(25): SEQ ID NO: 3103; WAN024DCJ_at; Start 257; Stop 281
gtagactgaccacaatcactcctgc

SEQ ID NO: 152436 - DNA, 25 bp, Artificial
  probe
  misc_feature (1)..(25): SEQ ID NO: 3103; WAN024DCJ_at; Start 379; Stop 403
gcatttgctttcacatctttgagag

SEQ ID NO: 152437 - DNA, 25 bp, Artificial
  probe
  misc_feature (1)..(25): SEQ ID NO: 3103; WAN024DCJ_at; Start 518; Stop 542
gattttcggatcagatactgttgcc

SEQ ID NO: 152438 - DNA, 25 bp, Artificial
  probe
  misc_feature (1)..(25): SEQ ID NO: 3103; WAN024DCJ_at; Start 544; Stop 568
aagctttcaagcgttggtctaactc

SEQ ID NO: 152439 - DNA, 25 bp, Artificial
  probe
  misc_feature (1)..(25): SEQ ID NO: 3103; WAN024DCJ_at; Start 321; Stop 345
actatcttccgttccttgttttgca

SEQ ID NO: 152440 - DNA, 25 bp, Artificial
  probe
  misc_feature (1)..(25): SEQ ID NO: 3103; WAN024DCJ_at; Start 466; Stop 490
cactatcttccggagctttttgagc

SEQ ID NO: 152441 - DNA, 25 bp, Artificial
  probe
  misc_feature (1)..(25): SEQ ID NO: 3103; WAN024DCJ_at; Start 482; Stop 506
tttttgagcatctaggaggacagcc

SEQ ID NO: 152442 - DNA, 25 bp, Artificial
  probe
  misc_feature (1)..(25): SEQ ID NO: 3103; WAN024DCJ_at; Start 137; Stop 161
tatccgctttttctgcatctagctg

SEQ ID NO: 152443 - DNA, 25 bp, Artificial
  probe
  misc_feature (1)..(25): SEQ ID NO: 3103; WAN024DCJ_at; Start 364; Stop 388
ggcttgctgtcgctagcatttgctt

SEQ ID NO: 152444 - DNA, 25 bp, Artificial
  probe
  misc_feature (1)..(25): SEQ ID NO: 4208; WAN024DCK_at; Start 172; Stop 196
gctccggaagatagtgccttgacag

SEQ ID NO: 152445 - DNA, 25 bp, Artificial
  probe
  misc_feature (1)..(25): SEQ ID NO: 4208; WAN024DCK_at; Start 126; Stop 150
tccgaaaatcgatgcaaccaaggct

SEQ ID NO: 152446 - DNA, 25 bp, Artificial
  probe
  misc_feature (1)..(25): SEQ ID NO: 4208; WAN024DCK_at; Start 35; Stop 59
cacaagctcaagagcaagttgacaa

SEQ ID NO: 152447 - DNA, 25 bp, Artificial
  probe
  misc_feature (1)..(25): SEQ ID NO: 4208; WAN024DCK_at; Start 178; Stop 202
gaagatagtgccttgacagagtaac

SEQ ID NO: 152448 - DNA, 25 bp, Artificial
  probe
  misc_feature (1)..(25): SEQ ID NO: 4208; WAN024DCK_at; Start 119; Stop 143
tatctgatccgaaaatcgatgcaac

SEQ ID NO: 152449 - DNA, 25 bp, Artificial
  probe
  misc_feature (1)..(25): SEQ ID NO: 4208; WAN024DCK_at; Start 128; Stop 152
cgaaaatcgatgcaaccaaggctgt

SEQ ID NO: 152450 - DNA, 25 bp, Artificial
  probe
  misc_feature (1)..(25): SEQ ID NO: 4208; WAN024DCK_at; Start 43; Stop 67
caagagcaagttgacaagtctgaac

SEQ ID NO: 152451 - DNA, 25 bp, Artificial
  probe
  misc_feature (1)..(25): SEQ ID NO: 4208; WAN024DCK_at; Start 132; Stop 156
aatcgatgcaaccaaggctgtcctc

SEQ ID NO: 152452 - DNA, 25 bp, Artificial
  probe
  misc_feature (1)..(25): SEQ ID NO: 4208; WAN024DCK_at; Start 134; Stop 158
tcgatgcaaccaaggctgtcctcct

SEQ ID NO: 152453 - DNA, 25 bp, Artificial
  probe
  misc_feature (1)..(25): SEQ ID NO: 4208; WAN024DCK_at; Start 181; Stop 205
gatagtgccttgacagagtaactaa

SEQ ID NO: 152454 - DNA, 25 bp, Artificial
  probe
  misc_feature (1)..(25): SEQ ID NO: 4208; WAN024DCK_at; Start 158; Stop 182
tagatgctcaaaaagctccggaaga

SEQ ID NO: 152455 - DNA, 25 bp, Artificial
  probe
  misc_feature (1)..(25): SEQ ID NO: 4208; WAN024DCK_at; Start 9; Stop 33
aagcgcttcggctagctcaacgagc

SEQ ID NO: 152456 - DNA, 25 bp, Artificial
  probe
  misc_feature (1)..(25): SEQ ID NO: 4208; WAN024DCK_at; Start 51; Stop 75
agttgacaagtctgaacttcgtgcc

SEQ ID NO: 152457 - DNA, 25 bp, Artificial
  probe
  misc_feature (1)..(25): SEQ ID NO: 4208; WAN024DCK_at; Start 63; Stop 87
tgaacttcgtgccttgagtcaagag

SEQ ID NO: 152458 - DNA, 25 bp, Artificial
  probe
  misc_feature (1)..(25): SEQ ID NO: 4208; WAN024DCK_at; Start 99; Stop 123
cttgaaagctttggcaacagtatct

SEQ ID NO: 152459 - DNA, 25 bp, Artificial
  probe
  misc_feature (1)..(25): SEQ ID NO: 4208; WAN024DCK_at; Start 130; Stop 154
aaaatcgatgcaaccaaggctgtcc

SEQ ID NO: 152460 - DNA, 25 bp, Artificial
  probe
  misc_feature (1)..(25): SEQ ID NO: 4208; WAN024DCK_at; Start 40; Stop 64
gctcaagagcaagttgacaagtctg

SEQ ID NO: 152461 - DNA, 25 bp, Artificial
  probe
  misc_feature (1)..(25): SEQ ID NO: 4208; WAN024DCK_at; Start 169; Stop 193
aaagctccggaagatagtgccttga

SEQ ID NO: 152462 - DNA, 25 bp, Artificial
  probe
  misc_feature (1)..(25): SEQ ID NO: 4208; WAN024DCK_at; Start 155; Stop 179
tcctagatgctcaaaaagctccgga

SEQ ID NO: 152463 - DNA, 25 bp, Artificial
  probe
  misc_feature (1)..(25): SEQ ID NO: 4208; WAN024DCK_at; Start 162; Stop 186
tgctcaaaaagctccggaagatagt

SEQ ID NO: 152464 - DNA, 25 bp, Artificial
  probe
  misc_feature (1)..(25): SEQ ID NO: 4208; WAN024DCK_at; Start 124; Stop 148
gatccgaaaatcgatgcaaccaagg

SEQ ID NO: 152465 - DNA, 25 bp, Artificial
  probe
  misc_feature (1)..(25): SEQ ID NO: 4208; WAN024DCK_at; Start 102; Stop 126
gaaagctttggcaacagtatctgat

SEQ ID NO: 152466 - DNA, 25 bp, Artificial
  probe
  misc_feature (1)..(25): SEQ ID NO: 4208; WAN024DCK_at; Start 106; Stop 130
gctttggcaacagtatctgatccga

SEQ ID NO: 152467 - DNA, 25 bp, Artificial
  probe
  misc_feature (1)..(25): SEQ ID NO: 4208; WAN024DCK_at; Start 68; Stop 92
ttcgtgccttgagtcaagagttaga

SEQ ID NO: 152468 - DNA, 25 bp, Artificial
  probe
  misc_feature (1)..(25): SEQ ID NO: 4208; WAN024DCK_at; Start 55; Stop 79
gacaagtctgaacttcgtgccttga

SEQ ID NO: 152469 - DNA, 25 bp, Artificial
  probe
  misc_feature (1)..(25): SEQ ID NO: 4208; WAN024DCK_at; Start 138; Stop 162
tgcaaccaaggctgtcctcctagat

SEQ ID NO: 152470 - DNA, 25 bp, Artificial
  probe
  misc_feature (1)..(25): SEQ ID NO: 4208; WAN024DCK_at; Start 150; Stop 174
tgtcctcctagatgctcaaaaagct

SEQ ID NO: 152471 - DNA, 25 bp, Artificial
  probe
  misc_feature (1)..(25): SEQ ID NO: 4208; WAN024DCK_at; Start 166; Stop 190
caaaaagctccggaagatagtgcct

SEQ ID NO: 152472 - DNA, 25 bp, Artificial
  probe
  misc_feature (1)..(25): SEQ ID NO: 4208; WAN024DCK_at; Start 59; Stop 83
agtctgaacttcgtgccttgagtca

SEQ ID NO: 152473 - DNA, 25 bp, Artificial
  probe
  misc_feature (1)..(25): SEQ ID NO: 4208; WAN024DCK_at; Start 147; Stop 171
ggctgtcctcctagatgctcaaaaa

SEQ ID NO: 152474 - DNA, 25 bp, Artificial
  probe
  misc_feature (1)..(25): SEQ ID NO: 4208; WAN024DCK_at; Start 115; Stop 139
acagtatctgatccgaaaatcgatg

SEQ ID NO: 152475 - DNA, 25 bp, Artificial
  probe
  misc_feature (1)..(25): SEQ ID NO: 4208; WAN024DCK_at; Start 174; Stop 198
tccggaagatagtgccttgacagag

SEQ ID NO: 152476 - DNA, 25 bp, Artificial
  probe
  misc_feature (1)..(25): SEQ ID NO: 4208; WAN024DCK_at; Start 112; Stop 136
gcaacagtatctgatccgaaaatcg

SEQ ID NO: 152477 - DNA, 25 bp, Artificial
  probe
  misc_feature (1)..(25): SEQ ID NO: 4208; WAN024DCK_at; Start 144; Stop 168
caaggctgtcctcctagatgctcaa

SEQ ID NO: 152478 - DNA, 25 bp, Artificial
  probe
  misc_feature (1)..(25): SEQ ID NO: 1457; WAN024DCL_at; Start 93; Stop 117
gaaagagtcagaaatccagcaatta

SEQ ID NO: 152479 - DNA, 25 bp, Artificial
  probe
  misc_feature (1)..(25): SEQ ID NO: 1457; WAN024DCL_at; Start 43; Stop 67
agtctacttgccctcctaggcgtga

SEQ ID NO: 152480 - DNA, 25 bp, Artificial
  probe
  misc_feature (1)..(25): SEQ ID NO: 1457; WAN024DCL_at; Start 281; Stop 305
tccttgacaaactcaagtaactaat

SEQ ID NO: 152481 - DNA, 25 bp, Artificial
  probe
  misc_feature (1)..(25): SEQ ID NO: 1457; WAN024DCL_at; Start 97; Stop 121
gagtcagaaatccagcaattaagca

SEQ ID NO: 152482 - DNA, 25 bp, Artificial
  probe
  misc_feature (1)..(25): SEQ ID NO: 1457; WAN024DCL_at; Start 241; Stop 265
gcagagacagaaactaaactagtag

SEQ ID NO: 152483 - DNA, 25 bp, Artificial
  probe
  misc_feature (1)..(25): SEQ ID NO: 1457; WAN024DCL_at; Start 263; Stop 287
tagaggagcttaaagcaatccttga

SEQ ID NO: 152484 - DNA, 25 bp, Artificial
  probe
  misc_feature (1)..(25): SEQ ID NO: 1457; WAN024DCL_at; Start 235; Stop 259
ggctcagcagagacagaaactaaac

SEQ ID NO: 152485 - DNA, 25 bp, Artificial
  probe
  misc_feature (1)..(25): SEQ ID NO: 1457; WAN024DCL_at; Start 31; Stop 55
gtgattgtggtcagtctacttgccc

SEQ ID NO: 152486 - DNA, 25 bp, Artificial
  probe
  misc_feature (1)..(25): SEQ ID NO: 1457; WAN024DCL_at; Start 248; Stop 272
cagaaactaaactagtagaggagct

SEQ ID NO: 152487 - DNA, 25 bp, Artificial
  probe
  misc_feature (1)..(25): SEQ ID NO: 1457; WAN024DCL_at; Start 218; Stop 242
tcgtgaaagaagaaaatggctcagc

SEQ ID NO: 152488 - DNA, 25 bp, Artificial
  probe
  misc_feature (1)..(25): SEQ ID NO: 1457; WAN024DCL_at; Start 25; Stop 49
gcaggagtgattgtggtcagtctac

SEQ ID NO: 152489 - DNA, 25 bp, Artificial
  probe
  misc_feature (1)..(25): SEQ ID NO: 1457; WAN024DCL_at; Start 226; Stop 250
gaagaaaatggctcagcagagacag

SEQ ID NO: 152490 - DNA, 25 bp, Artificial
  probe
  misc_feature (1)..(25): SEQ ID NO: 1457; WAN024DCL_at; Start 222; Stop 246
gaaagaagaaaatggctcagcagag

SEQ ID NO: 152491 - DNA, 25 bp, Artificial
  probe
  misc_feature (1)..(25): SEQ ID NO: 1457; WAN024DCL_at; Start 90; Stop 114
taagaaagagtcagaaatccagcaa

SEQ ID NO: 152492 - DNA, 25 bp, Artificial
  probe
  misc_feature (1)..(25): SEQ ID NO: 1457; WAN024DCL_at; Start 259; Stop 283
ctagtagaggagcttaaagcaatcc

SEQ ID NO: 152493 - DNA, 25 bp, Artificial
  probe
  misc_feature (1)..(25): SEQ ID NO: 1457; WAN024DCL_at; Start 254; Stop 278
ctaaactagtagaggagcttaaagc

SEQ ID NO: 152494 - DNA, 25 bp, Artificial
  probe
  misc_feature (1)..(25): SEQ ID NO: 1457; WAN024DCL_at; Start 232; Stop 256
aatggctcagcagagacagaaacta

SEQ ID NO: 152495 - DNA, 25 bp, Artificial
  probe
  misc_feature (1)..(25): SEQ ID NO: 1457; WAN024DCL_at; Start 56; Stop 80
tcctaggcgtgattgccttctggct

SEQ ID NO: 152496 - DNA, 25 bp, Artificial
  probe
  misc_feature (1)..(25): SEQ ID NO: 1457; WAN024DCL_at; Start 151; Stop 175
gatgcagaaaaagcggataaaaaag

SEQ ID NO: 152497 - DNA, 25 bp, Artificial
  probe
  misc_feature (1)..(25): SEQ ID NO: 1457; WAN024DCL_at; Start 39; Stop 63
ggtcagtctacttgccctcctaggc

SEQ ID NO: 152498 - DNA, 25 bp, Artificial
  probe
  misc_feature (1)..(25): SEQ ID NO: 1457; WAN024DCL_at; Start 100; Stop 124
tcagaaatccagcaattaagcacgg

SEQ ID NO: 152499 - DNA, 25 bp, Artificial
  probe
  misc_feature (1)..(25): SEQ ID NO: 1457; WAN024DCL_at; Start 36; Stop 60
tgtggtcagtctacttgccctccta

SEQ ID NO: 152500 - DNA, 25 bp, Artificial
  probe
  misc_feature (1)..(25): SEQ ID NO: 1457; WAN024DCL_at; Start 210; Stop 234
ccttgatttcgtgaaagaagaaaat

SEQ ID NO: 152501 - DNA, 25 bp, Artificial
  probe
  misc_feature (1)..(25): SEQ ID NO: 1457; WAN024DCL_at; Start 143; Stop 167
gacagctagatgcagaaaaagcgga

SEQ ID NO: 152502 - DNA, 25 bp, Artificial
  probe
  misc_feature (1)..(25): SEQ ID NO: 1457; WAN024DCL_at; Start 103; Stop 127
gaaatccagcaattaagcacggaat

SEQ ID NO: 152503 - DNA, 25 bp, Artificial
  probe
  misc_feature (1)..(25): SEQ ID NO: 1457; WAN024DCL_at; Start 274; Stop 298
aaagcaatccttgacaaactcaagt

SEQ ID NO: 152504 - DNA, 25 bp, Artificial
  probe
  misc_feature (1)..(25): SEQ ID NO: 1457; WAN024DCL_at; Start 196; Stop 220
cttctccaagaaacccttgatttcg

SEQ ID NO: 152505 - DNA, 25 bp, Artificial
  probe
  misc_feature (1)..(25): SEQ ID NO: 1457; WAN024DCL_at; Start 140; Stop 164
taggacagctagatgcagaaaaagc

SEQ ID NO: 152506 - DNA, 25 bp, Artificial
  probe
  misc_feature (1)..(25): SEQ ID NO: 1457; WAN024DCL_at; Start 147; Stop 171
gctagatgcagaaaaagcggataaa

SEQ ID NO: 152507 - DNA, 25 bp, Artificial
  probe
  misc_feature (1)..(25): SEQ ID NO: 1457; WAN024DCL_at; Start 202; Stop 226
caagaaacccttgatttcgtgaaag

SEQ ID NO: 152508 - DNA, 25 bp, Artificial
  probe
  misc_feature (1)..(25): SEQ ID NO: 1457; WAN024DCL_at; Start 229; Stop 253
gaaaatggctcagcagagacagaaa

SEQ ID NO: 152509 - DNA, 25 bp, Artificial
  probe
  misc_feature (1)..(25): SEQ ID NO: 1457; WAN024DCL_at; Start 53; Stop 77
ccctcctaggcgtgattgccttctg

SEQ ID NO: 152510 - DNA, 25 bp, Artificial
  probe
  misc_feature (1)..(25): SEQ ID NO: 1457; WAN024DCL_at; Start 47; Stop 71
tacttgccctcctaggcgtgattgc

SEQ ID NO: 152511 - DNA, 25 bp, Artificial
  probe
  misc_feature (1)..(25): SEQ ID NO: 1457; WAN024DCL_at; Start 238; Stop 262
tcagcagagacagaaactaaactag

SEQ ID NO: 152512 - DNA, 25 bp, Artificial
  probe
  misc_feature (1)..(25): SEQ ID NO: 5241; WAN024DCM_at; Start 1; Stop 25
ttgattagaacagagacagtagagg

SEQ ID NO: 152513 - DNA, 25 bp, Artificial
  probe
  misc_feature (1)..(25): SEQ ID NO: 5241; WAN024DCM_at; Start 238; Stop 262
gctcctccagttgagaaagtcttag

SEQ ID NO: 152514 - DNA, 25 bp, Artificial
  probe
  misc_feature (1)..(25): SEQ ID NO: 5241; WAN024DCM_at; Start 530; Stop 554
tcttagagtcggatcaagctaggga

SEQ ID NO: 152515 - DNA, 25 bp, Artificial
  probe
  misc_feature (1)..(25): SEQ ID NO: 5241; WAN024DCM_at; Start 227; Stop 251
ccttaaaagatgctcctccagttga

SEQ ID NO: 152516 - DNA, 25 bp, Artificial
  probe
  misc_feature (1)..(25): SEQ ID NO: 5241; WAN024DCM_at; Start 469; Stop 493
caaggtcagtctcataatagtttag

SEQ ID NO: 152517 - DNA, 25 bp, Artificial
  probe
  misc_feature (1)..(25): SEQ ID NO: 5241; WAN024DCM_at; Start 39; Stop 63
ggaacgattagaagattacattgct

SEQ ID NO: 152518 - DNA, 25 bp, Artificial
  probe
  misc_feature (1)..(25): SEQ ID NO: 5241; WAN024DCM_at; Start 189; Stop 213
aagctttatcaatggtttgaccggg

SEQ ID NO: 152519 - DNA, 25 bp, Artificial
  probe
  misc_feature (1)..(25): SEQ ID NO: 5241; WAN024DCM_at; Start 518; Stop 542
tttacgaatccttcttagagtcgga

SEQ ID NO: 152520 - DNA, 25 bp, Artificial
  probe
  misc_feature (1)..(25): SEQ ID NO: 5241; WAN024DCM_at; Start 131; Stop 155
gagatggtcgggaaatcgatgccta

SEQ ID NO: 152521 - DNA, 25 bp, Artificial
  probe
  misc_feature (1)..(25): SEQ ID NO: 5241; WAN024DCM_at; Start 405; Stop 429
gagttcagatttacatggtattgcc

SEQ ID NO: 152522 - DNA, 25 bp, Artificial
  probe
  misc_feature (1)..(25): SEQ ID NO: 5241; WAN024DCM_at; Start 427; Stop 451
gccaatctcaaattgcaaactgttg

SEQ ID NO: 152523 - DNA, 25 bp, Artificial
  probe
  misc_feature (1)..(25): SEQ ID NO: 5241; WAN024DCM_at; Start 504; Stop 528
gatgacggcgcgtgtttacgaatcc

SEQ ID NO: 152524 - DNA, 25 bp, Artificial
  probe
  misc_feature (1)..(25): SEQ ID NO: 5241; WAN024DCM_at; Start 455; Stop 479
catttcttggatttcaaggtcagtc

SEQ ID NO: 152525 - DNA, 25 bp, Artificial
  probe
  misc_feature (1)..(25): SEQ ID NO: 5241; WAN024DCM_at; Start 204; Stop 228
tttgaccgggattacagctgagacc

SEQ ID NO: 152526 - DNA, 25 bp, Artificial
  probe
  misc_feature (1)..(25): SEQ ID NO: 5241; WAN024DCM_at; Start 101; Stop 125
acttgattcaagtatcggcagtgcg

SEQ ID NO: 152527 - DNA, 25 bp, Artificial
  probe
  misc_feature (1)..(25): SEQ ID NO: 5241; WAN024DCM_at; Start 557; Stop 581
tgttagagacagaaagtagcttatc

SEQ ID NO: 152528 - DNA, 25 bp, Artificial
  probe
  misc_feature (1)..(25): SEQ ID NO: 5241; WAN024DCM_at; Start 486; Stop 510
tagtttagaggatgctcggatgacg

SEQ ID NO: 152529 - DNA, 25 bp, Artificial
  probe
  misc_feature (1)..(25): SEQ ID NO: 5241; WAN024DCM_at; Start 441; Stop 465
gcaaactgttgcctcatttcttgga

SEQ ID NO: 152530 - DNA, 25 bp, Artificial
  probe
  misc_feature (1)..(25): SEQ ID NO: 5241; WAN024DCM_at; Start 357; Stop 381
tagccaacagtacaaggtggatttg

SEQ ID NO: 152531 - DNA, 25 bp, Artificial
  probe
  misc_feature (1)..(25): SEQ ID NO: 5241; WAN024DCM_at; Start 412; Stop 436
gatttacatggtattgccaatctca

SEQ ID NO: 152532 - DNA, 25 bp, Artificial
  probe
  misc_feature (1)..(25): SEQ ID NO: 5241; WAN024DCM_at; Start 369; Stop 393
caaggtggatttgtatgatgaagct

SEQ ID NO: 152533 - DNA, 25 bp, Artificial
  probe
  misc_feature (1)..(25): SEQ ID NO: 5241; WAN024DCM_at; Start 269; Stop 293
tccaagagtttgtgggttctttgct

SEQ ID NO: 152534 - DNA, 25 bp, Artificial
  probe
  misc_feature (1)..(25): SEQ ID NO: 5241; WAN024DCM_at; Start 575; Stop 599
gcttatcaaacaatccttttggtgg

SEQ ID NO: 152535 - DNA, 25 bp, Artificial
  probe
  misc_feature (1)..(25): SEQ ID NO: 5241; WAN024DCM_at; Start 70; Stop 94
ttagaatttaatcagcacgaaggac

SEQ ID NO: 152536 - DNA, 25 bp, Artificial
  probe
  misc_feature (1)..(25): SEQ ID NO: 5241; WAN024DCM_at; Start 25; Stop 49
gagaggtacagaatggaacgattag

SEQ ID NO: 152537 - DNA, 25 bp, Artificial
  probe
  misc_feature (1)..(25): SEQ ID NO: 5241; WAN024DCM_at; Start 252; Stop 276
gaaagtcttagaagaattccaagag

SEQ ID NO: 152538 - DNA, 25 bp, Artificial
  probe
  misc_feature (1)..(25): SEQ ID NO: 5241; WAN024DCM_at; Start 215; Stop 239
ttacagctgagaccttaaaagatgc

SEQ ID NO: 152539 - DNA, 25 bp, Artificial
  probe
  misc_feature (1)..(25): SEQ ID NO: 5241; WAN024DCM_at; Start 154; Stop 178
tatgattcctatgttcataccagcg

SEQ ID NO: 152540 - DNA, 25 bp, Artificial
  probe
  misc_feature (1)..(25): SEQ ID NO: 5241; WAN024DCM_at; Start 345; Stop 369
tggtttagactatagccaacagtac

SEQ ID NO: 152541 - DNA, 25 bp, Artificial
  probe
  misc_feature (1)..(25): SEQ ID NO: 5241; WAN024DCM_at; Start 10; Stop 34
acagagacagtagaggagaggtaca

SEQ ID NO: 152542 - DNA, 25 bp, Artificial
  probe
  misc_feature (1)..(25): SEQ ID NO: 5241; WAN024DCM_at; Start 544; Stop 568
caagctagggaattgttagagacag

SEQ ID NO: 152543 - DNA, 25 bp, Artificial
  probe
  misc_feature (1)..(25): SEQ ID NO: 5241; WAN024DCM_at; Start 142; Stop 166
gaaatcgatgcctatgattcctatg

SEQ ID NO: 152544 - DNA, 25 bp, Artificial
  probe
  misc_feature (1)..(25): SEQ ID NO: 5241; WAN024DCM_at; Start 301; Stop 325
ggctacaatgctgctaaaagtgatt

SEQ ID NO: 152545 - DNA, 25 bp, Artificial
  probe
  misc_feature (1)..(25): SEQ ID NO: 5241; WAN024DCM_at; Start 115; Stop 139
tcggcagtgcgttttagagatggtc

SEQ ID NO: 152546 - DNA, 25 bp, Artificial
  probe
  misc_feature (1)..(25): SEQ ID NO: 1621; WAN024DCN_at; Start 12; Stop 36
aatgaccgtcagtgagattgcagag

SEQ ID NO: 152547 - DNA, 25 bp, Artificial
  probe
  misc_feature (1)..(25): SEQ ID NO: 1621; WAN024DCN_at; Start 316; Stop 340
cagatgcgtatcaaagaccgtcaga

SEQ ID NO: 152548 - DNA, 25 bp, Artificial
  probe
  misc_feature (1)..(25): SEQ ID NO: 1621; WAN024DCN_at; Start 55; Stop 79
caagcaatcaataaccgtgtcaaag

SEQ ID NO: 152549 - DNA, 25 bp, Artificial
  probe
  misc_feature (1)..(25): SEQ ID NO: 1621; WAN024DCN_at; Start 79; Stop 103
gaattaccagaagaagacacagata

SEQ ID NO: 152550 - DNA, 25 bp, Artificial
  probe
  misc_feature (1)..(25): SEQ ID NO: 1621; WAN024DCN_at; Start 376; Stop 400
caattgacccttcaagccatgaagg

SEQ ID NO: 152551 - DNA, 25 bp, Artificial
  probe
  misc_feature (1)..(25): SEQ ID NO: 1621; WAN024DCN_at; Start 346; Stop 370
gagaaagacaaacaattagatcagc

SEQ ID NO: 152552 - DNA, 25 bp, Artificial
  probe
  misc_feature (1)..(25): SEQ ID NO: 1621; WAN024DCN_at; Start 388; Stop 412
caagccatgaaggatcaagaaaatc

SEQ ID NO: 152553 - DNA, 25 bp, Artificial
  probe
  misc_feature (1)..(25): SEQ ID NO: 1621; WAN024DCN_at; Start 49; Stop 73
tctcgccaagcaatcaataaccgtg

SEQ ID NO: 152554 - DNA, 25 bp, Artificial
  probe
  misc_feature (1)..(25): SEQ ID NO: 1621; WAN024DCN_at; Start 301; Stop 325
tcagaaaaagacgagcagatgcgta

SEQ ID NO: 152555 - DNA, 25 bp, Artificial
  probe
  misc_feature (1)..(25): SEQ ID NO: 1621; WAN024DCN_at; Start 280; Stop 304
aaagccaaggatcgtcagttatcag

SEQ ID NO: 152556 - DNA, 25 bp, Artificial
  probe
  misc_feature (1)..(25): SEQ ID NO: 1621; WAN024DCN_at; Start 66; Stop 90
taaccgtgtcaaagaattaccagaa

SEQ ID NO: 152557 - DNA, 25 bp, Artificial
  probe
  misc_feature (1)..(25): SEQ ID NO: 1621; WAN024DCN_at; Start 190; Stop 214
cctgtcagtgaagatgtcaaacaac

SEQ ID NO: 152558 - DNA, 25 bp, Artificial
  probe
  misc_feature (1)..(25): SEQ ID NO: 1621; WAN024DCN_at; Start 423; Stop 447
gctggaccaagcaaaagaagaagtc

SEQ ID NO: 152559 - DNA, 25 bp, Artificial
  probe
  misc_feature (1)..(25): SEQ ID NO: 1621; WAN024DCN_at; Start 2; Stop 26
tgagtattgaaatgaccgtcagtga

SEQ ID NO: 152560 - DNA, 25 bp, Artificial
  probe
  misc_feature (1)..(25): SEQ ID NO: 1621; WAN024DCN_at; Start 251; Stop 275
cagaaattcttcgtctttatgaaca

SEQ ID NO: 152561 - DNA, 25 bp, Artificial
  probe
  misc_feature (1)..(25): SEQ ID NO: 1621; WAN024DCN_at; Start 139; Stop 163
ggcttgattaagctagaagaaatct

SEQ ID NO: 152562 - DNA, 25 bp, Artificial
  probe
  misc_feature (1)..(25): SEQ ID NO: 1621; WAN024DCN_at; Start 93; Stop 117
agacacagataaaaatgacaaaggg

SEQ ID NO: 152563 - DNA, 25 bp, Artificial
  probe
  misc_feature (1)..(25): SEQ ID NO: 1621; WAN024DCN_at; Start 433; Stop 457
gcaaaagaagaagtccaatccacta

SEQ ID NO: 152564 - DNA, 25 bp, Artificial
  probe
  misc_feature (1)..(25): SEQ ID NO: 1621; WAN024DCN_at; Start 217; Stop 241
gaactgatggagattctagtggatg

SEQ ID NO: 152565 - DNA, 25 bp, Artificial
  probe
  misc_feature (1)..(25): SEQ ID NO: 1621; WAN024DCN_at; Start 118; Stop 142
gtaacagttgttaccagaagtggct

SEQ ID NO: 152566 - DNA, 25 bp, Artificial
  probe
  misc_feature (1)..(25): SEQ ID NO: 1621; WAN024DCN_at; Start 270; Stop 294
tgaacaattaaaagccaaggatcgt

SEQ ID NO: 152567 - DNA, 25 bp, Artificial
  probe
  misc_feature (1)..(25): SEQ ID NO: 1621; WAN024DCN_at; Start 335; Stop 359
gtcagattgctgagaaagacaaaca

SEQ ID NO: 152568 - DNA, 25 bp, Artificial
  probe
  misc_feature (1)..(25): SEQ ID NO: 1621; WAN024DCN_at; Start 232; Stop 256
ctagtggatgagaagaatgcagaaa

SEQ ID NO: 152569 - DNA, 25 bp, Artificial
  probe
  misc_feature (1)..(25): SEQ ID NO: 1621; WAN024DCN_at; Start 414; Stop 438
taagctagagctggaccaagcaaaa

SEQ ID NO: 152570 - DNA, 25 bp, Artificial
  probe
  misc_feature (1)..(25): SEQ ID NO: 1621; WAN024DCN_at; Start 403; Stop 427
caagaaaatcttaagctagagctgg

SEQ ID NO: 152571 - DNA, 25 bp, Artificial
  probe
  misc_feature (1)..(25): SEQ ID NO: 1621; WAN024DCN_at; Start 472; Stop 496
gctcgtttatttggaggataactaa

SEQ ID NO: 152572 - DNA, 25 bp, Artificial
  probe
  misc_feature (1)..(25): SEQ ID NO: 1621; WAN024DCN_at; Start 324; Stop 348
tatcaaagaccgtcagattgctgag

SEQ ID NO: 152573 - DNA, 25 bp, Artificial
  probe
  misc_feature (1)..(25): SEQ ID NO: 1621; WAN024DCN_at; Start 131; Stop 155
ccagaagtggcttgattaagctaga

SEQ ID NO: 152574 - DNA, 25 bp, Artificial
  probe
  misc_feature (1)..(25): SEQ ID NO: 1621; WAN024DCN_at; Start 295; Stop 319
cagttatcagaaaaagacgagcaga

SEQ ID NO: 152575 - DNA, 25 bp, Artificial
  probe
  misc_feature (1)..(25): SEQ ID NO: 1621; WAN024DCN_at; Start 34; Stop 58
gaggtcttaggattatctcgccaag

SEQ ID NO: 152576 - DNA, 25 bp, Artificial
  probe
  misc_feature (1)..(25): SEQ ID NO: 1621; WAN024DCN_at; Start 361; Stop 385
ttagatcagcaacaacaattgaccc

SEQ ID NO: 152577 - DNA, 25 bp, Artificial
  probe
  misc_feature (1)..(25): SEQ ID NO: 1621; WAN024DCN_at; Start 211; Stop 235
caacgtgaactgatggagattctag

SEQ ID NO: 152578 - DNA, 25 bp, Artificial
  probe
  misc_feature (1)..(25): SEQ ID NO: 1621; WAN024DCN_at; Start 202; Stop 226
gatgtcaaacaacgtgaactgatgg

SEQ ID NO: 152579 - DNA, 25 bp, Artificial
  probe
  misc_feature (1)..(25): SEQ ID NO: 1621; WAN024DCN_at; Start 21; Stop 45
cagtgagattgcagaggtcttagga

SEQ ID NO: 152580 - DNA, 25 bp, Artificial
  probe
  misc_feature (1)..(25): SEQ ID NO: 1659; WAN024DCO_at; Start 88; Stop 112
gggaatacctatcatacaggaacca

SEQ ID NO: 152581 - DNA, 25 bp, Artificial
  probe
  misc_feature (1)..(25): SEQ ID NO: 1659; WAN024DCO_at; Start 478; Stop 502
gcgattaagtcccatttcccagaag

SEQ ID NO: 152582 - DNA, 25 bp, Artificial
  probe
  misc_feature (1)..(25): SEQ ID NO: 1659; WAN024DCO_at; Start 31; Stop 55
gaagaactggcttatctggtccagc

SEQ ID NO: 152583 - DNA, 25 bp, Artificial
  probe
  misc_feature (1)..(25): SEQ ID NO: 1659; WAN024DCO_at; Start 643; Stop 667
ggacgtcgctctgcccaagtcttgt

SEQ ID NO: 152584 - DNA, 25 bp, Artificial
  probe
  misc_feature (1)..(25): SEQ ID NO: 1659; WAN024DCO_at; Start 185; Stop 209
tggctgatcatttccaggtggatgc

SEQ ID NO: 152585 - DNA, 25 bp, Artificial
  probe
  misc_feature (1)..(25): SEQ ID NO: 1659; WAN024DCO_at; Start 170; Stop 194
tgagtgtggcgattttggctgatca

SEQ ID NO: 152586 - DNA, 25 bp, Artificial
  probe
  misc_feature (1)..(25): SEQ ID NO: 1659; WAN024DCO_at; Start 468; Stop 492
caagatagaagcgattaagtcccat

SEQ ID NO: 152587 - DNA, 25 bp, Artificial
  probe
  misc_feature (1)..(25): SEQ ID NO: 1659; WAN024DCO_at; Start 199; Stop 223
caggtggatgcccttattaatacgg

SEQ ID NO: 152588 - DNA, 25 bp, Artificial
  probe
  misc_feature (1)..(25): SEQ ID NO: 1659; WAN024DCO_at; Start 144; Stop 168
tggaattggtaaggtcatgtctgct

SEQ ID NO: 152589 - DNA, 25 bp, Artificial
  probe
  misc_feature (1)..(25): SEQ ID NO: 1659; WAN024DCO_at; Start 301; Stop 325
gatgtcacagcttttggctatgctt

SEQ ID NO: 152590 - DNA, 25 bp, Artificial
  probe
  misc_feature (1)..(25): SEQ ID NO: 1659; WAN024DCO_at; Start 124; Stop 148
gaagtcgttcttgtagaaagtggaa

SEQ ID NO: 152591 - DNA, 25 bp, Artificial
  probe
  misc_feature (1)..(25): SEQ ID NO: 1659; WAN024DCO_at; Start 426; Stop 450
tggtttgattgctacaggagatagt

SEQ ID NO: 152592 - DNA, 25 bp, Artificial
  probe
  misc_feature (1)..(25): SEQ ID NO: 1659; WAN024DCO_at; Start 8; Stop 32
taggaattattgctgctatgccaga

SEQ ID NO: 152593 - DNA, 25 bp, Artificial
  probe
  misc_feature (1)..(25): SEQ ID NO: 1659; WAN024DCO_at; Start 274; Stop 298
gctgacaaattagcctatcatgacg

SEQ ID NO: 152594 - DNA, 25 bp, Artificial
  probe
  misc_feature (1)..(25): SEQ ID NO: 1659; WAN024DCO_at; Start 106; Stop 130
ggaaccattgcttctcatgaagtcg

SEQ ID NO: 152595 - DNA, 25 bp, Artificial
  probe
  misc_feature (1)..(25): SEQ ID NO: 1659; WAN024DCO_at; Start 524; Stop 548
gggcagctattgctcaagcagcgca

SEQ ID NO: 152596 - DNA, 25 bp, Artificial
  probe
  misc_feature (1)..(25): SEQ ID NO: 1659; WAN024DCO_at; Start 440; Stop 464
caggagatagttttgttgcaggaaa

SEQ ID NO: 152597 - DNA, 25 bp, Artificial
  probe
  misc_feature (1)..(25): SEQ ID NO: 1659; WAN024DCO_at; Start 578; Stop 602
gagctatgagtgacaatgccaacca

SEQ ID NO: 152598 - DNA, 25 bp, Artificial
  probe
  misc_feature (1)..(25): SEQ ID NO: 1659; WAN024DCO_at; Start 595; Stop 619
gccaaccatgaagcaaacatctttt

SEQ ID NO: 152599 - DNA, 25 bp, Artificial
  probe
  misc_feature (1)..(25): SEQ ID NO: 1659; WAN024DCO_at; Start 366; Stop 390
caaaacctttgttgctcaaatccaa

SEQ ID NO: 152600 - DNA, 25 bp, Artificial
  probe
  misc_feature (1)..(25): SEQ ID NO: 1659; WAN024DCO_at; Start 585; Stop 609
gagtgacaatgccaaccatgaagca

SEQ ID NO: 152601 - DNA, 25 bp, Artificial
  probe
  misc_feature (1)..(25): SEQ ID NO: 1659; WAN024DCO_at; Start 158; Stop 182
tcatgtctgctatgagtgtggcgat

SEQ ID NO: 152602 - DNA, 25 bp, Artificial
  probe
  misc_feature (1)..(25): SEQ ID NO: 1659; WAN024DCO_at; Start 456; Stop 480
tgcaggaaatgacaagatagaagcg

SEQ ID NO: 152603 - DNA, 25 bp, Artificial
  probe
  misc_feature (1)..(25): SEQ ID NO: 1659; WAN024DCO_at; Start 352; Stop 376
tatttcgaatcagacaaaacctttg

SEQ ID NO: 152604 - DNA, 25 bp, Artificial
  probe
  misc_feature (1)..(25): SEQ ID NO: 1659; WAN024DCO_at; Start 208; Stop 232
gcccttattaatacgggttcagctg

SEQ ID NO: 152605 - DNA, 25 bp, Artificial
  probe
  misc_feature (1)..(25): SEQ ID NO: 1659; WAN024DCO_at; Start 18; Stop 42
tgctgctatgccagaagaactggct

SEQ ID NO: 152606 - DNA, 25 bp, Artificial
  probe
  misc_feature (1)..(25): SEQ ID NO: 1659; WAN024DCO_at; Start 495; Stop 519
cccagaagttttagccgtggagatg

SEQ ID NO: 152607 - DNA, 25 bp, Artificial
  probe
  misc_feature (1)..(25): SEQ ID NO: 1659; WAN024DCO_at; Start 316; Stop 340
ggctatgcttatggacaaatggcgc

SEQ ID NO: 152608 - DNA, 25 bp, Artificial
  probe
  misc_feature (1)..(25): SEQ ID NO: 1659; WAN024DCO_at; Start 234; Stop 258
ggcagtagcagaaggtatcgctgtt

SEQ ID NO: 152609 - DNA, 25 bp, Artificial
  probe
  misc_feature (1)..(25): SEQ ID NO: 1659; WAN024DCO_at; Start 40; Stop 64
gcttatctggtccagcatttagata

SEQ ID NO: 152610 - DNA, 25 bp, Artificial
  probe
  misc_feature (1)..(25): SEQ ID NO: 1659; WAN024DCO_at; Start 343; Stop 367
caaccgctttatttcgaatcagaca

SEQ ID NO: 152611 - DNA, 25 bp, Artificial
  probe
  misc_feature (1)..(25): SEQ ID NO: 1659; WAN024DCO_at; Start 328; Stop 352
ggacaaatggcgcaacaaccgcttt

SEQ ID NO: 152612 - DNA, 25 bp, Artificial
  probe
  misc_feature (1)..(25): SEQ ID NO: 1659; WAN024DCO_at; Start 632; Stop 656
ttatcgaagctggacgtcgctctgc

SEQ ID NO: 152613 - DNA, 25 bp, Artificial
  probe
  misc_feature (1)..(25): SEQ ID NO: 1659; WAN024DCO_at; Start 264; Stop 288
tgtcgtgattgctgacaaattagcc

SEQ ID NO: 152614 - DNA, 25 bp, Artificial
  probe
  misc_feature (1)..(25): SEQ ID NO: 5556; WAN024DCP_at; Start 246; Stop 270
tgaaaataccaagagaaatgtcttc

SEQ ID NO: 152615 - DNA, 25 bp, Artificial
  probe
  misc_feature (1)..(25): SEQ ID NO: 5556; WAN024DCP_at; Start 151; Stop 175
tcccgttttggttatgccaatccta

SEQ ID NO: 152616 - DNA, 25 bp, Artificial
  probe
  misc_feature (1)..(25): SEQ ID NO: 5556; WAN024DCP_at; Start 161; Stop 185
gttatgccaatcctaaggatcatgg

SEQ ID NO: 152617 - DNA, 25 bp, Artificial
  probe
  misc_feature (1)..(25): SEQ ID NO: 5556; WAN024DCP_at; Start 24; Stop 48
ggaggtcagtatgggtaaatcttta

SEQ ID NO: 152618 - DNA, 25 bp, Artificial
  probe
  misc_feature (1)..(25): SEQ ID NO: 5556; WAN024DCP_at; Start 168; Stop 192
caatcctaaggatcatggttttagc

SEQ ID NO: 152619 - DNA, 25 bp, Artificial
  probe
  misc_feature (1)..(25): SEQ ID NO: 5556; WAN024DCP_at; Start 30; Stop 54
cagtatgggtaaatctttattaacg

SEQ ID NO: 152620 - DNA, 25 bp, Artificial
  probe
  misc_feature (1)..(25): SEQ ID NO: 5556; WAN024DCP_at; Start 260; Stop 284
gaaatgtcttcaattctaagttgaa

SEQ ID NO: 152621 - DNA, 25 bp, Artificial
  probe
  misc_feature (1)..(25): SEQ ID NO: 5556; WAN024DCP_at; Start 63; Stop 87
gattgaaagagctaatagaggcgaa

SEQ ID NO: 152622 - DNA, 25 bp, Artificial
  probe
  misc_feature (1)..(25): SEQ ID NO: 5556; WAN024DCP_at; Start 7; Stop 31
gttgcagaaaaaatagaggaggtca

SEQ ID NO: 152623 - DNA, 25 bp, Artificial
  probe
  misc_feature (1)..(25): SEQ ID NO: 5556; WAN024DCP_at; Start 60; Stop 84
aatgattgaaagagctaatagaggc

SEQ ID NO: 152624 - DNA, 25 bp, Artificial
  probe
  misc_feature (1)..(25): SEQ ID NO: 5556; WAN024DCP_at; Start 310; Stop 334
ctcttgattttgcttgttttagcaa

SEQ ID NO: 152625 - DNA, 25 bp, Artificial
  probe
  misc_feature (1)..(25): SEQ ID NO: 5556; WAN024DCP_at; Start 177; Stop 201
ggatcatggttttagccaggaaacc

SEQ ID NO: 152626 - DNA, 25 bp, Artificial
  probe
  misc_feature (1)..(25): SEQ ID NO: 5556; WAN024DCP_at; Start 218; Stop 242
aaccatctattcataaaagccgtcg

SEQ ID NO: 152627 - DNA, 25 bp, Artificial
  probe
  misc_feature (1)..(25): SEQ ID NO: 5556; WAN024DCP_at; Start 97; Stop 121
ggtcctcctttgctagatgataatg

SEQ ID NO: 152628 - DNA, 25 bp, Artificial
  probe
  misc_feature (1)..(25): SEQ ID NO: 5556; WAN024DCP_at; Start 172; Stop 196
cctaaggatcatggttttagccagg

SEQ ID NO: 152629 - DNA, 25 bp, Artificial
  probe
  misc_feature (1)..(25): SEQ ID NO: 5556; WAN024DCP_at; Start 35; Stop 59
tgggtaaatctttattaacggatga

SEQ ID NO: 152630 - DNA, 25 bp, Artificial
  probe
  misc_feature (1)..(25): SEQ ID NO: 5556; WAN024DCP_at; Start 254; Stop 278
ccaagagaaatgtcttcaattctaa

SEQ ID NO: 152631 - DNA, 25 bp, Artificial
  probe
  misc_feature (1)..(25): SEQ ID NO: 5556; WAN024DCP_at; Start 10; Stop 34
gcagaaaaaatagaggaggtcagta

SEQ ID NO: 152632 - DNA, 25 bp, Artificial
  probe
  misc_feature (1)..(25): SEQ ID NO: 5556; WAN024DCP_at; Start 208; Stop 232
attcaggtcgaaccatctattcata

SEQ ID NO: 152633 - DNA, 25 bp, Artificial
  probe
  misc_feature (1)..(25): SEQ ID NO: 5556; WAN024DCP_at; Start 101; Stop 125
ctcctttgctagatgataatgagga

SEQ ID NO: 152634 - DNA, 25 bp, Artificial
  probe
  misc_feature (1)..(25): SEQ ID NO: 5556; WAN024DCP_at; Start 95; Stop 119
caggtcctcctttgctagatgataa

SEQ ID NO: 152635 - DNA, 25 bp, Artificial
  probe
  misc_feature (1)..(25): SEQ ID NO: 5556; WAN024DCP_at; Start 53; Stop 77
cggatgaaatgattgaaagagctaa

SEQ ID NO: 152636 - DNA, 25 bp, Artificial
  probe
  misc_feature (1)..(25): SEQ ID NO: 5556; WAN024DCP_at; Start 89; Stop 113
aaatttcaggtcctcctttgctaga

SEQ ID NO: 152637 - DNA, 25 bp, Artificial
  probe
  misc_feature (1)..(25): SEQ ID NO: 5556; WAN024DCP_at; Start 66; Stop 90
tgaaagagctaatagaggcgaaaaa

SEQ ID NO: 152638 - DNA, 25 bp, Artificial
  probe
  misc_feature (1)..(25): SEQ ID NO: 5556; WAN024DCP_at; Start 329; Stop 353
tagcaatgaaacttttgtaactaat

SEQ ID NO: 152639 - DNA, 25 bp, Artificial
  probe
  misc_feature (1)..(25): SEQ ID NO: 5556; WAN024DCP_at; Start 158; Stop 182
ttggttatgccaatcctaaggatca

SEQ ID NO: 152640 - DNA, 25 bp, Artificial
  probe
  misc_feature (1)..(25): SEQ ID NO: 5556; WAN024DCP_at; Start 50; Stop 74
taacggatgaaatgattgaaagagc

SEQ ID NO: 152641 - DNA, 25 bp, Artificial
  probe
  misc_feature (1)..(25): SEQ ID NO: 5556; WAN024DCP_at; Start 174; Stop 198
taaggatcatggttttagccaggaa

SEQ ID NO: 152642 - DNA, 25 bp, Artificial
  probe
  misc_feature (1)..(25): SEQ ID NO: 5556; WAN024DCP_at; Start 213; Stop 237
ggtcgaaccatctattcataaaagc

SEQ ID NO: 152643 - DNA, 25 bp, Artificial
  probe
  misc_feature (1)..(25): SEQ ID NO: 5556; WAN024DCP_at; Start 321; Stop 345
gcttgttttagcaatgaaacttttg

SEQ ID NO: 152644 - DNA, 25 bp, Artificial
  probe
  misc_feature (1)..(25): SEQ ID NO: 5556; WAN024DCP_at; Start 181; Stop 205
catggttttagccaggaaaccttga

SEQ ID NO: 152645 - DNA, 25 bp, Artificial
  probe
  misc_feature (1)..(25): SEQ ID NO: 5556; WAN024DCP_at; Start 20; Stop 44
tagaggaggtcagtatgggtaaatc

SEQ ID NO: 152646 - DNA, 25 bp, Artificial
  probe
  misc_feature (1)..(25): SEQ ID NO: 5556; WAN024DCP_at; Start 73; Stop 97
gctaatagaggcgaaaaaatttcag

SEQ ID NO: 152647 - DNA, 25 bp, Artificial
  probe
  misc_feature (1)..(25): SEQ ID NO: 5556; WAN024DCP_at; Start 145; Stop 169
tcttcttcccgttttggttatgcca

SEQ ID NO: 152648 - DNA, 25 bp, Artificial
  probe
  misc_feature (1)..(25): SEQ ID NO: 1496; WAN024DCQ_at; Start 547; Stop 571
ggcatctacgttggtgtctacttca

SEQ ID NO: 152649 - DNA, 25 bp, Artificial
  probe
  misc_feature (1)..(25): SEQ ID NO: 1496; WAN024DCQ_at; Start 231; Stop 255
tgctattgttcgtgttcacagtggt

SEQ ID NO: 152650 - DNA, 25 bp, Artificial
  probe
  misc_feature (1)..(25): SEQ ID NO: 1496; WAN024DCQ_at; Start 84; Stop 108
tgacagccaatcgtttaaaacaaaa

SEQ ID NO: 152651 - DNA, 25 bp, Artificial
  probe
  misc_feature (1)..(25): SEQ ID NO: 1496; WAN024DCQ_at; Start 159; Stop 183
gattattgacctctctggctggcag

SEQ ID NO: 152652 - DNA, 25 bp, Artificial
  probe
  misc_feature (1)..(25): SEQ ID NO: 1496; WAN024DCQ_at; Start 187; Stop 211
cctgaggaaatcaactacgatgccc

SEQ ID NO: 152653 - DNA, 25 bp, Artificial
  probe
  misc_feature (1)..(25): SEQ ID NO: 1496; WAN024DCQ_at; Start 205; Stop 229
gatgccctctcacaaaatatttcag

SEQ ID NO: 152654 - DNA, 25 bp, Artificial
  probe
  misc_feature (1)..(25): SEQ ID NO: 1496; WAN024DCQ_at; Start 318; Stop 342
tcatatcactgaacttcaaaagcgg

SEQ ID NO: 152655 - DNA, 25 bp, Artificial
  probe
  misc_feature (1)..(25): SEQ ID NO: 1496; WAN024DCQ_at; Start 406; Stop 430
gccgaagttttctacaatgctgcct

SEQ ID NO: 152656 - DNA, 25 bp, Artificial
  probe
  misc_feature (1)..(25): SEQ ID NO: 1496; WAN024DCQ_at; Start 681; Stop 705
tattcaccaatacacatctaaagga

SEQ ID NO: 152657 - DNA, 25 bp, Artificial
  probe
  misc_feature (1)..(25): SEQ ID NO: 1496; WAN024DCQ_at; Start 364; Stop 388
gcttatgtagctggaaaaagtgtcc

SEQ ID NO: 152658 - DNA, 25 bp, Artificial
  probe
  misc_feature (1)..(25): SEQ ID NO: 1496; WAN024DCQ_at; Start 99; Stop 123
taaaacaaaatccaatatagcacag

SEQ ID NO: 152659 - DNA, 25 bp, Artificial
  probe
  misc_feature (1)..(25): SEQ ID NO: 1496; WAN024DCQ_at; Start 174; Stop 198
tggctggcagcgtcctgaggaaatc

SEQ ID NO: 152660 - DNA, 25 bp, Artificial
  probe
  misc_feature (1)..(25): SEQ ID NO: 1496; WAN024DCQ_at; Start 69; Stop 93
caatcgcccacttaatgacagccaa

SEQ ID NO: 152661 - DNA, 25 bp, Artificial
  probe
  misc_feature (1)..(25): SEQ ID NO: 1496; WAN024DCQ_at; Start 635; Stop 659
actcaggatttttggagagcagtcc

SEQ ID NO: 152662 - DNA, 25 bp, Artificial
  probe
  misc_feature (1)..(25): SEQ ID NO: 1496; WAN024DCQ_at; Start 562; Stop 586
gtctacttcatggaagaacacagta

SEQ ID NO: 152663 - DNA, 25 bp, Artificial
  probe
  misc_feature (1)..(25): SEQ ID NO: 1496; WAN024DCQ_at; Start 333; Stop 357
tcaaaagcggaatgtcccagttgct

SEQ ID NO: 152664 - DNA, 25 bp, Artificial
  probe
  misc_feature (1)..(25): SEQ ID NO: 1496; WAN024DCQ_at; Start 384; Stop 408
tgtccaagaaatggaaaaggctgcc

SEQ ID NO: 152665 - DNA, 25 bp, Artificial
  probe
  misc_feature (1)..(25): SEQ ID NO: 1496; WAN024DCQ_at; Start 477; Stop 501
catgtctaatatgaacgaaggtgtc

SEQ ID NO: 152666 - DNA, 25 bp, Artificial
  probe
  misc_feature (1)..(25): SEQ ID NO: 1496; WAN024DCQ_at; Start 505; Stop 529
aactttcgagcaaaactagcatcac

SEQ ID NO: 152667 - DNA, 25 bp, Artificial
  probe
  misc_feature (1)..(25): SEQ ID NO: 1496; WAN024DCQ_at; Start 145; Stop 169
cacttagacaaaccgattattgacc

SEQ ID NO: 152668 - DNA, 25 bp, Artificial
  probe
  misc_feature (1)..(25): SEQ ID NO: 1496; WAN024DCQ_at; Start 441; Stop 465
ccctagttactattggcttgacgtg

SEQ ID NO: 152669 - DNA, 25 bp, Artificial
  probe
  misc_feature (1)..(25): SEQ ID NO: 1496; WAN024DCQ_at; Start 130; Stop 154
gcacaggctttgaaacacttagaca

SEQ ID NO: 152670 - DNA, 25 bp, Artificial
  probe
  misc_feature (1)..(25): SEQ ID NO: 1496; WAN024DCQ_at; Start 577; Stop 601
gaacacagtattgatacaggcaagt

SEQ ID NO: 152671 - DNA, 25 bp, Artificial
  probe
  misc_feature (1)..(25): SEQ ID NO: 1496; WAN024DCQ_at; Start 456; Stop 480
gcttgacgtggaagacaaaaccatg

SEQ ID NO: 152672 - DNA, 25 bp, Artificial
  probe
  misc_feature (1)..(25): SEQ ID NO: 1496; WAN024DCQ_at; Start 532; Stop 556
ggtgctaaaaacatcggcatctacg

SEQ ID NO: 152673 - DNA, 25 bp, Artificial
  probe
  misc_feature (1)..(25): SEQ ID NO: 1496; WAN024DCQ_at; Start 53; Stop 77
tgttcattttaatcatcaatcgccc

SEQ ID NO: 152674 - DNA, 25 bp, Artificial
  probe
  misc_feature (1)..(25): SEQ ID NO: 1496; WAN024DCQ_at; Start 114; Stop 138
tatagcacagattgaagcacaggct

SEQ ID NO: 152675 - DNA, 25 bp, Artificial
  probe
  misc_feature (1)..(25): SEQ ID NO: 1496; WAN024DCQ_at; Start 492; Stop 516
cgaaggtgtcgaaaactttcgagca

SEQ ID NO: 152676 - DNA, 25 bp, Artificial
  probe
  misc_feature (1)..(25): SEQ ID NO: 1496; WAN024DCQ_at; Start 695; Stop 719
catctaaaggaaaaattgccggctt

SEQ ID NO: 152677 - DNA, 25 bp, Artificial
  probe
  misc_feature (1)..(25): SEQ ID NO: 1496; WAN024DCQ_at; Start 712; Stop 736
gccggctttgaccacgatttagata

SEQ ID NO: 152678 - DNA, 25 bp, Artificial
  probe
  misc_feature (1)..(25): SEQ ID NO: 1496; WAN024DCQ_at; Start 733; Stop 757
gatatcaacgttatctctcccttaa

SEQ ID NO: 152679 - DNA, 25 bp, Artificial
  probe
  misc_feature (1)..(25): SEQ ID NO: 1496; WAN024DCQ_at; Start 593; Stop 617
caggcaagtttacctctgtttggat

SEQ ID NO: 152680 - DNA, 25 bp, Artificial
  probe
  misc_feature (1)..(25): SEQ ID NO: 1496; WAN024DCQ_at; Start 649; Stop 673
gagagcagtcctaaaactgatttag

SEQ ID NO: 152681 - DNA, 25 bp, Artificial
  probe
  misc_feature (1)..(25): SEQ ID NO: 1496; WAN024DCQ_at; Start 625; Stop 649
tacggctcagactcaggatttttgg

SEQ ID NO: 152682 - DNA, 25 bp, Artificial
  probe
  misc_feature (1)..(25): SEQ ID NO: 863; WAN024DCR_at; Start 43; Stop 67
caagaaggtcgttttcaaggtgcta

SEQ ID NO: 152683 - DNA, 25 bp, Artificial
  probe
  misc_feature (1)..(25): SEQ ID NO: 863; WAN024DCR_at; Start 555; Stop 579
tatagaaacccatgattttgaaaca

SEQ ID NO: 152684 - DNA, 25 bp, Artificial
  probe
  misc_feature (1)..(25): SEQ ID NO: 863; WAN024DCR_at; Start 227; Stop 251
tagaaatcgttcctaatctccgtga

SEQ ID NO: 152685 - DNA, 25 bp, Artificial
  probe
  misc_feature (1)..(25): SEQ ID NO: 863; WAN024DCR_at; Start 413; Stop 437
aatcattaaaagatagtccagctga

SEQ ID NO: 152686 - DNA, 25 bp, Artificial
  probe
  misc_feature (1)..(25): SEQ ID NO: 863; WAN024DCR_at; Start 364; Stop 388
ggagccgaatccctctatagtacaa

SEQ ID NO: 152687 - DNA, 25 bp, Artificial
  probe
  misc_feature (1)..(25): SEQ ID NO: 863; WAN024DCR_at; Start 35; Stop 59
tctggaaccaagaaggtcgttttca

SEQ ID NO: 152688 - DNA, 25 bp, Artificial
  probe
  misc_feature (1)..(25): SEQ ID NO: 863; WAN024DCR_at; Start 394; Stop 418
cggaccatccaatttatcaaatcat

SEQ ID NO: 152689 - DNA, 25 bp, Artificial
  probe
  misc_feature (1)..(25): SEQ ID NO: 863; WAN024DCR_at; Start 186; Stop 210
tgctgagattatccaaagtcaactc

SEQ ID NO: 152690 - DNA, 25 bp, Artificial
  probe
  misc_feature (1)..(25): SEQ ID NO: 863; WAN024DCR_at; Start 588; Stop 612
caatacttggaatgatacttcttat

SEQ ID NO: 152691 - DNA, 25 bp, Artificial
  probe
  misc_feature (1)..(25): SEQ ID NO: 863; WAN024DCR_at; Start 526; Stop 550
ggcggtctagcaaatgccagcctga

SEQ ID NO: 152692 - DNA, 25 bp, Artificial
  probe
  misc_feature (1)..(25): SEQ ID NO: 863; WAN024DCR_at; Start 505; Stop 529
gaaccacttcttcgtaaagatggcg

SEQ ID NO: 152693 - DNA, 25 bp, Artificial
  probe
  misc_feature (1)..(25): SEQ ID NO: 863; WAN024DCR_at; Start 129; Stop 153
caaggaaattccttttgatcagatt

SEQ ID NO: 152694 - DNA, 25 bp, Artificial
  probe
  misc_feature (1)..(25): SEQ ID NO: 863; WAN024DCR_at; Start 70; Stop 94
ggtgattctcctcttcttcctgaat

SEQ ID NO: 152695 - DNA, 25 bp, Artificial
  probe
  misc_feature (1)..(25): SEQ ID NO: 863; WAN024DCR_at; Start 441; Stop 465
tattctaattgtcggacacggcgcc

SEQ ID NO: 152696 - DNA, 25 bp, Artificial
  probe
  misc_feature (1)..(25): SEQ ID NO: 863; WAN024DCR_at; Start 478; Stop 502
agtcttcgtactctcctaggctata

SEQ ID NO: 152697 - DNA, 25 bp, Artificial
  probe
  misc_feature (1)..(25): SEQ ID NO: 863; WAN024DCR_at; Start 90; Stop 114
tgaatccattgaaaccctaaaacga

SEQ ID NO: 152698 - DNA, 25 bp, Artificial
  probe
  misc_feature (1)..(25): SEQ ID NO: 863; WAN024DCR_at; Start 348; Stop 372
tgacactcgaatgttcggagccgaa

SEQ ID NO: 152699 - DNA, 25 bp, Artificial
  probe
  misc_feature (1)..(25): SEQ ID NO: 863; WAN024DCR_at; Start 304; Stop 328
tacccgcaacaaatccaggcttttc

SEQ ID NO: 152700 - DNA, 25 bp, Artificial
  probe
  misc_feature (1)..(25): SEQ ID NO: 863; WAN024DCR_at; Start 22; Stop 46
cacggtcgtaccctctggaaccaag

SEQ ID NO: 152701 - DNA, 25 bp, Artificial
  probe
  misc_feature (1)..(25): SEQ ID NO: 863; WAN024DCR_at; Start 167; Stop 191
tacctcgagcggtcaaatctgctga

SEQ ID NO: 152702 - DNA, 25 bp, Artificial
  probe
  misc_feature (1)..(25): SEQ ID NO: 863; WAN024DCR_at; Start 540; Stop 564
tgccagcctgaccattatagaaacc

SEQ ID NO: 152703 - DNA, 25 bp, Artificial
  probe
  misc_feature (1)..(25): SEQ ID NO: 863; WAN024DCR_at; Start 2; Stop 26
tgaaactctactttgtccgccacgg

SEQ ID NO: 152704 - DNA, 25 bp, Artificial
  probe
  misc_feature (1)..(25): SEQ ID NO: 863; WAN024DCR_at; Start 264; Stop 288
gaagttagaaggtttgaaaattgca

SEQ ID NO: 152705 - DNA, 25 bp, Artificial
  probe
  misc_feature (1)..(25): SEQ ID NO: 863; WAN024DCR_at; Start 319; Stop 343
caggcttttcgttcaaatcttgctc

SEQ ID NO: 152706 - DNA, 25 bp, Artificial
  probe
  misc_feature (1)..(25): SEQ ID NO: 863; WAN024DCR_at; Start 333; Stop 357
aaatcttgctcaatttgacactcga

SEQ ID NO: 152707 - DNA, 25 bp, Artificial
  probe
  misc_feature (1)..(25): SEQ ID NO: 863; WAN024DCR_at; Start 455; Stop 479
gacacggcgccaatcttactgccag

SEQ ID NO: 152708 - DNA, 25 bp, Artificial
  probe
  misc_feature (1)..(25): SEQ ID NO: 863; WAN024DCR_at; Start 491; Stop 515
tcctaggctataaagaaccacttct

SEQ ID NO: 152709 - DNA, 25 bp, Artificial
  probe
  misc_feature (1)..(25): SEQ ID NO: 863; WAN024DCR_at; Start 463; Stop 487
gccaatcttactgccagtcttcgta

SEQ ID NO: 152710 - DNA, 25 bp, Artificial
  probe
  misc_feature (1)..(25): SEQ ID NO: 863; WAN024DCR_at; Start 172; Stop 196
cgagcggtcaaatctgctgagatta

SEQ ID NO: 152711 - DNA, 25 bp, Artificial
  probe
  misc_feature (1)..(25): SEQ ID NO: 863; WAN024DCR_at; Start 154; Stop 178
tattcaagtgatttacctcgagcgg

SEQ ID NO: 152712 - DNA, 25 bp, Artificial
  probe
  misc_feature (1)..(25): SEQ ID NO: 863; WAN024DCR_at; Start 246; Stop 270
ccgtgaatggcaacttgggaagtta

SEQ ID NO: 152713 - DNA, 25 bp, Artificial
  probe
  misc_feature (1)..(25): SEQ ID NO: 863; WAN024DCR_at; Start 240; Stop 264
taatctccgtgaatggcaacttggg

SEQ ID NO: 152714 - DNA, 25 bp, Artificial
  probe
  misc_feature (1)..(25): SEQ ID NO: 863; WAN024DCR_at; Start 293; Stop 317
tggaagctatttacccgcaacaaat

SEQ ID NO: 152715 - DNA, 25 bp, Artificial
  probe
  misc_feature (1)..(25): SEQ ID NO: 863; WAN024DCR_at; Start 519; Stop 543
taaagatggcggtctagcaaatgcc

SEQ ID NO: 152716 - DNA, 25 bp, Artificial
  probe
  misc_feature (1)..(25): SEQ ID NO: 1056; WAN024DCS_at; Start 851; Stop 875
tcaaggttaaggaccaagccttcca

SEQ ID NO: 152717 - DNA, 25 bp, Artificial
  probe
  misc_feature (1)..(25): SEQ ID NO: 1056; WAN024DCS_at; Start 836; Stop 860
tgcaagcagccaatatcaaggttaa

SEQ ID NO: 152718 - DNA, 25 bp, Artificial
  probe
  misc_feature (1)..(25): SEQ ID NO: 1056; WAN024DCS_at; Start 320; Stop 344
cacgtaaagctcaaattcgtacaag

SEQ ID NO: 152719 - DNA, 25 bp, Artificial
  probe
  misc_feature (1)..(25): SEQ ID NO: 1056; WAN024DCS_at; Start 118; Stop 142
gaacatcaattttatgagcaagtga

SEQ ID NO: 152720 - DNA, 25 bp, Artificial
  probe
  misc_feature (1)..(25): SEQ ID NO: 1056; WAN024DCS_at; Start 212; Stop 236
gctcagagcttgatgataaagaggt

SEQ ID NO: 152721 - DNA, 25 bp, Artificial
  probe
  misc_feature (1)..(25): SEQ ID NO: 1056; WAN024DCS_at; Start 595; Stop 619
tcaacagaagtacctgagcaagtca

SEQ ID NO: 152722 - DNA, 25 bp, Artificial
  probe
  misc_feature (1)..(25): SEQ ID NO: 1056; WAN024DCS_at; Start 265; Stop 289
caatatggcgaaaactaccaacgtg

SEQ ID NO: 152723 - DNA, 25 bp, Artificial
  probe
  misc_feature (1)..(25): SEQ ID NO: 1056; WAN024DCS_at; Start 359; Stop 383
tggcagttaagaaggtagcagaagc

SEQ ID NO: 152724 - DNA, 25 bp, Artificial
  probe
  misc_feature (1)..(25): SEQ ID NO: 1056; WAN024DCS_at; Start 53; Stop 77
tagcagcttgttcgaaagggtcaga

SEQ ID NO: 152725 - DNA, 25 bp, Artificial
  probe
  misc_feature (1)..(25): SEQ ID NO: 1056; WAN024DCS_at; Start 3; Stop 27
gaagaaaaaattattggcaggtgcc

SEQ ID NO: 152726 - DNA, 25 bp, Artificial
  probe
  misc_feature (1)..(25): SEQ ID NO: 1056; WAN024DCS_at; Start 301; Stop 325
gcaggtatgactcttgaaacacgta

SEQ ID NO: 152727 - DNA, 25 bp, Artificial
  probe
  misc_feature (1)..(25): SEQ ID NO: 1056; WAN024DCS_at; Start 280; Stop 304
taccaacgtgtcttgtcacaagcag

SEQ ID NO: 152728 - DNA, 25 bp, Artificial
  probe
  misc_feature (1)..(25): SEQ ID NO: 1056; WAN024DCS_at; Start 653; Stop 677
tttctgatgtgattacagcaactgg

SEQ ID NO: 152729 - DNA, 25 bp, Artificial
  probe
  misc_feature (1)..(25): SEQ ID NO: 1056; WAN024DCS_at; Start 148; Stop 172
aacccttcagcccaacaagtcttgt

SEQ ID NO: 152730 - DNA, 25 bp, Artificial
  probe
  misc_feature (1)..(25): SEQ ID NO: 1056; WAN024DCS_at; Start 433; Stop 457
gatgtaacggctcaaatcatccgtc

SEQ ID NO: 152731 - DNA, 25 bp, Artificial
  probe
  misc_feature (1)..(25): SEQ ID NO: 1056; WAN024DCS_at; Start 806; Stop 830
catttgttcaaagcattatcggaaa

SEQ ID NO: 152732 - DNA, 25 bp, Artificial
  probe
  misc_feature (1)..(25): SEQ ID NO: 1056; WAN024DCS_at; Start 481; Stop 505
gaagttctcgaaaaagccaaggcag

SEQ ID NO: 152733 - DNA, 25 bp, Artificial
  probe
  misc_feature (1)..(25): SEQ ID NO: 1056; WAN024DCS_at; Start 497; Stop 521
ccaaggcagaaggtgctgattttgc

SEQ ID NO: 152734 - DNA, 25 bp, Artificial
  probe
  misc_feature (1)..(25): SEQ ID NO: 1056; WAN024DCS_at; Start 466; Stop 490
gaagataaggccaaagaagttctcg

SEQ ID NO: 152735 - DNA, 25 bp, Artificial
  probe
  misc_feature (1)..(25): SEQ ID NO: 1056; WAN024DCS_at; Start 625; Stop 649
gccgctttcgctttagatgtggatg

SEQ ID NO: 152736 - DNA, 25 bp, Artificial
  probe
  misc_feature (1)..(25): SEQ ID NO: 1056; WAN024DCS_at; Start 881; Stop 905
tctttacccaatatatcggtggtgg

SEQ ID NO: 152737 - DNA, 25 bp, Artificial
  probe
  misc_feature (1)..(25): SEQ ID NO: 1056; WAN024DCS_at; Start 35; Stop 59
tattatcagtagcaactttagcagc

SEQ ID NO: 152738 - DNA, 25 bp, Artificial
  probe
  misc_feature (1)..(25): SEQ ID NO: 1056; WAN024DCS_at; Start 163; Stop 187
caagtcttgttaaatatgaccatcc

SEQ ID NO: 152739 - DNA, 25 bp, Artificial
  probe
  misc_feature (1)..(25): SEQ ID NO: 1056; WAN024DCS_at; Start 228; Stop 252
taaagaggttgatgatactattgcc

SEQ ID NO: 152740 - DNA, 25 bp, Artificial
  probe
  misc_feature (1)..(25): SEQ ID NO: 1056; WAN024DCS_at; Start 527; Stop 551
tagccaaagataattcaactgatga

SEQ ID NO: 152741 - DNA, 25 bp, Artificial
  probe
  misc_feature (1)..(25): SEQ ID NO: 1056; WAN024DCS_at; Start 894; Stop 918
tatcggtggtggagattcaagctca

SEQ ID NO: 152742 - DNA, 25 bp, Artificial
  probe
  misc_feature (1)..(25): SEQ ID NO: 1056; WAN024DCS_at; Start 405; Stop 429
taagaaagcctttgatgagtacact

SEQ ID NO: 152743 - DNA, 25 bp, Artificial
  probe
  misc_feature (1)..(25): SEQ ID NO: 1056; WAN024DCS_at; Start 379; Stop 403
gaagctgaattgacagatgaagcct

SEQ ID NO: 152744 - DNA, 25 bp, Artificial
  probe
  misc_feature (1)..(25): SEQ ID NO: 1056; WAN024DCS_at; Start 199; Stop 223
gaaaaacaatatggctcagagcttg

SEQ ID NO: 152745 - DNA, 25 bp, Artificial
  probe
  misc_feature (1)..(25): SEQ ID NO: 1056; WAN024DCS_at; Start 420; Stop 444
tgagtacactccagatgtaacggct

SEQ ID NO: 152746 - DNA, 25 bp, Artificial
  probe
  misc_feature (1)..(25): SEQ ID NO: 1056; WAN024DCS_at; Start 610; Stop 634
gagcaagtcaaaaaagccgctttcg

SEQ ID NO: 152747 - DNA, 25 bp, Artificial
  probe
  misc_feature (1)..(25): SEQ ID NO: 1056; WAN024DCS_at; Start 910; Stop 934
tcaagctcaagcagtagtacatcaa

SEQ ID NO: 152748 - DNA, 25 bp, Artificial
  probe
  misc_feature (1)..(25): SEQ ID NO: 1056; WAN024DCS_at; Start 18; Stop 42
ggcaggtgccatcacactattatca

SEQ ID NO: 152749 - DNA, 25 bp, Artificial
  probe
  misc_feature (1)..(25): SEQ ID NO: 1056; WAN024DCS_at; Start 822; Stop 846
tatcggaaaagaattgcaagcagcc

SEQ ID NO: 152750 - DNA, 25 bp, Artificial
  probe
  misc_feature (1)..(25): SEQ ID NO: 1973; WAN024DCT_at; Start 155; Stop 179
caggagattacaaacgtatcaaagc

SEQ ID NO: 152751 - DNA, 25 bp, Artificial
  probe
  misc_feature (1)..(25): SEQ ID NO: 1973; WAN024DCT_at; Start 107; Stop 131
aaactaagaaacaacgtcgtcatct

SEQ ID NO: 152752 - DNA, 25 bp, Artificial
  probe
  misc_feature (1)..(25): SEQ ID NO: 1973; WAN024DCT_at; Start 163; Stop 187
tacaaacgtatcaaagcaatgctta

SEQ ID NO: 152753 - DNA, 25 bp, Artificial
  probe
  misc_feature (1)..(25): SEQ ID NO: 1973; WAN024DCT_at; Start 121; Stop 145
cgtcgtcatcttcgtaaagcatcta

SEQ ID NO: 152754 - DNA, 25 bp, Artificial
  probe
  misc_feature (1)..(25): SEQ ID NO: 1973; WAN024DCT_at; Start 124; Stop 148
cgtcatcttcgtaaagcatctatgg

SEQ ID NO: 152755 - DNA, 25 bp, Artificial
  probe
  misc_feature (1)..(25): SEQ ID NO: 1973; WAN024DCT_at; Start 42; Stop 66
caaacgtacaggttctggtggactt

SEQ ID NO: 152756 - DNA, 25 bp, Artificial
  probe
  misc_feature (1)..(25): SEQ ID NO: 1973; WAN024DCT_at; Start 129; Stop 153
tcttcgtaaagcatctatggtgcat

SEQ ID NO: 152757 - DNA, 25 bp, Artificial
  probe
  misc_feature (1)..(25): SEQ ID NO: 1973; WAN024DCT_at; Start 17; Stop 41
cacaccgcgcatcagctaaacgttt

SEQ ID NO: 152758 - DNA, 25 bp, Artificial
  probe
  misc_feature (1)..(25): SEQ ID NO: 1973; WAN024DCT_at; Start 7; Stop 31
aaacaaaaaacacaccgcgcatcag

SEQ ID NO: 152759 - DNA, 25 bp, Artificial
  probe
  misc_feature (1)..(25): SEQ ID NO: 1973; WAN024DCT_at; Start 135; Stop 159
taaagcatctatggtgcattcagga

SEQ ID NO: 152760 - DNA, 25 bp, Artificial
  probe
  misc_feature (1)..(25): SEQ ID NO: 1973; WAN024DCT_at; Start 151; Stop 175
cattcaggagattacaaacgtatca

SEQ ID NO: 152761 - DNA, 25 bp, Artificial
  probe
  misc_feature (1)..(25): SEQ ID NO: 1973; WAN024DCT_at; Start 178; Stop 202
gcaatgcttactcgcttgaaataac

SEQ ID NO: 152762 - DNA, 25 bp, Artificial
  probe
  misc_feature (1)..(25): SEQ ID NO: 1973; WAN024DCT_at; Start 81; Stop 105
ttacacttctcaccgtttccacgga

SEQ ID NO: 152763 - DNA, 25 bp, Artificial
  probe
  misc_feature (1)..(25): SEQ ID NO: 1973; WAN024DCT_at; Start 37; Stop 61
cgtttcaaacgtacaggttctggtg

SEQ ID NO: 152764 - DNA, 25 bp, Artificial
  probe
  misc_feature (1)..(25): SEQ ID NO: 1973; WAN024DCT_at; Start 127; Stop 151
catcttcgtaaagcatctatggtgc

SEQ ID NO: 152765 - DNA, 25 bp, Artificial
  probe
  misc_feature (1)..(25): SEQ ID NO: 1973; WAN024DCT_at; Start 15; Stop 39
aacacaccgcgcatcagctaaacgt

SEQ ID NO: 152766 - DNA, 25 bp, Artificial
  probe
  misc_feature (1)..(25): SEQ ID NO: 1973; WAN024DCT_at; Start 77; Stop 101
gtgcttacacttctcaccgtttcca

SEQ ID NO: 152767 - DNA, 25 bp, Artificial
  probe
  misc_feature (1)..(25): SEQ ID NO: 1973; WAN024DCT_at; Start 171; Stop 195
tatcaaagcaatgcttactcgcttg

SEQ ID NO: 152768 - DNA, 25 bp, Artificial
  probe
  misc_feature (1)..(25): SEQ ID NO: 1973; WAN024DCT_at; Start 137; Stop 161
aagcatctatggtgcattcaggaga

SEQ ID NO: 152769 - DNA, 25 bp, Artificial
  probe
  misc_feature (1)..(25): SEQ ID NO: 1973; WAN024DCT_at; Start 149; Stop 173
tgcattcaggagattacaaacgtat

SEQ ID NO: 152770 - DNA, 25 bp, Artificial
  probe
  misc_feature (1)..(25): SEQ ID NO: 1973; WAN024DCT_at; Start 174; Stop 198
caaagcaatgcttactcgcttgaaa

SEQ ID NO: 152771 - DNA, 25 bp, Artificial
  probe
  misc_feature (1)..(25): SEQ ID NO: 1973; WAN024DCT_at; Start 9; Stop 33
acaaaaaacacaccgcgcatcagct

SEQ ID NO: 152772 - DNA, 25 bp, Artificial
  probe
  misc_feature (1)..(25): SEQ ID NO: 1973; WAN024DCT_at; Start 40; Stop 64
ttcaaacgtacaggttctggtggac

SEQ ID NO: 152773 - DNA, 25 bp, Artificial
  probe
  misc_feature (1)..(25): SEQ ID NO: 1973; WAN024DCT_at; Start 111; Stop 135
taagaaacaacgtcgtcatcttcgt

SEQ ID NO: 152774 - DNA, 25 bp, Artificial
  probe
  misc_feature (1)..(25): SEQ ID NO: 1973; WAN024DCT_at; Start 71; Stop 95
gtttccgtgcttacacttctcaccg

SEQ ID NO: 152775 - DNA, 25 bp, Artificial
  probe
  misc_feature (1)..(25): SEQ ID NO: 1973; WAN024DCT_at; Start 160; Stop 184
gattacaaacgtatcaaagcaatgc

SEQ ID NO: 152776 - DNA, 25 bp, Artificial
  probe
  misc_feature (1)..(25): SEQ ID NO: 1973; WAN024DCT_at; Start 2; Stop 26
tgccaaaacaaaaaacacaccgcgc

SEQ ID NO: 152777 - DNA, 25 bp, Artificial
  probe
  misc_feature (1)..(25): SEQ ID NO: 1973; WAN024DCT_at; Start 142; Stop 166
tctatggtgcattcaggagattaca

SEQ ID NO: 152778 - DNA, 25 bp, Artificial
  probe
  misc_feature (1)..(25): SEQ ID NO: 1973; WAN024DCT_at; Start 68; Stop 92
aacgtttccgtgcttacacttctca

SEQ ID NO: 152779 - DNA, 25 bp, Artificial
  probe
  misc_feature (1)..(25): SEQ ID NO: 1973; WAN024DCT_at; Start 118; Stop 142
caacgtcgtcatcttcgtaaagcat

SEQ ID NO: 152780 - DNA, 25 bp, Artificial
  probe
  misc_feature (1)..(25): SEQ ID NO: 1973; WAN024DCT_at; Start 146; Stop 170
tggtgcattcaggagattacaaacg

SEQ ID NO: 152781 - DNA, 25 bp, Artificial
  probe
  misc_feature (1)..(25): SEQ ID NO: 1973; WAN024DCT_at; Start 182; Stop 206
tgcttactcgcttgaaataactaat

SEQ ID NO: 152782 - DNA, 25 bp, Artificial
  probe
  misc_feature (1)..(25): SEQ ID NO: 1973; WAN024DCT_at; Start 20; Stop 44
accgcgcatcagctaaacgtttcaa

SEQ ID NO: 152783 - DNA, 25 bp, Artificial
  probe
  misc_feature (1)..(25): SEQ ID NO: 1973; WAN024DCT_at; Start 114; Stop 138
gaaacaacgtcgtcatcttcgtaaa

SEQ ID NO: 152784 - DNA, 25 bp, Artificial
  probe
  misc_feature (1)..(25): SEQ ID NO: 4080; WAN024DCU_at; Start 476; Stop 500
ttttagccgagtttgctgaagcaac

SEQ ID NO: 152785 - DNA, 25 bp, Artificial
  probe
  misc_feature (1)..(25): SEQ ID NO: 4080; WAN024DCU_at; Start 421; Stop 445
gtatctattcgctttaagggtcgta

SEQ ID NO: 152786 - DNA, 25 bp, Artificial
  probe
  misc_feature (1)..(25): SEQ ID NO: 4080; WAN024DCU_at; Start 431; Stop 455
gctttaagggtcgtatgattaccca

SEQ ID NO: 152787 - DNA, 25 bp, Artificial
  probe
  misc_feature (1)..(25): SEQ ID NO: 4080; WAN024DCU_at; Start 189; Stop 213
cgctaatgttgacctagtattgatt

SEQ ID NO: 152788 - DNA, 25 bp, Artificial
  probe
  misc_feature (1)..(25): SEQ ID NO: 4080; WAN024DCU_at; Start 489; Stop 513
tgctgaagcaactcaagatattgcc

SEQ ID NO: 152789 - DNA, 25 bp, Artificial
  probe
  misc_feature (1)..(25): SEQ ID NO: 4080; WAN024DCU_at; Start 447; Stop 471
gattacccataaagagattggtgca

SEQ ID NO: 152790 - DNA, 25 bp, Artificial
  probe
  misc_feature (1)..(25): SEQ ID NO: 4080; WAN024DCU_at; Start 22; Stop 46
agtccgctattgtttttctctaata

SEQ ID NO: 152791 - DNA, 25 bp, Artificial
  probe
  misc_feature (1)..(25): SEQ ID NO: 4080; WAN024DCU_at; Start 536; Stop 560
tggatggacgtcaaatgttcatgca

SEQ ID NO: 152792 - DNA, 25 bp, Artificial
  probe
  misc_feature (1)..(25): SEQ ID NO: 4080; WAN024DCU_at; Start 223; Stop 247
gccaaaccgcctgttgcaaaaatta

SEQ ID NO: 152793 - DNA, 25 bp, Artificial
  probe
  misc_feature (1)..(25): SEQ ID NO: 4080; WAN024DCU_at; Start 109; Stop 133
cgtgaagttcgcttgattggtcttg

SEQ ID NO: 152794 - DNA, 25 bp, Artificial
  probe
  misc_feature (1)..(25): SEQ ID NO: 4080; WAN024DCU_at; Start 320; Stop 344
ctgtgaaagaagttcgtctaagtcc

SEQ ID NO: 152795 - DNA, 25 bp, Artificial
  probe
  misc_feature (1)..(25): SEQ ID NO: 4080; WAN024DCU_at; Start 263; Stop 287
tcaaatttgagtaccagaagaagca

SEQ ID NO: 152796 - DNA, 25 bp, Artificial
  probe
  misc_feature (1)..(25): SEQ ID NO: 4080; WAN024DCU_at; Start 307; Stop 331
caaagcgttgttactgtgaaagaag

SEQ ID NO: 152797 - DNA, 25 bp, Artificial
  probe
  misc_feature (1)..(25): SEQ ID NO: 4080; WAN024DCU_at; Start 237; Stop 261
tgcaaaaattatggactacggtaag

SEQ ID NO: 152798 - DNA, 25 bp, Artificial
  probe
  misc_feature (1)..(25): SEQ ID NO: 4080; WAN024DCU_at; Start 68; Stop 92
tagcaaagcaagacttattcatcaa

SEQ ID NO: 152799 - DNA, 25 bp, Artificial
  probe
  misc_feature (1)..(25): SEQ ID NO: 4080; WAN024DCU_at; Start 152; Stop 176
tcaagccactcagtgaagcgcaagc

SEQ ID NO: 152800 - DNA, 25 bp, Artificial
  probe
  misc_feature (1)..(25): SEQ ID NO: 4080; WAN024DCU_at; Start 276; Stop 300
ccagaagaagcaaaaagaacaacgt

SEQ ID NO: 152801 - DNA, 25 bp, Artificial
  probe
  misc_feature (1)..(25): SEQ ID NO: 4080; WAN024DCU_at; Start 558; Stop 582
gcaattggcgccagcgactgacaaa

SEQ ID NO: 152802 - DNA, 25 bp, Artificial
  probe
  misc_feature (1)..(25): SEQ ID NO: 4080; WAN024DCU_at; Start 96; Stop 120
tgagattcgtgtacgtgaagttcgc

SEQ ID NO: 152803 - DNA, 25 bp, Artificial
  probe
  misc_feature (1)..(25): SEQ ID NO: 4080; WAN024DCU_at; Start 352; Stop 376
gacaagggtgactttgatacaaaac

SEQ ID NO: 152804 - DNA, 25 bp, Artificial
  probe
  misc_feature (1)..(25): SEQ ID NO: 4080; WAN024DCU_at; Start 549; Stop 573
aatgttcatgcaattggcgccagcg

SEQ ID NO: 152805 - DNA, 25 bp, Artificial
  probe
  misc_feature (1)..(25): SEQ ID NO: 4080; WAN024DCU_at; Start 55; Stop 79
gaggtgaaaaccatagcaaagcaag

SEQ ID NO: 152806 - DNA, 25 bp, Artificial
  probe
  misc_feature (1)..(25): SEQ ID NO: 4080; WAN024DCU_at; Start 166; Stop 190
gaagcgcaagctttggctgataacg

SEQ ID NO: 152807 - DNA, 25 bp, Artificial
  probe
  misc_feature (1)..(25): SEQ ID NO: 4080; WAN024DCU_at; Start 248; Stop 272
tggactacggtaagttcaaatttga

SEQ ID NO: 152808 - DNA, 25 bp, Artificial
  probe
  misc_feature (1)..(25): SEQ ID NO: 4080; WAN024DCU_at; Start 180; Stop 204
ggctgataacgctaatgttgaccta

SEQ ID NO: 152809 - DNA, 25 bp, Artificial
  probe
  misc_feature (1)..(25): SEQ ID NO: 4080; WAN024DCU_at; Start 369; Stop 393
tacaaaacttcgtaatgcacgtaag

SEQ ID NO: 152810 - DNA, 25 bp, Artificial
  probe
  misc_feature (1)..(25): SEQ ID NO: 4080; WAN024DCU_at; Start 462; Stop 486
gattggtgcaaaagttttagccgag

SEQ ID NO: 152811 - DNA, 25 bp, Artificial
  probe
  misc_feature (1)..(25): SEQ ID NO: 4080; WAN024DCU_at; Start 505; Stop 529
gatattgccatcatcgaacaacgtg

SEQ ID NO: 152812 - DNA, 25 bp, Artificial
  probe
  misc_feature (1)..(25): SEQ ID NO: 4080; WAN024DCU_at; Start 384; Stop 408
tgcacgtaagttccttgaaaaagga

SEQ ID NO: 152813 - DNA, 25 bp, Artificial
  probe
  misc_feature (1)..(25): SEQ ID NO: 4080; WAN024DCU_at; Start 37; Stop 61
ttctctaataaaacaaaagaggtga

SEQ ID NO: 152814 - DNA, 25 bp, Artificial
  probe
  misc_feature (1)..(25): SEQ ID NO: 4080; WAN024DCU_at; Start 520; Stop 544
gaacaacgtgctaaaatggatggac

SEQ ID NO: 152815 - DNA, 25 bp, Artificial
  probe
  misc_feature (1)..(25): SEQ ID NO: 4080; WAN024DCU_at; Start 409; Stop 433
aataaagttaaggtatctattcgct

SEQ ID NO: 152816 - DNA, 25 bp, Artificial
  probe
  misc_feature (1)..(25): SEQ ID NO: 4080; WAN024DCU_at; Start 567; Stop 591
gccagcgactgacaaaaaataacta

SEQ ID NO: 152817 - DNA, 25 bp, Artificial
  probe
  misc_feature (1)..(25): SEQ ID NO: 4080; WAN024DCU_at; Start 204; Stop 228
agtattgattcaaccccaagccaaa

SEQ ID NO: 152818 - DNA, 25 bp, Artificial
  probe
  misc_feature (1)..(25): SEQ ID NO: 7398; WAN024DCV_at; Start 38; Stop 62
taatagattctagctttcctatagg

SEQ ID NO: 152819 - DNA, 25 bp, Artificial
  probe
  misc_feature (1)..(25): SEQ ID NO: 7398; WAN024DCV_at; Start 41; Stop 65
tagattctagctttcctataggtag

SEQ ID NO: 152820 - DNA, 25 bp, Artificial
  probe
  misc_feature (1)..(25): SEQ ID NO: 7398; WAN024DCV_at; Start 1; Stop 25
ttgaaagatggggaagttcacagaa

SEQ ID NO: 152821 - DNA, 25 bp, Artificial
  probe
  misc_feature (1)..(25): SEQ ID NO: 7398; WAN024DCV_at; Start 36; Stop 60
tttaatagattctagctttcctata

SEQ ID NO: 152822 - DNA, 25 bp, Artificial
  probe
  misc_feature (1)..(25): SEQ ID NO: 7398; WAN024DCV_at; Start 3; Stop 27
gaaagatggggaagttcacagaaaa

SEQ ID NO: 152823 - DNA, 25 bp, Artificial
  probe
  misc_feature (1)..(25): SEQ ID NO: 7398; WAN024DCV_at; Start 28; Stop 52
aagaattttttaatagattctagct

SEQ ID NO: 152824 - DNA, 25 bp, Artificial
  probe
  misc_feature (1)..(25): SEQ ID NO: 7398; WAN024DCV_at; Start 39; Stop 63
aatagattctagctttcctataggt

SEQ ID NO: 152825 - DNA, 25 bp, Artificial
  probe
  misc_feature (1)..(25): SEQ ID NO: 7398; WAN024DCV_at; Start 43; Stop 67
gattctagctttcctataggtaggg

SEQ ID NO: 152826 - DNA, 25 bp, Artificial
  probe
  misc_feature (1)..(25): SEQ ID NO: 7398; WAN024DCV_at; Start 40; Stop 64
atagattctagctttcctataggta

SEQ ID NO: 152827 - DNA, 25 bp, Artificial
  probe
  misc_feature (1)..(25): SEQ ID NO: 7398; WAN024DCV_at; Start 46; Stop 70
tctagctttcctataggtagggaaa

SEQ ID NO: 152828 - DNA, 25 bp, Artificial
  probe
  misc_feature (1)..(25): SEQ ID NO: 7398; WAN024DCV_at; Start 2; Stop 26
tgaaagatggggaagttcacagaaa

SEQ ID NO: 152829 - DNA, 25 bp, Artificial
  probe
  misc_feature (1)..(25): SEQ ID NO: 7398; WAN024DCV_at; Start 45; Stop 69
ttctagctttcctataggtagggaa

SEQ ID NO: 152830 - DNA, 25 bp, Artificial
  probe
  misc_feature (1)..(25): SEQ ID NO: 7398; WAN024DCV_at; Start 7; Stop 31
gatggggaagttcacagaaaaaaga

SEQ ID NO: 152831 - DNA, 25 bp, Artificial
  probe
  misc_feature (1)..(25): SEQ ID NO: 7398; WAN024DCV_at; Start 6; Stop 30
agatggggaagttcacagaaaaaag

SEQ ID NO: 152832 - DNA, 25 bp, Artificial
  probe
  misc_feature (1)..(25): SEQ ID NO: 7398; WAN024DCV_at; Start 42; Stop 66
agattctagctttcctataggtagg

SEQ ID NO: 152833 - DNA, 25 bp, Artificial
  probe
  misc_feature (1)..(25): SEQ ID NO: 7398; WAN024DCV_at; Start 29; Stop 53
agaattttttaatagattctagctt

SEQ ID NO: 152834 - DNA, 25 bp, Artificial
  probe
  misc_feature (1)..(25): SEQ ID NO: 7398; WAN024DCV_at; Start 35; Stop 59
ttttaatagattctagctttcctat

SEQ ID NO: 152835 - DNA, 25 bp, Artificial
  probe
  misc_feature (1)..(25): SEQ ID NO: 7398; WAN024DCV_at; Start 34; Stop 58
tttttaatagattctagctttccta

SEQ ID NO: 152836 - DNA, 25 bp, Artificial
  probe
  misc_feature (1)..(25): SEQ ID NO: 7398; WAN024DCV_at; Start 44; Stop 68
attctagctttcctataggtaggga

SEQ ID NO: 152837 - DNA, 25 bp, Artificial
  probe
  misc_feature (1)..(25): SEQ ID NO: 7398; WAN024DCV_at; Start 37; Stop 61
ttaatagattctagctttcctatag

SEQ ID NO: 152838 - DNA, 25 bp, Artificial
  probe
  misc_feature (1)..(25): SEQ ID NO: 888; WAN024DCW_at; Start 714; Stop 738
tctagtgggaagtctgataagtggt

SEQ ID NO: 152839 - DNA, 25 bp, Artificial
  probe
  misc_feature (1)..(25): SEQ ID NO: 888; WAN024DCW_at; Start 78; Stop 102
atctgtactcggtgttaccttttat

SEQ ID NO: 152840 - DNA, 25 bp, Artificial
  probe
  misc_feature (1)..(25): SEQ ID NO: 888; WAN024DCW_at; Start 587; Stop 611
gatatcaaaatcatctggacacagc

SEQ ID NO: 152841 - DNA, 25 bp, Artificial
  probe
  misc_feature (1)..(25): SEQ ID NO: 888; WAN024DCW_at; Start 909; Stop 933
tgtcctctttctttcactcattggg

SEQ ID NO: 152842 - DNA, 25 bp, Artificial
  probe
  misc_feature (1)..(25): SEQ ID NO: 888; WAN024DCW_at; Start 684; Stop 708
gctgtttatcggaatctgtggcttt

SEQ ID NO: 152843 - DNA, 25 bp, Artificial
  probe
  misc_feature (1)..(25): SEQ ID NO: 888; WAN024DCW_at; Start 372; Stop 396
tgtatcaaatgacccgactgctagc

SEQ ID NO: 152844 - DNA, 25 bp, Artificial
  probe
  misc_feature (1)..(25): SEQ ID NO: 888; WAN024DCW_at; Start 559; Stop 583
tttatgctaacacaactatttgcag

SEQ ID NO: 152845 - DNA, 25 bp, Artificial
  probe
  misc_feature (1)..(25): SEQ ID NO: 888; WAN024DCW_at; Start 602; Stop 626
tggacacagctcacttatatcctgt

SEQ ID NO: 152846 - DNA, 25 bp, Artificial
  probe
  misc_feature (1)..(25): SEQ ID NO: 888; WAN024DCW_at; Start 879; Stop 903
gattgcttactttttcaagcaaaaa

SEQ ID NO: 152847 - DNA, 25 bp, Artificial
  probe
  misc_feature (1)..(25): SEQ ID NO: 888; WAN024DCW_at; Start 621; Stop 645
tcctgtttcaaaagtgacatttgca

SEQ ID NO: 152848 - DNA, 25 bp, Artificial
  probe
  misc_feature (1)..(25): SEQ ID NO: 888; WAN024DCW_at; Start 476; Stop 500
tggagtttccgacccacgggattga

SEQ ID NO: 152849 - DNA, 25 bp, Artificial
  probe
  misc_feature (1)..(25): SEQ ID NO: 888; WAN024DCW_at; Start 917; Stop 941
ttctttcactcattgggattgttgg

SEQ ID NO: 152850 - DNA, 25 bp, Artificial
  probe
  misc_feature (1)..(25): SEQ ID NO: 888; WAN024DCW_at; Start 894; Stop 918
caagcaaaaaatgcctgtcctcttt

SEQ ID NO: 152851 - DNA, 25 bp, Artificial
  probe
  misc_feature (1)..(25): SEQ ID NO: 888; WAN024DCW_at; Start 483; Stop 507
tccgacccacgggattgatcagatt

SEQ ID NO: 152852 - DNA, 25 bp, Artificial
  probe
  misc_feature (1)..(25): SEQ ID NO: 888; WAN024DCW_at; Start 1016; Stop 1040
cagtggagattttatctggaagatt

SEQ ID NO: 152853 - DNA, 25 bp, Artificial
  probe
  misc_feature (1)..(25): SEQ ID NO: 888; WAN024DCW_at; Start 218; Stop 242
ccagctcggaggaataccagtttgc

SEQ ID NO: 152854 - DNA, 25 bp, Artificial
  probe
  misc_feature (1)..(25): SEQ ID NO: 888; WAN024DCW_at; Start 446; Stop 470
tgtatcccttgaacataaaagcaca

SEQ ID NO: 152855 - DNA, 25 bp, Artificial
  probe
  misc_feature (1)..(25): SEQ ID NO: 888; WAN024DCW_at; Start 739; Stop 763
tttggacagttagattatccctacc

SEQ ID NO: 152856 - DNA, 25 bp, Artificial
  probe
  misc_feature (1)..(25): SEQ ID NO: 888; WAN024DCW_at; Start 340; Stop 364
cagtggcaagatgaagagaagaatt

SEQ ID NO: 152857 - DNA, 25 bp, Artificial
  probe
  misc_feature (1)..(25): SEQ ID NO: 888; WAN024DCW_at; Start 417; Stop 441
tgaccgcgaacggaagatttaccaa

SEQ ID NO: 152858 - DNA, 25 bp, Artificial
  probe
  misc_feature (1)..(25): SEQ ID NO: 888; WAN024DCW_at; Start 223; Stop 247
tcggaggaataccagtttgctaaaa

SEQ ID NO: 152859 - DNA, 25 bp, Artificial
  probe
  misc_feature (1)..(25): SEQ ID NO: 888; WAN024DCW_at; Start 699; Stop 723
ctgtggcttttcttttctagtggga

SEQ ID NO: 152860 - DNA, 25 bp, Artificial
  probe
  misc_feature (1)..(25): SEQ ID NO: 888; WAN024DCW_at; Start 981; Stop 1005
gattgcacatctgattccctttact

SEQ ID NO: 152861 - DNA, 25 bp, Artificial
  probe
  misc_feature (1)..(25): SEQ ID NO: 888; WAN024DCW_at; Start 461; Stop 485
taaaagcacatactttggagtttcc

SEQ ID NO: 152862 - DNA, 25 bp, Artificial
  probe
  misc_feature (1)..(25): SEQ ID NO: 888; WAN024DCW_at; Start 433; Stop 457
atttaccaagccctgtatcccttga

SEQ ID NO: 152863 - DNA, 25 bp, Artificial
  probe
  misc_feature (1)..(25): SEQ ID NO: 888; WAN024DCW_at; Start 569; Stop 593
cacaactatttgcagaaagatatca

SEQ ID NO: 152864 - DNA, 25 bp, Artificial
  probe
  misc_feature (1)..(25): SEQ ID NO: 888; WAN024DCW_at; Start 102; Stop 126
tttaaatagtcagactgcaaactca

SEQ ID NO: 152865 - DNA, 25 bp, Artificial
  probe
  misc_feature (1)..(25): SEQ ID NO: 888; WAN024DCW_at; Start 673; Stop 697
tatgtaactgtgctgtttatcggaa

SEQ ID NO: 152866 - DNA, 25 bp, Artificial
  probe
  misc_feature (1)..(25): SEQ ID NO: 888; WAN024DCW_at; Start 827; Stop 851
gcttgctcttagctttcttagcctt

SEQ ID NO: 152867 - DNA, 25 bp, Artificial
  probe
  misc_feature (1)..(25): SEQ ID NO: 888; WAN024DCW_at; Start 993; Stop 1017
gattccctttacttacttgcgttca

SEQ ID NO: 152868 - DNA, 25 bp, Artificial
  probe
  misc_feature (1)..(25): SEQ ID NO: 888; WAN024DCW_at; Start 843; Stop 867
cttagcctttatcgtcattgtggaa

SEQ ID NO: 152869 - DNA, 25 bp, Artificial
  probe
  misc_feature (1)..(25): SEQ ID NO: 888; WAN024DCW_at; Start 364; Stop 388
tatgaatttgtatcaaatgacccga

SEQ ID NO: 152870 - DNA, 25 bp, Artificial
  probe
  misc_feature (1)..(25): SEQ ID NO: 888; WAN024DCW_at; Start 726; Stop 750
tctgataagtggttttggacagtta

SEQ ID NO: 152871 - DNA, 25 bp, Artificial
  probe
  misc_feature (1)..(25): SEQ ID NO: 888; WAN024DCW_at; Start 1002; Stop 1026
tacttacttgcgttcagtggagatt

SEQ ID NO: 152872 - DNA, 25 bp, Artificial
  probe
  misc_feature (1)..(25): SEQ ID NO: 3926; WAN024DCX_at; Start 143; Stop 167
actacgctcgttatgaggtcataaa

SEQ ID NO: 152873 - DNA, 25 bp, Artificial
  probe
  misc_feature (1)..(25): SEQ ID NO: 3926; WAN024DCX_at; Start 19; Stop 43
tacaagtatgattggaatacggttt

SEQ ID NO: 152874 - DNA, 25 bp, Artificial
  probe
  misc_feature (1)..(25): SEQ ID NO: 3926; WAN024DCX_at; Start 114; Stop 138
ttctgagtataaagttggcggaggc

SEQ ID NO: 152875 - DNA, 25 bp, Artificial
  probe
  misc_feature (1)..(25): SEQ ID NO: 3926; WAN024DCX_at; Start 110; Stop 134
gctattctgagtataaagttggcgg

SEQ ID NO: 152876 - DNA, 25 bp, Artificial
  probe
  misc_feature (1)..(25): SEQ ID NO: 3926; WAN024DCX_at; Start 15; Stop 39
aagttacaagtatgattggaatacg

SEQ ID NO: 152877 - DNA, 25 bp, Artificial
  probe
  misc_feature (1)..(25): SEQ ID NO: 3926; WAN024DCX_at; Start 137; Stop 161
gctggaactacgctcgttatgaggt

SEQ ID NO: 152878 - DNA, 25 bp, Artificial
  probe
  misc_feature (1)..(25): SEQ ID NO: 3926; WAN024DCX_at; Start 145; Stop 169
tacgctcgttatgaggtcataaact

SEQ ID NO: 152879 - DNA, 25 bp, Artificial
  probe
  misc_feature (1)..(25): SEQ ID NO: 3926; WAN024DCX_at; Start 141; Stop 165
gaactacgctcgttatgaggtcata

SEQ ID NO: 152880 - DNA, 25 bp, Artificial
  probe
  misc_feature (1)..(25): SEQ ID NO: 3926; WAN024DCX_at; Start 61; Stop 85
tatcacgaccatcagtatgcttgga

SEQ ID NO: 152881 - DNA, 25 bp, Artificial
  probe
  misc_feature (1)..(25): SEQ ID NO: 3926; WAN024DCX_at; Start 123; Stop 147
taaagttggcggaggctggaactac

SEQ ID NO: 152882 - DNA, 25 bp, Artificial
  probe
  misc_feature (1)..(25): SEQ ID NO: 3926; WAN024DCX_at; Start 115; Stop 139
tctgagtataaagttggcggaggct

SEQ ID NO: 152883 - DNA, 25 bp, Artificial
  probe
  misc_feature (1)..(25): SEQ ID NO: 3926; WAN024DCX_at; Start 17; Stop 41
gttacaagtatgattggaatacggt

SEQ ID NO: 152884 - DNA, 25 bp, Artificial
  probe
  misc_feature (1)..(25): SEQ ID NO: 3926; WAN024DCX_at; Start 139; Stop 163
tggaactacgctcgttatgaggtca

SEQ ID NO: 152885 - DNA, 25 bp, Artificial
  probe
  misc_feature (1)..(25): SEQ ID NO: 3926; WAN024DCX_at; Start 64; Stop 88
cacgaccatcagtatgcttggattc

SEQ ID NO: 152886 - DNA, 25 bp, Artificial
  probe
  misc_feature (1)..(25): SEQ ID NO: 3926; WAN024DCX_at; Start 131; Stop 155
gcggaggctggaactacgctcgtta

SEQ ID NO: 152887 - DNA, 25 bp, Artificial
  probe
  misc_feature (1)..(25): SEQ ID NO: 3926; WAN024DCX_at; Start 138; Stop 162
ctggaactacgctcgttatgaggtc

SEQ ID NO: 152888 - DNA, 25 bp, Artificial
  probe
  misc_feature (1)..(25): SEQ ID NO: 3926; WAN024DCX_at; Start 60; Stop 84
ctatcacgaccatcagtatgcttgg

SEQ ID NO: 152889 - DNA, 25 bp, Artificial
  probe
  misc_feature (1)..(25): SEQ ID NO: 3926; WAN024DCX_at; Start 132; Stop 156
cggaggctggaactacgctcgttat

SEQ ID NO: 152890 - DNA, 25 bp, Artificial
  probe
  misc_feature (1)..(25): SEQ ID NO: 3926; WAN024DCX_at; Start 112; Stop 136
tattctgagtataaagttggcggag

SEQ ID NO: 152891 - DNA, 25 bp, Artificial
  probe
  misc_feature (1)..(25): SEQ ID NO: 3926; WAN024DCX_at; Start 66; Stop 90
cgaccatcagtatgcttggattccg

SEQ ID NO: 152892 - DNA, 25 bp, Artificial
  probe
  misc_feature (1)..(25): SEQ ID NO: 3926; WAN024DCX_at; Start 135; Stop 159
aggctggaactacgctcgttatgag

SEQ ID NO: 152893 - DNA, 25 bp, Artificial
  probe
  misc_feature (1)..(25): SEQ ID NO: 3926; WAN024DCX_at; Start 65; Stop 89
acgaccatcagtatgcttggattcc

SEQ ID NO: 152894 - DNA, 25 bp, Artificial
  probe
  misc_feature (1)..(25): SEQ ID NO: 3926; WAN024DCX_at; Start 9; Stop 33
cactaaaagttacaagtatgattgg

SEQ ID NO: 152895 - DNA, 25 bp, Artificial
  probe
  misc_feature (1)..(25): SEQ ID NO: 3926; WAN024DCX_at; Start 142; Stop 166
aactacgctcgttatgaggtcataa

SEQ ID NO: 152896 - DNA, 25 bp, Artificial
  probe
  misc_feature (1)..(25): SEQ ID NO: 3926; WAN024DCX_at; Start 108; Stop 132
cagctattctgagtataaagttggc

SEQ ID NO: 152897 - DNA, 25 bp, Artificial
  probe
  misc_feature (1)..(25): SEQ ID NO: 3926; WAN024DCX_at; Start 63; Stop 87
tcacgaccatcagtatgcttggatt

SEQ ID NO: 152898 - DNA, 25 bp, Artificial
  probe
  misc_feature (1)..(25): SEQ ID NO: 3926; WAN024DCX_at; Start 134; Stop 158
gaggctggaactacgctcgttatga

SEQ ID NO: 152899 - DNA, 25 bp, Artificial
  probe
  misc_feature (1)..(25): SEQ ID NO: 3926; WAN024DCX_at; Start 146; Stop 170
acgctcgttatgaggtcataaacta

SEQ ID NO: 152900 - DNA, 25 bp, Artificial
  probe
  misc_feature (1)..(25): SEQ ID NO: 3926; WAN024DCX_at; Start 11; Stop 35
ctaaaagttacaagtatgattggaa

SEQ ID NO: 152901 - DNA, 25 bp, Artificial
  probe
  misc_feature (1)..(25): SEQ ID NO: 3926; WAN024DCX_at; Start 57; Stop 81
caactatcacgaccatcagtatgct

SEQ ID NO: 152902 - DNA, 25 bp, Artificial
  probe
  misc_feature (1)..(25): SEQ ID NO: 3926; WAN024DCX_at; Start 133; Stop 157
ggaggctggaactacgctcgttatg

SEQ ID NO: 152903 - DNA, 25 bp, Artificial
  probe
  misc_feature (1)..(25): SEQ ID NO: 3926; WAN024DCX_at; Start 140; Stop 164
ggaactacgctcgttatgaggtcat

SEQ ID NO: 152904 - DNA, 25 bp, Artificial
  probe
  misc_feature (1)..(25): SEQ ID NO: 3926; WAN024DCX_at; Start 111; Stop 135
ctattctgagtataaagttggcgga

SEQ ID NO: 152905 - DNA, 25 bp, Artificial
  probe
  misc_feature (1)..(25): SEQ ID NO: 3926; WAN024DCX_at; Start 59; Stop 83
actatcacgaccatcagtatgcttg

SEQ ID NO: 152906 - DNA, 25 bp, Artificial
  probe
  misc_feature (1)..(25): SEQ ID NO: 7004; WAN024DCY_at; Start 256; Stop 280
gaaagggtacggattctgcctgaca

SEQ ID NO: 152907 - DNA, 25 bp, Artificial
  probe
  misc_feature (1)..(25): SEQ ID NO: 7004; WAN024DCY_at; Start 658; Stop 682
catctggacaccgactttgaggaga

SEQ ID NO: 152908 - DNA, 25 bp, Artificial
  probe
  misc_feature (1)..(25): SEQ ID NO: 7004; WAN024DCY_at; Start 1752; Stop 1776
tctgaaacagaaggaatttgtggca

SEQ ID NO: 152909 - DNA, 25 bp, Artificial
  probe
  misc_feature (1)..(25): SEQ ID NO: 7004; WAN024DCY_at; Start 277; Stop 301
gacactgttaaggtcaatggtgata

SEQ ID NO: 152910 - DNA, 25 bp, Artificial
  probe
  misc_feature (1)..(25): SEQ ID NO: 7004; WAN024DCY_at; Start 2142; Stop 2166
tccaaggattagaccgaactcaggg

SEQ ID NO: 152911 - DNA, 25 bp, Artificial
  probe
  misc_feature (1)..(25): SEQ ID NO: 7004; WAN024DCY_at; Start 604; Stop 628
aagacgcactttccagaccctatgc

SEQ ID NO: 152912 - DNA, 25 bp, Artificial
  probe
  misc_feature (1)..(25): SEQ ID NO: 7004; WAN024DCY_at; Start 1506; Stop 1530
tgtaactgggaaaaccattctcata

SEQ ID NO: 152913 - DNA, 25 bp, Artificial
  probe
  misc_feature (1)..(25): SEQ ID NO: 7004; WAN024DCY_at; Start 1431; Stop 1455
cctgaccaagcatccactggaaaat

SEQ ID NO: 152914 - DNA, 25 bp, Artificial
  probe
  misc_feature (1)..(25): SEQ ID NO: 7004; WAN024DCY_at; Start 144; Stop 168
tccgtggaaatctgctggtaaagtt

SEQ ID NO: 152915 - DNA, 25 bp, Artificial
  probe
  misc_feature (1)..(25): SEQ ID NO: 7004; WAN024DCY_at; Start 1170; Stop 1194
tgacttgaccttcttaccgctcttg

SEQ ID NO: 152916 - DNA, 25 bp, Artificial
  probe
  misc_feature (1)..(25): SEQ ID NO: 7004; WAN024DCY_at; Start 2103; Stop 2127
gagcaatcggatttcttctgccaat

SEQ ID NO: 152917 - DNA, 25 bp, Artificial
  probe
  misc_feature (1)..(25): SEQ ID NO: 7004; WAN024DCY_at; Start 2124; Stop 2148
caattctccaagtcctgatccaagg

SEQ ID NO: 152918 - DNA, 25 bp, Artificial
  probe
  misc_feature (1)..(25): SEQ ID NO: 7004; WAN024DCY_at; Start 730; Stop 754
tctggcatgcaggtaggttttttca

SEQ ID NO: 152919 - DNA, 25 bp, Artificial
  probe
  misc_feature (1)..(25): SEQ ID NO: 7004; WAN024DCY_at; Start 1671; Stop 1695
cacggacaaggagcatgttggagat

SEQ ID NO: 152920 - DNA, 25 bp, Artificial
  probe
  misc_feature (1)..(25): SEQ ID NO: 7004; WAN024DCY_at; Start 1686; Stop 1710
tgttggagatttgtcagagatgacc

SEQ ID NO: 152921 - DNA, 25 bp, Artificial
  probe
  misc_feature (1)..(25): SEQ ID NO: 7004; WAN024DCY_at; Start 1768; Stop 1792
tttgtggcagaactacaggcgactc

SEQ ID NO: 152922 - DNA, 25 bp, Artificial
  probe
  misc_feature (1)..(25): SEQ ID NO: 7004; WAN024DCY_at; Start 1282; Stop 1306
tcacaggtgacaagtagacctctgg

SEQ ID NO: 152923 - DNA, 25 bp, Artificial
  probe
  misc_feature (1)..(25): SEQ ID NO: 7004; WAN024DCY_at; Start 1383; Stop 1407
cattaaaaagctaacggtattgtgc

SEQ ID NO: 152924 - DNA, 25 bp, Artificial
  probe
  misc_feature (1)..(25): SEQ ID NO: 7004; WAN024DCY_at; Start 2167; Stop 2191
gctgcaattcccttttctttcagga

SEQ ID NO: 152925 - DNA, 25 bp, Artificial
  probe
  misc_feature (1)..(25): SEQ ID NO: 7004; WAN024DCY_at; Start 318; Stop 342
caaggctgatggacgcatttttcaa

SEQ ID NO: 152926 - DNA, 25 bp, Artificial
  probe
  misc_feature (1)..(25): SEQ ID NO: 7004; WAN024DCY_at; Start 1297; Stop 1321
agacctctggtctttggacaaccca

SEQ ID NO: 152927 - DNA, 25 bp, Artificial
  probe
  misc_feature (1)..(25): SEQ ID NO: 7004; WAN024DCY_at; Start 1605; Stop 1629
gcgaagcttgataccctatctcaaa

SEQ ID NO: 152928 - DNA, 25 bp, Artificial
  probe
  misc_feature (1)..(25): SEQ ID NO: 7004; WAN024DCY_at; Start 1017; Stop 1041
cctgaccatgcccagcaaagaaggg

SEQ ID NO: 152929 - DNA, 25 bp, Artificial
  probe
  misc_feature (1)..(25): SEQ ID NO: 7004; WAN024DCY_at; Start 551; Stop 575
gggatataggagaaaacttgtccag

SEQ ID NO: 152930 - DNA, 25 bp, Artificial
  probe
  misc_feature (1)..(25): SEQ ID NO: 7004; WAN024DCY_at; Start 1731; Stop 1755
gattctagtatcaaaagacagtctg

SEQ ID NO: 152931 - DNA, 25 bp, Artificial
  probe
  misc_feature (1)..(25): SEQ ID NO: 7004; WAN024DCY_at; Start 298; Stop 322
gatagtctgtcctttcgcggcaagg

SEQ ID NO: 152932 - DNA, 25 bp, Artificial
  probe
  misc_feature (1)..(25): SEQ ID NO: 7004; WAN024DCY_at; Start 1312; Stop 1336
ggacaacccaatacatggcttttaa

SEQ ID NO: 152933 - DNA, 25 bp, Artificial
  probe
  misc_feature (1)..(25): SEQ ID NO: 7004; WAN024DCY_at; Start 1591; Stop 1615
accagcaatgcccagcgaagcttga

SEQ ID NO: 152934 - DNA, 25 bp, Artificial
  probe
  misc_feature (1)..(25): SEQ ID NO: 7004; WAN024DCY_at; Start 1416; Stop 1440
tacagggctctttctcctgaccaag

SEQ ID NO: 152935 - DNA, 25 bp, Artificial
  probe
  misc_feature (1)..(25): SEQ ID NO: 7004; WAN024DCY_at; Start 1654; Stop 1678
cagctaattttgactaacacggaca

SEQ ID NO: 152936 - DNA, 25 bp, Artificial
  probe
  misc_feature (1)..(25): SEQ ID NO: 7004; WAN024DCY_at; Start 1269; Stop 1293
tattcgcttggtgtcacaggtgaca

SEQ ID NO: 152937 - DNA, 25 bp, Artificial
  probe
  misc_feature (1)..(25): SEQ ID NO: 7004; WAN024DCY_at; Start 706; Stop 730
ggaattatccacctctttgccctat

SEQ ID NO: 152938 - DNA, 25 bp, Artificial
  probe
  misc_feature (1)..(25): SEQ ID NO: 7004; WAN024DCY_at; Start 2182; Stop 2206
tctttcaggaaagtagcagtttcat

SEQ ID NO: 152939 - DNA, 25 bp, Artificial
  probe
  misc_feature (1)..(25): SEQ ID NO: 7004; WAN024DCY_at; Start 644; Stop 668
gactcttgctgggacatctggacac

SEQ ID NO: 152940 - DNA, 25 bp, Artificial
  probe
  misc_feature (1)..(25): SEQ ID NO: 2999; WAN024DCZ_at; Start 2214; Stop 2238
tagttggaaaatcgaaagtgttcga

SEQ ID NO: 152941 - DNA, 25 bp, Artificial
  probe
  misc_feature (1)..(25): SEQ ID NO: 2999; WAN024DCZ_at; Start 2130; Stop 2154
ggaaacattgacacgactggaaggt

SEQ ID NO: 152942 - DNA, 25 bp, Artificial
  probe
  misc_feature (1)..(25): SEQ ID NO: 2999; WAN024DCZ_at; Start 2213; Stop 2237
atagttggaaaatcgaaagtgttcg

SEQ ID NO: 152943 - DNA, 25 bp, Artificial
  probe
  misc_feature (1)..(25): SEQ ID NO: 2999; WAN024DCZ_at; Start 2140; Stop 2164
acacgactggaaggtatcaatagca

SEQ ID NO: 152944 - DNA, 25 bp, Artificial
  probe
  misc_feature (1)..(25): SEQ ID NO: 2999; WAN024DCZ_at; Start 2141; Stop 2165
cacgactggaaggtatcaatagcaa

SEQ ID NO: 152945 - DNA, 25 bp, Artificial
  probe
  misc_feature (1)..(25): SEQ ID NO: 2999; WAN024DCZ_at; Start 2212; Stop 2236
gatagttggaaaatcgaaagtgttc

SEQ ID NO: 152946 - DNA, 25 bp, Artificial
  probe
  misc_feature (1)..(25): SEQ ID NO: 2999; WAN024DCZ_at; Start 2127; Stop 2151
tcaggaaacattgacacgactggaa

SEQ ID NO: 152947 - DNA, 25 bp, Artificial
  probe
  misc_feature (1)..(25): SEQ ID NO: 2999; WAN024DCZ_at; Start 2142; Stop 2166
acgactggaaggtatcaatagcaaa

SEQ ID NO: 152948 - DNA, 25 bp, Artificial
  probe
  misc_feature (1)..(25): SEQ ID NO: 2999; WAN024DCZ_at; Start 2146; Stop 2170
ctggaaggtatcaatagcaaagttt

SEQ ID NO: 152949 - DNA, 25 bp, Artificial
  probe
  misc_feature (1)..(25): SEQ ID NO: 2999; WAN024DCZ_at; Start 2098; Stop 2122
ggaaagagcaatcgaatgaaactcc

SEQ ID NO: 152950 - DNA, 25 bp, Artificial
  probe
  misc_feature (1)..(25): SEQ ID NO: 2999; WAN024DCZ_at; Start 2147; Stop 2171
tggaaggtatcaatagcaaagttta

SEQ ID NO: 152951 - DNA, 25 bp, Artificial
  probe
  misc_feature (1)..(25): SEQ ID NO: 2999; WAN024DCZ_at; Start 2099; Stop 2123
gaaagagcaatcgaatgaaactccc

SEQ ID NO: 152952 - DNA, 25 bp, Artificial
  probe
  misc_feature (1)..(25): SEQ ID NO: 2999; WAN024DCZ_at; Start 2100; Stop 2124
aaagagcaatcgaatgaaactcccc

SEQ ID NO: 152953 - DNA, 25 bp, Artificial
  probe
  misc_feature (1)..(25): SEQ ID NO: 2999; WAN024DCZ_at; Start 2136; Stop 2160
attgacacgactggaaggtatcaat

SEQ ID NO: 152954 - DNA, 25 bp, Artificial
  probe
  misc_feature (1)..(25): SEQ ID NO: 2999; WAN024DCZ_at; Start 2134; Stop 2158
acattgacacgactggaaggtatca

SEQ ID NO: 152955 - DNA, 25 bp, Artificial
  probe
  misc_feature (1)..(25): SEQ ID NO: 2999; WAN024DCZ_at; Start 2138; Stop 2162
tgacacgactggaaggtatcaatag

SEQ ID NO: 152956 - DNA, 25 bp, Artificial
  probe
  misc_feature (1)..(25): SEQ ID NO: 2999; WAN024DCZ_at; Start 2137; Stop 2161
ttgacacgactggaaggtatcaata

SEQ ID NO: 152957 - DNA, 25 bp, Artificial
  probe
  misc_feature (1)..(25): SEQ ID NO: 2999; WAN024DCZ_at; Start 2139; Stop 2163
gacacgactggaaggtatcaatagc

SEQ ID NO: 152958 - DNA, 25 bp, Artificial
  probe
  misc_feature (1)..(25): SEQ ID NO: 2999; WAN024DCZ_at; Start 2135; Stop 2159
cattgacacgactggaaggtatcaa

SEQ ID NO: 152959 - DNA, 25 bp, Artificial
  probe
  misc_feature (1)..(25): SEQ ID NO: 2999; WAN024DCZ_at; Start 2209; Stop 2233
ttggatagttggaaaatcgaaagtg

SEQ ID NO: 152960 - DNA, 25 bp, Artificial
  probe
  misc_feature (1)..(25): SEQ ID NO: 2999; WAN024DCZ_at; Start 2128; Stop 2152
caggaaacattgacacgactggaag

SEQ ID NO: 152961 - DNA, 25 bp, Artificial
  probe
  misc_feature (1)..(25): SEQ ID NO: 2999; WAN024DCZ_at; Start 2132; Stop 2156
aaacattgacacgactggaaggtat

SEQ ID NO: 152962 - DNA, 25 bp, Artificial
  probe
  misc_feature (1)..(25): SEQ ID NO: 2999; WAN024DCZ_at; Start 2133; Stop 2157
aacattgacacgactggaaggtatc

SEQ ID NO: 152963 - DNA, 25 bp, Artificial
  probe
  misc_feature (1)..(25): SEQ ID NO: 2999; WAN024DCZ_at; Start 2173; Stop 2197
cgaactgaccagcaaggagctatac

SEQ ID NO: 152964 - DNA, 25 bp, Artificial
  probe
  misc_feature (1)..(25): SEQ ID NO: 2999; WAN024DCZ_at; Start 2144; Stop 2168
gactggaaggtatcaatagcaaagt

SEQ ID NO: 152965 - DNA, 25 bp, Artificial
  probe
  misc_feature (1)..(25): SEQ ID NO: 2999; WAN024DCZ_at; Start 2129; Stop 2153
aggaaacattgacacgactggaagg

SEQ ID NO: 152966 - DNA, 25 bp, Artificial
  probe
  misc_feature (1)..(25): SEQ ID NO: 2999; WAN024DCZ_at; Start 2210; Stop 2234
tggatagttggaaaatcgaaagtgt

SEQ ID NO: 152967 - DNA, 25 bp, Artificial
  probe
  misc_feature (1)..(25): SEQ ID NO: 2999; WAN024DCZ_at; Start 2131; Stop 2155
gaaacattgacacgactggaaggta

SEQ ID NO: 152968 - DNA, 25 bp, Artificial
  probe
  misc_feature (1)..(25): SEQ ID NO: 2999; WAN024DCZ_at; Start 2174; Stop 2198
gaactgaccagcaaggagctatacg

SEQ ID NO: 152969 - DNA, 25 bp, Artificial
  probe
  misc_feature (1)..(25): SEQ ID NO: 2999; WAN024DCZ_at; Start 2145; Stop 2169
actggaaggtatcaatagcaaagtt

SEQ ID NO: 152970 - DNA, 25 bp, Artificial
  probe
  misc_feature (1)..(25): SEQ ID NO: 2999; WAN024DCZ_at; Start 2097; Stop 2121
tggaaagagcaatcgaatgaaactc

SEQ ID NO: 152971 - DNA, 25 bp, Artificial
  probe
  misc_feature (1)..(25): SEQ ID NO: 2999; WAN024DCZ_at; Start 2126; Stop 2150
atcaggaaacattgacacgactgga

SEQ ID NO: 152972 - DNA, 25 bp, Artificial
  probe
  misc_feature (1)..(25): SEQ ID NO: 2999; WAN024DCZ_at; Start 2216; Stop 2240
gttggaaaatcgaaagtgttcgata

SEQ ID NO: 152973 - DNA, 25 bp, Artificial
  probe
  misc_feature (1)..(25): SEQ ID NO: 2999; WAN024DCZ_at; Start 2143; Stop 2167
cgactggaaggtatcaatagcaaag

SEQ ID NO: 152974 - DNA, 25 bp, Artificial
  probe
  misc_feature (1)..(25): SEQ ID NO: 5252; WAN024DD2_at; Start 448; Stop 472
tcaggaaaggtcatggagaaatcag

SEQ ID NO: 152975 - DNA, 25 bp, Artificial
  probe
  misc_feature (1)..(25): SEQ ID NO: 5252; WAN024DD2_at; Start 554; Stop 578
tcttgaccaaggaagactattttgc

SEQ ID NO: 152976 - DNA, 25 bp, Artificial
  probe
  misc_feature (1)..(25): SEQ ID NO: 5252; WAN024DD2_at; Start 123; Stop 147
tgcctcggacaagggtaatacacgt

SEQ ID NO: 152977 - DNA, 25 bp, Artificial
  probe
  misc_feature (1)..(25): SEQ ID NO: 5252; WAN024DD2_at; Start 46; Stop 70
cagtatccgtctatagaaacggagc

SEQ ID NO: 152978 - DNA, 25 bp, Artificial
  probe
  misc_feature (1)..(25): SEQ ID NO: 5252; WAN024DD2_at; Start 127; Stop 151
tcggacaagggtaatacacgttaca

SEQ ID NO: 152979 - DNA, 25 bp, Artificial
  probe
  misc_feature (1)..(25): SEQ ID NO: 5252; WAN024DD2_at; Start 3; Stop 27
gattggttggaaaagtatggaatca

SEQ ID NO: 152980 - DNA, 25 bp, Artificial
  probe
  misc_feature (1)..(25): SEQ ID NO: 5252; WAN024DD2_at; Start 178; Stop 202
gaaaccaagaataacattgctcagt

SEQ ID NO: 152981 - DNA, 25 bp, Artificial
  probe
  misc_feature (1)..(25): SEQ ID NO: 5252; WAN024DD2_at; Start 106; Stop 130
gaagcaatgtttgactatgcctcgg

SEQ ID NO: 152982 - DNA, 25 bp, Artificial
  probe
  misc_feature (1)..(25): SEQ ID NO: 5252; WAN024DD2_at; Start 114; Stop 138
gtttgactatgcctcggacaagggt

SEQ ID NO: 152983 - DNA, 25 bp, Artificial
  probe
  misc_feature (1)..(25): SEQ ID NO: 5252; WAN024DD2_at; Start 560; Stop 584
ccaaggaagactattttgcaaataa

SEQ ID NO: 152984 - DNA, 25 bp, Artificial
  probe
  misc_feature (1)..(25): SEQ ID NO: 5252; WAN024DD2_at; Start 83; Stop 107
gacctgtaactttggatgatgcgga

SEQ ID NO: 152985 - DNA, 25 bp, Artificial
  probe
  misc_feature (1)..(25): SEQ ID NO: 5252; WAN024DD2_at; Start 56; Stop 80
ctatagaaacggagcgtttattgct

SEQ ID NO: 152986 - DNA, 25 bp, Artificial
  probe
  misc_feature (1)..(25): SEQ ID NO: 5252; WAN024DD2_at; Start 293; Stop 317
ctgttcttaagaaggcagctattgg

SEQ ID NO: 152987 - DNA, 25 bp, Artificial
  probe
  misc_feature (1)..(25): SEQ ID NO: 5252; WAN024DD2_at; Start 380; Stop 404
ttgagctagcttttgagaagatagg

SEQ ID NO: 152988 - DNA, 25 bp, Artificial
  probe
  misc_feature (1)..(25): SEQ ID NO: 5252; WAN024DD2_at; Start 547; Stop 571
cattatgtcttgaccaaggaagact

SEQ ID NO: 152989 - DNA, 25 bp, Artificial
  probe
  misc_feature (1)..(25): SEQ ID NO: 5252; WAN024DD2_at; Start 42; Stop 66
tgcccagtatccgtctatagaaacg

SEQ ID NO: 152990 - DNA, 25 bp, Artificial
  probe
  misc_feature (1)..(25): SEQ ID NO: 5252; WAN024DD2_at; Start 110; Stop 134
caatgtttgactatgcctcggacaa

SEQ ID NO: 152991 - DNA, 25 bp, Artificial
  probe
  misc_feature (1)..(25): SEQ ID NO: 5252; WAN024DD2_at; Start 173; Stop 197
tggaagaaaccaagaataacattgc

SEQ ID NO: 152992 - DNA, 25 bp, Artificial
  probe
  misc_feature (1)..(25): SEQ ID NO: 5252; WAN024DD2_at; Start 482; Stop 506
tttcccatgcagaaccatatgcttg

SEQ ID NO: 152993 - DNA, 25 bp, Artificial
  probe
  misc_feature (1)..(25): SEQ ID NO: 5252; WAN024DD2_at; Start 493; Stop 517
gaaccatatgcttgtatggaccagc

SEQ ID NO: 152994 - DNA, 25 bp, Artificial
  probe
  misc_feature (1)..(25): SEQ ID NO: 5252; WAN024DD2_at; Start 51; Stop 75
tccgtctatagaaacggagcgttta

SEQ ID NO: 152995 - DNA, 25 bp, Artificial
  probe
  misc_feature (1)..(25): SEQ ID NO: 5252; WAN024DD2_at; Start 182; Stop 206
ccaagaataacattgctcagttcta

SEQ ID NO: 152996 - DNA, 25 bp, Artificial
  probe
  misc_feature (1)..(25): SEQ ID NO: 5252; WAN024DD2_at; Start 118; Stop 142
gactatgcctcggacaagggtaata

SEQ ID NO: 152997 - DNA, 25 bp, Artificial
  probe
  misc_feature (1)..(25): SEQ ID NO: 5252; WAN024DD2_at; Start 143; Stop 167
cacgttacacttttccaaccaatca

SEQ ID NO: 152998 - DNA, 25 bp, Artificial
  probe
  misc_feature (1)..(25): SEQ ID NO: 5252; WAN024DD2_at; Start 96; Stop 120
ggatgatgcggaagcaatgtttgac

SEQ ID NO: 152999 - DNA, 25 bp, Artificial
  probe
  misc_feature (1)..(25): SEQ ID NO: 5252; WAN024DD2_at; Start 337; Stop 361
tattggaatcaaggattaacgacag

SEQ ID NO: 153000 - DNA, 25 bp, Artificial
  probe
  misc_feature (1)..(25): SEQ ID NO: 5252; WAN024DD2_at; Start 373; Stop 397
gctgtgattgagctagcttttgaga

SEQ ID NO: 153001 - DNA, 25 bp, Artificial
  probe
  misc_feature (1)..(25): SEQ ID NO: 5252; WAN024DD2_at; Start 365; Stop 389
ccaatcgtgctgtgattgagctagc

SEQ ID NO: 153002 - DNA, 25 bp, Artificial
  probe
  misc_feature (1)..(25): SEQ ID NO: 5252; WAN024DD2_at; Start 542; Stop 566
gagttcattatgtcttgaccaagga

SEQ ID NO: 153003 - DNA, 25 bp, Artificial
  probe
  misc_feature (1)..(25): SEQ ID NO: 5252; WAN024DD2_at; Start 89; Stop 113
taactttggatgatgcggaagcaat

SEQ ID NO: 153004 - DNA, 25 bp, Artificial
  probe
  misc_feature (1)..(25): SEQ ID NO: 5252; WAN024DD2_at; Start 502; Stop 526
gcttgtatggaccagcatgaaaaag

SEQ ID NO: 153005 - DNA, 25 bp, Artificial
  probe
  misc_feature (1)..(25): SEQ ID NO: 5252; WAN024DD2_at; Start 476; Stop 500
tgcgtttttcccatgcagaaccata

SEQ ID NO: 153006 - DNA, 25 bp, Artificial
  probe
  misc_feature (1)..(25): SEQ ID NO: 5252; WAN024DD2_at; Start 102; Stop 126
tgcggaagcaatgtttgactatgcc

SEQ ID NO: 153007 - DNA, 25 bp, Artificial
  probe
  misc_feature (1)..(25): SEQ ID NO: 5252; WAN024DD2_at; Start 497; Stop 521
catatgcttgtatggaccagcatga

SEQ ID NO: 153008 - DNA, 25 bp, Artificial
  probe
  misc_feature (1)..(25): SEQ ID NO: 1838; WAN024DD3_at; Start 438; Stop 462
tggatgcgaggttaagcaagaactc

SEQ ID NO: 153009 - DNA, 25 bp, Artificial
  probe
  misc_feature (1)..(25): SEQ ID NO: 1838; WAN024DD3_at; Start 454; Stop 478
caagaactctatacggttgttatcg

SEQ ID NO: 153010 - DNA, 25 bp, Artificial
  probe
  misc_feature (1)..(25): SEQ ID NO: 1838; WAN024DD3_at; Start 348; Stop 372
tgctaagaactttcgaaaggcacgt

SEQ ID NO: 153011 - DNA, 25 bp, Artificial
  probe
  misc_feature (1)..(25): SEQ ID NO: 1838; WAN024DD3_at; Start 445; Stop 469
gaggttaagcaagaactctatacgg

SEQ ID NO: 153012 - DNA, 25 bp, Artificial
  probe
  misc_feature (1)..(25): SEQ ID NO: 1838; WAN024DD3_at; Start 240; Stop 264
tgcatatcctgatgaggagactgtt

SEQ ID NO: 153013 - DNA, 25 bp, Artificial
  probe
  misc_feature (1)..(25): SEQ ID NO: 1838; WAN024DD3_at; Start 71; Stop 95
ctttatatgaaagtaatcctctgta

SEQ ID NO: 153014 - DNA, 25 bp, Artificial
  probe
  misc_feature (1)..(25): SEQ ID NO: 1838; WAN024DD3_at; Start 357; Stop 381
ctttcgaaaggcacgtttggcttat

SEQ ID NO: 153015 - DNA, 25 bp, Artificial
  probe
  misc_feature (1)..(25): SEQ ID NO: 1838; WAN024DD3_at; Start 126; Stop 150
tgcaactgtaaaagaggacatgctt

SEQ ID NO: 153016 - DNA, 25 bp, Artificial
  probe
  misc_feature (1)..(25): SEQ ID NO: 1838; WAN024DD3_at; Start 331; Stop 355
gaagcactagcttattttgctaaga

SEQ ID NO: 153017 - DNA, 25 bp, Artificial
  probe
  misc_feature (1)..(25): SEQ ID NO: 1838; WAN024DD3_at; Start 139; Stop 163
gaggacatgctttgtctacctgaag

SEQ ID NO: 153018 - DNA, 25 bp, Artificial
  probe
  misc_feature (1)..(25): SEQ ID NO: 1838; WAN024DD3_at; Start 375; Stop 399
ggcttatgttaagggaaatccgcaa

SEQ ID NO: 153019 - DNA, 25 bp, Artificial
  probe
  misc_feature (1)..(25): SEQ ID NO: 1838; WAN024DD3_at; Start 381; Stop 405
tgttaagggaaatccgcaatctcag

SEQ ID NO: 153020 - DNA, 25 bp, Artificial
  probe
  misc_feature (1)..(25): SEQ ID NO: 1838; WAN024DD3_at; Start 305; Stop 329
aagggattggtagtcatattgtgac

SEQ ID NO: 153021 - DNA, 25 bp, Artificial
  probe
  misc_feature (1)..(25): SEQ ID NO: 1838; WAN024DD3_at; Start 38; Stop 62
tactaactgaaaaggatattccaag

SEQ ID NO: 153022 - DNA, 25 bp, Artificial
  probe
  misc_feature (1)..(25): SEQ ID NO: 1838; WAN024DD3_at; Start 31; Stop 55
tgtaggatactaactgaaaaggata

SEQ ID NO: 153023 - DNA, 25 bp, Artificial
  probe
  misc_feature (1)..(25): SEQ ID NO: 1838; WAN024DD3_at; Start 362; Stop 386
gaaaggcacgtttggcttatgttaa

SEQ ID NO: 153024 - DNA, 25 bp, Artificial
  probe
  misc_feature (1)..(25): SEQ ID NO: 1838; WAN024DD3_at; Start 397; Stop 421
caatctcagcatttttgggaaaagc

SEQ ID NO: 153025 - DNA, 25 bp, Artificial
  probe
  misc_feature (1)..(25): SEQ ID NO: 1838; WAN024DD3_at; Start 142; Stop 166
gacatgctttgtctacctgaaggta

SEQ ID NO: 153026 - DNA, 25 bp, Artificial
  probe
  misc_feature (1)..(25): SEQ ID NO: 1838; WAN024DD3_at; Start 118; Stop 142
ccaaattttgcaactgtaaaagagg

SEQ ID NO: 153027 - DNA, 25 bp, Artificial
  probe
  misc_feature (1)..(25): SEQ ID NO: 1838; WAN024DD3_at; Start 401; Stop 425
ctcagcatttttgggaaaagcaggg

SEQ ID NO: 153028 - DNA, 25 bp, Artificial
  probe
  misc_feature (1)..(25): SEQ ID NO: 1838; WAN024DD3_at; Start 234; Stop 258
tgtctatgcatatcctgatgaggag

SEQ ID NO: 153029 - DNA, 25 bp, Artificial
  probe
  misc_feature (1)..(25): SEQ ID NO: 1838; WAN024DD3_at; Start 157; Stop 181
cctgaaggtaaagctaaggctgata

SEQ ID NO: 153030 - DNA, 25 bp, Artificial
  probe
  misc_feature (1)..(25): SEQ ID NO: 1838; WAN024DD3_at; Start 79; Stop 103
gaaagtaatcctctgtattttcagc

SEQ ID NO: 153031 - DNA, 25 bp, Artificial
  probe
  misc_feature (1)..(25): SEQ ID NO: 1838; WAN024DD3_at; Start 58; Stop 82
ccaagtattttatctttatatgaaa

SEQ ID NO: 153032 - DNA, 25 bp, Artificial
  probe
  misc_feature (1)..(25): SEQ ID NO: 1838; WAN024DD3_at; Start 247; Stop 271
cctgatgaggagactgtttttattg

SEQ ID NO: 153033 - DNA, 25 bp, Artificial
  probe
  misc_feature (1)..(25): SEQ ID NO: 1838; WAN024DD3_at; Start 167; Stop 191
aagctaaggctgataagttttttgt

SEQ ID NO: 153034 - DNA, 25 bp, Artificial
  probe
  misc_feature (1)..(25): SEQ ID NO: 1838; WAN024DD3_at; Start 16; Stop 40
tctaagtattacagttgtaggatac

SEQ ID NO: 153035 - DNA, 25 bp, Artificial
  probe
  misc_feature (1)..(25): SEQ ID NO: 1838; WAN024DD3_at; Start 318; Stop 342
tcatattgtgacagaagcactagct

SEQ ID NO: 153036 - DNA, 25 bp, Artificial
  probe
  misc_feature (1)..(25): SEQ ID NO: 1838; WAN024DD3_at; Start 153; Stop 177
tctacctgaaggtaaagctaaggct

SEQ ID NO: 153037 - DNA, 25 bp, Artificial
  probe
  misc_feature (1)..(25): SEQ ID NO: 1838; WAN024DD3_at; Start 92; Stop 116
tgtattttcagcattgtccaccaga

SEQ ID NO: 153038 - DNA, 25 bp, Artificial
  probe
  misc_feature (1)..(25): SEQ ID NO: 1838; WAN024DD3_at; Start 219; Stop 243
ggctgttatggattttgtctatgca

SEQ ID NO: 153039 - DNA, 25 bp, Artificial
  probe
  misc_feature (1)..(25): SEQ ID NO: 1838; WAN024DD3_at; Start 209; Stop 233
ctgaccttgtggctgttatggattt

SEQ ID NO: 153040 - DNA, 25 bp, Artificial
  probe
  misc_feature (1)..(25): SEQ ID NO: 1838; WAN024DD3_at; Start 430; Stop 454
aaatcaattggatgcgaggttaagc

SEQ ID NO: 153041 - DNA, 25 bp, Artificial
  probe
  misc_feature (1)..(25): SEQ ID NO: 1838; WAN024DD3_at; Start 387; Stop 411
gggaaatccgcaatctcagcatttt

SEQ ID NO: 153042 - DNA, 25 bp, Artificial
  probe
  misc_feature (1)..(25): SEQ ID NO: 5285; WAN024DD4_at; Start 15; Stop 39
tctggtggacaatgctgaaaataca

SEQ ID NO: 153043 - DNA, 25 bp, Artificial
  probe
  misc_feature (1)..(25): SEQ ID NO: 5285; WAN024DD4_at; Start 91; Stop 115
gtatcctacaactgtaatactctaa

SEQ ID NO: 153044 - DNA, 25 bp, Artificial
  probe
  misc_feature (1)..(25): SEQ ID NO: 5285; WAN024DD4_at; Start 67; Stop 91
tacttggaatatccttttcagttag

SEQ ID NO: 153045 - DNA, 25 bp, Artificial
  probe
  misc_feature (1)..(25): SEQ ID NO: 5285; WAN024DD4_at; Start 7; Stop 31
aatttggctctggtggacaatgctg

SEQ ID NO: 153046 - DNA, 25 bp, Artificial
  probe
  misc_feature (1)..(25): SEQ ID NO: 5285; WAN024DD4_at; Start 72; Stop 96
ggaatatccttttcagttagtatcc

SEQ ID NO: 153047 - DNA, 25 bp, Artificial
  probe
  misc_feature (1)..(25): SEQ ID NO: 5285; WAN024DD4_at; Start 9; Stop 33
tttggctctggtggacaatgctgaa

SEQ ID NO: 153048 - DNA, 25 bp, Artificial
  probe
  misc_feature (1)..(25): SEQ ID NO: 5285; WAN024DD4_at; Start 24; Stop 48
caatgctgaaaatacagaggattac

SEQ ID NO: 153049 - DNA, 25 bp, Artificial
  probe
  misc_feature (1)..(25): SEQ ID NO: 5285; WAN024DD4_at; Start 10; Stop 34
ttggctctggtggacaatgctgaaa

SEQ ID NO: 153050 - DNA, 25 bp, Artificial
  probe
  misc_feature (1)..(25): SEQ ID NO: 5285; WAN024DD4_at; Start 22; Stop 46
gacaatgctgaaaatacagaggatt

SEQ ID NO: 153051 - DNA, 25 bp, Artificial
  probe
  misc_feature (1)..(25): SEQ ID NO: 5285; WAN024DD4_at; Start 12; Stop 36
ggctctggtggacaatgctgaaaat

SEQ ID NO: 153052 - DNA, 25 bp, Artificial
  probe
  misc_feature (1)..(25): SEQ ID NO: 5285; WAN024DD4_at; Start 17; Stop 41
tggtggacaatgctgaaaatacaga

SEQ ID NO: 153053 - DNA, 25 bp, Artificial
  probe
  misc_feature (1)..(25): SEQ ID NO: 5285; WAN024DD4_at; Start 27; Stop 51
tgctgaaaatacagaggattacttt

SEQ ID NO: 153054 - DNA, 25 bp, Artificial
  probe
  misc_feature (1)..(25): SEQ ID NO: 5285; WAN024DD4_at; Start 76; Stop 100
tatccttttcagttagtatcctaca

SEQ ID NO: 153055 - DNA, 25 bp, Artificial
  probe
  misc_feature (1)..(25): SEQ ID NO: 5285; WAN024DD4_at; Start 11; Stop 35
tggctctggtggacaatgctgaaaa

SEQ ID NO: 153056 - DNA, 25 bp, Artificial
  probe
  misc_feature (1)..(25): SEQ ID NO: 5285; WAN024DD4_at; Start 20; Stop 44
tggacaatgctgaaaatacagagga

SEQ ID NO: 153057 - DNA, 25 bp, Artificial
  probe
  misc_feature (1)..(25): SEQ ID NO: 5285; WAN024DD4_at; Start 28; Stop 52
gctgaaaatacagaggattactttc

SEQ ID NO: 153058 - DNA, 25 bp, Artificial
  probe
  misc_feature (1)..(25): SEQ ID NO: 5285; WAN024DD4_at; Start 36; Stop 60
tacagaggattactttcatataaag

SEQ ID NO: 153059 - DNA, 25 bp, Artificial
  probe
  misc_feature (1)..(25): SEQ ID NO: 5285; WAN024DD4_at; Start 5; Stop 29
aaaatttggctctggtggacaatgc

SEQ ID NO: 153060 - DNA, 25 bp, Artificial
  probe
  misc_feature (1)..(25): SEQ ID NO: 5285; WAN024DD4_at; Start 13; Stop 37
gctctggtggacaatgctgaaaata

SEQ ID NO: 153061 - DNA, 25 bp, Artificial
  probe
  misc_feature (1)..(25): SEQ ID NO: 5285; WAN024DD4_at; Start 86; Stop 110
agttagtatcctacaactgtaatac

SEQ ID NO: 153062 - DNA, 25 bp, Artificial
  probe
  misc_feature (1)..(25): SEQ ID NO: 5285; WAN024DD4_at; Start 4; Stop 28
caaaatttggctctggtggacaatg

SEQ ID NO: 153063 - DNA, 25 bp, Artificial
  probe
  misc_feature (1)..(25): SEQ ID NO: 5285; WAN024DD4_at; Start 95; Stop 119
cctacaactgtaatactctaactaa

SEQ ID NO: 153064 - DNA, 25 bp, Artificial
  probe
  misc_feature (1)..(25): SEQ ID NO: 5285; WAN024DD4_at; Start 3; Stop 27
gcaaaatttggctctggtggacaat

SEQ ID NO: 153065 - DNA, 25 bp, Artificial
  probe
  misc_feature (1)..(25): SEQ ID NO: 5285; WAN024DD4_at; Start 2; Stop 26
tgcaaaatttggctctggtggacaa

SEQ ID NO: 153066 - DNA, 25 bp, Artificial
  probe
  misc_feature (1)..(25): SEQ ID NO: 5285; WAN024DD4_at; Start 8; Stop 32
atttggctctggtggacaatgctga

SEQ ID NO: 153067 - DNA, 25 bp, Artificial
  probe
  misc_feature (1)..(25): SEQ ID NO: 5285; WAN024DD4_at; Start 56; Stop 80
taaagataaaatacttggaatatcc

SEQ ID NO: 153068 - DNA, 25 bp, Artificial
  probe
  misc_feature (1)..(25): SEQ ID NO: 5285; WAN024DD4_at; Start 49; Stop 73
tttcatataaagataaaatacttgg

SEQ ID NO: 153069 - DNA, 25 bp, Artificial
  probe
  misc_feature (1)..(25): SEQ ID NO: 5285; WAN024DD4_at; Start 18; Stop 42
ggtggacaatgctgaaaatacagag

SEQ ID NO: 153070 - DNA, 25 bp, Artificial
  probe
  misc_feature (1)..(25): SEQ ID NO: 5285; WAN024DD4_at; Start 78; Stop 102
tccttttcagttagtatcctacaac

SEQ ID NO: 153071 - DNA, 25 bp, Artificial
  probe
  misc_feature (1)..(25): SEQ ID NO: 5285; WAN024DD4_at; Start 38; Stop 62
cagaggattactttcatataaagat

SEQ ID NO: 153072 - DNA, 25 bp, Artificial
  probe
  misc_feature (1)..(25): SEQ ID NO: 5285; WAN024DD4_at; Start 63; Stop 87
aaaatacttggaatatccttttcag

SEQ ID NO: 153073 - DNA, 25 bp, Artificial
  probe
  misc_feature (1)..(25): SEQ ID NO: 5285; WAN024DD4_at; Start 14; Stop 38
ctctggtggacaatgctgaaaatac

SEQ ID NO: 153074 - DNA, 25 bp, Artificial
  probe
  misc_feature (1)..(25): SEQ ID NO: 5285; WAN024DD4_at; Start 31; Stop 55
gaaaatacagaggattactttcata

SEQ ID NO: 153075 - DNA, 25 bp, Artificial
  probe
  misc_feature (1)..(25): SEQ ID NO: 5285; WAN024DD4_at; Start 6; Stop 30
aaatttggctctggtggacaatgct

SEQ ID NO: 153076 - DNA, 25 bp, Artificial
  probe
  misc_feature (1)..(25): SEQ ID NO: 1500; WAN024DD5_at; Start 173; Stop 197
taggagattttgacagcatttggca

SEQ ID NO: 153077 - DNA, 25 bp, Artificial
  probe
  misc_feature (1)..(25): SEQ ID NO: 1500; WAN024DD5_at; Start 181; Stop 205
tttgacagcatttggcaggaatatc

SEQ ID NO: 153078 - DNA, 25 bp, Artificial
  probe
  misc_feature (1)..(25): SEQ ID NO: 1500; WAN024DD5_at; Start 123; Stop 147
tgatgaggtcagtcgctttttggag

SEQ ID NO: 153079 - DNA, 25 bp, Artificial
  probe
  misc_feature (1)..(25): SEQ ID NO: 1500; WAN024DD5_at; Start 176; Stop 200
gagattttgacagcatttggcagga

SEQ ID NO: 153080 - DNA, 25 bp, Artificial
  probe
  misc_feature (1)..(25): SEQ ID NO: 1500; WAN024DD5_at; Start 33; Stop 57
cgagcgcaatcctaaaagtaacagt

SEQ ID NO: 153081 - DNA, 25 bp, Artificial
  probe
  misc_feature (1)..(25): SEQ ID NO: 1500; WAN024DD5_at; Start 11; Stop 35
cattttacacttggctcatgaccga

SEQ ID NO: 153082 - DNA, 25 bp, Artificial
  probe
  misc_feature (1)..(25): SEQ ID NO: 1500; WAN024DD5_at; Start 30; Stop 54
gaccgagcgcaatcctaaaagtaac

SEQ ID NO: 153083 - DNA, 25 bp, Artificial
  probe
  misc_feature (1)..(25): SEQ ID NO: 1500; WAN024DD5_at; Start 153; Stop 177
tgccagtttctcttttaacctagga

SEQ ID NO: 153084 - DNA, 25 bp, Artificial
  probe
  misc_feature (1)..(25): SEQ ID NO: 1500; WAN024DD5_at; Start 191; Stop 215
tttggcaggaatatctagaacacta

SEQ ID NO: 153085 - DNA, 25 bp, Artificial
  probe
  misc_feature (1)..(25): SEQ ID NO: 1500; WAN024DD5_at; Start 115; Stop 139
gatgattttgatgaggtcagtcgct

SEQ ID NO: 153086 - DNA, 25 bp, Artificial
  probe
  misc_feature (1)..(25): SEQ ID NO: 1500; WAN024DD5_at; Start 48; Stop 72
aagtaacagtcccaaagcaattttg

SEQ ID NO: 153087 - DNA, 25 bp, Artificial
  probe
  misc_feature (1)..(25): SEQ ID NO: 1500; WAN024DD5_at; Start 60; Stop 84
caaagcaattttggcagacctcgct

SEQ ID NO: 153088 - DNA, 25 bp, Artificial
  probe
  misc_feature (1)..(25): SEQ ID NO: 1500; WAN024DD5_at; Start 18; Stop 42
cacttggctcatgaccgagcgcaat

SEQ ID NO: 153089 - DNA, 25 bp, Artificial
  probe
  misc_feature (1)..(25): SEQ ID NO: 1500; WAN024DD5_at; Start 147; Stop 171
ggagcatgccagtttctcttttaac

SEQ ID NO: 153090 - DNA, 25 bp, Artificial
  probe
  misc_feature (1)..(25): SEQ ID NO: 1500; WAN024DD5_at; Start 168; Stop 192
taacctaggagattttgacagcatt

SEQ ID NO: 153091 - DNA, 25 bp, Artificial
  probe
  misc_feature (1)..(25): SEQ ID NO: 1500; WAN024DD5_at; Start 23; Stop 47
ggctcatgaccgagcgcaatcctaa

SEQ ID NO: 153092 - DNA, 25 bp, Artificial
  probe
  misc_feature (1)..(25): SEQ ID NO: 1500; WAN024DD5_at; Start 189; Stop 213
catttggcaggaatatctagaacac

SEQ ID NO: 153093 - DNA, 25 bp, Artificial
  probe
  misc_feature (1)..(25): SEQ ID NO: 1500; WAN024DD5_at; Start 165; Stop 189
ttttaacctaggagattttgacagc

SEQ ID NO: 153094 - DNA, 25 bp, Artificial
  probe
  misc_feature (1)..(25): SEQ ID NO: 1500; WAN024DD5_at; Start 132; Stop 156
cagtcgctttttggaggagcatgcc

SEQ ID NO: 153095 - DNA, 25 bp, Artificial
  probe
  misc_feature (1)..(25): SEQ ID NO: 1500; WAN024DD5_at; Start 141; Stop 165
tttggaggagcatgccagtttctct

SEQ ID NO: 153096 - DNA, 25 bp, Artificial
  probe
  misc_feature (1)..(25): SEQ ID NO: 1500; WAN024DD5_at; Start 69; Stop 93
tttggcagacctcgcttttgaagag

SEQ ID NO: 153097 - DNA, 25 bp, Artificial
  probe
  misc_feature (1)..(25): SEQ ID NO: 1500; WAN024DD5_at; Start 65; Stop 89
caattttggcagacctcgcttttga

SEQ ID NO: 153098 - DNA, 25 bp, Artificial
  probe
  misc_feature (1)..(25): SEQ ID NO: 1500; WAN024DD5_at; Start 3; Stop 27
gagaaaatcattttacacttggctc

SEQ ID NO: 153099 - DNA, 25 bp, Artificial
  probe
  misc_feature (1)..(25): SEQ ID NO: 1500; WAN024DD5_at; Start 128; Stop 152
aggtcagtcgctttttggaggagca

SEQ ID NO: 153100 - DNA, 25 bp, Artificial
  probe
  misc_feature (1)..(25): SEQ ID NO: 1500; WAN024DD5_at; Start 51; Stop 75
taacagtcccaaagcaattttggca

SEQ ID NO: 153101 - DNA, 25 bp, Artificial
  probe
  misc_feature (1)..(25): SEQ ID NO: 1500; WAN024DD5_at; Start 138; Stop 162
ctttttggaggagcatgccagtttc

SEQ ID NO: 153102 - DNA, 25 bp, Artificial
  probe
  misc_feature (1)..(25): SEQ ID NO: 1500; WAN024DD5_at; Start 42; Stop 66
tcctaaaagtaacagtcccaaagca

SEQ ID NO: 153103 - DNA, 25 bp, Artificial
  probe
  misc_feature (1)..(25): SEQ ID NO: 1500; WAN024DD5_at; Start 27; Stop 51
catgaccgagcgcaatcctaaaagt

SEQ ID NO: 153104 - DNA, 25 bp, Artificial
  probe
  misc_feature (1)..(25): SEQ ID NO: 1500; WAN024DD5_at; Start 184; Stop 208
gacagcatttggcaggaatatctag

SEQ ID NO: 153105 - DNA, 25 bp, Artificial
  probe
  misc_feature (1)..(25): SEQ ID NO: 1500; WAN024DD5_at; Start 16; Stop 40
tacacttggctcatgaccgagcgca

SEQ ID NO: 153106 - DNA, 25 bp, Artificial
  probe
  misc_feature (1)..(25): SEQ ID NO: 1500; WAN024DD5_at; Start 14; Stop 38
tttacacttggctcatgaccgagcg

SEQ ID NO: 153107 - DNA, 25 bp, Artificial
  probe
  misc_feature (1)..(25): SEQ ID NO: 1500; WAN024DD5_at; Start 112; Stop 136
acagatgattttgatgaggtcagtc

SEQ ID NO: 153108 - DNA, 25 bp, Artificial
  probe
  misc_feature (1)..(25): SEQ ID NO: 1500; WAN024DD5_at; Start 36; Stop 60
gcgcaatcctaaaagtaacagtccc

SEQ ID NO: 153109 - DNA, 25 bp, Artificial
  probe
  misc_feature (1)..(25): SEQ ID NO: 1500; WAN024DD5_at; Start 135; Stop 159
tcgctttttggaggagcatgccagt

SEQ ID NO: 153110 - DNA, 25 bp, Artificial
  probe
  misc_feature (1)..(25): SEQ ID NO: 5590; WAN024DD6_at; Start 52; Stop 76
actatcttcttccattttctgattt

SEQ ID NO: 153111 - DNA, 25 bp, Artificial
  probe
  misc_feature (1)..(25): SEQ ID NO: 5590; WAN024DD6_at; Start 64; Stop 88
cattttctgattttagttctgaaag

SEQ ID NO: 153112 - DNA, 25 bp, Artificial
  probe
  misc_feature (1)..(25): SEQ ID NO: 5590; WAN024DD6_at; Start 77; Stop 101
tagttctgaaagttccaaaaggtgc

SEQ ID NO: 153113 - DNA, 25 bp, Artificial
  probe
  misc_feature (1)..(25): SEQ ID NO: 5590; WAN024DD6_at; Start 53; Stop 77
ctatcttcttccattttctgatttt

SEQ ID NO: 153114 - DNA, 25 bp, Artificial
  probe
  misc_feature (1)..(25): SEQ ID NO: 5590; WAN024DD6_at; Start 57; Stop 81
cttcttccattttctgattttagtt

SEQ ID NO: 153115 - DNA, 25 bp, Artificial
  probe
  misc_feature (1)..(25): SEQ ID NO: 5590; WAN024DD6_at; Start 81; Stop 105
tctgaaagttccaaaaggtgcaacc

SEQ ID NO: 153116 - DNA, 25 bp, Artificial
  probe
  misc_feature (1)..(25): SEQ ID NO: 5590; WAN024DD6_at; Start 43; Stop 67
atttataatactatcttcttccatt

SEQ ID NO: 153117 - DNA, 25 bp, Artificial
  probe
  misc_feature (1)..(25): SEQ ID NO: 5590; WAN024DD6_at; Start 41; Stop 65
taatttataatactatcttcttcca

SEQ ID NO: 153118 - DNA, 25 bp, Artificial
  probe
  misc_feature (1)..(25): SEQ ID NO: 5590; WAN024DD6_at; Start 79; Stop 103
gttctgaaagttccaaaaggtgcaa

SEQ ID NO: 153119 - DNA, 25 bp, Artificial
  probe
  misc_feature (1)..(25): SEQ ID NO: 5590; WAN024DD6_at; Start 60; Stop 84
cttccattttctgattttagttctg

SEQ ID NO: 153120 - DNA, 25 bp, Artificial
  probe
  misc_feature (1)..(25): SEQ ID NO: 5590; WAN024DD6_at; Start 54; Stop 78
tatcttcttccattttctgatttta

SEQ ID NO: 153121 - DNA, 25 bp, Artificial
  probe
  misc_feature (1)..(25): SEQ ID NO: 5590; WAN024DD6_at; Start 71; Stop 95
tgattttagttctgaaagttccaaa

SEQ ID NO: 153122 - DNA, 25 bp, Artificial
  probe
  misc_feature (1)..(25): SEQ ID NO: 5590; WAN024DD6_at; Start 58; Stop 82
ttcttccattttctgattttagttc

SEQ ID NO: 153123 - DNA, 25 bp, Artificial
  probe
  misc_feature (1)..(25): SEQ ID NO: 5590; WAN024DD6_at; Start 70; Stop 94
ctgattttagttctgaaagttccaa

SEQ ID NO: 153124 - DNA, 25 bp, Artificial
  probe
  misc_feature (1)..(25): SEQ ID NO: 5590; WAN024DD6_at; Start 50; Stop 74
atactatcttcttccattttctgat

SEQ ID NO: 153125 - DNA, 25 bp, Artificial
  probe
  misc_feature (1)..(25): SEQ ID NO: 5590; WAN024DD6_at; Start 90; Stop 114
tccaaaaggtgcaaccgtatttaca

SEQ ID NO: 153126 - DNA, 25 bp, Artificial
  probe
  misc_feature (1)..(25): SEQ ID NO: 5590; WAN024DD6_at; Start 78; Stop 102
agttctgaaagttccaaaaggtgca

SEQ ID NO: 153127 - DNA, 25 bp, Artificial
  probe
  misc_feature (1)..(25): SEQ ID NO: 5590; WAN024DD6_at; Start 59; Stop 83
tcttccattttctgattttagttct

SEQ ID NO: 153128 - DNA, 25 bp, Artificial
  probe
  misc_feature (1)..(25): SEQ ID NO: 5590; WAN024DD6_at; Start 68; Stop 92
ttctgattttagttctgaaagttcc

SEQ ID NO: 153129 - DNA, 25 bp, Artificial
  probe
  misc_feature (1)..(25): SEQ ID NO: 5590; WAN024DD6_at; Start 51; Stop 75
tactatcttcttccattttctgatt

SEQ ID NO: 153130 - DNA, 25 bp, Artificial
  probe
  misc_feature (1)..(25): SEQ ID NO: 5590; WAN024DD6_at; Start 80; Stop 104
ttctgaaagttccaaaaggtgcaac

SEQ ID NO: 153131 - DNA, 25 bp, Artificial
  probe
  misc_feature (1)..(25): SEQ ID NO: 5590; WAN024DD6_at; Start 42; Stop 66
aatttataatactatcttcttccat

SEQ ID NO: 153132 - DNA, 25 bp, Artificial
  probe
  misc_feature (1)..(25): SEQ ID NO: 5590; WAN024DD6_at; Start 67; Stop 91
tttctgattttagttctgaaagttc

SEQ ID NO: 153133 - DNA, 25 bp, Artificial
  probe
  misc_feature (1)..(25): SEQ ID NO: 5590; WAN024DD6_at; Start 82; Stop 106
ctgaaagttccaaaaggtgcaaccg

SEQ ID NO: 153134 - DNA, 25 bp, Artificial
  probe
  misc_feature (1)..(25): SEQ ID NO: 5590; WAN024DD6_at; Start 56; Stop 80
tcttcttccattttctgattttagt

SEQ ID NO: 153135 - DNA, 25 bp, Artificial
  probe
  misc_feature (1)..(25): SEQ ID NO: 5590; WAN024DD6_at; Start 69; Stop 93
tctgattttagttctgaaagttcca

SEQ ID NO: 153136 - DNA, 25 bp, Artificial
  probe
  misc_feature (1)..(25): SEQ ID NO: 5590; WAN024DD6_at; Start 62; Stop 86
tccattttctgattttagttctgaa

SEQ ID NO: 153137 - DNA, 25 bp, Artificial
  probe
  misc_feature (1)..(25): SEQ ID NO: 5590; WAN024DD6_at; Start 44; Stop 68
tttataatactatcttcttccattt

SEQ ID NO: 153138 - DNA, 25 bp, Artificial
  probe
  misc_feature (1)..(25): SEQ ID NO: 5590; WAN024DD6_at; Start 48; Stop 72
taatactatcttcttccattttctg

SEQ ID NO: 153139 - DNA, 25 bp, Artificial
  probe
  misc_feature (1)..(25): SEQ ID NO: 5590; WAN024DD6_at; Start 63; Stop 87
ccattttctgattttagttctgaaa

SEQ ID NO: 153140 - DNA, 25 bp, Artificial
  probe
  misc_feature (1)..(25): SEQ ID NO: 5590; WAN024DD6_at; Start 49; Stop 73
aatactatcttcttccattttctga

SEQ ID NO: 153141 - DNA, 25 bp, Artificial
  probe
  misc_feature (1)..(25): SEQ ID NO: 5590; WAN024DD6_at; Start 61; Stop 85
ttccattttctgattttagttctga

SEQ ID NO: 153142 - DNA, 25 bp, Artificial
  probe
  misc_feature (1)..(25): SEQ ID NO: 5590; WAN024DD6_at; Start 46; Stop 70
tataatactatcttcttccattttc

SEQ ID NO: 153143 - DNA, 25 bp, Artificial
  probe
  misc_feature (1)..(25): SEQ ID NO: 5590; WAN024DD6_at; Start 55; Stop 79
atcttcttccattttctgattttag

SEQ ID NO: 153144 - DNA, 25 bp, Artificial
  probe
  misc_feature (1)..(25): SEQ ID NO: 5175; WAN024DD7_at; Start 405; Stop 429
tgaaccgcatatgagaaagtgggct

SEQ ID NO: 153145 - DNA, 25 bp, Artificial
  probe
  misc_feature (1)..(25): SEQ ID NO: 5175; WAN024DD7_at; Start 429; Stop 453
tgatgaagcgactaaaacagcgact

SEQ ID NO: 153146 - DNA, 25 bp, Artificial
  probe
  misc_feature (1)..(25): SEQ ID NO: 5175; WAN024DD7_at; Start 61; Stop 85
gctgagatagagaaaacatttgaga

SEQ ID NO: 153147 - DNA, 25 bp, Artificial
  probe
  misc_feature (1)..(25): SEQ ID NO: 5175; WAN024DD7_at; Start 507; Stop 531
cagaactaaaatcagaaaatggaag

SEQ ID NO: 153148 - DNA, 25 bp, Artificial
  probe
  misc_feature (1)..(25): SEQ ID NO: 5175; WAN024DD7_at; Start 499; Stop 523
ggaactttcagaactaaaatcagaa

SEQ ID NO: 153149 - DNA, 25 bp, Artificial
  probe
  misc_feature (1)..(25): SEQ ID NO: 5175; WAN024DD7_at; Start 305; Stop 329
cctacgctcatttatctctgcaaga

SEQ ID NO: 153150 - DNA, 25 bp, Artificial
  probe
  misc_feature (1)..(25): SEQ ID NO: 5175; WAN024DD7_at; Start 293; Stop 317
ggttcacagatacctacgctcattt

SEQ ID NO: 153151 - DNA, 25 bp, Artificial
  probe
  misc_feature (1)..(25): SEQ ID NO: 5175; WAN024DD7_at; Start 245; Stop 269
caccatcggataaatttaaatggaa

SEQ ID NO: 153152 - DNA, 25 bp, Artificial
  probe
  misc_feature (1)..(25): SEQ ID NO: 5175; WAN024DD7_at; Start 286; Stop 310
tatcagtggttcacagatacctacg

SEQ ID NO: 153153 - DNA, 25 bp, Artificial
  probe
  misc_feature (1)..(25): SEQ ID NO: 5175; WAN024DD7_at; Start 360; Stop 384
ttctatctctgcaatgattgattcg

SEQ ID NO: 153154 - DNA, 25 bp, Artificial
  probe
  misc_feature (1)..(25): SEQ ID NO: 5175; WAN024DD7_at; Start 436; Stop 460
gcgactaaaacagcgacttgggaag

SEQ ID NO: 153155 - DNA, 25 bp, Artificial
  probe
  misc_feature (1)..(25): SEQ ID NO: 5175; WAN024DD7_at; Start 148; Stop 172
gacagaactccagcagaaaaccttg

SEQ ID NO: 153156 - DNA, 25 bp, Artificial
  probe
  misc_feature (1)..(25): SEQ ID NO: 5175; WAN024DD7_at; Start 1; Stop 25
ttgataaatcagaaagaaggtgatt

SEQ ID NO: 153157 - DNA, 25 bp, Artificial
  probe
  misc_feature (1)..(25): SEQ ID NO: 5175; WAN024DD7_at; Start 383; Stop 407
cgttgagtgaggaagaattatttga

SEQ ID NO: 153158 - DNA, 25 bp, Artificial
  probe
  misc_feature (1)..(25): SEQ ID NO: 5175; WAN024DD7_at; Start 204; Stop 228
taaatgggaagaagatgaaagaaag

SEQ ID NO: 153159 - DNA, 25 bp, Artificial
  probe
  misc_feature (1)..(25): SEQ ID NO: 5175; WAN024DD7_at; Start 518; Stop 542
tcagaaaatggaagaagatagtatt

SEQ ID NO: 153160 - DNA, 25 bp, Artificial
  probe
  misc_feature (1)..(25): SEQ ID NO: 5175; WAN024DD7_at; Start 16; Stop 40
gaaggtgattttttgcgaacatacg

SEQ ID NO: 153161 - DNA, 25 bp, Artificial
  probe
  misc_feature (1)..(25): SEQ ID NO: 5175; WAN024DD7_at; Start 393; Stop 417
ggaagaattatttgaaccgcatatg

SEQ ID NO: 153162 - DNA, 25 bp, Artificial
  probe
  misc_feature (1)..(25): SEQ ID NO: 5175; WAN024DD7_at; Start 195; Stop 219
cttggttcttaaatgggaagaagat

SEQ ID NO: 153163 - DNA, 25 bp, Artificial
  probe
  misc_feature (1)..(25): SEQ ID NO: 5175; WAN024DD7_at; Start 261; Stop 285
taaatggaatcaacttggtgaatta

SEQ ID NO: 153164 - DNA, 25 bp, Artificial
  probe
  misc_feature (1)..(25): SEQ ID NO: 5175; WAN024DD7_at; Start 446; Stop 470
cagcgacttgggaagtgtataagtt

SEQ ID NO: 153165 - DNA, 25 bp, Artificial
  probe
  misc_feature (1)..(25): SEQ ID NO: 5175; WAN024DD7_at; Start 45; Stop 69
taaagaagaactaaaagctgagata

SEQ ID NO: 153166 - DNA, 25 bp, Artificial
  probe
  misc_feature (1)..(25): SEQ ID NO: 5175; WAN024DD7_at; Start 316; Stop 340
ttatctctgcaagagttgaaagcaa

SEQ ID NO: 153167 - DNA, 25 bp, Artificial
  probe
  misc_feature (1)..(25): SEQ ID NO: 5175; WAN024DD7_at; Start 136; Stop 160
gctgatgaagttgacagaactccag

SEQ ID NO: 153168 - DNA, 25 bp, Artificial
  probe
  misc_feature (1)..(25): SEQ ID NO: 5175; WAN024DD7_at; Start 371; Stop 395
caatgattgattcgttgagtgagga

SEQ ID NO: 153169 - DNA, 25 bp, Artificial
  probe
  misc_feature (1)..(25): SEQ ID NO: 5175; WAN024DD7_at; Start 168; Stop 192
ccttgcttatcaggttggttggacc

SEQ ID NO: 153170 - DNA, 25 bp, Artificial
  probe
  misc_feature (1)..(25): SEQ ID NO: 5175; WAN024DD7_at; Start 486; Stop 510
ggttgcaccttttggaactttcaga

SEQ ID NO: 153171 - DNA, 25 bp, Artificial
  probe
  misc_feature (1)..(25): SEQ ID NO: 5175; WAN024DD7_at; Start 470; Stop 494
ttattcatgtaaatacggttgcacc

SEQ ID NO: 153172 - DNA, 25 bp, Artificial
  probe
  misc_feature (1)..(25): SEQ ID NO: 5175; WAN024DD7_at; Start 158; Stop 182
cagcagaaaaccttgcttatcaggt

SEQ ID NO: 153173 - DNA, 25 bp, Artificial
  probe
  misc_feature (1)..(25): SEQ ID NO: 5175; WAN024DD7_at; Start 419; Stop 443
gaaagtgggctgatgaagcgactaa

SEQ ID NO: 153174 - DNA, 25 bp, Artificial
  probe
  misc_feature (1)..(25): SEQ ID NO: 5175; WAN024DD7_at; Start 122; Stop 146
taaaagataagagagctgatgaagt

SEQ ID NO: 153175 - DNA, 25 bp, Artificial
  probe
  misc_feature (1)..(25): SEQ ID NO: 5175; WAN024DD7_at; Start 175; Stop 199
tatcaggttggttggaccaacttgg

SEQ ID NO: 153176 - DNA, 25 bp, Artificial
  probe
  misc_feature (1)..(25): SEQ ID NO: 5175; WAN024DD7_at; Start 230; Stop 254
ggcttcaagtaaaaacaccatcgga

SEQ ID NO: 153177 - DNA, 25 bp, Artificial
  probe
  misc_feature (1)..(25): SEQ ID NO: 5175; WAN024DD7_at; Start 271; Stop 295
caacttggtgaattatatcagtggt

SEQ ID NO: 153178 - DNA, 25 bp, Artificial
  probe
  misc_feature (1)..(25): SEQ ID NO: 6264; WAN024DD8_at; Start 3311; Stop 3335
gaaaaggaagagattacgccccagc

SEQ ID NO: 153179 - DNA, 25 bp, Artificial
  probe
  misc_feature (1)..(25): SEQ ID NO: 6264; WAN024DD8_at; Start 259; Stop 283
tatacaaatcaaacatgggcagagt

SEQ ID NO: 153180 - DNA, 25 bp, Artificial
  probe
  misc_feature (1)..(25): SEQ ID NO: 6264; WAN024DD8_at; Start 3160; Stop 3184
gtagcaactgctcatagaaaccatg

SEQ ID NO: 153181 - DNA, 25 bp, Artificial
  probe
  misc_feature (1)..(25): SEQ ID NO: 6264; WAN024DD8_at; Start 1703; Stop 1727
cagtctggccttatggagcaattga

SEQ ID NO: 153182 - DNA, 25 bp, Artificial
  probe
  misc_feature (1)..(25): SEQ ID NO: 6264; WAN024DD8_at; Start 4040; Stop 4064
caccaggtgccttgatgtttaaaca

SEQ ID NO: 153183 - DNA, 25 bp, Artificial
  probe
  misc_feature (1)..(25): SEQ ID NO: 6264; WAN024DD8_at; Start 3364; Stop 3388
cctatgggaggttggtatgcttacc

SEQ ID NO: 153184 - DNA, 25 bp, Artificial
  probe
  misc_feature (1)..(25): SEQ ID NO: 6264; WAN024DD8_at; Start 2105; Stop 2129
gaaatgctctcactcctgaacagga

SEQ ID NO: 153185 - DNA, 25 bp, Artificial
  probe
  misc_feature (1)..(25): SEQ ID NO: 6264; WAN024DD8_at; Start 1044; Stop 1068
tatgacatctaatcctacaggtacg

SEQ ID NO: 153186 - DNA, 25 bp, Artificial
  probe
  misc_feature (1)..(25): SEQ ID NO: 6264; WAN024DD8_at; Start 4026; Stop 4050
gaatagtgtaggttcaccaggtgcc

SEQ ID NO: 153187 - DNA, 25 bp, Artificial
  probe
  misc_feature (1)..(25): SEQ ID NO: 6264; WAN024DD8_at; Start 3579; Stop 3603
tcctgttccaggtcagccgggttgg

SEQ ID NO: 153188 - DNA, 25 bp, Artificial
  probe
  misc_feature (1)..(25): SEQ ID NO: 6264; WAN024DD8_at; Start 779; Stop 803
cacacttgtctgataaaccgaccga

SEQ ID NO: 153189 - DNA, 25 bp, Artificial
  probe
  misc_feature (1)..(25): SEQ ID NO: 6264; WAN024DD8_at; Start 1850; Stop 1874
caggcgattcgggtagtgattctaa

SEQ ID NO: 153190 - DNA, 25 bp, Artificial
  probe
  misc_feature (1)..(25): SEQ ID NO: 6264; WAN024DD8_at; Start 1686; Stop 1710
tggaggagcctcttctacagtctgg

SEQ ID NO: 153191 - DNA, 25 bp, Artificial
  probe
  misc_feature (1)..(25): SEQ ID NO: 6264; WAN024DD8_at; Start 438; Stop 462
catagatcgaaaagctacggtcacg

SEQ ID NO: 153192 - DNA, 25 bp, Artificial
  probe
  misc_feature (1)..(25): SEQ ID NO: 6264; WAN024DD8_at; Start 2825; Stop 2849
ctagcgaaacgaagcagaaggattt

SEQ ID NO: 153193 - DNA, 25 bp, Artificial
  probe
  misc_feature (1)..(25): SEQ ID NO: 6264; WAN024DD8_at; Start 1737; Stop 1761
cagctatgcaaaagtgaccaaaggg

SEQ ID NO: 153194 - DNA, 25 bp, Artificial
  probe
  misc_feature (1)..(25): SEQ ID NO: 6264; WAN024DD8_at; Start 3272; Stop 3296
tcccaggaagtgaatgggtagacca

SEQ ID NO: 153195 - DNA, 25 bp, Artificial
  probe
  misc_feature (1)..(25): SEQ ID NO: 6264; WAN024DD8_at; Start 119; Stop 143
taaaagataacggaacagcgaccca

SEQ ID NO: 153196 - DNA, 25 bp, Artificial
  probe
  misc_feature (1)..(25): SEQ ID NO: 6264; WAN024DD8_at; Start 976; Stop 1000
tattacatggagagagttatccctc

SEQ ID NO: 153197 - DNA, 25 bp, Artificial
  probe
  misc_feature (1)..(25): SEQ ID NO: 6264; WAN024DD8_at; Start 1093; Stop 1117
tcgcgtaatgtaaaaccggatggaa

SEQ ID NO: 153198 - DNA, 25 bp, Artificial
  probe
  misc_feature (1)..(25): SEQ ID NO: 6264; WAN024DD8_at; Start 201; Stop 225
tgacaaaacagctttgggaagcgct

SEQ ID NO: 153199 - DNA, 25 bp, Artificial
  probe
  misc_feature (1)..(25): SEQ ID NO: 6264; WAN024DD8_at; Start 1269; Stop 1293
ggtattcccagatagcaatcaagga

SEQ ID NO: 153200 - DNA, 25 bp, Artificial
  probe
  misc_feature (1)..(25): SEQ ID NO: 6264; WAN024DD8_at; Start 338; Stop 362
gcgacgttaacgaagctgctgaaaa

SEQ ID NO: 153201 - DNA, 25 bp, Artificial
  probe
  misc_feature (1)..(25): SEQ ID NO: 6264; WAN024DD8_at; Start 3718; Stop 3742
tataacgatactctcatgatggtgg

SEQ ID NO: 153202 - DNA, 25 bp, Artificial
  probe
  misc_feature (1)..(25): SEQ ID NO: 6264; WAN024DD8_at; Start 278; Stop 302
cagagttggaaacagcgcttacagc

SEQ ID NO: 153203 - DNA, 25 bp, Artificial
  probe
  misc_feature (1)..(25): SEQ ID NO: 6264; WAN024DD8_at; Start 3097; Stop 3121
tttgtcagccgtgaaaaacgcccta

SEQ ID NO: 153204 - DNA, 25 bp, Artificial
  probe
  misc_feature (1)..(25): SEQ ID NO: 6264; WAN024DD8_at; Start 1635; Stop 1659
tactgagtcagttgctaaaggaaca

SEQ ID NO: 153205 - DNA, 25 bp, Artificial
  probe
  misc_feature (1)..(25): SEQ ID NO: 6264; WAN024DD8_at; Start 2235; Stop 2259
tagtcagaagcgatataaggtaacc

SEQ ID NO: 153206 - DNA, 25 bp, Artificial
  probe
  misc_feature (1)..(25): SEQ ID NO: 6264; WAN024DD8_at; Start 3538; Stop 3562
aatatgggacctgaagcttatgctc

SEQ ID NO: 153207 - DNA, 25 bp, Artificial
  probe
  misc_feature (1)..(25): SEQ ID NO: 6264; WAN024DD8_at; Start 2567; Stop 2591
gagaatctagtggagctgtcgctgc

SEQ ID NO: 153208 - DNA, 25 bp, Artificial
  probe
  misc_feature (1)..(25): SEQ ID NO: 6264; WAN024DD8_at; Start 2944; Stop 2968
gaggaacgtccatccttagtagagg

SEQ ID NO: 153209 - DNA, 25 bp, Artificial
  probe
  misc_feature (1)..(25): SEQ ID NO: 6264; WAN024DD8_at; Start 1833; Stop 1857
tgttcaaggcatcagctcaggcgat

SEQ ID NO: 153210 - DNA, 25 bp, Artificial
  probe
  misc_feature (1)..(25): SEQ ID NO: 6264; WAN024DD8_at; Start 1658; Stop 1682
cattagaaaccaagcaaggagggca

SEQ ID NO: 153211 - DNA, 25 bp, Artificial
  probe
  misc_feature (1)..(25): SEQ ID NO: 6264; WAN024DD8_at; Start 391; Stop 415
gaattgtctgaaaagccacgtttga

SEQ ID NO: 153212 - DNA, 25 bp, Artificial
  probe
  misc_feature (1)..(25): SEQ ID NO: 3618; WAN024DD9_at; Start 3072; Stop 3096
tatcgttaacaaagctgcagatggt

SEQ ID NO: 153213 - DNA, 25 bp, Artificial
  probe
  misc_feature (1)..(25): SEQ ID NO: 3618; WAN024DD9_at; Start 1652; Stop 1676
caagtaagacttggcctgtaggtac

SEQ ID NO: 153214 - DNA, 25 bp, Artificial
  probe
  misc_feature (1)..(25): SEQ ID NO: 3618; WAN024DD9_at; Start 77; Stop 101
caaaaggtgtctatgcttcagagcc

SEQ ID NO: 153215 - DNA, 25 bp, Artificial
  probe
  misc_feature (1)..(25): SEQ ID NO: 3618; WAN024DD9_at; Start 3297; Stop 3321
taatggaacaggagcttatgctgct

SEQ ID NO: 153216 - DNA, 25 bp, Artificial
  probe
  misc_feature (1)..(25): SEQ ID NO: 3618; WAN024DD9_at; Start 3411; Stop 3435
tgaaacaacacacgtcaacgaccgt

SEQ ID NO: 153217 - DNA, 25 bp, Artificial
  probe
  misc_feature (1)..(25): SEQ ID NO: 3618; WAN024DD9_at; Start 226; Stop 250
tacagtgatagaagttggcaaaacc

SEQ ID NO: 153218 - DNA, 25 bp, Artificial
  probe
  misc_feature (1)..(25): SEQ ID NO: 3618; WAN024DD9_at; Start 1044; Stop 1068
tcgtctgggacaatcaatgagcgct

SEQ ID NO: 153219 - DNA, 25 bp, Artificial
  probe
  misc_feature (1)..(25): SEQ ID NO: 3618; WAN024DD9_at; Start 1691; Stop 1715
tcagctatgctaagattatccgtgg

SEQ ID NO: 153220 - DNA, 25 bp, Artificial
  probe
  misc_feature (1)..(25): SEQ ID NO: 3618; WAN024DD9_at; Start 1514; Stop 1538
cacgcgccagcttgttagttcctaa

SEQ ID NO: 153221 - DNA, 25 bp, Artificial
  probe
  misc_feature (1)..(25): SEQ ID NO: 3618; WAN024DD9_at; Start 2709; Stop 2733
taaaggttcacgtacattcgacgca

SEQ ID NO: 153222 - DNA, 25 bp, Artificial
  probe
  misc_feature (1)..(25): SEQ ID NO: 3618; WAN024DD9_at; Start 3503; Stop 3527
tacaaactcctgttactggtagtgg

SEQ ID NO: 153223 - DNA, 25 bp, Artificial
  probe
  misc_feature (1)..(25): SEQ ID NO: 3618; WAN024DD9_at; Start 3872; Stop 3896
tgactaatcgcaatccaggtaatgg

SEQ ID NO: 153224 - DNA, 25 bp, Artificial
  probe
  misc_feature (1)..(25): SEQ ID NO: 3618; WAN024DD9_at; Start 1307; Stop 1331
aaattacaggcacactttcaggtcg

SEQ ID NO: 153225 - DNA, 25 bp, Artificial
  probe
  misc_feature (1)..(25): SEQ ID NO: 3618; WAN024DD9_at; Start 2489; Stop 2513
aactaaatgattctccagctgctcg

SEQ ID NO: 153226 - DNA, 25 bp, Artificial
  probe
  misc_feature (1)..(25): SEQ ID NO: 3618; WAN024DD9_at; Start 2854; Stop 2878
gaccatgtctacatcgcagaacgcg

SEQ ID NO: 153227 - DNA, 25 bp, Artificial
  probe
  misc_feature (1)..(25): SEQ ID NO: 3618; WAN024DD9_at; Start 3014; Stop 3038
caattgcctttggtagtgcagagcg

SEQ ID NO: 153228 - DNA, 25 bp, Artificial
  probe
  misc_feature (1)..(25): SEQ ID NO: 3618; WAN024DD9_at; Start 1058; Stop 1082
caatgagcgctagaaatgttgttcc

SEQ ID NO: 153229 - DNA, 25 bp, Artificial
  probe
  misc_feature (1)..(25): SEQ ID NO: 3618; WAN024DD9_at; Start 1577; Stop 1601
caaaagctctcctaactgagtcggt

SEQ ID NO: 153230 - DNA, 25 bp, Artificial
  probe
  misc_feature (1)..(25): SEQ ID NO: 3618; WAN024DD9_at; Start 1409; Stop 1433
actctacaagtggaaatggctctca

SEQ ID NO: 153231 - DNA, 25 bp, Artificial
  probe
  misc_feature (1)..(25): SEQ ID NO: 3618; WAN024DD9_at; Start 2838; Stop 2862
tattgatgctacagaagaccatgtc

SEQ ID NO: 153232 - DNA, 25 bp, Artificial
  probe
  misc_feature (1)..(25): SEQ ID NO: 3618; WAN024DD9_at; Start 3437; Stop 3461
cgatttacttaggtggctttggaca

SEQ ID NO: 153233 - DNA, 25 bp, Artificial
  probe
  misc_feature (1)..(25): SEQ ID NO: 3618; WAN024DD9_at; Start 3977; Stop 4001
gtaatactagtaaaggtgctcctgg

SEQ ID NO: 153234 - DNA, 25 bp, Artificial
  probe
  misc_feature (1)..(25): SEQ ID NO: 3618; WAN024DD9_at; Start 1027; Stop 1051
gatccttcaaaagaatatcgtctgg

SEQ ID NO: 153235 - DNA, 25 bp, Artificial
  probe
  misc_feature (1)..(25): SEQ ID NO: 3618; WAN024DD9_at; Start 2872; Stop 2896
gaacgcgcttctgaggtcgaagaaa

SEQ ID NO: 153236 - DNA, 25 bp, Artificial
  probe
  misc_feature (1)..(25): SEQ ID NO: 3618; WAN024DD9_at; Start 2089; Stop 2113
gaagttctttctgttaccgcgatga

SEQ ID NO: 153237 - DNA, 25 bp, Artificial
  probe
  misc_feature (1)..(25): SEQ ID NO: 3618; WAN024DD9_at; Start 3220; Stop 3244
tatggccgctataataccgacaaag

SEQ ID NO: 153238 - DNA, 25 bp, Artificial
  probe
  misc_feature (1)..(25): SEQ ID NO: 3618; WAN024DD9_at; Start 2504; Stop 2528
cagctgctcgtcaaatgattcgtga

SEQ ID NO: 153239 - DNA, 25 bp, Artificial
  probe
  misc_feature (1)..(25): SEQ ID NO: 3618; WAN024DD9_at; Start 2153; Stop 2177
aaattattgttcactatgcggacgg

SEQ ID NO: 153240 - DNA, 25 bp, Artificial
  probe
  misc_feature (1)..(25): SEQ ID NO: 3618; WAN024DD9_at; Start 109; Stop 133
cagcctgaggtaaatagcgagacaa

SEQ ID NO: 153241 - DNA, 25 bp, Artificial
  probe
  misc_feature (1)..(25): SEQ ID NO: 3618; WAN024DD9_at; Start 1497; Stop 1521
tattacaggaaacaaaacacgcgcc

SEQ ID NO: 153242 - DNA, 25 bp, Artificial
  probe
  misc_feature (1)..(25): SEQ ID NO: 3618; WAN024DD9_at; Start 3462; Stop 3486
ccgtgaaggtactgatgctgaagca

SEQ ID NO: 153243 - DNA, 25 bp, Artificial
  probe
  misc_feature (1)..(25): SEQ ID NO: 3618; WAN024DD9_at; Start 1709; Stop 1733
tccgtggagaggagttattcggctc

SEQ ID NO: 153244 - DNA, 25 bp, Artificial
  probe
  misc_feature (1)..(25): SEQ ID NO: 3618; WAN024DD9_at; Start 2726; Stop 2750
tcgacgcattcggtcaagtattggc

SEQ ID NO: 153245 - DNA, 25 bp, Artificial
  probe
  misc_feature (1)..(25): SEQ ID NO: 3618; WAN024DD9_at; Start 141; Stop 165
taaaacggctattgacgctctaaac

SEQ ID NO: 153246 - DNA, 25 bp, Artificial
  probe
  misc_feature (1)..(25): SEQ ID NO: 4812; WAN024DDA-3_at; Start 77; Stop 101
tgtggtaggagctgggcaattggtc

SEQ ID NO: 153247 - DNA, 25 bp, Artificial
  probe
  misc_feature (1)..(25): SEQ ID NO: 4812; WAN024DDA-3_at; Start 73; Stop 97
aaactgtggtaggagctgggcaatt

SEQ ID NO: 153248 - DNA, 25 bp, Artificial
  probe
  misc_feature (1)..(25): SEQ ID NO: 4812; WAN024DDA-3_at; Start 76; Stop 100
ctgtggtaggagctgggcaattggt

SEQ ID NO: 153249 - DNA, 25 bp, Artificial
  probe
  misc_feature (1)..(25): SEQ ID NO: 4812; WAN024DDA-3_at; Start 74; Stop 98
aactgtggtaggagctgggcaattg

SEQ ID NO: 153250 - DNA, 25 bp, Artificial
  probe
  misc_feature (1)..(25): SEQ ID NO: 4812; WAN024DDA-3_at; Start 79; Stop 103
tggtaggagctgggcaattggtcct

SEQ ID NO: 153251 - DNA, 25 bp, Artificial
  probe
  misc_feature (1)..(25): SEQ ID NO: 4812; WAN024DDA-3_at; Start 244; Stop 268
cacaagaactaggtaaataactaat

SEQ ID NO: 153252 - DNA, 25 bp, Artificial
  probe
  misc_feature (1)..(25): SEQ ID NO: 4812; WAN024DDA-3_at; Start 75; Stop 99
actgtggtaggagctgggcaattgg

SEQ ID NO: 153253 - DNA, 25 bp, Artificial
  probe
  misc_feature (1)..(25): SEQ ID NO: 4812; WAN024DDA-3_at; Start 72; Stop 96
caaactgtggtaggagctgggcaat

SEQ ID NO: 153254 - DNA, 25 bp, Artificial
  probe
  misc_feature (1)..(25): SEQ ID NO: 4812; WAN024DDA-3_at; Start 78; Stop 102
gtggtaggagctgggcaattggtcc

SEQ ID NO: 153255 - DNA, 25 bp, Artificial
  probe
  misc_feature (1)..(25): SEQ ID NO: 1101; WAN024DDA-5_at; Start 205; Stop 229
gctcagttttctgaactgctttctc

SEQ ID NO: 153256 - DNA, 25 bp, Artificial
  probe
  misc_feature (1)..(25): SEQ ID NO: 1101; WAN024DDA-5_at; Start 236; Stop 260
agaccatccttgaaaaaagagaaag

SEQ ID NO: 153257 - DNA, 25 bp, Artificial
  probe
  misc_feature (1)..(25): SEQ ID NO: 1101; WAN024DDA-5_at; Start 77; Stop 101
atgagattctccttgccaatcgtag

SEQ ID NO: 153258 - DNA, 25 bp, Artificial
  probe
  misc_feature (1)..(25): SEQ ID NO: 1101; WAN024DDA-5_at; Start 207; Stop 231
tcagttttctgaactgctttctcaa

SEQ ID NO: 153259 - DNA, 25 bp, Artificial
  probe
  misc_feature (1)..(25): SEQ ID NO: 1101; WAN024DDA-5_at; Start 74; Stop 98
cagatgagattctccttgccaatcg

SEQ ID NO: 153260 - DNA, 25 bp, Artificial
  probe
  misc_feature (1)..(25): SEQ ID NO: 1101; WAN024DDA-5_at; Start 206; Stop 230
ctcagttttctgaactgctttctca

SEQ ID NO: 153261 - DNA, 25 bp, Artificial
  probe
  misc_feature (1)..(25): SEQ ID NO: 1101; WAN024DDA-5_at; Start 240; Stop 264
catccttgaaaaaagagaaagtctt

SEQ ID NO: 153262 - DNA, 25 bp, Artificial
  probe
  misc_feature (1)..(25): SEQ ID NO: 1101; WAN024DDA-5_at; Start 197; Stop 221
ttaagcctgctcagttttctgaact

SEQ ID NO: 153263 - DNA, 25 bp, Artificial
  probe
  misc_feature (1)..(25): SEQ ID NO: 1101; WAN024DDA-5_at; Start 71; Stop 95
cgtcagatgagattctccttgccaa

SEQ ID NO: 153264 - DNA, 25 bp, Artificial
  probe
  misc_feature (1)..(25): SEQ ID NO: 1101; WAN024DDA-5_at; Start 72; Stop 96
gtcagatgagattctccttgccaat

SEQ ID NO: 153265 - DNA, 25 bp, Artificial
  probe
  misc_feature (1)..(25): SEQ ID NO: 1101; WAN024DDA-5_at; Start 73; Stop 97
tcagatgagattctccttgccaatc

SEQ ID NO: 153266 - DNA, 25 bp, Artificial
  probe
  misc_feature (1)..(25): SEQ ID NO: 1101; WAN024DDA-5_at; Start 82; Stop 106
attctccttgccaatcgtagtcaag

SEQ ID NO: 153267 - DNA, 25 bp, Artificial
  probe
  misc_feature (1)..(25): SEQ ID NO: 1101; WAN024DDA-5_at; Start 9; Stop 33
tggatttatcggtttggggaatatg

SEQ ID NO: 153268 - DNA, 25 bp, Artificial
  probe
  misc_feature (1)..(25): SEQ ID NO: 1101; WAN024DDA-5_at; Start 16; Stop 40
atcggtttggggaatatgggtgcta

SEQ ID NO: 153269 - DNA, 25 bp, Artificial
  probe
  misc_feature (1)..(25): SEQ ID NO: 1101; WAN024DDA-5_at; Start 239; Stop 263
ccatccttgaaaaaagagaaagtct

SEQ ID NO: 153270 - DNA, 25 bp, Artificial
  probe
  misc_feature (1)..(25): SEQ ID NO: 1101; WAN024DDA-5_at; Start 2; Stop 26
tgaagattggatttatcggtttggg

SEQ ID NO: 153271 - DNA, 25 bp, Artificial
  probe
  misc_feature (1)..(25): SEQ ID NO: 1101; WAN024DDA-5_at; Start 200; Stop 224
agcctgctcagttttctgaactgct

SEQ ID NO: 153272 - DNA, 25 bp, Artificial
  probe
  misc_feature (1)..(25): SEQ ID NO: 1101; WAN024DDA-5_at; Start 196; Stop 220
gttaagcctgctcagttttctgaac

SEQ ID NO: 153273 - DNA, 25 bp, Artificial
  probe
  misc_feature (1)..(25): SEQ ID NO: 1101; WAN024DDA-5_at; Start 80; Stop 104
agattctccttgccaatcgtagtca

SEQ ID NO: 153274 - DNA, 25 bp, Artificial
  probe
  misc_feature (1)..(25): SEQ ID NO: 1101; WAN024DDA-5_at; Start 208; Stop 232
cagttttctgaactgctttctcaat

SEQ ID NO: 153275 - DNA, 25 bp, Artificial
  probe
  misc_feature (1)..(25): SEQ ID NO: 1101; WAN024DDA-5_at; Start 75; Stop 99
agatgagattctccttgccaatcgt

SEQ ID NO: 153276 - DNA, 25 bp, Artificial
  probe
  misc_feature (1)..(25): SEQ ID NO: 1101; WAN024DDA-5_at; Start 15; Stop 39
tatcggtttggggaatatgggtgct

SEQ ID NO: 153277 - DNA, 25 bp, Artificial
  probe
  misc_feature (1)..(25): SEQ ID NO: 1101; WAN024DDA-5_at; Start 81; Stop 105
gattctccttgccaatcgtagtcaa

SEQ ID NO: 153278 - DNA, 25 bp, Artificial
  probe
  misc_feature (1)..(25): SEQ ID NO: 1101; WAN024DDA-5_at; Start 78; Stop 102
tgagattctccttgccaatcgtagt

SEQ ID NO: 153279 - DNA, 25 bp, Artificial
  probe
  misc_feature (1)..(25): SEQ ID NO: 1101; WAN024DDA-5_at; Start 198; Stop 222
taagcctgctcagttttctgaactg

SEQ ID NO: 153280 - DNA, 25 bp, Artificial
  probe
  misc_feature (1)..(25): SEQ ID NO: 1101; WAN024DDA-5_at; Start 76; Stop 100
gatgagattctccttgccaatcgta

SEQ ID NO: 153281 - DNA, 25 bp, Artificial
  probe
  misc_feature (1)..(25): SEQ ID NO: 1101; WAN024DDA-5_at; Start 204; Stop 228
tgctcagttttctgaactgctttct

SEQ ID NO: 153282 - DNA, 25 bp, Artificial
  probe
  misc_feature (1)..(25): SEQ ID NO: 1101; WAN024DDA-5_at; Start 203; Stop 227
ctgctcagttttctgaactgctttc

SEQ ID NO: 153283 - DNA, 25 bp, Artificial
  probe
  misc_feature (1)..(25): SEQ ID NO: 1101; WAN024DDA-5_at; Start 17; Stop 41
tcggtttggggaatatgggtgctag

SEQ ID NO: 153284 - DNA, 25 bp, Artificial
  probe
  misc_feature (1)..(25): SEQ ID NO: 1101; WAN024DDA-5_at; Start 79; Stop 103
gagattctccttgccaatcgtagtc

SEQ ID NO: 153285 - DNA, 25 bp, Artificial
  probe
  misc_feature (1)..(25): SEQ ID NO: 1101; WAN024DDA-5_at; Start 199; Stop 223
aagcctgctcagttttctgaactgc

SEQ ID NO: 153286 - DNA, 25 bp, Artificial
  probe
  misc_feature (1)..(25): SEQ ID NO: 1101; WAN024DDA-5_at; Start 209; Stop 233
agttttctgaactgctttctcaata

SEQ ID NO: 153287 - DNA, 25 bp, Artificial
  probe
  misc_feature (1)..(25): SEQ ID NO: 1101; WAN024DDA-5_at; Start 201; Stop 225
gcctgctcagttttctgaactgctt

SEQ ID NO: 153288 - DNA, 25 bp, Artificial
  probe
  misc_feature (1)..(25): SEQ ID NO: 1101; WAN024DDA-5_at; Start 202; Stop 226
cctgctcagttttctgaactgcttt

SEQ ID NO: 153289 - DNA, 25 bp, Artificial
  probe
  misc_feature (1)..(25): SEQ ID NO: 5262; WAN024DDA-M_at; Start 3; Stop 27
gatttcgatggcagctggattgacc

SEQ ID NO: 153290 - DNA, 25 bp, Artificial
  probe
  misc_feature (1)..(25): SEQ ID NO: 5262; WAN024DDA-M_at; Start 97; Stop 121
tctatcgggcaaggagtgattagtt

SEQ ID NO: 153291 - DNA, 25 bp, Artificial
  probe
  misc_feature (1)..(25): SEQ ID NO: 5262; WAN024DDA-M_at; Start 7; Stop 31
tcgatggcagctggattgaccttag

SEQ ID NO: 153292 - DNA, 25 bp, Artificial
  probe
  misc_feature (1)..(25): SEQ ID NO: 5262; WAN024DDA-M_at; Start 83; Stop 107
ctaatacccctgcttctatcgggca

SEQ ID NO: 153293 - DNA, 25 bp, Artificial
  probe
  misc_feature (1)..(25): SEQ ID NO: 5262; WAN024DDA-M_at; Start 32; Stop 56
aaaaactagcaagtcttatcccaag

SEQ ID NO: 153294 - DNA, 25 bp, Artificial
  probe
  misc_feature (1)..(25): SEQ ID NO: 5262; WAN024DDA-M_at; Start 75; Stop 99
tatgatgcctaatacccctgcttct

SEQ ID NO: 153295 - DNA, 25 bp, Artificial
  probe
  misc_feature (1)..(25): SEQ ID NO: 5262; WAN024DDA-M_at; Start 9; Stop 33
gatggcagctggattgaccttagaa

SEQ ID NO: 153296 - DNA, 25 bp, Artificial
  probe
  misc_feature (1)..(25): SEQ ID NO: 5262; WAN024DDA-M_at; Start 95; Stop 119
cttctatcgggcaaggagtgattag

SEQ ID NO: 153297 - DNA, 25 bp, Artificial
  probe
  misc_feature (1)..(25): SEQ ID NO: 5262; WAN024DDA-M_at; Start 117; Stop 141
tagttatgccttgtctcctaattgc

SEQ ID NO: 153298 - DNA, 25 bp, Artificial
  probe
  misc_feature (1)..(25): SEQ ID NO: 5262; WAN024DDA-M_at; Start 101; Stop 125
tcgggcaaggagtgattagttatgc

SEQ ID NO: 153299 - DNA, 25 bp, Artificial
  probe
  misc_feature (1)..(25): SEQ ID NO: 5262; WAN024DDA-M_at; Start 64; Stop 88
cgaattattcgtatgatgcctaata

SEQ ID NO: 153300 - DNA, 25 bp, Artificial
  probe
  misc_feature (1)..(25): SEQ ID NO: 5262; WAN024DDA-M_at; Start 120; Stop 144
ttatgccttgtctcctaattgcagg

SEQ ID NO: 153301 - DNA, 25 bp, Artificial
  probe
  misc_feature (1)..(25): SEQ ID NO: 5262; WAN024DDA-M_at; Start 77; Stop 101
tgatgcctaatacccctgcttctat

SEQ ID NO: 153302 - DNA, 25 bp, Artificial
  probe
  misc_feature (1)..(25): SEQ ID NO: 5262; WAN024DDA-M_at; Start 13; Stop 37
gcagctggattgaccttagaaaaac

SEQ ID NO: 153303 - DNA, 25 bp, Artificial
  probe
  misc_feature (1)..(25): SEQ ID NO: 5262; WAN024DDA-M_at; Start 20; Stop 44
gattgaccttagaaaaactagcaag

SEQ ID NO: 153304 - DNA, 25 bp, Artificial
  probe
  misc_feature (1)..(25): SEQ ID NO: 5262; WAN024DDA-M_at; Start 29; Stop 53
tagaaaaactagcaagtcttatccc

SEQ ID NO: 153305 - DNA, 25 bp, Artificial
  probe
  misc_feature (1)..(25): SEQ ID NO: 5262; WAN024DDA-M_at; Start 2; Stop 26
tgatttcgatggcagctggattgac

SEQ ID NO: 153306 - DNA, 25 bp, Artificial
  probe
  misc_feature (1)..(25): SEQ ID NO: 5262; WAN024DDA-M_at; Start 69; Stop 93
tattcgtatgatgcctaatacccct

SEQ ID NO: 153307 - DNA, 25 bp, Artificial
  probe
  misc_feature (1)..(25): SEQ ID NO: 5262; WAN024DDA-M_at; Start 11; Stop 35
tggcagctggattgaccttagaaaa

SEQ ID NO: 153308 - DNA, 25 bp, Artificial
  probe
  misc_feature (1)..(25): SEQ ID NO: 5262; WAN024DDA-M_at; Start 5; Stop 29
tttcgatggcagctggattgacctt

SEQ ID NO: 153309 - DNA, 25 bp, Artificial
  probe
  misc_feature (1)..(25): SEQ ID NO: 5262; WAN024DDA-M_at; Start 23; Stop 47
tgaccttagaaaaactagcaagtct

SEQ ID NO: 153310 - DNA, 25 bp, Artificial
  probe
  misc_feature (1)..(25): SEQ ID NO: 5262; WAN024DDA-M_at; Start 85; Stop 109
aatacccctgcttctatcgggcaag

SEQ ID NO: 153311 - DNA, 25 bp, Artificial
  probe
  misc_feature (1)..(25): SEQ ID NO: 5262; WAN024DDA-M_at; Start 26; Stop 50
ccttagaaaaactagcaagtcttat

SEQ ID NO: 153312 - DNA, 25 bp, Artificial
  probe
  misc_feature (1)..(25): SEQ ID NO: 5262; WAN024DDA-M_at; Start 104; Stop 128
ggcaaggagtgattagttatgcctt

SEQ ID NO: 153313 - DNA, 25 bp, Artificial
  probe
  misc_feature (1)..(25): SEQ ID NO: 5262; WAN024DDA-M_at; Start 110; Stop 134
gagtgattagttatgccttgtctcc

SEQ ID NO: 153314 - DNA, 25 bp, Artificial
  probe
  misc_feature (1)..(25): SEQ ID NO: 5262; WAN024DDA-M_at; Start 80; Stop 104
tgcctaatacccctgcttctatcgg

SEQ ID NO: 153315 - DNA, 25 bp, Artificial
  probe
  misc_feature (1)..(25): SEQ ID NO: 5262; WAN024DDA-M_at; Start 87; Stop 111
tacccctgcttctatcgggcaagga

SEQ ID NO: 153316 - DNA, 25 bp, Artificial
  probe
  misc_feature (1)..(25): SEQ ID NO: 5262; WAN024DDA-M_at; Start 16; Stop 40
gctggattgaccttagaaaaactag

SEQ ID NO: 153317 - DNA, 25 bp, Artificial
  probe
  misc_feature (1)..(25): SEQ ID NO: 5262; WAN024DDA-M_at; Start 89; Stop 113
cccctgcttctatcgggcaaggagt

SEQ ID NO: 153318 - DNA, 25 bp, Artificial
  probe
  misc_feature (1)..(25): SEQ ID NO: 5262; WAN024DDA-M_at; Start 71; Stop 95
ttcgtatgatgcctaatacccctgc

SEQ ID NO: 153319 - DNA, 25 bp, Artificial
  probe
  misc_feature (1)..(25): SEQ ID NO: 5262; WAN024DDA-M_at; Start 73; Stop 97
cgtatgatgcctaatacccctgctt

SEQ ID NO: 153320 - DNA, 25 bp, Artificial
  probe
  misc_feature (1)..(25): SEQ ID NO: 5262; WAN024DDA-M_at; Start 18; Stop 42
tggattgaccttagaaaaactagca

SEQ ID NO: 153321 - DNA, 25 bp, Artificial
  probe
  misc_feature (1)..(25): SEQ ID NO: 5262; WAN024DDA-M_at; Start 99; Stop 123
tatcgggcaaggagtgattagttat

SEQ ID NO: 153322 - DNA, 25 bp, Artificial
  probe
  misc_feature (1)..(25): SEQ ID NO: 5262; WAN024DDA-M_at; Start 112; Stop 136
gtgattagttatgccttgtctccta

SEQ ID NO: 153323 - DNA, 25 bp, Artificial
  probe
  misc_feature (1)..(25): SEQ ID NO: 1187; WAN024DDB_at; Start 555; Stop 579
taattcagatccaagagccaaacgc

SEQ ID NO: 153324 - DNA, 25 bp, Artificial
  probe
  misc_feature (1)..(25): SEQ ID NO: 1187; WAN024DDB_at; Start 401; Stop 425
gggcaattcctatcatcaatgagaa

SEQ ID NO: 153325 - DNA, 25 bp, Artificial
  probe
  misc_feature (1)..(25): SEQ ID NO: 1187; WAN024DDB_at; Start 68; Stop 92
caaatgaggatggaagtttatcacg

SEQ ID NO: 153326 - DNA, 25 bp, Artificial
  probe
  misc_feature (1)..(25): SEQ ID NO: 1187; WAN024DDB_at; Start 351; Stop 375
gcgtcgttataaaaatgcccatcag

SEQ ID NO: 153327 - DNA, 25 bp, Artificial
  probe
  misc_feature (1)..(25): SEQ ID NO: 1187; WAN024DDB_at; Start 627; Stop 651
tggagctggttcgtcaaacggaact

SEQ ID NO: 153328 - DNA, 25 bp, Artificial
  probe
  misc_feature (1)..(25): SEQ ID NO: 1187; WAN024DDB_at; Start 532; Stop 556
gacggtctctatactggaaatccta

SEQ ID NO: 153329 - DNA, 25 bp, Artificial
  probe
  misc_feature (1)..(25): SEQ ID NO: 1187; WAN024DDB_at; Start 45; Stop 69
taaggtgggtacttcttctctgaca

SEQ ID NO: 153330 - DNA, 25 bp, Artificial
  probe
  misc_feature (1)..(25): SEQ ID NO: 1187; WAN024DDB_at; Start 734; Stop 758
cagattccatgattgaggcggcaga

SEQ ID NO: 153331 - DNA, 25 bp, Artificial
  probe
  misc_feature (1)..(25): SEQ ID NO: 1187; WAN024DDB_at; Start 1056; Stop 1080
caagggtgtcttgatttaccgtgac

SEQ ID NO: 153332 - DNA, 25 bp, Artificial
  probe
  misc_feature (1)..(25): SEQ ID NO: 1187; WAN024DDB_at; Start 755; Stop 779
cagaggagaccgaggatggttctta

SEQ ID NO: 153333 - DNA, 25 bp, Artificial
  probe
  misc_feature (1)..(25): SEQ ID NO: 1187; WAN024DDB_at; Start 1071; Stop 1095
ttaccgtgacgactggatttccatt

SEQ ID NO: 153334 - DNA, 25 bp, Artificial
  probe
  misc_feature (1)..(25): SEQ ID NO: 1187; WAN024DDB_at; Start 329; Stop 353
cccaagatgactttgtggataagcg

SEQ ID NO: 153335 - DNA, 25 bp, Artificial
  probe
  misc_feature (1)..(25): SEQ ID NO: 1187; WAN024DDB_at; Start 131; Stop 155
tgcacgaggctggtcatgagttgat

SEQ ID NO: 153336 - DNA, 25 bp, Artificial
  probe
  misc_feature (1)..(25): SEQ ID NO: 1187; WAN024DDB_at; Start 116; Stop 140
agcagttggctatgctgcacgaggc

SEQ ID NO: 153337 - DNA, 25 bp, Artificial
  probe
  misc_feature (1)..(25): SEQ ID NO: 1187; WAN024DDB_at; Start 818; Stop 842
aatggcttgccttctatgctcagag

SEQ ID NO: 153338 - DNA, 25 bp, Artificial
  probe
  misc_feature (1)..(25): SEQ ID NO: 1187; WAN024DDB_at; Start 573; Stop 597
caaacgcttggagagaatcgagacc

SEQ ID NO: 153339 - DNA, 25 bp, Artificial
  probe
  misc_feature (1)..(25): SEQ ID NO: 1187; WAN024DDB_at; Start 1001; Stop 1025
gacgcgtgcaatttggagcatctgc

SEQ ID NO: 153340 - DNA, 25 bp, Artificial
  probe
  misc_feature (1)..(25): SEQ ID NO: 1187; WAN024DDB_at; Start 518; Stop 542
tcttgacagatgtggacggtctcta

SEQ ID NO: 153341 - DNA, 25 bp, Artificial
  probe
  misc_feature (1)..(25): SEQ ID NO: 1187; WAN024DDB_at; Start 803; Stop 827
ttcgtacccagaaacaatggcttgc

SEQ ID NO: 153342 - DNA, 25 bp, Artificial
  probe
  misc_feature (1)..(25): SEQ ID NO: 1187; WAN024DDB_at; Start 297; Stop 321
gcgtcaaatcgtttctgcacaaatc

SEQ ID NO: 153343 - DNA, 25 bp, Artificial
  probe
  misc_feature (1)..(25): SEQ ID NO: 1187; WAN024DDB_at; Start 101; Stop 125
taaaggatattacccagcagttggc

SEQ ID NO: 153344 - DNA, 25 bp, Artificial
  probe
  misc_feature (1)..(25): SEQ ID NO: 1187; WAN024DDB_at; Start 1040; Stop 1064
tgcgttctcaaaaagccaagggtgt

SEQ ID NO: 153345 - DNA, 25 bp, Artificial
  probe
  misc_feature (1)..(25): SEQ ID NO: 1187; WAN024DDB_at; Start 684; Stop 708
tatcgcgacggaatcaggagttcct

SEQ ID NO: 153346 - DNA, 25 bp, Artificial
  probe
  misc_feature (1)..(25): SEQ ID NO: 1187; WAN024DDB_at; Start 671; Stop 695
tcaaggctgcaactatcgcgacgga

SEQ ID NO: 153347 - DNA, 25 bp, Artificial
  probe
  misc_feature (1)..(25): SEQ ID NO: 1187; WAN024DDB_at; Start 656; Stop 680
gtatgttaaccaaaatcaaggctgc

SEQ ID NO: 153348 - DNA, 25 bp, Artificial
  probe
  misc_feature (1)..(25): SEQ ID NO: 1187; WAN024DDB_at; Start 370; Stop 394
catcaggctttgtcggttttgctca

SEQ ID NO: 153349 - DNA, 25 bp, Artificial
  probe
  misc_feature (1)..(25): SEQ ID NO: 1187; WAN024DDB_at; Start 12; Stop 36
gagtgagactatgaaatacaaacgg

SEQ ID NO: 153350 - DNA, 25 bp, Artificial
  probe
  misc_feature (1)..(25): SEQ ID NO: 1187; WAN024DDB_at; Start 174; Stop 198
cattgcggctggttttggagcctta

SEQ ID NO: 153351 - DNA, 25 bp, Artificial
  probe
  misc_feature (1)..(25): SEQ ID NO: 1187; WAN024DDB_at; Start 835; Stop 859
gctcagagtcaaggttctatttggg

SEQ ID NO: 153352 - DNA, 25 bp, Artificial
  probe
  misc_feature (1)..(25): SEQ ID NO: 1187; WAN024DDB_at; Start 906; Stop 930
tctcttatctggtatcgttgaagca

SEQ ID NO: 153353 - DNA, 25 bp, Artificial
  probe
  misc_feature (1)..(25): SEQ ID NO: 1187; WAN024DDB_at; Start 231; Stop 255
taaacaggcttcagcagcggtaggg

SEQ ID NO: 153354 - DNA, 25 bp, Artificial
  probe
  misc_feature (1)..(25): SEQ ID NO: 1187; WAN024DDB_at; Start 159; Stop 183
ggtgtcttcaggtgccattgcggct

SEQ ID NO: 153355 - DNA, 25 bp, Artificial
  probe
  misc_feature (1)..(25): SEQ ID NO: 1187; WAN024DDB_at; Start 986; Stop 1010
aatcacttggaaaaggacgcgtgca

SEQ ID NO: 153356 - DNA, 25 bp, Artificial
  probe
  misc_feature (1)..(25): SEQ ID NO: 1187; WAN024DDB_at; Start 482; Stop 506
aagtagcggcgatggtccaagcaga

SEQ ID NO: 153357 - DNA, 25 bp, Artificial
  probe
  misc_feature (1)..(25): SEQ ID NO: 2165; WAN024DDC_at; Start 689; Stop 713
tccgtgtccacatggcttatatcgg

SEQ ID NO: 153358 - DNA, 25 bp, Artificial
  probe
  misc_feature (1)..(25): SEQ ID NO: 2165; WAN024DDC_at; Start 591; Stop 615
taaagggaagcctgcagtgacgcgt

SEQ ID NO: 153359 - DNA, 25 bp, Artificial
  probe
  misc_feature (1)..(25): SEQ ID NO: 2165; WAN024DDC_at; Start 519; Stop 543
taatgatcgtggtgtaattgaagcg

SEQ ID NO: 153360 - DNA, 25 bp, Artificial
  probe
  misc_feature (1)..(25): SEQ ID NO: 2165; WAN024DDC_at; Start 643; Stop 667
tatagcttagtagagttgcaactgg

SEQ ID NO: 153361 - DNA, 25 bp, Artificial
  probe
  misc_feature (1)..(25): SEQ ID NO: 2165; WAN024DDC_at; Start 829; Stop 853
gaatttaaagcagatatcccagaga

SEQ ID NO: 153362 - DNA, 25 bp, Artificial
  probe
  misc_feature (1)..(25): SEQ ID NO: 2165; WAN024DDC_at; Start 672; Stop 696
agggcgcactcatcaaatccgtgtc

SEQ ID NO: 153363 - DNA, 25 bp, Artificial
  probe
  misc_feature (1)..(25): SEQ ID NO: 2165; WAN024DDC_at; Start 208; Stop 232
gaggatcttccgctagaaatagtct

SEQ ID NO: 153364 - DNA, 25 bp, Artificial
  probe
  misc_feature (1)..(25): SEQ ID NO: 2165; WAN024DDC_at; Start 619; Stop 643
cacgtcttggaacgctttggcgatt

SEQ ID NO: 153365 - DNA, 25 bp, Artificial
  probe
  misc_feature (1)..(25): SEQ ID NO: 2165; WAN024DDC_at; Start 143; Stop 167
cagtccaagagggtgatgtcgtcac

SEQ ID NO: 153366 - DNA, 25 bp, Artificial
  probe
  misc_feature (1)..(25): SEQ ID NO: 2165; WAN024DDC_at; Start 57; Stop 81
gtcagaattatcacgtagtctcgcg

SEQ ID NO: 153367 - DNA, 25 bp, Artificial
  probe
  misc_feature (1)..(25): SEQ ID NO: 2165; WAN024DDC_at; Start 605; Stop 629
cagtgacgcgttttcacgtcttgga

SEQ ID NO: 153368 - DNA, 25 bp, Artificial
  probe
  misc_feature (1)..(25): SEQ ID NO: 2165; WAN024DDC_at; Start 486; Stop 510
caaatattgggcgattgttcatgga

SEQ ID NO: 153369 - DNA, 25 bp, Artificial
  probe
  misc_feature (1)..(25): SEQ ID NO: 2165; WAN024DDC_at; Start 157; Stop 181
gatgtcgtcacttaccatgtgccag

SEQ ID NO: 153370 - DNA, 25 bp, Artificial
  probe
  misc_feature (1)..(25): SEQ ID NO: 2165; WAN024DDC_at; Start 768; Stop 792
tggacaatttcttcatgccaagact

SEQ ID NO: 153371 - DNA, 25 bp, Artificial
  probe
  misc_feature (1)..(25): SEQ ID NO: 2165; WAN024DDC_at; Start 194; Stop 218
tagagtatgtggctgaggatcttcc

SEQ ID NO: 153372 - DNA, 25 bp, Artificial
  probe
  misc_feature (1)..(25): SEQ ID NO: 2165; WAN024DDC_at; Start 110; Stop 134
tggtcaatggtcaagtcaagaaagc

SEQ ID NO: 153373 - DNA, 25 bp, Artificial
  probe
  misc_feature (1)..(25): SEQ ID NO: 2165; WAN024DDC_at; Start 753; Stop 777
gactttgaaaggacatggacaattt

SEQ ID NO: 153374 - DNA, 25 bp, Artificial
  probe
  misc_feature (1)..(25): SEQ ID NO: 2165; WAN024DDC_at; Start 9; Stop 33
taaaattgaaactggtggtctgcgt

SEQ ID NO: 153375 - DNA, 25 bp, Artificial
  probe
  misc_feature (1)..(25): SEQ ID NO: 2165; WAN024DDC_at; Start 739; Stop 763
tatggtcctcgcaagactttgaaag

SEQ ID NO: 153376 - DNA, 25 bp, Artificial
  probe
  misc_feature (1)..(25): SEQ ID NO: 2165; WAN024DDC_at; Start 396; Stop 420
taaggatacgtcaggtcttctcatg

SEQ ID NO: 153377 - DNA, 25 bp, Artificial
  probe
  misc_feature (1)..(25): SEQ ID NO: 2165; WAN024DDC_at; Start 223; Stop 247
gaaatagtctaccaagatgaggatg

SEQ ID NO: 153378 - DNA, 25 bp, Artificial
  probe
  misc_feature (1)..(25): SEQ ID NO: 2165; WAN024DDC_at; Start 545; Stop 569
cgattggccggagtgaaaaagaccg

SEQ ID NO: 153379 - DNA, 25 bp, Artificial
  probe
  misc_feature (1)..(25): SEQ ID NO: 2165; WAN024DDC_at; Start 171; Stop 195
ccatgtgccagaaccagaggtatta

SEQ ID NO: 153380 - DNA, 25 bp, Artificial
  probe
  misc_feature (1)..(25): SEQ ID NO: 2165; WAN024DDC_at; Start 657; Stop 681
gttgcaactggagacagggcgcact

SEQ ID NO: 153381 - DNA, 25 bp, Artificial
  probe
  misc_feature (1)..(25): SEQ ID NO: 2165; WAN024DDC_at; Start 722; Stop 746
tcgctggtgatgaggtctatggtcc

SEQ ID NO: 153382 - DNA, 25 bp, Artificial
  probe
  misc_feature (1)..(25): SEQ ID NO: 2165; WAN024DDC_at; Start 260; Stop 284
acaaacctcagggaatggttgtgca

SEQ ID NO: 153383 - DNA, 25 bp, Artificial
  probe
  misc_feature (1)..(25): SEQ ID NO: 2165; WAN024DDC_at; Start 866; Stop 890
ccttggagagattgagaaagtaact

SEQ ID NO: 153384 - DNA, 25 bp, Artificial
  probe
  misc_feature (1)..(25): SEQ ID NO: 2165; WAN024DDC_at; Start 27; Stop 51
tctgcgtttggataaggctttgtca

SEQ ID NO: 153385 - DNA, 25 bp, Artificial
  probe
  misc_feature (1)..(25): SEQ ID NO: 2165; WAN024DDC_at; Start 420; Stop 444
gattgctaaaaacgatgatgcgcat

SEQ ID NO: 153386 - DNA, 25 bp, Artificial
  probe
  misc_feature (1)..(25): SEQ ID NO: 2165; WAN024DDC_at; Start 129; Stop 153
gaaagctaaatacacagtccaagag

SEQ ID NO: 153387 - DNA, 25 bp, Artificial
  probe
  misc_feature (1)..(25): SEQ ID NO: 2165; WAN024DDC_at; Start 804; Stop 828
tcatccgagaacaggtaagaccttg

SEQ ID NO: 153388 - DNA, 25 bp, Artificial
  probe
  misc_feature (1)..(25): SEQ ID NO: 2165; WAN024DDC_at; Start 789; Stop 813
gactttaggttttactcatccgaga

SEQ ID NO: 153389 - DNA, 25 bp, Artificial
  probe
  misc_feature (1)..(25): SEQ ID NO: 2165; WAN024DDC_at; Start 70; Stop 94
cgtagtctcgcgaatgaacaaatta

SEQ ID NO: 153390 - DNA, 25 bp, Artificial
  probe
  misc_feature (1)..(25): SEQ ID NO: 2165; WAN024DDC_at; Start 471; Stop 495
taaaaagtctctccgcaaatattgg

SEQ ID NO: 153391 - DNA, 25 bp, Artificial
  probe
  misc_feature (1)..(25): SEQ ID NO: 608; WAN024DDD_at; Start 159; Stop 183
cttttctatcttacaagatcagcag

SEQ ID NO: 153392 - DNA, 25 bp, Artificial
  probe
  misc_feature (1)..(25): SEQ ID NO: 608; WAN024DDD_at; Start 89; Stop 113
cactgggtgaagtgcgctcctggat

SEQ ID NO: 153393 - DNA, 25 bp, Artificial
  probe
  misc_feature (1)..(25): SEQ ID NO: 608; WAN024DDD_at; Start 374; Stop 398
caattttcaatgtggcagatagcta

SEQ ID NO: 153394 - DNA, 25 bp, Artificial
  probe
  misc_feature (1)..(25): SEQ ID NO: 608; WAN024DDD_at; Start 286; Stop 310
ataatcgcgggtggtcttggaaact

SEQ ID NO: 153395 - DNA, 25 bp, Artificial
  probe
  misc_feature (1)..(25): SEQ ID NO: 608; WAN024DDD_at; Start 297; Stop 321
tggtcttggaaactttattgacagg

SEQ ID NO: 153396 - DNA, 25 bp, Artificial
  probe
  misc_feature (1)..(25): SEQ ID NO: 608; WAN024DDD_at; Start 257; Stop 281
cattctggatggtcttgggtttgac

SEQ ID NO: 153397 - DNA, 25 bp, Artificial
  probe
  misc_feature (1)..(25): SEQ ID NO: 608; WAN024DDD_at; Start 14; Stop 38
caatagtggcagtcattgtactgct

SEQ ID NO: 153398 - DNA, 25 bp, Artificial
  probe
  misc_feature (1)..(25): SEQ ID NO: 608; WAN024DDD_at; Start 328; Stop 352
cagggctttgttgtggatatgttcc

SEQ ID NO: 153399 - DNA, 25 bp, Artificial
  probe
  misc_feature (1)..(25): SEQ ID NO: 608; WAN024DDD_at; Start 44; Stop 68
ttgggctggatcagttggtcaaatc

SEQ ID NO: 153400 - DNA, 25 bp, Artificial
  probe
  misc_feature (1)..(25): SEQ ID NO: 608; WAN024DDD_at; Start 389; Stop 413
cagatagctatctgacggttggagt

SEQ ID NO: 153401 - DNA, 25 bp, Artificial
  probe
  misc_feature (1)..(25): SEQ ID NO: 608; WAN024DDD_at; Start 240; Stop 264
taaacacatggaggactcattctgg

SEQ ID NO: 153402 - DNA, 25 bp, Artificial
  probe
  misc_feature (1)..(25): SEQ ID NO: 608; WAN024DDD_at; Start 210; Stop 234
tgtcgtgataggtgccatttggtat

SEQ ID NO: 153403 - DNA, 25 bp, Artificial
  probe
  misc_feature (1)..(25): SEQ ID NO: 608; WAN024DDD_at; Start 5; Stop 29
aaaaaagagcaatagtggcagtcat

SEQ ID NO: 153404 - DNA, 25 bp, Artificial
  probe
  misc_feature (1)..(25): SEQ ID NO: 608; WAN024DDD_at; Start 341; Stop 365
tggatatgttccaccttgactttat

SEQ ID NO: 153405 - DNA, 25 bp, Artificial
  probe
  misc_feature (1)..(25): SEQ ID NO: 608; WAN024DDD_at; Start 117; Stop 141
caatttcgttagcttgacctacctg

SEQ ID NO: 153406 - DNA, 25 bp, Artificial
  probe
  misc_feature (1)..(25): SEQ ID NO: 608; WAN024DDD_at; Start 434; Stop 458
tgctaaaagaggaaataaatggaaa

SEQ ID NO: 153407 - DNA, 25 bp, Artificial
  probe
  misc_feature (1)..(25): SEQ ID NO: 608; WAN024DDD_at; Start 185; Stop 209
tgttattcgctgtcattactctggt

SEQ ID NO: 153408 - DNA, 25 bp, Artificial
  probe
  misc_feature (1)..(25): SEQ ID NO: 608; WAN024DDD_at; Start 190; Stop 214
ttcgctgtcattactctggttgtcg

SEQ ID NO: 153409 - DNA, 25 bp, Artificial
  probe
  misc_feature (1)..(25): SEQ ID NO: 608; WAN024DDD_at; Start 220; Stop 244
ggtgccatttggtatttacataaac

SEQ ID NO: 153410 - DNA, 25 bp, Artificial
  probe
  misc_feature (1)..(25): SEQ ID NO: 608; WAN024DDD_at; Start 151; Stop 175
ggtgcagccttttctatcttacaag

SEQ ID NO: 153411 - DNA, 25 bp, Artificial
  probe
  misc_feature (1)..(25): SEQ ID NO: 608; WAN024DDD_at; Start 201; Stop 225
tactctggttgtcgtgataggtgcc

SEQ ID NO: 153412 - DNA, 25 bp, Artificial
  probe
  misc_feature (1)..(25): SEQ ID NO: 608; WAN024DDD_at; Start 128; Stop 152
gcttgacctacctgcaaaatcgagg

SEQ ID NO: 153413 - DNA, 25 bp, Artificial
  probe
  misc_feature (1)..(25): SEQ ID NO: 608; WAN024DDD_at; Start 246; Stop 270
catggaggactcattctggatggtc

SEQ ID NO: 153414 - DNA, 25 bp, Artificial
  probe
  misc_feature (1)..(25): SEQ ID NO: 608; WAN024DDD_at; Start 75; Stop 99
cgtccagcagattccactgggtgaa

SEQ ID NO: 153415 - DNA, 25 bp, Artificial
  probe
  misc_feature (1)..(25): SEQ ID NO: 608; WAN024DDD_at; Start 70; Stop 94
tatatcgtccagcagattccactgg

SEQ ID NO: 153416 - DNA, 25 bp, Artificial
  probe
  misc_feature (1)..(25): SEQ ID NO: 608; WAN024DDD_at; Start 142; Stop 166
caaaatcgaggtgcagccttttcta

SEQ ID NO: 153417 - DNA, 25 bp, Artificial
  probe
  misc_feature (1)..(25): SEQ ID NO: 608; WAN024DDD_at; Start 422; Stop 446
tattgattgcaatgctaaaagagga

SEQ ID NO: 153418 - DNA, 25 bp, Artificial
  probe
  misc_feature (1)..(25): SEQ ID NO: 608; WAN024DDD_at; Start 84; Stop 108
gattccactgggtgaagtgcgctcc

SEQ ID NO: 153419 - DNA, 25 bp, Artificial
  probe
  misc_feature (1)..(25): SEQ ID NO: 608; WAN024DDD_at; Start 399; Stop 423
tctgacggttggagtgattatttta

SEQ ID NO: 153420 - DNA, 25 bp, Artificial
  probe
  misc_feature (1)..(25): SEQ ID NO: 608; WAN024DDD_at; Start 324; Stop 348
cagtcagggctttgttgtggatatg

SEQ ID NO: 153421 - DNA, 25 bp, Artificial
  probe
  misc_feature (1)..(25): SEQ ID NO: 608; WAN024DDD_at; Start 232; Stop 256
tatttacataaacacatggaggact

SEQ ID NO: 153422 - DNA, 25 bp, Artificial
  probe
  misc_feature (1)..(25): SEQ ID NO: 608; WAN024DDD_at; Start 366; Stop 390
caactttgcaattttcaatgtggca

SEQ ID NO: 153423 - DNA, 25 bp, Artificial
  probe
  misc_feature (1)..(25): SEQ ID NO: 608; WAN024DDD_at; Start 136; Stop 160
tacctgcaaaatcgaggtgcagcct

SEQ ID NO: 153424 - DNA, 25 bp, Artificial
  probe
  misc_feature (1)..(25): SEQ ID NO: 608; WAN024DDD_at; Start 352; Stop 376
caccttgactttatcaactttgcaa

SEQ ID NO: 153425 - DNA, 25 bp, Artificial
  probe
  misc_feature (1)..(25): SEQ ID NO: 1024; WAN024DDE_at; Start 415; Stop 439
gagattgggattatctacctcaaca

SEQ ID NO: 153426 - DNA, 25 bp, Artificial
  probe
  misc_feature (1)..(25): SEQ ID NO: 1024; WAN024DDE_at; Start 819; Stop 843
tgttaaacgtgaagaagtggagctt

SEQ ID NO: 153427 - DNA, 25 bp, Artificial
  probe
  misc_feature (1)..(25): SEQ ID NO: 1024; WAN024DDE_at; Start 230; Stop 254
tttttcaaaatcagtatgccaatcc

SEQ ID NO: 153428 - DNA, 25 bp, Artificial
  probe
  misc_feature (1)..(25): SEQ ID NO: 1024; WAN024DDE_at; Start 2; Stop 26
tgaacattcaacaattacgctatgt

SEQ ID NO: 153429 - DNA, 25 bp, Artificial
  probe
  misc_feature (1)..(25): SEQ ID NO: 1024; WAN024DDE_at; Start 335; Stop 359
gctatcctgactataagaacttccg

SEQ ID NO: 153430 - DNA, 25 bp, Artificial
  probe
  misc_feature (1)..(25): SEQ ID NO: 1024; WAN024DDE_at; Start 566; Stop 590
tcatggaggatttagcggatttacc

SEQ ID NO: 153431 - DNA, 25 bp, Artificial
  probe
  misc_feature (1)..(25): SEQ ID NO: 1024; WAN024DDE_at; Start 135; Stop 159
taagattttccgtcggaccagctca

SEQ ID NO: 153432 - DNA, 25 bp, Artificial
  probe
  misc_feature (1)..(25): SEQ ID NO: 1024; WAN024DDE_at; Start 789; Stop 813
caaggataacctagataaccgcatg

SEQ ID NO: 153433 - DNA, 25 bp, Artificial
  probe
  misc_feature (1)..(25): SEQ ID NO: 1024; WAN024DDE_at; Start 705; Stop 729
tattttggagcggacggacgcctat

SEQ ID NO: 153434 - DNA, 25 bp, Artificial
  probe
  misc_feature (1)..(25): SEQ ID NO: 1024; WAN024DDE_at; Start 386; Stop 410
tattagatgaagtggcgcaagggca

SEQ ID NO: 153435 - DNA, 25 bp, Artificial
  probe
  misc_feature (1)..(25): SEQ ID NO: 1024; WAN024DDE_at; Start 89; Stop 113
cgagtctgtctatttctgttcgtga

SEQ ID NO: 153436 - DNA, 25 bp, Artificial
  probe
  misc_feature (1)..(25): SEQ ID NO: 1024; WAN024DDE_at; Start 72; Stop 96
gatgtatgttagtcagccgagtctg

SEQ ID NO: 153437 - DNA, 25 bp, Artificial
  probe
  misc_feature (1)..(25): SEQ ID NO: 1024; WAN024DDE_at; Start 552; Stop 576
gaaagaggaattagtcatggaggat

SEQ ID NO: 153438 - DNA, 25 bp, Artificial
  probe
  misc_feature (1)..(25): SEQ ID NO: 1024; WAN024DDE_at; Start 589; Stop 613
ccaacggttcgtttcactcaagaga

SEQ ID NO: 153439 - DNA, 25 bp, Artificial
  probe
  misc_feature (1)..(25): SEQ ID NO: 1024; WAN024DDE_at; Start 616; Stop 640
gacgagtacctttattattcagaga

SEQ ID NO: 153440 - DNA, 25 bp, Artificial
  probe
  misc_feature (1)..(25): SEQ ID NO: 1024; WAN024DDE_at; Start 634; Stop 658
tcagagaactttgtcgataccagcg

SEQ ID NO: 153441 - DNA, 25 bp, Artificial
  probe
  misc_feature (1)..(25): SEQ ID NO: 1024; WAN024DDE_at; Start 774; Stop 798
tacagttattcgtctcaaggataac

SEQ ID NO: 153442 - DNA, 25 bp, Artificial
  probe
  misc_feature (1)..(25): SEQ ID NO: 1024; WAN024DDE_at; Start 312; Stop 336
aactattacggccttttcagagcgc

SEQ ID NO: 153443 - DNA, 25 bp, Artificial
  probe
  misc_feature (1)..(25): SEQ ID NO: 1024; WAN024DDE_at; Start 281; Stop 305
ttgctagccagcactatgacttctt

SEQ ID NO: 153444 - DNA, 25 bp, Artificial
  probe
  misc_feature (1)..(25): SEQ ID NO: 1024; WAN024DDE_at; Start 649; Stop 673
gataccagcgctagctcacagatgt

SEQ ID NO: 153445 - DNA, 25 bp, Artificial
  probe
  misc_feature (1)..(25): SEQ ID NO: 1024; WAN024DDE_at; Start 150; Stop 174
gaccagctcagggactttcttgacc

SEQ ID NO: 153446 - DNA, 25 bp, Artificial
  probe
  misc_feature (1)..(25): SEQ ID NO: 1024; WAN024DDE_at; Start 669; Stop 693
gatgtttaatgtgacagaccgtgcc

SEQ ID NO: 153447 - DNA, 25 bp, Artificial
  probe
  misc_feature (1)..(25): SEQ ID NO: 1024; WAN024DDE_at; Start 602; Stop 626
tcactcaagagaaagacgagtacct

SEQ ID NO: 153448 - DNA, 25 bp, Artificial
  probe
  misc_feature (1)..(25): SEQ ID NO: 1024; WAN024DDE_at; Start 840; Stop 864
gcttagtcaagctgggactctcttc

SEQ ID NO: 153449 - DNA, 25 bp, Artificial
  probe
  misc_feature (1)..(25): SEQ ID NO: 1024; WAN024DDE_at; Start 244; Stop 268
tatgccaatcctgaagaagaaaaag

SEQ ID NO: 153450 - DNA, 25 bp, Artificial
  probe
  misc_feature (1)..(25): SEQ ID NO: 1024; WAN024DDE_at; Start 478; Stop 502
ttaggtctggaggtcatcgaattga

SEQ ID NO: 153451 - DNA, 25 bp, Artificial
  probe
  misc_feature (1)..(25): SEQ ID NO: 1024; WAN024DDE_at; Start 55; Stop 79
cgtgaagctgctgaaaagatgtatg

SEQ ID NO: 153452 - DNA, 25 bp, Artificial
  probe
  misc_feature (1)..(25): SEQ ID NO: 1024; WAN024DDE_at; Start 695; Stop 719
ccttgaatggtattttggagcggac

SEQ ID NO: 153453 - DNA, 25 bp, Artificial
  probe
  misc_feature (1)..(25): SEQ ID NO: 1024; WAN024DDE_at; Start 167; Stop 191
tcttgacccgtcgtgggatggaatt

SEQ ID NO: 153454 - DNA, 25 bp, Artificial
  probe
  misc_feature (1)..(25): SEQ ID NO: 1024; WAN024DDE_at; Start 496; Stop 520
gaattgattcctttccatacccata

SEQ ID NO: 153455 - DNA, 25 bp, Artificial
  probe
  misc_feature (1)..(25): SEQ ID NO: 1024; WAN024DDE_at; Start 805; Stop 829
aaccgcatggtctatgttaaacgtg

SEQ ID NO: 153456 - DNA, 25 bp, Artificial
  probe
  misc_feature (1)..(25): SEQ ID NO: 1024; WAN024DDE_at; Start 681; Stop 705
gacagaccgtgccaccttgaatggt

SEQ ID NO: 153457 - DNA, 25 bp, Artificial
  probe
  misc_feature (1)..(25): SEQ ID NO: 1024; WAN024DDE_at; Start 720; Stop 744
ggacgcctatgcgacaggttctgga

SEQ ID NO: 153458 - DNA, 25 bp, Artificial
  probe
  misc_feature (1)..(25): SEQ ID NO: 1024; WAN024DDE_at; Start 855; Stop 879
gactctcttcgtagaagtcatgcaa

SEQ ID NO: 153459 - DNA, 25 bp, Artificial
  probe
  misc_feature (1)..(25): SEQ ID NO: 3034; WAN024DDF_at; Start 96; Stop 120
ctatcttcactatctgcctttctca

SEQ ID NO: 153460 - DNA, 25 bp, Artificial
  probe
  misc_feature (1)..(25): SEQ ID NO: 3034; WAN024DDF_at; Start 95; Stop 119
actatcttcactatctgcctttctc

SEQ ID NO: 153461 - DNA, 25 bp, Artificial
  probe
  misc_feature (1)..(25): SEQ ID NO: 3034; WAN024DDF_at; Start 77; Stop 101
aacatcctattcttcttaactatct

SEQ ID NO: 153462 - DNA, 25 bp, Artificial
  probe
  misc_feature (1)..(25): SEQ ID NO: 3034; WAN024DDF_at; Start 88; Stop 112
cttcttaactatcttcactatctgc

SEQ ID NO: 153463 - DNA, 25 bp, Artificial
  probe
  misc_feature (1)..(25): SEQ ID NO: 3034; WAN024DDF_at; Start 79; Stop 103
catcctattcttcttaactatcttc

SEQ ID NO: 153464 - DNA, 25 bp, Artificial
  probe
  misc_feature (1)..(25): SEQ ID NO: 3034; WAN024DDF_at; Start 90; Stop 114
tcttaactatcttcactatctgcct

SEQ ID NO: 153465 - DNA, 25 bp, Artificial
  probe
  misc_feature (1)..(25): SEQ ID NO: 3034; WAN024DDF_at; Start 75; Stop 99
agaacatcctattcttcttaactat

SEQ ID NO: 153466 - DNA, 25 bp, Artificial
  probe
  misc_feature (1)..(25): SEQ ID NO: 3034; WAN024DDF_at; Start 92; Stop 116
ttaactatcttcactatctgccttt

SEQ ID NO: 153467 - DNA, 25 bp, Artificial
  probe
  misc_feature (1)..(25): SEQ ID NO: 3034; WAN024DDF_at; Start 1; Stop 25
atgttcatcttctacccccaacttc

SEQ ID NO: 153468 - DNA, 25 bp, Artificial
  probe
  misc_feature (1)..(25): SEQ ID NO: 3034; WAN024DDF_at; Start 93; Stop 117
taactatcttcactatctgcctttc

SEQ ID NO: 153469 - DNA, 25 bp, Artificial
  probe
  misc_feature (1)..(25): SEQ ID NO: 3034; WAN024DDF_at; Start 87; Stop 111
tcttcttaactatcttcactatctg

SEQ ID NO: 153470 - DNA, 25 bp, Artificial
  probe
  misc_feature (1)..(25): SEQ ID NO: 3034; WAN024DDF_at; Start 84; Stop 108
tattcttcttaactatcttcactat

SEQ ID NO: 153471 - DNA, 25 bp, Artificial
  probe
  misc_feature (1)..(25): SEQ ID NO: 3034; WAN024DDF_at; Start 83; Stop 107
ctattcttcttaactatcttcacta

SEQ ID NO: 153472 - DNA, 25 bp, Artificial
  probe
  misc_feature (1)..(25): SEQ ID NO: 3034; WAN024DDF_at; Start 22; Stop 46
cttctttatcttttcattataccat

SEQ ID NO: 153473 - DNA, 25 bp, Artificial
  probe
  misc_feature (1)..(25): SEQ ID NO: 3034; WAN024DDF_at; Start 81; Stop 105
tcctattcttcttaactatcttcac

SEQ ID NO: 153474 - DNA, 25 bp, Artificial
  probe
  misc_feature (1)..(25): SEQ ID NO: 3034; WAN024DDF_at; Start 6; Stop 30
catcttctacccccaacttctttat

SEQ ID NO: 153475 - DNA, 25 bp, Artificial
  probe
  misc_feature (1)..(25): SEQ ID NO: 3034; WAN024DDF_at; Start 18; Stop 42
ccaacttctttatcttttcattata

SEQ ID NO: 153476 - DNA, 25 bp, Artificial
  probe
  misc_feature (1)..(25): SEQ ID NO: 3034; WAN024DDF_at; Start 82; Stop 106
cctattcttcttaactatcttcact

SEQ ID NO: 153477 - DNA, 25 bp, Artificial
  probe
  misc_feature (1)..(25): SEQ ID NO: 3034; WAN024DDF_at; Start 78; Stop 102
acatcctattcttcttaactatctt

SEQ ID NO: 153478 - DNA, 25 bp, Artificial
  probe
  misc_feature (1)..(25): SEQ ID NO: 3034; WAN024DDF_at; Start 76; Stop 100
gaacatcctattcttcttaactatc

SEQ ID NO: 153479 - DNA, 25 bp, Artificial
  probe
  misc_feature (1)..(25): SEQ ID NO: 3034; WAN024DDF_at; Start 74; Stop 98
aagaacatcctattcttcttaacta

SEQ ID NO: 153480 - DNA, 25 bp, Artificial
  probe
  misc_feature (1)..(25): SEQ ID NO: 3034; WAN024DDF_at; Start 2; Stop 26
tgttcatcttctacccccaacttct

SEQ ID NO: 153481 - DNA, 25 bp, Artificial
  probe
  misc_feature (1)..(25): SEQ ID NO: 3034; WAN024DDF_at; Start 94; Stop 118
aactatcttcactatctgcctttct

SEQ ID NO: 153482 - DNA, 25 bp, Artificial
  probe
  misc_feature (1)..(25): SEQ ID NO: 3034; WAN024DDF_at; Start 5; Stop 29
tcatcttctacccccaacttcttta

SEQ ID NO: 153483 - DNA, 25 bp, Artificial
  probe
  misc_feature (1)..(25): SEQ ID NO: 3034; WAN024DDF_at; Start 23; Stop 47
ttctttatcttttcattataccata

SEQ ID NO: 153484 - DNA, 25 bp, Artificial
  probe
  misc_feature (1)..(25): SEQ ID NO: 3034; WAN024DDF_at; Start 39; Stop 63
tataccatattttagaagttttcca

SEQ ID NO: 153485 - DNA, 25 bp, Artificial
  probe
  misc_feature (1)..(25): SEQ ID NO: 3034; WAN024DDF_at; Start 17; Stop 41
cccaacttctttatcttttcattat

SEQ ID NO: 153486 - DNA, 25 bp, Artificial
  probe
  misc_feature (1)..(25): SEQ ID NO: 3034; WAN024DDF_at; Start 21; Stop 45
acttctttatcttttcattatacca

SEQ ID NO: 153487 - DNA, 25 bp, Artificial
  probe
  misc_feature (1)..(25): SEQ ID NO: 3034; WAN024DDF_at; Start 89; Stop 113
ttcttaactatcttcactatctgcc

SEQ ID NO: 153488 - DNA, 25 bp, Artificial
  probe
  misc_feature (1)..(25): SEQ ID NO: 3034; WAN024DDF_at; Start 85; Stop 109
attcttcttaactatcttcactatc

SEQ ID NO: 153489 - DNA, 25 bp, Artificial
  probe
  misc_feature (1)..(25): SEQ ID NO: 3034; WAN024DDF_at; Start 91; Stop 115
cttaactatcttcactatctgcctt

SEQ ID NO: 153490 - DNA, 25 bp, Artificial
  probe
  misc_feature (1)..(25): SEQ ID NO: 3034; WAN024DDF_at; Start 73; Stop 97
aaagaacatcctattcttcttaact

SEQ ID NO: 153491 - DNA, 25 bp, Artificial
  probe
  misc_feature (1)..(25): SEQ ID NO: 3034; WAN024DDF_at; Start 19; Stop 43
caacttctttatcttttcattatac

SEQ ID NO: 153492 - DNA, 25 bp, Artificial
  probe
  misc_feature (1)..(25): SEQ ID NO: 3034; WAN024DDF_at; Start 80; Stop 104
atcctattcttcttaactatcttca

SEQ ID NO: 153493 - DNA, 25 bp, Artificial
  probe
  misc_feature (1)..(25): SEQ ID NO: 636; WAN024DDG_at; Start 506; Stop 530
attttgctttaactcctcttgcttt

SEQ ID NO: 153494 - DNA, 25 bp, Artificial
  probe
  misc_feature (1)..(25): SEQ ID NO: 636; WAN024DDG_at; Start 471; Stop 495
gctttctgctattattttcggttat

SEQ ID NO: 153495 - DNA, 25 bp, Artificial
  probe
  misc_feature (1)..(25): SEQ ID NO: 636; WAN024DDG_at; Start 501; Stop 525
tatcaattttgctttaactcctctt

SEQ ID NO: 153496 - DNA, 25 bp, Artificial
  probe
  misc_feature (1)..(25): SEQ ID NO: 636; WAN024DDG_at; Start 122; Stop 146
ttcagattctgcttttgatggagag

SEQ ID NO: 153497 - DNA, 25 bp, Artificial
  probe
  misc_feature (1)..(25): SEQ ID NO: 636; WAN024DDG_at; Start 476; Stop 500
ctgctattattttcggttatattca

SEQ ID NO: 153498 - DNA, 25 bp, Artificial
  probe
  misc_feature (1)..(25): SEQ ID NO: 636; WAN024DDG_at; Start 283; Stop 307
tcgtatttcatatccctgtcttcaa

SEQ ID NO: 153499 - DNA, 25 bp, Artificial
  probe
  misc_feature (1)..(25): SEQ ID NO: 636; WAN024DDG_at; Start 392; Stop 416
ctattgctgaggaattgatttatcg

SEQ ID NO: 153500 - DNA, 25 bp, Artificial
  probe
  misc_feature (1)..(25): SEQ ID NO: 636; WAN024DDG_at; Start 115; Stop 139
gaattttttcagattctgcttttga

SEQ ID NO: 153501 - DNA, 25 bp, Artificial
  probe
  misc_feature (1)..(25): SEQ ID NO: 636; WAN024DDG_at; Start 390; Stop 414
ccctattgctgaggaattgatttat

SEQ ID NO: 153502 - DNA, 25 bp, Artificial
  probe
  misc_feature (1)..(25): SEQ ID NO: 636; WAN024DDG_at; Start 29; Stop 53
tagcattgtccttaattttttacaa

SEQ ID NO: 153503 - DNA, 25 bp, Artificial
  probe
  misc_feature (1)..(25): SEQ ID NO: 636; WAN024DDG_at; Start 278; Stop 302
tcttttcgtatttcatatccctgtc

SEQ ID NO: 153504 - DNA, 25 bp, Artificial
  probe
  misc_feature (1)..(25): SEQ ID NO: 636; WAN024DDG_at; Start 503; Stop 527
tcaattttgctttaactcctcttgc

SEQ ID NO: 153505 - DNA, 25 bp, Artificial
  probe
  misc_feature (1)..(25): SEQ ID NO: 636; WAN024DDG_at; Start 590; Stop 614
tctactatccaatactagttcatat

SEQ ID NO: 153506 - DNA, 25 bp, Artificial
  probe
  misc_feature (1)..(25): SEQ ID NO: 636; WAN024DDG_at; Start 521; Stop 545
ctcttgcttttttcatttatgctag

SEQ ID NO: 153507 - DNA, 25 bp, Artificial
  probe
  misc_feature (1)..(25): SEQ ID NO: 636; WAN024DDG_at; Start 120; Stop 144
ttttcagattctgcttttgatggag

SEQ ID NO: 153508 - DNA, 25 bp, Artificial
  probe
  misc_feature (1)..(25): SEQ ID NO: 636; WAN024DDG_at; Start 499; Stop 523
catatcaattttgctttaactcctc

SEQ ID NO: 153509 - DNA, 25 bp, Artificial
  probe
  misc_feature (1)..(25): SEQ ID NO: 636; WAN024DDG_at; Start 19; Stop 43
caaattttactagcattgtccttaa

SEQ ID NO: 153510 - DNA, 25 bp, Artificial
  probe
  misc_feature (1)..(25): SEQ ID NO: 636; WAN024DDG_at; Start 595; Stop 619
tatccaatactagttcatattctca

SEQ ID NO: 153511 - DNA, 25 bp, Artificial
  probe
  misc_feature (1)..(25): SEQ ID NO: 636; WAN024DDG_at; Start 391; Stop 415
cctattgctgaggaattgatttatc

SEQ ID NO: 153512 - DNA, 25 bp, Artificial
  probe
  misc_feature (1)..(25): SEQ ID NO: 636; WAN024DDG_at; Start 17; Stop 41
ttcaaattttactagcattgtcctt

SEQ ID NO: 153513 - DNA, 25 bp, Artificial
  probe
  misc_feature (1)..(25): SEQ ID NO: 636; WAN024DDG_at; Start 482; Stop 506
ttattttcggttatattcatatcaa

SEQ ID NO: 153514 - DNA, 25 bp, Artificial
  probe
  misc_feature (1)..(25): SEQ ID NO: 636; WAN024DDG_at; Start 202; Stop 226
tttcatttcaagtggcagctgaggt

SEQ ID NO: 153515 - DNA, 25 bp, Artificial
  probe
  misc_feature (1)..(25): SEQ ID NO: 636; WAN024DDG_at; Start 563; Stop 587
ctctattgtatcgcatgactaaaaa

SEQ ID NO: 153516 - DNA, 25 bp, Artificial
  probe
  misc_feature (1)..(25): SEQ ID NO: 636; WAN024DDG_at; Start 28; Stop 52
ctagcattgtccttaattttttaca

SEQ ID NO: 153517 - DNA, 25 bp, Artificial
  probe
  misc_feature (1)..(25): SEQ ID NO: 636; WAN024DDG_at; Start 470; Stop 494
tgctttctgctattattttcggtta

SEQ ID NO: 153518 - DNA, 25 bp, Artificial
  probe
  misc_feature (1)..(25): SEQ ID NO: 636; WAN024DDG_at; Start 281; Stop 305
tttcgtatttcatatccctgtcttc

SEQ ID NO: 153519 - DNA, 25 bp, Artificial
  probe
  misc_feature (1)..(25): SEQ ID NO: 636; WAN024DDG_at; Start 504; Stop 528
caattttgctttaactcctcttgct

SEQ ID NO: 153520 - DNA, 25 bp, Artificial
  probe
  misc_feature (1)..(25): SEQ ID NO: 636; WAN024DDG_at; Start 562; Stop 586
gctctattgtatcgcatgactaaaa

SEQ ID NO: 153521 - DNA, 25 bp, Artificial
  probe
  misc_feature (1)..(25): SEQ ID NO: 636; WAN024DDG_at; Start 505; Stop 529
aattttgctttaactcctcttgctt

SEQ ID NO: 153522 - DNA, 25 bp, Artificial
  probe
  misc_feature (1)..(25): SEQ ID NO: 636; WAN024DDG_at; Start 15; Stop 39
tattcaaattttactagcattgtcc

SEQ ID NO: 153523 - DNA, 25 bp, Artificial
  probe
  misc_feature (1)..(25): SEQ ID NO: 636; WAN024DDG_at; Start 20; Stop 44
aaattttactagcattgtccttaat

SEQ ID NO: 153524 - DNA, 25 bp, Artificial
  probe
  misc_feature (1)..(25): SEQ ID NO: 636; WAN024DDG_at; Start 203; Stop 227
ttcatttcaagtggcagctgaggta

SEQ ID NO: 153525 - DNA, 25 bp, Artificial
  probe
  misc_feature (1)..(25): SEQ ID NO: 636; WAN024DDG_at; Start 279; Stop 303
cttttcgtatttcatatccctgtct

SEQ ID NO: 153526 - DNA, 25 bp, Artificial
  probe
  misc_feature (1)..(25): SEQ ID NO: 636; WAN024DDG_at; Start 121; Stop 145
tttcagattctgcttttgatggaga

SEQ ID NO: 153527 - DNA, 25 bp, Artificial
  probe
  misc_feature (1)..(25): SEQ ID NO: 1754; WAN024DDH_at; Start 887; Stop 911
gactagcagcttcctacgtaaactt

SEQ ID NO: 153528 - DNA, 25 bp, Artificial
  probe
  misc_feature (1)..(25): SEQ ID NO: 1754; WAN024DDH_at; Start 464; Stop 488
caatccatagcgatggtcaaggaac

SEQ ID NO: 153529 - DNA, 25 bp, Artificial
  probe
  misc_feature (1)..(25): SEQ ID NO: 1754; WAN024DDH_at; Start 307; Stop 331
aagaaattagccgtggattgggcct

SEQ ID NO: 153530 - DNA, 25 bp, Artificial
  probe
  misc_feature (1)..(25): SEQ ID NO: 1754; WAN024DDH_at; Start 396; Stop 420
cagtcgttttgctgaggccttggaa

SEQ ID NO: 153531 - DNA, 25 bp, Artificial
  probe
  misc_feature (1)..(25): SEQ ID NO: 1754; WAN024DDH_at; Start 730; Stop 754
gcagatctcgaactcttagaacagg

SEQ ID NO: 153532 - DNA, 25 bp, Artificial
  probe
  misc_feature (1)..(25): SEQ ID NO: 1754; WAN024DDH_at; Start 758; Stop 782
cagatgcaaaaggttgtcacttcac

SEQ ID NO: 153533 - DNA, 25 bp, Artificial
  probe
  misc_feature (1)..(25): SEQ ID NO: 1754; WAN024DDH_at; Start 167; Stop 191
gagtctatcttttggtggagcaggc

SEQ ID NO: 153534 - DNA, 25 bp, Artificial
  probe
  misc_feature (1)..(25): SEQ ID NO: 1754; WAN024DDH_at; Start 197; Stop 221
tatctgaagcccaatcctatcttgg

SEQ ID NO: 153535 - DNA, 25 bp, Artificial
  probe
  misc_feature (1)..(25): SEQ ID NO: 1754; WAN024DDH_at; Start 264; Stop 288
ggcgcgtgatactggcccaaccatt

SEQ ID NO: 153536 - DNA, 25 bp, Artificial
  probe
  misc_feature (1)..(25): SEQ ID NO: 1754; WAN024DDH_at; Start 382; Stop 406
gatgaccaagtagccagtcgttttg

SEQ ID NO: 153537 - DNA, 25 bp, Artificial
  probe
  misc_feature (1)..(25): SEQ ID NO: 1754; WAN024DDH_at; Start 504; Stop 528
aagttgcttgcttagtcctggtcgc

SEQ ID NO: 153538 - DNA, 25 bp, Artificial
  probe
  misc_feature (1)..(25): SEQ ID NO: 1754; WAN024DDH_at; Start 872; Stop 896
gatacgcaggtgaacgactagcagc

SEQ ID NO: 153539 - DNA, 25 bp, Artificial
  probe
  misc_feature (1)..(25): SEQ ID NO: 1754; WAN024DDH_at; Start 696; Stop 720
tgacgaaaatgatccccagtatgcc

SEQ ID NO: 153540 - DNA, 25 bp, Artificial
  probe
  misc_feature (1)..(25): SEQ ID NO: 1754; WAN024DDH_at; Start 678; Stop 702
tgttttggcttggacagatgacgaa

SEQ ID NO: 153541 - DNA, 25 bp, Artificial
  probe
  misc_feature (1)..(25): SEQ ID NO: 1754; WAN024DDH_at; Start 418; Stop 442
gaaaggcctgtctatgatgctaaac

SEQ ID NO: 153542 - DNA, 25 bp, Artificial
  probe
  misc_feature (1)..(25): SEQ ID NO: 1754; WAN024DDH_at; Start 86; Stop 110
gaccaggatcatggccttttcaagg

SEQ ID NO: 153543 - DNA, 25 bp, Artificial
  probe
  misc_feature (1)..(25): SEQ ID NO: 1754; WAN024DDH_at; Start 249; Stop 273
caccaatgatgcctgggcgcgtgat

SEQ ID NO: 153544 - DNA, 25 bp, Artificial
  probe
  misc_feature (1)..(25): SEQ ID NO: 1754; WAN024DDH_at; Start 616; Stop 640
tatcaggatgaaaccaatgaacacg

SEQ ID NO: 153545 - DNA, 25 bp, Artificial
  probe
  misc_feature (1)..(25): SEQ ID NO: 1754; WAN024DDH_at; Start 905; Stop 929
taaacttttatatcgccaacaaggc

SEQ ID NO: 153546 - DNA, 25 bp, Artificial
  probe
  misc_feature (1)..(25): SEQ ID NO: 1754; WAN024DDH_at; Start 922; Stop 946
aacaaggctgtcttggttccacagt

SEQ ID NO: 153547 - DNA, 25 bp, Artificial
  probe
  misc_feature (1)..(25): SEQ ID NO: 1754; WAN024DDH_at; Start 22; Stop 46
ttaggctatcacatgccagcagagt

SEQ ID NO: 153548 - DNA, 25 bp, Artificial
  probe
  misc_feature (1)..(25): SEQ ID NO: 1754; WAN024DDH_at; Start 798; Stop 822
tatccctgcagttcgacaagttgtg

SEQ ID NO: 153549 - DNA, 25 bp, Artificial
  probe
  misc_feature (1)..(25): SEQ ID NO: 1754; WAN024DDH_at; Start 445; Stop 469
tttgtactggaaggaggcgcaatcc

SEQ ID NO: 153550 - DNA, 25 bp, Artificial
  probe
  misc_feature (1)..(25): SEQ ID NO: 1754; WAN024DDH_at; Start 105; Stop 129
tcaaggaaaggctgctaaaagagca

SEQ ID NO: 153551 - DNA, 25 bp, Artificial
  probe
  misc_feature (1)..(25): SEQ ID NO: 1754; WAN024DDH_at; Start 948; Stop 972
tgaggatgtaaacgaccaagtggcc

SEQ ID NO: 153552 - DNA, 25 bp, Artificial
  probe
  misc_feature (1)..(25): SEQ ID NO: 1754; WAN024DDH_at; Start 715; Stop 739
tatgccatgtcaaaagcagatctcg

SEQ ID NO: 153553 - DNA, 25 bp, Artificial
  probe
  misc_feature (1)..(25): SEQ ID NO: 1754; WAN024DDH_at; Start 182; Stop 206
tggagcaggcctatctatctgaagc

SEQ ID NO: 153554 - DNA, 25 bp, Artificial
  probe
  misc_feature (1)..(25): SEQ ID NO: 1754; WAN024DDH_at; Start 58; Stop 82
catggtaccctcatgatatggccga

SEQ ID NO: 153555 - DNA, 25 bp, Artificial
  probe
  misc_feature (1)..(25): SEQ ID NO: 1754; WAN024DDH_at; Start 983; Stop 1007
tcagcaagtgtttcccagaccgtaa

SEQ ID NO: 153556 - DNA, 25 bp, Artificial
  probe
  misc_feature (1)..(25): SEQ ID NO: 1754; WAN024DDH_at; Start 837; Stop 861
gccaggctacatctatgaagaagga

SEQ ID NO: 153557 - DNA, 25 bp, Artificial
  probe
  misc_feature (1)..(25): SEQ ID NO: 1754; WAN024DDH_at; Start 40; Stop 64
gcagagtacgaaccccatcatggta

SEQ ID NO: 153558 - DNA, 25 bp, Artificial
  probe
  misc_feature (1)..(25): SEQ ID NO: 1754; WAN024DDH_at; Start 822; Stop 846
gacagaagaagatttgccaggctac

SEQ ID NO: 153559 - DNA, 25 bp, Artificial
  probe
  misc_feature (1)..(25): SEQ ID NO: 1754; WAN024DDH_at; Start 1005; Stop 1029
taaagttgtcggaataccagccaga

SEQ ID NO: 153560 - DNA, 25 bp, Artificial
  probe
  misc_feature (1)..(25): SEQ ID NO: 1754; WAN024DDH_at; Start 964; Stop 988
caagtggccttagatatcctcagca

SEQ ID NO: 153561 - DNA, 25 bp, Artificial
  probe
  misc_feature (1)..(25): SEQ ID NO: 1145; WAN024DDI_at; Start 1047; Stop 1071
tctctatctcatggacgaacaggga

SEQ ID NO: 153562 - DNA, 25 bp, Artificial
  probe
  misc_feature (1)..(25): SEQ ID NO: 1145; WAN024DDI_at; Start 26; Stop 50
cagcctatgttattgacttggccaa

SEQ ID NO: 153563 - DNA, 25 bp, Artificial
  probe
  misc_feature (1)..(25): SEQ ID NO: 1145; WAN024DDI_at; Start 659; Stop 683
cagaaatcaagcgtatccgaaaaac

SEQ ID NO: 153564 - DNA, 25 bp, Artificial
  probe
  misc_feature (1)..(25): SEQ ID NO: 1145; WAN024DDI_at; Start 214; Stop 238
gaagaatttcctggtgaagtccatg

SEQ ID NO: 153565 - DNA, 25 bp, Artificial
  probe
  misc_feature (1)..(25): SEQ ID NO: 1145; WAN024DDI_at; Start 499; Stop 523
cattttcataccctttgcgagcagg

SEQ ID NO: 153566 - DNA, 25 bp, Artificial
  probe
  misc_feature (1)..(25): SEQ ID NO: 1145; WAN024DDI_at; Start 10; Stop 34
gaacaagtaccaacaccagcctatg

SEQ ID NO: 153567 - DNA, 25 bp, Artificial
  probe
  misc_feature (1)..(25): SEQ ID NO: 1145; WAN024DDI_at; Start 802; Stop 826
tctgcgacctgccatatgcctgatg

SEQ ID NO: 153568 - DNA, 25 bp, Artificial
  probe
  misc_feature (1)..(25): SEQ ID NO: 1145; WAN024DDI_at; Start 637; Stop 661
tacgatgtggatttgctgatttcag

SEQ ID NO: 153569 - DNA, 25 bp, Artificial
  probe
  misc_feature (1)..(25): SEQ ID NO: 1145; WAN024DDI_at; Start 816; Stop 840
tatgcctgatgtacttgagatgccc

SEQ ID NO: 153570 - DNA, 25 bp, Artificial
  probe
  misc_feature (1)..(25): SEQ ID NO: 1145; WAN024DDI_at; Start 302; Stop 326
tctttaactcagagagacagttgcg

SEQ ID NO: 153571 - DNA, 25 bp, Artificial
  probe
  misc_feature (1)..(25): SEQ ID NO: 1145; WAN024DDI_at; Start 446; Stop 470
gagttactatagacaagattccgag

SEQ ID NO: 153572 - DNA, 25 bp, Artificial
  probe
  misc_feature (1)..(25): SEQ ID NO: 1145; WAN024DDI_at; Start 377; Stop 401
tcaaccctcagtgttcaactcaagg

SEQ ID NO: 153573 - DNA, 25 bp, Artificial
  probe
  misc_feature (1)..(25): SEQ ID NO: 1145; WAN024DDI_at; Start 405; Stop 429
tcacgcgctctatgacccttgtgca

SEQ ID NO: 153574 - DNA, 25 bp, Artificial
  probe
  misc_feature (1)..(25): SEQ ID NO: 1145; WAN024DDI_at; Start 355; Stop 379
ggtgtcagtgttggtttgcgcctca

SEQ ID NO: 153575 - DNA, 25 bp, Artificial
  probe
  misc_feature (1)..(25): SEQ ID NO: 1145; WAN024DDI_at; Start 715; Stop 739
gaagccattgcgcttaatgcgggtt

SEQ ID NO: 153576 - DNA, 25 bp, Artificial
  probe
  misc_feature (1)..(25): SEQ ID NO: 1145; WAN024DDI_at; Start 1063; Stop 1087
gaacagggagactgtagcttactca

SEQ ID NO: 153577 - DNA, 25 bp, Artificial
  probe
  misc_feature (1)..(25): SEQ ID NO: 1145; WAN024DDI_at; Start 186; Stop 210
tggactctatgaggccaaattggca

SEQ ID NO: 153578 - DNA, 25 bp, Artificial
  probe
  misc_feature (1)..(25): SEQ ID NO: 1145; WAN024DDI_at; Start 732; Stop 756
tgcgggttatttagcaactgaggta

SEQ ID NO: 153579 - DNA, 25 bp, Artificial
  probe
  misc_feature (1)..(25): SEQ ID NO: 1145; WAN024DDI_at; Start 616; Stop 640
catcatattacaagagaaggttacg

SEQ ID NO: 153580 - DNA, 25 bp, Artificial
  probe
  misc_feature (1)..(25): SEQ ID NO: 1145; WAN024DDI_at; Start 46; Stop 70
gccaagttagaagctaattgccgca

SEQ ID NO: 153581 - DNA, 25 bp, Artificial
  probe
  misc_feature (1)..(25): SEQ ID NO: 1145; WAN024DDI_at; Start 948; Stop 972
tgaaaatccagtccaaatcggagac

SEQ ID NO: 153582 - DNA, 25 bp, Artificial
  probe
  misc_feature (1)..(25): SEQ ID NO: 1145; WAN024DDI_at; Start 102; Stop 126
caaggtcttgcttgcccagaaggca

SEQ ID NO: 153583 - DNA, 25 bp, Artificial
  probe
  misc_feature (1)..(25): SEQ ID NO: 1145; WAN024DDI_at; Start 690; Stop 714
tcttgaaatctatatcgagcctggt

SEQ ID NO: 153584 - DNA, 25 bp, Artificial
  probe
  misc_feature (1)..(25): SEQ ID NO: 1145; WAN024DDI_at; Start 597; Stop 621
gctcaatatgggtggtggtcatcat

SEQ ID NO: 153585 - DNA, 25 bp, Artificial
  probe
  misc_feature (1)..(25): SEQ ID NO: 1145; WAN024DDI_at; Start 472; Stop 496
gatttgctagatttggttgacggac

SEQ ID NO: 153586 - DNA, 25 bp, Artificial
  probe
  misc_feature (1)..(25): SEQ ID NO: 1145; WAN024DDI_at; Start 138; Stop 162
caaaacttatcccttgattagccag

SEQ ID NO: 153587 - DNA, 25 bp, Artificial
  probe
  misc_feature (1)..(25): SEQ ID NO: 1145; WAN024DDI_at; Start 565; Stop 589
cagtttggtccctacttacatgagg

SEQ ID NO: 153588 - DNA, 25 bp, Artificial
  probe
  misc_feature (1)..(25): SEQ ID NO: 1145; WAN024DDI_at; Start 972; Stop 996
cagactttattttcaagacatggcc

SEQ ID NO: 153589 - DNA, 25 bp, Artificial
  probe
  misc_feature (1)..(25): SEQ ID NO: 1145; WAN024DDI_at; Start 169; Stop 193
tcaggtacgacagctagtggactct

SEQ ID NO: 153590 - DNA, 25 bp, Artificial
  probe
  misc_feature (1)..(25): SEQ ID NO: 1145; WAN024DDI_at; Start 516; Stop 540
cgagcagggagcagatgatttacaa

SEQ ID NO: 153591 - DNA, 25 bp, Artificial
  probe
  misc_feature (1)..(25): SEQ ID NO: 1145; WAN024DDI_at; Start 153; Stop 177
gattagccagtatctatcaggtacg

SEQ ID NO: 153592 - DNA, 25 bp, Artificial
  probe
  misc_feature (1)..(25): SEQ ID NO: 1145; WAN024DDI_at; Start 781; Stop 805
gaaatcttggttttagacgcctctg

SEQ ID NO: 153593 - DNA, 25 bp, Artificial
  probe
  misc_feature (1)..(25): SEQ ID NO: 1145; WAN024DDI_at; Start 702; Stop 726
tatcgagcctggtgaagccattgcg

SEQ ID NO: 153594 - DNA, 25 bp, Artificial
  probe
  misc_feature (1)..(25): SEQ ID NO: 1145; WAN024DDI_at; Start 834; Stop 858
gatgccctatcgtccacctttgaga

SEQ ID NO: 153595 - DNA, 25 bp, Artificial
  probe
  misc_feature (1)..(25): SEQ ID NO: 817; WAN024DDJ_at; Start 134; Stop 158
cagttgttatcagcatccaccattt

SEQ ID NO: 153596 - DNA, 25 bp, Artificial
  probe
  misc_feature (1)..(25): SEQ ID NO: 817; WAN024DDJ_at; Start 63; Stop 87
gctcttagttgaacacacacacttt

SEQ ID NO: 153597 - DNA, 25 bp, Artificial
  probe
  misc_feature (1)..(25): SEQ ID NO: 817; WAN024DDJ_at; Start 10; Stop 34
aaagaacatatactcatcggacttc

SEQ ID NO: 153598 - DNA, 25 bp, Artificial
  probe
  misc_feature (1)..(25): SEQ ID NO: 817; WAN024DDJ_at; Start 143; Stop 167
tcagcatccaccatttttccaaaaa

SEQ ID NO: 153599 - DNA, 25 bp, Artificial
  probe
  misc_feature (1)..(25): SEQ ID NO: 817; WAN024DDJ_at; Start 138; Stop 162
tgttatcagcatccaccatttttcc

SEQ ID NO: 153600 - DNA, 25 bp, Artificial
  probe
  misc_feature (1)..(25): SEQ ID NO: 817; WAN024DDJ_at; Start 28; Stop 52
ggacttctctatctgctctctccat

SEQ ID NO: 153601 - DNA, 25 bp, Artificial
  probe
  misc_feature (1)..(25): SEQ ID NO: 817; WAN024DDJ_at; Start 60; Stop 84
tcagctcttagttgaacacacacac

SEQ ID NO: 153602 - DNA, 25 bp, Artificial
  probe
  misc_feature (1)..(25): SEQ ID NO: 817; WAN024DDJ_at; Start 97; Stop 121
gaatttaccggcactgcttatgtta

SEQ ID NO: 153603 - DNA, 25 bp, Artificial
  probe
  misc_feature (1)..(25): SEQ ID NO: 817; WAN024DDJ_at; Start 108; Stop 132
cactgcttatgttatttgctggtta

SEQ ID NO: 153604 - DNA, 25 bp, Artificial
  probe
  misc_feature (1)..(25): SEQ ID NO: 817; WAN024DDJ_at; Start 58; Stop 82
ggtcagctcttagttgaacacacac

SEQ ID NO: 153605 - DNA, 25 bp, Artificial
  probe
  misc_feature (1)..(25): SEQ ID NO: 817; WAN024DDJ_at; Start 41; Stop 65
tgctctctccattcatcggtcagct

SEQ ID NO: 153606 - DNA, 25 bp, Artificial
  probe
  misc_feature (1)..(25): SEQ ID NO: 817; WAN024DDJ_at; Start 112; Stop 136
gcttatgttatttgctggttatcag

SEQ ID NO: 153607 - DNA, 25 bp, Artificial
  probe
  misc_feature (1)..(25): SEQ ID NO: 817; WAN024DDJ_at; Start 141; Stop 165
tatcagcatccaccatttttccaaa

SEQ ID NO: 153608 - DNA, 25 bp, Artificial
  probe
  misc_feature (1)..(25): SEQ ID NO: 817; WAN024DDJ_at; Start 35; Stop 59
tctatctgctctctccattcatcgg

SEQ ID NO: 153609 - DNA, 25 bp, Artificial
  probe
  misc_feature (1)..(25): SEQ ID NO: 817; WAN024DDJ_at; Start 92; Stop 116
gtacagaatttaccggcactgctta

SEQ ID NO: 153610 - DNA, 25 bp, Artificial
  probe
  misc_feature (1)..(25): SEQ ID NO: 817; WAN024DDJ_at; Start 37; Stop 61
tatctgctctctccattcatcggtc

SEQ ID NO: 153611 - DNA, 25 bp, Artificial
  probe
  misc_feature (1)..(25): SEQ ID NO: 817; WAN024DDJ_at; Start 48; Stop 72
tccattcatcggtcagctcttagtt

SEQ ID NO: 153612 - DNA, 25 bp, Artificial
  probe
  misc_feature (1)..(25): SEQ ID NO: 817; WAN024DDJ_at; Start 131; Stop 155
tatcagttgttatcagcatccacca

SEQ ID NO: 153613 - DNA, 25 bp, Artificial
  probe
  misc_feature (1)..(25): SEQ ID NO: 817; WAN024DDJ_at; Start 44; Stop 68
tctctccattcatcggtcagctctt

SEQ ID NO: 153614 - DNA, 25 bp, Artificial
  probe
  misc_feature (1)..(25): SEQ ID NO: 817; WAN024DDJ_at; Start 13; Stop 37
gaacatatactcatcggacttctct

SEQ ID NO: 153615 - DNA, 25 bp, Artificial
  probe
  misc_feature (1)..(25): SEQ ID NO: 817; WAN024DDJ_at; Start 56; Stop 80
tcggtcagctcttagttgaacacac

SEQ ID NO: 153616 - DNA, 25 bp, Artificial
  probe
  misc_feature (1)..(25): SEQ ID NO: 817; WAN024DDJ_at; Start 24; Stop 48
catcggacttctctatctgctctct

SEQ ID NO: 153617 - DNA, 25 bp, Artificial
  probe
  misc_feature (1)..(25): SEQ ID NO: 817; WAN024DDJ_at; Start 128; Stop 152
ggttatcagttgttatcagcatcca

SEQ ID NO: 153618 - DNA, 25 bp, Artificial
  probe
  misc_feature (1)..(25): SEQ ID NO: 817; WAN024DDJ_at; Start 105; Stop 129
cggcactgcttatgttatttgctgg

SEQ ID NO: 153619 - DNA, 25 bp, Artificial
  probe
  misc_feature (1)..(25): SEQ ID NO: 817; WAN024DDJ_at; Start 3; Stop 27
gaaacacaaagaacatatactcatc

SEQ ID NO: 153620 - DNA, 25 bp, Artificial
  probe
  misc_feature (1)..(25): SEQ ID NO: 817; WAN024DDJ_at; Start 18; Stop 42
tatactcatcggacttctctatctg

SEQ ID NO: 153621 - DNA, 25 bp, Artificial
  probe
  misc_feature (1)..(25): SEQ ID NO: 817; WAN024DDJ_at; Start 155; Stop 179
atttttccaaaaatgtattgtctca

SEQ ID NO: 153622 - DNA, 25 bp, Artificial
  probe
  misc_feature (1)..(25): SEQ ID NO: 817; WAN024DDJ_at; Start 50; Stop 74
cattcatcggtcagctcttagttga

SEQ ID NO: 153623 - DNA, 25 bp, Artificial
  probe
  misc_feature (1)..(25): SEQ ID NO: 817; WAN024DDJ_at; Start 7; Stop 31
cacaaagaacatatactcatcggac

SEQ ID NO: 153624 - DNA, 25 bp, Artificial
  probe
  misc_feature (1)..(25): SEQ ID NO: 817; WAN024DDJ_at; Start 54; Stop 78
catcggtcagctcttagttgaacac

SEQ ID NO: 153625 - DNA, 25 bp, Artificial
  probe
  misc_feature (1)..(25): SEQ ID NO: 817; WAN024DDJ_at; Start 66; Stop 90
cttagttgaacacacacactttatc

SEQ ID NO: 153626 - DNA, 25 bp, Artificial
  probe
  misc_feature (1)..(25): SEQ ID NO: 817; WAN024DDJ_at; Start 20; Stop 44
tactcatcggacttctctatctgct

SEQ ID NO: 153627 - DNA, 25 bp, Artificial
  probe
  misc_feature (1)..(25): SEQ ID NO: 817; WAN024DDJ_at; Start 53; Stop 77
tcatcggtcagctcttagttgaaca

SEQ ID NO: 153628 - DNA, 25 bp, Artificial
  probe
  misc_feature (1)..(25): SEQ ID NO: 817; WAN024DDJ_at; Start 102; Stop 126
taccggcactgcttatgttatttgc

SEQ ID NO: 153629 - DNA, 25 bp, Artificial
  probe
  misc_feature (1)..(25): SEQ ID NO: 7181; WAN024DDK_at; Start 2412; Stop 2436
cggagcatatgctaccggagatgca

SEQ ID NO: 153630 - DNA, 25 bp, Artificial
  probe
  misc_feature (1)..(25): SEQ ID NO: 7181; WAN024DDK_at; Start 3404; Stop 3428
taaatacggctgtcaatgaagatgc

SEQ ID NO: 153631 - DNA, 25 bp, Artificial
  probe
  misc_feature (1)..(25): SEQ ID NO: 7181; WAN024DDK_at; Start 1531; Stop 1555
gcagcaatcgctgagaatagtaatt

SEQ ID NO: 153632 - DNA, 25 bp, Artificial
  probe
  misc_feature (1)..(25): SEQ ID NO: 7181; WAN024DDK_at; Start 32; Stop 56
tagttgatgcaatgaatagtgaccc

SEQ ID NO: 153633 - DNA, 25 bp, Artificial
  probe
  misc_feature (1)..(25): SEQ ID NO: 7181; WAN024DDK_at; Start 2397; Stop 2421
tgttcataatggacacggagcatat

SEQ ID NO: 153634 - DNA, 25 bp, Artificial
  probe
  misc_feature (1)..(25): SEQ ID NO: 7181; WAN024DDK_at; Start 1102; Stop 1126
aatttagtagatgaaagcagcgagc

SEQ ID NO: 153635 - DNA, 25 bp, Artificial
  probe
  misc_feature (1)..(25): SEQ ID NO: 7181; WAN024DDK_at; Start 581; Stop 605
ccggagttgttgagaaaagtgcgac

SEQ ID NO: 153636 - DNA, 25 bp, Artificial
  probe
  misc_feature (1)..(25): SEQ ID NO: 7181; WAN024DDK_at; Start 628; Stop 652
ggaaatgttaacaatgtgcgacact

SEQ ID NO: 153637 - DNA, 25 bp, Artificial
  probe
  misc_feature (1)..(25): SEQ ID NO: 7181; WAN024DDK_at; Start 2871; Stop 2895
gacaaatgttgttcgcagattaacg

SEQ ID NO: 153638 - DNA, 25 bp, Artificial
  probe
  misc_feature (1)..(25): SEQ ID NO: 7181; WAN024DDK_at; Start 752; Stop 776
taacaaatggtaatgctatatcggg

SEQ ID NO: 153639 - DNA, 25 bp, Artificial
  probe
  misc_feature (1)..(25): SEQ ID NO: 7181; WAN024DDK_at; Start 2689; Stop 2713
caacgatttaatagtgcagaagacc

SEQ ID NO: 153640 - DNA, 25 bp, Artificial
  probe
  misc_feature (1)..(25): SEQ ID NO: 7181; WAN024DDK_at; Start 2759; Stop 2783
aaatattagaaggtcgtgctgtagc

SEQ ID NO: 153641 - DNA, 25 bp, Artificial
  probe
  misc_feature (1)..(25): SEQ ID NO: 7181; WAN024DDK_at; Start 1999; Stop 2023
gatagattaactagtccgtcatgga

SEQ ID NO: 153642 - DNA, 25 bp, Artificial
  probe
  misc_feature (1)..(25): SEQ ID NO: 7181; WAN024DDK_at; Start 2362; Stop 2386
ataaaatacttctttggacctgcgg

SEQ ID NO: 153643 - DNA, 25 bp, Artificial
  probe
  misc_feature (1)..(25): SEQ ID NO: 7181; WAN024DDK_at; Start 1010; Stop 1034
taacaggttatcaaaagtcgagaga

SEQ ID NO: 153644 - DNA, 25 bp, Artificial
  probe
  misc_feature (1)..(25): SEQ ID NO: 7181; WAN024DDK_at; Start 874; Stop 898
gattcagatgtacaaagaggtacgg

SEQ ID NO: 153645 - DNA, 25 bp, Artificial
  probe
  misc_feature (1)..(25): SEQ ID NO: 7181; WAN024DDK_at; Start 1061; Stop 1085
tattaccgttctataatcgagagac

SEQ ID NO: 153646 - DNA, 25 bp, Artificial
  probe
  misc_feature (1)..(25): SEQ ID NO: 7181; WAN024DDK_at; Start 2171; Stop 2195
tagaagacaatgtaagagaagctgc

SEQ ID NO: 153647 - DNA, 25 bp, Artificial
  probe
  misc_feature (1)..(25): SEQ ID NO: 7181; WAN024DDK_at; Start 2129; Stop 2153
gaagtaaagtccatcctaaaggaga

SEQ ID NO: 153648 - DNA, 25 bp, Artificial
  probe
  misc_feature (1)..(25): SEQ ID NO: 7181; WAN024DDK_at; Start 3055; Stop 3079
cctggtgatttaatgggacgtcgta

SEQ ID NO: 153649 - DNA, 25 bp, Artificial
  probe
  misc_feature (1)..(25): SEQ ID NO: 7181; WAN024DDK_at; Start 2832; Stop 2856
taaatataagcaagatccagatggt

SEQ ID NO: 153650 - DNA, 25 bp, Artificial
  probe
  misc_feature (1)..(25): SEQ ID NO: 7181; WAN024DDK_at; Start 1511; Stop 1535
caaaacttctgtcagcggatgcagc

SEQ ID NO: 153651 - DNA, 25 bp, Artificial
  probe
  misc_feature (1)..(25): SEQ ID NO: 7181; WAN024DDK_at; Start 61; Stop 85
ggaacattccatttaggtgcaacta

SEQ ID NO: 153652 - DNA, 25 bp, Artificial
  probe
  misc_feature (1)..(25): SEQ ID NO: 7181; WAN024DDK_at; Start 3111; Stop 3135
taaagagggcatggtaccttatatc

SEQ ID NO: 153653 - DNA, 25 bp, Artificial
  probe
  misc_feature (1)..(25): SEQ ID NO: 7181; WAN024DDK_at; Start 2569; Stop 2593
tatgctaagggcttattacaagcac

SEQ ID NO: 153654 - DNA, 25 bp, Artificial
  probe
  misc_feature (1)..(25): SEQ ID NO: 7181; WAN024DDK_at; Start 521; Stop 545
tagcatcgattgacatagcctctaa

SEQ ID NO: 153655 - DNA, 25 bp, Artificial
  probe
  misc_feature (1)..(25): SEQ ID NO: 7181; WAN024DDK_at; Start 2237; Stop 2261
tagagcctgagaatagagagaaact

SEQ ID NO: 153656 - DNA, 25 bp, Artificial
  probe
  misc_feature (1)..(25): SEQ ID NO: 7181; WAN024DDK_at; Start 562; Stop 586
caaattgttggtggtatagccggag

SEQ ID NO: 153657 - DNA, 25 bp, Artificial
  probe
  misc_feature (1)..(25): SEQ ID NO: 7181; WAN024DDK_at; Start 3145; Stop 3169
tatgaaaaagatgcaaaagctgcgg

SEQ ID NO: 153658 - DNA, 25 bp, Artificial
  probe
  misc_feature (1)..(25): SEQ ID NO: 7181; WAN024DDK_at; Start 2952; Stop 2976
tactagcagagggtacaaagaccaa

SEQ ID NO: 153659 - DNA, 25 bp, Artificial
  probe
  misc_feature (1)..(25): SEQ ID NO: 7181; WAN024DDK_at; Start 3433; Stop 3457
gattttagagcacaattataccctg

SEQ ID NO: 153660 - DNA, 25 bp, Artificial
  probe
  misc_feature (1)..(25): SEQ ID NO: 7181; WAN024DDK_at; Start 3019; Stop 3043
ccgatttattcagctcttagtggag

SEQ ID NO: 153661 - DNA, 25 bp, Artificial
  probe
  misc_feature (1)..(25): SEQ ID NO: 7181; WAN024DDK_at; Start 536; Stop 560
tagcctctaatgcaaaatcaggaga

SEQ ID NO: 153662 - DNA, 25 bp, Artificial
  probe
  misc_feature (1)..(25): SEQ ID NO: 7181; WAN024DDK_at; Start 939; Stop 963
ggtttccaaacacagcactaaagta

SEQ ID NO: 153663 - DNA, 25 bp, Artificial
  probe
  misc_feature (1)..(25): SEQ ID NO: 7200; WAN024DDL_at; Start 2706; Stop 2730
taatcatactgaaggaaaggctaca

SEQ ID NO: 153664 - DNA, 25 bp, Artificial
  probe
  misc_feature (1)..(25): SEQ ID NO: 7200; WAN024DDL_at; Start 2591; Stop 2615
aaacagcagagcgtcaacgagatca

SEQ ID NO: 153665 - DNA, 25 bp, Artificial
  probe
  misc_feature (1)..(25): SEQ ID NO: 7200; WAN024DDL_at; Start 1841; Stop 1865
caccagaagtgaagctaacggagtt

SEQ ID NO: 153666 - DNA, 25 bp, Artificial
  probe
  misc_feature (1)..(25): SEQ ID NO: 7200; WAN024DDL_at; Start 2202; Stop 2226
tatcagccttgccagccatcatgga

SEQ ID NO: 153667 - DNA, 25 bp, Artificial
  probe
  misc_feature (1)..(25): SEQ ID NO: 7200; WAN024DDL_at; Start 3109; Stop 3133
gacgcaacagatcttcaaaaatacg

SEQ ID NO: 153668 - DNA, 25 bp, Artificial
  probe
  misc_feature (1)..(25): SEQ ID NO: 7200; WAN024DDL_at; Start 1813; Stop 1837
gatgctgttagaaatacacttggaa

SEQ ID NO: 153669 - DNA, 25 bp, Artificial
  probe
  misc_feature (1)..(25): SEQ ID NO: 7200; WAN024DDL_at; Start 1713; Stop 1737
agatagtgggcttctctatacgcca

SEQ ID NO: 153670 - DNA, 25 bp, Artificial
  probe
  misc_feature (1)..(25): SEQ ID NO: 7200; WAN024DDL_at; Start 470; Stop 494
gaacctatcatttaggagctagcct

SEQ ID NO: 153671 - DNA, 25 bp, Artificial
  probe
  misc_feature (1)..(25): SEQ ID NO: 7200; WAN024DDL_at; Start 2946; Stop 2970
aagaagtggacttggacctgagttc

SEQ ID NO: 153672 - DNA, 25 bp, Artificial
  probe
  misc_feature (1)..(25): SEQ ID NO: 7200; WAN024DDL_at; Start 3820; Stop 3844
gatgaagctgttttgcaggatgcaa

SEQ ID NO: 153673 - DNA, 25 bp, Artificial
  probe
  misc_feature (1)..(25): SEQ ID NO: 7200; WAN024DDL_at; Start 3206; Stop 3230
tatatcagaaaatagaagctctcag

SEQ ID NO: 153674 - DNA, 25 bp, Artificial
  probe
  misc_feature (1)..(25): SEQ ID NO: 7200; WAN024DDL_at; Start 1476; Stop 1500
tttctataacaaggcgaccatcgtg

SEQ ID NO: 153675 - DNA, 25 bp, Artificial
  probe
  misc_feature (1)..(25): SEQ ID NO: 7200; WAN024DDL_at; Start 3870; Stop 3894
taactataatccagaaacggacagt

SEQ ID NO: 153676 - DNA, 25 bp, Artificial
  probe
  misc_feature (1)..(25): SEQ ID NO: 7200; WAN024DDL_at; Start 3446; Stop 3470
cattgagcggtgagaaaggaactcc

SEQ ID NO: 153677 - DNA, 25 bp, Artificial
  probe
  misc_feature (1)..(25): SEQ ID NO: 7200; WAN024DDL_at; Start 1930; Stop 1954
tcatctgatgcaggtttagtaacag

SEQ ID NO: 153678 - DNA, 25 bp, Artificial
  probe
  misc_feature (1)..(25): SEQ ID NO: 7200; WAN024DDL_at; Start 1655; Stop 1679
aaaagtttgatctcaggtaccaggc

SEQ ID NO: 153679 - DNA, 25 bp, Artificial
  probe
  misc_feature (1)..(25): SEQ ID NO: 7200; WAN024DDL_at; Start 2575; Stop 2599
gaaaagagtgctcacgaaacagcag

SEQ ID NO: 153680 - DNA, 25 bp, Artificial
  probe
  misc_feature (1)..(25): SEQ ID NO: 7200; WAN024DDL_at; Start 2632; Stop 2656
cgtattctagatgaaaaagggcgtg

SEQ ID NO: 153681 - DNA, 25 bp, Artificial
  probe
  misc_feature (1)..(25): SEQ ID NO: 7200; WAN024DDL_at; Start 1270; Stop 1294
gtcgtcagcaaagaatccttcgagg

SEQ ID NO: 153682 - DNA, 25 bp, Artificial
  probe
  misc_feature (1)..(25): SEQ ID NO: 7200; WAN024DDL_at; Start 2360; Stop 2384
cgaagcaaggactagttggcactaa

SEQ ID NO: 153683 - DNA, 25 bp, Artificial
  probe
  misc_feature (1)..(25): SEQ ID NO: 7200; WAN024DDL_at; Start 1883; Stop 1907
ttaccaaaacgaaagagcatctagc

SEQ ID NO: 153684 - DNA, 25 bp, Artificial
  probe
  misc_feature (1)..(25): SEQ ID NO: 7200; WAN024DDL_at; Start 2996; Stop 3020
cagaccaaccaagtgatgcaacgat

SEQ ID NO: 153685 - DNA, 25 bp, Artificial
  probe
  misc_feature (1)..(25): SEQ ID NO: 7200; WAN024DDL_at; Start 540; Stop 564
caagggaacctttactggtcagttg

SEQ ID NO: 153686 - DNA, 25 bp, Artificial
  probe
  misc_feature (1)..(25): SEQ ID NO: 7200; WAN024DDL_at; Start 1762; Stop 1786
tctattattaaccaagtgctgcctg

SEQ ID NO: 153687 - DNA, 25 bp, Artificial
  probe
  misc_feature (1)..(25): SEQ ID NO: 7200; WAN024DDL_at; Start 2805; Stop 2829
taatggacatggtgcttatgctaca

SEQ ID NO: 153688 - DNA, 25 bp, Artificial
  probe
  misc_feature (1)..(25): SEQ ID NO: 7200; WAN024DDL_at; Start 1774; Stop 1798
caagtgctgcctgaattgaatcgag

SEQ ID NO: 153689 - DNA, 25 bp, Artificial
  probe
  misc_feature (1)..(25): SEQ ID NO: 7200; WAN024DDL_at; Start 3092; Stop 3116
caactacgagatttaaagacgcaac

SEQ ID NO: 153690 - DNA, 25 bp, Artificial
  probe
  misc_feature (1)..(25): SEQ ID NO: 7200; WAN024DDL_at; Start 2399; Stop 2423
tctatgaccgtatcactagtgccac

SEQ ID NO: 153691 - DNA, 25 bp, Artificial
  probe
  misc_feature (1)..(25): SEQ ID NO: 7200; WAN024DDL_at; Start 3468; Stop 3492
tccaggtgaccttatgggacgaagg

SEQ ID NO: 153692 - DNA, 25 bp, Artificial
  probe
  misc_feature (1)..(25): SEQ ID NO: 7200; WAN024DDL_at; Start 2453; Stop 2477
tacttaccttgccagaaagatccgt

SEQ ID NO: 153693 - DNA, 25 bp, Artificial
  probe
  misc_feature (1)..(25): SEQ ID NO: 7200; WAN024DDL_at; Start 1674; Stop 1698
ccaggctgattttgccaatttggca

SEQ ID NO: 153694 - DNA, 25 bp, Artificial
  probe
  misc_feature (1)..(25): SEQ ID NO: 7200; WAN024DDL_at; Start 3887; Stop 3911
cggacagtgccgtccataagttgaa

SEQ ID NO: 153695 - DNA, 25 bp, Artificial
  probe
  misc_feature (1)..(25): SEQ ID NO: 7200; WAN024DDL_at; Start 2893; Stop 2917
catgagatgacgcataattcagatc

SEQ ID NO: 153696 - DNA, 25 bp, Artificial
  probe
  misc_feature (1)..(25): SEQ ID NO: 7200; WAN024DDL_at; Start 2856; Stop 2880
tcgcatgctagataaggatggagct

SEQ ID NO: 153697 - DNA, 25 bp, Artificial
  probe
  misc_feature (1)..(25): SEQ ID NO: 7190; WAN024DDM_at; Start 2728; Stop 2752
tatgctaaaggactgctacaagctc

SEQ ID NO: 153698 - DNA, 25 bp, Artificial
  probe
  misc_feature (1)..(25): SEQ ID NO: 7190; WAN024DDM_at; Start 3304; Stop 3328
cagtatgaaaaagaagcgaaagctc

SEQ ID NO: 153699 - DNA, 25 bp, Artificial
  probe
  misc_feature (1)..(25): SEQ ID NO: 7190; WAN024DDM_at; Start 1390; Stop 1414
tacgcggataatacatcagagacac

SEQ ID NO: 153700 - DNA, 25 bp, Artificial
  probe
  misc_feature (1)..(25): SEQ ID NO: 7190; WAN024DDM_at; Start 914; Stop 938
taacgaatggtaatgctattgcagg

SEQ ID NO: 153701 - DNA, 25 bp, Artificial
  probe
  misc_feature (1)..(25): SEQ ID NO: 7190; WAN024DDM_at; Start 489; Stop 513
tgataacgttcatgctgatggagcg

SEQ ID NO: 153702 - DNA, 25 bp, Artificial
  probe
  misc_feature (1)..(25): SEQ ID NO: 7190; WAN024DDM_at; Start 2286; Stop 2310
tagaagtaaagaacatccagcagga

SEQ ID NO: 153703 - DNA, 25 bp, Artificial
  probe
  misc_feature (1)..(25): SEQ ID NO: 7190; WAN024DDM_at; Start 2161; Stop 2185
gatagattaactagcccatcttgga

SEQ ID NO: 153704 - DNA, 25 bp, Artificial
  probe
  misc_feature (1)..(25): SEQ ID NO: 7190; WAN024DDM_at; Start 3; Stop 27
gaactttaaagatgtgatgctacca

SEQ ID NO: 153705 - DNA, 25 bp, Artificial
  probe
  misc_feature (1)..(25): SEQ ID NO: 7190; WAN024DDM_at; Start 2534; Stop 2558
tcggtccagcgggaaataatgttgt

SEQ ID NO: 153706 - DNA, 25 bp, Artificial
  probe
  misc_feature (1)..(25): SEQ ID NO: 7190; WAN024DDM_at; Start 1674; Stop 1698
aaaacttcttactgcagatgctgca

SEQ ID NO: 153707 - DNA, 25 bp, Artificial
  probe
  misc_feature (1)..(25): SEQ ID NO: 7190; WAN024DDM_at; Start 2186; Stop 2210
aatatccaagtatggtgttgccgct

SEQ ID NO: 153708 - DNA, 25 bp, Artificial
  probe
  misc_feature (1)..(25): SEQ ID NO: 7190; WAN024DDM_at; Start 438; Stop 462
aaaggacgatactgcaacacttgcg

SEQ ID NO: 153709 - DNA, 25 bp, Artificial
  probe
  misc_feature (1)..(25): SEQ ID NO: 7190; WAN024DDM_at; Start 222; Stop 246
taatggcacattccgtttaggagca

SEQ ID NO: 153710 - DNA, 25 bp, Artificial
  probe
  misc_feature (1)..(25): SEQ ID NO: 7190; WAN024DDM_at; Start 3244; Stop 3268
gcatttgagttattggcagccaagg

SEQ ID NO: 153711 - DNA, 25 bp, Artificial
  probe
  misc_feature (1)..(25): SEQ ID NO: 7190; WAN024DDM_at; Start 3661; Stop 3685
aaagcttatcttgaccaaaccggtg

SEQ ID NO: 153712 - DNA, 25 bp, Artificial
  probe
  misc_feature (1)..(25): SEQ ID NO: 7190; WAN024DDM_at; Start 526; Stop 550
cgtagcataggaggattagtatcac

SEQ ID NO: 153713 - DNA, 25 bp, Artificial
  probe
  misc_feature (1)..(25): SEQ ID NO: 7190; WAN024DDM_at; Start 614; Stop 638
cagttgctagttatcaaatcggagg

SEQ ID NO: 153714 - DNA, 25 bp, Artificial
  probe
  misc_feature (1)..(25): SEQ ID NO: 7190; WAN024DDM_at; Start 2520; Stop 2544
tataaaacatttcttcggtccagcg

SEQ ID NO: 153715 - DNA, 25 bp, Artificial
  probe
  misc_feature (1)..(25): SEQ ID NO: 7190; WAN024DDM_at; Start 641; Stop 665
tagtaggcaaactttctggtccgag

SEQ ID NO: 153716 - DNA, 25 bp, Artificial
  probe
  misc_feature (1)..(25): SEQ ID NO: 7190; WAN024DDM_at; Start 3500; Stop 3524
caaacggttcttgggctcgacaaca

SEQ ID NO: 153717 - DNA, 25 bp, Artificial
  probe
  misc_feature (1)..(25): SEQ ID NO: 7190; WAN024DDM_at; Start 706; Stop 730
tcaaatgcaacacaaggagaccagt

SEQ ID NO: 153718 - DNA, 25 bp, Artificial
  probe
  misc_feature (1)..(25): SEQ ID NO: 7190; WAN024DDM_at; Start 843; Stop 867
taatctttgggatccggttggagga

SEQ ID NO: 153719 - DNA, 25 bp, Artificial
  probe
  misc_feature (1)..(25): SEQ ID NO: 7190; WAN024DDM_at; Start 2991; Stop 3015
tgaatataaacctgatcctgatgga

SEQ ID NO: 153720 - DNA, 25 bp, Artificial
  probe
  misc_feature (1)..(25): SEQ ID NO: 7190; WAN024DDM_at; Start 2702; Stop 2726
gacgaaatggacttggaccagagtt

SEQ ID NO: 153721 - DNA, 25 bp, Artificial
  probe
  misc_feature (1)..(25): SEQ ID NO: 7190; WAN024DDM_at; Start 3215; Stop 3239
caccaggagatttaatgggacgacg

SEQ ID NO: 153722 - DNA, 25 bp, Artificial
  probe
  misc_feature (1)..(25): SEQ ID NO: 7190; WAN024DDM_at; Start 2629; Stop 2653
gatggtgcggtaacttatacacacg

SEQ ID NO: 153723 - DNA, 25 bp, Artificial
  probe
  misc_feature (1)..(25): SEQ ID NO: 7190; WAN024DDM_at; Start 3269; Stop 3293
ggtacaaagacggtatggttccata

SEQ ID NO: 153724 - DNA, 25 bp, Artificial
  probe
  misc_feature (1)..(25): SEQ ID NO: 7190; WAN024DDM_at; Start 3585; Stop 3609
tgatgctgaggatgaagttgccaaa

SEQ ID NO: 153725 - DNA, 25 bp, Artificial
  probe
  misc_feature (1)..(25): SEQ ID NO: 7190; WAN024DDM_at; Start 421; Stop 445
gatgttaatatttccgcaaaggacg

SEQ ID NO: 153726 - DNA, 25 bp, Artificial
  probe
  misc_feature (1)..(25): SEQ ID NO: 7190; WAN024DDM_at; Start 2118; Stop 2142
taagcaatcaatagctggtagtcca

SEQ ID NO: 153727 - DNA, 25 bp, Artificial
  probe
  misc_feature (1)..(25): SEQ ID NO: 7190; WAN024DDM_at; Start 3194; Stop 3218
cattgagcagtaaaataggaacacc

SEQ ID NO: 153728 - DNA, 25 bp, Artificial
  probe
  misc_feature (1)..(25): SEQ ID NO: 7190; WAN024DDM_at; Start 2815; Stop 2839
gaatcaacaaggcttcaagtagcag

SEQ ID NO: 153729 - DNA, 25 bp, Artificial
  probe
  misc_feature (1)..(25): SEQ ID NO: 7190; WAN024DDM_at; Start 3132; Stop 3156
tgaagcaacttataagcggaatggc

SEQ ID NO: 153730 - DNA, 25 bp, Artificial
  probe
  misc_feature (1)..(25): SEQ ID NO: 7190; WAN024DDM_at; Start 3513; Stop 3537
ggctcgacaacagaaagtgactatt

SEQ ID NO: 153731 - DNA, 25 bp, Artificial
  probe
  misc_feature (1)..(25): SEQ ID NO: 3358; WAN024DDN_at; Start 91; Stop 115
tcagatagcttagaaggatcgcgtc

SEQ ID NO: 153732 - DNA, 25 bp, Artificial
  probe
  misc_feature (1)..(25): SEQ ID NO: 3358; WAN024DDN_at; Start 169; Stop 193
tatgttcacaacatgtttgacctca

SEQ ID NO: 153733 - DNA, 25 bp, Artificial
  probe
  misc_feature (1)..(25): SEQ ID NO: 3358; WAN024DDN_at; Start 105; Stop 129
aggatcgcgtctgcaagtcttggat

SEQ ID NO: 153734 - DNA, 25 bp, Artificial
  probe
  misc_feature (1)..(25): SEQ ID NO: 3358; WAN024DDN_at; Start 143; Stop 167
tccaaaactcagcagatcttcaaaa

SEQ ID NO: 153735 - DNA, 25 bp, Artificial
  probe
  misc_feature (1)..(25): SEQ ID NO: 3358; WAN024DDN_at; Start 610; Stop 634
gctaaacaaaatggtcagacaatca

SEQ ID NO: 153736 - DNA, 25 bp, Artificial
  probe
  misc_feature (1)..(25): SEQ ID NO: 3358; WAN024DDN_at; Start 751; Stop 775
gctcagtttgatcatttgactaaag

SEQ ID NO: 153737 - DNA, 25 bp, Artificial
  probe
  misc_feature (1)..(25): SEQ ID NO: 3358; WAN024DDN_at; Start 234; Stop 258
gaaactgaatgtttctcagaaaatg

SEQ ID NO: 153738 - DNA, 25 bp, Artificial
  probe
  misc_feature (1)..(25): SEQ ID NO: 3358; WAN024DDN_at; Start 205; Stop 229
gaatatctagaagggcaatcgattg

SEQ ID NO: 153739 - DNA, 25 bp, Artificial
  probe
  misc_feature (1)..(25): SEQ ID NO: 3358; WAN024DDN_at; Start 154; Stop 178
gcagatcttcaaaactatgttcaca

SEQ ID NO: 153740 - DNA, 25 bp, Artificial
  probe
  misc_feature (1)..(25): SEQ ID NO: 3358; WAN024DDN_at; Start 198; Stop 222
tatgttggaatatctagaagggcaa

SEQ ID NO: 153741 - DNA, 25 bp, Artificial
  probe
  misc_feature (1)..(25): SEQ ID NO: 3358; WAN024DDN_at; Start 706; Stop 730
ccatcttggacagcctttaaaaaag

SEQ ID NO: 153742 - DNA, 25 bp, Artificial
  probe
  misc_feature (1)..(25): SEQ ID NO: 3358; WAN024DDN_at; Start 601; Stop 625
gaaggaattgctaaacaaaatggtc

SEQ ID NO: 153743 - DNA, 25 bp, Artificial
  probe
  misc_feature (1)..(25): SEQ ID NO: 3358; WAN024DDN_at; Start 218; Stop 242
ggcaatcgattgttaagaaactgaa

SEQ ID NO: 153744 - DNA, 25 bp, Artificial
  probe
  misc_feature (1)..(25): SEQ ID NO: 3358; WAN024DDN_at; Start 78; Stop 102
gaaacattcaaaatcagatagctta

SEQ ID NO: 153745 - DNA, 25 bp, Artificial
  probe
  misc_feature (1)..(25): SEQ ID NO: 3358; WAN024DDN_at; Start 182; Stop 206
tgtttgacctcatctatatgttgga

SEQ ID NO: 153746 - DNA, 25 bp, Artificial
  probe
  misc_feature (1)..(25): SEQ ID NO: 3358; WAN024DDN_at; Start 716; Stop 740
cagcctttaaaaaagctatgtatca

SEQ ID NO: 153747 - DNA, 25 bp, Artificial
  probe
  misc_feature (1)..(25): SEQ ID NO: 3358; WAN024DDN_at; Start 680; Stop 704
tggaaaagatattctctggcaagta

SEQ ID NO: 153748 - DNA, 25 bp, Artificial
  probe
  misc_feature (1)..(25): SEQ ID NO: 3358; WAN024DDN_at; Start 493; Stop 517
agtgagaaaggtactcctggagatc

SEQ ID NO: 153749 - DNA, 25 bp, Artificial
  probe
  misc_feature (1)..(25): SEQ ID NO: 3358; WAN024DDN_at; Start 507; Stop 531
tcctggagatcttatgggacgaagg

SEQ ID NO: 153750 - DNA, 25 bp, Artificial
  probe
  misc_feature (1)..(25): SEQ ID NO: 3358; WAN024DDN_at; Start 730; Stop 754
gctatgtatcaagagcgtattgctc

SEQ ID NO: 153751 - DNA, 25 bp, Artificial
  probe
  misc_feature (1)..(25): SEQ ID NO: 3358; WAN024DDN_at; Start 663; Stop 687
gacagataagcttgttttggaaaag

SEQ ID NO: 153752 - DNA, 25 bp, Artificial
  probe
  misc_feature (1)..(25): SEQ ID NO: 3358; WAN024DDN_at; Start 739; Stop 763
caagagcgtattgctcagtttgatc

SEQ ID NO: 153753 - DNA, 25 bp, Artificial
  probe
  misc_feature (1)..(25): SEQ ID NO: 3358; WAN024DDN_at; Start 245; Stop 269
tttctcagaaaatggaagctctcag

SEQ ID NO: 153754 - DNA, 25 bp, Artificial
  probe
  misc_feature (1)..(25): SEQ ID NO: 3358; WAN024DDN_at; Start 651; Stop 675
gcaaggattagtgacagataagctt

SEQ ID NO: 153755 - DNA, 25 bp, Artificial
  probe
  misc_feature (1)..(25): SEQ ID NO: 3358; WAN024DDN_at; Start 621; Stop 645
tggtcagacaatcaacctttacggt

SEQ ID NO: 153756 - DNA, 25 bp, Artificial
  probe
  misc_feature (1)..(25): SEQ ID NO: 3358; WAN024DDN_at; Start 534; Stop 558
agcttatgaactcttagctgctaaa

SEQ ID NO: 153757 - DNA, 25 bp, Artificial
  probe
  misc_feature (1)..(25): SEQ ID NO: 3358; WAN024DDN_at; Start 96; Stop 120
tagcttagaaggatcgcgtctgcaa

SEQ ID NO: 153758 - DNA, 25 bp, Artificial
  probe
  misc_feature (1)..(25): SEQ ID NO: 3358; WAN024DDN_at; Start 696; Stop 720
tggcaagtatccatcttggacagcc

SEQ ID NO: 153759 - DNA, 25 bp, Artificial
  probe
  misc_feature (1)..(25): SEQ ID NO: 3358; WAN024DDN_at; Start 587; Stop 611
tttccaaccaatatgaaggaattgc

SEQ ID NO: 153760 - DNA, 25 bp, Artificial
  probe
  misc_feature (1)..(25): SEQ ID NO: 3358; WAN024DDN_at; Start 19; Stop 43
gtttatttacaagcgccagaccatc

SEQ ID NO: 153761 - DNA, 25 bp, Artificial
  probe
  misc_feature (1)..(25): SEQ ID NO: 3358; WAN024DDN_at; Start 487; Stop 511
ttgagcagtgagaaaggtactcctg

SEQ ID NO: 153762 - DNA, 25 bp, Artificial
  probe
  misc_feature (1)..(25): SEQ ID NO: 3358; WAN024DDN_at; Start 524; Stop 548
gacgaaggatagcttatgaactctt

SEQ ID NO: 153763 - DNA, 25 bp, Artificial
  probe
  misc_feature (1)..(25): SEQ ID NO: 3358; WAN024DDN_at; Start 12; Stop 36
gctaaaggtttatttacaagcgcca

SEQ ID NO: 153764 - DNA, 25 bp, Artificial
  probe
  misc_feature (1)..(25): SEQ ID NO: 3358; WAN024DDN_at; Start 642; Stop 666
cggtaaaaagcaaggattagtgaca

SEQ ID NO: 153765 - DNA, 25 bp, Artificial
  probe
  misc_feature (1)..(25): SEQ ID NO: 331; WAN024DDO_at; Start 2103; Stop 2127
gctctatctagaagaccagttcgcc

SEQ ID NO: 153766 - DNA, 25 bp, Artificial
  probe
  misc_feature (1)..(25): SEQ ID NO: 331; WAN024DDO_at; Start 2775; Stop 2799
tagtgaccataaagcgggcaaggct

SEQ ID NO: 153767 - DNA, 25 bp, Artificial
  probe
  misc_feature (1)..(25): SEQ ID NO: 331; WAN024DDO_at; Start 2073; Stop 2097
gggtatttctccaaacgtcaagcaa

SEQ ID NO: 153768 - DNA, 25 bp, Artificial
  probe
  misc_feature (1)..(25): SEQ ID NO: 331; WAN024DDO_at; Start 3136; Stop 3160
gagatgacacatgactcagatcagg

SEQ ID NO: 153769 - DNA, 25 bp, Artificial
  probe
  misc_feature (1)..(25): SEQ ID NO: 331; WAN024DDO_at; Start 968; Stop 992
aaattaagcaagttcacgtcgatgg

SEQ ID NO: 153770 - DNA, 25 bp, Artificial
  probe
  misc_feature (1)..(25): SEQ ID NO: 331; WAN024DDO_at; Start 1110; Stop 1134
caatatcggtggtatggtcggtcat

SEQ ID NO: 153771 - DNA, 25 bp, Artificial
  probe
  misc_feature (1)..(25): SEQ ID NO: 331; WAN024DDO_at; Start 3038; Stop 3062
ttgggcataatcaacacggtgctta

SEQ ID NO: 153772 - DNA, 25 bp, Artificial
  probe
  misc_feature (1)..(25): SEQ ID NO: 331; WAN024DDO_at; Start 3816; Stop 3840
gggcaagacaatcaatctctacggt

SEQ ID NO: 153773 - DNA, 25 bp, Artificial
  probe
  misc_feature (1)..(25): SEQ ID NO: 331; WAN024DDO_at; Start 3687; Stop 3711
taatgatataggaacaccaggtgac

SEQ ID NO: 153774 - DNA, 25 bp, Artificial
  probe
  misc_feature (1)..(25): SEQ ID NO: 331; WAN024DDO_at; Start 3703; Stop 3727
ccaggtgacctgatgggacgtcgta

SEQ ID NO: 153775 - DNA, 25 bp, Artificial
  probe
  misc_feature (1)..(25): SEQ ID NO: 331; WAN024DDO_at; Start 2157; Stop 2181
gaaaaaactcttgtcagcggatgct

SEQ ID NO: 153776 - DNA, 25 bp, Artificial
  probe
  misc_feature (1)..(25): SEQ ID NO: 331; WAN024DDO_at; Start 1086; Stop 1110
cacttatgaaacgactgctgcctac

SEQ ID NO: 153777 - DNA, 25 bp, Artificial
  probe
  misc_feature (1)..(25): SEQ ID NO: 331; WAN024DDO_at; Start 1491; Stop 1515
caccttggtcaaggatgaggtcgtc

SEQ ID NO: 153778 - DNA, 25 bp, Artificial
  probe
  misc_feature (1)..(25): SEQ ID NO: 331; WAN024DDO_at; Start 2693; Stop 2717
tcctgaccttgccagagagatccgt

SEQ ID NO: 153779 - DNA, 25 bp, Artificial
  probe
  misc_feature (1)..(25): SEQ ID NO: 331; WAN024DDO_at; Start 1448; Stop 1472
taaaggacacattcagcagcaaggc

SEQ ID NO: 153780 - DNA, 25 bp, Artificial
  probe
  misc_feature (1)..(25): SEQ ID NO: 331; WAN024DDO_at; Start 1656; Stop 1680
ggtggcctattatcaagctaagcgc

SEQ ID NO: 153781 - DNA, 25 bp, Artificial
  probe
  misc_feature (1)..(25): SEQ ID NO: 331; WAN024DDO_at; Start 2440; Stop 2464
ggtatcagtcttgccagtcaacatg

SEQ ID NO: 153782 - DNA, 25 bp, Artificial
  probe
  misc_feature (1)..(25): SEQ ID NO: 331; WAN024DDO_at; Start 3976; Stop 4000
tttaatgatacaacacagccttggc

SEQ ID NO: 153783 - DNA, 25 bp, Artificial
  probe
  misc_feature (1)..(25): SEQ ID NO: 331; WAN024DDO_at; Start 2255; Stop 2279
tacttggcttgacctatctggaacg

SEQ ID NO: 153784 - DNA, 25 bp, Artificial
  probe
  misc_feature (1)..(25): SEQ ID NO: 331; WAN024DDO_at; Start 1463; Stop 1487
gcagcaaggccaacagagtctacaa

SEQ ID NO: 153785 - DNA, 25 bp, Artificial
  probe
  misc_feature (1)..(25): SEQ ID NO: 331; WAN024DDO_at; Start 1201; Stop 1225
acttcagatcagactgtgggtggac

SEQ ID NO: 153786 - DNA, 25 bp, Artificial
  probe
  misc_feature (1)..(25): SEQ ID NO: 331; WAN024DDO_at; Start 1795; Stop 1819
tcagcagtcatgatgaaggacaacc

SEQ ID NO: 153787 - DNA, 25 bp, Artificial
  probe
  misc_feature (1)..(25): SEQ ID NO: 331; WAN024DDO_at; Start 1014; Stop 1038
tatcggtggtttgctggctaaggct

SEQ ID NO: 153788 - DNA, 25 bp, Artificial
  probe
  misc_feature (1)..(25): SEQ ID NO: 331; WAN024DDO_at; Start 2612; Stop 2636
tagctggcaccaagtattctatcgg

SEQ ID NO: 153789 - DNA, 25 bp, Artificial
  probe
  misc_feature (1)..(25): SEQ ID NO: 331; WAN024DDO_at; Start 1944; Stop 1968
tagtctgggcaatactggacttctc

SEQ ID NO: 153790 - DNA, 25 bp, Artificial
  probe
  misc_feature (1)..(25): SEQ ID NO: 331; WAN024DDO_at; Start 2050; Stop 2074
tcagaagccatcagaaagacgctgg

SEQ ID NO: 153791 - DNA, 25 bp, Artificial
  probe
  misc_feature (1)..(25): SEQ ID NO: 331; WAN024DDO_at; Start 1035; Stop 1059
ggctgagcaatcaagcatcacagag

SEQ ID NO: 153792 - DNA, 25 bp, Artificial
  probe
  misc_feature (1)..(25): SEQ ID NO: 331; WAN024DDO_at; Start 4122; Stop 4146
tagtgaagtccacaagctcaagaga

SEQ ID NO: 153793 - DNA, 25 bp, Artificial
  probe
  misc_feature (1)..(25): SEQ ID NO: 331; WAN024DDO_at; Start 2178; Stop 2202
tgctggactggctagtgctaacccc

SEQ ID NO: 153794 - DNA, 25 bp, Artificial
  probe
  misc_feature (1)..(25): SEQ ID NO: 331; WAN024DDO_at; Start 1132; Stop 1156
catttgacaggtgacaaggctttac

SEQ ID NO: 153795 - DNA, 25 bp, Artificial
  probe
  misc_feature (1)..(25): SEQ ID NO: 331; WAN024DDO_at; Start 2752; Stop 2776
ggagcttatgatcgctaccgcagta

SEQ ID NO: 153796 - DNA, 25 bp, Artificial
  probe
  misc_feature (1)..(25): SEQ ID NO: 331; WAN024DDO_at; Start 1158; Stop 1182
tactaagtcaaaagcgacagtagcc

SEQ ID NO: 153797 - DNA, 25 bp, Artificial
  probe
  misc_feature (1)..(25): SEQ ID NO: 331; WAN024DDO_at; Start 3599; Stop 3623
tttcgtctagggaatatgcctcagg

SEQ ID NO: 153798 - DNA, 25 bp, Artificial
  probe
  misc_feature (1)..(25): SEQ ID NO: 331; WAN024DDO_at; Start 2598; Stop 2622
aacgaagcaagggttagctggcacc

SEQ ID NO: 153799 - DNA, 25 bp, Artificial
  probe
  misc_feature (1)..(25): SEQ ID NO: 332; WAN024DDP_at; Start 273; Stop 297
tagtcagacgaatggaacctacaga

SEQ ID NO: 153800 - DNA, 25 bp, Artificial
  probe
  misc_feature (1)..(25): SEQ ID NO: 332; WAN024DDP_at; Start 1969; Stop 1993
aagttaaccgagctctatttagaag

SEQ ID NO: 153801 - DNA, 25 bp, Artificial
  probe
  misc_feature (1)..(25): SEQ ID NO: 332; WAN024DDP_at; Start 3484; Stop 3508
tcagctcgtgagtaccagtctggcg

SEQ ID NO: 153802 - DNA, 25 bp, Artificial
  probe
  misc_feature (1)..(25): SEQ ID NO: 332; WAN024DDP_at; Start 315; Stop 339
tggaattccagagaatacggatact

SEQ ID NO: 153803 - DNA, 25 bp, Artificial
  probe
  misc_feature (1)..(25): SEQ ID NO: 332; WAN024DDP_at; Start 373; Stop 397
gatgtctatataccagtagcttcaa

SEQ ID NO: 153804 - DNA, 25 bp, Artificial
  probe
  misc_feature (1)..(25): SEQ ID NO: 332; WAN024DDP_at; Start 2067; Stop 2091
tagcgataactcagtcaccagaggc

SEQ ID NO: 153805 - DNA, 25 bp, Artificial
  probe
  misc_feature (1)..(25): SEQ ID NO: 332; WAN024DDP_at; Start 294; Stop 318
cagacaacatgtttcattggatgga

SEQ ID NO: 153806 - DNA, 25 bp, Artificial
  probe
  misc_feature (1)..(25): SEQ ID NO: 332; WAN024DDP_at; Start 418; Stop 442
gggcagtcagtttataaaatcacag

SEQ ID NO: 153807 - DNA, 25 bp, Artificial
  probe
  misc_feature (1)..(25): SEQ ID NO: 332; WAN024DDP_at; Start 3122; Stop 3146
caagtgacgcaaccattaccattaa

SEQ ID NO: 153808 - DNA, 25 bp, Artificial
  probe
  misc_feature (1)..(25): SEQ ID NO: 332; WAN024DDP_at; Start 3169; Stop 3193
tcagatagtacagagggatcccgtc

SEQ ID NO: 153809 - DNA, 25 bp, Artificial
  probe
  misc_feature (1)..(25): SEQ ID NO: 332; WAN024DDP_at; Start 2051; Stop 2075
cagatgccggtctagctagcgataa

SEQ ID NO: 153810 - DNA, 25 bp, Artificial
  probe
  misc_feature (1)..(25): SEQ ID NO: 332; WAN024DDP_at; Start 1775; Stop 1799
aatttgatctcaagtaccagactga

SEQ ID NO: 153811 - DNA, 25 bp, Artificial
  probe
  misc_feature (1)..(25): SEQ ID NO: 332; WAN024DDP_at; Start 3502; Stop 3526
tctggcgactatgaacgaaatggct

SEQ ID NO: 153812 - DNA, 25 bp, Artificial
  probe
  misc_feature (1)..(25): SEQ ID NO: 332; WAN024DDP_at; Start 3357; Stop 3381
gaacaagtatgtgaaagatccagca

SEQ ID NO: 153813 - DNA, 25 bp, Artificial
  probe
  misc_feature (1)..(25): SEQ ID NO: 332; WAN024DDP_at; Start 2036; Stop 2060
aaaaacttttgtcagcagatgccgg

SEQ ID NO: 153814 - DNA, 25 bp, Artificial
  probe
  misc_feature (1)..(25): SEQ ID NO: 332; WAN024DDP_at; Start 3623; Stop 3647
ttttggctgccaaaggctttaagga

SEQ ID NO: 153815 - DNA, 25 bp, Artificial
  probe
  misc_feature (1)..(25): SEQ ID NO: 332; WAN024DDP_at; Start 3181; Stop 3205
gagggatcccgtcttcaagtcttgg

SEQ ID NO: 153816 - DNA, 25 bp, Artificial
  probe
  misc_feature (1)..(25): SEQ ID NO: 332; WAN024DDP_at; Start 3551; Stop 3575
caatctattcagctctcagcagtga

SEQ ID NO: 153817 - DNA, 25 bp, Artificial
  probe
  misc_feature (1)..(25): SEQ ID NO: 332; WAN024DDP_at; Start 3469; Stop 3493
gaccacaacatcttatcagctcgtg

SEQ ID NO: 153818 - DNA, 25 bp, Artificial
  probe
  misc_feature (1)..(25): SEQ ID NO: 332; WAN024DDP_at; Start 3332; Stop 3356
aaatggcggctctcagaaaaattga

SEQ ID NO: 153819 - DNA, 25 bp, Artificial
  probe
  misc_feature (1)..(25): SEQ ID NO: 332; WAN024DDP_at; Start 450; Stop 474
tgagaaactccagcaagaactagaa

SEQ ID NO: 153820 - DNA, 25 bp, Artificial
  probe
  misc_feature (1)..(25): SEQ ID NO: 332; WAN024DDP_at; Start 1903; Stop 1927
gagttgcagaagcttgattaccagt

SEQ ID NO: 153821 - DNA, 25 bp, Artificial
  probe
  misc_feature (1)..(25): SEQ ID NO: 332; WAN024DDP_at; Start 2785; Stop 2809
cgtacgattctcctttatgatgcct

SEQ ID NO: 153822 - DNA, 25 bp, Artificial
  probe
  misc_feature (1)..(25): SEQ ID NO: 332; WAN024DDP_at; Start 3317; Stop 3341
taagtgtttaccagaaaatggcggc

SEQ ID NO: 153823 - DNA, 25 bp, Artificial
  probe
  misc_feature (1)..(25): SEQ ID NO: 332; WAN024DDP_at; Start 1887; Stop 1911
taaggaagtcttgcctgagttgcag

SEQ ID NO: 153824 - DNA, 25 bp, Artificial
  probe
  misc_feature (1)..(25): SEQ ID NO: 332; WAN024DDP_at; Start 1930; Stop 1954
gatgctatcagaaagacacttggta

SEQ ID NO: 153825 - DNA, 25 bp, Artificial
  probe
  misc_feature (1)..(25): SEQ ID NO: 332; WAN024DDP_at; Start 2854; Stop 2878
gctaagtttgatagctccaatccag

SEQ ID NO: 153826 - DNA, 25 bp, Artificial
  probe
  misc_feature (1)..(25): SEQ ID NO: 332; WAN024DDP_at; Start 1870; Stop 1894
gatcgagactctattgttaaggaag

SEQ ID NO: 153827 - DNA, 25 bp, Artificial
  probe
  misc_feature (1)..(25): SEQ ID NO: 332; WAN024DDP_at; Start 1467; Stop 1491
tcctctcactctaccaacggtggaa

SEQ ID NO: 153828 - DNA, 25 bp, Artificial
  probe
  misc_feature (1)..(25): SEQ ID NO: 332; WAN024DDP_at; Start 3566; Stop 3590
tcagcagtgagaaaggcacaccagg

SEQ ID NO: 153829 - DNA, 25 bp, Artificial
  probe
  misc_feature (1)..(25): SEQ ID NO: 332; WAN024DDP_at; Start 1821; Stop 1845
taatctaggtaatacgggacttctc

SEQ ID NO: 153830 - DNA, 25 bp, Artificial
  probe
  misc_feature (1)..(25): SEQ ID NO: 332; WAN024DDP_at; Start 3282; Stop 3306
ggaatatctcgaagggcagtcaatc

SEQ ID NO: 153831 - DNA, 25 bp, Artificial
  probe
  misc_feature (1)..(25): SEQ ID NO: 332; WAN024DDP_at; Start 3594; Stop 3618
ccttatgggacgtaggattgcgtac

SEQ ID NO: 153832 - DNA, 25 bp, Artificial
  probe
  misc_feature (1)..(25): SEQ ID NO: 332; WAN024DDP_at; Start 3609; Stop 3633
gattgcgtacgaacttttggctgcc

SEQ ID NO: 153833 - DNA, 25 bp, Artificial
  probe
  misc_feature (1)..(25): SEQ ID NO: 3345; WAN024DDQ_at; Start 189; Stop 213
gaattcttttgctgagttgtctgat

SEQ ID NO: 153834 - DNA, 25 bp, Artificial
  probe
  misc_feature (1)..(25): SEQ ID NO: 3345; WAN024DDQ_at; Start 903; Stop 927
gcttggttttcaatatagaacacct

SEQ ID NO: 153835 - DNA, 25 bp, Artificial
  probe
  misc_feature (1)..(25): SEQ ID NO: 3345; WAN024DDQ_at; Start 1297; Stop 1321
ggtcaggaacatcttccagaactgg

SEQ ID NO: 153836 - DNA, 25 bp, Artificial
  probe
  misc_feature (1)..(25): SEQ ID NO: 3345; WAN024DDQ_at; Start 597; Stop 621
taaacctgttatagatgctaaacct

SEQ ID NO: 153837 - DNA, 25 bp, Artificial
  probe
  misc_feature (1)..(25): SEQ ID NO: 3345; WAN024DDQ_at; Start 821; Stop 845
gaattttcccttttcttgagcttga

SEQ ID NO: 153838 - DNA, 25 bp, Artificial
  probe
  misc_feature (1)..(25): SEQ ID NO: 3345; WAN024DDQ_at; Start 71; Stop 95
tagtggagagacaaacattaaaaga

SEQ ID NO: 153839 - DNA, 25 bp, Artificial
  probe
  misc_feature (1)..(25): SEQ ID NO: 3345; WAN024DDQ_at; Start 793; Stop 817
tatcataagttaatagctgcagaga

SEQ ID NO: 153840 - DNA, 25 bp, Artificial
  probe
  misc_feature (1)..(25): SEQ ID NO: 3345; WAN024DDQ_at; Start 1015; Stop 1039
gaggaacttatttcaccgagctgga

SEQ ID NO: 153841 - DNA, 25 bp, Artificial
  probe
  misc_feature (1)..(25): SEQ ID NO: 3345; WAN024DDQ_at; Start 564; Stop 588
tgcaacctatattaatttcccgaca

SEQ ID NO: 153842 - DNA, 25 bp, Artificial
  probe
  misc_feature (1)..(25): SEQ ID NO: 3345; WAN024DDQ_at; Start 547; Stop 571
tatattcactctaaaactgcaacct

SEQ ID NO: 153843 - DNA, 25 bp, Artificial
  probe
  misc_feature (1)..(25): SEQ ID NO: 3345; WAN024DDQ_at; Start 56; Stop 80
tagagtctttgtcaatagtggagag

SEQ ID NO: 153844 - DNA, 25 bp, Artificial
  probe
  misc_feature (1)..(25): SEQ ID NO: 3345; WAN024DDQ_at; Start 1372; Stop 1396
aaaggtggcaatgctctttaactaa

SEQ ID NO: 153845 - DNA, 25 bp, Artificial
  probe
  misc_feature (1)..(25): SEQ ID NO: 3345; WAN024DDQ_at; Start 884; Stop 908
gaggattaatttataaacagcttgg

SEQ ID NO: 153846 - DNA, 25 bp, Artificial
  probe
  misc_feature (1)..(25): SEQ ID NO: 3345; WAN024DDQ_at; Start 747; Stop 771
tgcttggttaaaaaatgacggtgaa

SEQ ID NO: 153847 - DNA, 25 bp, Artificial
  probe
  misc_feature (1)..(25): SEQ ID NO: 3345; WAN024DDQ_at; Start 305; Stop 329
ccgattctgatgttgttcttggtca

SEQ ID NO: 153848 - DNA, 25 bp, Artificial
  probe
  misc_feature (1)..(25): SEQ ID NO: 3345; WAN024DDQ_at; Start 1031; Stop 1055
cgagctggactcatgaagtttatcc

SEQ ID NO: 153849 - DNA, 25 bp, Artificial
  probe
  misc_feature (1)..(25): SEQ ID NO: 3345; WAN024DDQ_at; Start 694; Stop 718
tatgatatagaaagagcgaaaaaac

SEQ ID NO: 153850 - DNA, 25 bp, Artificial
  probe
  misc_feature (1)..(25): SEQ ID NO: 3345; WAN024DDQ_at; Start 1313; Stop 1337
cagaactggctattatgtctgatcc

SEQ ID NO: 153851 - DNA, 25 bp, Artificial
  probe
  misc_feature (1)..(25): SEQ ID NO: 3345; WAN024DDQ_at; Start 272; Stop 296
catttgaaaagatgtatcatgcgat

SEQ ID NO: 153852 - DNA, 25 bp, Artificial
  probe
  misc_feature (1)..(25): SEQ ID NO: 3345; WAN024DDQ_at; Start 328; Stop 352
cattttgctgatttggttgatggag

SEQ ID NO: 153853 - DNA, 25 bp, Artificial
  probe
  misc_feature (1)..(25): SEQ ID NO: 3345; WAN024DDQ_at; Start 1341; Stop 1365
aaatacttttgatatcatggcttgg

SEQ ID NO: 153854 - DNA, 25 bp, Artificial
  probe
  misc_feature (1)..(25): SEQ ID NO: 3345; WAN024DDQ_at; Start 132; Stop 156
gatagcttccattagccaacagatg

SEQ ID NO: 153855 - DNA, 25 bp, Artificial
  probe
  misc_feature (1)..(25): SEQ ID NO: 3345; WAN024DDQ_at; Start 838; Stop 862
gagcttgatagattagattttacga

SEQ ID NO: 153856 - DNA, 25 bp, Artificial
  probe
  misc_feature (1)..(25): SEQ ID NO: 3345; WAN024DDQ_at; Start 520; Stop 544
gatataaacaaccttatttggagac

SEQ ID NO: 153857 - DNA, 25 bp, Artificial
  probe
  misc_feature (1)..(25): SEQ ID NO: 3345; WAN024DDQ_at; Start 673; Stop 697
gattgcgccgtcttagaaaactatg

SEQ ID NO: 153858 - DNA, 25 bp, Artificial
  probe
  misc_feature (1)..(25): SEQ ID NO: 3345; WAN024DDQ_at; Start 806; Stop 830
tagctgcagagaaaggaattttccc

SEQ ID NO: 153859 - DNA, 25 bp, Artificial
  probe
  misc_feature (1)..(25): SEQ ID NO: 3345; WAN024DDQ_at; Start 1279; Stop 1303
agtcaatgtgttattccaggtcagg

SEQ ID NO: 153860 - DNA, 25 bp, Artificial
  probe
  misc_feature (1)..(25): SEQ ID NO: 3345; WAN024DDQ_at; Start 1106; Stop 1130
ttgaagaagcacgaactaagtggga

SEQ ID NO: 153861 - DNA, 25 bp, Artificial
  probe
  misc_feature (1)..(25): SEQ ID NO: 3345; WAN024DDQ_at; Start 1061; Stop 1085
ggcacttaggagatatagatattca

SEQ ID NO: 153862 - DNA, 25 bp, Artificial
  probe
  misc_feature (1)..(25): SEQ ID NO: 3345; WAN024DDQ_at; Start 658; Stop 682
gaaaatagaatcaaagattgcgccg

SEQ ID NO: 153863 - DNA, 25 bp, Artificial
  probe
  misc_feature (1)..(25): SEQ ID NO: 3345; WAN024DDQ_at; Start 117; Stop 141
tcaatctacagaggagatagcttcc

SEQ ID NO: 153864 - DNA, 25 bp, Artificial
  probe
  misc_feature (1)..(25): SEQ ID NO: 3345; WAN024DDQ_at; Start 610; Stop 634
gatgctaaacctctaaaagactcct

SEQ ID NO: 153865 - DNA, 25 bp, Artificial
  probe
  misc_feature (1)..(25): SEQ ID NO: 3345; WAN024DDQ_at; Start 435; Stop 459
tacagatcatcgaattagaaaacaa

SEQ ID NO: 153866 - DNA, 25 bp, Artificial
  probe
  misc_feature (1)..(25): SEQ ID NO: 3345; WAN024DDQ_at; Start 419; Stop 443
tacaaaagatggatgatacagatca

SEQ ID NO: 153867 - DNA, 25 bp, Artificial
  probe
  misc_feature (1)..(25): SEQ ID NO: 655; WAN024DDR_at; Start 189; Stop 213
tcttggaggagatttagctcgttat

SEQ ID NO: 153868 - DNA, 25 bp, Artificial
  probe
  misc_feature (1)..(25): SEQ ID NO: 655; WAN024DDR_at; Start 537; Stop 561
agataccttgtttattagtcctcgc

SEQ ID NO: 153869 - DNA, 25 bp, Artificial
  probe
  misc_feature (1)..(25): SEQ ID NO: 655; WAN024DDR_at; Start 522; Stop 546
taagagagaagtgggagataccttg

SEQ ID NO: 153870 - DNA, 25 bp, Artificial
  probe
  misc_feature (1)..(25): SEQ ID NO: 655; WAN024DDR_at; Start 240; Stop 264
gaaactgattcttttggatggtggc

SEQ ID NO: 153871 - DNA, 25 bp, Artificial
  probe
  misc_feature (1)..(25): SEQ ID NO: 655; WAN024DDR_at; Start 29; Stop 53
gaagcaatgcctatcatagcaagga

SEQ ID NO: 153872 - DNA, 25 bp, Artificial
  probe
  misc_feature (1)..(25): SEQ ID NO: 655; WAN024DDR_at; Start 254; Stop 278
tggatggtggctatctagatttaga

SEQ ID NO: 153873 - DNA, 25 bp, Artificial
  probe
  misc_feature (1)..(25): SEQ ID NO: 655; WAN024DDR_at; Start 655; Stop 679
tatactcaagcacctaaagaaatcg

SEQ ID NO: 153874 - DNA, 25 bp, Artificial
  probe
  misc_feature (1)..(25): SEQ ID NO: 655; WAN024DDR_at; Start 628; Stop 652
tttttagaaaactttggccatgagc

SEQ ID NO: 153875 - DNA, 25 bp, Artificial
  probe
  misc_feature (1)..(25): SEQ ID NO: 655; WAN024DDR_at; Start 279; Stop 303
taagattttacctttggatacagag

SEQ ID NO: 153876 - DNA, 25 bp, Artificial
  probe
  misc_feature (1)..(25): SEQ ID NO: 655; WAN024DDR_at; Start 295; Stop 319
gatacagagttagaggaaactaaaa

SEQ ID NO: 153877 - DNA, 25 bp, Artificial
  probe
  misc_feature (1)..(25): SEQ ID NO: 655; WAN024DDR_at; Start 441; Stop 465
tgagtataatagatatgagttggct

SEQ ID NO: 153878 - DNA, 25 bp, Artificial
  probe
  misc_feature (1)..(25): SEQ ID NO: 655; WAN024DDR_at; Start 289; Stop 313
cctttggatacagagttagaggaaa

SEQ ID NO: 153879 - DNA, 25 bp, Artificial
  probe
  misc_feature (1)..(25): SEQ ID NO: 655; WAN024DDR_at; Start 480; Stop 504
tatagaagcgatactccgcctacgg

SEQ ID NO: 153880 - DNA, 25 bp, Artificial
  probe
  misc_feature (1)..(25): SEQ ID NO: 655; WAN024DDR_at; Start 686; Stop 710
taatgaatgagtggctcgcttattt

SEQ ID NO: 153881 - DNA, 25 bp, Artificial
  probe
  misc_feature (1)..(25): SEQ ID NO: 655; WAN024DDR_at; Start 429; Stop 453
tcactggaatgttgagtataataga

SEQ ID NO: 153882 - DNA, 25 bp, Artificial
  probe
  misc_feature (1)..(25): SEQ ID NO: 655; WAN024DDR_at; Start 399; Stop 423
aaatatggagaaagctgtaagacag

SEQ ID NO: 153883 - DNA, 25 bp, Artificial
  probe
  misc_feature (1)..(25): SEQ ID NO: 655; WAN024DDR_at; Start 383; Stop 407
caaagcattggtcagaaaatatgga

SEQ ID NO: 153884 - DNA, 25 bp, Artificial
  probe
  misc_feature (1)..(25): SEQ ID NO: 655; WAN024DDR_at; Start 379; Stop 403
gaagcaaagcattggtcagaaaata

SEQ ID NO: 153885 - DNA, 25 bp, Artificial
  probe
  misc_feature (1)..(25): SEQ ID NO: 655; WAN024DDR_at; Start 454; Stop 478
tatgagttggctataaattatgaaa

SEQ ID NO: 153886 - DNA, 25 bp, Artificial
  probe
  misc_feature (1)..(25): SEQ ID NO: 655; WAN024DDR_at; Start 216; Stop 240
cgcatcggaatttgaagaagtaaag

SEQ ID NO: 153887 - DNA, 25 bp, Artificial
  probe
  misc_feature (1)..(25): SEQ ID NO: 655; WAN024DDR_at; Start 122; Stop 146
cagaattgaaatcatggtttaaaaa

SEQ ID NO: 153888 - DNA, 25 bp, Artificial
  probe
  misc_feature (1)..(25): SEQ ID NO: 655; WAN024DDR_at; Start 106; Stop 130
catcttcgagatgaaacagaattga

SEQ ID NO: 153889 - DNA, 25 bp, Artificial
  probe
  misc_feature (1)..(25): SEQ ID NO: 655; WAN024DDR_at; Start 74; Stop 98
cgcaggtctattttctaaatccata

SEQ ID NO: 153890 - DNA, 25 bp, Artificial
  probe
  misc_feature (1)..(25): SEQ ID NO: 655; WAN024DDR_at; Start 642; Stop 666
tggccatgagctttatactcaagca

SEQ ID NO: 153891 - DNA, 25 bp, Artificial
  probe
  misc_feature (1)..(25): SEQ ID NO: 655; WAN024DDR_at; Start 660; Stop 684
tcaagcacctaaagaaatcgctagt

SEQ ID NO: 153892 - DNA, 25 bp, Artificial
  probe
  misc_feature (1)..(25): SEQ ID NO: 655; WAN024DDR_at; Start 59; Stop 83
ttcaagaactagattcgcaggtcta

SEQ ID NO: 153893 - DNA, 25 bp, Artificial
  probe
  misc_feature (1)..(25): SEQ ID NO: 655; WAN024DDR_at; Start 20; Stop 44
gcggtttgggaagcaatgcctatca

SEQ ID NO: 153894 - DNA, 25 bp, Artificial
  probe
  misc_feature (1)..(25): SEQ ID NO: 655; WAN024DDR_at; Start 226; Stop 250
tttgaagaagtaaagaaactgattc

SEQ ID NO: 153895 - DNA, 25 bp, Artificial
  probe
  misc_feature (1)..(25): SEQ ID NO: 655; WAN024DDR_at; Start 184; Stop 208
cattctcttggaggagatttagctc

SEQ ID NO: 153896 - DNA, 25 bp, Artificial
  probe
  misc_feature (1)..(25): SEQ ID NO: 655; WAN024DDR_at; Start 474; Stop 498
tgaaaatatagaagcgatactccgc

SEQ ID NO: 153897 - DNA, 25 bp, Artificial
  probe
  misc_feature (1)..(25): SEQ ID NO: 655; WAN024DDR_at; Start 494; Stop 518
tccgcctacggagaaaaatacaagc

SEQ ID NO: 153898 - DNA, 25 bp, Artificial
  probe
  misc_feature (1)..(25): SEQ ID NO: 655; WAN024DDR_at; Start 91; Stop 115
aatccatatgaaaagcatcttcgag

SEQ ID NO: 153899 - DNA, 25 bp, Artificial
  probe
  misc_feature (1)..(25): SEQ ID NO: 655; WAN024DDR_at; Start 545; Stop 569
tgtttattagtcctcgctatcctaa

SEQ ID NO: 153900 - DNA, 25 bp, Artificial
  probe
  misc_feature (1)..(25): SEQ ID NO: 655; WAN024DDR_at; Start 512; Stop 536
tacaagcttttaagagagaagtggg

SEQ ID NO: 153901 - DNA, 25 bp, Artificial
  probe
  misc_feature (1)..(25): SEQ ID NO: 2234; WAN024DDS_at; Start 16; Stop 40
tttacagaaaaagaacaggaaatga

SEQ ID NO: 153902 - DNA, 25 bp, Artificial
  probe
  misc_feature (1)..(25): SEQ ID NO: 2234; WAN024DDS_at; Start 205; Stop 229
gctgtagctcaaacaagtggtgaga

SEQ ID NO: 153903 - DNA, 25 bp, Artificial
  probe
  misc_feature (1)..(25): SEQ ID NO: 2234; WAN024DDS_at; Start 131; Stop 155
tcccgttttttgtcagaaaacatgc

SEQ ID NO: 153904 - DNA, 25 bp, Artificial
  probe
  misc_feature (1)..(25): SEQ ID NO: 2234; WAN024DDS_at; Start 247; Stop 271
gaagaattgcgtcagattatcacaa

SEQ ID NO: 153905 - DNA, 25 bp, Artificial
  probe
  misc_feature (1)..(25): SEQ ID NO: 2234; WAN024DDS_at; Start 214; Stop 238
caaacaagtggtgagattccagaaa

SEQ ID NO: 153906 - DNA, 25 bp, Artificial
  probe
  misc_feature (1)..(25): SEQ ID NO: 2234; WAN024DDS_at; Start 151; Stop 175
catgctacaacacgtacgattaaac

SEQ ID NO: 153907 - DNA, 25 bp, Artificial
  probe
  misc_feature (1)..(25): SEQ ID NO: 2234; WAN024DDS_at; Start 259; Stop 283
cagattatcacaactatctttgaac

SEQ ID NO: 153908 - DNA, 25 bp, Artificial
  probe
  misc_feature (1)..(25): SEQ ID NO: 2234; WAN024DDS_at; Start 195; Stop 219
tgaactctacgctgtagctcaaaca

SEQ ID NO: 153909 - DNA, 25 bp, Artificial
  probe
  misc_feature (1)..(25): SEQ ID NO: 2234; WAN024DDS_at; Start 42; Stop 66
taagaaaaggcttacaatgtctaat

SEQ ID NO: 153910 - DNA, 25 bp, Artificial
  probe
  misc_feature (1)..(25): SEQ ID NO: 2234; WAN024DDS_at; Start 134; Stop 158
cgttttttgtcagaaaacatgctac

SEQ ID NO: 153911 - DNA, 25 bp, Artificial
  probe
  misc_feature (1)..(25): SEQ ID NO: 2234; WAN024DDS_at; Start 287; Stop 311
agatgaataagcatagtattaagta

SEQ ID NO: 153912 - DNA, 25 bp, Artificial
  probe
  misc_feature (1)..(25): SEQ ID NO: 2234; WAN024DDS_at; Start 156; Stop 180
tacaacacgtacgattaaacgcatt

SEQ ID NO: 153913 - DNA, 25 bp, Artificial
  probe
  misc_feature (1)..(25): SEQ ID NO: 2234; WAN024DDS_at; Start 146; Stop 170
gaaaacatgctacaacacgtacgat

SEQ ID NO: 153914 - DNA, 25 bp, Artificial
  probe
  misc_feature (1)..(25): SEQ ID NO: 2234; WAN024DDS_at; Start 245; Stop 269
gcgaagaattgcgtcagattatcac

SEQ ID NO: 153915 - DNA, 25 bp, Artificial
  probe
  misc_feature (1)..(25): SEQ ID NO: 2234; WAN024DDS_at; Start 143; Stop 167
tcagaaaacatgctacaacacgtac

SEQ ID NO: 153916 - DNA, 25 bp, Artificial
  probe
  misc_feature (1)..(25): SEQ ID NO: 2234; WAN024DDS_at; Start 60; Stop 84
gtctaatattagtgacaaagaaact

SEQ ID NO: 153917 - DNA, 25 bp, Artificial
  probe
  misc_feature (1)..(25): SEQ ID NO: 2234; WAN024DDS_at; Start 216; Stop 240
aacaagtggtgagattccagaaaaa

SEQ ID NO: 153918 - DNA, 25 bp, Artificial
  probe
  misc_feature (1)..(25): SEQ ID NO: 2234; WAN024DDS_at; Start 276; Stop 300
ctttgaacaaaagatgaataagcat

SEQ ID NO: 153919 - DNA, 25 bp, Artificial
  probe
  misc_feature (1)..(25): SEQ ID NO: 2234; WAN024DDS_at; Start 264; Stop 288
tatcacaactatctttgaacaaaag

SEQ ID NO: 153920 - DNA, 25 bp, Artificial
  probe
  misc_feature (1)..(25): SEQ ID NO: 2234; WAN024DDS_at; Start 202; Stop 226
tacgctgtagctcaaacaagtggtg

SEQ ID NO: 153921 - DNA, 25 bp, Artificial
  probe
  misc_feature (1)..(25): SEQ ID NO: 2234; WAN024DDS_at; Start 200; Stop 224
tctacgctgtagctcaaacaagtgg

SEQ ID NO: 153922 - DNA, 25 bp, Artificial
  probe
  misc_feature (1)..(25): SEQ ID NO: 2234; WAN024DDS_at; Start 31; Stop 55
caggaaatgattaagaaaaggctta

SEQ ID NO: 153923 - DNA, 25 bp, Artificial
  probe
  misc_feature (1)..(25): SEQ ID NO: 2234; WAN024DDS_at; Start 50; Stop 74
ggcttacaatgtctaatattagtga

SEQ ID NO: 153924 - DNA, 25 bp, Artificial
  probe
  misc_feature (1)..(25): SEQ ID NO: 2234; WAN024DDS_at; Start 211; Stop 235
gctcaaacaagtggtgagattccag

SEQ ID NO: 153925 - DNA, 25 bp, Artificial
  probe
  misc_feature (1)..(25): SEQ ID NO: 2234; WAN024DDS_at; Start 28; Stop 52
gaacaggaaatgattaagaaaaggc

SEQ ID NO: 153926 - DNA, 25 bp, Artificial
  probe
  misc_feature (1)..(25): SEQ ID NO: 2234; WAN024DDS_at; Start 254; Stop 278
tgcgtcagattatcacaactatctt

SEQ ID NO: 153927 - DNA, 25 bp, Artificial
  probe
  misc_feature (1)..(25): SEQ ID NO: 2234; WAN024DDS_at; Start 154; Stop 178
gctacaacacgtacgattaaacgca

SEQ ID NO: 153928 - DNA, 25 bp, Artificial
  probe
  misc_feature (1)..(25): SEQ ID NO: 2234; WAN024DDS_at; Start 18; Stop 42
tacagaaaaagaacaggaaatgatt

SEQ ID NO: 153929 - DNA, 25 bp, Artificial
  probe
  misc_feature (1)..(25): SEQ ID NO: 2234; WAN024DDS_at; Start 141; Stop 165
tgtcagaaaacatgctacaacacgt

SEQ ID NO: 153930 - DNA, 25 bp, Artificial
  probe
  misc_feature (1)..(25): SEQ ID NO: 2234; WAN024DDS_at; Start 250; Stop 274
gaattgcgtcagattatcacaacta

SEQ ID NO: 153931 - DNA, 25 bp, Artificial
  probe
  misc_feature (1)..(25): SEQ ID NO: 2234; WAN024DDS_at; Start 279; Stop 303
tgaacaaaagatgaataagcatagt

SEQ ID NO: 153932 - DNA, 25 bp, Artificial
  probe
  misc_feature (1)..(25): SEQ ID NO: 2234; WAN024DDS_at; Start 209; Stop 233
tagctcaaacaagtggtgagattcc

SEQ ID NO: 153933 - DNA, 25 bp, Artificial
  probe
  misc_feature (1)..(25): SEQ ID NO: 2234; WAN024DDS_at; Start 38; Stop 62
tgattaagaaaaggcttacaatgtc

SEQ ID NO: 153934 - DNA, 25 bp, Artificial
  probe
  misc_feature (1)..(25): SEQ ID NO: 2234; WAN024DDS_at; Start 191; Stop 215
accctgaactctacgctgtagctca

SEQ ID NO: 153935 - DNA, 25 bp, Artificial
  probe
  misc_feature (1)..(25): SEQ ID NO: 1073; WAN024DDT_at; Start 180; Stop 204
ggtcaaatctctcttatcagctcac

SEQ ID NO: 153936 - DNA, 25 bp, Artificial
  probe
  misc_feature (1)..(25): SEQ ID NO: 1073; WAN024DDT_at; Start 519; Stop 543
tctattttcgagagttccaactgag

SEQ ID NO: 153937 - DNA, 25 bp, Artificial
  probe
  misc_feature (1)..(25): SEQ ID NO: 1073; WAN024DDT_at; Start 843; Stop 867
catggataatgataagtgggttaaa

SEQ ID NO: 153938 - DNA, 25 bp, Artificial
  probe
  misc_feature (1)..(25): SEQ ID NO: 1073; WAN024DDT_at; Start 743; Stop 767
cctaccaagcgattaaatttgctag

SEQ ID NO: 153939 - DNA, 25 bp, Artificial
  probe
  misc_feature (1)..(25): SEQ ID NO: 1073; WAN024DDT_at; Start 159; Stop 183
caaccaggtaagtacagaagaggtc

SEQ ID NO: 153940 - DNA, 25 bp, Artificial
  probe
  misc_feature (1)..(25): SEQ ID NO: 1073; WAN024DDT_at; Start 490; Stop 514
gattcacaagataaggaagagtttg

SEQ ID NO: 153941 - DNA, 25 bp, Artificial
  probe
  misc_feature (1)..(25): SEQ ID NO: 1073; WAN024DDT_at; Start 793; Stop 817
ggcaccaagtatgcggattatacag

SEQ ID NO: 153942 - DNA, 25 bp, Artificial
  probe
  misc_feature (1)..(25): SEQ ID NO: 1073; WAN024DDT_at; Start 334; Stop 358
catctctggaatcaaaagaagggcg

SEQ ID NO: 153943 - DNA, 25 bp, Artificial
  probe
  misc_feature (1)..(25): SEQ ID NO: 1073; WAN024DDT_at; Start 419; Stop 443
ttccaaagcttgaaaagaatgacca

SEQ ID NO: 153944 - DNA, 25 bp, Artificial
  probe
  misc_feature (1)..(25): SEQ ID NO: 1073; WAN024DDT_at; Start 118; Stop 142
tcagcgaaagttccatggaaagctt

SEQ ID NO: 153945 - DNA, 25 bp, Artificial
  probe
  misc_feature (1)..(25): SEQ ID NO: 1073; WAN024DDT_at; Start 286; Stop 310
gatttcacttcctttactcacaccg

SEQ ID NO: 153946 - DNA, 25 bp, Artificial
  probe
  misc_feature (1)..(25): SEQ ID NO: 1073; WAN024DDT_at; Start 447; Stop 471
gcttttcctagataatgatgcgatt

SEQ ID NO: 153947 - DNA, 25 bp, Artificial
  probe
  misc_feature (1)..(25): SEQ ID NO: 1073; WAN024DDT_at; Start 103; Stop 127
caaaggcaaagcagttcagcgaaag

SEQ ID NO: 153948 - DNA, 25 bp, Artificial
  probe
  misc_feature (1)..(25): SEQ ID NO: 1073; WAN024DDT_at; Start 620; Stop 644
gaatgctgtctgtagtcttgcacga

SEQ ID NO: 153949 - DNA, 25 bp, Artificial
  probe
  misc_feature (1)..(25): SEQ ID NO: 1073; WAN024DDT_at; Start 71; Stop 95
aacaacaacatgctacttctgaggg

SEQ ID NO: 153950 - DNA, 25 bp, Artificial
  probe
  misc_feature (1)..(25): SEQ ID NO: 1073; WAN024DDT_at; Start 605; Stop 629
tcaatgaaaaagctcgaatgctgtc

SEQ ID NO: 153951 - DNA, 25 bp, Artificial
  probe
  misc_feature (1)..(25): SEQ ID NO: 1073; WAN024DDT_at; Start 53; Stop 77
taggcttggctgcttgtcaacaaca

SEQ ID NO: 153952 - DNA, 25 bp, Artificial
  probe
  misc_feature (1)..(25): SEQ ID NO: 1073; WAN024DDT_at; Start 808; Stop 832
gattatacaggcgagggactggcta

SEQ ID NO: 153953 - DNA, 25 bp, Artificial
  probe
  misc_feature (1)..(25): SEQ ID NO: 1073; WAN024DDT_at; Start 760; Stop 784
tttgctagtaaggaagattgctaca

SEQ ID NO: 153954 - DNA, 25 bp, Artificial
  probe
  misc_feature (1)..(25): SEQ ID NO: 1073; WAN024DDT_at; Start 402; Stop 426
gaaaaattcagtcaccattccaaag

SEQ ID NO: 153955 - DNA, 25 bp, Artificial
  probe
  misc_feature (1)..(25): SEQ ID NO: 1073; WAN024DDT_at; Start 558; Stop 582
caaggttcacgctgaaaagatggaa

SEQ ID NO: 153956 - DNA, 25 bp, Artificial
  probe
  misc_feature (1)..(25): SEQ ID NO: 1073; WAN024DDT_at; Start 303; Stop 327
tcacaccgaatacgatgttgagaaa

SEQ ID NO: 153957 - DNA, 25 bp, Artificial
  probe
  misc_feature (1)..(25): SEQ ID NO: 1073; WAN024DDT_at; Start 545; Stop 569
caactacagatgtcaaggttcacgc

SEQ ID NO: 153958 - DNA, 25 bp, Artificial
  probe
  misc_feature (1)..(25): SEQ ID NO: 1073; WAN024DDT_at; Start 364; Stop 388
gttgggaccaactgccgtatcaata

SEQ ID NO: 153959 - DNA, 25 bp, Artificial
  probe
  misc_feature (1)..(25): SEQ ID NO: 1073; WAN024DDT_at; Start 261; Stop 285
tgtcggctcaactggcttatcagga

SEQ ID NO: 153960 - DNA, 25 bp, Artificial
  probe
  misc_feature (1)..(25): SEQ ID NO: 1073; WAN024DDT_at; Start 194; Stop 218
tatcagctcacttggatccaaatag

SEQ ID NO: 153961 - DNA, 25 bp, Artificial
  probe
  misc_feature (1)..(25): SEQ ID NO: 1073; WAN024DDT_at; Start 824; Stop 848
gactggctaagccttttatcatgga

SEQ ID NO: 153962 - DNA, 25 bp, Artificial
  probe
  misc_feature (1)..(25): SEQ ID NO: 1073; WAN024DDT_at; Start 462; Stop 486
tgatgcgattgataaaggaaaggtc

SEQ ID NO: 153963 - DNA, 25 bp, Artificial
  probe
  misc_feature (1)..(25): SEQ ID NO: 1073; WAN024DDT_at; Start 204; Stop 228
cttggatccaaatagtgttgatgca

SEQ ID NO: 153964 - DNA, 25 bp, Artificial
  probe
  misc_feature (1)..(25): SEQ ID NO: 1073; WAN024DDT_at; Start 475; Stop 499
aaaggaaaggtctttgattcacaag

SEQ ID NO: 153965 - DNA, 25 bp, Artificial
  probe
  misc_feature (1)..(25): SEQ ID NO: 1073; WAN024DDT_at; Start 134; Stop 158
ggaaagcttcatacaccaacctaaa

SEQ ID NO: 153966 - DNA, 25 bp, Artificial
  probe
  misc_feature (1)..(25): SEQ ID NO: 1073; WAN024DDT_at; Start 318; Stop 342
tgttgagaaaatcagtcatctctgg

SEQ ID NO: 153967 - DNA, 25 bp, Artificial
  probe
  misc_feature (1)..(25): SEQ ID NO: 1073; WAN024DDT_at; Start 269; Stop 293
caactggcttatcaggagatttcac

SEQ ID NO: 153968 - DNA, 25 bp, Artificial
  probe
  misc_feature (1)..(25): SEQ ID NO: 1073; WAN024DDT_at; Start 700; Stop 724
gatgacggtttcttatttgtagaga

SEQ ID NO: 153969 - DNA, 25 bp, Artificial
  probe
  misc_feature (1)..(25): SEQ ID NO: 6968; WAN024DDU_at; Start 423; Stop 447
aacccaagacgataacctaaacatg

SEQ ID NO: 153970 - DNA, 25 bp, Artificial
  probe
  misc_feature (1)..(25): SEQ ID NO: 6968; WAN024DDU_at; Start 147; Stop 171
tatagataaaatcgaaatgctggct

SEQ ID NO: 153971 - DNA, 25 bp, Artificial
  probe
  misc_feature (1)..(25): SEQ ID NO: 6968; WAN024DDU_at; Start 179; Stop 203
tcaacgtttcaaagtctgacttagt

SEQ ID NO: 153972 - DNA, 25 bp, Artificial
  probe
  misc_feature (1)..(25): SEQ ID NO: 6968; WAN024DDU_at; Start 552; Stop 576
tatcaagaatacacctcaagttgac

SEQ ID NO: 153973 - DNA, 25 bp, Artificial
  probe
  misc_feature (1)..(25): SEQ ID NO: 6968; WAN024DDU_at; Start 113; Stop 137
tcaacgattgggtaaatgctaaaac

SEQ ID NO: 153974 - DNA, 25 bp, Artificial
  probe
  misc_feature (1)..(25): SEQ ID NO: 6968; WAN024DDU_at; Start 263; Stop 287
tcactccaccaagacaagaaaaagc

SEQ ID NO: 153975 - DNA, 25 bp, Artificial
  probe
  misc_feature (1)..(25): SEQ ID NO: 6968; WAN024DDU_at; Start 390; Stop 414
tgttatcggagttgtaaccgccgga

SEQ ID NO: 153976 - DNA, 25 bp, Artificial
  probe
  misc_feature (1)..(25): SEQ ID NO: 6968; WAN024DDU_at; Start 534; Stop 558
gaatggcgactacctatttatcaag

SEQ ID NO: 153977 - DNA, 25 bp, Artificial
  probe
  misc_feature (1)..(25): SEQ ID NO: 6968; WAN024DDU_at; Start 708; Stop 732
cggcgaagtcgtgagtatatataga

SEQ ID NO: 153978 - DNA, 25 bp, Artificial
  probe
  misc_feature (1)..(25): SEQ ID NO: 6968; WAN024DDU_at; Start 448; Stop 472
gaaaaatgcttttatactgatgaaa

SEQ ID NO: 153979 - DNA, 25 bp, Artificial
  probe
  misc_feature (1)..(25): SEQ ID NO: 6968; WAN024DDU_at; Start 129; Stop 153
tgctaaaacttacccacgtatagat

SEQ ID NO: 153980 - DNA, 25 bp, Artificial
  probe
  misc_feature (1)..(25): SEQ ID NO: 6968; WAN024DDU_at; Start 23; Stop 47
taatggcggacaatatcaaaagact

SEQ ID NO: 153981 - DNA, 25 bp, Artificial
  probe
  misc_feature (1)..(25): SEQ ID NO: 6968; WAN024DDU_at; Start 460; Stop 484
tatactgatgaaataccagacgact

SEQ ID NO: 153982 - DNA, 25 bp, Artificial
  probe
  misc_feature (1)..(25): SEQ ID NO: 6968; WAN024DDU_at; Start 644; Stop 668
tagaaagccttaaccctgattgtgc

SEQ ID NO: 153983 - DNA, 25 bp, Artificial
  probe
  misc_feature (1)..(25): SEQ ID NO: 6968; WAN024DDU_at; Start 433; Stop 457
gataacctaaacatggaaaaatgct

SEQ ID NO: 153984 - DNA, 25 bp, Artificial
  probe
  misc_feature (1)..(25): SEQ ID NO: 6968; WAN024DDU_at; Start 88; Stop 112
gcattagattttaagtatacaaccg

SEQ ID NO: 153985 - DNA, 25 bp, Artificial
  probe
  misc_feature (1)..(25): SEQ ID NO: 6968; WAN024DDU_at; Start 295; Stop 319
tatcttaaaaagcagctgctggagc

SEQ ID NO: 153986 - DNA, 25 bp, Artificial
  probe
  misc_feature (1)..(25): SEQ ID NO: 6968; WAN024DDU_at; Start 343; Stop 367
gaaaacattatcagtctggacgact

SEQ ID NO: 153987 - DNA, 25 bp, Artificial
  probe
  misc_feature (1)..(25): SEQ ID NO: 6968; WAN024DDU_at; Start 655; Stop 679
aaccctgattgtgctgatattcaac

SEQ ID NO: 153988 - DNA, 25 bp, Artificial
  probe
  misc_feature (1)..(25): SEQ ID NO: 6968; WAN024DDU_at; Start 375; Stop 399
aagcaagacgctccctgttatcgga

SEQ ID NO: 153989 - DNA, 25 bp, Artificial
  probe
  misc_feature (1)..(25): SEQ ID NO: 6968; WAN024DDU_at; Start 359; Stop 383
tggacgactacagagaaagcaagac

SEQ ID NO: 153990 - DNA, 25 bp, Artificial
  probe
  misc_feature (1)..(25): SEQ ID NO: 6968; WAN024DDU_at; Start 525; Stop 549
aaagataaagaatggcgactaccta

SEQ ID NO: 153991 - DNA, 25 bp, Artificial
  probe
  misc_feature (1)..(25): SEQ ID NO: 6968; WAN024DDU_at; Start 165; Stop 189
gctggctaattttttcaacgtttca

SEQ ID NO: 153992 - DNA, 25 bp, Artificial
  probe
  misc_feature (1)..(25): SEQ ID NO: 6968; WAN024DDU_at; Start 669; Stop 693
tgatattcaactagacgaaagcaac

SEQ ID NO: 153993 - DNA, 25 bp, Artificial
  probe
  misc_feature (1)..(25): SEQ ID NO: 6968; WAN024DDU_at; Start 629; Stop 653
tgcgtcaagggtatttagaaagcct

SEQ ID NO: 153994 - DNA, 25 bp, Artificial
  probe
  misc_feature (1)..(25): SEQ ID NO: 6968; WAN024DDU_at; Start 195; Stop 219
tgacttagtagaaaataaaaacgca

SEQ ID NO: 153995 - DNA, 25 bp, Artificial
  probe
  misc_feature (1)..(25): SEQ ID NO: 6968; WAN024DDU_at; Start 8; Stop 32
taggaaataagcaaataatggcgga

SEQ ID NO: 153996 - DNA, 25 bp, Artificial
  probe
  misc_feature (1)..(25): SEQ ID NO: 6968; WAN024DDU_at; Start 696; Stop 720
tatacgcaccatcggcgaagtcgtg

SEQ ID NO: 153997 - DNA, 25 bp, Artificial
  probe
  misc_feature (1)..(25): SEQ ID NO: 6968; WAN024DDU_at; Start 311; Stop 335
tgctggagcagaaaaacgaaaacat

SEQ ID NO: 153998 - DNA, 25 bp, Artificial
  probe
  misc_feature (1)..(25): SEQ ID NO: 6968; WAN024DDU_at; Start 100; Stop 124
aagtatacaaccgtcaacgattggg

SEQ ID NO: 153999 - DNA, 25 bp, Artificial
  probe
  misc_feature (1)..(25): SEQ ID NO: 6968; WAN024DDU_at; Start 682; Stop 706
gacgaaagcaacgatatacgcacca

SEQ ID NO: 154000 - DNA, 25 bp, Artificial
  probe
  misc_feature (1)..(25): SEQ ID NO: 6968; WAN024DDU_at; Start 65; Stop 89
taaaccctcgtcaattagctattgc

SEQ ID NO: 154001 - DNA, 25 bp, Artificial
  probe
  misc_feature (1)..(25): SEQ ID NO: 6968; WAN024DDU_at; Start 567; Stop 591
tcaagttgactataacactatcggt

SEQ ID NO: 154002 - DNA, 25 bp, Artificial
  probe
  misc_feature (1)..(25): SEQ ID NO: 6968; WAN024DDU_at; Start 618; Stop 642
cgtcaagaaactgcgtcaagggtat

SEQ ID NO: 154003 - DNA, 25 bp, Artificial
  probe
  misc_feature (1)..(25): SEQ ID NO: 7287; WAN024DDV_at; Start 345; Stop 369
ctatgttaagaaactgcgtcaggga

SEQ ID NO: 154004 - DNA, 25 bp, Artificial
  probe
  misc_feature (1)..(25): SEQ ID NO: 7287; WAN024DDV_at; Start 104; Stop 128
agactacttaccgacgtgttactgg

SEQ ID NO: 154005 - DNA, 25 bp, Artificial
  probe
  misc_feature (1)..(25): SEQ ID NO: 7287; WAN024DDV_at; Start 358; Stop 382
ctgcgtcagggatatctggaaagct

SEQ ID NO: 154006 - DNA, 25 bp, Artificial
  probe
  misc_feature (1)..(25): SEQ ID NO: 7287; WAN024DDV_at; Start 51; Stop 75
aacgaagataaacgaagtatcggag

SEQ ID NO: 154007 - DNA, 25 bp, Artificial
  probe
  misc_feature (1)..(25): SEQ ID NO: 7287; WAN024DDV_at; Start 26; Stop 50
tggagagtcaagaaaacgaagaaga

SEQ ID NO: 154008 - DNA, 25 bp, Artificial
  probe
  misc_feature (1)..(25): SEQ ID NO: 7287; WAN024DDV_at; Start 134; Stop 158
tctctgctggtagtggttcgataca

SEQ ID NO: 154009 - DNA, 25 bp, Artificial
  probe
  misc_feature (1)..(25): SEQ ID NO: 7287; WAN024DDV_at; Start 2; Stop 26
tgctacggacatctgaggagcttct

SEQ ID NO: 154010 - DNA, 25 bp, Artificial
  probe
  misc_feature (1)..(25): SEQ ID NO: 7287; WAN024DDV_at; Start 342; Stop 366
taactatgttaagaaactgcgtcag

SEQ ID NO: 154011 - DNA, 25 bp, Artificial
  probe
  misc_feature (1)..(25): SEQ ID NO: 7287; WAN024DDV_at; Start 101; Stop 125
gacagactacttaccgacgtgttac

SEQ ID NO: 154012 - DNA, 25 bp, Artificial
  probe
  misc_feature (1)..(25): SEQ ID NO: 7287; WAN024DDV_at; Start 184; Stop 208
tcgttctatgaggatgaaatcccag

SEQ ID NO: 154013 - DNA, 25 bp, Artificial
  probe
  misc_feature (1)..(25): SEQ ID NO: 7287; WAN024DDV_at; Start 172; Stop 196
gatatggaggtttcgttctatgagg

SEQ ID NO: 154014 - DNA, 25 bp, Artificial
  probe
  misc_feature (1)..(25): SEQ ID NO: 7287; WAN024DDV_at; Start 354; Stop 378
gaaactgcgtcagggatatctggaa

SEQ ID NO: 154015 - DNA, 25 bp, Artificial
  probe
  misc_feature (1)..(25): SEQ ID NO: 7287; WAN024DDV_at; Start 300; Stop 324
ggttgattataacactatcggcatc

SEQ ID NO: 154016 - DNA, 25 bp, Artificial
  probe
  misc_feature (1)..(25): SEQ ID NO: 7287; WAN024DDV_at; Start 19; Stop 43
gagcttctggagagtcaagaaaacg

SEQ ID NO: 154017 - DNA, 25 bp, Artificial
  probe
  misc_feature (1)..(25): SEQ ID NO: 7287; WAN024DDV_at; Start 281; Stop 305
ttataaagaatacccaacaggttga

SEQ ID NO: 154018 - DNA, 25 bp, Artificial
  probe
  misc_feature (1)..(25): SEQ ID NO: 7287; WAN024DDV_at; Start 190; Stop 214
tatgaggatgaaatcccagacgact

SEQ ID NO: 154019 - DNA, 25 bp, Artificial
  probe
  misc_feature (1)..(25): SEQ ID NO: 7287; WAN024DDV_at; Start 130; Stop 154
gttgtctctgctggtagtggttcga

SEQ ID NO: 154020 - DNA, 25 bp, Artificial
  probe
  misc_feature (1)..(25): SEQ ID NO: 7287; WAN024DDV_at; Start 69; Stop 93
atcggagaacatcatcagactggac

SEQ ID NO: 154021 - DNA, 25 bp, Artificial
  probe
  misc_feature (1)..(25): SEQ ID NO: 7287; WAN024DDV_at; Start 376; Stop 400
gaaagcttgaatccagattatgagg

SEQ ID NO: 154022 - DNA, 25 bp, Artificial
  probe
  misc_feature (1)..(25): SEQ ID NO: 7287; WAN024DDV_at; Start 364; Stop 388
cagggatatctggaaagcttgaatc

SEQ ID NO: 154023 - DNA, 25 bp, Artificial
  probe
  misc_feature (1)..(25): SEQ ID NO: 7287; WAN024DDV_at; Start 391; Stop 415
gattatgaggatatacacctagacg

SEQ ID NO: 154024 - DNA, 25 bp, Artificial
  probe
  misc_feature (1)..(25): SEQ ID NO: 7287; WAN024DDV_at; Start 157; Stop 181
caggacgacgatttagatatggagg

SEQ ID NO: 154025 - DNA, 25 bp, Artificial
  probe
  misc_feature (1)..(25): SEQ ID NO: 7287; WAN024DDV_at; Start 5; Stop 29
tacggacatctgaggagcttctgga

SEQ ID NO: 154026 - DNA, 25 bp, Artificial
  probe
  misc_feature (1)..(25): SEQ ID NO: 7287; WAN024DDV_at; Start 417; Stop 441
aagcaacgacatccgaactattggg

SEQ ID NO: 154027 - DNA, 25 bp, Artificial
  probe
  misc_feature (1)..(25): SEQ ID NO: 7287; WAN024DDV_at; Start 161; Stop 185
acgacgatttagatatggaggtttc

SEQ ID NO: 154028 - DNA, 25 bp, Artificial
  probe
  misc_feature (1)..(25): SEQ ID NO: 7287; WAN024DDV_at; Start 291; Stop 315
tacccaacaggttgattataacact

SEQ ID NO: 154029 - DNA, 25 bp, Artificial
  probe
  misc_feature (1)..(25): SEQ ID NO: 7287; WAN024DDV_at; Start 443; Stop 467
aagttgtcagtgtgtatagggagaa

SEQ ID NO: 154030 - DNA, 25 bp, Artificial
  probe
  misc_feature (1)..(25): SEQ ID NO: 7287; WAN024DDV_at; Start 148; Stop 172
ggttcgatacaggacgacgatttag

SEQ ID NO: 154031 - DNA, 25 bp, Artificial
  probe
  misc_feature (1)..(25): SEQ ID NO: 7287; WAN024DDV_at; Start 396; Stop 420
tgaggatatacacctagacgaaagc

SEQ ID NO: 154032 - DNA, 25 bp, Artificial
  probe
  misc_feature (1)..(25): SEQ ID NO: 7287; WAN024DDV_at; Start 264; Stop 288
gaatggtgactatctttttataaag

SEQ ID NO: 154033 - DNA, 25 bp, Artificial
  probe
  misc_feature (1)..(25): SEQ ID NO: 7287; WAN024DDV_at; Start 412; Stop 436
gacgaaagcaacgacatccgaacta

SEQ ID NO: 154034 - DNA, 25 bp, Artificial
  probe
  misc_feature (1)..(25): SEQ ID NO: 7287; WAN024DDV_at; Start 64; Stop 88
gaagtatcggagaacatcatcagac

SEQ ID NO: 154035 - DNA, 25 bp, Artificial
  probe
  misc_feature (1)..(25): SEQ ID NO: 7287; WAN024DDV_at; Start 141; Stop 165
tggtagtggttcgatacaggacgac

SEQ ID NO: 154036 - DNA, 25 bp, Artificial
  probe
  misc_feature (1)..(25): SEQ ID NO: 7287; WAN024DDV_at; Start 11; Stop 35
catctgaggagcttctggagagtca

SEQ ID NO: 154037 - DNA, 25 bp, Artificial
  probe
  misc_feature (1)..(25): SEQ ID NO: 6978; WAN024DDW_at; Start 38; Stop 62
ccttggcggagtttcttgacatagt

SEQ ID NO: 154038 - DNA, 25 bp, Artificial
  probe
  misc_feature (1)..(25): SEQ ID NO: 6978; WAN024DDW_at; Start 68; Stop 92
ccgtctacttggaagatgccgatgg

SEQ ID NO: 154039 - DNA, 25 bp, Artificial
  probe
  misc_feature (1)..(25): SEQ ID NO: 6978; WAN024DDW_at; Start 63; Stop 87
tagtgccgtctacttggaagatgcc

SEQ ID NO: 154040 - DNA, 25 bp, Artificial
  probe
  misc_feature (1)..(25): SEQ ID NO: 6978; WAN024DDW_at; Start 80; Stop 104
aagatgccgatggtattatagtcaa

SEQ ID NO: 154041 - DNA, 25 bp, Artificial
  probe
  misc_feature (1)..(25): SEQ ID NO: 6978; WAN024DDW_at; Start 52; Stop 76
cttgacatagttagtgccgtctact

SEQ ID NO: 154042 - DNA, 25 bp, Artificial
  probe
  misc_feature (1)..(25): SEQ ID NO: 6978; WAN024DDW_at; Start 20; Stop 44
tgagtttttttgaggtagccttggc

SEQ ID NO: 154043 - DNA, 25 bp, Artificial
  probe
  misc_feature (1)..(25): SEQ ID NO: 6978; WAN024DDW_at; Start 88; Stop 112
gatggtattatagtcaatctgtggg

SEQ ID NO: 154044 - DNA, 25 bp, Artificial
  probe
  misc_feature (1)..(25): SEQ ID NO: 6978; WAN024DDW_at; Start 69; Stop 93
cgtctacttggaagatgccgatggt

SEQ ID NO: 154045 - DNA, 25 bp, Artificial
  probe
  misc_feature (1)..(25): SEQ ID NO: 6978; WAN024DDW_at; Start 44; Stop 68
cggagtttcttgacatagttagtgc

SEQ ID NO: 154046 - DNA, 25 bp, Artificial
  probe
  misc_feature (1)..(25): SEQ ID NO: 6978; WAN024DDW_at; Start 34; Stop 58
gtagccttggcggagtttcttgaca

SEQ ID NO: 154047 - DNA, 25 bp, Artificial
  probe
  misc_feature (1)..(25): SEQ ID NO: 6978; WAN024DDW_at; Start 82; Stop 106
gatgccgatggtattatagtcaatc

SEQ ID NO: 154048 - DNA, 25 bp, Artificial
  probe
  misc_feature (1)..(25): SEQ ID NO: 6978; WAN024DDW_at; Start 48; Stop 72
gtttcttgacatagttagtgccgtc

SEQ ID NO: 154049 - DNA, 25 bp, Artificial
  probe
  misc_feature (1)..(25): SEQ ID NO: 6978; WAN024DDW_at; Start 37; Stop 61
gccttggcggagtttcttgacatag

SEQ ID NO: 154050 - DNA, 25 bp, Artificial
  probe
  misc_feature (1)..(25): SEQ ID NO: 6978; WAN024DDW_at; Start 1; Stop 25
atgtcggagtattcgggattgagtt

SEQ ID NO: 154051 - DNA, 25 bp, Artificial
  probe
  misc_feature (1)..(25): SEQ ID NO: 6978; WAN024DDW_at; Start 61; Stop 85
gttagtgccgtctacttggaagatg

SEQ ID NO: 154052 - DNA, 25 bp, Artificial
  probe
  misc_feature (1)..(25): SEQ ID NO: 6978; WAN024DDW_at; Start 41; Stop 65
tggcggagtttcttgacatagttag

SEQ ID NO: 154053 - DNA, 25 bp, Artificial
  probe
  misc_feature (1)..(25): SEQ ID NO: 6978; WAN024DDW_at; Start 46; Stop 70
gagtttcttgacatagttagtgccg

SEQ ID NO: 154054 - DNA, 25 bp, Artificial
  probe
  misc_feature (1)..(25): SEQ ID NO: 6978; WAN024DDW_at; Start 35; Stop 59
tagccttggcggagtttcttgacat

SEQ ID NO: 154055 - DNA, 25 bp, Artificial
  probe
  misc_feature (1)..(25): SEQ ID NO: 6978; WAN024DDW_at; Start 102; Stop 126
caatctgtggggtattcttgataaa

SEQ ID NO: 154056 - DNA, 25 bp, Artificial
  probe
  misc_feature (1)..(25): SEQ ID NO: 6978; WAN024DDW_at; Start 73; Stop 97
tacttggaagatgccgatggtatta

SEQ ID NO: 154057 - DNA, 25 bp, Artificial
  probe
  misc_feature (1)..(25): SEQ ID NO: 6978; WAN024DDW_at; Start 71; Stop 95
tctacttggaagatgccgatggtat

SEQ ID NO: 154058 - DNA, 25 bp, Artificial
  probe
  misc_feature (1)..(25): SEQ ID NO: 6978; WAN024DDW_at; Start 65; Stop 89
gtgccgtctacttggaagatgccga

SEQ ID NO: 154059 - DNA, 25 bp, Artificial
  probe
  misc_feature (1)..(25): SEQ ID NO: 6978; WAN024DDW_at; Start 66; Stop 90
tgccgtctacttggaagatgccgat

SEQ ID NO: 154060 - DNA, 25 bp, Artificial
  probe
  misc_feature (1)..(25): SEQ ID NO: 6978; WAN024DDW_at; Start 55; Stop 79
gacatagttagtgccgtctacttgg

SEQ ID NO: 154061 - DNA, 25 bp, Artificial
  probe
  misc_feature (1)..(25): SEQ ID NO: 6978; WAN024DDW_at; Start 84; Stop 108
tgccgatggtattatagtcaatctg

SEQ ID NO: 154062 - DNA, 25 bp, Artificial
  probe
  misc_feature (1)..(25): SEQ ID NO: 6978; WAN024DDW_at; Start 64; Stop 88
agtgccgtctacttggaagatgccg

SEQ ID NO: 154063 - DNA, 25 bp, Artificial
  probe
  misc_feature (1)..(25): SEQ ID NO: 6978; WAN024DDW_at; Start 78; Stop 102
ggaagatgccgatggtattatagtc

SEQ ID NO: 154064 - DNA, 25 bp, Artificial
  probe
  misc_feature (1)..(25): SEQ ID NO: 6978; WAN024DDW_at; Start 67; Stop 91
gccgtctacttggaagatgccgatg

SEQ ID NO: 154065 - DNA, 25 bp, Artificial
  probe
  misc_feature (1)..(25): SEQ ID NO: 6978; WAN024DDW_at; Start 28; Stop 52
tttgaggtagccttggcggagtttc

SEQ ID NO: 154066 - DNA, 25 bp, Artificial
  probe
  misc_feature (1)..(25): SEQ ID NO: 6978; WAN024DDW_at; Start 36; Stop 60
agccttggcggagtttcttgacata

SEQ ID NO: 154067 - DNA, 25 bp, Artificial
  probe
  misc_feature (1)..(25): SEQ ID NO: 6978; WAN024DDW_at; Start 30; Stop 54
tgaggtagccttggcggagtttctt

SEQ ID NO: 154068 - DNA, 25 bp, Artificial
  probe
  misc_feature (1)..(25): SEQ ID NO: 6978; WAN024DDW_at; Start 58; Stop 82
atagttagtgccgtctacttggaag

SEQ ID NO: 154069 - DNA, 25 bp, Artificial
  probe
  misc_feature (1)..(25): SEQ ID NO: 6978; WAN024DDW_at; Start 59; Stop 83
tagttagtgccgtctacttggaaga

SEQ ID NO: 154070 - DNA, 25 bp, Artificial
  probe
  misc_feature (1)..(25): SEQ ID NO: 6978; WAN024DDW_at; Start 51; Stop 75
tcttgacatagttagtgccgtctac

SEQ ID NO: 154071 - DNA, 25 bp, Artificial
  probe
  misc_feature (1)..(25): SEQ ID NO: 5580; WAN024DDX_at; Start 226; Stop 250
ctgtatgatcagaaaaacgaagtat

SEQ ID NO: 154072 - DNA, 25 bp, Artificial
  probe
  misc_feature (1)..(25): SEQ ID NO: 5580; WAN024DDX_at; Start 142; Stop 166
gattctcctagcgatatccaatcta

SEQ ID NO: 154073 - DNA, 25 bp, Artificial
  probe
  misc_feature (1)..(25): SEQ ID NO: 5580; WAN024DDX_at; Start 136; Stop 160
caaaaggattctcctagcgatatcc

SEQ ID NO: 154074 - DNA, 25 bp, Artificial
  probe
  misc_feature (1)..(25): SEQ ID NO: 5580; WAN024DDX_at; Start 129; Stop 153
tccagttcaaaaggattctcctagc

SEQ ID NO: 154075 - DNA, 25 bp, Artificial
  probe
  misc_feature (1)..(25): SEQ ID NO: 5580; WAN024DDX_at; Start 152; Stop 176
gcgatatccaatctatctacgacca

SEQ ID NO: 154076 - DNA, 25 bp, Artificial
  probe
  misc_feature (1)..(25): SEQ ID NO: 5580; WAN024DDX_at; Start 215; Stop 239
ccgagaggcaactgtatgatcagaa

SEQ ID NO: 154077 - DNA, 25 bp, Artificial
  probe
  misc_feature (1)..(25): SEQ ID NO: 5580; WAN024DDX_at; Start 232; Stop 256
gatcagaaaaacgaagtatcgtaaa

SEQ ID NO: 154078 - DNA, 25 bp, Artificial
  probe
  misc_feature (1)..(25): SEQ ID NO: 5580; WAN024DDX_at; Start 209; Stop 233
cctatgccgagaggcaactgtatga

SEQ ID NO: 154079 - DNA, 25 bp, Artificial
  probe
  misc_feature (1)..(25): SEQ ID NO: 5580; WAN024DDX_at; Start 216; Stop 240
cgagaggcaactgtatgatcagaaa

SEQ ID NO: 154080 - DNA, 25 bp, Artificial
  probe
  misc_feature (1)..(25): SEQ ID NO: 5580; WAN024DDX_at; Start 229; Stop 253
tatgatcagaaaaacgaagtatcgt

SEQ ID NO: 154081 - DNA, 25 bp, Artificial
  probe
  misc_feature (1)..(25): SEQ ID NO: 5580; WAN024DDX_at; Start 156; Stop 180
tatccaatctatctacgaccaacgg

SEQ ID NO: 154082 - DNA, 25 bp, Artificial
  probe
  misc_feature (1)..(25): SEQ ID NO: 5580; WAN024DDX_at; Start 138; Stop 162
aaaggattctcctagcgatatccaa

SEQ ID NO: 154083 - DNA, 25 bp, Artificial
  probe
  misc_feature (1)..(25): SEQ ID NO: 5580; WAN024DDX_at; Start 128; Stop 152
ctccagttcaaaaggattctcctag

SEQ ID NO: 154084 - DNA, 25 bp, Artificial
  probe
  misc_feature (1)..(25): SEQ ID NO: 5580; WAN024DDX_at; Start 130; Stop 154
ccagttcaaaaggattctcctagcg

SEQ ID NO: 154085 - DNA, 25 bp, Artificial
  probe
  misc_feature (1)..(25): SEQ ID NO: 5580; WAN024DDX_at; Start 150; Stop 174
tagcgatatccaatctatctacgac

SEQ ID NO: 154086 - DNA, 25 bp, Artificial
  probe
  misc_feature (1)..(25): SEQ ID NO: 5580; WAN024DDX_at; Start 223; Stop 247
caactgtatgatcagaaaaacgaag

SEQ ID NO: 154087 - DNA, 25 bp, Artificial
  probe
  misc_feature (1)..(25): SEQ ID NO: 5580; WAN024DDX_at; Start 246; Stop 270
agtatcgtaaaaatcatcagactgg

SEQ ID NO: 154088 - DNA, 25 bp, Artificial
  probe
  misc_feature (1)..(25): SEQ ID NO: 5580; WAN024DDX_at; Start 208; Stop 232
acctatgccgagaggcaactgtatg

SEQ ID NO: 154089 - DNA, 25 bp, Artificial
  probe
  misc_feature (1)..(25): SEQ ID NO: 5580; WAN024DDX_at; Start 135; Stop 159
tcaaaaggattctcctagcgatatc

SEQ ID NO: 154090 - DNA, 25 bp, Artificial
  probe
  misc_feature (1)..(25): SEQ ID NO: 5580; WAN024DDX_at; Start 213; Stop 237
tgccgagaggcaactgtatgatcag

SEQ ID NO: 154091 - DNA, 25 bp, Artificial
  probe
  misc_feature (1)..(25): SEQ ID NO: 5580; WAN024DDX_at; Start 219; Stop 243
gaggcaactgtatgatcagaaaaac

SEQ ID NO: 154092 - DNA, 25 bp, Artificial
  probe
  misc_feature (1)..(25): SEQ ID NO: 5580; WAN024DDX_at; Start 131; Stop 155
cagttcaaaaggattctcctagcga

SEQ ID NO: 154093 - DNA, 25 bp, Artificial
  probe
  misc_feature (1)..(25): SEQ ID NO: 5580; WAN024DDX_at; Start 148; Stop 172
cctagcgatatccaatctatctacg

SEQ ID NO: 154094 - DNA, 25 bp, Artificial
  probe
  misc_feature (1)..(25): SEQ ID NO: 5580; WAN024DDX_at; Start 211; Stop 235
tatgccgagaggcaactgtatgatc

SEQ ID NO: 154095 - DNA, 25 bp, Artificial
  probe
  misc_feature (1)..(25): SEQ ID NO: 5580; WAN024DDX_at; Start 140; Stop 164
aggattctcctagcgatatccaatc

SEQ ID NO: 154096 - DNA, 25 bp, Artificial
  probe
  misc_feature (1)..(25): SEQ ID NO: 5580; WAN024DDX_at; Start 214; Stop 238
gccgagaggcaactgtatgatcaga

SEQ ID NO: 154097 - DNA, 25 bp, Artificial
  probe
  misc_feature (1)..(25): SEQ ID NO: 5580; WAN024DDX_at; Start 145; Stop 169
tctcctagcgatatccaatctatct

SEQ ID NO: 154098 - DNA, 25 bp, Artificial
  probe
  misc_feature (1)..(25): SEQ ID NO: 5580; WAN024DDX_at; Start 221; Stop 245
ggcaactgtatgatcagaaaaacga

SEQ ID NO: 154099 - DNA, 25 bp, Artificial
  probe
  misc_feature (1)..(25): SEQ ID NO: 5580; WAN024DDX_at; Start 157; Stop 181
atccaatctatctacgaccaacggg

SEQ ID NO: 154100 - DNA, 25 bp, Artificial
  probe
  misc_feature (1)..(25): SEQ ID NO: 5580; WAN024DDX_at; Start 243; Stop 267
cgaagtatcgtaaaaatcatcagac

SEQ ID NO: 154101 - DNA, 25 bp, Artificial
  probe
  misc_feature (1)..(25): SEQ ID NO: 5580; WAN024DDX_at; Start 133; Stop 157
gttcaaaaggattctcctagcgata

SEQ ID NO: 154102 - DNA, 25 bp, Artificial
  probe
  misc_feature (1)..(25): SEQ ID NO: 5580; WAN024DDX_at; Start 244; Stop 268
gaagtatcgtaaaaatcatcagact

SEQ ID NO: 154103 - DNA, 25 bp, Artificial
  probe
  misc_feature (1)..(25): SEQ ID NO: 5580; WAN024DDX_at; Start 61; Stop 85
tctactaagaaaaatactatatttg

SEQ ID NO: 154104 - DNA, 25 bp, Artificial
  probe
  misc_feature (1)..(25): SEQ ID NO: 5580; WAN024DDX_at; Start 217; Stop 241
gagaggcaactgtatgatcagaaaa

SEQ ID NO: 154105 - DNA, 25 bp, Artificial
  probe
  misc_feature (1)..(25): SEQ ID NO: 2139; WAN024DDY_at; Start 260; Stop 284
taaattctcaaaatcaactggcgga

SEQ ID NO: 154106 - DNA, 25 bp, Artificial
  probe
  misc_feature (1)..(25): SEQ ID NO: 2139; WAN024DDY_at; Start 130; Stop 154
gaaactgcgggagttcactataaat

SEQ ID NO: 154107 - DNA, 25 bp, Artificial
  probe
  misc_feature (1)..(25): SEQ ID NO: 2139; WAN024DDY_at; Start 1299; Stop 1323
tgagtcagcagtccaaccagagttg

SEQ ID NO: 154108 - DNA, 25 bp, Artificial
  probe
  misc_feature (1)..(25): SEQ ID NO: 2139; WAN024DDY_at; Start 1245; Stop 1269
tgttgaacccgcaattcagcctgaa

SEQ ID NO: 154109 - DNA, 25 bp, Artificial
  probe
  misc_feature (1)..(25): SEQ ID NO: 2139; WAN024DDY_at; Start 692; Stop 716
tacaagctattcaggaacaaacacc

SEQ ID NO: 154110 - DNA, 25 bp, Artificial
  probe
  misc_feature (1)..(25): SEQ ID NO: 2139; WAN024DDY_at; Start 566; Stop 590
tcaaagagggaaaaacgacttctga

SEQ ID NO: 154111 - DNA, 25 bp, Artificial
  probe
  misc_feature (1)..(25): SEQ ID NO: 2139; WAN024DDY_at; Start 728; Stop 752
ctaagccgacagaagttcaagtagt

SEQ ID NO: 154112 - DNA, 25 bp, Artificial
  probe
  misc_feature (1)..(25): SEQ ID NO: 2139; WAN024DDY_at; Start 1331; Stop 1355
ctgtagtaagtgataaaggcgtacc

SEQ ID NO: 154113 - DNA, 25 bp, Artificial
  probe
  misc_feature (1)..(25): SEQ ID NO: 2139; WAN024DDY_at; Start 808; Stop 832
tcagattctcaagaacaattagccg

SEQ ID NO: 154114 - DNA, 25 bp, Artificial
  probe
  misc_feature (1)..(25): SEQ ID NO: 2139; WAN024DDY_at; Start 173; Stop 197
tatcatcagaagaaaagaagcagct

SEQ ID NO: 154115 - DNA, 25 bp, Artificial
  probe
  misc_feature (1)..(25): SEQ ID NO: 2139; WAN024DDY_at; Start 1348; Stop 1372
ggcgtaccagaagttcaaccagcgt

SEQ ID NO: 154116 - DNA, 25 bp, Artificial
  probe
  misc_feature (1)..(25): SEQ ID NO: 2139; WAN024DDY_at; Start 189; Stop 213
gaagcagcttgtctatgatattccg

SEQ ID NO: 154117 - DNA, 25 bp, Artificial
  probe
  misc_feature (1)..(25): SEQ ID NO: 2139; WAN024DDY_at; Start 1315; Stop 1339
ccagagttgccagaagctgtagtaa

SEQ ID NO: 154118 - DNA, 25 bp, Artificial
  probe
  misc_feature (1)..(25): SEQ ID NO: 2139; WAN024DDY_at; Start 890; Stop 914
gggtaaatacattaaatccacagga

SEQ ID NO: 154119 - DNA, 25 bp, Artificial
  probe
  misc_feature (1)..(25): SEQ ID NO: 2139; WAN024DDY_at; Start 1286; Stop 1310
taaccgacaaaggtgagtcagcagt

SEQ ID NO: 154120 - DNA, 25 bp, Artificial
  probe
  misc_feature (1)..(25): SEQ ID NO: 2139; WAN024DDY_at; Start 98; Stop 122
ctgtattagctagttcatctgtgga

SEQ ID NO: 154121 - DNA, 25 bp, Artificial
  probe
  misc_feature (1)..(25): SEQ ID NO: 2139; WAN024DDY_at; Start 491; Stop 515
cggactatgaattgacctctggaga

SEQ ID NO: 154122 - DNA, 25 bp, Artificial
  probe
  misc_feature (1)..(25): SEQ ID NO: 2139; WAN024DDY_at; Start 476; Stop 500
tgctaaattacaatacggactatga

SEQ ID NO: 154123 - DNA, 25 bp, Artificial
  probe
  misc_feature (1)..(25): SEQ ID NO: 2139; WAN024DDY_at; Start 1362; Stop 1386
tcaaccagcgttaccagaggcagtc

SEQ ID NO: 154124 - DNA, 25 bp, Artificial
  probe
  misc_feature (1)..(25): SEQ ID NO: 2139; WAN024DDY_at; Start 674; Stop 698
tagaccatccatcaacagtacaagc

SEQ ID NO: 154125 - DNA, 25 bp, Artificial
  probe
  misc_feature (1)..(25): SEQ ID NO: 2139; WAN024DDY_at; Start 300; Stop 324
aagcaagaatgagaggcaagcccta

SEQ ID NO: 154126 - DNA, 25 bp, Artificial
  probe
  misc_feature (1)..(25): SEQ ID NO: 2139; WAN024DDY_at; Start 1231; Stop 1255
cagtctggagctattgttgaacccg

SEQ ID NO: 154127 - DNA, 25 bp, Artificial
  probe
  misc_feature (1)..(25): SEQ ID NO: 2139; WAN024DDY_at; Start 1271; Stop 1295
taccagcagctgtattaaccgacaa

SEQ ID NO: 154128 - DNA, 25 bp, Artificial
  probe
  misc_feature (1)..(25): SEQ ID NO: 2139; WAN024DDY_at; Start 528; Stop 552
tcctaaagagatttcaggttacact

SEQ ID NO: 154129 - DNA, 25 bp, Artificial
  probe
  misc_feature (1)..(25): SEQ ID NO: 2139; WAN024DDY_at; Start 1257; Stop 1281
aattcagcctgaactaccagcagct

SEQ ID NO: 154130 - DNA, 25 bp, Artificial
  probe
  misc_feature (1)..(25): SEQ ID NO: 2139; WAN024DDY_at; Start 156; Stop 180
tgtggcagattcagagctatcatca

SEQ ID NO: 154131 - DNA, 25 bp, Artificial
  probe
  misc_feature (1)..(25): SEQ ID NO: 2139; WAN024DDY_at; Start 115; Stop 139
tctgtggatgctcaagaaactgcgg

SEQ ID NO: 154132 - DNA, 25 bp, Artificial
  probe
  misc_feature (1)..(25): SEQ ID NO: 2139; WAN024DDY_at; Start 202; Stop 226
tatgatattccgacatacgtggaga

SEQ ID NO: 154133 - DNA, 25 bp, Artificial
  probe
  misc_feature (1)..(25): SEQ ID NO: 2139; WAN024DDY_at; Start 823; Stop 847
caattagccgaacataagaatctag

SEQ ID NO: 154134 - DNA, 25 bp, Artificial
  probe
  misc_feature (1)..(25): SEQ ID NO: 2139; WAN024DDY_at; Start 53; Stop 77
cagtaggacttgtatctgcaacgat

SEQ ID NO: 154135 - DNA, 25 bp, Artificial
  probe
  misc_feature (1)..(25): SEQ ID NO: 2139; WAN024DDY_at; Start 713; Stop 737
cacctgtttcttcaactaagccgac

SEQ ID NO: 154136 - DNA, 25 bp, Artificial
  probe
  misc_feature (1)..(25): SEQ ID NO: 2139; WAN024DDY_at; Start 215; Stop 239
catacgtggagaatgatgatgaaac

SEQ ID NO: 154137 - DNA, 25 bp, Artificial
  probe
  misc_feature (1)..(25): SEQ ID NO: 2139; WAN024DDY_at; Start 431; Stop 455
gaaatggtgtcttagtttcagtcca

SEQ ID NO: 154138 - DNA, 25 bp, Artificial
  probe
  misc_feature (1)..(25): SEQ ID NO: 2139; WAN024DDY_at; Start 1376; Stop 1400
cagaggcagtcatgactgacaaggg

SEQ ID NO: 154139 - DNA, 25 bp, Artificial
  probe
  misc_feature (1)..(25): SEQ ID NO: 6311; WAN024DDZ_s_at; Start 439; Stop 463
tgtattcttaatacgattaaaaggc

SEQ ID NO: 154140 - DNA, 25 bp, Artificial
  probe
  misc_feature (1)..(25): SEQ ID NO: 6311; WAN024DDZ_s_at; Start 403; Stop 427
gaattgctaggtatcgaagaacaag

SEQ ID NO: 154141 - DNA, 25 bp, Artificial
  probe
  misc_feature (1)..(25): SEQ ID NO: 6311; WAN024DDZ_s_at; Start 254; Stop 278
tcttaaaaaagaatgagcgatacaa

SEQ ID NO: 154142 - DNA, 25 bp, Artificial
  probe
  misc_feature (1)..(25): SEQ ID NO: 6311; WAN024DDZ_s_at; Start 414; Stop 438
tatcgaagaacaagagaacattatc

SEQ ID NO: 154143 - DNA, 25 bp, Artificial
  probe
  misc_feature (1)..(25): SEQ ID NO: 6311; WAN024DDZ_s_at; Start 316; Stop 340
gaaagtaaatcgcagtatttacgag

SEQ ID NO: 154144 - DNA, 25 bp, Artificial
  probe
  misc_feature (1)..(25): SEQ ID NO: 6311; WAN024DDZ_s_at; Start 364; Stop 388
cctcatttaaacaagaatatattac

SEQ ID NO: 154145 - DNA, 25 bp, Artificial
  probe
  misc_feature (1)..(25): SEQ ID NO: 6311; WAN024DDZ_s_at; Start 494; Stop 518
aactaaacttgctcgtcaaatcccg

SEQ ID NO: 154146 - DNA, 25 bp, Artificial
  probe
  misc_feature (1)..(25): SEQ ID NO: 6311; WAN024DDZ_s_at; Start 264; Stop 288
gaatgagcgatacaaagaaaaaatt

SEQ ID NO: 154147 - DNA, 25 bp, Artificial
  probe
  misc_feature (1)..(25): SEQ ID NO: 6311; WAN024DDZ_s_at; Start 213; Stop 237
tggttatggattatcgggagctgtt

SEQ ID NO: 154148 - DNA, 25 bp, Artificial
  probe
  misc_feature (1)..(25): SEQ ID NO: 6311; WAN024DDZ_s_at; Start 49; Stop 73
aaagccactgtacttgctgaacaaa

SEQ ID NO: 154149 - DNA, 25 bp, Artificial
  probe
  misc_feature (1)..(25): SEQ ID NO: 6311; WAN024DDZ_s_at; Start 417; Stop 441
cgaagaacaagagaacattatctgt

SEQ ID NO: 154150 - DNA, 25 bp, Artificial
  probe
  misc_feature (1)..(25): SEQ ID NO: 6311; WAN024DDZ_s_at; Start 249; Stop 273
tacggtcttaaaaaagaatgagcga

SEQ ID NO: 154151 - DNA, 25 bp, Artificial
  probe
  misc_feature (1)..(25): SEQ ID NO: 6311; WAN024DDZ_s_at; Start 52; Stop 76
gccactgtacttgctgaacaaacaa

SEQ ID NO: 154152 - DNA, 25 bp, Artificial
  probe
  misc_feature (1)..(25): SEQ ID NO: 6311; WAN024DDZ_s_at; Start 74; Stop 98
caactctaagccaacgttatattca

SEQ ID NO: 154153 - DNA, 25 bp, Artificial
  probe
  misc_feature (1)..(25): SEQ ID NO: 6311; WAN024DDZ_s_at; Start 209; Stop 233
cagttggttatggattatcgggagc

SEQ ID NO: 154154 - DNA, 25 bp, Artificial
  probe
  misc_feature (1)..(25): SEQ ID NO: 6311; WAN024DDZ_s_at; Start 66; Stop 90
tgaacaaacaactctaagccaacgt

SEQ ID NO: 154155 - DNA, 25 bp, Artificial
  probe
  misc_feature (1)..(25): SEQ ID NO: 6311; WAN024DDZ_s_at; Start 229; Stop 253
ggagctgttggtagtacaattacgg

SEQ ID NO: 154156 - DNA, 25 bp, Artificial
  probe
  misc_feature (1)..(25): SEQ ID NO: 6311; WAN024DDZ_s_at; Start 83; Stop 107
gccaacgttatattcaaatagatga

SEQ ID NO: 154157 - DNA, 25 bp, Artificial
  probe
  misc_feature (1)..(25): SEQ ID NO: 6311; WAN024DDZ_s_at; Start 46; Stop 70
aagaaagccactgtacttgctgaac

SEQ ID NO: 154158 - DNA, 25 bp, Artificial
  probe
  misc_feature (1)..(25): SEQ ID NO: 6311; WAN024DDZ_s_at; Start 429; Stop 453
gaacattatctgtattcttaatacg

SEQ ID NO: 154159 - DNA, 25 bp, Artificial
  probe
  misc_feature (1)..(25): SEQ ID NO: 6311; WAN024DDZ_s_at; Start 59; Stop 83
tacttgctgaacaaacaactctaag

SEQ ID NO: 154160 - DNA, 25 bp, Artificial
  probe
  misc_feature (1)..(25): SEQ ID NO: 6311; WAN024DDZ_s_at; Start 385; Stop 409
ttacttgatttacaattagaattgc

SEQ ID NO: 154161 - DNA, 25 bp, Artificial
  probe
  misc_feature (1)..(25): SEQ ID NO: 6311; WAN024DDZ_s_at; Start 224; Stop 248
tatcgggagctgttggtagtacaat

SEQ ID NO: 154162 - DNA, 25 bp, Artificial
  probe
  misc_feature (1)..(25): SEQ ID NO: 6311; WAN024DDZ_s_at; Start 203; Stop 227
caggaacagttggttatggattatc

SEQ ID NO: 154163 - DNA, 25 bp, Artificial
  probe
  misc_feature (1)..(25): SEQ ID NO: 6311; WAN024DDZ_s_at; Start 308; Stop 332
tctttttggaaagtaaatcgcagta

SEQ ID NO: 154164 - DNA, 25 bp, Artificial
  probe
  misc_feature (1)..(25): SEQ ID NO: 6311; WAN024DDZ_s_at; Start 196; Stop 220
gctaatgcaggaacagttggttatg

SEQ ID NO: 154165 - DNA, 25 bp, Artificial
  probe
  misc_feature (1)..(25): SEQ ID NO: 6311; WAN024DDZ_s_at; Start 285; Stop 309
aattatatcagattacttgggagtc

SEQ ID NO: 154166 - DNA, 25 bp, Artificial
  probe
  misc_feature (1)..(25): SEQ ID NO: 6311; WAN024DDZ_s_at; Start 488; Stop 512
tagatgaactaaacttgctcgtcaa

SEQ ID NO: 154167 - DNA, 25 bp, Artificial
  probe
  misc_feature (1)..(25): SEQ ID NO: 6311; WAN024DDZ_s_at; Start 133; Stop 157
ttcactgaaagtttaaatatgactg

SEQ ID NO: 154168 - DNA, 25 bp, Artificial
  probe
  misc_feature (1)..(25): SEQ ID NO: 6311; WAN024DDZ_s_at; Start 484; Stop 508
cagttagatgaactaaacttgctcg

SEQ ID NO: 154169 - DNA, 25 bp, Artificial
  probe
  misc_feature (1)..(25): SEQ ID NO: 6311; WAN024DDZ_s_at; Start 234; Stop 258
tgttggtagtacaattacggtctta

SEQ ID NO: 154170 - DNA, 25 bp, Artificial
  probe
  misc_feature (1)..(25): SEQ ID NO: 6311; WAN024DDZ_s_at; Start 293; Stop 317
cagattacttgggagtctttttgga

SEQ ID NO: 154171 - DNA, 25 bp, Artificial
  probe
  misc_feature (1)..(25): SEQ ID NO: 6311; WAN024DDZ_s_at; Start 397; Stop 421
caattagaattgctaggtatcgaag

SEQ ID NO: 154172 - DNA, 25 bp, Artificial
  probe
  misc_feature (1)..(25): SEQ ID NO: 6311; WAN024DDZ_s_at; Start 139; Stop 163
gaaagtttaaatatgactgaagcac

SEQ ID NO: 154173 - DNA, 25 bp, Artificial
  probe
  misc_feature (1)..(25): SEQ ID NO: 6312; WAN024DE2_at; Start 849; Stop 873
caattttgagaagttaaataaggct

SEQ ID NO: 154174 - DNA, 25 bp, Artificial
  probe
  misc_feature (1)..(25): SEQ ID NO: 6312; WAN024DE2_at; Start 867; Stop 891
taaggctgtaacaatacctagttta

SEQ ID NO: 154175 - DNA, 25 bp, Artificial
  probe
  misc_feature (1)..(25): SEQ ID NO: 6312; WAN024DE2_at; Start 536; Stop 560
gggatgttattctaaatgaaaaaga

SEQ ID NO: 154176 - DNA, 25 bp, Artificial
  probe
  misc_feature (1)..(25): SEQ ID NO: 6312; WAN024DE2_at; Start 676; Stop 700
tatgctaaagattggatagtgaaga

SEQ ID NO: 154177 - DNA, 25 bp, Artificial
  probe
  misc_feature (1)..(25): SEQ ID NO: 6312; WAN024DE2_at; Start 871; Stop 895
gctgtaacaatacctagtttaacca

SEQ ID NO: 154178 - DNA, 25 bp, Artificial
  probe
  misc_feature (1)..(25): SEQ ID NO: 6312; WAN024DE2_at; Start 698; Stop 722
agaaaaattcagttattattggacg

SEQ ID NO: 154179 - DNA, 25 bp, Artificial
  probe
  misc_feature (1)..(25): SEQ ID NO: 6312; WAN024DE2_at; Start 786; Stop 810
tggattagagcctgttttagaaaaa

SEQ ID NO: 154180 - DNA, 25 bp, Artificial
  probe
  misc_feature (1)..(25): SEQ ID NO: 6312; WAN024DE2_at; Start 782; Stop 806
catttggattagagcctgttttaga

SEQ ID NO: 154181 - DNA, 25 bp, Artificial
  probe
  misc_feature (1)..(25): SEQ ID NO: 6312; WAN024DE2_at; Start 555; Stop 579
aaaagaatggaaagttagcaaatgg

SEQ ID NO: 154182 - DNA, 25 bp, Artificial
  probe
  misc_feature (1)..(25): SEQ ID NO: 6312; WAN024DE2_at; Start 608; Stop 632
aaaatcaaaaacaggttgaagatgc

SEQ ID NO: 154183 - DNA, 25 bp, Artificial
  probe
  misc_feature (1)..(25): SEQ ID NO: 6312; WAN024DE2_at; Start 838; Stop 862
tgtcaattatacaattttgagaagt

SEQ ID NO: 154184 - DNA, 25 bp, Artificial
  probe
  misc_feature (1)..(25): SEQ ID NO: 6312; WAN024DE2_at; Start 625; Stop 649
gaagatgctgatgggaaatttccta

SEQ ID NO: 154185 - DNA, 25 bp, Artificial
  probe
  misc_feature (1)..(25): SEQ ID NO: 6312; WAN024DE2_at; Start 663; Stop 687
gggaattatgggatatgctaaagat

SEQ ID NO: 154186 - DNA, 25 bp, Artificial
  probe
  misc_feature (1)..(25): SEQ ID NO: 6312; WAN024DE2_at; Start 758; Stop 782
aaaatttttggaatgtagatacagc

SEQ ID NO: 154187 - DNA, 25 bp, Artificial
  probe
  misc_feature (1)..(25): SEQ ID NO: 6312; WAN024DE2_at; Start 706; Stop 730
tcagttattattggacgtaaaggaa

SEQ ID NO: 154188 - DNA, 25 bp, Artificial
  probe
  misc_feature (1)..(25): SEQ ID NO: 6312; WAN024DE2_at; Start 773; Stop 797
tagatacagcatttggattagagcc

SEQ ID NO: 154189 - DNA, 25 bp, Artificial
  probe
  misc_feature (1)..(25): SEQ ID NO: 6312; WAN024DE2_at; Start 669; Stop 693
tatgggatatgctaaagattggata

SEQ ID NO: 154190 - DNA, 25 bp, Artificial
  probe
  misc_feature (1)..(25): SEQ ID NO: 6312; WAN024DE2_at; Start 878; Stop 902
caatacctagtttaaccaaatcaga

SEQ ID NO: 154191 - DNA, 25 bp, Artificial
  probe
  misc_feature (1)..(25): SEQ ID NO: 6312; WAN024DE2_at; Start 618; Stop 642
acaggttgaagatgctgatgggaaa

SEQ ID NO: 154192 - DNA, 25 bp, Artificial
  probe
  misc_feature (1)..(25): SEQ ID NO: 6312; WAN024DE2_at; Start 685; Stop 709
gattggatagtgaagaaaaattcag

SEQ ID NO: 154193 - DNA, 25 bp, Artificial
  probe
  misc_feature (1)..(25): SEQ ID NO: 6312; WAN024DE2_at; Start 590; Stop 614
taacaataagaaatggtaaaaatca

SEQ ID NO: 154194 - DNA, 25 bp, Artificial
  probe
  misc_feature (1)..(25): SEQ ID NO: 6312; WAN024DE2_at; Start 582; Stop 606
cgagattctaacaataagaaatggt

SEQ ID NO: 154195 - DNA, 25 bp, Artificial
  probe
  misc_feature (1)..(25): SEQ ID NO: 6312; WAN024DE2_at; Start 565; Stop 589
aaagttagcaaatggaacgagattc

SEQ ID NO: 154196 - DNA, 25 bp, Artificial
  probe
  misc_feature (1)..(25): SEQ ID NO: 6312; WAN024DE2_at; Start 559; Stop 583
gaatggaaagttagcaaatggaacg

SEQ ID NO: 154197 - DNA, 25 bp, Artificial
  probe
  misc_feature (1)..(25): SEQ ID NO: 6312; WAN024DE2_at; Start 711; Stop 735
tattattggacgtaaaggaaatata

SEQ ID NO: 154198 - DNA, 25 bp, Artificial
  probe
  misc_feature (1)..(25): SEQ ID NO: 6312; WAN024DE2_at; Start 570; Stop 594
tagcaaatggaacgagattctaaca

SEQ ID NO: 154199 - DNA, 25 bp, Artificial
  probe
  misc_feature (1)..(25): SEQ ID NO: 6312; WAN024DE2_at; Start 883; Stop 907
cctagtttaaccaaatcagatttat

SEQ ID NO: 154200 - DNA, 25 bp, Artificial
  probe
  misc_feature (1)..(25): SEQ ID NO: 6312; WAN024DE2_at; Start 775; Stop 799
gatacagcatttggattagagcctg

SEQ ID NO: 154201 - DNA, 25 bp, Artificial
  probe
  misc_feature (1)..(25): SEQ ID NO: 6312; WAN024DE2_at; Start 577; Stop 601
tggaacgagattctaacaataagaa

SEQ ID NO: 154202 - DNA, 25 bp, Artificial
  probe
  misc_feature (1)..(25): SEQ ID NO: 6312; WAN024DE2_at; Start 634; Stop 658
gatgggaaatttcctatttatggaa

SEQ ID NO: 154203 - DNA, 25 bp, Artificial
  probe
  misc_feature (1)..(25): SEQ ID NO: 6312; WAN024DE2_at; Start 613; Stop 637
caaaaacaggttgaagatgctgatg

SEQ ID NO: 154204 - DNA, 25 bp, Artificial
  probe
  misc_feature (1)..(25): SEQ ID NO: 6312; WAN024DE2_at; Start 764; Stop 788
tttggaatgtagatacagcatttgg

SEQ ID NO: 154205 - DNA, 25 bp, Artificial
  probe
  misc_feature (1)..(25): SEQ ID NO: 6312; WAN024DE2_at; Start 899; Stop 923
cagatttattaaatatttccatccc

SEQ ID NO: 154206 - DNA, 25 bp, Artificial
  probe
  misc_feature (1)..(25): SEQ ID NO: 6312; WAN024DE2_at; Start 863; Stop 887
taaataaggctgtaacaatacctag

SEQ ID NO: 154207 - DNA, 25 bp, Artificial
  probe
  misc_feature (1)..(25): SEQ ID NO: 6442; WAN024DE3_at; Start 9; Stop 33
ggtgaaattaggtgaagtggctact

SEQ ID NO: 154208 - DNA, 25 bp, Artificial
  probe
  misc_feature (1)..(25): SEQ ID NO: 6442; WAN024DE3_at; Start 3; Stop 27
gaagaaggtgaaattaggtgaagtg

SEQ ID NO: 154209 - DNA, 25 bp, Artificial
  probe
  misc_feature (1)..(25): SEQ ID NO: 6442; WAN024DE3_at; Start 8; Stop 32
aggtgaaattaggtgaagtggctac

SEQ ID NO: 154210 - DNA, 25 bp, Artificial
  probe
  misc_feature (1)..(25): SEQ ID NO: 6442; WAN024DE3_at; Start 5; Stop 29
agaaggtgaaattaggtgaagtggc

SEQ ID NO: 154211 - DNA, 25 bp, Artificial
  probe
  misc_feature (1)..(25): SEQ ID NO: 6442; WAN024DE3_at; Start 6; Stop 30
gaaggtgaaattaggtgaagtggct

SEQ ID NO: 154212 - DNA, 25 bp, Artificial
  probe
  misc_feature (1)..(25): SEQ ID NO: 6442; WAN024DE3_at; Start 7; Stop 31
aaggtgaaattaggtgaagtggcta

SEQ ID NO: 154213 - DNA, 25 bp, Artificial
  probe
  misc_feature (1)..(25): SEQ ID NO: 6442; WAN024DE3_at; Start 1; Stop 25
atgaagaaggtgaaattaggtgaag

SEQ ID NO: 154214 - DNA, 25 bp, Artificial
  probe
  misc_feature (1)..(25): SEQ ID NO: 6442; WAN024DE3_at; Start 2; Stop 26
tgaagaaggtgaaattaggtgaagt

SEQ ID NO: 154215 - DNA, 25 bp, Artificial
  probe
  misc_feature (1)..(25): SEQ ID NO: 6442; WAN024DE3_at; Start 4; Stop 28
aagaaggtgaaattaggtgaagtgg

SEQ ID NO: 154216 - DNA, 25 bp, Artificial
  probe
  misc_feature (1)..(25): SEQ ID NO: 6963; WAN024DE4_at; Start 172; Stop 196
tatcctgcctatggtggaaatggca

SEQ ID NO: 154217 - DNA, 25 bp, Artificial
  probe
  misc_feature (1)..(25): SEQ ID NO: 6963; WAN024DE4_at; Start 400; Stop 424
gctgatttctcaggtcaaccaaaga

SEQ ID NO: 154218 - DNA, 25 bp, Artificial
  probe
  misc_feature (1)..(25): SEQ ID NO: 6963; WAN024DE4_at; Start 240; Stop 264
catcattggtcgtgtaggtgcatat

SEQ ID NO: 154219 - DNA, 25 bp, Artificial
  probe
  misc_feature (1)..(25): SEQ ID NO: 6963; WAN024DE4_at; Start 156; Stop 180
tagagtttttgaaggttatcctgcc

SEQ ID NO: 154220 - DNA, 25 bp, Artificial
  probe
  misc_feature (1)..(25): SEQ ID NO: 6963; WAN024DE4_at; Start 136; Stop 160
aaatttcttgataaacatgatagag

SEQ ID NO: 154221 - DNA, 25 bp, Artificial
  probe
  misc_feature (1)..(25): SEQ ID NO: 6963; WAN024DE4_at; Start 265; Stop 289
tgtggtaatgtaagaactacccacg

SEQ ID NO: 154222 - DNA, 25 bp, Artificial
  probe
  misc_feature (1)..(25): SEQ ID NO: 6963; WAN024DE4_at; Start 8; Stop 32
gcattcacaccaaaaattcatctct

SEQ ID NO: 154223 - DNA, 25 bp, Artificial
  probe
  misc_feature (1)..(25): SEQ ID NO: 6963; WAN024DE4_at; Start 24; Stop 48
ttcatctcttaaaagcaaatcccga

SEQ ID NO: 154224 - DNA, 25 bp, Artificial
  probe
  misc_feature (1)..(25): SEQ ID NO: 6963; WAN024DE4_at; Start 249; Stop 273
tcgtgtaggtgcatattgtggtaat

SEQ ID NO: 154225 - DNA, 25 bp, Artificial
  probe
  misc_feature (1)..(25): SEQ ID NO: 6963; WAN024DE4_at; Start 227; Stop 251
ataatcctactatcatcattggtcg

SEQ ID NO: 154226 - DNA, 25 bp, Artificial
  probe
  misc_feature (1)..(25): SEQ ID NO: 6963; WAN024DE4_at; Start 407; Stop 431
tctcaggtcaaccaaagataactca

SEQ ID NO: 154227 - DNA, 25 bp, Artificial
  probe
  misc_feature (1)..(25): SEQ ID NO: 6963; WAN024DE4_at; Start 304; Stop 328
agtgacaatgctatatatataaaag

SEQ ID NO: 154228 - DNA, 25 bp, Artificial
  probe
  misc_feature (1)..(25): SEQ ID NO: 6963; WAN024DE4_at; Start 15; Stop 39
caccaaaaattcatctcttaaaagc

SEQ ID NO: 154229 - DNA, 25 bp, Artificial
  probe
  misc_feature (1)..(25): SEQ ID NO: 6963; WAN024DE4_at; Start 178; Stop 202
gcctatggtggaaatggcattgctt

SEQ ID NO: 154230 - DNA, 25 bp, Artificial
  probe
  misc_feature (1)..(25): SEQ ID NO: 6963; WAN024DE4_at; Start 294; Stop 318
ggtatggataagtgacaatgctata

SEQ ID NO: 154231 - DNA, 25 bp, Artificial
  probe
  misc_feature (1)..(25): SEQ ID NO: 6963; WAN024DE4_at; Start 291; Stop 315
taaggtatggataagtgacaatgct

SEQ ID NO: 154232 - DNA, 25 bp, Artificial
  probe
  misc_feature (1)..(25): SEQ ID NO: 6963; WAN024DE4_at; Start 2; Stop 26
tgtcaagcattcacaccaaaaattc

SEQ ID NO: 154233 - DNA, 25 bp, Artificial
  probe
  misc_feature (1)..(25): SEQ ID NO: 6963; WAN024DE4_at; Start 392; Stop 416
gtaaatttgctgatttctcaggtca

SEQ ID NO: 154234 - DNA, 25 bp, Artificial
  probe
  misc_feature (1)..(25): SEQ ID NO: 6963; WAN024DE4_at; Start 333; Stop 357
taagaattccgatttcaatcttgta

SEQ ID NO: 154235 - DNA, 25 bp, Artificial
  probe
  misc_feature (1)..(25): SEQ ID NO: 6963; WAN024DE4_at; Start 198; Stop 222
tgcttggaaaagtcgaaaatattta

SEQ ID NO: 154236 - DNA, 25 bp, Artificial
  probe
  misc_feature (1)..(25): SEQ ID NO: 6963; WAN024DE4_at; Start 285; Stop 309
ccacggtaaggtatggataagtgac

SEQ ID NO: 154237 - DNA, 25 bp, Artificial
  probe
  misc_feature (1)..(25): SEQ ID NO: 6963; WAN024DE4_at; Start 187; Stop 211
ggaaatggcattgcttggaaaagtc

SEQ ID NO: 154238 - DNA, 25 bp, Artificial
  probe
  misc_feature (1)..(25): SEQ ID NO: 6963; WAN024DE4_at; Start 328; Stop 352
gaatttaagaattccgatttcaatc

SEQ ID NO: 154239 - DNA, 25 bp, Artificial
  probe
  misc_feature (1)..(25): SEQ ID NO: 6963; WAN024DE4_at; Start 419; Stop 443
caaagataactcaaaaaccattaga

SEQ ID NO: 154240 - DNA, 25 bp, Artificial
  probe
  misc_feature (1)..(25): SEQ ID NO: 6963; WAN024DE4_at; Start 262; Stop 286
tattgtggtaatgtaagaactaccc

SEQ ID NO: 154241 - DNA, 25 bp, Artificial
  probe
  misc_feature (1)..(25): SEQ ID NO: 6963; WAN024DE4_at; Start 192; Stop 216
tggcattgcttggaaaagtcgaaaa

SEQ ID NO: 154242 - DNA, 25 bp, Artificial
  probe
  misc_feature (1)..(25): SEQ ID NO: 6963; WAN024DE4_at; Start 243; Stop 267
cattggtcgtgtaggtgcatattgt

SEQ ID NO: 154243 - DNA, 25 bp, Artificial
  probe
  misc_feature (1)..(25): SEQ ID NO: 6963; WAN024DE4_at; Start 128; Stop 152
caagtggaaaatttcttgataaaca

SEQ ID NO: 154244 - DNA, 25 bp, Artificial
  probe
  misc_feature (1)..(25): SEQ ID NO: 6963; WAN024DE4_at; Start 237; Stop 261
tatcatcattggtcgtgtaggtgca

SEQ ID NO: 154245 - DNA, 25 bp, Artificial
  probe
  misc_feature (1)..(25): SEQ ID NO: 6963; WAN024DE4_at; Start 28; Stop 52
tctcttaaaagcaaatcccgattta

SEQ ID NO: 154246 - DNA, 25 bp, Artificial
  probe
  misc_feature (1)..(25): SEQ ID NO: 6963; WAN024DE4_at; Start 410; Stop 434
caggtcaaccaaagataactcaaaa

SEQ ID NO: 154247 - DNA, 25 bp, Artificial
  probe
  misc_feature (1)..(25): SEQ ID NO: 6963; WAN024DE4_at; Start 212; Stop 236
gaaaatatttaattgataatcctac

SEQ ID NO: 154248 - DNA, 25 bp, Artificial
  probe
  misc_feature (1)..(25): SEQ ID NO: 6963; WAN024DE4_at; Start 165; Stop 189
tgaaggttatcctgcctatggtgga

SEQ ID NO: 154249 - DNA, 25 bp, Artificial
  probe
  misc_feature (1)..(25): SEQ ID NO: 6963; WAN024DE4_at; Start 281; Stop 305
ctacccacggtaaggtatggataag

SEQ ID NO: 154250 - DNA, 25 bp, Artificial
  probe
  misc_feature (1)..(25): SEQ ID NO: 6440; WAN024DE5_at; Start 530; Stop 554
tagctataaaagtgtggagaaatag

SEQ ID NO: 154251 - DNA, 25 bp, Artificial
  probe
  misc_feature (1)..(25): SEQ ID NO: 6440; WAN024DE5_at; Start 542; Stop 566
tgtggagaaatagcttgaaatttag

SEQ ID NO: 154252 - DNA, 25 bp, Artificial
  probe
  misc_feature (1)..(25): SEQ ID NO: 6440; WAN024DE5_at; Start 526; Stop 550
gagatagctataaaagtgtggagaa

SEQ ID NO: 154253 - DNA, 25 bp, Artificial
  probe
  misc_feature (1)..(25): SEQ ID NO: 6440; WAN024DE5_at; Start 520; Stop 544
gcttgtgagatagctataaaagtgt

SEQ ID NO: 154254 - DNA, 25 bp, Artificial
  probe
  misc_feature (1)..(25): SEQ ID NO: 6440; WAN024DE5_at; Start 517; Stop 541
tttgcttgtgagatagctataaaag

SEQ ID NO: 154255 - DNA, 25 bp, Artificial
  probe
  misc_feature (1)..(25): SEQ ID NO: 6440; WAN024DE5_at; Start 523; Stop 547
tgtgagatagctataaaagtgtgga

SEQ ID NO: 154256 - DNA, 25 bp, Artificial
  probe
  misc_feature (1)..(25): SEQ ID NO: 6440; WAN024DE5_at; Start 527; Stop 551
agatagctataaaagtgtggagaaa

SEQ ID NO: 154257 - DNA, 25 bp, Artificial
  probe
  misc_feature (1)..(25): SEQ ID NO: 6440; WAN024DE5_at; Start 524; Stop 548
gtgagatagctataaaagtgtggag

SEQ ID NO: 154258 - DNA, 25 bp, Artificial
  probe
  misc_feature (1)..(25): SEQ ID NO: 6440; WAN024DE5_at; Start 513; Stop 537
acaatttgcttgtgagatagctata

SEQ ID NO: 154259 - DNA, 25 bp, Artificial
  probe
  misc_feature (1)..(25): SEQ ID NO: 6440; WAN024DE5_at; Start 3; Stop 27
gaagaaagtgaaattagggcaagtg

SEQ ID NO: 154260 - DNA, 25 bp, Artificial
  probe
  misc_feature (1)..(25): SEQ ID NO: 6440; WAN024DE5_at; Start 515; Stop 539
aatttgcttgtgagatagctataaa

SEQ ID NO: 154261 - DNA, 25 bp, Artificial
  probe
  misc_feature (1)..(25): SEQ ID NO: 6440; WAN024DE5_at; Start 548; Stop 572
gaaatagcttgaaatttagtataat

SEQ ID NO: 154262 - DNA, 25 bp, Artificial
  probe
  misc_feature (1)..(25): SEQ ID NO: 6440; WAN024DE5_at; Start 536; Stop 560
taaaagtgtggagaaatagcttgaa

SEQ ID NO: 154263 - DNA, 25 bp, Artificial
  probe
  misc_feature (1)..(25): SEQ ID NO: 6440; WAN024DE5_at; Start 6; Stop 30
gaaagtgaaattagggcaagtggct

SEQ ID NO: 154264 - DNA, 25 bp, Artificial
  probe
  misc_feature (1)..(25): SEQ ID NO: 6440; WAN024DE5_at; Start 534; Stop 558
tataaaagtgtggagaaatagcttg

SEQ ID NO: 154265 - DNA, 25 bp, Artificial
  probe
  misc_feature (1)..(25): SEQ ID NO: 6440; WAN024DE5_at; Start 5; Stop 29
agaaagtgaaattagggcaagtggc

SEQ ID NO: 154266 - DNA, 25 bp, Artificial
  probe
  misc_feature (1)..(25): SEQ ID NO: 6440; WAN024DE5_at; Start 7; Stop 31
aaagtgaaattagggcaagtggcta

SEQ ID NO: 154267 - DNA, 25 bp, Artificial
  probe
  misc_feature (1)..(25): SEQ ID NO: 6440; WAN024DE5_at; Start 538; Stop 562
aaagtgtggagaaatagcttgaaat

SEQ ID NO: 154268 - DNA, 25 bp, Artificial
  probe
  misc_feature (1)..(25): SEQ ID NO: 6440; WAN024DE5_at; Start 522; Stop 546
ttgtgagatagctataaaagtgtgg

SEQ ID NO: 154269 - DNA, 25 bp, Artificial
  probe
  misc_feature (1)..(25): SEQ ID NO: 6440; WAN024DE5_at; Start 519; Stop 543
tgcttgtgagatagctataaaagtg

SEQ ID NO: 154270 - DNA, 25 bp, Artificial
  probe
  misc_feature (1)..(25): SEQ ID NO: 6440; WAN024DE5_at; Start 9; Stop 33
agtgaaattagggcaagtggctact

SEQ ID NO: 154271 - DNA, 25 bp, Artificial
  probe
  misc_feature (1)..(25): SEQ ID NO: 6440; WAN024DE5_at; Start 525; Stop 549
tgagatagctataaaagtgtggaga

SEQ ID NO: 154272 - DNA, 25 bp, Artificial
  probe
  misc_feature (1)..(25): SEQ ID NO: 6440; WAN024DE5_at; Start 540; Stop 564
agtgtggagaaatagcttgaaattt

SEQ ID NO: 154273 - DNA, 25 bp, Artificial
  probe
  misc_feature (1)..(25): SEQ ID NO: 6440; WAN024DE5_at; Start 512; Stop 536
cacaatttgcttgtgagatagctat

SEQ ID NO: 154274 - DNA, 25 bp, Artificial
  probe
  misc_feature (1)..(25): SEQ ID NO: 6440; WAN024DE5_at; Start 498; Stop 522
tctacttgtaaaatcacaatttgct

SEQ ID NO: 154275 - DNA, 25 bp, Artificial
  probe
  misc_feature (1)..(25): SEQ ID NO: 6440; WAN024DE5_at; Start 521; Stop 545
cttgtgagatagctataaaagtgtg

SEQ ID NO: 154276 - DNA, 25 bp, Artificial
  probe
  misc_feature (1)..(25): SEQ ID NO: 6440; WAN024DE5_at; Start 2; Stop 26
tgaagaaagtgaaattagggcaagt

SEQ ID NO: 154277 - DNA, 25 bp, Artificial
  probe
  misc_feature (1)..(25): SEQ ID NO: 6440; WAN024DE5_at; Start 537; Stop 561
aaaagtgtggagaaatagcttgaaa

SEQ ID NO: 154278 - DNA, 25 bp, Artificial
  probe
  misc_feature (1)..(25): SEQ ID NO: 6440; WAN024DE5_at; Start 528; Stop 552
gatagctataaaagtgtggagaaat

SEQ ID NO: 154279 - DNA, 25 bp, Artificial
  probe
  misc_feature (1)..(25): SEQ ID NO: 6440; WAN024DE5_at; Start 514; Stop 538
caatttgcttgtgagatagctataa

SEQ ID NO: 154280 - DNA, 25 bp, Artificial
  probe
  misc_feature (1)..(25): SEQ ID NO: 6440; WAN024DE5_at; Start 532; Stop 556
gctataaaagtgtggagaaatagct

SEQ ID NO: 154281 - DNA, 25 bp, Artificial
  probe
  misc_feature (1)..(25): SEQ ID NO: 6440; WAN024DE5_at; Start 4; Stop 28
aagaaagtgaaattagggcaagtgg

SEQ ID NO: 154282 - DNA, 25 bp, Artificial
  probe
  misc_feature (1)..(25): SEQ ID NO: 6440; WAN024DE5_at; Start 533; Stop 557
ctataaaagtgtggagaaatagctt

SEQ ID NO: 154283 - DNA, 25 bp, Artificial
  probe
  misc_feature (1)..(25): SEQ ID NO: 6440; WAN024DE5_at; Start 545; Stop 569
ggagaaatagcttgaaatttagtat

SEQ ID NO: 154284 - DNA, 25 bp, Artificial
  probe
  misc_feature (1)..(25): SEQ ID NO: 651; WAN024DE7_at; Start 298; Stop 322
tatatatcttggttgattcctaaat

SEQ ID NO: 154285 - DNA, 25 bp, Artificial
  probe
  misc_feature (1)..(25): SEQ ID NO: 651; WAN024DE7_at; Start 130; Stop 154
gatacctactttgaaggaacttatc

SEQ ID NO: 154286 - DNA, 25 bp, Artificial
  probe
  misc_feature (1)..(25): SEQ ID NO: 651; WAN024DE7_at; Start 340; Stop 364
gataagaccccttttgttacagtga

SEQ ID NO: 154287 - DNA, 25 bp, Artificial
  probe
  misc_feature (1)..(25): SEQ ID NO: 651; WAN024DE7_at; Start 469; Stop 493
gattttcgtaaaattcaatcagaaa

SEQ ID NO: 154288 - DNA, 25 bp, Artificial
  probe
  misc_feature (1)..(25): SEQ ID NO: 651; WAN024DE7_at; Start 145; Stop 169
ggaacttatcccgaagaatatctta

SEQ ID NO: 154289 - DNA, 25 bp, Artificial
  probe
  misc_feature (1)..(25): SEQ ID NO: 651; WAN024DE7_at; Start 181; Stop 205
gacttattgattacaatggatggca

SEQ ID NO: 154290 - DNA, 25 bp, Artificial
  probe
  misc_feature (1)..(25): SEQ ID NO: 651; WAN024DE7_at; Start 236; Stop 260
tagcgctacttaatcaacgtgtctg

SEQ ID NO: 154291 - DNA, 25 bp, Artificial
  probe
  misc_feature (1)..(25): SEQ ID NO: 651; WAN024DE7_at; Start 69; Stop 93
taatgataacaaaattggtctcccc

SEQ ID NO: 154292 - DNA, 25 bp, Artificial
  probe
  misc_feature (1)..(25): SEQ ID NO: 651; WAN024DE7_at; Start 20; Stop 44
gggaagtttgtgagattttatctgg

SEQ ID NO: 154293 - DNA, 25 bp, Artificial
  probe
  misc_feature (1)..(25): SEQ ID NO: 651; WAN024DE7_at; Start 154; Stop 178
cccgaagaatatcttattaaaaatg

SEQ ID NO: 154294 - DNA, 25 bp, Artificial
  probe
  misc_feature (1)..(25): SEQ ID NO: 651; WAN024DE7_at; Start 230; Stop 254
gggatttagcgctacttaatcaacg

SEQ ID NO: 154295 - DNA, 25 bp, Artificial
  probe
  misc_feature (1)..(25): SEQ ID NO: 651; WAN024DE7_at; Start 189; Stop 213
gattacaatggatggcagttttata

SEQ ID NO: 154296 - DNA, 25 bp, Artificial
  probe
  misc_feature (1)..(25): SEQ ID NO: 651; WAN024DE7_at; Start 98; Stop 122
tacgaattcgagatgtagaaagagg

SEQ ID NO: 154297 - DNA, 25 bp, Artificial
  probe
  misc_feature (1)..(25): SEQ ID NO: 651; WAN024DE7_at; Start 389; Stop 413
aagatatctcatttgtattgcctaa

SEQ ID NO: 154298 - DNA, 25 bp, Artificial
  probe
  misc_feature (1)..(25): SEQ ID NO: 651; WAN024DE7_at; Start 204; Stop 228
cagttttatattgaaaaaatgggag

SEQ ID NO: 154299 - DNA, 25 bp, Artificial
  probe
  misc_feature (1)..(25): SEQ ID NO: 651; WAN024DE7_at; Start 248; Stop 272
atcaacgtgtctgtaaaattaaaat

SEQ ID NO: 154300 - DNA, 25 bp, Artificial
  probe
  misc_feature (1)..(25): SEQ ID NO: 651; WAN024DE7_at; Start 273; Stop 297
tacggataaaagtgtagatgaaggt

SEQ ID NO: 154301 - DNA, 25 bp, Artificial
  probe
  misc_feature (1)..(25): SEQ ID NO: 651; WAN024DE7_at; Start 347; Stop 371
ccccttttgttacagtgaaacatct

SEQ ID NO: 154302 - DNA, 25 bp, Artificial
  probe
  misc_feature (1)..(25): SEQ ID NO: 651; WAN024DE7_at; Start 372; Stop 396
ttcagtagctaaaataaaagatatc

SEQ ID NO: 154303 - DNA, 25 bp, Artificial
  probe
  misc_feature (1)..(25): SEQ ID NO: 651; WAN024DE7_at; Start 141; Stop 165
tgaaggaacttatcccgaagaatat

SEQ ID NO: 154304 - DNA, 25 bp, Artificial
  probe
  misc_feature (1)..(25): SEQ ID NO: 651; WAN024DE7_at; Start 43; Stop 67
ggttacgcttttaaatcatcacaat

SEQ ID NO: 154305 - DNA, 25 bp, Artificial
  probe
  misc_feature (1)..(25): SEQ ID NO: 651; WAN024DE7_at; Start 240; Stop 264
gctacttaatcaacgtgtctgtaaa

SEQ ID NO: 154306 - DNA, 25 bp, Artificial
  probe
  misc_feature (1)..(25): SEQ ID NO: 651; WAN024DE7_at; Start 113; Stop 137
tagaaagaggtttttctgataccta

SEQ ID NO: 154307 - DNA, 25 bp, Artificial
  probe
  misc_feature (1)..(25): SEQ ID NO: 651; WAN024DE7_at; Start 402; Stop 426
tgtattgcctaataaactagaacaa

SEQ ID NO: 154308 - DNA, 25 bp, Artificial
  probe
  misc_feature (1)..(25): SEQ ID NO: 651; WAN024DE7_at; Start 89; Stop 113
tccccttaatacgaattcgagatgt

SEQ ID NO: 154309 - DNA, 25 bp, Artificial
  probe
  misc_feature (1)..(25): SEQ ID NO: 651; WAN024DE7_at; Start 31; Stop 55
gagattttatctggttacgctttta

SEQ ID NO: 154310 - DNA, 25 bp, Artificial
  probe
  misc_feature (1)..(25): SEQ ID NO: 651; WAN024DE7_at; Start 289; Stop 313
gatgaaggttatatatcttggttga

SEQ ID NO: 154311 - DNA, 25 bp, Artificial
  probe
  misc_feature (1)..(25): SEQ ID NO: 651; WAN024DE7_at; Start 487; Stop 511
tcagaaaaatttaacgagctcgtca

SEQ ID NO: 154312 - DNA, 25 bp, Artificial
  probe
  misc_feature (1)..(25): SEQ ID NO: 651; WAN024DE7_at; Start 84; Stop 108
tggtctccccttaatacgaattcga

SEQ ID NO: 154313 - DNA, 25 bp, Artificial
  probe
  misc_feature (1)..(25): SEQ ID NO: 651; WAN024DE7_at; Start 165; Stop 189
tcttattaaaaatggagacttattg

SEQ ID NO: 154314 - DNA, 25 bp, Artificial
  probe
  misc_feature (1)..(25): SEQ ID NO: 651; WAN024DE7_at; Start 494; Stop 518
aatttaacgagctcgtcaaatcccg

SEQ ID NO: 154315 - DNA, 25 bp, Artificial
  probe
  misc_feature (1)..(25): SEQ ID NO: 651; WAN024DE7_at; Start 417; Stop 441
actagaacaaaagctaattgcaaaa

SEQ ID NO: 154316 - DNA, 25 bp, Artificial
  probe
  misc_feature (1)..(25): SEQ ID NO: 651; WAN024DE7_at; Start 452; Stop 476
cgataagtcaaatttatgattttcg

SEQ ID NO: 154317 - DNA, 25 bp, Artificial
  probe
  misc_feature (1)..(25): SEQ ID NO: 651; WAN024DE7_at; Start 359; Stop 383
cagtgaaacatctttcagtagctaa

SEQ ID NO: 154318 - DNA, 25 bp, Artificial
  probe
  misc_feature (1)..(25): SEQ ID NO: 1795; WAN024DE8_at; Start 1014; Stop 1038
tggttcgtctaaagctcataaagga

SEQ ID NO: 154319 - DNA, 25 bp, Artificial
  probe
  misc_feature (1)..(25): SEQ ID NO: 1795; WAN024DE8_at; Start 556; Stop 580
gagttgatgcaaccgactatcaaag

SEQ ID NO: 154320 - DNA, 25 bp, Artificial
  probe
  misc_feature (1)..(25): SEQ ID NO: 1795; WAN024DE8_at; Start 980; Stop 1004
gagcagcagttatcgtacctgatgg

SEQ ID NO: 154321 - DNA, 25 bp, Artificial
  probe
  misc_feature (1)..(25): SEQ ID NO: 1795; WAN024DE8_at; Start 509; Stop 533
aaaatggacagttccgtacacctcg

SEQ ID NO: 154322 - DNA, 25 bp, Artificial
  probe
  misc_feature (1)..(25): SEQ ID NO: 1795; WAN024DE8_at; Start 1085; Stop 1109
caatgcctagtggtgtgttcaagcc

SEQ ID NO: 154323 - DNA, 25 bp, Artificial
  probe
  misc_feature (1)..(25): SEQ ID NO: 1795; WAN024DE8_at; Start 1107; Stop 1131
gccttatgctggagtttcaactgcc

SEQ ID NO: 154324 - DNA, 25 bp, Artificial
  probe
  misc_feature (1)..(25): SEQ ID NO: 1795; WAN024DE8_at; Start 582; Stop 606
tatcatctcagatcccgctatgggt

SEQ ID NO: 154325 - DNA, 25 bp, Artificial
  probe
  misc_feature (1)..(25): SEQ ID NO: 1795; WAN024DE8_at; Start 1027; Stop 1051
gctcataaaggaattcgtcaggaaa

SEQ ID NO: 154326 - DNA, 25 bp, Artificial
  probe
  misc_feature (1)..(25): SEQ ID NO: 1795; WAN024DE8_at; Start 131; Stop 155
tcgagcttggacgtgaaagtgatgc

SEQ ID NO: 154327 - DNA, 25 bp, Artificial
  probe
  misc_feature (1)..(25): SEQ ID NO: 1795; WAN024DE8_at; Start 761; Stop 785
tgctacatggagtagaaaatccaca

SEQ ID NO: 154328 - DNA, 25 bp, Artificial
  probe
  misc_feature (1)..(25): SEQ ID NO: 1795; WAN024DE8_at; Start 645; Stop 669
gcgtaagaaagatgaatgggaaacc

SEQ ID NO: 154329 - DNA, 25 bp, Artificial
  probe
  misc_feature (1)..(25): SEQ ID NO: 1795; WAN024DE8_at; Start 894; Stop 918
taatgaccttcttgcaaccgtaaaa

SEQ ID NO: 154330 - DNA, 25 bp, Artificial
  probe
  misc_feature (1)..(25): SEQ ID NO: 1795; WAN024DE8_at; Start 50; Stop 74
tttggacagaaggaaacgcaaatcc

SEQ ID NO: 154331 - DNA, 25 bp, Artificial
  probe
  misc_feature (1)..(25): SEQ ID NO: 1795; WAN024DE8_at; Start 718; Stop 742
gatacggatacgactatgttgagac

SEQ ID NO: 154332 - DNA, 25 bp, Artificial
  probe
  misc_feature (1)..(25): SEQ ID NO: 1795; WAN024DE8_at; Start 317; Stop 341
cagccttttcacgatatatgcgaga

SEQ ID NO: 154333 - DNA, 25 bp, Artificial
  probe
  misc_feature (1)..(25): SEQ ID NO: 1795; WAN024DE8_at; Start 482; Stop 506
tgttatcaaaattgtcgaccgcagg

SEQ ID NO: 154334 - DNA, 25 bp, Artificial
  probe
  misc_feature (1)..(25): SEQ ID NO: 1795; WAN024DE8_at; Start 965; Stop 989
taaaaccaggtggacgagcagcagt

SEQ ID NO: 154335 - DNA, 25 bp, Artificial
  probe
  misc_feature (1)..(25): SEQ ID NO: 1795; WAN024DE8_at; Start 1285; Stop 1309
gaagcagaacgtcagagaacggatc

SEQ ID NO: 154336 - DNA, 25 bp, Artificial
  probe
  misc_feature (1)..(25): SEQ ID NO: 1795; WAN024DE8_at; Start 1175; Stop 1199
tctggttttacgatatgaaagcgga

SEQ ID NO: 154337 - DNA, 25 bp, Artificial
  probe
  misc_feature (1)..(25): SEQ ID NO: 1795; WAN024DE8_at; Start 623; Stop 647
tatctgctagccgttacttaaagcg

SEQ ID NO: 154338 - DNA, 25 bp, Artificial
  probe
  misc_feature (1)..(25): SEQ ID NO: 1795; WAN024DE8_at; Start 597; Stop 621
cgctatgggttctgctggcttctta

SEQ ID NO: 154339 - DNA, 25 bp, Artificial
  probe
  misc_feature (1)..(25): SEQ ID NO: 1795; WAN024DE8_at; Start 302; Stop 326
gggatacagatgatacagccttttc

SEQ ID NO: 154340 - DNA, 25 bp, Artificial
  probe
  misc_feature (1)..(25): SEQ ID NO: 1795; WAN024DE8_at; Start 233; Stop 257
taggagatgctcaggaagtttatcg

SEQ ID NO: 154341 - DNA, 25 bp, Artificial
  probe
  misc_feature (1)..(25): SEQ ID NO: 1795; WAN024DE8_at; Start 799; Stop 823
gactcgctgtctcaagataatgaag

SEQ ID NO: 154342 - DNA, 25 bp, Artificial
  probe
  misc_feature (1)..(25): SEQ ID NO: 1795; WAN024DE8_at; Start 848; Stop 872
tagcaaatcctccttttaagggctc

SEQ ID NO: 154343 - DNA, 25 bp, Artificial
  probe
  misc_feature (1)..(25): SEQ ID NO: 1795; WAN024DE8_at; Start 1211; Stop 1235
tggatgataagcgacaaccgattag

SEQ ID NO: 154344 - DNA, 25 bp, Artificial
  probe
  misc_feature (1)..(25): SEQ ID NO: 1795; WAN024DE8_at; Start 358; Stop 382
aataaacctgctacgcttcaaaagg

SEQ ID NO: 154345 - DNA, 25 bp, Artificial
  probe
  misc_feature (1)..(25): SEQ ID NO: 1795; WAN024DE8_at; Start 1155; Stop 1179
taatggtggtactgacaaagtctgg

SEQ ID NO: 154346 - DNA, 25 bp, Artificial
  probe
  misc_feature (1)..(25): SEQ ID NO: 1795; WAN024DE8_at; Start 496; Stop 520
tcgaccgcaggtaaaaatggacagt

SEQ ID NO: 154347 - DNA, 25 bp, Artificial
  probe
  misc_feature (1)..(25): SEQ ID NO: 1795; WAN024DE8_at; Start 1444; Stop 1468
gaaaaagaaattcaagctggcttgg

SEQ ID NO: 154348 - DNA, 25 bp, Artificial
  probe
  misc_feature (1)..(25): SEQ ID NO: 1795; WAN024DE8_at; Start 864; Stop 888
taagggctcacttgactacaattca

SEQ ID NO: 154349 - DNA, 25 bp, Artificial
  probe
  misc_feature (1)..(25): SEQ ID NO: 1795; WAN024DE8_at; Start 784; Stop 808
caaatcagttaccttgactcgctgt

SEQ ID NO: 154350 - DNA, 25 bp, Artificial
  probe
  misc_feature (1)..(25): SEQ ID NO: 1795; WAN024DE8_at; Start 113; Stop 137
tgaaagatttggatagtgtcgagct

SEQ ID NO: 154351 - DNA, 25 bp, Artificial
  probe
  misc_feature (1)..(25): SEQ ID NO: 1795; WAN024DE8_at; Start 1072; Stop 1096
gatgctgtaatctcaatgcctagtg

SEQ ID NO: 154352 - DNA, 25 bp, Artificial
  probe
  misc_feature (1)..(25): SEQ ID NO: 1351; WAN024DE9_at; Start 1076; Stop 1100
aaaaaagcctgcaggaagaccatcg

SEQ ID NO: 154353 - DNA, 25 bp, Artificial
  probe
  misc_feature (1)..(25): SEQ ID NO: 1351; WAN024DE9_at; Start 343; Stop 367
tttgacgagcgacttctaaaatggc

SEQ ID NO: 154354 - DNA, 25 bp, Artificial
  probe
  misc_feature (1)..(25): SEQ ID NO: 1351; WAN024DE9_at; Start 530; Stop 554
ttttacttgggaaatcggatgacca

SEQ ID NO: 154355 - DNA, 25 bp, Artificial
  probe
  misc_feature (1)..(25): SEQ ID NO: 1351; WAN024DE9_at; Start 801; Stop 825
ggccaaacaataccaaaaagagctg

SEQ ID NO: 154356 - DNA, 25 bp, Artificial
  probe
  misc_feature (1)..(25): SEQ ID NO: 1351; WAN024DE9_at; Start 667; Stop 691
aatctggttctagccatgggacccg

SEQ ID NO: 154357 - DNA, 25 bp, Artificial
  probe
  misc_feature (1)..(25): SEQ ID NO: 1351; WAN024DE9_at; Start 199; Stop 223
ccaattggtagcgactgtgttcgtc

SEQ ID NO: 154358 - DNA, 25 bp, Artificial
  probe
  misc_feature (1)..(25): SEQ ID NO: 1351; WAN024DE9_at; Start 1090; Stop 1114
gaagaccatcgctcatcagcacaag

SEQ ID NO: 154359 - DNA, 25 bp, Artificial
  probe
  misc_feature (1)..(25): SEQ ID NO: 1351; WAN024DE9_at; Start 126; Stop 150
caattgtgtctgtggaaatgccatc

SEQ ID NO: 154360 - DNA, 25 bp, Artificial
  probe
  misc_feature (1)..(25): SEQ ID NO: 1351; WAN024DE9_at; Start 1126; Stop 1150
gaaggaattctcctcaactgcctca

SEQ ID NO: 154361 - DNA, 25 bp, Artificial
  probe
  misc_feature (1)..(25): SEQ ID NO: 1351; WAN024DE9_at; Start 50; Stop 74
cgaaagcggatacttgggaacaagc

SEQ ID NO: 154362 - DNA, 25 bp, Artificial
  probe
  misc_feature (1)..(25): SEQ ID NO: 1351; WAN024DE9_at; Start 686; Stop 710
gacccgcagagcgtgcttatcaaga

SEQ ID NO: 154363 - DNA, 25 bp, Artificial
  probe
  misc_feature (1)..(25): SEQ ID NO: 1351; WAN024DE9_at; Start 358; Stop 382
ctaaaatggctctgggaaaaaggtg

SEQ ID NO: 154364 - DNA, 25 bp, Artificial
  probe
  misc_feature (1)..(25): SEQ ID NO: 1351; WAN024DE9_at; Start 111; Stop 135
cggtatcggccgtagcaattgtgtc

SEQ ID NO: 154365 - DNA, 25 bp, Artificial
  probe
  misc_feature (1)..(25): SEQ ID NO: 1351; WAN024DE9_at; Start 729; Stop 753
gaccctgactcaagaagaacgcaag

SEQ ID NO: 154366 - DNA, 25 bp, Artificial
  probe
  misc_feature (1)..(25): SEQ ID NO: 1351; WAN024DE9_at; Start 909; Stop 933
gcttcctgaagaaaaagctcgattt

SEQ ID NO: 154367 - DNA, 25 bp, Artificial
  probe
  misc_feature (1)..(25): SEQ ID NO: 1351; WAN024DE9_at; Start 28; Stop 52
cacgatgcagttttacaggcttcga

SEQ ID NO: 154368 - DNA, 25 bp, Artificial
  probe
  misc_feature (1)..(25): SEQ ID NO: 1351; WAN024DE9_at; Start 479; Stop 503
caaagaaaaaggctcggatggaaga

SEQ ID NO: 154369 - DNA, 25 bp, Artificial
  probe
  misc_feature (1)..(25): SEQ ID NO: 1351; WAN024DE9_at; Start 422; Stop 446
gagactaccagcttttcctagaagt

SEQ ID NO: 154370 - DNA, 25 bp, Artificial
  probe
  misc_feature (1)..(25): SEQ ID NO: 1351; WAN024DE9_at; Start 628; Stop 652
cgcaagaagagggataaaatcgcca

SEQ ID NO: 154371 - DNA, 25 bp, Artificial
  probe
  misc_feature (1)..(25): SEQ ID NO: 1351; WAN024DE9_at; Start 596; Stop 620
aacaagaactccgtatccaggcaga

SEQ ID NO: 154372 - DNA, 25 bp, Artificial
  probe
  misc_feature (1)..(25): SEQ ID NO: 1351; WAN024DE9_at; Start 829; Stop 853
aaagaccaacgaattgccagtcagg

SEQ ID NO: 154373 - DNA, 25 bp, Artificial
  probe
  misc_feature (1)..(25): SEQ ID NO: 1351; WAN024DE9_at; Start 1042; Stop 1066
gaaatcgcaccagaacaagtccgag

SEQ ID NO: 154374 - DNA, 25 bp, Artificial
  probe
  misc_feature (1)..(25): SEQ ID NO: 1351; WAN024DE9_at; Start 609; Stop 633
tatccaggcagagaaagaacgcaag

SEQ ID NO: 154375 - DNA, 25 bp, Artificial
  probe
  misc_feature (1)..(25): SEQ ID NO: 1351; WAN024DE9_at; Start 184; Stop 208
ggccaacgcctctttccaattggta

SEQ ID NO: 154376 - DNA, 25 bp, Artificial
  probe
  misc_feature (1)..(25): SEQ ID NO: 1351; WAN024DE9_at; Start 550; Stop 574
gaccaactctaccttgtcaagctag

SEQ ID NO: 154377 - DNA, 25 bp, Artificial
  probe
  misc_feature (1)..(25): SEQ ID NO: 1351; WAN024DE9_at; Start 379; Stop 403
ggtgttttcaaacccaatcgtggca

SEQ ID NO: 154378 - DNA, 25 bp, Artificial
  probe
  misc_feature (1)..(25): SEQ ID NO: 1351; WAN024DE9_at; Start 250; Stop 274
caattggaagaggaagaaaaactgc

SEQ ID NO: 154379 - DNA, 25 bp, Artificial
  probe
  misc_feature (1)..(25): SEQ ID NO: 1351; WAN024DE9_at; Start 13; Stop 37
gttagaaaatccctgcacgatgcag

SEQ ID NO: 154380 - DNA, 25 bp, Artificial
  probe
  misc_feature (1)..(25): SEQ ID NO: 1351; WAN024DE9_at; Start 169; Stop 193
tttaacggtgtcacaggccaacgcc

SEQ ID NO: 154381 - DNA, 25 bp, Artificial
  probe
  misc_feature (1)..(25): SEQ ID NO: 1351; WAN024DE9_at; Start 567; Stop 591
caagctaggcaaggagaaaattgac

SEQ ID NO: 154382 - DNA, 25 bp, Artificial
  probe
  misc_feature (1)..(25): SEQ ID NO: 1351; WAN024DE9_at; Start 1109; Stop 1133
cacaaggaagctggatagaaggaat

SEQ ID NO: 154383 - DNA, 25 bp, Artificial
  probe
  misc_feature (1)..(25): SEQ ID NO: 1351; WAN024DE9_at; Start 406; Stop 430
caatttgcgcctgagagagactacc

SEQ ID NO: 154384 - DNA, 25 bp, Artificial
  probe
  misc_feature (1)..(25): SEQ ID NO: 1351; WAN024DE9_at; Start 712; Stop 736
tactttggctttacagagaccctga

SEQ ID NO: 154385 - DNA, 25 bp, Artificial
  probe
  misc_feature (1)..(25): SEQ ID NO: 1351; WAN024DE9_at; Start 446; Stop 470
tctttcagggaggaagttggaccaa

SEQ ID NO: 154386 - DNA, 25 bp, Artificial
  probe
  misc_feature (1)..(25): SEQ ID NO: 7484; WAN024DEA_at; Start 145; Stop 169
tttaccagtatttgcctcaacagca

SEQ ID NO: 154387 - DNA, 25 bp, Artificial
  probe
  misc_feature (1)..(25): SEQ ID NO: 7484; WAN024DEA_at; Start 11; Stop 35
taatcagaaatatctacaggagtgg

SEQ ID NO: 154388 - DNA, 25 bp, Artificial
  probe
  misc_feature (1)..(25): SEQ ID NO: 7484; WAN024DEA_at; Start 198; Stop 222
cttgagcaacagcagtagaagcacc

SEQ ID NO: 154389 - DNA, 25 bp, Artificial
  probe
  misc_feature (1)..(25): SEQ ID NO: 7484; WAN024DEA_at; Start 23; Stop 47
tctacaggagtggagagggtaatac

SEQ ID NO: 154390 - DNA, 25 bp, Artificial
  probe
  misc_feature (1)..(25): SEQ ID NO: 7484; WAN024DEA_at; Start 97; Stop 121
tatggaagcaatttcgacaggttgc

SEQ ID NO: 154391 - DNA, 25 bp, Artificial
  probe
  misc_feature (1)..(25): SEQ ID NO: 7484; WAN024DEA_at; Start 62; Stop 86
gcttcatagaccagataaacagtaa

SEQ ID NO: 154392 - DNA, 25 bp, Artificial
  probe
  misc_feature (1)..(25): SEQ ID NO: 7484; WAN024DEA_at; Start 56; Stop 80
tccaaagcttcatagaccagataaa

SEQ ID NO: 154393 - DNA, 25 bp, Artificial
  probe
  misc_feature (1)..(25): SEQ ID NO: 7484; WAN024DEA_at; Start 162; Stop 186
caacagcaatcgcatgtttagcggc

SEQ ID NO: 154394 - DNA, 25 bp, Artificial
  probe
  misc_feature (1)..(25): SEQ ID NO: 7484; WAN024DEA_at; Start 112; Stop 136
gacaggttgcgttgcatccttctca

SEQ ID NO: 154395 - DNA, 25 bp, Artificial
  probe
  misc_feature (1)..(25): SEQ ID NO: 7484; WAN024DEA_at; Start 94; Stop 118
tgttatggaagcaatttcgacaggt

SEQ ID NO: 154396 - DNA, 25 bp, Artificial
  probe
  misc_feature (1)..(25): SEQ ID NO: 7484; WAN024DEA_at; Start 27; Stop 51
caggagtggagagggtaatacttcc

SEQ ID NO: 154397 - DNA, 25 bp, Artificial
  probe
  misc_feature (1)..(25): SEQ ID NO: 7484; WAN024DEA_at; Start 51; Stop 75
cgttttccaaagcttcatagaccag

SEQ ID NO: 154398 - DNA, 25 bp, Artificial
  probe
  misc_feature (1)..(25): SEQ ID NO: 7484; WAN024DEA_at; Start 116; Stop 140
ggttgcgttgcatccttctcataga

SEQ ID NO: 154399 - DNA, 25 bp, Artificial
  probe
  misc_feature (1)..(25): SEQ ID NO: 7484; WAN024DEA_at; Start 81; Stop 105
cagtaatcaattttgttatggaagc

SEQ ID NO: 154400 - DNA, 25 bp, Artificial
  probe
  misc_feature (1)..(25): SEQ ID NO: 7484; WAN024DEA_at; Start 101; Stop 125
gaagcaatttcgacaggttgcgttg

SEQ ID NO: 154401 - DNA, 25 bp, Artificial
  probe
  misc_feature (1)..(25): SEQ ID NO: 7484; WAN024DEA_at; Start 15; Stop 39
cagaaatatctacaggagtggagag

SEQ ID NO: 154402 - DNA, 25 bp, Artificial
  probe
  misc_feature (1)..(25): SEQ ID NO: 7484; WAN024DEA_at; Start 66; Stop 90
catagaccagataaacagtaatcaa

SEQ ID NO: 154403 - DNA, 25 bp, Artificial
  probe
  misc_feature (1)..(25): SEQ ID NO: 7484; WAN024DEA_at; Start 126; Stop 150
catccttctcatagagaattttacc

SEQ ID NO: 154404 - DNA, 25 bp, Artificial
  probe
  misc_feature (1)..(25): SEQ ID NO: 7484; WAN024DEA_at; Start 106; Stop 130
aatttcgacaggttgcgttgcatcc

SEQ ID NO: 154405 - DNA, 25 bp, Artificial
  probe
  misc_feature (1)..(25): SEQ ID NO: 7484; WAN024DEA_at; Start 180; Stop 204
tagcggcaatggtaaaatcttgagc

SEQ ID NO: 154406 - DNA, 25 bp, Artificial
  probe
  misc_feature (1)..(25): SEQ ID NO: 7484; WAN024DEA_at; Start 192; Stop 216
taaaatcttgagcaacagcagtaga

SEQ ID NO: 154407 - DNA, 25 bp, Artificial
  probe
  misc_feature (1)..(25): SEQ ID NO: 7484; WAN024DEA_at; Start 183; Stop 207
cggcaatggtaaaatcttgagcaac

SEQ ID NO: 154408 - DNA, 25 bp, Artificial
  probe
  misc_feature (1)..(25): SEQ ID NO: 7484; WAN024DEA_at; Start 45; Stop 69
tacttccgttttccaaagcttcata

SEQ ID NO: 154409 - DNA, 25 bp, Artificial
  probe
  misc_feature (1)..(25): SEQ ID NO: 7484; WAN024DEA_at; Start 189; Stop 213
tggtaaaatcttgagcaacagcagt

SEQ ID NO: 154410 - DNA, 25 bp, Artificial
  probe
  misc_feature (1)..(25): SEQ ID NO: 7484; WAN024DEA_at; Start 8; Stop 32
ggataatcagaaatatctacaggag

SEQ ID NO: 154411 - DNA, 25 bp, Artificial
  probe
  misc_feature (1)..(25): SEQ ID NO: 7484; WAN024DEA_at; Start 119; Stop 143
tgcgttgcatccttctcatagagaa

SEQ ID NO: 154412 - DNA, 25 bp, Artificial
  probe
  misc_feature (1)..(25): SEQ ID NO: 7484; WAN024DEA_at; Start 174; Stop 198
catgtttagcggcaatggtaaaatc

SEQ ID NO: 154413 - DNA, 25 bp, Artificial
  probe
  misc_feature (1)..(25): SEQ ID NO: 7484; WAN024DEA_at; Start 18; Stop 42
aaatatctacaggagtggagagggt

SEQ ID NO: 154414 - DNA, 25 bp, Artificial
  probe
  misc_feature (1)..(25): SEQ ID NO: 7484; WAN024DEA_at; Start 168; Stop 192
caatcgcatgtttagcggcaatggt

SEQ ID NO: 154415 - DNA, 25 bp, Artificial
  probe
  misc_feature (1)..(25): SEQ ID NO: 7484; WAN024DEA_at; Start 153; Stop 177
tatttgcctcaacagcaatcgcatg

SEQ ID NO: 154416 - DNA, 25 bp, Artificial
  probe
  misc_feature (1)..(25): SEQ ID NO: 7484; WAN024DEA_at; Start 164; Stop 188
acagcaatcgcatgtttagcggcaa

SEQ ID NO: 154417 - DNA, 25 bp, Artificial
  probe
  misc_feature (1)..(25): SEQ ID NO: 7484; WAN024DEA_at; Start 195; Stop 219
aatcttgagcaacagcagtagaagc

SEQ ID NO: 154418 - DNA, 25 bp, Artificial
  probe
  misc_feature (1)..(25): SEQ ID NO: 7484; WAN024DEA_at; Start 141; Stop 165
gaattttaccagtatttgcctcaac

SEQ ID NO: 154419 - DNA, 25 bp, Artificial
  probe
  misc_feature (1)..(25): SEQ ID NO: 7484; WAN024DEA_at; Start 200; Stop 224
tgagcaacagcagtagaagcacccc

SEQ ID NO: 154420 - DNA, 25 bp, Artificial
  probe
  misc_feature (1)..(25): SEQ ID NO: 617; WAN024DEB_at; Start 785; Stop 809
tcacagttgttttaaatgcagatca

SEQ ID NO: 154421 - DNA, 25 bp, Artificial
  probe
  misc_feature (1)..(25): SEQ ID NO: 617; WAN024DEB_at; Start 397; Stop 421
ggctcagaaaaagatttcgtcgata

SEQ ID NO: 154422 - DNA, 25 bp, Artificial
  probe
  misc_feature (1)..(25): SEQ ID NO: 617; WAN024DEB_at; Start 685; Stop 709
cctgcttaccgtggtggttttgatg

SEQ ID NO: 154423 - DNA, 25 bp, Artificial
  probe
  misc_feature (1)..(25): SEQ ID NO: 617; WAN024DEB_at; Start 762; Stop 786
tgtcgaaaaaggcatgagagtcatc

SEQ ID NO: 154424 - DNA, 25 bp, Artificial
  probe
  misc_feature (1)..(25): SEQ ID NO: 617; WAN024DEB_at; Start 337; Stop 361
gaagcaactctggtatctagtgcca

SEQ ID NO: 154425 - DNA, 25 bp, Artificial
  probe
  misc_feature (1)..(25): SEQ ID NO: 617; WAN024DEB_at; Start 1196; Stop 1220
aagtttggtggaatcagtttgtccg

SEQ ID NO: 154426 - DNA, 25 bp, Artificial
  probe
  misc_feature (1)..(25): SEQ ID NO: 617; WAN024DEB_at; Start 725; Stop 749
caacagataaggctggagagtcttt

SEQ ID NO: 154427 - DNA, 25 bp, Artificial
  probe
  misc_feature (1)..(25): SEQ ID NO: 617; WAN024DEB_at; Start 851; Stop 875
ccctaatggattatatttcttctac

SEQ ID NO: 154428 - DNA, 25 bp, Artificial
  probe
  misc_feature (1)..(25): SEQ ID NO: 617; WAN024DEB_at; Start 650; Stop 674
caatcacttcaaccaactacatgtt

SEQ ID NO: 154429 - DNA, 25 bp, Artificial
  probe
  misc_feature (1)..(25): SEQ ID NO: 617; WAN024DEB_at; Start 393; Stop 417
tgctggctcagaaaaagatttcgtc

SEQ ID NO: 154430 - DNA, 25 bp, Artificial
  probe
  misc_feature (1)..(25): SEQ ID NO: 617; WAN024DEB_at; Start 809; Stop 833
atcaagacaataatccttacgctcg

SEQ ID NO: 154431 - DNA, 25 bp, Artificial
  probe
  misc_feature (1)..(25): SEQ ID NO: 617; WAN024DEB_at; Start 716; Stop 740
aaacaggaacaacagataaggctgg

SEQ ID NO: 154432 - DNA, 25 bp, Artificial
  probe
  misc_feature (1)..(25): SEQ ID NO: 617; WAN024DEB_at; Start 270; Stop 294
gacgacaaattctgaagccagtaat

SEQ ID NO: 154433 - DNA, 25 bp, Artificial
  probe
  misc_feature (1)..(25): SEQ ID NO: 617; WAN024DEB_at; Start 352; Stop 376
tctagtgccaacagcgccgctattg

SEQ ID NO: 154434 - DNA, 25 bp, Artificial
  probe
  misc_feature (1)..(25): SEQ ID NO: 617; WAN024DEB_at; Start 772; Stop 796
ggcatgagagtcatcacagttgttt

SEQ ID NO: 154435 - DNA, 25 bp, Artificial
  probe
  misc_feature (1)..(25): SEQ ID NO: 617; WAN024DEB_at; Start 801; Stop 825
tgcagatcatcaagacaataatcct

SEQ ID NO: 154436 - DNA, 25 bp, Artificial
  probe
  misc_feature (1)..(25): SEQ ID NO: 617; WAN024DEB_at; Start 1136; Stop 1160
cagagcgccctagtttcgaaatggt

SEQ ID NO: 154437 - DNA, 25 bp, Artificial
  probe
  misc_feature (1)..(25): SEQ ID NO: 617; WAN024DEB_at; Start 864; Stop 888
tatttcttctacatttacacttcgc

SEQ ID NO: 154438 - DNA, 25 bp, Artificial
  probe
  misc_feature (1)..(25): SEQ ID NO: 617; WAN024DEB_at; Start 266; Stop 290
aattgacgacaaattctgaagccag

SEQ ID NO: 154439 - DNA, 25 bp, Artificial
  probe
  misc_feature (1)..(25): SEQ ID NO: 617; WAN024DEB_at; Start 378; Stop 402
cctagctgagaaaattgctggctca

SEQ ID NO: 154440 - DNA, 25 bp, Artificial
  probe
  misc_feature (1)..(25): SEQ ID NO: 617; WAN024DEB_at; Start 253; Stop 277
gattatccttatcaattgacgacaa

SEQ ID NO: 154441 - DNA, 25 bp, Artificial
  probe
  misc_feature (1)..(25): SEQ ID NO: 617; WAN024DEB_at; Start 662; Stop 686
ccaactacatgttagaaggtatgcc

SEQ ID NO: 154442 - DNA, 25 bp, Artificial
  probe
  misc_feature (1)..(25): SEQ ID NO: 617; WAN024DEB_at; Start 968; Stop 992
tggctccagaggatatctatctaat

SEQ ID NO: 154443 - DNA, 25 bp, Artificial
  probe
  misc_feature (1)..(25): SEQ ID NO: 617; WAN024DEB_at; Start 674; Stop 698
tagaaggtatgcctgcttaccgtgg

SEQ ID NO: 154444 - DNA, 25 bp, Artificial
  probe
  misc_feature (1)..(25): SEQ ID NO: 617; WAN024DEB_at; Start 578; Stop 602
gcaacctcatcaaaaaatacccaca

SEQ ID NO: 154445 - DNA, 25 bp, Artificial
  probe
  misc_feature (1)..(25): SEQ ID NO: 617; WAN024DEB_at; Start 753; Stop 777
tggtactactgtcgaaaaaggcatg

SEQ ID NO: 154446 - DNA, 25 bp, Artificial
  probe
  misc_feature (1)..(25): SEQ ID NO: 617; WAN024DEB_at; Start 364; Stop 388
agcgccgctattgccctagctgaga

SEQ ID NO: 154447 - DNA, 25 bp, Artificial
  probe
  misc_feature (1)..(25): SEQ ID NO: 617; WAN024DEB_at; Start 1117; Stop 1141
ggtcaaggttacatcaccacagagc

SEQ ID NO: 154448 - DNA, 25 bp, Artificial
  probe
  misc_feature (1)..(25): SEQ ID NO: 617; WAN024DEB_at; Start 901; Stop 925
caaggcgatgcctatcaagatagca

SEQ ID NO: 154449 - DNA, 25 bp, Artificial
  probe
  misc_feature (1)..(25): SEQ ID NO: 617; WAN024DEB_at; Start 372; Stop 396
tattgccctagctgagaaaattgct

SEQ ID NO: 154450 - DNA, 25 bp, Artificial
  probe
  misc_feature (1)..(25): SEQ ID NO: 617; WAN024DEB_at; Start 1121; Stop 1145
aaggttacatcaccacagagcgccc

SEQ ID NO: 154451 - DNA, 25 bp, Artificial
  probe
  misc_feature (1)..(25): SEQ ID NO: 617; WAN024DEB_at; Start 345; Stop 369
tctggtatctagtgccaacagcgcc

SEQ ID NO: 154452 - DNA, 25 bp, Artificial
  probe
  misc_feature (1)..(25): SEQ ID NO: 617; WAN024DEB_at; Start 737; Stop 761
ctggagagtcttttgttggtactac

SEQ ID NO: 154453 - DNA, 25 bp, Artificial
  probe
  misc_feature (1)..(25): SEQ ID NO: 617; WAN024DEB_at; Start 963; Stop 987
tgcagtggctccagaggatatctat

SEQ ID NO: 154454 - DNA, 25 bp, Artificial
  probe
  misc_feature (1)..(25): SEQ ID NO: 6282; WAN024DEC_at; Start 241; Stop 265
gaagatgctatgaatcgttctgcca

SEQ ID NO: 154455 - DNA, 25 bp, Artificial
  probe
  misc_feature (1)..(25): SEQ ID NO: 6282; WAN024DEC_at; Start 1653; Stop 1677
tgctcgtgctaaagaacaccatcgt

SEQ ID NO: 154456 - DNA, 25 bp, Artificial
  probe
  misc_feature (1)..(25): SEQ ID NO: 6282; WAN024DEC_at; Start 3572; Stop 3596
tagatcatgtagaagcagacgccgt

SEQ ID NO: 154457 - DNA, 25 bp, Artificial
  probe
  misc_feature (1)..(25): SEQ ID NO: 6282; WAN024DEC_at; Start 2995; Stop 3019
gacttctggtcacgtttagcattgc

SEQ ID NO: 154458 - DNA, 25 bp, Artificial
  probe
  misc_feature (1)..(25): SEQ ID NO: 6282; WAN024DEC_at; Start 1291; Stop 1315
tggaaaggactagtcgaacgtgcgt

SEQ ID NO: 154459 - DNA, 25 bp, Artificial
  probe
  misc_feature (1)..(25): SEQ ID NO: 6282; WAN024DEC_at; Start 445; Stop 469
cgtggtcaaggttctgaaacgtcta

SEQ ID NO: 154460 - DNA, 25 bp, Artificial
  probe
  misc_feature (1)..(25): SEQ ID NO: 6282; WAN024DEC_at; Start 1365; Stop 1389
ttattggacacaaaacagtggtgac

SEQ ID NO: 154461 - DNA, 25 bp, Artificial
  probe
  misc_feature (1)..(25): SEQ ID NO: 6282; WAN024DEC_at; Start 1451; Stop 1475
tagaaagtcctgttgaagtcggcgg

SEQ ID NO: 154462 - DNA, 25 bp, Artificial
  probe
  misc_feature (1)..(25): SEQ ID NO: 6282; WAN024DEC_at; Start 934; Stop 958
gacggcgactttagaggtacattga

SEQ ID NO: 154463 - DNA, 25 bp, Artificial
  probe
  misc_feature (1)..(25): SEQ ID NO: 6282; WAN024DEC_at; Start 3401; Stop 3425
aaactccgtcaagtattggtcacca

SEQ ID NO: 154464 - DNA, 25 bp, Artificial
  probe
  misc_feature (1)..(25): SEQ ID NO: 6282; WAN024DEC_at; Start 918; Stop 942
taagaaatggtatgttgacggcgac

SEQ ID NO: 154465 - DNA, 25 bp, Artificial
  probe
  misc_feature (1)..(25): SEQ ID NO: 6282; WAN024DEC_at; Start 3041; Stop 3065
tcaagagtgagaatagggtaccaac

SEQ ID NO: 154466 - DNA, 25 bp, Artificial
  probe
  misc_feature (1)..(25): SEQ ID NO: 6282; WAN024DEC_at; Start 468; Stop 492
taaactggatgaaagacctctgcgt

SEQ ID NO: 154467 - DNA, 25 bp, Artificial
  probe
  misc_feature (1)..(25): SEQ ID NO: 6282; WAN024DEC_at; Start 3681; Stop 3705
taacttagtagcaccgcaccaatgg

SEQ ID NO: 154468 - DNA, 25 bp, Artificial
  probe
  misc_feature (1)..(25): SEQ ID NO: 6282; WAN024DEC_at; Start 979; Stop 1003
tatactatccacaacacggagcgtc

SEQ ID NO: 154469 - DNA, 25 bp, Artificial
  probe
  misc_feature (1)..(25): SEQ ID NO: 6282; WAN024DEC_at; Start 3061; Stop 3085
ccaactcctgtgtgggataaccaaa

SEQ ID NO: 154470 - DNA, 25 bp, Artificial
  probe
  misc_feature (1)..(25): SEQ ID NO: 6282; WAN024DEC_at; Start 1091; Stop 1115
caccgattgctgacactattaaagg

SEQ ID NO: 154471 - DNA, 25 bp, Artificial
  probe
  misc_feature (1)..(25): SEQ ID NO: 6282; WAN024DEC_at; Start 1191; Stop 1215
gattgacaaccaaggtacactcaga

SEQ ID NO: 154472 - DNA, 25 bp, Artificial
  probe
  misc_feature (1)..(25): SEQ ID NO: 6282; WAN024DEC_at; Start 3586; Stop 3610
gcagacgccgtacttccacaattga

SEQ ID NO: 154473 - DNA, 25 bp, Artificial
  probe
  misc_feature (1)..(25): SEQ ID NO: 6282; WAN024DEC_at; Start 3011; Stop 3035
tagcattgccaagcgtacgtgacca

SEQ ID NO: 154474 - DNA, 25 bp, Artificial
  probe
  misc_feature (1)..(25): SEQ ID NO: 6282; WAN024DEC_at; Start 2707; Stop 2731
gattggttcatccatgcagctaaga

SEQ ID NO: 154475 - DNA, 25 bp, Artificial
  probe
  misc_feature (1)..(25): SEQ ID NO: 6282; WAN024DEC_at; Start 2092; Stop 2116
tataccatcgctggacaaaacgttg

SEQ ID NO: 154476 - DNA, 25 bp, Artificial
  probe
  misc_feature (1)..(25): SEQ ID NO: 6282; WAN024DEC_at; Start 4202; Stop 4226
tcgacaaagctgtcacagaagacct

SEQ ID NO: 154477 - DNA, 25 bp, Artificial
  probe
  misc_feature (1)..(25): SEQ ID NO: 6282; WAN024DEC_at; Start 2041; Stop 2065
gaaatggacgtcactaagaatgctg

SEQ ID NO: 154478 - DNA, 25 bp, Artificial
  probe
  misc_feature (1)..(25): SEQ ID NO: 6282; WAN024DEC_at; Start 3499; Stop 3523
gaccctgataagcttcaaactcgtg

SEQ ID NO: 154479 - DNA, 25 bp, Artificial
  probe
  misc_feature (1)..(25): SEQ ID NO: 6282; WAN024DEC_at; Start 2216; Stop 2240
ctttgatggatgcacgtaagaaacc

SEQ ID NO: 154480 - DNA, 25 bp, Artificial
  probe
  misc_feature (1)..(25): SEQ ID NO: 6282; WAN024DEC_at; Start 4219; Stop 4243
gaagacctcaagaaagctggaaact

SEQ ID NO: 154481 - DNA, 25 bp, Artificial
  probe
  misc_feature (1)..(25): SEQ ID NO: 6282; WAN024DEC_at; Start 632; Stop 656
tcactagtcgcgataataaggtaac

SEQ ID NO: 154482 - DNA, 25 bp, Artificial
  probe
  misc_feature (1)..(25): SEQ ID NO: 6282; WAN024DEC_at; Start 1062; Stop 1086
tatcaatatgccatgggcagaccgc

SEQ ID NO: 154483 - DNA, 25 bp, Artificial
  probe
  misc_feature (1)..(25): SEQ ID NO: 6282; WAN024DEC_at; Start 1392; Stop 1416
tcataaagttggtgtcgaaggtgca

SEQ ID NO: 154484 - DNA, 25 bp, Artificial
  probe
  misc_feature (1)..(25): SEQ ID NO: 6282; WAN024DEC_at; Start 2169; Stop 2193
caaagataagttggcgtcagttcaa

SEQ ID NO: 154485 - DNA, 25 bp, Artificial
  probe
  misc_feature (1)..(25): SEQ ID NO: 6282; WAN024DEC_at; Start 3697; Stop 3721
caccaatgggacaacgttcgtgact

SEQ ID NO: 154486 - DNA, 25 bp, Artificial
  probe
  misc_feature (1)..(25): SEQ ID NO: 6282; WAN024DEC_at; Start 1332; Stop 1356
tattggcaagaaagccaaggctgct

SEQ ID NO: 154487 - DNA, 25 bp, Artificial
  probe
  misc_feature (1)..(25): SEQ ID NO: 6282; WAN024DEC_at; Start 3126; Stop 3150
tgagaagaaagtaccaattgcgcca

SEQ ID NO: 154488 - DNA, 25 bp, Artificial
  probe
  misc_feature (1)..(25): SEQ ID NO: 7187; WAN024DED_at; Start 410; Stop 434
tagagaccactatgacctatgaccg

SEQ ID NO: 154489 - DNA, 25 bp, Artificial
  probe
  misc_feature (1)..(25): SEQ ID NO: 7187; WAN024DED_at; Start 3075; Stop 3099
caatggttctcctgtaggtcgtcga

SEQ ID NO: 154490 - DNA, 25 bp, Artificial
  probe
  misc_feature (1)..(25): SEQ ID NO: 7187; WAN024DED_at; Start 2581; Stop 2605
cggactcaggatgcttaccgtgaaa

SEQ ID NO: 154491 - DNA, 25 bp, Artificial
  probe
  misc_feature (1)..(25): SEQ ID NO: 7187; WAN024DED_at; Start 1056; Stop 1080
tatgccttgggctgacggaatagca

SEQ ID NO: 154492 - DNA, 25 bp, Artificial
  probe
  misc_feature (1)..(25): SEQ ID NO: 7187; WAN024DED_at; Start 3039; Stop 3063
tatggtaccgacaccagtttgggat

SEQ ID NO: 154493 - DNA, 25 bp, Artificial
  probe
  misc_feature (1)..(25): SEQ ID NO: 7187; WAN024DED_at; Start 2220; Stop 2244
taaacctgcagagaatacggatgaa

SEQ ID NO: 154494 - DNA, 25 bp, Artificial
  probe
  misc_feature (1)..(25): SEQ ID NO: 7187; WAN024DED_at; Start 2204; Stop 2228
taatgagtagacgtgataaacctgc

SEQ ID NO: 154495 - DNA, 25 bp, Artificial
  probe
  misc_feature (1)..(25): SEQ ID NO: 7187; WAN024DED_at; Start 2901; Stop 2925
tggaaaacatacagaagaagctcgt

SEQ ID NO: 154496 - DNA, 25 bp, Artificial
  probe
  misc_feature (1)..(25): SEQ ID NO: 7187; WAN024DED_at; Start 3415; Stop 3439
tacggcgcacttggaattaacatgg

SEQ ID NO: 154497 - DNA, 25 bp, Artificial
  probe
  misc_feature (1)..(25): SEQ ID NO: 7187; WAN024DED_at; Start 1610; Stop 1634
tcaaaggtgtcagttcaggtaagca

SEQ ID NO: 154498 - DNA, 25 bp, Artificial
  probe
  misc_feature (1)..(25): SEQ ID NO: 7187; WAN024DED_at; Start 3398; Stop 3422
caacgactaatggtgaatacggcgc

SEQ ID NO: 154499 - DNA, 25 bp, Artificial
  probe
  misc_feature (1)..(25): SEQ ID NO: 7187; WAN024DED_at; Start 2350; Stop 2374
caattgaatggtgatgaagctgcga

SEQ ID NO: 154500 - DNA, 25 bp, Artificial
  probe
  misc_feature (1)..(25): SEQ ID NO: 7187; WAN024DED_at; Start 3328; Stop 3352
ggtcataagcatcgtcaaggtacag

SEQ ID NO: 154501 - DNA, 25 bp, Artificial
  probe
  misc_feature (1)..(25): SEQ ID NO: 7187; WAN024DED_at; Start 3996; Stop 4020
caaccacggtttactaagcgataag

SEQ ID NO: 154502 - DNA, 25 bp, Artificial
  probe
  misc_feature (1)..(25): SEQ ID NO: 7187; WAN024DED_at; Start 1245; Stop 1269
tcaatatatggctggcattgccggt

SEQ ID NO: 154503 - DNA, 25 bp, Artificial
  probe
  misc_feature (1)..(25): SEQ ID NO: 7187; WAN024DED_at; Start 230; Stop 254
caaatgtattaaaccgatccgcaac

SEQ ID NO: 154504 - DNA, 25 bp, Artificial
  probe
  misc_feature (1)..(25): SEQ ID NO: 7187; WAN024DED_at; Start 923; Stop 947
caggtacgtttaagggacatctatc

SEQ ID NO: 154505 - DNA, 25 bp, Artificial
  probe
  misc_feature (1)..(25): SEQ ID NO: 7187; WAN024DED_at; Start 3142; Stop 3166
ttatatggtccaacatggcgacacc

SEQ ID NO: 154506 - DNA, 25 bp, Artificial
  probe
  misc_feature (1)..(25): SEQ ID NO: 7187; WAN024DED_at; Start 2692; Stop 2716
gattggtttatccactcagctaaga

SEQ ID NO: 154507 - DNA, 25 bp, Artificial
  probe
  misc_feature (1)..(25): SEQ ID NO: 7187; WAN024DED_at; Start 1311; Stop 1335
tgatattgttgctaacagagcccgt

SEQ ID NO: 154508 - DNA, 25 bp, Artificial
  probe
  misc_feature (1)..(25): SEQ ID NO: 7187; WAN024DED_at; Start 1287; Stop 1311
tcttgcaaaagcatatgtcgaggct

SEQ ID NO: 154509 - DNA, 25 bp, Artificial
  probe
  misc_feature (1)..(25): SEQ ID NO: 7187; WAN024DED_at; Start 2864; Stop 2888
catataacacgatggcgtacagttc

SEQ ID NO: 154510 - DNA, 25 bp, Artificial
  probe
  misc_feature (1)..(25): SEQ ID NO: 7187; WAN024DED_at; Start 3161; Stop 3185
gacaccatgatagagactggcgtat

SEQ ID NO: 154511 - DNA, 25 bp, Artificial
  probe
  misc_feature (1)..(25): SEQ ID NO: 7187; WAN024DED_at; Start 1404; Stop 1428
tcgtaaatcagtcaccaaaggaacc

SEQ ID NO: 154512 - DNA, 25 bp, Artificial
  probe
  misc_feature (1)..(25): SEQ ID NO: 7187; WAN024DED_at; Start 1578; Stop 1602
cacaaatggctggttagagcgtaac

SEQ ID NO: 154513 - DNA, 25 bp, Artificial
  probe
  misc_feature (1)..(25): SEQ ID NO: 7187; WAN024DED_at; Start 2047; Stop 2071
gattctaaagtccaacaagtgcgtg

SEQ ID NO: 154514 - DNA, 25 bp, Artificial
  probe
  misc_feature (1)..(25): SEQ ID NO: 7187; WAN024DED_at; Start 3494; Stop 3518
taaagacacgtgatgacattgaccg

SEQ ID NO: 154515 - DNA, 25 bp, Artificial
  probe
  misc_feature (1)..(25): SEQ ID NO: 7187; WAN024DED_at; Start 429; Stop 453
tgaccgtggcaagggagaagaaact

SEQ ID NO: 154516 - DNA, 25 bp, Artificial
  probe
  misc_feature (1)..(25): SEQ ID NO: 7187; WAN024DED_at; Start 1550; Stop 1574
ccgatttggactacgatggtggtta

SEQ ID NO: 154517 - DNA, 25 bp, Artificial
  probe
  misc_feature (1)..(25): SEQ ID NO: 7187; WAN024DED_at; Start 3510; Stop 3534
cattgaccgctacatgagaaactac

SEQ ID NO: 154518 - DNA, 25 bp, Artificial
  probe
  misc_feature (1)..(25): SEQ ID NO: 7187; WAN024DED_at; Start 3115; Stop 3139
ggtaaccctatagctccaattcgtg

SEQ ID NO: 154519 - DNA, 25 bp, Artificial
  probe
  misc_feature (1)..(25): SEQ ID NO: 7187; WAN024DED_at; Start 3180; Stop 3204
gcgtatgggcgctatggcatcaata

SEQ ID NO: 154520 - DNA, 25 bp, Artificial
  probe
  misc_feature (1)..(25): SEQ ID NO: 7187; WAN024DED_at; Start 697; Stop 721
tataaaatcactgccgaagctcaag

SEQ ID NO: 154521 - DNA, 25 bp, Artificial
  probe
  misc_feature (1)..(25): SEQ ID NO: 7187; WAN024DED_at; Start 3239; Stop 3263
ttatggtgacggatatgattagccc

SEQ ID NO: 154522 - DNA, 25 bp, Artificial
  probe
  misc_feature (1)..(25): SEQ ID NO: 6275; WAN024DEE_at; Start 2949; Stop 2973
taaggtagcgacaccaattcgtgag

SEQ ID NO: 154523 - DNA, 25 bp, Artificial
  probe
  misc_feature (1)..(25): SEQ ID NO: 6275; WAN024DEE_at; Start 3572; Stop 3596
taataacgaaacatggtgctcctgg

SEQ ID NO: 154524 - DNA, 25 bp, Artificial
  probe
  misc_feature (1)..(25): SEQ ID NO: 6275; WAN024DEE_at; Start 564; Stop 588
gtacaaagtggtagctaaagctcct

SEQ ID NO: 154525 - DNA, 25 bp, Artificial
  probe
  misc_feature (1)..(25): SEQ ID NO: 6275; WAN024DEE_at; Start 924; Stop 948
tatgccttgggctgatcaaattgca

SEQ ID NO: 154526 - DNA, 25 bp, Artificial
  probe
  misc_feature (1)..(25): SEQ ID NO: 6275; WAN024DEE_at; Start 3671; Stop 3695
gaaatacaagtacaggtgcaccggg

SEQ ID NO: 154527 - DNA, 25 bp, Artificial
  probe
  misc_feature (1)..(25): SEQ ID NO: 6275; WAN024DEE_at; Start 2521; Stop 2545
gactggtttatccattcagcgaaaa

SEQ ID NO: 154528 - DNA, 25 bp, Artificial
  probe
  misc_feature (1)..(25): SEQ ID NO: 6275; WAN024DEE_at; Start 3609; Stop 3633
taatccaacggactttaggtctgct

SEQ ID NO: 154529 - DNA, 25 bp, Artificial
  probe
  misc_feature (1)..(25): SEQ ID NO: 6275; WAN024DEE_at; Start 835; Stop 859
tatacgattcacaatactgcgcgcc

SEQ ID NO: 154530 - DNA, 25 bp, Artificial
  probe
  misc_feature (1)..(25): SEQ ID NO: 6275; WAN024DEE_at; Start 288; Stop 312
cacaaccatggtctataatcgaggc

SEQ ID NO: 154531 - DNA, 25 bp, Artificial
  probe
  misc_feature (1)..(25): SEQ ID NO: 6275; WAN024DEE_at; Start 451; Stop 475
gaaaaaccgacagacgttgctccac

SEQ ID NO: 154532 - DNA, 25 bp, Artificial
  probe
  misc_feature (1)..(25): SEQ ID NO: 6275; WAN024DEE_at; Start 993; Stop 1017
taaagtcaaaggtaatgtgctcggc

SEQ ID NO: 154533 - DNA, 25 bp, Artificial
  probe
  misc_feature (1)..(25): SEQ ID NO: 6275; WAN024DEE_at; Start 1572; Stop 1596
taaagaattgggtatcacagcagat

SEQ ID NO: 154534 - DNA, 25 bp, Artificial
  probe
  misc_feature (1)..(25): SEQ ID NO: 6275; WAN024DEE_at; Start 3432; Stop 3456
tacgagtcgctggttcaagaaaatg

SEQ ID NO: 154535 - DNA, 25 bp, Artificial
  probe
  misc_feature (1)..(25): SEQ ID NO: 6275; WAN024DEE_at; Start 1219; Stop 1243
tcttattggtcgcaaaatagcggag

SEQ ID NO: 154536 - DNA, 25 bp, Artificial
  probe
  misc_feature (1)..(25): SEQ ID NO: 6275; WAN024DEE_at; Start 2179; Stop 2203
cagttaaatagtgatgaggcagcca

SEQ ID NO: 154537 - DNA, 25 bp, Artificial
  probe
  misc_feature (1)..(25): SEQ ID NO: 6275; WAN024DEE_at; Start 956; Stop 980
caaatgtgatcaaaggtggtagcct

SEQ ID NO: 154538 - DNA, 25 bp, Artificial
  probe
  misc_feature (1)..(25): SEQ ID NO: 6275; WAN024DEE_at; Start 3418; Stop 3442
cagttaaatggaaatacgagtcgct

SEQ ID NO: 154539 - DNA, 25 bp, Artificial
  probe
  misc_feature (1)..(25): SEQ ID NO: 6275; WAN024DEE_at; Start 1008; Stop 1032
tgtgctcggcagaaactgggtatct

SEQ ID NO: 154540 - DNA, 25 bp, Artificial
  probe
  misc_feature (1)..(25): SEQ ID NO: 6275; WAN024DEE_at; Start 2736; Stop 2760
aaatacggaagctgaacgtgaagcg

SEQ ID NO: 154541 - DNA, 25 bp, Artificial
  probe
  misc_feature (1)..(25): SEQ ID NO: 6275; WAN024DEE_at; Start 3461; Stop 3485
gacaataccgtagtggaaattcagg

SEQ ID NO: 154542 - DNA, 25 bp, Artificial
  probe
  misc_feature (1)..(25): SEQ ID NO: 6275; WAN024DEE_at; Start 1188; Stop 1212
taaaggtaagcgagctaaagctgct

SEQ ID NO: 154543 - DNA, 25 bp, Artificial
  probe
  misc_feature (1)..(25): SEQ ID NO: 6275; WAN024DEE_at; Start 2052; Stop 2076
tcttgaatctcctgaagttcgtgcg

SEQ ID NO: 154544 - DNA, 25 bp, Artificial
  probe
  misc_feature (1)..(25): SEQ ID NO: 6275; WAN024DEE_at; Start 724; Stop 748
ggtacattcaaactaggtgcagatc

SEQ ID NO: 154545 - DNA, 25 bp, Artificial
  probe
  misc_feature (1)..(25): SEQ ID NO: 6275; WAN024DEE_at; Start 1866; Stop 1890
tatgattcactatgcggatggtaca

SEQ ID NO: 154546 - DNA, 25 bp, Artificial
  probe
  misc_feature (1)..(25): SEQ ID NO: 6275; WAN024DEE_at; Start 1985; Stop 2009
caaatatggtggttaaagaccgtgc

SEQ ID NO: 154547 - DNA, 25 bp, Artificial
  probe
  misc_feature (1)..(25): SEQ ID NO: 6275; WAN024DEE_at; Start 750; Stop 774
taatgcagcgaatactccaactcca

SEQ ID NO: 154548 - DNA, 25 bp, Artificial
  probe
  misc_feature (1)..(25): SEQ ID NO: 6275; WAN024DEE_at; Start 2194; Stop 2218
gaggcagccatcaaagcatttctta

SEQ ID NO: 154549 - DNA, 25 bp, Artificial
  probe
  misc_feature (1)..(25): SEQ ID NO: 6275; WAN024DEE_at; Start 2975; Stop 2999
tatttggtccaacagacagatggca

SEQ ID NO: 154550 - DNA, 25 bp, Artificial
  probe
  misc_feature (1)..(25): SEQ ID NO: 6275; WAN024DEE_at; Start 2910; Stop 2934
tattaaggatgctaatcgtcgtgga

SEQ ID NO: 154551 - DNA, 25 bp, Artificial
  probe
  misc_feature (1)..(25): SEQ ID NO: 6275; WAN024DEE_at; Start 3153; Stop 3177
tcttggtggtcatggacatcgtcca

SEQ ID NO: 154552 - DNA, 25 bp, Artificial
  probe
  misc_feature (1)..(25): SEQ ID NO: 6275; WAN024DEE_at; Start 303; Stop 327
taatcgaggcgaaggcgaagaaact

SEQ ID NO: 154553 - DNA, 25 bp, Artificial
  probe
  misc_feature (1)..(25): SEQ ID NO: 6275; WAN024DEE_at; Start 3289; Stop 3313
gacggaaatcagtggtataacccag

SEQ ID NO: 154554 - DNA, 25 bp, Artificial
  probe
  misc_feature (1)..(25): SEQ ID NO: 6275; WAN024DEE_at; Start 3687; Stop 3711
tgcaccgggtgcagcatcatttaaa

SEQ ID NO: 154555 - DNA, 25 bp, Artificial
  probe
  misc_feature (1)..(25): SEQ ID NO: 6275; WAN024DEE_at; Start 1427; Stop 1451
tcgataccgatccatattacacagg

SEQ ID NO: 154556 - DNA, 25 bp, Artificial
  probe
  misc_feature (1)..(25): SEQ ID NO: 7560; WAN024DEF_at; Start 131; Stop 155
caataggtgcaactttatcagccca

SEQ ID NO: 154557 - DNA, 25 bp, Artificial
  probe
  misc_feature (1)..(25): SEQ ID NO: 7560; WAN024DEF_at; Start 21; Stop 45
gcgcatattagcttcgtctaactta

SEQ ID NO: 154558 - DNA, 25 bp, Artificial
  probe
  misc_feature (1)..(25): SEQ ID NO: 7560; WAN024DEF_at; Start 1; Stop 25
ttgccaataaaagctacattgcgca

SEQ ID NO: 154559 - DNA, 25 bp, Artificial
  probe
  misc_feature (1)..(25): SEQ ID NO: 7560; WAN024DEF_at; Start 90; Stop 114
tactttgatattctcaagtgtagac

SEQ ID NO: 154560 - DNA, 25 bp, Artificial
  probe
  misc_feature (1)..(25): SEQ ID NO: 7560; WAN024DEF_at; Start 101; Stop 125
tctcaagtgtagacttcttaaacat

SEQ ID NO: 154561 - DNA, 25 bp, Artificial
  probe
  misc_feature (1)..(25): SEQ ID NO: 7560; WAN024DEF_at; Start 158; Stop 182
gcatgtttatatttacattacctaa

SEQ ID NO: 154562 - DNA, 25 bp, Artificial
  probe
  misc_feature (1)..(25): SEQ ID NO: 7560; WAN024DEF_at; Start 185; Stop 209
taaagtttttgagtgtagcaccttc

SEQ ID NO: 154563 - DNA, 25 bp, Artificial
  probe
  misc_feature (1)..(25): SEQ ID NO: 7560; WAN024DEF_at; Start 116; Stop 140
tcttaaacatattaccaataggtgc

SEQ ID NO: 154564 - DNA, 25 bp, Artificial
  probe
  misc_feature (1)..(25): SEQ ID NO: 7560; WAN024DEF_at; Start 138; Stop 162
tgcaactttatcagcccaaggcatg

SEQ ID NO: 154565 - DNA, 25 bp, Artificial
  probe
  misc_feature (1)..(25): SEQ ID NO: 7560; WAN024DEF_at; Start 134; Stop 158
taggtgcaactttatcagcccaagg

SEQ ID NO: 154566 - DNA, 25 bp, Artificial
  probe
  misc_feature (1)..(25): SEQ ID NO: 7560; WAN024DEF_at; Start 202; Stop 226
gcaccttcagcctcattaaacaaag

SEQ ID NO: 154567 - DNA, 25 bp, Artificial
  probe
  misc_feature (1)..(25): SEQ ID NO: 7560; WAN024DEF_at; Start 128; Stop 152
taccaataggtgcaactttatcagc

SEQ ID NO: 154568 - DNA, 25 bp, Artificial
  probe
  misc_feature (1)..(25): SEQ ID NO: 7560; WAN024DEF_at; Start 15; Stop 39
tacattgcgcatattagcttcgtct

SEQ ID NO: 154569 - DNA, 25 bp, Artificial
  probe
  misc_feature (1)..(25): SEQ ID NO: 7560; WAN024DEF_at; Start 47; Stop 71
taacagcaccggttacatcgttatt

SEQ ID NO: 154570 - DNA, 25 bp, Artificial
  probe
  misc_feature (1)..(25): SEQ ID NO: 7560; WAN024DEF_at; Start 43; Stop 67
ttattaacagcaccggttacatcgt

SEQ ID NO: 154571 - DNA, 25 bp, Artificial
  probe
  misc_feature (1)..(25): SEQ ID NO: 7560; WAN024DEF_at; Start 96; Stop 120
gatattctcaagtgtagacttctta

SEQ ID NO: 154572 - DNA, 25 bp, Artificial
  probe
  misc_feature (1)..(25): SEQ ID NO: 7560; WAN024DEF_at; Start 34; Stop 58
tcgtctaacttattaacagcaccgg

SEQ ID NO: 154573 - DNA, 25 bp, Artificial
  probe
  misc_feature (1)..(25): SEQ ID NO: 7560; WAN024DEF_at; Start 39; Stop 63
taacttattaacagcaccggttaca

SEQ ID NO: 154574 - DNA, 25 bp, Artificial
  probe
  misc_feature (1)..(25): SEQ ID NO: 7560; WAN024DEF_at; Start 136; Stop 160
ggtgcaactttatcagcccaaggca

SEQ ID NO: 154575 - DNA, 25 bp, Artificial
  probe
  misc_feature (1)..(25): SEQ ID NO: 7560; WAN024DEF_at; Start 68; Stop 92
tatttcctgttactgaacccactac

SEQ ID NO: 154576 - DNA, 25 bp, Artificial
  probe
  misc_feature (1)..(25): SEQ ID NO: 7560; WAN024DEF_at; Start 82; Stop 106
gaacccactactttgatattctcaa

SEQ ID NO: 154577 - DNA, 25 bp, Artificial
  probe
  misc_feature (1)..(25): SEQ ID NO: 7560; WAN024DEF_at; Start 142; Stop 166
actttatcagcccaaggcatgttta

SEQ ID NO: 154578 - DNA, 25 bp, Artificial
  probe
  misc_feature (1)..(25): SEQ ID NO: 7560; WAN024DEF_at; Start 206; Stop 230
cttcagcctcattaaacaaaggtct

SEQ ID NO: 154579 - DNA, 25 bp, Artificial
  probe
  misc_feature (1)..(25): SEQ ID NO: 7560; WAN024DEF_at; Start 198; Stop 222
tgtagcaccttcagcctcattaaac

SEQ ID NO: 154580 - DNA, 25 bp, Artificial
  probe
  misc_feature (1)..(25): SEQ ID NO: 7560; WAN024DEF_at; Start 8; Stop 32
taaaagctacattgcgcatattagc

SEQ ID NO: 154581 - DNA, 25 bp, Artificial
  probe
  misc_feature (1)..(25): SEQ ID NO: 7560; WAN024DEF_at; Start 75; Stop 99
tgttactgaacccactactttgata

SEQ ID NO: 154582 - DNA, 25 bp, Artificial
  probe
  misc_feature (1)..(25): SEQ ID NO: 7560; WAN024DEF_at; Start 195; Stop 219
gagtgtagcaccttcagcctcatta

SEQ ID NO: 154583 - DNA, 25 bp, Artificial
  probe
  misc_feature (1)..(25): SEQ ID NO: 7560; WAN024DEF_at; Start 62; Stop 86
catcgttatttcctgttactgaacc

SEQ ID NO: 154584 - DNA, 25 bp, Artificial
  probe
  misc_feature (1)..(25): SEQ ID NO: 7560; WAN024DEF_at; Start 190; Stop 214
tttttgagtgtagcaccttcagcct

SEQ ID NO: 154585 - DNA, 25 bp, Artificial
  probe
  misc_feature (1)..(25): SEQ ID NO: 7560; WAN024DEF_at; Start 151; Stop 175
gcccaaggcatgtttatatttacat

SEQ ID NO: 154586 - DNA, 25 bp, Artificial
  probe
  misc_feature (1)..(25): SEQ ID NO: 7560; WAN024DEF_at; Start 211; Stop 235
gcctcattaaacaaaggtctttcta

SEQ ID NO: 154587 - DNA, 25 bp, Artificial
  probe
  misc_feature (1)..(25): SEQ ID NO: 7560; WAN024DEF_at; Start 119; Stop 143
taaacatattaccaataggtgcaac

SEQ ID NO: 154588 - DNA, 25 bp, Artificial
  probe
  misc_feature (1)..(25): SEQ ID NO: 7560; WAN024DEF_at; Start 148; Stop 172
tcagcccaaggcatgtttatattta

SEQ ID NO: 154589 - DNA, 25 bp, Artificial
  probe
  misc_feature (1)..(25): SEQ ID NO: 7560; WAN024DEF_at; Start 52; Stop 76
gcaccggttacatcgttatttcctg

SEQ ID NO: 154590 - DNA, 25 bp, Artificial
  probe
  misc_feature (1)..(25): SEQ ID NO: 7341; WAN024DEG_at; Start 550; Stop 574
tacaaagttgtagccaaagctccag

SEQ ID NO: 154591 - DNA, 25 bp, Artificial
  probe
  misc_feature (1)..(25): SEQ ID NO: 7341; WAN024DEG_at; Start 118; Stop 142
tatacattgactaaaccagctggtg

SEQ ID NO: 154592 - DNA, 25 bp, Artificial
  probe
  misc_feature (1)..(25): SEQ ID NO: 7341; WAN024DEG_at; Start 3058; Stop 3082
gagccgttcggtatctcagccttta

SEQ ID NO: 154593 - DNA, 25 bp, Artificial
  probe
  misc_feature (1)..(25): SEQ ID NO: 7341; WAN024DEG_at; Start 2547; Stop 2571
ggatttcaaagacaagcgccatcgt

SEQ ID NO: 154594 - DNA, 25 bp, Artificial
  probe
  misc_feature (1)..(25): SEQ ID NO: 7341; WAN024DEG_at; Start 3426; Stop 3450
taaagagtggcgcactaatgcagat

SEQ ID NO: 154595 - DNA, 25 bp, Artificial
  probe
  misc_feature (1)..(25): SEQ ID NO: 7341; WAN024DEG_at; Start 1397; Stop 1421
caggttctattgacggtgacccata

SEQ ID NO: 154596 - DNA, 25 bp, Artificial
  probe
  misc_feature (1)..(25): SEQ ID NO: 7341; WAN024DEG_at; Start 690; Stop 714
tatgcaagctaatccaatgggtgag

SEQ ID NO: 154597 - DNA, 25 bp, Artificial
  probe
  misc_feature (1)..(25): SEQ ID NO: 7341; WAN024DEG_at; Start 3570; Stop 3594
tcatggtatgccgaagaacggtcgt

SEQ ID NO: 154598 - DNA, 25 bp, Artificial
  probe
  misc_feature (1)..(25): SEQ ID NO: 7341; WAN024DEG_at; Start 1507; Stop 1531
cagtctatctctcaagccgaagcag

SEQ ID NO: 154599 - DNA, 25 bp, Artificial
  probe
  misc_feature (1)..(25): SEQ ID NO: 7341; WAN024DEG_at; Start 1473; Stop 1497
tggagaaagtacctacaagcgttcg

SEQ ID NO: 154600 - DNA, 25 bp, Artificial
  probe
  misc_feature (1)..(25): SEQ ID NO: 7341; WAN024DEG_at; Start 1777; Stop 1801
tctgtaacgggtatgaaatcagggc

SEQ ID NO: 154601 - DNA, 25 bp, Artificial
  probe
  misc_feature (1)..(25): SEQ ID NO: 7341; WAN024DEG_at; Start 1879; Stop 1903
tctgcgatttcggactctagggtaa

SEQ ID NO: 154602 - DNA, 25 bp, Artificial
  probe
  misc_feature (1)..(25): SEQ ID NO: 7341; WAN024DEG_at; Start 2703; Stop 2727
gaatacagaagaagagcggaacgct

SEQ ID NO: 154603 - DNA, 25 bp, Artificial
  probe
  misc_feature (1)..(25): SEQ ID NO: 7341; WAN024DEG_at; Start 3215; Stop 3239
acggtgctctcggtatcaatatggc

SEQ ID NO: 154604 - DNA, 25 bp, Artificial
  probe
  misc_feature (1)..(25): SEQ ID NO: 7341; WAN024DEG_at; Start 997; Stop 1021
ggaaataacgatgtaaccggtgctg

SEQ ID NO: 154605 - DNA, 25 bp, Artificial
  probe
  misc_feature (1)..(25): SEQ ID NO: 7341; WAN024DEG_at; Start 3043; Stop 3067
gttacaaatatgatggagccgttcg

SEQ ID NO: 154606 - DNA, 25 bp, Artificial
  probe
  misc_feature (1)..(25): SEQ ID NO: 7341; WAN024DEG_at; Start 259; Stop 283
ggttacaccctatctactacaatgg

SEQ ID NO: 154607 - DNA, 25 bp, Artificial
  probe
  misc_feature (1)..(25): SEQ ID NO: 7341; WAN024DEG_at; Start 2526; Stop 2550
tgagcctgagacgactacagaggat

SEQ ID NO: 154608 - DNA, 25 bp, Artificial
  probe
  misc_feature (1)..(25): SEQ ID NO: 7341; WAN024DEG_at; Start 1661; Stop 1685
gaaacctagcttatcgaaacttgga

SEQ ID NO: 154609 - DNA, 25 bp, Artificial
  probe
  misc_feature (1)..(25): SEQ ID NO: 7341; WAN024DEG_at; Start 740; Stop 764
cagttaacgttaagccagcaggtaa

SEQ ID NO: 154610 - DNA, 25 bp, Artificial
  probe
  misc_feature (1)..(25): SEQ ID NO: 7341; WAN024DEG_at; Start 3200; Stop 3224
caaccaatggtgaatacggtgctct

SEQ ID NO: 154611 - DNA, 25 bp, Artificial
  probe
  misc_feature (1)..(25): SEQ ID NO: 7341; WAN024DEG_at; Start 2145; Stop 2169
tcaactgaacagtgatgaagtggct

SEQ ID NO: 154612 - DNA, 25 bp, Artificial
  probe
  misc_feature (1)..(25): SEQ ID NO: 7341; WAN024DEG_at; Start 1841; Stop 1865
ttcactatgccgatggaaccaaaga

SEQ ID NO: 154613 - DNA, 25 bp, Artificial
  probe
  misc_feature (1)..(25): SEQ ID NO: 7341; WAN024DEG_at; Start 1630; Stop 1654
tataaagcgattcaggactaccaag

SEQ ID NO: 154614 - DNA, 25 bp, Artificial
  probe
  misc_feature (1)..(25): SEQ ID NO: 7341; WAN024DEG_at; Start 3145; Stop 3169
ggtacggatttagaagcctttgctc

SEQ ID NO: 154615 - DNA, 25 bp, Artificial
  probe
  misc_feature (1)..(25): SEQ ID NO: 7341; WAN024DEG_at; Start 2942; Stop 2966
tattcggcccgactgatcgttggca

SEQ ID NO: 154616 - DNA, 25 bp, Artificial
  probe
  misc_feature (1)..(25): SEQ ID NO: 7341; WAN024DEG_at; Start 1529; Stop 1553
cagacgccaaaatcgctaatatggg

SEQ ID NO: 154617 - DNA, 25 bp, Artificial
  probe
  misc_feature (1)..(25): SEQ ID NO: 7341; WAN024DEG_at; Start 912; Stop 936
gccttgggctgataaagttgcacct

SEQ ID NO: 154618 - DNA, 25 bp, Artificial
  probe
  misc_feature (1)..(25): SEQ ID NO: 7341; WAN024DEG_at; Start 1119; Stop 1143
cgaaagttggcgaagtaacacggat

SEQ ID NO: 154619 - DNA, 25 bp, Artificial
  probe
  misc_feature (1)..(25): SEQ ID NO: 7341; WAN024DEG_at; Start 2990; Stop 3014
cgatggcgaagatttatgaacgtcc

SEQ ID NO: 154620 - DNA, 25 bp, Artificial
  probe
  misc_feature (1)..(25): SEQ ID NO: 7341; WAN024DEG_at; Start 1196; Stop 1220
tagtagctaaagtcaatcacggaag

SEQ ID NO: 154621 - DNA, 25 bp, Artificial
  probe
  misc_feature (1)..(25): SEQ ID NO: 7341; WAN024DEG_at; Start 3460; Stop 3484
ttaattggagaaccgcatcagtggg

SEQ ID NO: 154622 - DNA, 25 bp, Artificial
  probe
  misc_feature (1)..(25): SEQ ID NO: 7341; WAN024DEG_at; Start 402; Stop 426
tgagggtaacgaaactgataagagc

SEQ ID NO: 154623 - DNA, 25 bp, Artificial
  probe
  misc_feature (1)..(25): SEQ ID NO: 7341; WAN024DEG_at; Start 852; Stop 876
taatgaggctgaaggtgctacactc

SEQ ID NO: 154624 - DNA, 25 bp, Artificial
  probe
  misc_feature (1)..(25): SEQ ID NO: 1165; WAN024DEH_at; Start 60; Stop 84
caatgaagcctggatgactggccgc

SEQ ID NO: 154625 - DNA, 25 bp, Artificial
  probe
  misc_feature (1)..(25): SEQ ID NO: 1165; WAN024DEH_at; Start 58; Stop 82
ttcaatgaagcctggatgactggcc

SEQ ID NO: 154626 - DNA, 25 bp, Artificial
  probe
  misc_feature (1)..(25): SEQ ID NO: 1165; WAN024DEH_at; Start 72; Stop 96
gatgactggccgctatattatggca

SEQ ID NO: 154627 - DNA, 25 bp, Artificial
  probe
  misc_feature (1)..(25): SEQ ID NO: 1165; WAN024DEH_at; Start 168; Stop 192
cgatcagcattttaataggaaagac

SEQ ID NO: 154628 - DNA, 25 bp, Artificial
  probe
  misc_feature (1)..(25): SEQ ID NO: 1165; WAN024DEH_at; Start 36; Stop 60
tacagctgctgagacctattttttc

SEQ ID NO: 154629 - DNA, 25 bp, Artificial
  probe
  misc_feature (1)..(25): SEQ ID NO: 1165; WAN024DEH_at; Start 113; Stop 137
tactctttagaaatttccgagtcag

SEQ ID NO: 154630 - DNA, 25 bp, Artificial
  probe
  misc_feature (1)..(25): SEQ ID NO: 1165; WAN024DEH_at; Start 65; Stop 89
aagcctggatgactggccgctatat

SEQ ID NO: 154631 - DNA, 25 bp, Artificial
  probe
  misc_feature (1)..(25): SEQ ID NO: 1165; WAN024DEH_at; Start 38; Stop 62
cagctgctgagacctattttttcaa

SEQ ID NO: 154632 - DNA, 25 bp, Artificial
  probe
  misc_feature (1)..(25): SEQ ID NO: 1165; WAN024DEH_at; Start 75; Stop 99
gactggccgctatattatggcagcc

SEQ ID NO: 154633 - DNA, 25 bp, Artificial
  probe
  misc_feature (1)..(25): SEQ ID NO: 1165; WAN024DEH_at; Start 45; Stop 69
tgagacctattttttcaatgaagcc

SEQ ID NO: 154634 - DNA, 25 bp, Artificial
  probe
  misc_feature (1)..(25): SEQ ID NO: 1165; WAN024DEH_at; Start 40; Stop 64
gctgctgagacctattttttcaatg

SEQ ID NO: 154635 - DNA, 25 bp, Artificial
  probe
  misc_feature (1)..(25): SEQ ID NO: 1165; WAN024DEH_at; Start 67; Stop 91
gcctggatgactggccgctatatta

SEQ ID NO: 154636 - DNA, 25 bp, Artificial
  probe
  misc_feature (1)..(25): SEQ ID NO: 1165; WAN024DEH_at; Start 162; Stop 186
tgtcatcgatcagcattttaatagg

SEQ ID NO: 154637 - DNA, 25 bp, Artificial
  probe
  misc_feature (1)..(25): SEQ ID NO: 1165; WAN024DEH_at; Start 151; Stop 175
aaaatcgttgatgtcatcgatcagc

SEQ ID NO: 154638 - DNA, 25 bp, Artificial
  probe
  misc_feature (1)..(25): SEQ ID NO: 1165; WAN024DEH_at; Start 48; Stop 72
gacctattttttcaatgaagcctgg

SEQ ID NO: 154639 - DNA, 25 bp, Artificial
  probe
  misc_feature (1)..(25): SEQ ID NO: 1165; WAN024DEH_at; Start 50; Stop 74
cctattttttcaatgaagcctggat

SEQ ID NO: 154640 - DNA, 25 bp, Artificial
  probe
  misc_feature (1)..(25): SEQ ID NO: 1165; WAN024DEH_at; Start 64; Stop 88
gaagcctggatgactggccgctata

SEQ ID NO: 154641 - DNA, 25 bp, Artificial
  probe
  misc_feature (1)..(25): SEQ ID NO: 1165; WAN024DEH_at; Start 122; Stop 146
gaaatttccgagtcagttatgtgat

SEQ ID NO: 154642 - DNA, 25 bp, Artificial
  probe
  misc_feature (1)..(25): SEQ ID NO: 1165; WAN024DEH_at; Start 43; Stop 67
gctgagacctattttttcaatgaag

SEQ ID NO: 154643 - DNA, 25 bp, Artificial
  probe
  misc_feature (1)..(25): SEQ ID NO: 1165; WAN024DEH_at; Start 120; Stop 144
tagaaatttccgagtcagttatgtg

SEQ ID NO: 154644 - DNA, 25 bp, Artificial
  probe
  misc_feature (1)..(25): SEQ ID NO: 1165; WAN024DEH_at; Start 61; Stop 85
aatgaagcctggatgactggccgct

SEQ ID NO: 154645 - DNA, 25 bp, Artificial
  probe
  misc_feature (1)..(25): SEQ ID NO: 1165; WAN024DEH_at; Start 125; Stop 149
atttccgagtcagttatgtgatggg

SEQ ID NO: 154646 - DNA, 25 bp, Artificial
  probe
  misc_feature (1)..(25): SEQ ID NO: 1165; WAN024DEH_at; Start 59; Stop 83
tcaatgaagcctggatgactggccg

SEQ ID NO: 154647 - DNA, 25 bp, Artificial
  probe
  misc_feature (1)..(25): SEQ ID NO: 1165; WAN024DEH_at; Start 53; Stop 77
attttttcaatgaagcctggatgac

SEQ ID NO: 154648 - DNA, 25 bp, Artificial
  probe
  misc_feature (1)..(25): SEQ ID NO: 1165; WAN024DEH_at; Start 57; Stop 81
tttcaatgaagcctggatgactggc

SEQ ID NO: 154649 - DNA, 25 bp, Artificial
  probe
  misc_feature (1)..(25): SEQ ID NO: 1165; WAN024DEH_at; Start 169; Stop 193
gatcagcattttaataggaaagact

SEQ ID NO: 154650 - DNA, 25 bp, Artificial
  probe
  misc_feature (1)..(25): SEQ ID NO: 1165; WAN024DEH_at; Start 63; Stop 87
tgaagcctggatgactggccgctat

SEQ ID NO: 154651 - DNA, 25 bp, Artificial
  probe
  misc_feature (1)..(25): SEQ ID NO: 1165; WAN024DEH_at; Start 156; Stop 180
cgttgatgtcatcgatcagcatttt

SEQ ID NO: 154652 - DNA, 25 bp, Artificial
  probe
  misc_feature (1)..(25): SEQ ID NO: 1165; WAN024DEH_at; Start 124; Stop 148
aatttccgagtcagttatgtgatgg

SEQ ID NO: 154653 - DNA, 25 bp, Artificial
  probe
  misc_feature (1)..(25): SEQ ID NO: 1165; WAN024DEH_at; Start 165; Stop 189
catcgatcagcattttaataggaaa

SEQ ID NO: 154654 - DNA, 25 bp, Artificial
  probe
  misc_feature (1)..(25): SEQ ID NO: 1165; WAN024DEH_at; Start 116; Stop 140
tctttagaaatttccgagtcagtta

SEQ ID NO: 154655 - DNA, 25 bp, Artificial
  probe
  misc_feature (1)..(25): SEQ ID NO: 1165; WAN024DEH_at; Start 55; Stop 79
tttttcaatgaagcctggatgactg

SEQ ID NO: 154656 - DNA, 25 bp, Artificial
  probe
  misc_feature (1)..(25): SEQ ID NO: 1165; WAN024DEH_at; Start 74; Stop 98
tgactggccgctatattatggcagc

SEQ ID NO: 154657 - DNA, 25 bp, Artificial
  probe
  misc_feature (1)..(25): SEQ ID NO: 1165; WAN024DEH_at; Start 152; Stop 176
aaatcgttgatgtcatcgatcagca

SEQ ID NO: 154658 - DNA, 25 bp, Artificial
  probe
  misc_feature (1)..(25): SEQ ID NO: 1557; WAN024DEI_at; Start 45; Stop 69
caaagttaatgttggtaaagacagt

SEQ ID NO: 154659 - DNA, 25 bp, Artificial
  probe
  misc_feature (1)..(25): SEQ ID NO: 1557; WAN024DEI_at; Start 180; Stop 204
attggaaaaagctgtggaaattttg

SEQ ID NO: 154660 - DNA, 25 bp, Artificial
  probe
  misc_feature (1)..(25): SEQ ID NO: 1557; WAN024DEI_at; Start 110; Stop 134
gagaaattgccgaattagacggaca

SEQ ID NO: 154661 - DNA, 25 bp, Artificial
  probe
  misc_feature (1)..(25): SEQ ID NO: 1557; WAN024DEI_at; Start 109; Stop 133
ggagaaattgccgaattagacggac

SEQ ID NO: 154662 - DNA, 25 bp, Artificial
  probe
  misc_feature (1)..(25): SEQ ID NO: 1557; WAN024DEI_at; Start 31; Stop 55
caagtagcggatgccaaagttaatg

SEQ ID NO: 154663 - DNA, 25 bp, Artificial
  probe
  misc_feature (1)..(25): SEQ ID NO: 1557; WAN024DEI_at; Start 127; Stop 151
gacggacaatttgccattataaaga

SEQ ID NO: 154664 - DNA, 25 bp, Artificial
  probe
  misc_feature (1)..(25): SEQ ID NO: 1557; WAN024DEI_at; Start 153; Stop 177
tgggaatgtcgatagtttttataaa

SEQ ID NO: 154665 - DNA, 25 bp, Artificial
  probe
  misc_feature (1)..(25): SEQ ID NO: 1557; WAN024DEI_at; Start 73; Stop 97
gaaggttatacattgactatcggta

SEQ ID NO: 154666 - DNA, 25 bp, Artificial
  probe
  misc_feature (1)..(25): SEQ ID NO: 1557; WAN024DEI_at; Start 42; Stop 66
tgccaaagttaatgttggtaaagac

SEQ ID NO: 154667 - DNA, 25 bp, Artificial
  probe
  misc_feature (1)..(25): SEQ ID NO: 1557; WAN024DEI_at; Start 51; Stop 75
taatgttggtaaagacagttttgaa

SEQ ID NO: 154668 - DNA, 25 bp, Artificial
  probe
  misc_feature (1)..(25): SEQ ID NO: 1557; WAN024DEI_at; Start 105; Stop 129
tatcggagaaattgccgaattagac

SEQ ID NO: 154669 - DNA, 25 bp, Artificial
  probe
  misc_feature (1)..(25): SEQ ID NO: 1557; WAN024DEI_at; Start 23; Stop 47
tcgaaattcaagtagcggatgccaa

SEQ ID NO: 154670 - DNA, 25 bp, Artificial
  probe
  misc_feature (1)..(25): SEQ ID NO: 1557; WAN024DEI_at; Start 112; Stop 136
gaaattgccgaattagacggacaat

SEQ ID NO: 154671 - DNA, 25 bp, Artificial
  probe
  misc_feature (1)..(25): SEQ ID NO: 1557; WAN024DEI_at; Start 20; Stop 44
aaatcgaaattcaagtagcggatgc

SEQ ID NO: 154672 - DNA, 25 bp, Artificial
  probe
  misc_feature (1)..(25): SEQ ID NO: 1557; WAN024DEI_at; Start 100; Stop 124
aaagttatcggagaaattgccgaat

SEQ ID NO: 154673 - DNA, 25 bp, Artificial
  probe
  misc_feature (1)..(25): SEQ ID NO: 1557; WAN024DEI_at; Start 35; Stop 59
tagcggatgccaaagttaatgttgg

SEQ ID NO: 154674 - DNA, 25 bp, Artificial
  probe
  misc_feature (1)..(25): SEQ ID NO: 1557; WAN024DEI_at; Start 119; Stop 143
ccgaattagacggacaatttgccat

SEQ ID NO: 154675 - DNA, 25 bp, Artificial
  probe
  misc_feature (1)..(25): SEQ ID NO: 1557; WAN024DEI_at; Start 121; Stop 145
gaattagacggacaatttgccatta

SEQ ID NO: 154676 - DNA, 25 bp, Artificial
  probe
  misc_feature (1)..(25): SEQ ID NO: 1557; WAN024DEI_at; Start 83; Stop 107
cattgactatcggtaaaaaagttat

SEQ ID NO: 154677 - DNA, 25 bp, Artificial
  probe
  misc_feature (1)..(25): SEQ ID NO: 1557; WAN024DEI_at; Start 79; Stop 103
tatacattgactatcggtaaaaaag

SEQ ID NO: 154678 - DNA, 25 bp, Artificial
  probe
  misc_feature (1)..(25): SEQ ID NO: 1557; WAN024DEI_at; Start 65; Stop 89
acagttttgaaggttatacattgac

SEQ ID NO: 154679 - DNA, 25 bp, Artificial
  probe
  misc_feature (1)..(25): SEQ ID NO: 1557; WAN024DEI_at; Start 60; Stop 84
taaagacagttttgaaggttataca

SEQ ID NO: 154680 - DNA, 25 bp, Artificial
  probe
  misc_feature (1)..(25): SEQ ID NO: 1557; WAN024DEI_at; Start 146; Stop 170
taaagaatgggaatgtcgatagttt

SEQ ID NO: 154681 - DNA, 25 bp, Artificial
  probe
  misc_feature (1)..(25): SEQ ID NO: 1557; WAN024DEI_at; Start 133; Stop 157
caatttgccattataaagaatggga

SEQ ID NO: 154682 - DNA, 25 bp, Artificial
  probe
  misc_feature (1)..(25): SEQ ID NO: 1557; WAN024DEI_at; Start 71; Stop 95
ttgaaggttatacattgactatcgg

SEQ ID NO: 154683 - DNA, 25 bp, Artificial
  probe
  misc_feature (1)..(25): SEQ ID NO: 1557; WAN024DEI_at; Start 29; Stop 53
ttcaagtagcggatgccaaagttaa

SEQ ID NO: 154684 - DNA, 25 bp, Artificial
  probe
  misc_feature (1)..(25): SEQ ID NO: 1557; WAN024DEI_at; Start 76; Stop 100
ggttatacattgactatcggtaaaa

SEQ ID NO: 154685 - DNA, 25 bp, Artificial
  probe
  misc_feature (1)..(25): SEQ ID NO: 1557; WAN024DEI_at; Start 139; Stop 163
gccattataaagaatgggaatgtcg

SEQ ID NO: 154686 - DNA, 25 bp, Artificial
  probe
  misc_feature (1)..(25): SEQ ID NO: 1557; WAN024DEI_at; Start 150; Stop 174
gaatgggaatgtcgatagtttttat

SEQ ID NO: 154687 - DNA, 25 bp, Artificial
  probe
  misc_feature (1)..(25): SEQ ID NO: 1557; WAN024DEI_at; Start 141; Stop 165
cattataaagaatgggaatgtcgat

SEQ ID NO: 154688 - DNA, 25 bp, Artificial
  probe
  misc_feature (1)..(25): SEQ ID NO: 1557; WAN024DEI_at; Start 38; Stop 62
cggatgccaaagttaatgttggtaa

SEQ ID NO: 154689 - DNA, 25 bp, Artificial
  probe
  misc_feature (1)..(25): SEQ ID NO: 1557; WAN024DEI_at; Start 187; Stop 211
aaagctgtggaaattttgattgaaa

SEQ ID NO: 154690 - DNA, 25 bp, Artificial
  probe
  misc_feature (1)..(25): SEQ ID NO: 1557; WAN024DEI_at; Start 25; Stop 49
gaaattcaagtagcggatgccaaag

SEQ ID NO: 154691 - DNA, 25 bp, Artificial
  probe
  misc_feature (1)..(25): SEQ ID NO: 1557; WAN024DEI_at; Start 117; Stop 141
tgccgaattagacggacaatttgcc

SEQ ID NO: 154692 - DNA, 25 bp, Artificial
  probe
  misc_feature (1)..(25): SEQ ID NO: 744; WAN024DEJ_at; Start 380; Stop 404
gacttccggcagttgtatccaatag

SEQ ID NO: 154693 - DNA, 25 bp, Artificial
  probe
  misc_feature (1)..(25): SEQ ID NO: 744; WAN024DEJ_at; Start 241; Stop 265
gctattaatcaagatgatgctcgca

SEQ ID NO: 154694 - DNA, 25 bp, Artificial
  probe
  misc_feature (1)..(25): SEQ ID NO: 744; WAN024DEJ_at; Start 45; Stop 69
gattaatccagctttggaggctgta

SEQ ID NO: 154695 - DNA, 25 bp, Artificial
  probe
  misc_feature (1)..(25): SEQ ID NO: 744; WAN024DEJ_at; Start 179; Stop 203
cagatgctgtactttgtattggaca

SEQ ID NO: 154696 - DNA, 25 bp, Artificial
  probe
  misc_feature (1)..(25): SEQ ID NO: 744; WAN024DEJ_at; Start 507; Stop 531
gatggaacaagtagtaaataagccg

SEQ ID NO: 154697 - DNA, 25 bp, Artificial
  probe
  misc_feature (1)..(25): SEQ ID NO: 744; WAN024DEJ_at; Start 529; Stop 553
ccgaatactgcaggaatgagtctat

SEQ ID NO: 154698 - DNA, 25 bp, Artificial
  probe
  misc_feature (1)..(25): SEQ ID NO: 744; WAN024DEJ_at; Start 256; Stop 280
gatgctcgcatacctgataacgaag

SEQ ID NO: 154699 - DNA, 25 bp, Artificial
  probe
  misc_feature (1)..(25): SEQ ID NO: 744; WAN024DEJ_at; Start 596; Stop 620
tagactacaaagataaggatttgca

SEQ ID NO: 154700 - DNA, 25 bp, Artificial
  probe
  misc_feature (1)..(25): SEQ ID NO: 744; WAN024DEJ_at; Start 151; Stop 175
ttagaggcagaaatattacgatatc

SEQ ID NO: 154701 - DNA, 25 bp, Artificial
  probe
  misc_feature (1)..(25): SEQ ID NO: 744; WAN024DEJ_at; Start 616; Stop 640
ttgcagttagtaggcggtgagactc

SEQ ID NO: 154702 - DNA, 25 bp, Artificial
  probe
  misc_feature (1)..(25): SEQ ID NO: 744; WAN024DEJ_at; Start 580; Stop 604
gctattgaagctattgtagactaca

SEQ ID NO: 154703 - DNA, 25 bp, Artificial
  probe
  misc_feature (1)..(25): SEQ ID NO: 744; WAN024DEJ_at; Start 394; Stop 418
gtatccaatagtgcaggaacctttg

SEQ ID NO: 154704 - DNA, 25 bp, Artificial
  probe
  misc_feature (1)..(25): SEQ ID NO: 744; WAN024DEJ_at; Start 343; Stop 367
cctatcaaagcgatggtacaagcta

SEQ ID NO: 154705 - DNA, 25 bp, Artificial
  probe
  misc_feature (1)..(25): SEQ ID NO: 744; WAN024DEJ_at; Start 477; Stop 501
gagagcaggtttcatgcatattcca

SEQ ID NO: 154706 - DNA, 25 bp, Artificial
  probe
  misc_feature (1)..(25): SEQ ID NO: 744; WAN024DEJ_at; Start 438; Stop 462
ccaagctctttatttagtggataaa

SEQ ID NO: 154707 - DNA, 25 bp, Artificial
  probe
  misc_feature (1)..(25): SEQ ID NO: 744; WAN024DEJ_at; Start 461; Stop 485
aaaaattccctaatatgagagcagg

SEQ ID NO: 154708 - DNA, 25 bp, Artificial
  probe
  misc_feature (1)..(25): SEQ ID NO: 744; WAN024DEJ_at; Start 214; Stop 238
aggaccggcttaacacctgaacgag

SEQ ID NO: 154709 - DNA, 25 bp, Artificial
  probe
  misc_feature (1)..(25): SEQ ID NO: 744; WAN024DEJ_at; Start 406; Stop 430
gcaggaacctttgtttgcaatcatt

SEQ ID NO: 154710 - DNA, 25 bp, Artificial
  probe
  misc_feature (1)..(25): SEQ ID NO: 744; WAN024DEJ_at; Start 366; Stop 390
tatcaaaaaacagggacttccggca

SEQ ID NO: 154711 - DNA, 25 bp, Artificial
  probe
  misc_feature (1)..(25): SEQ ID NO: 744; WAN024DEJ_at; Start 521; Stop 545
taaataagccgaatactgcaggaat

SEQ ID NO: 154712 - DNA, 25 bp, Artificial
  probe
  misc_feature (1)..(25): SEQ ID NO: 744; WAN024DEJ_at; Start 559; Stop 583
attgtaagaggcatagaggtagcta

SEQ ID NO: 154713 - DNA, 25 bp, Artificial
  probe
  misc_feature (1)..(25): SEQ ID NO: 744; WAN024DEJ_at; Start 100; Stop 124
gaagttcgctgggtagaaattccaa

SEQ ID NO: 154714 - DNA, 25 bp, Artificial
  probe
  misc_feature (1)..(25): SEQ ID NO: 744; WAN024DEJ_at; Start 271; Stop 295
gataacgaaggcaatcaaccaattg

SEQ ID NO: 154715 - DNA, 25 bp, Artificial
  probe
  misc_feature (1)..(25): SEQ ID NO: 744; WAN024DEJ_at; Start 135; Stop 159
taagtcgtcagaagttttagaggca

SEQ ID NO: 154716 - DNA, 25 bp, Artificial
  probe
  misc_feature (1)..(25): SEQ ID NO: 744; WAN024DEJ_at; Start 190; Stop 214
ctttgtattggacaagcaggcggca

SEQ ID NO: 154717 - DNA, 25 bp, Artificial
  probe
  misc_feature (1)..(25): SEQ ID NO: 744; WAN024DEJ_at; Start 285; Stop 309
tcaaccaattgatacaccgattcgt

SEQ ID NO: 154718 - DNA, 25 bp, Artificial
  probe
  misc_feature (1)..(25): SEQ ID NO: 744; WAN024DEJ_at; Start 315; Stop 339
tggagcatcggcctattttagtagt

SEQ ID NO: 154719 - DNA, 25 bp, Artificial
  probe
  misc_feature (1)..(25): SEQ ID NO: 744; WAN024DEJ_at; Start 164; Stop 188
tattacgatatcaaccagatgctgt

SEQ ID NO: 154720 - DNA, 25 bp, Artificial
  probe
  misc_feature (1)..(25): SEQ ID NO: 744; WAN024DEJ_at; Start 422; Stop 446
gcaatcatttgatgtaccaagctct

SEQ ID NO: 154721 - DNA, 25 bp, Artificial
  probe
  misc_feature (1)..(25): SEQ ID NO: 744; WAN024DEJ_at; Start 356; Stop 380
tggtacaagctatcaaaaaacaggg

SEQ ID NO: 154722 - DNA, 25 bp, Artificial
  probe
  misc_feature (1)..(25): SEQ ID NO: 744; WAN024DEJ_at; Start 333; Stop 357
tagtagtttacctatcaaagcgatg

SEQ ID NO: 154723 - DNA, 25 bp, Artificial
  probe
  misc_feature (1)..(25): SEQ ID NO: 744; WAN024DEJ_at; Start 203; Stop 227
aagcaggcggcaggaccggcttaac

SEQ ID NO: 154724 - DNA, 25 bp, Artificial
  probe
  misc_feature (1)..(25): SEQ ID NO: 744; WAN024DEJ_at; Start 32; Stop 56
ttggaggtgaaaagattaatccagc

SEQ ID NO: 154725 - DNA, 25 bp, Artificial
  probe
  misc_feature (1)..(25): SEQ ID NO: 744; WAN024DEJ_at; Start 299; Stop 323
caccgattcgtattgatggagcatc

SEQ ID NO: 154726 - DNA, 25 bp, Artificial
  probe
  misc_feature (1)..(25): SEQ ID NO: 7579; WAN024DEK_at; Start 69; Stop 93
caaaccagctaagactactgttgca

SEQ ID NO: 154727 - DNA, 25 bp, Artificial
  probe
  misc_feature (1)..(25): SEQ ID NO: 7579; WAN024DEK_at; Start 170; Stop 194
cctttatattcaaaatgacagtatt

SEQ ID NO: 154728 - DNA, 25 bp, Artificial
  probe
  misc_feature (1)..(25): SEQ ID NO: 7579; WAN024DEK_at; Start 41; Stop 65
gagaaacacctgaaactaaagctgt

SEQ ID NO: 154729 - DNA, 25 bp, Artificial
  probe
  misc_feature (1)..(25): SEQ ID NO: 7579; WAN024DEK_at; Start 164; Stop 188
caaactcctttatattcaaaatgac

SEQ ID NO: 154730 - DNA, 25 bp, Artificial
  probe
  misc_feature (1)..(25): SEQ ID NO: 7579; WAN024DEK_at; Start 86; Stop 110
ctgttgcaattgtatcaaattttaa

SEQ ID NO: 154731 - DNA, 25 bp, Artificial
  probe
  misc_feature (1)..(25): SEQ ID NO: 7579; WAN024DEK_at; Start 47; Stop 71
cacctgaaactaaagctgtaaccaa

SEQ ID NO: 154732 - DNA, 25 bp, Artificial
  probe
  misc_feature (1)..(25): SEQ ID NO: 7579; WAN024DEK_at; Start 2; Stop 26
tgctaaattcttttcccaaaatctc

SEQ ID NO: 154733 - DNA, 25 bp, Artificial
  probe
  misc_feature (1)..(25): SEQ ID NO: 7579; WAN024DEK_at; Start 27; Stop 51
caaaaattcaacgagagaaacacct

SEQ ID NO: 154734 - DNA, 25 bp, Artificial
  probe
  misc_feature (1)..(25): SEQ ID NO: 7579; WAN024DEK_at; Start 113; Stop 137
taaaacccacaacaatgattgctat

SEQ ID NO: 154735 - DNA, 25 bp, Artificial
  probe
  misc_feature (1)..(25): SEQ ID NO: 7579; WAN024DEK_at; Start 132; Stop 156
tgctattcctattaatctaatccac

SEQ ID NO: 154736 - DNA, 25 bp, Artificial
  probe
  misc_feature (1)..(25): SEQ ID NO: 7579; WAN024DEK_at; Start 78; Stop 102
taagactactgttgcaattgtatca

SEQ ID NO: 154737 - DNA, 25 bp, Artificial
  probe
  misc_feature (1)..(25): SEQ ID NO: 7579; WAN024DEK_at; Start 122; Stop 146
caacaatgattgctattcctattaa

SEQ ID NO: 154738 - DNA, 25 bp, Artificial
  probe
  misc_feature (1)..(25): SEQ ID NO: 7579; WAN024DEK_at; Start 149; Stop 173
taatccactccatatcaaactcctt

SEQ ID NO: 154739 - DNA, 25 bp, Artificial
  probe
  misc_feature (1)..(25): SEQ ID NO: 7579; WAN024DEK_at; Start 25; Stop 49
tccaaaaattcaacgagagaaacac

SEQ ID NO: 154740 - DNA, 25 bp, Artificial
  probe
  misc_feature (1)..(25): SEQ ID NO: 7579; WAN024DEK_at; Start 51; Stop 75
tgaaactaaagctgtaaccaaacca

SEQ ID NO: 154741 - DNA, 25 bp, Artificial
  probe
  misc_feature (1)..(25): SEQ ID NO: 7579; WAN024DEK_at; Start 144; Stop 168
taatctaatccactccatatcaaac

SEQ ID NO: 154742 - DNA, 25 bp, Artificial
  probe
  misc_feature (1)..(25): SEQ ID NO: 7579; WAN024DEK_at; Start 63; Stop 87
tgtaaccaaaccagctaagactact

SEQ ID NO: 154743 - DNA, 25 bp, Artificial
  probe
  misc_feature (1)..(25): SEQ ID NO: 7579; WAN024DEK_at; Start 202; Stop 226
ttttatcaagatcaataccattcct

SEQ ID NO: 154744 - DNA, 25 bp, Artificial
  probe
  misc_feature (1)..(25): SEQ ID NO: 7579; WAN024DEK_at; Start 17; Stop 41
ccaaaatctccaaaaattcaacgag

SEQ ID NO: 154745 - DNA, 25 bp, Artificial
  probe
  misc_feature (1)..(25): SEQ ID NO: 7579; WAN024DEK_at; Start 35; Stop 59
caacgagagaaacacctgaaactaa

SEQ ID NO: 154746 - DNA, 25 bp, Artificial
  probe
  misc_feature (1)..(25): SEQ ID NO: 7579; WAN024DEK_at; Start 118; Stop 142
cccacaacaatgattgctattccta

SEQ ID NO: 154747 - DNA, 25 bp, Artificial
  probe
  misc_feature (1)..(25): SEQ ID NO: 7579; WAN024DEK_at; Start 208; Stop 232
caagatcaataccattccttattta

SEQ ID NO: 154748 - DNA, 25 bp, Artificial
  probe
  misc_feature (1)..(25): SEQ ID NO: 7579; WAN024DEK_at; Start 38; Stop 62
cgagagaaacacctgaaactaaagc

SEQ ID NO: 154749 - DNA, 25 bp, Artificial
  probe
  misc_feature (1)..(25): SEQ ID NO: 7579; WAN024DEK_at; Start 34; Stop 58
tcaacgagagaaacacctgaaacta

SEQ ID NO: 154750 - DNA, 25 bp, Artificial
  probe
  misc_feature (1)..(25): SEQ ID NO: 7579; WAN024DEK_at; Start 61; Stop 85
gctgtaaccaaaccagctaagacta

SEQ ID NO: 154751 - DNA, 25 bp, Artificial
  probe
  misc_feature (1)..(25): SEQ ID NO: 7579; WAN024DEK_at; Start 43; Stop 67
gaaacacctgaaactaaagctgtaa

SEQ ID NO: 154752 - DNA, 25 bp, Artificial
  probe
  misc_feature (1)..(25): SEQ ID NO: 7579; WAN024DEK_at; Start 76; Stop 100
gctaagactactgttgcaattgtat

SEQ ID NO: 154753 - DNA, 25 bp, Artificial
  probe
  misc_feature (1)..(25): SEQ ID NO: 7579; WAN024DEK_at; Start 81; Stop 105
gactactgttgcaattgtatcaaat

SEQ ID NO: 154754 - DNA, 25 bp, Artificial
  probe
  misc_feature (1)..(25): SEQ ID NO: 7579; WAN024DEK_at; Start 111; Stop 135
aataaaacccacaacaatgattgct

SEQ ID NO: 154755 - DNA, 25 bp, Artificial
  probe
  misc_feature (1)..(25): SEQ ID NO: 7579; WAN024DEK_at; Start 57; Stop 81
taaagctgtaaccaaaccagctaag

SEQ ID NO: 154756 - DNA, 25 bp, Artificial
  probe
  misc_feature (1)..(25): SEQ ID NO: 7579; WAN024DEK_at; Start 65; Stop 89
taaccaaaccagctaagactactgt

SEQ ID NO: 154757 - DNA, 25 bp, Artificial
  probe
  misc_feature (1)..(25): SEQ ID NO: 7579; WAN024DEK_at; Start 73; Stop 97
ccagctaagactactgttgcaattg

SEQ ID NO: 154758 - DNA, 25 bp, Artificial
  probe
  misc_feature (1)..(25): SEQ ID NO: 7579; WAN024DEK_at; Start 197; Stop 221
taaaattttatcaagatcaatacca

SEQ ID NO: 154759 - DNA, 25 bp, Artificial
  probe
  misc_feature (1)..(25): SEQ ID NO: 7579; WAN024DEK_at; Start 29; Stop 53
aaaattcaacgagagaaacacctga

SEQ ID NO: 154760 - DNA, 25 bp, Artificial
  probe
  misc_feature (1)..(25): SEQ ID NO: 4986; WAN024DEL_at; Start 474; Stop 498
tgcggctgcgaatgaaaattttgga

SEQ ID NO: 154761 - DNA, 25 bp, Artificial
  probe
  misc_feature (1)..(25): SEQ ID NO: 4986; WAN024DEL_at; Start 291; Stop 315
gacagttggaaacttctatacagtt

SEQ ID NO: 154762 - DNA, 25 bp, Artificial
  probe
  misc_feature (1)..(25): SEQ ID NO: 4986; WAN024DEL_at; Start 670; Stop 694
aaattgatatcaaaaaagactaggg

SEQ ID NO: 154763 - DNA, 25 bp, Artificial
  probe
  misc_feature (1)..(25): SEQ ID NO: 4986; WAN024DEL_at; Start 125; Stop 149
tagtttcaggtgtttctctcgttga

SEQ ID NO: 154764 - DNA, 25 bp, Artificial
  probe
  misc_feature (1)..(25): SEQ ID NO: 4986; WAN024DEL_at; Start 112; Stop 136
ttggttacagctttagtttcaggtg

SEQ ID NO: 154765 - DNA, 25 bp, Artificial
  probe
  misc_feature (1)..(25): SEQ ID NO: 4986; WAN024DEL_at; Start 495; Stop 519
tggaaatttctttgctcaaaatacg

SEQ ID NO: 154766 - DNA, 25 bp, Artificial
  probe
  misc_feature (1)..(25): SEQ ID NO: 4986; WAN024DEL_at; Start 82; Stop 106
gatacaattgcaacagtagtcttag

SEQ ID NO: 154767 - DNA, 25 bp, Artificial
  probe
  misc_feature (1)..(25): SEQ ID NO: 4986; WAN024DEL_at; Start 619; Stop 643
gctgttataacacttattgtagtgg

SEQ ID NO: 154768 - DNA, 25 bp, Artificial
  probe
  misc_feature (1)..(25): SEQ ID NO: 4986; WAN024DEL_at; Start 440; Stop 464
taacagaggttgaagatgagacaat

SEQ ID NO: 154769 - DNA, 25 bp, Artificial
  probe
  misc_feature (1)..(25): SEQ ID NO: 4986; WAN024DEL_at; Start 409; Stop 433
gcagctgcagagtctcaattaggta

SEQ ID NO: 154770 - DNA, 25 bp, Artificial
  probe
  misc_feature (1)..(25): SEQ ID NO: 4986; WAN024DEL_at; Start 269; Stop 293
tgattcgaaagattaaaggtctgac

SEQ ID NO: 154771 - DNA, 25 bp, Artificial
  probe
  misc_feature (1)..(25): SEQ ID NO: 4986; WAN024DEL_at; Start 226; Stop 250
gggctgtcagaaacctttggactca

SEQ ID NO: 154772 - DNA, 25 bp, Artificial
  probe
  misc_feature (1)..(25): SEQ ID NO: 4986; WAN024DEL_at; Start 571; Stop 595
ggctatgaaagcaattatgcaggga

SEQ ID NO: 154773 - DNA, 25 bp, Artificial
  probe
  misc_feature (1)..(25): SEQ ID NO: 4986; WAN024DEL_at; Start 252; Stop 276
gcaacgatcaatcgatttgattcga

SEQ ID NO: 154774 - DNA, 25 bp, Artificial
  probe
  misc_feature (1)..(25): SEQ ID NO: 4986; WAN024DEL_at; Start 397; Stop 421
cctatgggagaagcagctgcagagt

SEQ ID NO: 154775 - DNA, 25 bp, Artificial
  probe
  misc_feature (1)..(25): SEQ ID NO: 4986; WAN024DEL_at; Start 350; Stop 374
caattcgtctaggaggacaccctca

SEQ ID NO: 154776 - DNA, 25 bp, Artificial
  probe
  misc_feature (1)..(25): SEQ ID NO: 4986; WAN024DEL_at; Start 589; Stop 613
gcagggattgcttctacatctatta

SEQ ID NO: 154777 - DNA, 25 bp, Artificial
  probe
  misc_feature (1)..(25): SEQ ID NO: 4986; WAN024DEL_at; Start 203; Stop 227
ttatggttaccttgcctcttgtggg

SEQ ID NO: 154778 - DNA, 25 bp, Artificial
  probe
  misc_feature (1)..(25): SEQ ID NO: 4986; WAN024DEL_at; Start 187; Stop 211
cgagtgctcacgatttttatggtta

SEQ ID NO: 154779 - DNA, 25 bp, Artificial
  probe
  misc_feature (1)..(25): SEQ ID NO: 4986; WAN024DEL_at; Start 343; Stop 367
ttcttttcaattcgtctaggaggac

SEQ ID NO: 154780 - DNA, 25 bp, Artificial
  probe
  misc_feature (1)..(25): SEQ ID NO: 4986; WAN024DEL_at; Start 461; Stop 485
caataaaagcgcgtgcggctgcgaa

SEQ ID NO: 154781 - DNA, 25 bp, Artificial
  probe
  misc_feature (1)..(25): SEQ ID NO: 4986; WAN024DEL_at; Start 554; Stop 578
gaacattagatcagttaggctatga

SEQ ID NO: 154782 - DNA, 25 bp, Artificial
  probe
  misc_feature (1)..(25): SEQ ID NO: 4986; WAN024DEL_at; Start 328; Stop 352
cgagagttagctggtttcttttcaa

SEQ ID NO: 154783 - DNA, 25 bp, Artificial
  probe
  misc_feature (1)..(25): SEQ ID NO: 4986; WAN024DEL_at; Start 510; Stop 534
tcaaaatacgtttgtaggtgctggg

SEQ ID NO: 154784 - DNA, 25 bp, Artificial
  probe
  misc_feature (1)..(25): SEQ ID NO: 4986; WAN024DEL_at; Start 172; Stop 196
gaatttagcaatcagcgagtgctca

SEQ ID NO: 154785 - DNA, 25 bp, Artificial
  probe
  misc_feature (1)..(25): SEQ ID NO: 4986; WAN024DEL_at; Start 371; Stop 395
ctcagtttgtcagacctttggttca

SEQ ID NO: 154786 - DNA, 25 bp, Artificial
  probe
  misc_feature (1)..(25): SEQ ID NO: 4986; WAN024DEL_at; Start 241; Stop 265
tttggactcaagcaacgatcaatcg

SEQ ID NO: 154787 - DNA, 25 bp, Artificial
  probe
  misc_feature (1)..(25): SEQ ID NO: 4986; WAN024DEL_at; Start 98; Stop 122
tagtcttagctggtttggttacagc

SEQ ID NO: 154788 - DNA, 25 bp, Artificial
  probe
  misc_feature (1)..(25): SEQ ID NO: 4986; WAN024DEL_at; Start 157; Stop 181
gagattttgggaaaagaatttagca

SEQ ID NO: 154789 - DNA, 25 bp, Artificial
  probe
  misc_feature (1)..(25): SEQ ID NO: 4986; WAN024DEL_at; Start 282; Stop 306
taaaggtctgacagttggaaacttc

SEQ ID NO: 154790 - DNA, 25 bp, Artificial
  probe
  misc_feature (1)..(25): SEQ ID NO: 4986; WAN024DEL_at; Start 41; Stop 65
taggaatagcaatcattgttgtggg

SEQ ID NO: 154791 - DNA, 25 bp, Artificial
  probe
  misc_feature (1)..(25): SEQ ID NO: 4986; WAN024DEL_at; Start 361; Stop 385
ggaggacaccctcagtttgtcagac

SEQ ID NO: 154792 - DNA, 25 bp, Artificial
  probe
  misc_feature (1)..(25): SEQ ID NO: 4986; WAN024DEL_at; Start 454; Stop 478
gatgagacaataaaagcgcgtgcgg

SEQ ID NO: 154793 - DNA, 25 bp, Artificial
  probe
  misc_feature (1)..(25): SEQ ID NO: 4986; WAN024DEL_at; Start 424; Stop 448
caattaggtagaaagttaacagagg

SEQ ID NO: 154794 - DNA, 25 bp, Artificial
  probe
  misc_feature (1)..(25): SEQ ID NO: 5229; WAN024DEM_at; Start 367; Stop 391
ggttatctatcaggtgacatcctca

SEQ ID NO: 154795 - DNA, 25 bp, Artificial
  probe
  misc_feature (1)..(25): SEQ ID NO: 5229; WAN024DEM_at; Start 379; Stop 403
ggtgacatcctcaaaacgcttggct

SEQ ID NO: 154796 - DNA, 25 bp, Artificial
  probe
  misc_feature (1)..(25): SEQ ID NO: 5229; WAN024DEM_at; Start 353; Stop 377
gctatcgctatgttggttatctatc

SEQ ID NO: 154797 - DNA, 25 bp, Artificial
  probe
  misc_feature (1)..(25): SEQ ID NO: 5229; WAN024DEM_at; Start 220; Stop 244
tacaagagaaagaaaattgctagcg

SEQ ID NO: 154798 - DNA, 25 bp, Artificial
  probe
  misc_feature (1)..(25): SEQ ID NO: 5229; WAN024DEM_at; Start 524; Stop 548
cagaggaagctccaaaagaagaagc

SEQ ID NO: 154799 - DNA, 25 bp, Artificial
  probe
  misc_feature (1)..(25): SEQ ID NO: 5229; WAN024DEM_at; Start 679; Stop 703
gaagttgagtcaaaaccagaggaaa

SEQ ID NO: 154800 - DNA, 25 bp, Artificial
  probe
  misc_feature (1)..(25): SEQ ID NO: 5229; WAN024DEM_at; Start 390; Stop 414
caaaacgcttggcttggacactgtt

SEQ ID NO: 154801 - DNA, 25 bp, Artificial
  probe
  misc_feature (1)..(25): SEQ ID NO: 5229; WAN024DEM_at; Start 652; Stop 676
ccagctccagttgaagaagtaggtg

SEQ ID NO: 154802 - DNA, 25 bp, Artificial
  probe
  misc_feature (1)..(25): SEQ ID NO: 5229; WAN024DEM_at; Start 510; Stop 534
ccaagtagtagagacagaggaagct

SEQ ID NO: 154803 - DNA, 25 bp, Artificial
  probe
  misc_feature (1)..(25): SEQ ID NO: 5229; WAN024DEM_at; Start 159; Stop 183
gacagaagcatctgttttgacagct

SEQ ID NO: 154804 - DNA, 25 bp, Artificial
  probe
  misc_feature (1)..(25): SEQ ID NO: 5229; WAN024DEM_at; Start 175; Stop 199
ttgacagcttttggtttgctgactg

SEQ ID NO: 154805 - DNA, 25 bp, Artificial
  probe
  misc_feature (1)..(25): SEQ ID NO: 5229; WAN024DEM_at; Start 147; Stop 171
gcctcaaacagggacagaagcatct

SEQ ID NO: 154806 - DNA, 25 bp, Artificial
  probe
  misc_feature (1)..(25): SEQ ID NO: 5229; WAN024DEM_at; Start 234; Stop 258
aattgctagcgtctttctagttgga

SEQ ID NO: 154807 - DNA, 25 bp, Artificial
  probe
  misc_feature (1)..(25): SEQ ID NO: 5229; WAN024DEM_at; Start 125; Stop 149
tggtgtatcaaaaagatcagttgcc

SEQ ID NO: 154808 - DNA, 25 bp, Artificial
  probe
  misc_feature (1)..(25): SEQ ID NO: 5229; WAN024DEM_at; Start 203; Stop 227
ggagcttgcttttaatctacaagag

SEQ ID NO: 154809 - DNA, 25 bp, Artificial
  probe
  misc_feature (1)..(25): SEQ ID NO: 5229; WAN024DEM_at; Start 266; Stop 290
gattggtagttcttcctagtgcagg

SEQ ID NO: 154810 - DNA, 25 bp, Artificial
  probe
  misc_feature (1)..(25): SEQ ID NO: 5229; WAN024DEM_at; Start 496; Stop 520
gctaggacagaaaaccaagtagtag

SEQ ID NO: 154811 - DNA, 25 bp, Artificial
  probe
  misc_feature (1)..(25): SEQ ID NO: 5229; WAN024DEM_at; Start 323; Stop 347
ctagtcgagagggtgttgttgaaat

SEQ ID NO: 154812 - DNA, 25 bp, Artificial
  probe
  misc_feature (1)..(25): SEQ ID NO: 5229; WAN024DEM_at; Start 189; Stop 213
tttgctgactgttgggagcttgctt

SEQ ID NO: 154813 - DNA, 25 bp, Artificial
  probe
  misc_feature (1)..(25): SEQ ID NO: 5229; WAN024DEM_at; Start 418; Stop 442
gaagaaacctcagcaaaacctggag

SEQ ID NO: 154814 - DNA, 25 bp, Artificial
  probe
  misc_feature (1)..(25): SEQ ID NO: 5229; WAN024DEM_at; Start 404; Stop 428
tggacactgttttagaagaaacctc

SEQ ID NO: 154815 - DNA, 25 bp, Artificial
  probe
  misc_feature (1)..(25): SEQ ID NO: 5229; WAN024DEM_at; Start 603; Stop 627
tgacgacacccttcctaaagtagaa

SEQ ID NO: 154816 - DNA, 25 bp, Artificial
  probe
  misc_feature (1)..(25): SEQ ID NO: 5229; WAN024DEM_at; Start 637; Stop 661
gaagattcagcagaaccagctccag

SEQ ID NO: 154817 - DNA, 25 bp, Artificial
  probe
  misc_feature (1)..(25): SEQ ID NO: 5229; WAN024DEM_at; Start 454; Stop 478
gtcgaagttgagactcctcaatcaa

SEQ ID NO: 154818 - DNA, 25 bp, Artificial
  probe
  misc_feature (1)..(25): SEQ ID NO: 5229; WAN024DEM_at; Start 52; Stop 76
gagattatttcacaagaagctaaag

SEQ ID NO: 154819 - DNA, 25 bp, Artificial
  probe
  misc_feature (1)..(25): SEQ ID NO: 5229; WAN024DEM_at; Start 3; Stop 27
gatggctccttctgtagtggacgca

SEQ ID NO: 154820 - DNA, 25 bp, Artificial
  probe
  misc_feature (1)..(25): SEQ ID NO: 5229; WAN024DEM_at; Start 541; Stop 565
gaagaagcacctaaaacagaagaaa

SEQ ID NO: 154821 - DNA, 25 bp, Artificial
  probe
  misc_feature (1)..(25): SEQ ID NO: 5229; WAN024DEM_at; Start 21; Stop 45
ggacgcagccacctatcactatgta

SEQ ID NO: 154822 - DNA, 25 bp, Artificial
  probe
  misc_feature (1)..(25): SEQ ID NO: 5229; WAN024DEM_at; Start 96; Stop 120
gcctgacaggaatgaagttgtatat

SEQ ID NO: 154823 - DNA, 25 bp, Artificial
  probe
  misc_feature (1)..(25): SEQ ID NO: 5229; WAN024DEM_at; Start 290; Stop 314
gggctgtagacccagttgcgaccct

SEQ ID NO: 154824 - DNA, 25 bp, Artificial
  probe
  misc_feature (1)..(25): SEQ ID NO: 5229; WAN024DEM_at; Start 139; Stop 163
gatcagttgcctcaaacagggacag

SEQ ID NO: 154825 - DNA, 25 bp, Artificial
  probe
  misc_feature (1)..(25): SEQ ID NO: 5229; WAN024DEM_at; Start 428; Stop 452
cagcaaaacctggagaggtgactgt

SEQ ID NO: 154826 - DNA, 25 bp, Artificial
  probe
  misc_feature (1)..(25): SEQ ID NO: 5229; WAN024DEM_at; Start 482; Stop 506
caaatcaggagcaagctaggacaga

SEQ ID NO: 154827 - DNA, 25 bp, Artificial
  probe
  misc_feature (1)..(25): SEQ ID NO: 5229; WAN024DEM_at; Start 80; Stop 104
taattcagacaggaaagcctgacag

SEQ ID NO: 154828 - DNA, 25 bp, Artificial
  probe
  misc_feature (1)..(25): SEQ ID NO: 2919; WAN024DEN_at; Start 90; Stop 114
ctctgaacgtggtggtgtggtaaac

SEQ ID NO: 154829 - DNA, 25 bp, Artificial
  probe
  misc_feature (1)..(25): SEQ ID NO: 2919; WAN024DEN_at; Start 460; Stop 484
actagtctacttggttatctggcga

SEQ ID NO: 154830 - DNA, 25 bp, Artificial
  probe
  misc_feature (1)..(25): SEQ ID NO: 2919; WAN024DEN_at; Start 22; Stop 46
cccctcttggtgtcttctatgctga

SEQ ID NO: 154831 - DNA, 25 bp, Artificial
  probe
  misc_feature (1)..(25): SEQ ID NO: 2919; WAN024DEN_at; Start 271; Stop 295
gttcatttccgtgcagaccatgttg

SEQ ID NO: 154832 - DNA, 25 bp, Artificial
  probe
  misc_feature (1)..(25): SEQ ID NO: 2919; WAN024DEN_at; Start 173; Stop 197
aatttgcagaacaatttggagcagc

SEQ ID NO: 154833 - DNA, 25 bp, Artificial
  probe
  misc_feature (1)..(25): SEQ ID NO: 2919; WAN024DEN_at; Start 397; Stop 421
ggacgctttgatttcccagtcttgg

SEQ ID NO: 154834 - DNA, 25 bp, Artificial
  probe
  misc_feature (1)..(25): SEQ ID NO: 2919; WAN024DEN_at; Start 751; Stop 775
ccaatcggtgctatgctttctagtc

SEQ ID NO: 154835 - DNA, 25 bp, Artificial
  probe
  misc_feature (1)..(25): SEQ ID NO: 2919; WAN024DEN_at; Start 256; Stop 280
cacgcagcagcgacggttcatttcc

SEQ ID NO: 154836 - DNA, 25 bp, Artificial
  probe
  misc_feature (1)..(25): SEQ ID NO: 2919; WAN024DEN_at; Start 565; Stop 589
caagcagcggataccttgggaatca

SEQ ID NO: 154837 - DNA, 25 bp, Artificial
  probe
  misc_feature (1)..(25): SEQ ID NO: 2919; WAN024DEN_at; Start 416; Stop 440
tcttggcaaatatcccagtgattgg

SEQ ID NO: 154838 - DNA, 25 bp, Artificial
  probe
  misc_feature (1)..(25): SEQ ID NO: 2919; WAN024DEN_at; Start 203; Stop 227
catggctatccttgcttgtagcagg

SEQ ID NO: 154839 - DNA, 25 bp, Artificial
  probe
  misc_feature (1)..(25): SEQ ID NO: 2919; WAN024DEN_at; Start 625; Stop 649
tcaggttttctaggtggaattggcg

SEQ ID NO: 154840 - DNA, 25 bp, Artificial
  probe
  misc_feature (1)..(25): SEQ ID NO: 2919; WAN024DEN_at; Start 286; Stop 310
gaccatgttgtcagcggtacggtat

SEQ ID NO: 154841 - DNA, 25 bp, Artificial
  probe
  misc_feature (1)..(25): SEQ ID NO: 2919; WAN024DEN_at; Start 671; Stop 695
tctcagttaacttctcagtgacaac

SEQ ID NO: 154842 - DNA, 25 bp, Artificial
  probe
  misc_feature (1)..(25): SEQ ID NO: 2919; WAN024DEN_at; Start 830; Stop 854
tacaaggagtgccagcggtttatct

SEQ ID NO: 154843 - DNA, 25 bp, Artificial
  probe
  misc_feature (1)..(25): SEQ ID NO: 2919; WAN024DEN_at; Start 549; Stop 573
tgtcggtgaacatcctcaagcagcg

SEQ ID NO: 154844 - DNA, 25 bp, Artificial
  probe
  misc_feature (1)..(25): SEQ ID NO: 2919; WAN024DEN_at; Start 581; Stop 605
tgggaatcaacgtctacaagatgag

SEQ ID NO: 154845 - DNA, 25 bp, Artificial
  probe
  misc_feature (1)..(25): SEQ ID NO: 2919; WAN024DEN_at; Start 920; Stop 944
caaaagcagatggtatcaactacat

SEQ ID NO: 154846 - DNA, 25 bp, Artificial
  probe
  misc_feature (1)..(25): SEQ ID NO: 2919; WAN024DEN_at; Start 71; Stop 95
caagtatcggtggtgttttctctga

SEQ ID NO: 154847 - DNA, 25 bp, Artificial
  probe
  misc_feature (1)..(25): SEQ ID NO: 2919; WAN024DEN_at; Start 734; Stop 758
tctttgggaaatggaatccaatcgg

SEQ ID NO: 154848 - DNA, 25 bp, Artificial
  probe
  misc_feature (1)..(25): SEQ ID NO: 2919; WAN024DEN_at; Start 905; Stop 929
gaaaagcagtcgcaccaaaagcaga

SEQ ID NO: 154849 - DNA, 25 bp, Artificial
  probe
  misc_feature (1)..(25): SEQ ID NO: 2919; WAN024DEN_at; Start 686; Stop 710
cagtgacaactattgttggacctgg

SEQ ID NO: 154850 - DNA, 25 bp, Artificial
  probe
  misc_feature (1)..(25): SEQ ID NO: 2919; WAN024DEN_at; Start 646; Stop 670
ggcggagcgatttatgcgcaatcaa

SEQ ID NO: 154851 - DNA, 25 bp, Artificial
  probe
  misc_feature (1)..(25): SEQ ID NO: 2919; WAN024DEN_at; Start 887; Stop 911
tcttagcagccttctttggaaaagc

SEQ ID NO: 154852 - DNA, 25 bp, Artificial
  probe
  misc_feature (1)..(25): SEQ ID NO: 2919; WAN024DEN_at; Start 241; Stop 265
gttttctctatcatccacgcagcag

SEQ ID NO: 154853 - DNA, 25 bp, Artificial
  probe
  misc_feature (1)..(25): SEQ ID NO: 2919; WAN024DEN_at; Start 105; Stop 129
tgtggtaaacgttggccttgaagga

SEQ ID NO: 154854 - DNA, 25 bp, Artificial
  probe
  misc_feature (1)..(25): SEQ ID NO: 2919; WAN024DEN_at; Start 188; Stop 212
ttggagcagcaactccatggctatc

SEQ ID NO: 154855 - DNA, 25 bp, Artificial
  probe
  misc_feature (1)..(25): SEQ ID NO: 2919; WAN024DEN_at; Start 793; Stop 817
caaagtttggctgttatcggttctc

SEQ ID NO: 154856 - DNA, 25 bp, Artificial
  probe
  misc_feature (1)..(25): SEQ ID NO: 2919; WAN024DEN_at; Start 703; Stop 727
ggacctggatttatcgcccttgctg

SEQ ID NO: 154857 - DNA, 25 bp, Artificial
  probe
  misc_feature (1)..(25): SEQ ID NO: 2919; WAN024DEN_at; Start 718; Stop 742
gcccttgctgcgatgatctttggga

SEQ ID NO: 154858 - DNA, 25 bp, Artificial
  probe
  misc_feature (1)..(25): SEQ ID NO: 2919; WAN024DEN_at; Start 224; Stop 248
caggattggttggtagtgttttctc

SEQ ID NO: 154859 - DNA, 25 bp, Artificial
  probe
  misc_feature (1)..(25): SEQ ID NO: 2919; WAN024DEN_at; Start 307; Stop 331
gtattgaacttgatggcgcctgcct

SEQ ID NO: 154860 - DNA, 25 bp, Artificial
  probe
  misc_feature (1)..(25): SEQ ID NO: 2919; WAN024DEN_at; Start 483; Stop 507
gattgccttctcattccttgcttgg

SEQ ID NO: 154861 - DNA, 25 bp, Artificial
  probe
  misc_feature (1)..(25): SEQ ID NO: 2919; WAN024DEN_at; Start 138; Stop 162
tatgggtgccttttctggagttgtc

SEQ ID NO: 154862 - DNA, 25 bp, Artificial
  probe
  misc_feature (1)..(25): SEQ ID NO: 2465; WAN024DEO_at; Start 26; Stop 50
tggcaattgaaaccagcaaacatgc

SEQ ID NO: 154863 - DNA, 25 bp, Artificial
  probe
  misc_feature (1)..(25): SEQ ID NO: 2465; WAN024DEO_at; Start 33; Stop 57
tgaaaccagcaaacatgcctatgtc

SEQ ID NO: 154864 - DNA, 25 bp, Artificial
  probe
  misc_feature (1)..(25): SEQ ID NO: 2465; WAN024DEO_at; Start 39; Stop 63
cagcaaacatgcctatgtcccctat

SEQ ID NO: 154865 - DNA, 25 bp, Artificial
  probe
  misc_feature (1)..(25): SEQ ID NO: 2465; WAN024DEO_at; Start 22; Stop 46
gaactggcaattgaaaccagcaaac

SEQ ID NO: 154866 - DNA, 25 bp, Artificial
  probe
  misc_feature (1)..(25): SEQ ID NO: 2465; WAN024DEO_at; Start 314; Stop 338
tagtcgcaaaagataaatcgacggt

SEQ ID NO: 154867 - DNA, 25 bp, Artificial
  probe
  misc_feature (1)..(25): SEQ ID NO: 2465; WAN024DEO_at; Start 149; Stop 173
tgaccaattgcggtgagagaacagc

SEQ ID NO: 154868 - DNA, 25 bp, Artificial
  probe
  misc_feature (1)..(25): SEQ ID NO: 2465; WAN024DEO_at; Start 212; Stop 236
cagaattgattgtctatggtcaaac

SEQ ID NO: 154869 - DNA, 25 bp, Artificial
  probe
  misc_feature (1)..(25): SEQ ID NO: 2465; WAN024DEO_at; Start 61; Stop 85
tattctcactttcctatcggagcag

SEQ ID NO: 154870 - DNA, 25 bp, Artificial
  probe
  misc_feature (1)..(25): SEQ ID NO: 2465; WAN024DEO_at; Start 48; Stop 72
tgcctatgtcccctattctcacttt

SEQ ID NO: 154871 - DNA, 25 bp, Artificial
  probe
  misc_feature (1)..(25): SEQ ID NO: 2465; WAN024DEO_at; Start 142; Stop 166
tatcctttgaccaattgcggtgaga

SEQ ID NO: 154872 - DNA, 25 bp, Artificial
  probe
  misc_feature (1)..(25): SEQ ID NO: 2465; WAN024DEO_at; Start 71; Stop 95
ttcctatcggagcagttttagtagc

SEQ ID NO: 154873 - DNA, 25 bp, Artificial
  probe
  misc_feature (1)..(25): SEQ ID NO: 2465; WAN024DEO_at; Start 18; Stop 42
gattgaactggcaattgaaaccagc

SEQ ID NO: 154874 - DNA, 25 bp, Artificial
  probe
  misc_feature (1)..(25): SEQ ID NO: 2465; WAN024DEO_at; Start 162; Stop 186
tgagagaacagctatttttaaggct

SEQ ID NO: 154875 - DNA, 25 bp, Artificial
  probe
  misc_feature (1)..(25): SEQ ID NO: 2465; WAN024DEO_at; Start 188; Stop 212
tatctgaaggccaaagagaattttc

SEQ ID NO: 154876 - DNA, 25 bp, Artificial
  probe
  misc_feature (1)..(25): SEQ ID NO: 2465; WAN024DEO_at; Start 222; Stop 246
tgtctatggtcaaactgaaaaaccg

SEQ ID NO: 154877 - DNA, 25 bp, Artificial
  probe
  misc_feature (1)..(25): SEQ ID NO: 2465; WAN024DEO_at; Start 197; Stop 221
gccaaagagaattttcagaattgat

SEQ ID NO: 154878 - DNA, 25 bp, Artificial
  probe
  misc_feature (1)..(25): SEQ ID NO: 2465; WAN024DEO_at; Start 152; Stop 176
ccaattgcggtgagagaacagctat

SEQ ID NO: 154879 - DNA, 25 bp, Artificial
  probe
  misc_feature (1)..(25): SEQ ID NO: 2465; WAN024DEO_at; Start 29; Stop 53
caattgaaaccagcaaacatgccta

SEQ ID NO: 154880 - DNA, 25 bp, Artificial
  probe
  misc_feature (1)..(25): SEQ ID NO: 2465; WAN024DEO_at; Start 157; Stop 181
tgcggtgagagaacagctattttta

SEQ ID NO: 154881 - DNA, 25 bp, Artificial
  probe
  misc_feature (1)..(25): SEQ ID NO: 2465; WAN024DEO_at; Start 224; Stop 248
tctatggtcaaactgaaaaaccgat

SEQ ID NO: 154882 - DNA, 25 bp, Artificial
  probe
  misc_feature (1)..(25): SEQ ID NO: 2465; WAN024DEO_at; Start 320; Stop 344
caaaagataaatcgacggtcgagat

SEQ ID NO: 154883 - DNA, 25 bp, Artificial
  probe
  misc_feature (1)..(25): SEQ ID NO: 2465; WAN024DEO_at; Start 180; Stop 204
taaggctatatctgaaggccaaaga

SEQ ID NO: 154884 - DNA, 25 bp, Artificial
  probe
  misc_feature (1)..(25): SEQ ID NO: 2465; WAN024DEO_at; Start 64; Stop 88
tctcactttcctatcggagcagttt

SEQ ID NO: 154885 - DNA, 25 bp, Artificial
  probe
  misc_feature (1)..(25): SEQ ID NO: 2465; WAN024DEO_at; Start 6; Stop 30
gactactgagttgattgaactggca

SEQ ID NO: 154886 - DNA, 25 bp, Artificial
  probe
  misc_feature (1)..(25): SEQ ID NO: 2465; WAN024DEO_at; Start 44; Stop 68
aacatgcctatgtcccctattctca

SEQ ID NO: 154887 - DNA, 25 bp, Artificial
  probe
  misc_feature (1)..(25): SEQ ID NO: 2465; WAN024DEO_at; Start 138; Stop 162
tagctatcctttgaccaattgcggt

SEQ ID NO: 154888 - DNA, 25 bp, Artificial
  probe
  misc_feature (1)..(25): SEQ ID NO: 2465; WAN024DEO_at; Start 145; Stop 169
cctttgaccaattgcggtgagagaa

SEQ ID NO: 154889 - DNA, 25 bp, Artificial
  probe
  misc_feature (1)..(25): SEQ ID NO: 2465; WAN024DEO_at; Start 318; Stop 342
cgcaaaagataaatcgacggtcgag

SEQ ID NO: 154890 - DNA, 25 bp, Artificial
  probe
  misc_feature (1)..(25): SEQ ID NO: 2465; WAN024DEO_at; Start 322; Stop 346
aaagataaatcgacggtcgagatga

SEQ ID NO: 154891 - DNA, 25 bp, Artificial
  probe
  misc_feature (1)..(25): SEQ ID NO: 2465; WAN024DEO_at; Start 165; Stop 189
gagaacagctatttttaaggctata

SEQ ID NO: 154892 - DNA, 25 bp, Artificial
  probe
  misc_feature (1)..(25): SEQ ID NO: 2465; WAN024DEO_at; Start 174; Stop 198
tatttttaaggctatatctgaaggc

SEQ ID NO: 154893 - DNA, 25 bp, Artificial
  probe
  misc_feature (1)..(25): SEQ ID NO: 2465; WAN024DEO_at; Start 2; Stop 26
tggcgactactgagttgattgaact

SEQ ID NO: 154894 - DNA, 25 bp, Artificial
  probe
  misc_feature (1)..(25): SEQ ID NO: 2465; WAN024DEO_at; Start 184; Stop 208
gctatatctgaaggccaaagagaat

SEQ ID NO: 154895 - DNA, 25 bp, Artificial
  probe
  misc_feature (1)..(25): SEQ ID NO: 2465; WAN024DEO_at; Start 193; Stop 217
gaaggccaaagagaattttcagaat

SEQ ID NO: 154896 - DNA, 25 bp, Artificial
  probe
  misc_feature (1)..(25): SEQ ID NO: 769; WAN024DEP_at; Start 258; Stop 282
ggttatttcttccacatgtcactag

SEQ ID NO: 154897 - DNA, 25 bp, Artificial
  probe
  misc_feature (1)..(25): SEQ ID NO: 769; WAN024DEP_at; Start 136; Stop 160
catgctattgtaacagctgtcttta

SEQ ID NO: 154898 - DNA, 25 bp, Artificial
  probe
  misc_feature (1)..(25): SEQ ID NO: 769; WAN024DEP_at; Start 132; Stop 156
ggaacatgctattgtaacagctgtc

SEQ ID NO: 154899 - DNA, 25 bp, Artificial
  probe
  misc_feature (1)..(25): SEQ ID NO: 769; WAN024DEP_at; Start 231; Stop 255
tttttagtcctacggattgcgacag

SEQ ID NO: 154900 - DNA, 25 bp, Artificial
  probe
  misc_feature (1)..(25): SEQ ID NO: 769; WAN024DEP_at; Start 282; Stop 306
gaagatttgatacgactttggacaa

SEQ ID NO: 154901 - DNA, 25 bp, Artificial
  probe
  misc_feature (1)..(25): SEQ ID NO: 769; WAN024DEP_at; Start 80; Stop 104
cagataatggtagatgctttgtgga

SEQ ID NO: 154902 - DNA, 25 bp, Artificial
  probe
  misc_feature (1)..(25): SEQ ID NO: 769; WAN024DEP_at; Start 87; Stop 111
tggtagatgctttgtggaaacctat

SEQ ID NO: 154903 - DNA, 25 bp, Artificial
  probe
  misc_feature (1)..(25): SEQ ID NO: 769; WAN024DEP_at; Start 290; Stop 314
gatacgactttggacaagtttggaa

SEQ ID NO: 154904 - DNA, 25 bp, Artificial
  probe
  misc_feature (1)..(25): SEQ ID NO: 769; WAN024DEP_at; Start 272; Stop 296
catgtcactagaagatttgatacga

SEQ ID NO: 154905 - DNA, 25 bp, Artificial
  probe
  misc_feature (1)..(25): SEQ ID NO: 769; WAN024DEP_at; Start 235; Stop 259
tagtcctacggattgcgacagaggg

SEQ ID NO: 154906 - DNA, 25 bp, Artificial
  probe
  misc_feature (1)..(25): SEQ ID NO: 769; WAN024DEP_at; Start 175; Stop 199
attgctttcttactaaaaaacgatg

SEQ ID NO: 154907 - DNA, 25 bp, Artificial
  probe
  misc_feature (1)..(25): SEQ ID NO: 769; WAN024DEP_at; Start 215; Stop 239
tgcgggtagttattgctttttagtc

SEQ ID NO: 154908 - DNA, 25 bp, Artificial
  probe
  misc_feature (1)..(25): SEQ ID NO: 769; WAN024DEP_at; Start 203; Stop 227
gaaatggattgctgcgggtagttat

SEQ ID NO: 154909 - DNA, 25 bp, Artificial
  probe
  misc_feature (1)..(25): SEQ ID NO: 769; WAN024DEP_at; Start 229; Stop 253
gctttttagtcctacggattgcgac

SEQ ID NO: 154910 - DNA, 25 bp, Artificial
  probe
  misc_feature (1)..(25): SEQ ID NO: 769; WAN024DEP_at; Start 261; Stop 285
tatttcttccacatgtcactagaag

SEQ ID NO: 154911 - DNA, 25 bp, Artificial
  probe
  misc_feature (1)..(25): SEQ ID NO: 769; WAN024DEP_at; Start 298; Stop 322
tttggacaagtttggaaatcctgac

SEQ ID NO: 154912 - DNA, 25 bp, Artificial
  probe
  misc_feature (1)..(25): SEQ ID NO: 769; WAN024DEP_at; Start 242; Stop 266
acggattgcgacagagggttatttc

SEQ ID NO: 154913 - DNA, 25 bp, Artificial
  probe
  misc_feature (1)..(25): SEQ ID NO: 769; WAN024DEP_at; Start 302; Stop 326
gacaagtttggaaatcctgacataa

SEQ ID NO: 154914 - DNA, 25 bp, Artificial
  probe
  misc_feature (1)..(25): SEQ ID NO: 769; WAN024DEP_at; Start 267; Stop 291
ttccacatgtcactagaagatttga

SEQ ID NO: 154915 - DNA, 25 bp, Artificial
  probe
  misc_feature (1)..(25): SEQ ID NO: 769; WAN024DEP_at; Start 249; Stop 273
gcgacagagggttatttcttccaca

SEQ ID NO: 154916 - DNA, 25 bp, Artificial
  probe
  misc_feature (1)..(25): SEQ ID NO: 769; WAN024DEP_at; Start 84; Stop 108
taatggtagatgctttgtggaaacc

SEQ ID NO: 154917 - DNA, 25 bp, Artificial
  probe
  misc_feature (1)..(25): SEQ ID NO: 769; WAN024DEP_at; Start 74; Stop 98
ccaatgcagataatggtagatgctt

SEQ ID NO: 154918 - DNA, 25 bp, Artificial
  probe
  misc_feature (1)..(25): SEQ ID NO: 769; WAN024DEP_at; Start 17; Stop 41
gttacatattggaactctgttttat

SEQ ID NO: 154919 - DNA, 25 bp, Artificial
  probe
  misc_feature (1)..(25): SEQ ID NO: 769; WAN024DEP_at; Start 128; Stop 152
tgatggaacatgctattgtaacagc

SEQ ID NO: 154920 - DNA, 25 bp, Artificial
  probe
  misc_feature (1)..(25): SEQ ID NO: 769; WAN024DEP_at; Start 208; Stop 232
ggattgctgcgggtagttattgctt

SEQ ID NO: 154921 - DNA, 25 bp, Artificial
  probe
  misc_feature (1)..(25): SEQ ID NO: 769; WAN024DEP_at; Start 212; Stop 236
tgctgcgggtagttattgcttttta

SEQ ID NO: 154922 - DNA, 25 bp, Artificial
  probe
  misc_feature (1)..(25): SEQ ID NO: 769; WAN024DEP_at; Start 93; Stop 117
atgctttgtggaaacctattacggt

SEQ ID NO: 154923 - DNA, 25 bp, Artificial
  probe
  misc_feature (1)..(25): SEQ ID NO: 769; WAN024DEP_at; Start 92; Stop 116
gatgctttgtggaaacctattacgg

SEQ ID NO: 154924 - DNA, 25 bp, Artificial
  probe
  misc_feature (1)..(25): SEQ ID NO: 769; WAN024DEP_at; Start 277; Stop 301
cactagaagatttgatacgactttg

SEQ ID NO: 154925 - DNA, 25 bp, Artificial
  probe
  misc_feature (1)..(25): SEQ ID NO: 769; WAN024DEP_at; Start 285; Stop 309
gatttgatacgactttggacaagtt

SEQ ID NO: 154926 - DNA, 25 bp, Artificial
  probe
  misc_feature (1)..(25): SEQ ID NO: 769; WAN024DEP_at; Start 239; Stop 263
cctacggattgcgacagagggttat

SEQ ID NO: 154927 - DNA, 25 bp, Artificial
  probe
  misc_feature (1)..(25): SEQ ID NO: 769; WAN024DEP_at; Start 245; Stop 269
gattgcgacagagggttatttcttc

SEQ ID NO: 154928 - DNA, 25 bp, Artificial
  probe
  misc_feature (1)..(25): SEQ ID NO: 769; WAN024DEP_at; Start 251; Stop 275
gacagagggttatttcttccacatg

SEQ ID NO: 154929 - DNA, 25 bp, Artificial
  probe
  misc_feature (1)..(25): SEQ ID NO: 769; WAN024DEP_at; Start 255; Stop 279
gagggttatttcttccacatgtcac

SEQ ID NO: 154930 - DNA, 25 bp, Artificial
  probe
  misc_feature (1)..(25): SEQ ID NO: 4205; WAN024DEQ_at; Start 340; Stop 364
gtgacaactttcagtgctcctaaag

SEQ ID NO: 154931 - DNA, 25 bp, Artificial
  probe
  misc_feature (1)..(25): SEQ ID NO: 4205; WAN024DEQ_at; Start 324; Stop 348
ccatgtattgaggaaagtgacaact

SEQ ID NO: 154932 - DNA, 25 bp, Artificial
  probe
  misc_feature (1)..(25): SEQ ID NO: 4205; WAN024DEQ_at; Start 61; Stop 85
aaactagaaactcctcttagagagg

SEQ ID NO: 154933 - DNA, 25 bp, Artificial
  probe
  misc_feature (1)..(25): SEQ ID NO: 4205; WAN024DEQ_at; Start 624; Stop 648
taaacatggttatcgtgatccgaaa

SEQ ID NO: 154934 - DNA, 25 bp, Artificial
  probe
  misc_feature (1)..(25): SEQ ID NO: 4205; WAN024DEQ_at; Start 708; Stop 732
cgctgaaccaatggaaaatattgcc

SEQ ID NO: 154935 - DNA, 25 bp, Artificial
  probe
  misc_feature (1)..(25): SEQ ID NO: 4205; WAN024DEQ_at; Start 129; Stop 153
tcttgaaaacaaaagggaagagtca

SEQ ID NO: 154936 - DNA, 25 bp, Artificial
  probe
  misc_feature (1)..(25): SEQ ID NO: 4205; WAN024DEQ_at; Start 856; Stop 880
ccttggtggcaagtagatttggcta

SEQ ID NO: 154937 - DNA, 25 bp, Artificial
  probe
  misc_feature (1)..(25): SEQ ID NO: 4205; WAN024DEQ_at; Start 539; Stop 563
gctttaaacaccgttctcgtggcta

SEQ ID NO: 154938 - DNA, 25 bp, Artificial
  probe
  misc_feature (1)..(25): SEQ ID NO: 4205; WAN024DEQ_at; Start 36; Stop 60
gaaagagtcagaaaatgatgctcca

SEQ ID NO: 154939 - DNA, 25 bp, Artificial
  probe
  misc_feature (1)..(25): SEQ ID NO: 4205; WAN024DEQ_at; Start 206; Stop 230
gggaattagccaaggatataagtat

SEQ ID NO: 154940 - DNA, 25 bp, Artificial
  probe
  misc_feature (1)..(25): SEQ ID NO: 4205; WAN024DEQ_at; Start 934; Stop 958
gatagattggcaaactttgatgtca

SEQ ID NO: 154941 - DNA, 25 bp, Artificial
  probe
  misc_feature (1)..(25): SEQ ID NO: 4205; WAN024DEQ_at; Start 92; Stop 116
gactagctcctcaaacgcttccgga

SEQ ID NO: 154942 - DNA, 25 bp, Artificial
  probe
  misc_feature (1)..(25): SEQ ID NO: 4205; WAN024DEQ_at; Start 553; Stop 577
tctcgtggctattttgaaagtccaa

SEQ ID NO: 154943 - DNA, 25 bp, Artificial
  probe
  misc_feature (1)..(25): SEQ ID NO: 4205; WAN024DEQ_at; Start 883; Stop 907
gaagaaaccattcgccaaatcaata

SEQ ID NO: 154944 - DNA, 25 bp, Artificial
  probe
  misc_feature (1)..(25): SEQ ID NO: 4205; WAN024DEQ_at; Start 5; Stop 29
taataggtgtgctagattctaagga

SEQ ID NO: 154945 - DNA, 25 bp, Artificial
  probe
  misc_feature (1)..(25): SEQ ID NO: 4205; WAN024DEQ_at; Start 847; Stop 871
caatctaagccttggtggcaagtag

SEQ ID NO: 154946 - DNA, 25 bp, Artificial
  probe
  misc_feature (1)..(25): SEQ ID NO: 4205; WAN024DEQ_at; Start 231; Stop 255
tactaagttgtatatgacaggtcat

SEQ ID NO: 154947 - DNA, 25 bp, Artificial
  probe
  misc_feature (1)..(25): SEQ ID NO: 4205; WAN024DEQ_at; Start 567; Stop 591
tgaaagtccaatgaatgatattcct

SEQ ID NO: 154948 - DNA, 25 bp, Artificial
  probe
  misc_feature (1)..(25): SEQ ID NO: 4205; WAN024DEQ_at; Start 434; Stop 458
tagctgttagtggaaaaattaagca

SEQ ID NO: 154949 - DNA, 25 bp, Artificial
  probe
  misc_feature (1)..(25): SEQ ID NO: 4205; WAN024DEQ_at; Start 817; Stop 841
ggtcacaattctgtcactcatacaa

SEQ ID NO: 154950 - DNA, 25 bp, Artificial
  probe
  misc_feature (1)..(25): SEQ ID NO: 4205; WAN024DEQ_at; Start 780; Stop 804
tagaagagctgtggatggcaaagtc

SEQ ID NO: 154951 - DNA, 25 bp, Artificial
  probe
  misc_feature (1)..(25): SEQ ID NO: 4205; WAN024DEQ_at; Start 920; Stop 944
cagacactgcccaggatagattggc

SEQ ID NO: 154952 - DNA, 25 bp, Artificial
  probe
  misc_feature (1)..(25): SEQ ID NO: 4205; WAN024DEQ_at; Start 873; Stop 897
tttggctaaagaagaaaccattcgc

SEQ ID NO: 154953 - DNA, 25 bp, Artificial
  probe
  misc_feature (1)..(25): SEQ ID NO: 4205; WAN024DEQ_at; Start 177; Stop 201
tcaagcggatgatatccgcaaggtt

SEQ ID NO: 154954 - DNA, 25 bp, Artificial
  probe
  misc_feature (1)..(25): SEQ ID NO: 4205; WAN024DEQ_at; Start 144; Stop 168
ggaagagtcaaaagtagagataaca

SEQ ID NO: 154955 - DNA, 25 bp, Artificial
  probe
  misc_feature (1)..(25): SEQ ID NO: 4205; WAN024DEQ_at; Start 906; Stop 930
tatttacaaccgaacagacactgcc

SEQ ID NO: 154956 - DNA, 25 bp, Artificial
  probe
  misc_feature (1)..(25): SEQ ID NO: 4205; WAN024DEQ_at; Start 75; Stop 99
tcttagagaggagccaagactagct

SEQ ID NO: 154957 - DNA, 25 bp, Artificial
  probe
  misc_feature (1)..(25): SEQ ID NO: 4205; WAN024DEQ_at; Start 525; Stop 549
tacaggtaattcacgctttaaacac

SEQ ID NO: 154958 - DNA, 25 bp, Artificial
  probe
  misc_feature (1)..(25): SEQ ID NO: 4205; WAN024DEQ_at; Start 691; Stop 715
tcttctagtcaaccaagcgctgaac

SEQ ID NO: 154959 - DNA, 25 bp, Artificial
  probe
  misc_feature (1)..(25): SEQ ID NO: 4205; WAN024DEQ_at; Start 107; Stop 131
cgcttccggaagcaagtgaagttct

SEQ ID NO: 154960 - DNA, 25 bp, Artificial
  probe
  misc_feature (1)..(25): SEQ ID NO: 4205; WAN024DEQ_at; Start 798; Stop 822
caaagtcgatggtaactatggtcac

SEQ ID NO: 154961 - DNA, 25 bp, Artificial
  probe
  misc_feature (1)..(25): SEQ ID NO: 4205; WAN024DEQ_at; Start 22; Stop 46
tctaaggaggaattgaaagagtcag

SEQ ID NO: 154962 - DNA, 25 bp, Artificial
  probe
  misc_feature (1)..(25): SEQ ID NO: 4205; WAN024DEQ_at; Start 51; Stop 75
tgatgctccaaaactagaaactcct

SEQ ID NO: 154963 - DNA, 25 bp, Artificial
  probe
  misc_feature (1)..(25): SEQ ID NO: 4205; WAN024DEQ_at; Start 471; Stop 495
taatgacaatgttgtgactcccttg

SEQ ID NO: 154964 - DNA, 25 bp, Artificial
  probe
  misc_feature (1)..(25): SEQ ID NO: 933; WAN024DER_s_at; Start 478; Stop 502
tctggaattacgattgaaaagcaaa

SEQ ID NO: 154965 - DNA, 25 bp, Artificial
  probe
  misc_feature (1)..(25): SEQ ID NO: 933; WAN024DER_s_at; Start 836; Stop 860
gtcaacaagagagggtaagcaaaga

SEQ ID NO: 154966 - DNA, 25 bp, Artificial
  probe
  misc_feature (1)..(25): SEQ ID NO: 933; WAN024DER_s_at; Start 841; Stop 865
caagagagggtaagcaaagataaac

SEQ ID NO: 154967 - DNA, 25 bp, Artificial
  probe
  misc_feature (1)..(25): SEQ ID NO: 933; WAN024DER_s_at; Start 840; Stop 864
acaagagagggtaagcaaagataaa

SEQ ID NO: 154968 - DNA, 25 bp, Artificial
  probe
  misc_feature (1)..(25): SEQ ID NO: 933; WAN024DER_s_at; Start 838; Stop 862
caacaagagagggtaagcaaagata

SEQ ID NO: 154969 - DNA, 25 bp, Artificial
  probe
  misc_feature (1)..(25): SEQ ID NO: 933; WAN024DER_s_at; Start 837; Stop 861
tcaacaagagagggtaagcaaagat

SEQ ID NO: 154970 - DNA, 25 bp, Artificial
  probe
  misc_feature (1)..(25): SEQ ID NO: 933; WAN024DER_s_at; Start 844; Stop 868
gagagggtaagcaaagataaacttg

SEQ ID NO: 154971 - DNA, 25 bp, Artificial
  probe
  misc_feature (1)..(25): SEQ ID NO: 933; WAN024DER_s_at; Start 835; Stop 859
tgtcaacaagagagggtaagcaaag

SEQ ID NO: 154972 - DNA, 25 bp, Artificial
  probe
  misc_feature (1)..(25): SEQ ID NO: 933; WAN024DER_s_at; Start 842; Stop 866
aagagagggtaagcaaagataaact

SEQ ID NO: 154973 - DNA, 25 bp, Artificial
  probe
  misc_feature (1)..(25): SEQ ID NO: 933; WAN024DER_s_at; Start 374; Stop 398
tgattgtagacggaggtgccttgac

SEQ ID NO: 154974 - DNA, 25 bp, Artificial
  probe
  misc_feature (1)..(25): SEQ ID NO: 933; WAN024DER_s_at; Start 843; Stop 867
agagagggtaagcaaagataaactt

SEQ ID NO: 154975 - DNA, 25 bp, Artificial
  probe
  misc_feature (1)..(25): SEQ ID NO: 933; WAN024DER_s_at; Start 845; Stop 869
agagggtaagcaaagataaacttgt

SEQ ID NO: 154976 - DNA, 25 bp, Artificial
  probe
  misc_feature (1)..(25): SEQ ID NO: 933; WAN024DER_s_at; Start 839; Stop 863
aacaagagagggtaagcaaagataa

SEQ ID NO: 154977 - DNA, 25 bp, Artificial
  probe
  misc_feature (1)..(25): SEQ ID NO: 3451; WAN024DES_at; Start 23; Stop 47
tctttgcttaccctctcttgttgac

SEQ ID NO: 154978 - DNA, 25 bp, Artificial
  probe
  misc_feature (1)..(25): SEQ ID NO: 3451; WAN024DES_at; Start 63; Stop 87
ttttgggaagatacctgctgatttc

SEQ ID NO: 154979 - DNA, 25 bp, Artificial
  probe
  misc_feature (1)..(25): SEQ ID NO: 3451; WAN024DES_at; Start 27; Stop 51
tgcttaccctctcttgttgacaaat

SEQ ID NO: 154980 - DNA, 25 bp, Artificial
  probe
  misc_feature (1)..(25): SEQ ID NO: 3451; WAN024DES_at; Start 1; Stop 25
ctgtctattttaaacaagtttatct

SEQ ID NO: 154981 - DNA, 25 bp, Artificial
  probe
  misc_feature (1)..(25): SEQ ID NO: 3451; WAN024DES_at; Start 60; Stop 84
ttattttgggaagatacctgctgat

SEQ ID NO: 154982 - DNA, 25 bp, Artificial
  probe
  misc_feature (1)..(25): SEQ ID NO: 3451; WAN024DES_at; Start 61; Stop 85
tattttgggaagatacctgctgatt

SEQ ID NO: 154983 - DNA, 25 bp, Artificial
  probe
  misc_feature (1)..(25): SEQ ID NO: 3451; WAN024DES_at; Start 25; Stop 49
tttgcttaccctctcttgttgacaa

SEQ ID NO: 154984 - DNA, 25 bp, Artificial
  probe
  misc_feature (1)..(25): SEQ ID NO: 3451; WAN024DES_at; Start 24; Stop 48
ctttgcttaccctctcttgttgaca

SEQ ID NO: 154985 - DNA, 25 bp, Artificial
  probe
  misc_feature (1)..(25): SEQ ID NO: 3451; WAN024DES_at; Start 19; Stop 43
tttatctttgcttaccctctcttgt

SEQ ID NO: 154986 - DNA, 25 bp, Artificial
  probe
  misc_feature (1)..(25): SEQ ID NO: 3451; WAN024DES_at; Start 28; Stop 52
gcttaccctctcttgttgacaaata

SEQ ID NO: 154987 - DNA, 25 bp, Artificial
  probe
  misc_feature (1)..(25): SEQ ID NO: 3451; WAN024DES_at; Start 58; Stop 82
cattattttgggaagatacctgctg

SEQ ID NO: 154988 - DNA, 25 bp, Artificial
  probe
  misc_feature (1)..(25): SEQ ID NO: 3451; WAN024DES_at; Start 69; Stop 93
gaagatacctgctgatttccgtcgg

SEQ ID NO: 154989 - DNA, 25 bp, Artificial
  probe
  misc_feature (1)..(25): SEQ ID NO: 3451; WAN024DES_at; Start 57; Stop 81
tcattattttgggaagatacctgct

SEQ ID NO: 154990 - DNA, 25 bp, Artificial
  probe
  misc_feature (1)..(25): SEQ ID NO: 3451; WAN024DES_at; Start 16; Stop 40
aagtttatctttgcttaccctctct

SEQ ID NO: 154991 - DNA, 25 bp, Artificial
  probe
  misc_feature (1)..(25): SEQ ID NO: 3451; WAN024DES_at; Start 18; Stop 42
gtttatctttgcttaccctctcttg

SEQ ID NO: 154992 - DNA, 25 bp, Artificial
  probe
  misc_feature (1)..(25): SEQ ID NO: 3451; WAN024DES_at; Start 59; Stop 83
attattttgggaagatacctgctga

SEQ ID NO: 154993 - DNA, 25 bp, Artificial
  probe
  misc_feature (1)..(25): SEQ ID NO: 3451; WAN024DES_at; Start 21; Stop 45
tatctttgcttaccctctcttgttg

SEQ ID NO: 154994 - DNA, 25 bp, Artificial
  probe
  misc_feature (1)..(25): SEQ ID NO: 3451; WAN024DES_at; Start 33; Stop 57
ccctctcttgttgacaaataatttt

SEQ ID NO: 154995 - DNA, 25 bp, Artificial
  probe
  misc_feature (1)..(25): SEQ ID NO: 3451; WAN024DES_at; Start 62; Stop 86
attttgggaagatacctgctgattt

SEQ ID NO: 154996 - DNA, 25 bp, Artificial
  probe
  misc_feature (1)..(25): SEQ ID NO: 3451; WAN024DES_at; Start 36; Stop 60
tctcttgttgacaaataattttcat

SEQ ID NO: 154997 - DNA, 25 bp, Artificial
  probe
  misc_feature (1)..(25): SEQ ID NO: 3451; WAN024DES_at; Start 26; Stop 50
ttgcttaccctctcttgttgacaaa

SEQ ID NO: 154998 - DNA, 25 bp, Artificial
  probe
  misc_feature (1)..(25): SEQ ID NO: 3451; WAN024DES_at; Start 38; Stop 62
tcttgttgacaaataattttcatta

SEQ ID NO: 154999 - DNA, 25 bp, Artificial
  probe
  misc_feature (1)..(25): SEQ ID NO: 3451; WAN024DES_at; Start 66; Stop 90
tgggaagatacctgctgatttccgt

SEQ ID NO: 155000 - DNA, 25 bp, Artificial
  probe
  misc_feature (1)..(25): SEQ ID NO: 3451; WAN024DES_at; Start 68; Stop 92
ggaagatacctgctgatttccgtcg

SEQ ID NO: 155001 - DNA, 25 bp, Artificial
  probe
  misc_feature (1)..(25): SEQ ID NO: 3451; WAN024DES_at; Start 67; Stop 91
gggaagatacctgctgatttccgtc

SEQ ID NO: 155002 - DNA, 25 bp, Artificial
  probe
  misc_feature (1)..(25): SEQ ID NO: 3451; WAN024DES_at; Start 31; Stop 55
taccctctcttgttgacaaataatt

SEQ ID NO: 155003 - DNA, 25 bp, Artificial
  probe
  misc_feature (1)..(25): SEQ ID NO: 3451; WAN024DES_at; Start 29; Stop 53
cttaccctctcttgttgacaaataa

SEQ ID NO: 155004 - DNA, 25 bp, Artificial
  probe
  misc_feature (1)..(25): SEQ ID NO: 3451; WAN024DES_at; Start 14; Stop 38
acaagtttatctttgcttaccctct

SEQ ID NO: 155005 - DNA, 25 bp, Artificial
  probe
  misc_feature (1)..(25): SEQ ID NO: 3451; WAN024DES_at; Start 65; Stop 89
ttgggaagatacctgctgatttccg

SEQ ID NO: 155006 - DNA, 25 bp, Artificial
  probe
  misc_feature (1)..(25): SEQ ID NO: 3451; WAN024DES_at; Start 15; Stop 39
caagtttatctttgcttaccctctc

SEQ ID NO: 155007 - DNA, 25 bp, Artificial
  probe
  misc_feature (1)..(25): SEQ ID NO: 3451; WAN024DES_at; Start 64; Stop 88
tttgggaagatacctgctgatttcc

SEQ ID NO: 155008 - DNA, 25 bp, Artificial
  probe
  misc_feature (1)..(25): SEQ ID NO: 3451; WAN024DES_at; Start 35; Stop 59
ctctcttgttgacaaataattttca

SEQ ID NO: 155009 - DNA, 25 bp, Artificial
  probe
  misc_feature (1)..(25): SEQ ID NO: 3451; WAN024DES_at; Start 55; Stop 79
tttcattattttgggaagatacctg

SEQ ID NO: 155010 - DNA, 25 bp, Artificial
  probe
  misc_feature (1)..(25): SEQ ID NO: 3451; WAN024DES_at; Start 34; Stop 58
cctctcttgttgacaaataattttc

SEQ ID NO: 155011 - DNA, 25 bp, Artificial
  probe
  misc_feature (1)..(25): SEQ ID NO: 931; WAN024DET_at; Start 570; Stop 594
ggctactcgtgtttggcaagctggc

SEQ ID NO: 155012 - DNA, 25 bp, Artificial
  probe
  misc_feature (1)..(25): SEQ ID NO: 931; WAN024DET_at; Start 784; Stop 808
gtcttaccgacggaaatcagcaggt

SEQ ID NO: 155013 - DNA, 25 bp, Artificial
  probe
  misc_feature (1)..(25): SEQ ID NO: 931; WAN024DET_at; Start 780; Stop 804
tgtggtcttaccgacggaaatcagc

SEQ ID NO: 155014 - DNA, 25 bp, Artificial
  probe
  misc_feature (1)..(25): SEQ ID NO: 931; WAN024DET_at; Start 71; Stop 95
attatggtcgtctgctgctgcttgg

SEQ ID NO: 155015 - DNA, 25 bp, Artificial
  probe
  misc_feature (1)..(25): SEQ ID NO: 931; WAN024DET_at; Start 235; Stop 259
gctcttcaagacaagcaattgttaa

SEQ ID NO: 155016 - DNA, 25 bp, Artificial
  probe
  misc_feature (1)..(25): SEQ ID NO: 931; WAN024DET_at; Start 247; Stop 271
aagcaattgttaaaagagcagttgg

SEQ ID NO: 155017 - DNA, 25 bp, Artificial
  probe
  misc_feature (1)..(25): SEQ ID NO: 931; WAN024DET_at; Start 624; Stop 648
cggtccctatcaggcaactggggga

SEQ ID NO: 155018 - DNA, 25 bp, Artificial
  probe
  misc_feature (1)..(25): SEQ ID NO: 931; WAN024DET_at; Start 660; Stop 684
tctggctgggatgatcgcaggattt

SEQ ID NO: 155019 - DNA, 25 bp, Artificial
  probe
  misc_feature (1)..(25): SEQ ID NO: 931; WAN024DET_at; Start 801; Stop 825
cagcaggtatcttcccaaaataatg

SEQ ID NO: 155020 - DNA, 25 bp, Artificial
  probe
  misc_feature (1)..(25): SEQ ID NO: 931; WAN024DET_at; Start 804; Stop 828
caggtatcttcccaaaataatgaaa

SEQ ID NO: 155021 - DNA, 25 bp, Artificial
  probe
  misc_feature (1)..(25): SEQ ID NO: 931; WAN024DET_at; Start 330; Stop 354
tttagttaaacaggtctttgctggc

SEQ ID NO: 155022 - DNA, 25 bp, Artificial
  probe
  misc_feature (1)..(25): SEQ ID NO: 931; WAN024DET_at; Start 68; Stop 92
gagattatggtcgtctgctgctgct

SEQ ID NO: 155023 - DNA, 25 bp, Artificial
  probe
  misc_feature (1)..(25): SEQ ID NO: 931; WAN024DET_at; Start 654; Stop 678
agatactctggctgggatgatcgca

SEQ ID NO: 155024 - DNA, 25 bp, Artificial
  probe
  misc_feature (1)..(25): SEQ ID NO: 931; WAN024DET_at; Start 333; Stop 357
agttaaacaggtctttgctggctta

SEQ ID NO: 155025 - DNA, 25 bp, Artificial
  probe
  misc_feature (1)..(25): SEQ ID NO: 931; WAN024DET_at; Start 567; Stop 591
tccggctactcgtgtttggcaagct

SEQ ID NO: 155026 - DNA, 25 bp, Artificial
  probe
  misc_feature (1)..(25): SEQ ID NO: 931; WAN024DET_at; Start 508; Stop 532
gatacaacggctagtgccctgactt

SEQ ID NO: 155027 - DNA, 25 bp, Artificial
  probe
  misc_feature (1)..(25): SEQ ID NO: 931; WAN024DET_at; Start 788; Stop 812
taccgacggaaatcagcaggtatct

SEQ ID NO: 155028 - DNA, 25 bp, Artificial
  probe
  misc_feature (1)..(25): SEQ ID NO: 931; WAN024DET_at; Start 321; Stop 345
tggagaagatttagttaaacaggtc

SEQ ID NO: 155029 - DNA, 25 bp, Artificial
  probe
  misc_feature (1)..(25): SEQ ID NO: 931; WAN024DET_at; Start 192; Stop 216
tatccctgctctgcacagtcattta

SEQ ID NO: 155030 - DNA, 25 bp, Artificial
  probe
  misc_feature (1)..(25): SEQ ID NO: 931; WAN024DET_at; Start 556; Stop 580
gtggagaaaggtccggctactcgtg

SEQ ID NO: 155031 - DNA, 25 bp, Artificial
  probe
  misc_feature (1)..(25): SEQ ID NO: 931; WAN024DET_at; Start 672; Stop 696
gatcgcaggatttgtaggccaattc

SEQ ID NO: 155032 - DNA, 25 bp, Artificial
  probe
  misc_feature (1)..(25): SEQ ID NO: 931; WAN024DET_at; Start 285; Stop 309
tgttttgctgggacctggtttagga

SEQ ID NO: 155033 - DNA, 25 bp, Artificial
  probe
  misc_feature (1)..(25): SEQ ID NO: 931; WAN024DET_at; Start 669; Stop 693
gatgatcgcaggatttgtaggccaa

SEQ ID NO: 155034 - DNA, 25 bp, Artificial
  probe
  misc_feature (1)..(25): SEQ ID NO: 931; WAN024DET_at; Start 288; Stop 312
tttgctgggacctggtttaggagac

SEQ ID NO: 155035 - DNA, 25 bp, Artificial
  probe
  misc_feature (1)..(25): SEQ ID NO: 931; WAN024DET_at; Start 244; Stop 268
gacaagcaattgttaaaagagcagt

SEQ ID NO: 155036 - DNA, 25 bp, Artificial
  probe
  misc_feature (1)..(25): SEQ ID NO: 931; WAN024DET_at; Start 65; Stop 89
aaggagattatggtcgtctgctgct

SEQ ID NO: 155037 - DNA, 25 bp, Artificial
  probe
  misc_feature (1)..(25): SEQ ID NO: 931; WAN024DET_at; Start 197; Stop 221
ctgctctgcacagtcatttacctga

SEQ ID NO: 155038 - DNA, 25 bp, Artificial
  probe
  misc_feature (1)..(25): SEQ ID NO: 931; WAN024DET_at; Start 506; Stop 530
aagatacaacggctagtgccctgac

SEQ ID NO: 155039 - DNA, 25 bp, Artificial
  probe
  misc_feature (1)..(25): SEQ ID NO: 931; WAN024DET_at; Start 223; Stop 247
gctatggcctttgctcttcaagaca

SEQ ID NO: 155040 - DNA, 25 bp, Artificial
  probe
  misc_feature (1)..(25): SEQ ID NO: 931; WAN024DET_at; Start 228; Stop 252
ggcctttgctcttcaagacaagcaa

SEQ ID NO: 155041 - DNA, 25 bp, Artificial
  probe
  misc_feature (1)..(25): SEQ ID NO: 931; WAN024DET_at; Start 796; Stop 820
gaaatcagcaggtatcttcccaaaa

SEQ ID NO: 155042 - DNA, 25 bp, Artificial
  probe
  misc_feature (1)..(25): SEQ ID NO: 931; WAN024DET_at; Start 675; Stop 699
cgcaggatttgtaggccaattccga

SEQ ID NO: 155043 - DNA, 25 bp, Artificial
  probe
  misc_feature (1)..(25): SEQ ID NO: 931; WAN024DET_at; Start 790; Stop 814
ccgacggaaatcagcaggtatcttc

SEQ ID NO: 155044 - DNA, 25 bp, Artificial
  probe
  misc_feature (1)..(25): SEQ ID NO: 931; WAN024DET_at; Start 657; Stop 681
tactctggctgggatgatcgcagga

SEQ ID NO: 155045 - DNA, 25 bp, Artificial
  probe
  misc_feature (1)..(25): SEQ ID NO: 5787; WAN024DEU_at; Start 549; Stop 573
tagtaattgtcttcctaaagtaatg

SEQ ID NO: 155046 - DNA, 25 bp, Artificial
  probe
  misc_feature (1)..(25): SEQ ID NO: 5787; WAN024DEU_at; Start 217; Stop 241
gaaaaactgtctggtattgctattg

SEQ ID NO: 155047 - DNA, 25 bp, Artificial
  probe
  misc_feature (1)..(25): SEQ ID NO: 5787; WAN024DEU_at; Start 372; Stop 396
cggtccctatcaggcgactggtggt

SEQ ID NO: 155048 - DNA, 25 bp, Artificial
  probe
  misc_feature (1)..(25): SEQ ID NO: 5787; WAN024DEU_at; Start 423; Stop 447
tgcaggatttgcaggccaatttcga

SEQ ID NO: 155049 - DNA, 25 bp, Artificial
  probe
  misc_feature (1)..(25): SEQ ID NO: 5787; WAN024DEU_at; Start 53; Stop 77
tacgagacgatacgtttggagaaaa

SEQ ID NO: 155050 - DNA, 25 bp, Artificial
  probe
  misc_feature (1)..(25): SEQ ID NO: 5787; WAN024DEU_at; Start 569; Stop 593
taatgaaaagatatgtcctaactaa

SEQ ID NO: 155051 - DNA, 25 bp, Artificial
  probe
  misc_feature (1)..(25): SEQ ID NO: 5787; WAN024DEU_at; Start 416; Stop 440
gaatgattgcaggatttgcaggcca

SEQ ID NO: 155052 - DNA, 25 bp, Artificial
  probe
  misc_feature (1)..(25): SEQ ID NO: 5787; WAN024DEU_at; Start 407; Stop 431
cactggctggaatgattgcaggatt

SEQ ID NO: 155053 - DNA, 25 bp, Artificial
  probe
  misc_feature (1)..(25): SEQ ID NO: 5787; WAN024DEU_at; Start 58; Stop 82
gacgatacgtttggagaaaatcttg

SEQ ID NO: 155054 - DNA, 25 bp, Artificial
  probe
  misc_feature (1)..(25): SEQ ID NO: 5787; WAN024DEU_at; Start 137; Stop 161
gggccttaaccatccttgctaggac

SEQ ID NO: 155055 - DNA, 25 bp, Artificial
  probe
  misc_feature (1)..(25): SEQ ID NO: 5787; WAN024DEU_at; Start 256; Stop 280
ggtacaacatctagtgccctgactt

SEQ ID NO: 155056 - DNA, 25 bp, Artificial
  probe
  misc_feature (1)..(25): SEQ ID NO: 5787; WAN024DEU_at; Start 176; Stop 200
catctaaccagcttatcttaactcc

SEQ ID NO: 155057 - DNA, 25 bp, Artificial
  probe
  misc_feature (1)..(25): SEQ ID NO: 5787; WAN024DEU_at; Start 168; Stop 192
gttgtttccatctaaccagcttatc

SEQ ID NO: 155058 - DNA, 25 bp, Artificial
  probe
  misc_feature (1)..(25): SEQ ID NO: 5787; WAN024DEU_at; Start 459; Stop 483
ctacgaacgtgtggcagtagcaacc

SEQ ID NO: 155059 - DNA, 25 bp, Artificial
  probe
  misc_feature (1)..(25): SEQ ID NO: 5787; WAN024DEU_at; Start 235; Stop 259
gctattgaaaagcaaaacgaaggta

SEQ ID NO: 155060 - DNA, 25 bp, Artificial
  probe
  misc_feature (1)..(25): SEQ ID NO: 5787; WAN024DEU_at; Start 223; Stop 247
ctgtctggtattgctattgaaaagc

SEQ ID NO: 155061 - DNA, 25 bp, Artificial
  probe
  misc_feature (1)..(25): SEQ ID NO: 5787; WAN024DEU_at; Start 528; Stop 552
tgtggtcttgccgacggaaattagt

SEQ ID NO: 155062 - DNA, 25 bp, Artificial
  probe
  misc_feature (1)..(25): SEQ ID NO: 5787; WAN024DEU_at; Start 81; Stop 105
tgtaaaacaggtctttgctagctta

SEQ ID NO: 155063 - DNA, 25 bp, Artificial
  probe
  misc_feature (1)..(25): SEQ ID NO: 5787; WAN024DEU_at; Start 69; Stop 93
tggagaaaatcttgtaaaacaggtc

SEQ ID NO: 155064 - DNA, 25 bp, Artificial
  probe
  misc_feature (1)..(25): SEQ ID NO: 5787; WAN024DEU_at; Start 456; Stop 480
tctctacgaacgtgtggcagtagca

SEQ ID NO: 155065 - DNA, 25 bp, Artificial
  probe
  misc_feature (1)..(25): SEQ ID NO: 5787; WAN024DEU_at; Start 253; Stop 277
gaaggtacaacatctagtgccctga

SEQ ID NO: 155066 - DNA, 25 bp, Artificial
  probe
  misc_feature (1)..(25): SEQ ID NO: 5787; WAN024DEU_at; Start 246; Stop 270
gcaaaacgaaggtacaacatctagt

SEQ ID NO: 155067 - DNA, 25 bp, Artificial
  probe
  misc_feature (1)..(25): SEQ ID NO: 5787; WAN024DEU_at; Start 78; Stop 102
tcttgtaaaacaggtctttgctagc

SEQ ID NO: 155068 - DNA, 25 bp, Artificial
  probe
  misc_feature (1)..(25): SEQ ID NO: 5787; WAN024DEU_at; Start 535; Stop 559
ttgccgacggaaattagtaattgtc

SEQ ID NO: 155069 - DNA, 25 bp, Artificial
  probe
  misc_feature (1)..(25): SEQ ID NO: 5787; WAN024DEU_at; Start 155; Stop 179
ctaggacaagtttgttgtttccatc

SEQ ID NO: 155070 - DNA, 25 bp, Artificial
  probe
  misc_feature (1)..(25): SEQ ID NO: 5787; WAN024DEU_at; Start 396; Stop 420
tatgggtgatacactggctggaatg

SEQ ID NO: 155071 - DNA, 25 bp, Artificial
  probe
  misc_feature (1)..(25): SEQ ID NO: 5787; WAN024DEU_at; Start 122; Stop 146
tgattgtagatggaggggccttaac

SEQ ID NO: 155072 - DNA, 25 bp, Artificial
  probe
  misc_feature (1)..(25): SEQ ID NO: 5787; WAN024DEU_at; Start 403; Stop 427
gatacactggctggaatgattgcag

SEQ ID NO: 155073 - DNA, 25 bp, Artificial
  probe
  misc_feature (1)..(25): SEQ ID NO: 5787; WAN024DEU_at; Start 386; Stop 410
cgactggtggtatgggtgatacact

SEQ ID NO: 155074 - DNA, 25 bp, Artificial
  probe
  misc_feature (1)..(25): SEQ ID NO: 5787; WAN024DEU_at; Start 250; Stop 274
aacgaaggtacaacatctagtgccc

SEQ ID NO: 155075 - DNA, 25 bp, Artificial
  probe
  misc_feature (1)..(25): SEQ ID NO: 5787; WAN024DEU_at; Start 376; Stop 400
ccctatcaggcgactggtggtatgg

SEQ ID NO: 155076 - DNA, 25 bp, Artificial
  probe
  misc_feature (1)..(25): SEQ ID NO: 5787; WAN024DEU_at; Start 46; Stop 70
cctggtttacgagacgatacgtttg

SEQ ID NO: 155077 - DNA, 25 bp, Artificial
  probe
  misc_feature (1)..(25): SEQ ID NO: 5787; WAN024DEU_at; Start 562; Stop 586
cctaaagtaatgaaaagatatgtcc

SEQ ID NO: 155078 - DNA, 25 bp, Artificial
  probe
  misc_feature (1)..(25): SEQ ID NO: 5787; WAN024DEU_at; Start 162; Stop 186
aagtttgttgtttccatctaaccag

SEQ ID NO: 155079 - DNA, 25 bp, Artificial
  probe
  misc_feature (1)..(25): SEQ ID NO: 932; WAN024DEV_at; Start 34; Stop 58
gtcattattgaacgttcttgtacaa

SEQ ID NO: 155080 - DNA, 25 bp, Artificial
  probe
  misc_feature (1)..(25): SEQ ID NO: 932; WAN024DEV_at; Start 199; Stop 223
gctctacacagccatttgcctgagg

SEQ ID NO: 155081 - DNA, 25 bp, Artificial
  probe
  misc_feature (1)..(25): SEQ ID NO: 932; WAN024DEV_at; Start 228; Stop 252
ggccttttctctgcaagatcagtaa

SEQ ID NO: 155082 - DNA, 25 bp, Artificial
  probe
  misc_feature (1)..(25): SEQ ID NO: 932; WAN024DEV_at; Start 33; Stop 57
agtcattattgaacgttcttgtaca

SEQ ID NO: 155083 - DNA, 25 bp, Artificial
  probe
  misc_feature (1)..(25): SEQ ID NO: 932; WAN024DEV_at; Start 32; Stop 56
aagtcattattgaacgttcttgtac

SEQ ID NO: 155084 - DNA, 25 bp, Artificial
  probe
  misc_feature (1)..(25): SEQ ID NO: 932; WAN024DEV_at; Start 13; Stop 37
gatcaaaccttactagaaaaagtca

SEQ ID NO: 155085 - DNA, 25 bp, Artificial
  probe
  misc_feature (1)..(25): SEQ ID NO: 932; WAN024DEV_at; Start 227; Stop 251
tggccttttctctgcaagatcagta

SEQ ID NO: 155086 - DNA, 25 bp, Artificial
  probe
  misc_feature (1)..(25): SEQ ID NO: 932; WAN024DEV_at; Start 71; Stop 95
actacggtcgtctgctgttgcttgg

SEQ ID NO: 155087 - DNA, 25 bp, Artificial
  probe
  misc_feature (1)..(25): SEQ ID NO: 932; WAN024DEV_at; Start 66; Stop 90
aggagactacggtcgtctgctgttg

SEQ ID NO: 155088 - DNA, 25 bp, Artificial
  probe
  misc_feature (1)..(25): SEQ ID NO: 932; WAN024DEV_at; Start 193; Stop 217
atccctgctctacacagccatttgc

SEQ ID NO: 155089 - DNA, 25 bp, Artificial
  probe
  misc_feature (1)..(25): SEQ ID NO: 932; WAN024DEV_at; Start 65; Stop 89
aaggagactacggtcgtctgctgtt

SEQ ID NO: 155090 - DNA, 25 bp, Artificial
  probe
  misc_feature (1)..(25): SEQ ID NO: 932; WAN024DEV_at; Start 67; Stop 91
ggagactacggtcgtctgctgttgc

SEQ ID NO: 155091 - DNA, 25 bp, Artificial
  probe
  misc_feature (1)..(25): SEQ ID NO: 932; WAN024DEV_at; Start 68; Stop 92
gagactacggtcgtctgctgttgct

SEQ ID NO: 155092 - DNA, 25 bp, Artificial
  probe
  misc_feature (1)..(25): SEQ ID NO: 932; WAN024DEV_at; Start 194; Stop 218
tccctgctctacacagccatttgcc

SEQ ID NO: 155093 - DNA, 25 bp, Artificial
  probe
  misc_feature (1)..(25): SEQ ID NO: 932; WAN024DEV_at; Start 226; Stop 250
atggccttttctctgcaagatcagt

SEQ ID NO: 155094 - DNA, 25 bp, Artificial
  probe
  misc_feature (1)..(25): SEQ ID NO: 932; WAN024DEV_at; Start 201; Stop 225
tctacacagccatttgcctgaggct

SEQ ID NO: 155095 - DNA, 25 bp, Artificial
  probe
  misc_feature (1)..(25): SEQ ID NO: 932; WAN024DEV_at; Start 204; Stop 228
acacagccatttgcctgaggctatg

SEQ ID NO: 155096 - DNA, 25 bp, Artificial
  probe
  misc_feature (1)..(25): SEQ ID NO: 932; WAN024DEV_at; Start 31; Stop 55
aaagtcattattgaacgttcttgta

SEQ ID NO: 155097 - DNA, 25 bp, Artificial
  probe
  misc_feature (1)..(25): SEQ ID NO: 932; WAN024DEV_at; Start 198; Stop 222
tgctctacacagccatttgcctgag

SEQ ID NO: 155098 - DNA, 25 bp, Artificial
  probe
  misc_feature (1)..(25): SEQ ID NO: 932; WAN024DEV_at; Start 200; Stop 224
ctctacacagccatttgcctgaggc

SEQ ID NO: 155099 - DNA, 25 bp, Artificial
  probe
  misc_feature (1)..(25): SEQ ID NO: 932; WAN024DEV_at; Start 12; Stop 36
tgatcaaaccttactagaaaaagtc

SEQ ID NO: 155100 - DNA, 25 bp, Artificial
  probe
  misc_feature (1)..(25): SEQ ID NO: 932; WAN024DEV_at; Start 192; Stop 216
tatccctgctctacacagccatttg

SEQ ID NO: 155101 - DNA, 25 bp, Artificial
  probe
  misc_feature (1)..(25): SEQ ID NO: 932; WAN024DEV_at; Start 202; Stop 226
ctacacagccatttgcctgaggcta

SEQ ID NO: 155102 - DNA, 25 bp, Artificial
  probe
  misc_feature (1)..(25): SEQ ID NO: 932; WAN024DEV_at; Start 69; Stop 93
agactacggtcgtctgctgttgctt

SEQ ID NO: 155103 - DNA, 25 bp, Artificial
  probe
  misc_feature (1)..(25): SEQ ID NO: 932; WAN024DEV_at; Start 196; Stop 220
cctgctctacacagccatttgcctg

SEQ ID NO: 155104 - DNA, 25 bp, Artificial
  probe
  misc_feature (1)..(25): SEQ ID NO: 932; WAN024DEV_at; Start 35; Stop 59
tcattattgaacgttcttgtacaag

SEQ ID NO: 155105 - DNA, 25 bp, Artificial
  probe
  misc_feature (1)..(25): SEQ ID NO: 932; WAN024DEV_at; Start 203; Stop 227
tacacagccatttgcctgaggctat

SEQ ID NO: 155106 - DNA, 25 bp, Artificial
  probe
  misc_feature (1)..(25): SEQ ID NO: 932; WAN024DEV_at; Start 36; Stop 60
cattattgaacgttcttgtacaagt

SEQ ID NO: 155107 - DNA, 25 bp, Artificial
  probe
  misc_feature (1)..(25): SEQ ID NO: 932; WAN024DEV_at; Start 70; Stop 94
gactacggtcgtctgctgttgcttg

SEQ ID NO: 155108 - DNA, 25 bp, Artificial
  probe
  misc_feature (1)..(25): SEQ ID NO: 932; WAN024DEV_at; Start 195; Stop 219
ccctgctctacacagccatttgcct

SEQ ID NO: 155109 - DNA, 25 bp, Artificial
  probe
  misc_feature (1)..(25): SEQ ID NO: 932; WAN024DEV_at; Start 197; Stop 221
ctgctctacacagccatttgcctga

SEQ ID NO: 155110 - DNA, 25 bp, Artificial
  probe
  misc_feature (1)..(25): SEQ ID NO: 1129; WAN024DEW_at; Start 121; Stop 145
catgacagtgtctatcaagctttaa

SEQ ID NO: 155111 - DNA, 25 bp, Artificial
  probe
  misc_feature (1)..(25): SEQ ID NO: 1129; WAN024DEW_at; Start 324; Stop 348
tgatcaggttttggaaattttagaa

SEQ ID NO: 155112 - DNA, 25 bp, Artificial
  probe
  misc_feature (1)..(25): SEQ ID NO: 1129; WAN024DEW_at; Start 234; Stop 258
tgaacacccgattttatttgaagga

SEQ ID NO: 155113 - DNA, 25 bp, Artificial
  probe
  misc_feature (1)..(25): SEQ ID NO: 1129; WAN024DEW_at; Start 61; Stop 85
tatgaaacttcaacagctgcatttg

SEQ ID NO: 155114 - DNA, 25 bp, Artificial
  probe
  misc_feature (1)..(25): SEQ ID NO: 1129; WAN024DEW_at; Start 388; Stop 412
tctagctcaggctttaagagaaagc

SEQ ID NO: 155115 - DNA, 25 bp, Artificial
  probe
  misc_feature (1)..(25): SEQ ID NO: 1129; WAN024DEW_at; Start 288; Stop 312
tcaaggtggccgtcattttttggtc

SEQ ID NO: 155116 - DNA, 25 bp, Artificial
  probe
  misc_feature (1)..(25): SEQ ID NO: 1129; WAN024DEW_at; Start 133; Stop 157
tatcaagctttaaaggtttctactc

SEQ ID NO: 155117 - DNA, 25 bp, Artificial
  probe
  misc_feature (1)..(25): SEQ ID NO: 1129; WAN024DEW_at; Start 402; Stop 426
taagagaaagccaaatcccgaatcc

SEQ ID NO: 155118 - DNA, 25 bp, Artificial
  probe
  misc_feature (1)..(25): SEQ ID NO: 1129; WAN024DEW_at; Start 508; Stop 532
gctgcaggacttgatacccacttgt

SEQ ID NO: 155119 - DNA, 25 bp, Artificial
  probe
  misc_feature (1)..(25): SEQ ID NO: 1129; WAN024DEW_at; Start 418; Stop 442
cccgaatccatgctttatttaagag

SEQ ID NO: 155120 - DNA, 25 bp, Artificial
  probe
  misc_feature (1)..(25): SEQ ID NO: 1129; WAN024DEW_at; Start 465; Stop 489
tcttgtcattggtgatcggccgatt

SEQ ID NO: 155121 - DNA, 25 bp, Artificial
  probe
  misc_feature (1)..(25): SEQ ID NO: 1129; WAN024DEW_at; Start 169; Stop 193
gagacattcgctcccaatttagaga

SEQ ID NO: 155122 - DNA, 25 bp, Artificial
  probe
  misc_feature (1)..(25): SEQ ID NO: 1129; WAN024DEW_at; Start 3; Stop 27
gaagggtatgaaatatcacgattac

SEQ ID NO: 155123 - DNA, 25 bp, Artificial
  probe
  misc_feature (1)..(25): SEQ ID NO: 1129; WAN024DEW_at; Start 253; Stop 277
gaaggagtttctgacctattggaag

SEQ ID NO: 155124 - DNA, 25 bp, Artificial
  probe
  misc_feature (1)..(25): SEQ ID NO: 1129; WAN024DEW_at; Start 208; Stop 232
tacaaggaaaatgaagccagagagc

SEQ ID NO: 155125 - DNA, 25 bp, Artificial
  probe
  misc_feature (1)..(25): SEQ ID NO: 1129; WAN024DEW_at; Start 147; Stop 171
ggtttctactccttttgcgattgag

SEQ ID NO: 155126 - DNA, 25 bp, Artificial
  probe
  misc_feature (1)..(25): SEQ ID NO: 1129; WAN024DEW_at; Start 551; Stop 575
taagacaagtattagacatataact

SEQ ID NO: 155127 - DNA, 25 bp, Artificial
  probe
  misc_feature (1)..(25): SEQ ID NO: 1129; WAN024DEW_at; Start 492; Stop 516
tatcgaagcaggtcaagctgcagga

SEQ ID NO: 155128 - DNA, 25 bp, Artificial
  probe
  misc_feature (1)..(25): SEQ ID NO: 1129; WAN024DEW_at; Start 92; Stop 116
cattggcactgtatggtatcacaca

SEQ ID NO: 155129 - DNA, 25 bp, Artificial
  probe
  misc_feature (1)..(25): SEQ ID NO: 1129; WAN024DEW_at; Start 437; Stop 461
taagagaaaagtatcagattagctc

SEQ ID NO: 155130 - DNA, 25 bp, Artificial
  probe
  misc_feature (1)..(25): SEQ ID NO: 1129; WAN024DEW_at; Start 522; Stop 546
tacccacttgtttaccagtatcgtg

SEQ ID NO: 155131 - DNA, 25 bp, Artificial
  probe
  misc_feature (1)..(25): SEQ ID NO: 1129; WAN024DEW_at; Start 453; Stop 477
gattagctctggtcttgtcattggt

SEQ ID NO: 155132 - DNA, 25 bp, Artificial
  probe
  misc_feature (1)..(25): SEQ ID NO: 1129; WAN024DEW_at; Start 106; Stop 130
ggtatcacacaagaccatgacagtg

SEQ ID NO: 155133 - DNA, 25 bp, Artificial
  probe
  misc_feature (1)..(25): SEQ ID NO: 1129; WAN024DEW_at; Start 477; Stop 501
tgatcggccgattgatatcgaagca

SEQ ID NO: 155134 - DNA, 25 bp, Artificial
  probe
  misc_feature (1)..(25): SEQ ID NO: 1129; WAN024DEW_at; Start 342; Stop 366
tttagaaaaaacctctatagcagct

SEQ ID NO: 155135 - DNA, 25 bp, Artificial
  probe
  misc_feature (1)..(25): SEQ ID NO: 1129; WAN024DEW_at; Start 12; Stop 36
gaaatatcacgattacatctgggat

SEQ ID NO: 155136 - DNA, 25 bp, Artificial
  probe
  misc_feature (1)..(25): SEQ ID NO: 1129; WAN024DEW_at; Start 536; Stop 560
ccagtatcgtgaatttaagacaagt

SEQ ID NO: 155137 - DNA, 25 bp, Artificial
  probe
  misc_feature (1)..(25): SEQ ID NO: 1129; WAN024DEW_at; Start 76; Stop 100
gctgcatttgttgaaacattggcac

SEQ ID NO: 155138 - DNA, 25 bp, Artificial
  probe
  misc_feature (1)..(25): SEQ ID NO: 1129; WAN024DEW_at; Start 159; Stop 183
ttttgcgattgagacattcgctccc

SEQ ID NO: 155139 - DNA, 25 bp, Artificial
  probe
  misc_feature (1)..(25): SEQ ID NO: 1129; WAN024DEW_at; Start 44; Stop 68
gaactttactggataattatgaaac

SEQ ID NO: 155140 - DNA, 25 bp, Artificial
  probe
  misc_feature (1)..(25): SEQ ID NO: 1129; WAN024DEW_at; Start 376; Stop 400
gaagtggtgacttctagctcaggct

SEQ ID NO: 155141 - DNA, 25 bp, Artificial
  probe
  misc_feature (1)..(25): SEQ ID NO: 1129; WAN024DEW_at; Start 362; Stop 386
cagcttattttacagaagtggtgac

SEQ ID NO: 155142 - DNA, 25 bp, Artificial
  probe
  misc_feature (1)..(25): SEQ ID NO: 1129; WAN024DEW_at; Start 27; Stop 51
catctgggatttaggtggaacttta

SEQ ID NO: 155143 - DNA, 25 bp, Artificial
  probe
  misc_feature (1)..(25): SEQ ID NO: 1129; WAN024DEW_at; Start 223; Stop 247
gccagagagcttgaacacccgattt

SEQ ID NO: 155144 - DNA, 25 bp, Artificial
  probe
  misc_feature (1)..(25): SEQ ID NO: 1997; WAN024DEX_at; Start 230; Stop 254
tcagcttacttgttttaaaagttca

SEQ ID NO: 155145 - DNA, 25 bp, Artificial
  probe
  misc_feature (1)..(25): SEQ ID NO: 1997; WAN024DEX_at; Start 11; Stop 35
gaaaattacaatcctatgaggtaga

SEQ ID NO: 155146 - DNA, 25 bp, Artificial
  probe
  misc_feature (1)..(25): SEQ ID NO: 1997; WAN024DEX_at; Start 217; Stop 241
gcagcaatcggattcagcttacttg

SEQ ID NO: 155147 - DNA, 25 bp, Artificial
  probe
  misc_feature (1)..(25): SEQ ID NO: 1997; WAN024DEX_at; Start 248; Stop 272
aagttcaacggtctattatcaaacg

SEQ ID NO: 155148 - DNA, 25 bp, Artificial
  probe
  misc_feature (1)..(25): SEQ ID NO: 1997; WAN024DEX_at; Start 43; Stop 67
gaagaattaaaccagcagcttcctc

SEQ ID NO: 155149 - DNA, 25 bp, Artificial
  probe
  misc_feature (1)..(25): SEQ ID NO: 1997; WAN024DEX_at; Start 103; Stop 127
gccaatctcaaggaaatcctatttt

SEQ ID NO: 155150 - DNA, 25 bp, Artificial
  probe
  misc_feature (1)..(25): SEQ ID NO: 1997; WAN024DEX_at; Start 88; Stop 112
gaagcgcaatctgatgccaatctca

SEQ ID NO: 155151 - DNA, 25 bp, Artificial
  probe
  misc_feature (1)..(25): SEQ ID NO: 1997; WAN024DEX_at; Start 260; Stop 284
ctattatcaaacgaaaacgtagaag

SEQ ID NO: 155152 - DNA, 25 bp, Artificial
  probe
  misc_feature (1)..(25): SEQ ID NO: 1997; WAN024DEX_at; Start 220; Stop 244
gcaatcggattcagcttacttgttt

SEQ ID NO: 155153 - DNA, 25 bp, Artificial
  probe
  misc_feature (1)..(25): SEQ ID NO: 1997; WAN024DEX_at; Start 57; Stop 81
gcagcttcctcattaccaagcttat

SEQ ID NO: 155154 - DNA, 25 bp, Artificial
  probe
  misc_feature (1)..(25): SEQ ID NO: 1997; WAN024DEX_at; Start 34; Stop 58
gactatcaagaagaattaaaccagc

SEQ ID NO: 155155 - DNA, 25 bp, Artificial
  probe
  misc_feature (1)..(25): SEQ ID NO: 1997; WAN024DEX_at; Start 23; Stop 47
cctatgaggtagactatcaagaaga

SEQ ID NO: 155156 - DNA, 25 bp, Artificial
  probe
  misc_feature (1)..(25): SEQ ID NO: 1997; WAN024DEX_at; Start 224; Stop 248
tcggattcagcttacttgttttaaa

SEQ ID NO: 155157 - DNA, 25 bp, Artificial
  probe
  misc_feature (1)..(25): SEQ ID NO: 1997; WAN024DEX_at; Start 194; Stop 218
tatcaactgctcttgcctttgccgc

SEQ ID NO: 155158 - DNA, 25 bp, Artificial
  probe
  misc_feature (1)..(25): SEQ ID NO: 1997; WAN024DEX_at; Start 97; Stop 121
tctgatgccaatctcaaggaaatcc

SEQ ID NO: 155159 - DNA, 25 bp, Artificial
  probe
  misc_feature (1)..(25): SEQ ID NO: 1997; WAN024DEX_at; Start 2; Stop 26
tgcccgtaagaaaattacaatccta

SEQ ID NO: 155160 - DNA, 25 bp, Artificial
  probe
  misc_feature (1)..(25): SEQ ID NO: 1997; WAN024DEX_at; Start 208; Stop 232
gcctttgccgcagcaatcggattca

SEQ ID NO: 155161 - DNA, 25 bp, Artificial
  probe
  misc_feature (1)..(25): SEQ ID NO: 1997; WAN024DEX_at; Start 100; Stop 124
gatgccaatctcaaggaaatcctat

SEQ ID NO: 155162 - DNA, 25 bp, Artificial
  probe
  misc_feature (1)..(25): SEQ ID NO: 1997; WAN024DEX_at; Start 211; Stop 235
tttgccgcagcaatcggattcagct

SEQ ID NO: 155163 - DNA, 25 bp, Artificial
  probe
  misc_feature (1)..(25): SEQ ID NO: 1997; WAN024DEX_at; Start 70; Stop 94
taccaagcttatacacctgaagcgc

SEQ ID NO: 155164 - DNA, 25 bp, Artificial
  probe
  misc_feature (1)..(25): SEQ ID NO: 1997; WAN024DEX_at; Start 252; Stop 276
tcaacggtctattatcaaacgaaaa

SEQ ID NO: 155165 - DNA, 25 bp, Artificial
  probe
  misc_feature (1)..(25): SEQ ID NO: 1997; WAN024DEX_at; Start 83; Stop 107
cacctgaagcgcaatctgatgccaa

SEQ ID NO: 155166 - DNA, 25 bp, Artificial
  probe
  misc_feature (1)..(25): SEQ ID NO: 1997; WAN024DEX_at; Start 184; Stop 208
gcattaaaattatcaactgctcttg

SEQ ID NO: 155167 - DNA, 25 bp, Artificial
  probe
  misc_feature (1)..(25): SEQ ID NO: 1997; WAN024DEX_at; Start 198; Stop 222
aactgctcttgcctttgccgcagca

SEQ ID NO: 155168 - DNA, 25 bp, Artificial
  probe
  misc_feature (1)..(25): SEQ ID NO: 1997; WAN024DEX_at; Start 93; Stop 117
gcaatctgatgccaatctcaaggaa

SEQ ID NO: 155169 - DNA, 25 bp, Artificial
  probe
  misc_feature (1)..(25): SEQ ID NO: 1997; WAN024DEX_at; Start 76; Stop 100
gcttatacacctgaagcgcaatctg

SEQ ID NO: 155170 - DNA, 25 bp, Artificial
  probe
  misc_feature (1)..(25): SEQ ID NO: 1997; WAN024DEX_at; Start 79; Stop 103
tatacacctgaagcgcaatctgatg

SEQ ID NO: 155171 - DNA, 25 bp, Artificial
  probe
  misc_feature (1)..(25): SEQ ID NO: 1997; WAN024DEX_at; Start 148; Stop 172
tgtatctgtattgctatctttagtt

SEQ ID NO: 155172 - DNA, 25 bp, Artificial
  probe
  misc_feature (1)..(25): SEQ ID NO: 1997; WAN024DEX_at; Start 213; Stop 237
tgccgcagcaatcggattcagctta

SEQ ID NO: 155173 - DNA, 25 bp, Artificial
  probe
  misc_feature (1)..(25): SEQ ID NO: 1997; WAN024DEX_at; Start 37; Stop 61
tatcaagaagaattaaaccagcagc

SEQ ID NO: 155174 - DNA, 25 bp, Artificial
  probe
  misc_feature (1)..(25): SEQ ID NO: 1997; WAN024DEX_at; Start 52; Stop 76
aaccagcagcttcctcattaccaag

SEQ ID NO: 155175 - DNA, 25 bp, Artificial
  probe
  misc_feature (1)..(25): SEQ ID NO: 1997; WAN024DEX_at; Start 133; Stop 157
aatatcgctgttttttgtatctgta

SEQ ID NO: 155176 - DNA, 25 bp, Artificial
  probe
  misc_feature (1)..(25): SEQ ID NO: 1997; WAN024DEX_at; Start 264; Stop 288
tatcaaacgaaaacgtagaagataa

SEQ ID NO: 155177 - DNA, 25 bp, Artificial
  probe
  misc_feature (1)..(25): SEQ ID NO: 1997; WAN024DEX_at; Start 19; Stop 43
caatcctatgaggtagactatcaag

SEQ ID NO: 155178 - DNA, 25 bp, Artificial
  probe
  misc_feature (1)..(25): SEQ ID NO: 2194; WAN024DEY_at; Start 568; Stop 592
gctaaaaagcttggtgctgcaatga

SEQ ID NO: 155179 - DNA, 25 bp, Artificial
  probe
  misc_feature (1)..(25): SEQ ID NO: 2194; WAN024DEY_at; Start 480; Stop 504
gattgctgggatttcctcagggtta

SEQ ID NO: 155180 - DNA, 25 bp, Artificial
  probe
  misc_feature (1)..(25): SEQ ID NO: 2194; WAN024DEY_at; Start 242; Stop 266
ggctaaattcttttactcgctattc

SEQ ID NO: 155181 - DNA, 25 bp, Artificial
  probe
  misc_feature (1)..(25): SEQ ID NO: 2194; WAN024DEY_at; Start 658; Stop 682
gtagcagaatttttaggatatgagt

SEQ ID NO: 155182 - DNA, 25 bp, Artificial
  probe
  misc_feature (1)..(25): SEQ ID NO: 2194; WAN024DEY_at; Start 508; Stop 532
taccgtaaagcagttgaagtggaag

SEQ ID NO: 155183 - DNA, 25 bp, Artificial
  probe
  misc_feature (1)..(25): SEQ ID NO: 2194; WAN024DEY_at; Start 623; Stop 647
cactttgggatgctcataatgaggc

SEQ ID NO: 155184 - DNA, 25 bp, Artificial
  probe
  misc_feature (1)..(25): SEQ ID NO: 2194; WAN024DEY_at; Start 608; Stop 632
atagagatatgtttccactttggga

SEQ ID NO: 155185 - DNA, 25 bp, Artificial
  probe
  misc_feature (1)..(25): SEQ ID NO: 2194; WAN024DEY_at; Start 692; Stop 716
cttatgaagcttttgaactagagga

SEQ ID NO: 155186 - DNA, 25 bp, Artificial
  probe
  misc_feature (1)..(25): SEQ ID NO: 2194; WAN024DEY_at; Start 257; Stop 281
ctcgctattcttttaaagataaggc

SEQ ID NO: 155187 - DNA, 25 bp, Artificial
  probe
  misc_feature (1)..(25): SEQ ID NO: 2194; WAN024DEY_at; Start 358; Stop 382
catatttataactgcttttctacgg

SEQ ID NO: 155188 - DNA, 25 bp, Artificial
  probe
  misc_feature (1)..(25): SEQ ID NO: 2194; WAN024DEY_at; Start 383; Stop 407
aagaatggtcacaggatttacaggg

SEQ ID NO: 155189 - DNA, 25 bp, Artificial
  probe
  misc_feature (1)..(25): SEQ ID NO: 2194; WAN024DEY_at; Start 539; Stop 563
ctagaccaaacgaacaaggaaatgg

SEQ ID NO: 155190 - DNA, 25 bp, Artificial
  probe
  misc_feature (1)..(25): SEQ ID NO: 2194; WAN024DEY_at; Start 439; Stop 463
aaaggtggatttggctttgtgattc

SEQ ID NO: 155191 - DNA, 25 bp, Artificial
  probe
  misc_feature (1)..(25): SEQ ID NO: 2194; WAN024DEY_at; Start 50; Stop 74
aatctcaaattggaactgtctaccg

SEQ ID NO: 155192 - DNA, 25 bp, Artificial
  probe
  misc_feature (1)..(25): SEQ ID NO: 2194; WAN024DEY_at; Start 373; Stop 397
ttttctacggaagaatggtcacagg

SEQ ID NO: 155193 - DNA, 25 bp, Artificial
  probe
  misc_feature (1)..(25): SEQ ID NO: 2194; WAN024DEY_at; Start 108; Stop 132
tgggaattttctatacctagcaggg

SEQ ID NO: 155194 - DNA, 25 bp, Artificial
  probe
  misc_feature (1)..(25): SEQ ID NO: 2194; WAN024DEY_at; Start 33; Stop 57
ggttctctatggtcttaaatctcaa

SEQ ID NO: 155195 - DNA, 25 bp, Artificial
  probe
  misc_feature (1)..(25): SEQ ID NO: 2194; WAN024DEY_at; Start 678; Stop 702
tgagttatctgaaccttatgaagct

SEQ ID NO: 155196 - DNA, 25 bp, Artificial
  probe
  misc_feature (1)..(25): SEQ ID NO: 2194; WAN024DEY_at; Start 323; Stop 347
tagaggaaggttacaatattgtgcc

SEQ ID NO: 155197 - DNA, 25 bp, Artificial
  probe
  misc_feature (1)..(25): SEQ ID NO: 2194; WAN024DEY_at; Start 74; Stop 98
gaaacaatgataggacaacaagctt

SEQ ID NO: 155198 - DNA, 25 bp, Artificial
  probe
  misc_feature (1)..(25): SEQ ID NO: 2194; WAN024DEY_at; Start 465; Stop 489
taaaaataatgaactgattgctggg

SEQ ID NO: 155199 - DNA, 25 bp, Artificial
  probe
  misc_feature (1)..(25): SEQ ID NO: 2194; WAN024DEY_at; Start 17; Stop 41
catggaagaaaaatatggttctcta

SEQ ID NO: 155200 - DNA, 25 bp, Artificial
  probe
  misc_feature (1)..(25): SEQ ID NO: 2194; WAN024DEY_at; Start 89; Stop 113
caacaagcttttatgatgttgggaa

SEQ ID NO: 155201 - DNA, 25 bp, Artificial
  probe
  misc_feature (1)..(25): SEQ ID NO: 2194; WAN024DEY_at; Start 2; Stop 26
tggaactatttaaaacatggaagaa

SEQ ID NO: 155202 - DNA, 25 bp, Artificial
  probe
  misc_feature (1)..(25): SEQ ID NO: 2194; WAN024DEY_at; Start 272; Stop 296
aagataaggcaaattttcaagttga

SEQ ID NO: 155203 - DNA, 25 bp, Artificial
  probe
  misc_feature (1)..(25): SEQ ID NO: 2194; WAN024DEY_at; Start 217; Stop 241
caagattttctgcatcgaaaagtgg

SEQ ID NO: 155204 - DNA, 25 bp, Artificial
  probe
  misc_feature (1)..(25): SEQ ID NO: 2194; WAN024DEY_at; Start 199; Stop 223
tcagaaaatactaattggcaagatt

SEQ ID NO: 155205 - DNA, 25 bp, Artificial
  probe
  misc_feature (1)..(25): SEQ ID NO: 2194; WAN024DEY_at; Start 407; Stop 431
gggattttgagtcctatcaggattt

SEQ ID NO: 155206 - DNA, 25 bp, Artificial
  probe
  misc_feature (1)..(25): SEQ ID NO: 2194; WAN024DEY_at; Start 639; Stop 663
taatgaggcttccaaaaaagtagca

SEQ ID NO: 155207 - DNA, 25 bp, Artificial
  probe
  misc_feature (1)..(25): SEQ ID NO: 2194; WAN024DEY_at; Start 309; Stop 333
tctagttactcatttagaggaaggt

SEQ ID NO: 155208 - DNA, 25 bp, Artificial
  probe
  misc_feature (1)..(25): SEQ ID NO: 2194; WAN024DEY_at; Start 523; Stop 547
gaagtggaagttgcaactagaccaa

SEQ ID NO: 155209 - DNA, 25 bp, Artificial
  probe
  misc_feature (1)..(25): SEQ ID NO: 2194; WAN024DEY_at; Start 133; Stop 157
gagttggattccagattttgggaag

SEQ ID NO: 155210 - DNA, 25 bp, Artificial
  probe
  misc_feature (1)..(25): SEQ ID NO: 2194; WAN024DEY_at; Start 62; Stop 86
gaactgtctaccgaaacaatgatag

SEQ ID NO: 155211 - DNA, 25 bp, Artificial
  probe
  misc_feature (1)..(25): SEQ ID NO: 2194; WAN024DEY_at; Start 583; Stop 607
gctgcaatgattctagagagtttaa

SEQ ID NO: 155212 - DNA, 25 bp, Artificial
  probe
  misc_feature (1)..(25): SEQ ID NO: 1435; WAN024DEZ_at; Start 171; Stop 195
tatttttgactggtgccctcaggtg

SEQ ID NO: 155213 - DNA, 25 bp, Artificial
  probe
  misc_feature (1)..(25): SEQ ID NO: 1435; WAN024DEZ_at; Start 447; Stop 471
gcagttggctctagactatgctgaa

SEQ ID NO: 155214 - DNA, 25 bp, Artificial
  probe
  misc_feature (1)..(25): SEQ ID NO: 1435; WAN024DEZ_at; Start 431; Stop 455
tggctggcttcaccaagcagttggc

SEQ ID NO: 155215 - DNA, 25 bp, Artificial
  probe
  misc_feature (1)..(25): SEQ ID NO: 1435; WAN024DEZ_at; Start 477; Stop 501
gattcaggtctttggtatcgctcca

SEQ ID NO: 155216 - DNA, 25 bp, Artificial
  probe
  misc_feature (1)..(25): SEQ ID NO: 1435; WAN024DEZ_at; Start 291; Stop 315
cattattccagtagagttgactcgg

SEQ ID NO: 155217 - DNA, 25 bp, Artificial
  probe
  misc_feature (1)..(25): SEQ ID NO: 1435; WAN024DEZ_at; Start 627; Stop 651
tttagcaagtggaaaagcgagcgcc

SEQ ID NO: 155218 - DNA, 25 bp, Artificial
  probe
  misc_feature (1)..(25): SEQ ID NO: 1435; WAN024DEZ_at; Start 415; Stop 439
tcatccaagcatgccttggctggct

SEQ ID NO: 155219 - DNA, 25 bp, Artificial
  probe
  misc_feature (1)..(25): SEQ ID NO: 1435; WAN024DEZ_at; Start 462; Stop 486
ctatgctgaagctgggattcaggtc

SEQ ID NO: 155220 - DNA, 25 bp, Artificial
  probe
  misc_feature (1)..(25): SEQ ID NO: 1435; WAN024DEZ_at; Start 400; Stop 424
ggtcacgcctatacttcatccaagc

SEQ ID NO: 155221 - DNA, 25 bp, Artificial
  probe
  misc_feature (1)..(25): SEQ ID NO: 1435; WAN024DEZ_at; Start 375; Stop 399
tgcttctagcctagcaggtggaggt

SEQ ID NO: 155222 - DNA, 25 bp, Artificial
  probe
  misc_feature (1)..(25): SEQ ID NO: 1435; WAN024DEZ_at; Start 494; Stop 518
tcgctccaggagcagtcaagacagc

SEQ ID NO: 155223 - DNA, 25 bp, Artificial
  probe
  misc_feature (1)..(25): SEQ ID NO: 1435; WAN024DEZ_at; Start 77; Stop 101
gctatcaagtttatggagttgacca

SEQ ID NO: 155224 - DNA, 25 bp, Artificial
  probe
  misc_feature (1)..(25): SEQ ID NO: 1435; WAN024DEZ_at; Start 148; Stop 172
gatttgaccttggacttggaaccta

SEQ ID NO: 155225 - DNA, 25 bp, Artificial
  probe
  misc_feature (1)..(25): SEQ ID NO: 1435; WAN024DEZ_at; Start 361; Stop 385
aatatgtgttccattgcttctagcc

SEQ ID NO: 155226 - DNA, 25 bp, Artificial
  probe
  misc_feature (1)..(25): SEQ ID NO: 1435; WAN024DEZ_at; Start 598; Stop 622
ccagaggaaatagcagagcttagtc

SEQ ID NO: 155227 - DNA, 25 bp, Artificial
  probe
  misc_feature (1)..(25): SEQ ID NO: 1435; WAN024DEZ_at; Start 185; Stop 209
gccctcaggtggatgttttgtgtaa

SEQ ID NO: 155228 - DNA, 25 bp, Artificial
  probe
  misc_feature (1)..(25): SEQ ID NO: 1435; WAN024DEZ_at; Start 521; Stop 545
tgaccgctgcggattttgaaccagg

SEQ ID NO: 155229 - DNA, 25 bp, Artificial
  probe
  misc_feature (1)..(25): SEQ ID NO: 1435; WAN024DEZ_at; Start 304; Stop 328
gagttgactcggtattatttgacac

SEQ ID NO: 155230 - DNA, 25 bp, Artificial
  probe
  misc_feature (1)..(25): SEQ ID NO: 1435; WAN024DEZ_at; Start 92; Stop 116
gagttgaccaaggtgaaaagccact

SEQ ID NO: 155231 - DNA, 25 bp, Artificial
  probe
  misc_feature (1)..(25): SEQ ID NO: 1435; WAN024DEZ_at; Start 3; Stop 27
gactaaacgtgtactcattacagga

SEQ ID NO: 155232 - DNA, 25 bp, Artificial
  probe
  misc_feature (1)..(25): SEQ ID NO: 1435; WAN024DEZ_at; Start 254; Stop 278
cggcgcaggacattcaagagatttt

SEQ ID NO: 155233 - DNA, 25 bp, Artificial
  probe
  misc_feature (1)..(25): SEQ ID NO: 1435; WAN024DEZ_at; Start 138; Stop 162
tttacagagagatttgaccttggac

SEQ ID NO: 155234 - DNA, 25 bp, Artificial
  probe
  misc_feature (1)..(25): SEQ ID NO: 1435; WAN024DEZ_at; Start 674; Stop 698
tagatggtggctggtctttgaagta

SEQ ID NO: 155235 - DNA, 25 bp, Artificial
  probe
  misc_feature (1)..(25): SEQ ID NO: 1435; WAN024DEZ_at; Start 389; Stop 413
caggtggaggtggtcacgcctatac

SEQ ID NO: 155236 - DNA, 25 bp, Artificial
  probe
  misc_feature (1)..(25): SEQ ID NO: 1435; WAN024DEZ_at; Start 643; Stop 667
gcgagcgccatgcaaggacaaatct

SEQ ID NO: 155237 - DNA, 25 bp, Artificial
  probe
  misc_feature (1)..(25): SEQ ID NO: 1435; WAN024DEZ_at; Start 241; Stop 265
ctgttggaacaaacggcgcaggaca

SEQ ID NO: 155238 - DNA, 25 bp, Artificial
  probe
  misc_feature (1)..(25): SEQ ID NO: 1435; WAN024DEZ_at; Start 105; Stop 129
tgaaaagccactcttagagggtgat

SEQ ID NO: 155239 - DNA, 25 bp, Artificial
  probe
  misc_feature (1)..(25): SEQ ID NO: 1435; WAN024DEZ_at; Start 158; Stop 182
tggacttggaacctatttttgactg

SEQ ID NO: 155240 - DNA, 25 bp, Artificial
  probe
  misc_feature (1)..(25): SEQ ID NO: 1435; WAN024DEZ_at; Start 60; Stop 84
cctctttttagagaagggctatcaa

SEQ ID NO: 155241 - DNA, 25 bp, Artificial
  probe
  misc_feature (1)..(25): SEQ ID NO: 1435; WAN024DEZ_at; Start 14; Stop 38
tactcattacaggagtgagttcagg

SEQ ID NO: 155242 - DNA, 25 bp, Artificial
  probe
  misc_feature (1)..(25): SEQ ID NO: 1435; WAN024DEZ_at; Start 342; Stop 366
taaaaagggaatcatcatcaatatg

SEQ ID NO: 155243 - DNA, 25 bp, Artificial
  probe
  misc_feature (1)..(25): SEQ ID NO: 1435; WAN024DEZ_at; Start 509; Stop 533
tcaagacagctatgaccgctgcgga

SEQ ID NO: 155244 - DNA, 25 bp, Artificial
  probe
  misc_feature (1)..(25): SEQ ID NO: 1435; WAN024DEZ_at; Start 661; Stop 685
caaatcttgacaatagatggtggct

SEQ ID NO: 155245 - DNA, 25 bp, Artificial
  probe
  misc_feature (1)..(25): SEQ ID NO: 1435; WAN024DEZ_at; Start 326; Stop 350
cacaaatgctggaaaataaaaaggg

SEQ ID NO: 155246 - DNA, 25 bp, Artificial
  probe
  misc_feature (1)..(25): SEQ ID NO: 1082; WAN024DF2_at; Start 73; Stop 97
aaatatgtacgaactggttggggag

SEQ ID NO: 155247 - DNA, 25 bp, Artificial
  probe
  misc_feature (1)..(25): SEQ ID NO: 1082; WAN024DF2_at; Start 115; Stop 139
caactctttgataccatcgagcaaa

SEQ ID NO: 155248 - DNA, 25 bp, Artificial
  probe
  misc_feature (1)..(25): SEQ ID NO: 1082; WAN024DF2_at; Start 121; Stop 145
tttgataccatcgagcaaaatgggc

SEQ ID NO: 155249 - DNA, 25 bp, Artificial
  probe
  misc_feature (1)..(25): SEQ ID NO: 1082; WAN024DF2_at; Start 244; Stop 268
gattgggtagaagtgcatgactaac

SEQ ID NO: 155250 - DNA, 25 bp, Artificial
  probe
  misc_feature (1)..(25): SEQ ID NO: 1082; WAN024DF2_at; Start 130; Stop 154
atcgagcaaaatgggcttgcacttg

SEQ ID NO: 155251 - DNA, 25 bp, Artificial
  probe
  misc_feature (1)..(25): SEQ ID NO: 1082; WAN024DF2_at; Start 194; Stop 218
gagaaggtttttccatgtggagccc

SEQ ID NO: 155252 - DNA, 25 bp, Artificial
  probe
  misc_feature (1)..(25): SEQ ID NO: 1082; WAN024DF2_at; Start 225; Stop 249
ttgtgatgttttggcaacggattgg

SEQ ID NO: 155253 - DNA, 25 bp, Artificial
  probe
  misc_feature (1)..(25): SEQ ID NO: 1082; WAN024DF2_at; Start 239; Stop 263
caacggattgggtagaagtgcatga

SEQ ID NO: 155254 - DNA, 25 bp, Artificial
  probe
  misc_feature (1)..(25): SEQ ID NO: 1082; WAN024DF2_at; Start 193; Stop 217
ggagaaggtttttccatgtggagcc

SEQ ID NO: 155255 - DNA, 25 bp, Artificial
  probe
  misc_feature (1)..(25): SEQ ID NO: 1082; WAN024DF2_at; Start 196; Stop 220
gaaggtttttccatgtggagcccga

SEQ ID NO: 155256 - DNA, 25 bp, Artificial
  probe
  misc_feature (1)..(25): SEQ ID NO: 1082; WAN024DF2_at; Start 20; Stop 44
aggagaaaaacatgacatttgaaga

SEQ ID NO: 155257 - DNA, 25 bp, Artificial
  probe
  misc_feature (1)..(25): SEQ ID NO: 1082; WAN024DF2_at; Start 240; Stop 264
aacggattgggtagaagtgcatgac

SEQ ID NO: 155258 - DNA, 25 bp, Artificial
  probe
  misc_feature (1)..(25): SEQ ID NO: 1082; WAN024DF2_at; Start 248; Stop 272
gggtagaagtgcatgactaactaat

SEQ ID NO: 155259 - DNA, 25 bp, Artificial
  probe
  misc_feature (1)..(25): SEQ ID NO: 1082; WAN024DF2_at; Start 111; Stop 135
tgtccaactctttgataccatcgag

SEQ ID NO: 155260 - DNA, 25 bp, Artificial
  probe
  misc_feature (1)..(25): SEQ ID NO: 1082; WAN024DF2_at; Start 127; Stop 151
accatcgagcaaaatgggcttgcac

SEQ ID NO: 155261 - DNA, 25 bp, Artificial
  probe
  misc_feature (1)..(25): SEQ ID NO: 1082; WAN024DF2_at; Start 246; Stop 270
ttgggtagaagtgcatgactaacta

SEQ ID NO: 155262 - DNA, 25 bp, Artificial
  probe
  misc_feature (1)..(25): SEQ ID NO: 1082; WAN024DF2_at; Start 124; Stop 148
gataccatcgagcaaaatgggcttg

SEQ ID NO: 155263 - DNA, 25 bp, Artificial
  probe
  misc_feature (1)..(25): SEQ ID NO: 1082; WAN024DF2_at; Start 119; Stop 143
tctttgataccatcgagcaaaatgg

SEQ ID NO: 155264 - DNA, 25 bp, Artificial
  probe
  misc_feature (1)..(25): SEQ ID NO: 1082; WAN024DF2_at; Start 128; Stop 152
ccatcgagcaaaatgggcttgcact

SEQ ID NO: 155265 - DNA, 25 bp, Artificial
  probe
  misc_feature (1)..(25): SEQ ID NO: 1082; WAN024DF2_at; Start 103; Stop 127
gaaaactatgtccaactctttgata

SEQ ID NO: 155266 - DNA, 25 bp, Artificial
  probe
  misc_feature (1)..(25): SEQ ID NO: 1082; WAN024DF2_at; Start 122; Stop 146
ttgataccatcgagcaaaatgggct

SEQ ID NO: 155267 - DNA, 25 bp, Artificial
  probe
  misc_feature (1)..(25): SEQ ID NO: 1082; WAN024DF2_at; Start 198; Stop 222
aggtttttccatgtggagcccgaca

SEQ ID NO: 155268 - DNA, 25 bp, Artificial
  probe
  misc_feature (1)..(25): SEQ ID NO: 1082; WAN024DF2_at; Start 228; Stop 252
tgatgttttggcaacggattgggta

SEQ ID NO: 155269 - DNA, 25 bp, Artificial
  probe
  misc_feature (1)..(25): SEQ ID NO: 1082; WAN024DF2_at; Start 129; Stop 153
catcgagcaaaatgggcttgcactt

SEQ ID NO: 155270 - DNA, 25 bp, Artificial
  probe
  misc_feature (1)..(25): SEQ ID NO: 1082; WAN024DF2_at; Start 109; Stop 133
tatgtccaactctttgataccatcg

SEQ ID NO: 155271 - DNA, 25 bp, Artificial
  probe
  misc_feature (1)..(25): SEQ ID NO: 1082; WAN024DF2_at; Start 106; Stop 130
aactatgtccaactctttgatacca

SEQ ID NO: 155272 - DNA, 25 bp, Artificial
  probe
  misc_feature (1)..(25): SEQ ID NO: 1082; WAN024DF2_at; Start 242; Stop 266
cggattgggtagaagtgcatgacta

SEQ ID NO: 155273 - DNA, 25 bp, Artificial
  probe
  misc_feature (1)..(25): SEQ ID NO: 1082; WAN024DF2_at; Start 16; Stop 40
ttaaaggagaaaaacatgacatttg

SEQ ID NO: 155274 - DNA, 25 bp, Artificial
  probe
  misc_feature (1)..(25): SEQ ID NO: 1082; WAN024DF2_at; Start 199; Stop 223
ggtttttccatgtggagcccgacag

SEQ ID NO: 155275 - DNA, 25 bp, Artificial
  probe
  misc_feature (1)..(25): SEQ ID NO: 1082; WAN024DF2_at; Start 158; Stop 182
tgacaccttatttcctaatcaacgt

SEQ ID NO: 155276 - DNA, 25 bp, Artificial
  probe
  misc_feature (1)..(25): SEQ ID NO: 1082; WAN024DF2_at; Start 126; Stop 150
taccatcgagcaaaatgggcttgca

SEQ ID NO: 155277 - DNA, 25 bp, Artificial
  probe
  misc_feature (1)..(25): SEQ ID NO: 1082; WAN024DF2_at; Start 132; Stop 156
cgagcaaaatgggcttgcacttgaa

SEQ ID NO: 155278 - DNA, 25 bp, Artificial
  probe
  misc_feature (1)..(25): SEQ ID NO: 1082; WAN024DF2_at; Start 190; Stop 214
gaaggagaaggtttttccatgtgga

SEQ ID NO: 155279 - DNA, 25 bp, Artificial
  probe
  misc_feature (1)..(25): SEQ ID NO: 1082; WAN024DF2_at; Start 113; Stop 137
tccaactctttgataccatcgagca

SEQ ID NO: 155280 - DNA, 25 bp, Artificial
  probe
  misc_feature (1)..(25): SEQ ID NO: 5218; WAN024DF3_at; Start 346; Stop 370
gatagcttgctccttcatcgaccag

SEQ ID NO: 155281 - DNA, 25 bp, Artificial
  probe
  misc_feature (1)..(25): SEQ ID NO: 5218; WAN024DF3_at; Start 496; Stop 520
aagcagccgttagctgttaatcagc

SEQ ID NO: 155282 - DNA, 25 bp, Artificial
  probe
  misc_feature (1)..(25): SEQ ID NO: 5218; WAN024DF3_at; Start 892; Stop 916
tatgaaatttatcttgctgcaggga

SEQ ID NO: 155283 - DNA, 25 bp, Artificial
  probe
  misc_feature (1)..(25): SEQ ID NO: 5218; WAN024DF3_at; Start 530; Stop 554
gtgcggcttttactccaggatttga

SEQ ID NO: 155284 - DNA, 25 bp, Artificial
  probe
  misc_feature (1)..(25): SEQ ID NO: 5218; WAN024DF3_at; Start 175; Stop 199
gaagaactgttaggtcttgtcctaa

SEQ ID NO: 155285 - DNA, 25 bp, Artificial
  probe
  misc_feature (1)..(25): SEQ ID NO: 5218; WAN024DF3_at; Start 544; Stop 568
ccaggatttgaatcagcttttcatg

SEQ ID NO: 155286 - DNA, 25 bp, Artificial
  probe
  misc_feature (1)..(25): SEQ ID NO: 5218; WAN024DF3_at; Start 216; Stop 240
aagagaaaagatgtggattcagtcc

SEQ ID NO: 155287 - DNA, 25 bp, Artificial
  probe
  misc_feature (1)..(25): SEQ ID NO: 5218; WAN024DF3_at; Start 481; Stop 505
cttaaaaaagatgtcaagcagccgt

SEQ ID NO: 155288 - DNA, 25 bp, Artificial
  probe
  misc_feature (1)..(25): SEQ ID NO: 5218; WAN024DF3_at; Start 128; Stop 152
gaatcaatgccttcgacttggctga

SEQ ID NO: 155289 - DNA, 25 bp, Artificial
  probe
  misc_feature (1)..(25): SEQ ID NO: 5218; WAN024DF3_at; Start 146; Stop 170
tggctgatatttatggtcgtggtcg

SEQ ID NO: 155290 - DNA, 25 bp, Artificial
  probe
  misc_feature (1)..(25): SEQ ID NO: 5218; WAN024DF3_at; Start 512; Stop 536
ttaatcagctacaattgagtgcggc

SEQ ID NO: 155291 - DNA, 25 bp, Artificial
  probe
  misc_feature (1)..(25): SEQ ID NO: 5218; WAN024DF3_at; Start 859; Stop 883
gcggcaaactttagcttaacaagaa

SEQ ID NO: 155292 - DNA, 25 bp, Artificial
  probe
  misc_feature (1)..(25): SEQ ID NO: 5218; WAN024DF3_at; Start 44; Stop 68
cagaaattgttctcggaatgatgag

SEQ ID NO: 155293 - DNA, 25 bp, Artificial
  probe
  misc_feature (1)..(25): SEQ ID NO: 5218; WAN024DF3_at; Start 382; Stop 406
gaatctgaccaagtagcagaagcct

SEQ ID NO: 155294 - DNA, 25 bp, Artificial
  probe
  misc_feature (1)..(25): SEQ ID NO: 5218; WAN024DF3_at; Start 113; Stop 137
cagcactttctgttggaatcaatgc

SEQ ID NO: 155295 - DNA, 25 bp, Artificial
  probe
  misc_feature (1)..(25): SEQ ID NO: 5218; WAN024DF3_at; Start 629; Stop 653
tacacgatgtggtcattcaagcatg

SEQ ID NO: 155296 - DNA, 25 bp, Artificial
  probe
  misc_feature (1)..(25): SEQ ID NO: 5218; WAN024DF3_at; Start 721; Stop 745
caagtacttgatcgtttagctatta

SEQ ID NO: 155297 - DNA, 25 bp, Artificial
  probe
  misc_feature (1)..(25): SEQ ID NO: 5218; WAN024DF3_at; Start 751; Stop 775
ggagtaacctcttcaactattgcca

SEQ ID NO: 155298 - DNA, 25 bp, Artificial
  probe
  misc_feature (1)..(25): SEQ ID NO: 5218; WAN024DF3_at; Start 94; Stop 118
gttgaagagcttgtagaaacagcac

SEQ ID NO: 155299 - DNA, 25 bp, Artificial
  probe
  misc_feature (1)..(25): SEQ ID NO: 5218; WAN024DF3_at; Start 230; Stop 254
ggattcagtccaaatgtggcattcg

SEQ ID NO: 155300 - DNA, 25 bp, Artificial
  probe
  misc_feature (1)..(25): SEQ ID NO: 5218; WAN024DF3_at; Start 767; Stop 791
ctattgccatttcttggatattgcg

SEQ ID NO: 155301 - DNA, 25 bp, Artificial
  probe
  misc_feature (1)..(25): SEQ ID NO: 5218; WAN024DF3_at; Start 585; Stop 609
tcaagcagctatgcgagatggcagc

SEQ ID NO: 155302 - DNA, 25 bp, Artificial
  probe
  misc_feature (1)..(25): SEQ ID NO: 5218; WAN024DF3_at; Start 832; Stop 856
cctaagcacttgagagaagttagcc

SEQ ID NO: 155303 - DNA, 25 bp, Artificial
  probe
  misc_feature (1)..(25): SEQ ID NO: 5218; WAN024DF3_at; Start 788; Stop 812
tgcgttatccagcaaaaatgcaggc

SEQ ID NO: 155304 - DNA, 25 bp, Artificial
  probe
  misc_feature (1)..(25): SEQ ID NO: 5218; WAN024DF3_at; Start 162; Stop 186
tcgtggtcgttgtgaagaactgtta

SEQ ID NO: 155305 - DNA, 25 bp, Artificial
  probe
  misc_feature (1)..(25): SEQ ID NO: 5218; WAN024DF3_at; Start 22; Stop 46
ggtcaagatgacaaagaattatcag

SEQ ID NO: 155306 - DNA, 25 bp, Artificial
  probe
  misc_feature (1)..(25): SEQ ID NO: 5218; WAN024DF3_at; Start 304; Stop 328
tcagtagacggtattttgcaaagat

SEQ ID NO: 155307 - DNA, 25 bp, Artificial
  probe
  misc_feature (1)..(25): SEQ ID NO: 5218; WAN024DF3_at; Start 445; Stop 469
ggagtttctaatcaaaatcctatga

SEQ ID NO: 155308 - DNA, 25 bp, Artificial
  probe
  misc_feature (1)..(25): SEQ ID NO: 5218; WAN024DF3_at; Start 570; Stop 594
taatatggaagatagtcaagcagct

SEQ ID NO: 155309 - DNA, 25 bp, Artificial
  probe
  misc_feature (1)..(25): SEQ ID NO: 5218; WAN024DF3_at; Start 361; Stop 385
catcgaccagatgctttgatggaat

SEQ ID NO: 155310 - DNA, 25 bp, Artificial
  probe
  misc_feature (1)..(25): SEQ ID NO: 5218; WAN024DF3_at; Start 907; Stop 931
gctgcagggaataatttgccgtaac

SEQ ID NO: 155311 - DNA, 25 bp, Artificial
  probe
  misc_feature (1)..(25): SEQ ID NO: 5218; WAN024DF3_at; Start 638; Stop 662
tggtcattcaagcatggtctgtctt

SEQ ID NO: 155312 - DNA, 25 bp, Artificial
  probe
  misc_feature (1)..(25): SEQ ID NO: 5218; WAN024DF3_at; Start 597; Stop 621
gcgagatggcagcatttttgaatat

SEQ ID NO: 155313 - DNA, 25 bp, Artificial
  probe
  misc_feature (1)..(25): SEQ ID NO: 5218; WAN024DF3_at; Start 737; Stop 761
tagctattaaatatggagtaacctc

SEQ ID NO: 155314 - DNA, 25 bp, Artificial
  probe
  misc_feature (1)..(25): SEQ ID NO: 1068; WAN024DF4_at; Start 672; Stop 696
tgtggtgggttctctgctccgttat

SEQ ID NO: 155315 - DNA, 25 bp, Artificial
  probe
  misc_feature (1)..(25): SEQ ID NO: 1068; WAN024DF4_at; Start 643; Stop 667
ccatttgtcagtatgattattgccc

SEQ ID NO: 155316 - DNA, 25 bp, Artificial
  probe
  misc_feature (1)..(25): SEQ ID NO: 1068; WAN024DF4_at; Start 271; Stop 295
gagtcccttttgacgccaattcttg

SEQ ID NO: 155317 - DNA, 25 bp, Artificial
  probe
  misc_feature (1)..(25): SEQ ID NO: 1068; WAN024DF4_at; Start 194; Stop 218
cagaggattatctaggtaagaatcc

SEQ ID NO: 155318 - DNA, 25 bp, Artificial
  probe
  misc_feature (1)..(25): SEQ ID NO: 1068; WAN024DF4_at; Start 256; Stop 280
cgcagttctatcaaagagtcccttt

SEQ ID NO: 155319 - DNA, 25 bp, Artificial
  probe
  misc_feature (1)..(25): SEQ ID NO: 1068; WAN024DF4_at; Start 83; Stop 107
tgtgggaaagttttaatcttgctgg

SEQ ID NO: 155320 - DNA, 25 bp, Artificial
  probe
  misc_feature (1)..(25): SEQ ID NO: 1068; WAN024DF4_at; Start 11; Stop 35
tgaagtattacgaagaaacaagcgc

SEQ ID NO: 155321 - DNA, 25 bp, Artificial
  probe
  misc_feature (1)..(25): SEQ ID NO: 1068; WAN024DF4_at; Start 181; Stop 205
gatggcatgagtgcagaggattatc

SEQ ID NO: 155322 - DNA, 25 bp, Artificial
  probe
  misc_feature (1)..(25): SEQ ID NO: 1068; WAN024DF4_at; Start 286; Stop 310
ccaattcttgtcctggcggtattac

SEQ ID NO: 155323 - DNA, 25 bp, Artificial
  probe
  misc_feature (1)..(25): SEQ ID NO: 1068; WAN024DF4_at; Start 64; Stop 88
caaaagtattttgaggagttgtggg

SEQ ID NO: 155324 - DNA, 25 bp, Artificial
  probe
  misc_feature (1)..(25): SEQ ID NO: 1068; WAN024DF4_at; Start 448; Stop 472
gattctcctaaaatgaaaattggca

SEQ ID NO: 155325 - DNA, 25 bp, Artificial
  probe
  misc_feature (1)..(25): SEQ ID NO: 1068; WAN024DF4_at; Start 102; Stop 126
tgctggatttctctatgatgaagac

SEQ ID NO: 155326 - DNA, 25 bp, Artificial
  probe
  misc_feature (1)..(25): SEQ ID NO: 1068; WAN024DF4_at; Start 149; Stop 173
tgatgatgctagatttctcagaagc

SEQ ID NO: 155327 - DNA, 25 bp, Artificial
  probe
  misc_feature (1)..(25): SEQ ID NO: 1068; WAN024DF4_at; Start 413; Stop 437
ttgtggccacaattttacgaagaag

SEQ ID NO: 155328 - DNA, 25 bp, Artificial
  probe
  misc_feature (1)..(25): SEQ ID NO: 1068; WAN024DF4_at; Start 731; Stop 755
caaaagttattcctttagctgtcct

SEQ ID NO: 155329 - DNA, 25 bp, Artificial
  probe
  misc_feature (1)..(25): SEQ ID NO: 1068; WAN024DF4_at; Start 510; Stop 534
tttaggatatgtaggaatggcaagc

SEQ ID NO: 155330 - DNA, 25 bp, Artificial
  probe
  misc_feature (1)..(25): SEQ ID NO: 1068; WAN024DF4_at; Start 628; Stop 652
gaagcggtctttcgtccatttgtca

SEQ ID NO: 155331 - DNA, 25 bp, Artificial
  probe
  misc_feature (1)..(25): SEQ ID NO: 1068; WAN024DF4_at; Start 524; Stop 548
gaatggcaagcttcatacaagaagg

SEQ ID NO: 155332 - DNA, 25 bp, Artificial
  probe
  misc_feature (1)..(25): SEQ ID NO: 1068; WAN024DF4_at; Start 396; Stop 420
tctgattggatttggacttgtggcc

SEQ ID NO: 155333 - DNA, 25 bp, Artificial
  probe
  misc_feature (1)..(25): SEQ ID NO: 1068; WAN024DF4_at; Start 117; Stop 141
tgatgaagactatctcagagagcag

SEQ ID NO: 155334 - DNA, 25 bp, Artificial
  probe
  misc_feature (1)..(25): SEQ ID NO: 1068; WAN024DF4_at; Start 246; Stop 270
gggagcacctcgcagttctatcaaa

SEQ ID NO: 155335 - DNA, 25 bp, Artificial
  probe
  misc_feature (1)..(25): SEQ ID NO: 1068; WAN024DF4_at; Start 687; Stop 711
gctccgttattatgagtggatggga

SEQ ID NO: 155336 - DNA, 25 bp, Artificial
  probe
  misc_feature (1)..(25): SEQ ID NO: 1068; WAN024DF4_at; Start 612; Stop 636
tatttggaattggaaagaagcggtc

SEQ ID NO: 155337 - DNA, 25 bp, Artificial
  probe
  misc_feature (1)..(25): SEQ ID NO: 1068; WAN024DF4_at; Start 25; Stop 49
gaaacaagcgctttgctacatgagt

SEQ ID NO: 155338 - DNA, 25 bp, Artificial
  probe
  misc_feature (1)..(25): SEQ ID NO: 1068; WAN024DF4_at; Start 39; Stop 63
gctacatgagttttctgaggagaat

SEQ ID NO: 155339 - DNA, 25 bp, Artificial
  probe
  misc_feature (1)..(25): SEQ ID NO: 1068; WAN024DF4_at; Start 230; Stop 254
tgaaagagattctcaagggagcacc

SEQ ID NO: 155340 - DNA, 25 bp, Artificial
  probe
  misc_feature (1)..(25): SEQ ID NO: 1068; WAN024DF4_at; Start 428; Stop 452
tacgaagaagtttagtccaagattc

SEQ ID NO: 155341 - DNA, 25 bp, Artificial
  probe
  misc_feature (1)..(25): SEQ ID NO: 1068; WAN024DF4_at; Start 469; Stop 493
ggcacttacattgttgttgggacta

SEQ ID NO: 155342 - DNA, 25 bp, Artificial
  probe
  misc_feature (1)..(25): SEQ ID NO: 1068; WAN024DF4_at; Start 656; Stop 680
tgattattgcccatcttgtggtggg

SEQ ID NO: 155343 - DNA, 25 bp, Artificial
  probe
  misc_feature (1)..(25): SEQ ID NO: 1068; WAN024DF4_at; Start 366; Stop 390
gctcacatttttagggcaacttctt

SEQ ID NO: 155344 - DNA, 25 bp, Artificial
  probe
  misc_feature (1)..(25): SEQ ID NO: 1068; WAN024DF4_at; Start 554; Stop 578
tttatattccggctccctgggatag

SEQ ID NO: 155345 - DNA, 25 bp, Artificial
  probe
  misc_feature (1)..(25): SEQ ID NO: 1068; WAN024DF4_at; Start 164; Stop 188
tctcagaagcagaacgagatggcat

SEQ ID NO: 155346 - DNA, 25 bp, Artificial
  probe
  misc_feature (1)..(25): SEQ ID NO: 1068; WAN024DF4_at; Start 132; Stop 156
cagagagcagatctatttgatgatg

SEQ ID NO: 155347 - DNA, 25 bp, Artificial
  probe
  misc_feature (1)..(25): SEQ ID NO: 1068; WAN024DF4_at; Start 594; Stop 618
gatttcgctagttatcggtatttgg

SEQ ID NO: 155348 - DNA, 25 bp, Artificial
  probe
  misc_feature (1)..(25): SEQ ID NO: 4005; WAN024DF5_at; Start 10; Stop 34
gaaactcagctattaaaaggtgttc

SEQ ID NO: 155349 - DNA, 25 bp, Artificial
  probe
  misc_feature (1)..(25): SEQ ID NO: 4005; WAN024DF5_at; Start 257; Stop 281
tctcagtcttttggcaacaatggga

SEQ ID NO: 155350 - DNA, 25 bp, Artificial
  probe
  misc_feature (1)..(25): SEQ ID NO: 4005; WAN024DF5_at; Start 25; Stop 49
aaaggtgttcttgaaggttgtgtct

SEQ ID NO: 155351 - DNA, 25 bp, Artificial
  probe
  misc_feature (1)..(25): SEQ ID NO: 4005; WAN024DF5_at; Start 64; Stop 88
caaaaagagcggtatggttatgagt

SEQ ID NO: 155352 - DNA, 25 bp, Artificial
  probe
  misc_feature (1)..(25): SEQ ID NO: 4005; WAN024DF5_at; Start 270; Stop 294
gcaacaatgggacgatttgagtcaa

SEQ ID NO: 155353 - DNA, 25 bp, Artificial
  probe
  misc_feature (1)..(25): SEQ ID NO: 4005; WAN024DF5_at; Start 93; Stop 117
tcagactttgcgagaggctggattt

SEQ ID NO: 155354 - DNA, 25 bp, Artificial
  probe
  misc_feature (1)..(25): SEQ ID NO: 4005; WAN024DF5_at; Start 133; Stop 157
ggaactatttatcctttgttgcaaa

SEQ ID NO: 155355 - DNA, 25 bp, Artificial
  probe
  misc_feature (1)..(25): SEQ ID NO: 4005; WAN024DF5_at; Start 192; Stop 216
gcgcccgtcgccagatggtccagat

SEQ ID NO: 155356 - DNA, 25 bp, Artificial
  probe
  misc_feature (1)..(25): SEQ ID NO: 4005; WAN024DF5_at; Start 87; Stop 111
gttggttcagactttgcgagaggct

SEQ ID NO: 155357 - DNA, 25 bp, Artificial
  probe
  misc_feature (1)..(25): SEQ ID NO: 4005; WAN024DF5_at; Start 52; Stop 76
gatatgattggtcaaaaagagcggt

SEQ ID NO: 155358 - DNA, 25 bp, Artificial
  probe
  misc_feature (1)..(25): SEQ ID NO: 4005; WAN024DF5_at; Start 40; Stop 64
ggttgtgtcttggatatgattggtc

SEQ ID NO: 155359 - DNA, 25 bp, Artificial
  probe
  misc_feature (1)..(25): SEQ ID NO: 4005; WAN024DF5_at; Start 233; Stop 257
taatgaaagaaggagaagagcgtgt

SEQ ID NO: 155360 - DNA, 25 bp, Artificial
  probe
  misc_feature (1)..(25): SEQ ID NO: 4005; WAN024DF5_at; Start 250; Stop 274
gagcgtgtctcagtcttttggcaac

SEQ ID NO: 155361 - DNA, 25 bp, Artificial
  probe
  misc_feature (1)..(25): SEQ ID NO: 4005; WAN024DF5_at; Start 142; Stop 166
tatcctttgttgcaaaagttagaaa

SEQ ID NO: 155362 - DNA, 25 bp, Artificial
  probe
  misc_feature (1)..(25): SEQ ID NO: 4005; WAN024DF5_at; Start 112; Stop 136
ggatttgatactatcgttccaggaa

SEQ ID NO: 155363 - DNA, 25 bp, Artificial
  probe
  misc_feature (1)..(25): SEQ ID NO: 4005; WAN024DF5_at; Start 102; Stop 126
gcgagaggctggatttgatactatc

SEQ ID NO: 155364 - DNA, 25 bp, Artificial
  probe
  misc_feature (1)..(25): SEQ ID NO: 4005; WAN024DF5_at; Start 263; Stop 287
tcttttggcaacaatgggacgattt

SEQ ID NO: 155365 - DNA, 25 bp, Artificial
  probe
  misc_feature (1)..(25): SEQ ID NO: 4005; WAN024DF5_at; Start 71; Stop 95
agcggtatggttatgagttggttca

SEQ ID NO: 155366 - DNA, 25 bp, Artificial
  probe
  misc_feature (1)..(25): SEQ ID NO: 4005; WAN024DF5_at; Start 126; Stop 150
cgttccaggaactatttatcctttg

SEQ ID NO: 155367 - DNA, 25 bp, Artificial
  probe
  misc_feature (1)..(25): SEQ ID NO: 4005; WAN024DF5_at; Start 171; Stop 195
tcaatggataagaggcgacatgcgc

SEQ ID NO: 155368 - DNA, 25 bp, Artificial
  probe
  misc_feature (1)..(25): SEQ ID NO: 4005; WAN024DF5_at; Start 16; Stop 40
cagctattaaaaggtgttcttgaag

SEQ ID NO: 155369 - DNA, 25 bp, Artificial
  probe
  misc_feature (1)..(25): SEQ ID NO: 4005; WAN024DF5_at; Start 165; Stop 189
aaaaaatcaatggataagaggcgac

SEQ ID NO: 155370 - DNA, 25 bp, Artificial
  probe
  misc_feature (1)..(25): SEQ ID NO: 4005; WAN024DF5_at; Start 115; Stop 139
tttgatactatcgttccaggaacta

SEQ ID NO: 155371 - DNA, 25 bp, Artificial
  probe
  misc_feature (1)..(25): SEQ ID NO: 4005; WAN024DF5_at; Start 178; Stop 202
ataagaggcgacatgcgcccgtcgc

SEQ ID NO: 155372 - DNA, 25 bp, Artificial
  probe
  misc_feature (1)..(25): SEQ ID NO: 4005; WAN024DF5_at; Start 98; Stop 122
ctttgcgagaggctggatttgatac

SEQ ID NO: 155373 - DNA, 25 bp, Artificial
  probe
  misc_feature (1)..(25): SEQ ID NO: 4005; WAN024DF5_at; Start 82; Stop 106
tatgagttggttcagactttgcgag

SEQ ID NO: 155374 - DNA, 25 bp, Artificial
  probe
  misc_feature (1)..(25): SEQ ID NO: 4005; WAN024DF5_at; Start 229; Stop 253
tcattaatgaaagaaggagaagagc

SEQ ID NO: 155375 - DNA, 25 bp, Artificial
  probe
  misc_feature (1)..(25): SEQ ID NO: 4005; WAN024DF5_at; Start 175; Stop 199
tggataagaggcgacatgcgcccgt

SEQ ID NO: 155376 - DNA, 25 bp, Artificial
  probe
  misc_feature (1)..(25): SEQ ID NO: 4005; WAN024DF5_at; Start 292; Stop 316
caaaaagtagaagggattaagaatg

SEQ ID NO: 155377 - DNA, 25 bp, Artificial
  probe
  misc_feature (1)..(25): SEQ ID NO: 4005; WAN024DF5_at; Start 283; Stop 307
gatttgagtcaaaaagtagaaggga

SEQ ID NO: 155378 - DNA, 25 bp, Artificial
  probe
  misc_feature (1)..(25): SEQ ID NO: 4005; WAN024DF5_at; Start 57; Stop 81
gattggtcaaaaagagcggtatggt

SEQ ID NO: 155379 - DNA, 25 bp, Artificial
  probe
  misc_feature (1)..(25): SEQ ID NO: 4005; WAN024DF5_at; Start 1; Stop 25
gtgatgaaagaaactcagctattaa

SEQ ID NO: 155380 - DNA, 25 bp, Artificial
  probe
  misc_feature (1)..(25): SEQ ID NO: 4005; WAN024DF5_at; Start 237; Stop 261
gaaagaaggagaagagcgtgtctca

SEQ ID NO: 155381 - DNA, 25 bp, Artificial
  probe
  misc_feature (1)..(25): SEQ ID NO: 4005; WAN024DF5_at; Start 274; Stop 298
caatgggacgatttgagtcaaaaag

SEQ ID NO: 155382 - DNA, 25 bp, Artificial
  probe
  misc_feature (1)..(25): SEQ ID NO: 852; WAN024DF6_at; Start 124; Stop 148
gcccctgcaaagtttgatattcgtg

SEQ ID NO: 155383 - DNA, 25 bp, Artificial
  probe
  misc_feature (1)..(25): SEQ ID NO: 852; WAN024DF6_at; Start 131; Stop 155
caaagtttgatattcgtgcttggag

SEQ ID NO: 155384 - DNA, 25 bp, Artificial
  probe
  misc_feature (1)..(25): SEQ ID NO: 852; WAN024DF6_at; Start 108; Stop 132
tgtgagctttaatggtgcccctgca

SEQ ID NO: 155385 - DNA, 25 bp, Artificial
  probe
  misc_feature (1)..(25): SEQ ID NO: 852; WAN024DF6_at; Start 160; Stop 184
gaccatactaaaatgggcaaaggga

SEQ ID NO: 155386 - DNA, 25 bp, Artificial
  probe
  misc_feature (1)..(25): SEQ ID NO: 852; WAN024DF6_at; Start 93; Stop 117
caaggaaattaaccgtgtgagcttt

SEQ ID NO: 155387 - DNA, 25 bp, Artificial
  probe
  misc_feature (1)..(25): SEQ ID NO: 852; WAN024DF6_at; Start 36; Stop 60
tacatttgaaatcgaagagcacttg

SEQ ID NO: 155388 - DNA, 25 bp, Artificial
  probe
  misc_feature (1)..(25): SEQ ID NO: 852; WAN024DF6_at; Start 153; Stop 177
gagtccagaccatactaaaatgggc

SEQ ID NO: 155389 - DNA, 25 bp, Artificial
  probe
  misc_feature (1)..(25): SEQ ID NO: 852; WAN024DF6_at; Start 43; Stop 67
gaaatcgaagagcacttgttgactc

SEQ ID NO: 155390 - DNA, 25 bp, Artificial
  probe
  misc_feature (1)..(25): SEQ ID NO: 852; WAN024DF6_at; Start 178; Stop 202
aaagggattactctctcaaatgaag

SEQ ID NO: 155391 - DNA, 25 bp, Artificial
  probe
  misc_feature (1)..(25): SEQ ID NO: 852; WAN024DF6_at; Start 168; Stop 192
taaaatgggcaaagggattactctc

SEQ ID NO: 155392 - DNA, 25 bp, Artificial
  probe
  misc_feature (1)..(25): SEQ ID NO: 852; WAN024DF6_at; Start 171; Stop 195
aatgggcaaagggattactctctca

SEQ ID NO: 155393 - DNA, 25 bp, Artificial
  probe
  misc_feature (1)..(25): SEQ ID NO: 852; WAN024DF6_at; Start 144; Stop 168
tcgtgcttggagtccagaccatact

SEQ ID NO: 155394 - DNA, 25 bp, Artificial
  probe
  misc_feature (1)..(25): SEQ ID NO: 852; WAN024DF6_at; Start 181; Stop 205
gggattactctctcaaatgaagaat

SEQ ID NO: 155395 - DNA, 25 bp, Artificial
  probe
  misc_feature (1)..(25): SEQ ID NO: 852; WAN024DF6_at; Start 216; Stop 240
ggtggatgcctttaaaggcaactaa

SEQ ID NO: 155396 - DNA, 25 bp, Artificial
  probe
  misc_feature (1)..(25): SEQ ID NO: 852; WAN024DF6_at; Start 105; Stop 129
ccgtgtgagctttaatggtgcccct

SEQ ID NO: 155397 - DNA, 25 bp, Artificial
  probe
  misc_feature (1)..(25): SEQ ID NO: 852; WAN024DF6_at; Start 148; Stop 172
gcttggagtccagaccatactaaaa

SEQ ID NO: 155398 - DNA, 25 bp, Artificial
  probe
  misc_feature (1)..(25): SEQ ID NO: 852; WAN024DF6_at; Start 52; Stop 76
gagcacttgttgactctttctgaaa

SEQ ID NO: 155399 - DNA, 25 bp, Artificial
  probe
  misc_feature (1)..(25): SEQ ID NO: 852; WAN024DF6_at; Start 55; Stop 79
cacttgttgactctttctgaaaacg

SEQ ID NO: 155400 - DNA, 25 bp, Artificial
  probe
  misc_feature (1)..(25): SEQ ID NO: 852; WAN024DF6_at; Start 202; Stop 226
gaatttcaaacgatggtggatgcct

SEQ ID NO: 155401 - DNA, 25 bp, Artificial
  probe
  misc_feature (1)..(25): SEQ ID NO: 852; WAN024DF6_at; Start 116; Stop 140
ttaatggtgcccctgcaaagtttga

SEQ ID NO: 155402 - DNA, 25 bp, Artificial
  probe
  misc_feature (1)..(25): SEQ ID NO: 852; WAN024DF6_at; Start 88; Stop 112
tggaccaaggaaattaaccgtgtga

SEQ ID NO: 155403 - DNA, 25 bp, Artificial
  probe
  misc_feature (1)..(25): SEQ ID NO: 852; WAN024DF6_at; Start 102; Stop 126
taaccgtgtgagctttaatggtgcc

SEQ ID NO: 155404 - DNA, 25 bp, Artificial
  probe
  misc_feature (1)..(25): SEQ ID NO: 852; WAN024DF6_at; Start 28; Stop 52
gcagaatttacatttgaaatcgaag

SEQ ID NO: 155405 - DNA, 25 bp, Artificial
  probe
  misc_feature (1)..(25): SEQ ID NO: 852; WAN024DF6_at; Start 207; Stop 231
tcaaacgatggtggatgcctttaaa

SEQ ID NO: 155406 - DNA, 25 bp, Artificial
  probe
  misc_feature (1)..(25): SEQ ID NO: 852; WAN024DF6_at; Start 220; Stop 244
gatgcctttaaaggcaactaactaa

SEQ ID NO: 155407 - DNA, 25 bp, Artificial
  probe
  misc_feature (1)..(25): SEQ ID NO: 852; WAN024DF6_at; Start 38; Stop 62
catttgaaatcgaagagcacttgtt

SEQ ID NO: 155408 - DNA, 25 bp, Artificial
  probe
  misc_feature (1)..(25): SEQ ID NO: 852; WAN024DF6_at; Start 138; Stop 162
tgatattcgtgcttggagtccagac

SEQ ID NO: 155409 - DNA, 25 bp, Artificial
  probe
  misc_feature (1)..(25): SEQ ID NO: 852; WAN024DF6_at; Start 110; Stop 134
tgagctttaatggtgcccctgcaaa

SEQ ID NO: 155410 - DNA, 25 bp, Artificial
  probe
  misc_feature (1)..(25): SEQ ID NO: 852; WAN024DF6_at; Start 141; Stop 165
tattcgtgcttggagtccagaccat

SEQ ID NO: 155411 - DNA, 25 bp, Artificial
  probe
  misc_feature (1)..(25): SEQ ID NO: 852; WAN024DF6_at; Start 59; Stop 83
tgttgactctttctgaaaacgaaaa

SEQ ID NO: 155412 - DNA, 25 bp, Artificial
  probe
  misc_feature (1)..(25): SEQ ID NO: 852; WAN024DF6_at; Start 174; Stop 198
gggcaaagggattactctctcaaat

SEQ ID NO: 155413 - DNA, 25 bp, Artificial
  probe
  misc_feature (1)..(25): SEQ ID NO: 852; WAN024DF6_at; Start 118; Stop 142
aatggtgcccctgcaaagtttgata

SEQ ID NO: 155414 - DNA, 25 bp, Artificial
  probe
  misc_feature (1)..(25): SEQ ID NO: 852; WAN024DF6_at; Start 189; Stop 213
tctctcaaatgaagaatttcaaacg

SEQ ID NO: 155415 - DNA, 25 bp, Artificial
  probe
  misc_feature (1)..(25): SEQ ID NO: 852; WAN024DF6_at; Start 210; Stop 234
aacgatggtggatgcctttaaaggc

SEQ ID NO: 155416 - DNA, 25 bp, Artificial
  probe
  misc_feature (1)..(25): SEQ ID NO: 1528; WAN024DF7_at; Start 127; Stop 151
gctgttcaccttatcttgtctgaga

SEQ ID NO: 155417 - DNA, 25 bp, Artificial
  probe
  misc_feature (1)..(25): SEQ ID NO: 1528; WAN024DF7_at; Start 117; Stop 141
gaaacaaaccgctgttcaccttatc

SEQ ID NO: 155418 - DNA, 25 bp, Artificial
  probe
  misc_feature (1)..(25): SEQ ID NO: 1528; WAN024DF7_at; Start 178; Stop 202
tatgatcagcaaggccagcaaatta

SEQ ID NO: 155419 - DNA, 25 bp, Artificial
  probe
  misc_feature (1)..(25): SEQ ID NO: 1528; WAN024DF7_at; Start 94; Stop 118
gccactattgaagaggctatccaga

SEQ ID NO: 155420 - DNA, 25 bp, Artificial
  probe
  misc_feature (1)..(25): SEQ ID NO: 1528; WAN024DF7_at; Start 243; Stop 267
tataagcgatattcaacgcctgcga

SEQ ID NO: 155421 - DNA, 25 bp, Artificial
  probe
  misc_feature (1)..(25): SEQ ID NO: 1528; WAN024DF7_at; Start 230; Stop 254
gccggattatccgtataagcgatat

SEQ ID NO: 155422 - DNA, 25 bp, Artificial
  probe
  misc_feature (1)..(25): SEQ ID NO: 1528; WAN024DF7_at; Start 268; Stop 292
tttgtcccctcaactgtccaaacag

SEQ ID NO: 155423 - DNA, 25 bp, Artificial
  probe
  misc_feature (1)..(25): SEQ ID NO: 1528; WAN024DF7_at; Start 250; Stop 274
gatattcaacgcctgcgatttgtcc

SEQ ID NO: 155424 - DNA, 25 bp, Artificial
  probe
  misc_feature (1)..(25): SEQ ID NO: 1528; WAN024DF7_at; Start 190; Stop 214
ggccagcaaattatcgtgaaaaatt

SEQ ID NO: 155425 - DNA, 25 bp, Artificial
  probe
  misc_feature (1)..(25): SEQ ID NO: 1528; WAN024DF7_at; Start 225; Stop 249
tgtgagccggattatccgtataagc

SEQ ID NO: 155426 - DNA, 25 bp, Artificial
  probe
  misc_feature (1)..(25): SEQ ID NO: 1528; WAN024DF7_at; Start 1; Stop 25
atgagacataaattccagcaagttc

SEQ ID NO: 155427 - DNA, 25 bp, Artificial
  probe
  misc_feature (1)..(25): SEQ ID NO: 1528; WAN024DF7_at; Start 66; Stop 90
tgaccagactgaaaccaactccctt

SEQ ID NO: 155428 - DNA, 25 bp, Artificial
  probe
  misc_feature (1)..(25): SEQ ID NO: 1528; WAN024DF7_at; Start 239; Stop 263
tccgtataagcgatattcaacgcct

SEQ ID NO: 155429 - DNA, 25 bp, Artificial
  probe
  misc_feature (1)..(25): SEQ ID NO: 1528; WAN024DF7_at; Start 111; Stop 135
tatccagaaacaaaccgctgttcac

SEQ ID NO: 155430 - DNA, 25 bp, Artificial
  probe
  misc_feature (1)..(25): SEQ ID NO: 1528; WAN024DF7_at; Start 218; Stop 242
ccaaaaatgtgagccggattatccg

SEQ ID NO: 155431 - DNA, 25 bp, Artificial
  probe
  misc_feature (1)..(25): SEQ ID NO: 1528; WAN024DF7_at; Start 171; Stop 195
catcaaatatgatcagcaaggccag

SEQ ID NO: 155432 - DNA, 25 bp, Artificial
  probe
  misc_feature (1)..(25): SEQ ID NO: 1528; WAN024DF7_at; Start 3; Stop 27
gagacataaattccagcaagttcta

SEQ ID NO: 155433 - DNA, 25 bp, Artificial
  probe
  misc_feature (1)..(25): SEQ ID NO: 1528; WAN024DF7_at; Start 108; Stop 132
ggctatccagaaacaaaccgctgtt

SEQ ID NO: 155434 - DNA, 25 bp, Artificial
  probe
  misc_feature (1)..(25): SEQ ID NO: 1528; WAN024DF7_at; Start 186; Stop 210
gcaaggccagcaaattatcgtgaaa

SEQ ID NO: 155435 - DNA, 25 bp, Artificial
  probe
  misc_feature (1)..(25): SEQ ID NO: 1528; WAN024DF7_at; Start 98; Stop 122
ctattgaagaggctatccagaaaca

SEQ ID NO: 155436 - DNA, 25 bp, Artificial
  probe
  misc_feature (1)..(25): SEQ ID NO: 1528; WAN024DF7_at; Start 245; Stop 269
taagcgatattcaacgcctgcgatt

SEQ ID NO: 155437 - DNA, 25 bp, Artificial
  probe
  misc_feature (1)..(25): SEQ ID NO: 1528; WAN024DF7_at; Start 103; Stop 127
gaagaggctatccagaaacaaaccg

SEQ ID NO: 155438 - DNA, 25 bp, Artificial
  probe
  misc_feature (1)..(25): SEQ ID NO: 1528; WAN024DF7_at; Start 174; Stop 198
caaatatgatcagcaaggccagcaa

SEQ ID NO: 155439 - DNA, 25 bp, Artificial
  probe
  misc_feature (1)..(25): SEQ ID NO: 1528; WAN024DF7_at; Start 90; Stop 114
tacagccactattgaagaggctatc

SEQ ID NO: 155440 - DNA, 25 bp, Artificial
  probe
  misc_feature (1)..(25): SEQ ID NO: 1528; WAN024DF7_at; Start 70; Stop 94
cagactgaaaccaactcccttacag

SEQ ID NO: 155441 - DNA, 25 bp, Artificial
  probe
  misc_feature (1)..(25): SEQ ID NO: 1528; WAN024DF7_at; Start 260; Stop 284
gcctgcgatttgtcccctcaactgt

SEQ ID NO: 155442 - DNA, 25 bp, Artificial
  probe
  misc_feature (1)..(25): SEQ ID NO: 1528; WAN024DF7_at; Start 277; Stop 301
tcaactgtccaaacagcccaaaaaa

SEQ ID NO: 155443 - DNA, 25 bp, Artificial
  probe
  misc_feature (1)..(25): SEQ ID NO: 1528; WAN024DF7_at; Start 61; Stop 85
caacctgaccagactgaaaccaact

SEQ ID NO: 155444 - DNA, 25 bp, Artificial
  probe
  misc_feature (1)..(25): SEQ ID NO: 1528; WAN024DF7_at; Start 82; Stop 106
aactcccttacagccactattgaag

SEQ ID NO: 155445 - DNA, 25 bp, Artificial
  probe
  misc_feature (1)..(25): SEQ ID NO: 1528; WAN024DF7_at; Start 85; Stop 109
tcccttacagccactattgaagagg

SEQ ID NO: 155446 - DNA, 25 bp, Artificial
  probe
  misc_feature (1)..(25): SEQ ID NO: 1528; WAN024DF7_at; Start 131; Stop 155
ttcaccttatcttgtctgagacaag

SEQ ID NO: 155447 - DNA, 25 bp, Artificial
  probe
  misc_feature (1)..(25): SEQ ID NO: 1528; WAN024DF7_at; Start 264; Stop 288
gcgatttgtcccctcaactgtccaa

SEQ ID NO: 155448 - DNA, 25 bp, Artificial
  probe
  misc_feature (1)..(25): SEQ ID NO: 1528; WAN024DF7_at; Start 183; Stop 207
tcagcaaggccagcaaattatcgtg

SEQ ID NO: 155449 - DNA, 25 bp, Artificial
  probe
  misc_feature (1)..(25): SEQ ID NO: 1528; WAN024DF7_at; Start 106; Stop 130
gaggctatccagaaacaaaccgctg

SEQ ID NO: 155450 - DNA, 25 bp, Artificial
  probe
  misc_feature (1)..(25): SEQ ID NO: 2327; WAN024DF8_at; Start 78; Stop 102
tgaggatacaccagaatttttggaa

SEQ ID NO: 155451 - DNA, 25 bp, Artificial
  probe
  misc_feature (1)..(25): SEQ ID NO: 2327; WAN024DF8_at; Start 21; Stop 45
cattattgcgattgtgaaaccctta

SEQ ID NO: 155452 - DNA, 25 bp, Artificial
  probe
  misc_feature (1)..(25): SEQ ID NO: 2327; WAN024DF8_at; Start 180; Stop 204
gattgtctactctgtcccaactgaa

SEQ ID NO: 155453 - DNA, 25 bp, Artificial
  probe
  misc_feature (1)..(25): SEQ ID NO: 2327; WAN024DF8_at; Start 138; Stop 162
tgtaatcggtcgtaagggtcgcact

SEQ ID NO: 155454 - DNA, 25 bp, Artificial
  probe
  misc_feature (1)..(25): SEQ ID NO: 2327; WAN024DF8_at; Start 65; Stop 89
taactatcaagattgaggatacacc

SEQ ID NO: 155455 - DNA, 25 bp, Artificial
  probe
  misc_feature (1)..(25): SEQ ID NO: 2327; WAN024DF8_at; Start 145; Stop 169
ggtcgtaagggtcgcactatttctg

SEQ ID NO: 155456 - DNA, 25 bp, Artificial
  probe
  misc_feature (1)..(25): SEQ ID NO: 2327; WAN024DF8_at; Start 27; Stop 51
tgcgattgtgaaacccttaatttca

SEQ ID NO: 155457 - DNA, 25 bp, Artificial
  probe
  misc_feature (1)..(25): SEQ ID NO: 2327; WAN024DF8_at; Start 75; Stop 99
gattgaggatacaccagaatttttg

SEQ ID NO: 155458 - DNA, 25 bp, Artificial
  probe
  misc_feature (1)..(25): SEQ ID NO: 2327; WAN024DF8_at; Start 105; Stop 129
tcatttgaatcttgatcaaagcgat

SEQ ID NO: 155459 - DNA, 25 bp, Artificial
  probe
  misc_feature (1)..(25): SEQ ID NO: 2327; WAN024DF8_at; Start 215; Stop 239
taagaatcgttattgacgaaaaata

SEQ ID NO: 155460 - DNA, 25 bp, Artificial
  probe
  misc_feature (1)..(25): SEQ ID NO: 2327; WAN024DF8_at; Start 103; Stop 127
tatcatttgaatcttgatcaaagcg

SEQ ID NO: 155461 - DNA, 25 bp, Artificial
  probe
  misc_feature (1)..(25): SEQ ID NO: 2327; WAN024DF8_at; Start 148; Stop 172
cgtaagggtcgcactatttctgcga

SEQ ID NO: 155462 - DNA, 25 bp, Artificial
  probe
  misc_feature (1)..(25): SEQ ID NO: 2327; WAN024DF8_at; Start 200; Stop 224
ctgaatacaaaaaagtaagaatcgt

SEQ ID NO: 155463 - DNA, 25 bp, Artificial
  probe
  misc_feature (1)..(25): SEQ ID NO: 2327; WAN024DF8_at; Start 44; Stop 68
taatttcacaaccagatgccttaac

SEQ ID NO: 155464 - DNA, 25 bp, Artificial
  probe
  misc_feature (1)..(25): SEQ ID NO: 2327; WAN024DF8_at; Start 18; Stop 42
tctcattattgcgattgtgaaaccc

SEQ ID NO: 155465 - DNA, 25 bp, Artificial
  probe
  misc_feature (1)..(25): SEQ ID NO: 2327; WAN024DF8_at; Start 190; Stop 214
tctgtcccaactgaatacaaaaaag

SEQ ID NO: 155466 - DNA, 25 bp, Artificial
  probe
  misc_feature (1)..(25): SEQ ID NO: 2327; WAN024DF8_at; Start 140; Stop 164
taatcggtcgtaagggtcgcactat

SEQ ID NO: 155467 - DNA, 25 bp, Artificial
  probe
  misc_feature (1)..(25): SEQ ID NO: 2327; WAN024DF8_at; Start 166; Stop 190
tctgcgataagaacgattgtctact

SEQ ID NO: 155468 - DNA, 25 bp, Artificial
  probe
  misc_feature (1)..(25): SEQ ID NO: 2327; WAN024DF8_at; Start 153; Stop 177
gggtcgcactatttctgcgataaga

SEQ ID NO: 155469 - DNA, 25 bp, Artificial
  probe
  misc_feature (1)..(25): SEQ ID NO: 2327; WAN024DF8_at; Start 143; Stop 167
tcggtcgtaagggtcgcactatttc

SEQ ID NO: 155470 - DNA, 25 bp, Artificial
  probe
  misc_feature (1)..(25): SEQ ID NO: 2327; WAN024DF8_at; Start 183; Stop 207
tgtctactctgtcccaactgaatac

SEQ ID NO: 155471 - DNA, 25 bp, Artificial
  probe
  misc_feature (1)..(25): SEQ ID NO: 2327; WAN024DF8_at; Start 68; Stop 92
ctatcaagattgaggatacaccaga

SEQ ID NO: 155472 - DNA, 25 bp, Artificial
  probe
  misc_feature (1)..(25): SEQ ID NO: 2327; WAN024DF8_at; Start 52; Stop 76
caaccagatgccttaactatcaaga

SEQ ID NO: 155473 - DNA, 25 bp, Artificial
  probe
  misc_feature (1)..(25): SEQ ID NO: 2327; WAN024DF8_at; Start 88; Stop 112
ccagaatttttggaatatcatttga

SEQ ID NO: 155474 - DNA, 25 bp, Artificial
  probe
  misc_feature (1)..(25): SEQ ID NO: 2327; WAN024DF8_at; Start 176; Stop 200
gaacgattgtctactctgtcccaac

SEQ ID NO: 155475 - DNA, 25 bp, Artificial
  probe
  misc_feature (1)..(25): SEQ ID NO: 2327; WAN024DF8_at; Start 71; Stop 95
tcaagattgaggatacaccagaatt

SEQ ID NO: 155476 - DNA, 25 bp, Artificial
  probe
  misc_feature (1)..(25): SEQ ID NO: 2327; WAN024DF8_at; Start 135; Stop 159
tcgtgtaatcggtcgtaagggtcgc

SEQ ID NO: 155477 - DNA, 25 bp, Artificial
  probe
  misc_feature (1)..(25): SEQ ID NO: 2327; WAN024DF8_at; Start 157; Stop 181
cgcactatttctgcgataagaacga

SEQ ID NO: 155478 - DNA, 25 bp, Artificial
  probe
  misc_feature (1)..(25): SEQ ID NO: 2327; WAN024DF8_at; Start 192; Stop 216
tgtcccaactgaatacaaaaaagta

SEQ ID NO: 155479 - DNA, 25 bp, Artificial
  probe
  misc_feature (1)..(25): SEQ ID NO: 2327; WAN024DF8_at; Start 37; Stop 61
aaacccttaatttcacaaccagatg

SEQ ID NO: 155480 - DNA, 25 bp, Artificial
  probe
  misc_feature (1)..(25): SEQ ID NO: 2327; WAN024DF8_at; Start 173; Stop 197
taagaacgattgtctactctgtccc

SEQ ID NO: 155481 - DNA, 25 bp, Artificial
  probe
  misc_feature (1)..(25): SEQ ID NO: 2327; WAN024DF8_at; Start 6; Stop 30
tacgattgaaaatctcattattgcg

SEQ ID NO: 155482 - DNA, 25 bp, Artificial
  probe
  misc_feature (1)..(25): SEQ ID NO: 2327; WAN024DF8_at; Start 162; Stop 186
tatttctgcgataagaacgattgtc

SEQ ID NO: 155483 - DNA, 25 bp, Artificial
  probe
  misc_feature (1)..(25): SEQ ID NO: 2327; WAN024DF8_at; Start 58; Stop 82
gatgccttaactatcaagattgagg

SEQ ID NO: 155484 - DNA, 25 bp, Artificial
  probe
  misc_feature (1)..(25): SEQ ID NO: 2438; WAN024DF9_at; Start 233; Stop 257
gcgtattgaaaaaattccacgattc

SEQ ID NO: 155485 - DNA, 25 bp, Artificial
  probe
  misc_feature (1)..(25): SEQ ID NO: 2438; WAN024DF9_at; Start 129; Stop 153
tgttgctgaaaaccaagtaactttg

SEQ ID NO: 155486 - DNA, 25 bp, Artificial
  probe
  misc_feature (1)..(25): SEQ ID NO: 2438; WAN024DF9_at; Start 80; Stop 104
caccacgtgacggacgtttcatcga

SEQ ID NO: 155487 - DNA, 25 bp, Artificial
  probe
  misc_feature (1)..(25): SEQ ID NO: 2438; WAN024DF9_at; Start 202; Stop 226
gacacagtacgtaacatcctttcaa

SEQ ID NO: 155488 - DNA, 25 bp, Artificial
  probe
  misc_feature (1)..(25): SEQ ID NO: 2438; WAN024DF9_at; Start 52; Stop 76
taccgtatcaacgtagcagattcac

SEQ ID NO: 155489 - DNA, 25 bp, Artificial
  probe
  misc_feature (1)..(25): SEQ ID NO: 2438; WAN024DF9_at; Start 211; Stop 235
cgtaacatcctttcaaaagaaggcg

SEQ ID NO: 155490 - DNA, 25 bp, Artificial
  probe
  misc_feature (1)..(25): SEQ ID NO: 2438; WAN024DF9_at; Start 76; Stop 100
cgttcaccacgtgacggacgtttca

SEQ ID NO: 155491 - DNA, 25 bp, Artificial
  probe
  misc_feature (1)..(25): SEQ ID NO: 2438; WAN024DF9_at; Start 113; Stop 137
gaacttacaacccacttgttgctga

SEQ ID NO: 155492 - DNA, 25 bp, Artificial
  probe
  misc_feature (1)..(25): SEQ ID NO: 2438; WAN024DF9_at; Start 65; Stop 89
tagcagattcacgttcaccacgtga

SEQ ID NO: 155493 - DNA, 25 bp, Artificial
  probe
  misc_feature (1)..(25): SEQ ID NO: 2438; WAN024DF9_at; Start 20; Stop 44
tgactcgtatgggttctaagaaaaa

SEQ ID NO: 155494 - DNA, 25 bp, Artificial
  probe
  misc_feature (1)..(25): SEQ ID NO: 2438; WAN024DF9_at; Start 92; Stop 116
gacgtttcatcgaaacagttggaac

SEQ ID NO: 155495 - DNA, 25 bp, Artificial
  probe
  misc_feature (1)..(25): SEQ ID NO: 2438; WAN024DF9_at; Start 99; Stop 123
catcgaaacagttggaacttacaac

SEQ ID NO: 155496 - DNA, 25 bp, Artificial
  probe
  misc_feature (1)..(25): SEQ ID NO: 2438; WAN024DF9_at; Start 63; Stop 87
cgtagcagattcacgttcaccacgt

SEQ ID NO: 155497 - DNA, 25 bp, Artificial
  probe
  misc_feature (1)..(25): SEQ ID NO: 2438; WAN024DF9_at; Start 46; Stop 70
cctttctaccgtatcaacgtagcag

SEQ ID NO: 155498 - DNA, 25 bp, Artificial
  probe
  misc_feature (1)..(25): SEQ ID NO: 2438; WAN024DF9_at; Start 218; Stop 242
tcctttcaaaagaaggcgtattgaa

SEQ ID NO: 155499 - DNA, 25 bp, Artificial
  probe
  misc_feature (1)..(25): SEQ ID NO: 2438; WAN024DF9_at; Start 186; Stop 210
tggagctcaaccttcagacacagta

SEQ ID NO: 155500 - DNA, 25 bp, Artificial
  probe
  misc_feature (1)..(25): SEQ ID NO: 2438; WAN024DF9_at; Start 88; Stop 112
gacggacgtttcatcgaaacagttg

SEQ ID NO: 155501 - DNA, 25 bp, Artificial
  probe
  misc_feature (1)..(25): SEQ ID NO: 2438; WAN024DF9_at; Start 142; Stop 166
caagtaactttgaaagaagaccgcg

SEQ ID NO: 155502 - DNA, 25 bp, Artificial
  probe
  misc_feature (1)..(25): SEQ ID NO: 2438; WAN024DF9_at; Start 6; Stop 30
agttaaaatccgtttgactcgtatg

SEQ ID NO: 155503 - DNA, 25 bp, Artificial
  probe
  misc_feature (1)..(25): SEQ ID NO: 2438; WAN024DF9_at; Start 2; Stop 26
tggcagttaaaatccgtttgactcg

SEQ ID NO: 155504 - DNA, 25 bp, Artificial
  probe
  misc_feature (1)..(25): SEQ ID NO: 2438; WAN024DF9_at; Start 14; Stop 38
tccgtttgactcgtatgggttctaa

SEQ ID NO: 155505 - DNA, 25 bp, Artificial
  probe
  misc_feature (1)..(25): SEQ ID NO: 2438; WAN024DF9_at; Start 193; Stop 217
caaccttcagacacagtacgtaaca

SEQ ID NO: 155506 - DNA, 25 bp, Artificial
  probe
  misc_feature (1)..(25): SEQ ID NO: 2438; WAN024DF9_at; Start 206; Stop 230
cagtacgtaacatcctttcaaaaga

SEQ ID NO: 155507 - DNA, 25 bp, Artificial
  probe
  misc_feature (1)..(25): SEQ ID NO: 2438; WAN024DF9_at; Start 248; Stop 272
tccacgattctaaattttcaaaata

SEQ ID NO: 155508 - DNA, 25 bp, Artificial
  probe
  misc_feature (1)..(25): SEQ ID NO: 2438; WAN024DF9_at; Start 57; Stop 81
tatcaacgtagcagattcacgttca

SEQ ID NO: 155509 - DNA, 25 bp, Artificial
  probe
  misc_feature (1)..(25): SEQ ID NO: 2438; WAN024DF9_at; Start 183; Stop 207
taatggagctcaaccttcagacaca

SEQ ID NO: 155510 - DNA, 25 bp, Artificial
  probe
  misc_feature (1)..(25): SEQ ID NO: 2438; WAN024DF9_at; Start 190; Stop 214
gctcaaccttcagacacagtacgta

SEQ ID NO: 155511 - DNA, 25 bp, Artificial
  probe
  misc_feature (1)..(25): SEQ ID NO: 2438; WAN024DF9_at; Start 107; Stop 131
cagttggaacttacaacccacttgt

SEQ ID NO: 155512 - DNA, 25 bp, Artificial
  probe
  misc_feature (1)..(25): SEQ ID NO: 2438; WAN024DF9_at; Start 83; Stop 107
cacgtgacggacgtttcatcgaaac

SEQ ID NO: 155513 - DNA, 25 bp, Artificial
  probe
  misc_feature (1)..(25): SEQ ID NO: 2438; WAN024DF9_at; Start 188; Stop 212
gagctcaaccttcagacacagtacg

SEQ ID NO: 155514 - DNA, 25 bp, Artificial
  probe
  misc_feature (1)..(25): SEQ ID NO: 2438; WAN024DF9_at; Start 70; Stop 94
gattcacgttcaccacgtgacggac

SEQ ID NO: 155515 - DNA, 25 bp, Artificial
  probe
  misc_feature (1)..(25): SEQ ID NO: 2438; WAN024DF9_at; Start 121; Stop 145
aacccacttgttgctgaaaaccaag

SEQ ID NO: 155516 - DNA, 25 bp, Artificial
  probe
  misc_feature (1)..(25): SEQ ID NO: 2438; WAN024DF9_at; Start 181; Stop 205
gctaatggagctcaaccttcagaca

SEQ ID NO: 155517 - DNA, 25 bp, Artificial
  probe
  misc_feature (1)..(25): SEQ ID NO: 2438; WAN024DF9_at; Start 198; Stop 222
ttcagacacagtacgtaacatcctt

SEQ ID NO: 155518 - DNA, 25 bp, Artificial
  probe
  misc_feature (1)..(25): SEQ ID NO: 513; WAN024DFA_at; Start 158; Stop 182
gctatcacacccaatacctatctaa

SEQ ID NO: 155519 - DNA, 25 bp, Artificial
  probe
  misc_feature (1)..(25): SEQ ID NO: 513; WAN024DFA_at; Start 310; Stop 334
tgatgatgaaatcccaactattatc

SEQ ID NO: 155520 - DNA, 25 bp, Artificial
  probe
  misc_feature (1)..(25): SEQ ID NO: 513; WAN024DFA_at; Start 192; Stop 216
tcgtaaactttattgcagctcttcc

SEQ ID NO: 155521 - DNA, 25 bp, Artificial
  probe
  misc_feature (1)..(25): SEQ ID NO: 513; WAN024DFA_at; Start 217; Stop 241
tctaaatttcctaattgttgaacca

SEQ ID NO: 155522 - DNA, 25 bp, Artificial
  probe
  misc_feature (1)..(25): SEQ ID NO: 513; WAN024DFA_at; Start 317; Stop 341
gaaatcccaactattatctaactaa

SEQ ID NO: 155523 - DNA, 25 bp, Artificial
  probe
  misc_feature (1)..(25): SEQ ID NO: 513; WAN024DFA_at; Start 20; Stop 44
tcctgaagaagaagggagttactgg

SEQ ID NO: 155524 - DNA, 25 bp, Artificial
  probe
  misc_feature (1)..(25): SEQ ID NO: 513; WAN024DFA_at; Start 287; Stop 311
gaagaagttgaagattttcaagatg

SEQ ID NO: 155525 - DNA, 25 bp, Artificial
  probe
  misc_feature (1)..(25): SEQ ID NO: 513; WAN024DFA_at; Start 83; Stop 107
ttcatgagcatttttcagaagaaga

SEQ ID NO: 155526 - DNA, 25 bp, Artificial
  probe
  misc_feature (1)..(25): SEQ ID NO: 513; WAN024DFA_at; Start 206; Stop 230
gcagctcttcctctaaatttcctaa

SEQ ID NO: 155527 - DNA, 25 bp, Artificial
  probe
  misc_feature (1)..(25): SEQ ID NO: 513; WAN024DFA_at; Start 13; Stop 37
aagaatatcctgaagaagaagggag

SEQ ID NO: 155528 - DNA, 25 bp, Artificial
  probe
  misc_feature (1)..(25): SEQ ID NO: 513; WAN024DFA_at; Start 186; Stop 210
cctggttcgtaaactttattgcagc

SEQ ID NO: 155529 - DNA, 25 bp, Artificial
  probe
  misc_feature (1)..(25): SEQ ID NO: 513; WAN024DFA_at; Start 149; Stop 173
aatggcattgctatcacacccaata

SEQ ID NO: 155530 - DNA, 25 bp, Artificial
  probe
  misc_feature (1)..(25): SEQ ID NO: 513; WAN024DFA_at; Start 269; Stop 293
cagaaaccatttactggggaagaag

SEQ ID NO: 155531 - DNA, 25 bp, Artificial
  probe
  misc_feature (1)..(25): SEQ ID NO: 513; WAN024DFA_at; Start 182; Stop 206
agcgcctggttcgtaaactttattg

SEQ ID NO: 155532 - DNA, 25 bp, Artificial
  probe
  misc_feature (1)..(25): SEQ ID NO: 513; WAN024DFA_at; Start 3; Stop 27
taccatgaaaaagaatatcctgaag

SEQ ID NO: 155533 - DNA, 25 bp, Artificial
  probe
  misc_feature (1)..(25): SEQ ID NO: 513; WAN024DFA_at; Start 197; Stop 221
aactttattgcagctcttcctctaa

SEQ ID NO: 155534 - DNA, 25 bp, Artificial
  probe
  misc_feature (1)..(25): SEQ ID NO: 513; WAN024DFA_at; Start 303; Stop 327
ttcaagatgatgatgaaatcccaac

SEQ ID NO: 155535 - DNA, 25 bp, Artificial
  probe
  misc_feature (1)..(25): SEQ ID NO: 513; WAN024DFA_at; Start 6; Stop 30
catgaaaaagaatatcctgaagaag

SEQ ID NO: 155536 - DNA, 25 bp, Artificial
  probe
  misc_feature (1)..(25): SEQ ID NO: 513; WAN024DFA_at; Start 260; Stop 284
agttcttttcagaaaccatttactg

SEQ ID NO: 155537 - DNA, 25 bp, Artificial
  probe
  misc_feature (1)..(25): SEQ ID NO: 513; WAN024DFA_at; Start 18; Stop 42
tatcctgaagaagaagggagttact

SEQ ID NO: 155538 - DNA, 25 bp, Artificial
  probe
  misc_feature (1)..(25): SEQ ID NO: 513; WAN024DFA_at; Start 124; Stop 148
catgtccttctatggacttttttac

SEQ ID NO: 155539 - DNA, 25 bp, Artificial
  probe
  misc_feature (1)..(25): SEQ ID NO: 513; WAN024DFA_at; Start 23; Stop 47
tgaagaagaagggagttactggact

SEQ ID NO: 155540 - DNA, 25 bp, Artificial
  probe
  misc_feature (1)..(25): SEQ ID NO: 513; WAN024DFA_at; Start 152; Stop 176
ggcattgctatcacacccaatacct

SEQ ID NO: 155541 - DNA, 25 bp, Artificial
  probe
  misc_feature (1)..(25): SEQ ID NO: 513; WAN024DFA_at; Start 232; Stop 256
tgttgaaccaattgcccgttttata

SEQ ID NO: 155542 - DNA, 25 bp, Artificial
  probe
  misc_feature (1)..(25): SEQ ID NO: 513; WAN024DFA_at; Start 225; Stop 249
tcctaattgttgaaccaattgcccg

SEQ ID NO: 155543 - DNA, 25 bp, Artificial
  probe
  misc_feature (1)..(25): SEQ ID NO: 513; WAN024DFA_at; Start 84; Stop 108
tcatgagcatttttcagaagaagaa

SEQ ID NO: 155544 - DNA, 25 bp, Artificial
  probe
  misc_feature (1)..(25): SEQ ID NO: 513; WAN024DFA_at; Start 118; Stop 142
cactttcatgtccttctatggactt

SEQ ID NO: 155545 - DNA, 25 bp, Artificial
  probe
  misc_feature (1)..(25): SEQ ID NO: 513; WAN024DFA_at; Start 146; Stop 170
tacaatggcattgctatcacaccca

SEQ ID NO: 155546 - DNA, 25 bp, Artificial
  probe
  misc_feature (1)..(25): SEQ ID NO: 513; WAN024DFA_at; Start 166; Stop 190
acccaatacctatctaagcgcctgg

SEQ ID NO: 155547 - DNA, 25 bp, Artificial
  probe
  misc_feature (1)..(25): SEQ ID NO: 513; WAN024DFA_at; Start 136; Stop 160
tggacttttttacaatggcattgct

SEQ ID NO: 155548 - DNA, 25 bp, Artificial
  probe
  misc_feature (1)..(25): SEQ ID NO: 513; WAN024DFA_at; Start 253; Stop 277
tatactaagttcttttcagaaacca

SEQ ID NO: 155549 - DNA, 25 bp, Artificial
  probe
  misc_feature (1)..(25): SEQ ID NO: 513; WAN024DFA_at; Start 170; Stop 194
aatacctatctaagcgcctggttcg

SEQ ID NO: 155550 - DNA, 25 bp, Artificial
  probe
  misc_feature (1)..(25): SEQ ID NO: 513; WAN024DFA_at; Start 305; Stop 329
caagatgatgatgaaatcccaacta

SEQ ID NO: 155551 - DNA, 25 bp, Artificial
  probe
  misc_feature (1)..(25): SEQ ID NO: 513; WAN024DFA_at; Start 176; Stop 200
tatctaagcgcctggttcgtaaact

SEQ ID NO: 155552 - DNA, 25 bp, Artificial
  probe
  misc_feature (1)..(25): SEQ ID NO: 2761; WAN024DFB_at; Start 336; Stop 360
tggaatcgagtgtacgcaattaatc

SEQ ID NO: 155553 - DNA, 25 bp, Artificial
  probe
  misc_feature (1)..(25): SEQ ID NO: 2761; WAN024DFB_at; Start 88; Stop 112
gaacaatctaccgtgggagtgggaa

SEQ ID NO: 155554 - DNA, 25 bp, Artificial
  probe
  misc_feature (1)..(25): SEQ ID NO: 2761; WAN024DFB_at; Start 94; Stop 118
tctaccgtgggagtgggaactccag

SEQ ID NO: 155555 - DNA, 25 bp, Artificial
  probe
  misc_feature (1)..(25): SEQ ID NO: 2761; WAN024DFB_at; Start 183; Stop 207
cgaagtgagtgacattggacaatta

SEQ ID NO: 155556 - DNA, 25 bp, Artificial
  probe
  misc_feature (1)..(25): SEQ ID NO: 2761; WAN024DFB_at; Start 124; Stop 148
cagcatcttggacgcctggtttttc

SEQ ID NO: 155557 - DNA, 25 bp, Artificial
  probe
  misc_feature (1)..(25): SEQ ID NO: 2761; WAN024DFB_at; Start 428; Stop 452
gctatctggcttggctcctttataa

SEQ ID NO: 155558 - DNA, 25 bp, Artificial
  probe
  misc_feature (1)..(25): SEQ ID NO: 2761; WAN024DFB_at; Start 390; Stop 414
ctttgagattgatgatttgtggacc

SEQ ID NO: 155559 - DNA, 25 bp, Artificial
  probe
  misc_feature (1)..(25): SEQ ID NO: 2761; WAN024DFB_at; Start 118; Stop 142
ggtattcagcatcttggacgcctgg

SEQ ID NO: 155560 - DNA, 25 bp, Artificial
  probe
  misc_feature (1)..(25): SEQ ID NO: 2761; WAN024DFB_at; Start 422; Stop 446
tgggtggctatctggcttggctcct

SEQ ID NO: 155561 - DNA, 25 bp, Artificial
  probe
  misc_feature (1)..(25): SEQ ID NO: 2761; WAN024DFB_at; Start 162; Stop 186
caattctctctggaaactgggcgaa

SEQ ID NO: 155562 - DNA, 25 bp, Artificial
  probe
  misc_feature (1)..(25): SEQ ID NO: 2761; WAN024DFB_at; Start 69; Stop 93
tttttgctttactcctcaagaacaa

SEQ ID NO: 155563 - DNA, 25 bp, Artificial
  probe
  misc_feature (1)..(25): SEQ ID NO: 2761; WAN024DFB_at; Start 109; Stop 133
ggaactccaggtattcagcatcttg

SEQ ID NO: 155564 - DNA, 25 bp, Artificial
  probe
  misc_feature (1)..(25): SEQ ID NO: 2761; WAN024DFB_at; Start 150; Stop 174
tttgactcctttcaattctctctgg

SEQ ID NO: 155565 - DNA, 25 bp, Artificial
  probe
  misc_feature (1)..(25): SEQ ID NO: 2761; WAN024DFB_at; Start 318; Stop 342
tagttttcttgtgagtcttggaatc

SEQ ID NO: 155566 - DNA, 25 bp, Artificial
  probe
  misc_feature (1)..(25): SEQ ID NO: 2761; WAN024DFB_at; Start 418; Stop 442
actttgggtggctatctggcttggc

SEQ ID NO: 155567 - DNA, 25 bp, Artificial
  probe
  misc_feature (1)..(25): SEQ ID NO: 2761; WAN024DFB_at; Start 276; Stop 300
tctatttccaaatttgcggaaaaca

SEQ ID NO: 155568 - DNA, 25 bp, Artificial
  probe
  misc_feature (1)..(25): SEQ ID NO: 2761; WAN024DFB_at; Start 252; Stop 276
tcctctgattttccaactcctttat

SEQ ID NO: 155569 - DNA, 25 bp, Artificial
  probe
  misc_feature (1)..(25): SEQ ID NO: 2761; WAN024DFB_at; Start 270; Stop 294
cctttatctatttccaaatttgcgg

SEQ ID NO: 155570 - DNA, 25 bp, Artificial
  probe
  misc_feature (1)..(25): SEQ ID NO: 2761; WAN024DFB_at; Start 364; Stop 388
gactttttctttgatttcaatcgcg

SEQ ID NO: 155571 - DNA, 25 bp, Artificial
  probe
  misc_feature (1)..(25): SEQ ID NO: 2761; WAN024DFB_at; Start 381; Stop 405
caatcgcgtctttgagattgatgat

SEQ ID NO: 155572 - DNA, 25 bp, Artificial
  probe
  misc_feature (1)..(25): SEQ ID NO: 2761; WAN024DFB_at; Start 440; Stop 464
ggctcctttataaacgattacataa

SEQ ID NO: 155573 - DNA, 25 bp, Artificial
  probe
  misc_feature (1)..(25): SEQ ID NO: 2761; WAN024DFB_at; Start 324; Stop 348
tcttgtgagtcttggaatcgagtgt

SEQ ID NO: 155574 - DNA, 25 bp, Artificial
  probe
  misc_feature (1)..(25): SEQ ID NO: 2761; WAN024DFB_at; Start 372; Stop 396
ctttgatttcaatcgcgtctttgag

SEQ ID NO: 155575 - DNA, 25 bp, Artificial
  probe
  misc_feature (1)..(25): SEQ ID NO: 2761; WAN024DFB_at; Start 174; Stop 198
gaaactgggcgaagtgagtgacatt

SEQ ID NO: 155576 - DNA, 25 bp, Artificial
  probe
  misc_feature (1)..(25): SEQ ID NO: 2761; WAN024DFB_at; Start 330; Stop 354
gagtcttggaatcgagtgtacgcaa

SEQ ID NO: 155577 - DNA, 25 bp, Artificial
  probe
  misc_feature (1)..(25): SEQ ID NO: 2761; WAN024DFB_at; Start 348; Stop 372
tacgcaattaatcttggactttttc

SEQ ID NO: 155578 - DNA, 25 bp, Artificial
  probe
  misc_feature (1)..(25): SEQ ID NO: 2761; WAN024DFB_at; Start 342; Stop 366
cgagtgtacgcaattaatcttggac

SEQ ID NO: 155579 - DNA, 25 bp, Artificial
  probe
  misc_feature (1)..(25): SEQ ID NO: 2761; WAN024DFB_at; Start 193; Stop 217
gacattggacaattatgttggattt

SEQ ID NO: 155580 - DNA, 25 bp, Artificial
  probe
  misc_feature (1)..(25): SEQ ID NO: 2761; WAN024DFB_at; Start 104; Stop 128
gagtgggaactccaggtattcagca

SEQ ID NO: 155581 - DNA, 25 bp, Artificial
  probe
  misc_feature (1)..(25): SEQ ID NO: 2761; WAN024DFB_at; Start 166; Stop 190
tctctctggaaactgggcgaagtga

SEQ ID NO: 155582 - DNA, 25 bp, Artificial
  probe
  misc_feature (1)..(25): SEQ ID NO: 2761; WAN024DFB_at; Start 435; Stop 459
ggcttggctcctttataaacgatta

SEQ ID NO: 155583 - DNA, 25 bp, Artificial
  probe
  misc_feature (1)..(25): SEQ ID NO: 2761; WAN024DFB_at; Start 78; Stop 102
tactcctcaagaacaatctaccgtg

SEQ ID NO: 155584 - DNA, 25 bp, Artificial
  probe
  misc_feature (1)..(25): SEQ ID NO: 2761; WAN024DFB_at; Start 84; Stop 108
tcaagaacaatctaccgtgggagtg

SEQ ID NO: 155585 - DNA, 25 bp, Artificial
  probe
  misc_feature (1)..(25): SEQ ID NO: 2761; WAN024DFB_at; Start 235; Stop 259
aatgtcttcttgttttttcctctga

SEQ ID NO: 155586 - DNA, 25 bp, Artificial
  probe
  misc_feature (1)..(25): SEQ ID NO: 3330; WAN024DFC_at; Start 1023; Stop 1047
ggcactcttacagattgctagtcag

SEQ ID NO: 155587 - DNA, 25 bp, Artificial
  probe
  misc_feature (1)..(25): SEQ ID NO: 3330; WAN024DFC_at; Start 820; Stop 844
gagtctggccaaacagaatcgcaga

SEQ ID NO: 155588 - DNA, 25 bp, Artificial
  probe
  misc_feature (1)..(25): SEQ ID NO: 3330; WAN024DFC_at; Start 481; Stop 505
caaaagtggagtcagaaacaaggtc

SEQ ID NO: 155589 - DNA, 25 bp, Artificial
  probe
  misc_feature (1)..(25): SEQ ID NO: 3330; WAN024DFC_at; Start 713; Stop 737
cgcgcgatttggtgagagacttgac

SEQ ID NO: 155590 - DNA, 25 bp, Artificial
  probe
  misc_feature (1)..(25): SEQ ID NO: 3330; WAN024DFC_at; Start 869; Stop 893
tgggacgtaacccaaatccttatca

SEQ ID NO: 155591 - DNA, 25 bp, Artificial
  probe
  misc_feature (1)..(25): SEQ ID NO: 3330; WAN024DFC_at; Start 230; Stop 254
tctttgcggatgagaaaatcgtgat

SEQ ID NO: 155592 - DNA, 25 bp, Artificial
  probe
  misc_feature (1)..(25): SEQ ID NO: 3330; WAN024DFC_at; Start 768; Stop 792
tgcagtcatgctgggacaatttcgg

SEQ ID NO: 155593 - DNA, 25 bp, Artificial
  probe
  misc_feature (1)..(25): SEQ ID NO: 3330; WAN024DFC_at; Start 48; Stop 72
gactttatcaaatttaccgagcctg

SEQ ID NO: 155594 - DNA, 25 bp, Artificial
  probe
  misc_feature (1)..(25): SEQ ID NO: 3330; WAN024DFC_at; Start 437; Stop 461
tcgatgcagtagaagtaaaagaaca

SEQ ID NO: 155595 - DNA, 25 bp, Artificial
  probe
  misc_feature (1)..(25): SEQ ID NO: 3330; WAN024DFC_at; Start 2; Stop 26
tgaagaaaggagagacgatgctagc

SEQ ID NO: 155596 - DNA, 25 bp, Artificial
  probe
  misc_feature (1)..(25): SEQ ID NO: 3330; WAN024DFC_at; Start 969; Stop 993
gacagactatcagattaagacaggt

SEQ ID NO: 155597 - DNA, 25 bp, Artificial
  probe
  misc_feature (1)..(25): SEQ ID NO: 3330; WAN024DFC_at; Start 839; Stop 863
cgcagattgcaagtagtttaggtag

SEQ ID NO: 155598 - DNA, 25 bp, Artificial
  probe
  misc_feature (1)..(25): SEQ ID NO: 3330; WAN024DFC_at; Start 645; Stop 669
tcccaagaccttgcaggacaatatt

SEQ ID NO: 155599 - DNA, 25 bp, Artificial
  probe
  misc_feature (1)..(25): SEQ ID NO: 3330; WAN024DFC_at; Start 365; Stop 389
taatctttgcagaaggaaagctgga

SEQ ID NO: 155600 - DNA, 25 bp, Artificial
  probe
  misc_feature (1)..(25): SEQ ID NO: 3330; WAN024DFC_at; Start 288; Stop 312
gaaacgctttttgacagatgatgag

SEQ ID NO: 155601 - DNA, 25 bp, Artificial
  probe
  misc_feature (1)..(25): SEQ ID NO: 3330; WAN024DFC_at; Start 798; Stop 822
tactcaggtgaagattttggcggag

SEQ ID NO: 155602 - DNA, 25 bp, Artificial
  probe
  misc_feature (1)..(25): SEQ ID NO: 3330; WAN024DFC_at; Start 310; Stop 334
gagcttaagtcatttgaggaatacc

SEQ ID NO: 155603 - DNA, 25 bp, Artificial
  probe
  misc_feature (1)..(25): SEQ ID NO: 3330; WAN024DFC_at; Start 139; Stop 163
gggtatgattctgctgacctcaact

SEQ ID NO: 155604 - DNA, 25 bp, Artificial
  probe
  misc_feature (1)..(25): SEQ ID NO: 3330; WAN024DFC_at; Start 551; Stop 575
ggtttcaatttagcgaaatccagaa

SEQ ID NO: 155605 - DNA, 25 bp, Artificial
  probe
  misc_feature (1)..(25): SEQ ID NO: 3330; WAN024DFC_at; Start 897; Stop 921
caagtttgcattaagagattcgaga

SEQ ID NO: 155606 - DNA, 25 bp, Artificial
  probe
  misc_feature (1)..(25): SEQ ID NO: 3330; WAN024DFC_at; Start 384; Stop 408
gctggatagcaaaagacggttagtc

SEQ ID NO: 155607 - DNA, 25 bp, Artificial
  probe
  misc_feature (1)..(25): SEQ ID NO: 3330; WAN024DFC_at; Start 18; Stop 42
gatgctagccattgaagaaagtcag

SEQ ID NO: 155608 - DNA, 25 bp, Artificial
  probe
  misc_feature (1)..(25): SEQ ID NO: 3330; WAN024DFC_at; Start 497; Stop 521
aacaaggtctgcagtttaccaatca

SEQ ID NO: 155609 - DNA, 25 bp, Artificial
  probe
  misc_feature (1)..(25): SEQ ID NO: 3330; WAN024DFC_at; Start 913; Stop 937
gattcgagaggactttctttgagct

SEQ ID NO: 155610 - DNA, 25 bp, Artificial
  probe
  misc_feature (1)..(25): SEQ ID NO: 3330; WAN024DFC_at; Start 408; Stop 432
caaattacttaagcgtgatgccaag

SEQ ID NO: 155611 - DNA, 25 bp, Artificial
  probe
  misc_feature (1)..(25): SEQ ID NO: 3330; WAN024DFC_at; Start 951; Stop 975
tatttcctatttgattgagacagac

SEQ ID NO: 155612 - DNA, 25 bp, Artificial
  probe
  misc_feature (1)..(25): SEQ ID NO: 3330; WAN024DFC_at; Start 271; Stop 295
gatatcacgactgctaagaaacgct

SEQ ID NO: 155613 - DNA, 25 bp, Artificial
  probe
  misc_feature (1)..(25): SEQ ID NO: 3330; WAN024DFC_at; Start 696; Stop 720
taaaaagatggatcaggcgcgcgat

SEQ ID NO: 155614 - DNA, 25 bp, Artificial
  probe
  misc_feature (1)..(25): SEQ ID NO: 3330; WAN024DFC_at; Start 62; Stop 86
taccgagcctgagcctatttacagg

SEQ ID NO: 155615 - DNA, 25 bp, Artificial
  probe
  misc_feature (1)..(25): SEQ ID NO: 3330; WAN024DFC_at; Start 784; Stop 808
caatttcggacttttactcaggtga

SEQ ID NO: 155616 - DNA, 25 bp, Artificial
  probe
  misc_feature (1)..(25): SEQ ID NO: 3330; WAN024DFC_at; Start 452; Stop 476
taaaagaacaagaattgcgccagta

SEQ ID NO: 155617 - DNA, 25 bp, Artificial
  probe
  misc_feature (1)..(25): SEQ ID NO: 3330; WAN024DFC_at; Start 527; Stop 551
ttgaaaatctcctcatcaagtcggg

SEQ ID NO: 155618 - DNA, 25 bp, Artificial
  probe
  misc_feature (1)..(25): SEQ ID NO: 3330; WAN024DFC_at; Start 582; Stop 606
tctctttttacagtcctataaggcg

SEQ ID NO: 155619 - DNA, 25 bp, Artificial
  probe
  misc_feature (1)..(25): SEQ ID NO: 3330; WAN024DFC_at; Start 77; Stop 101
tatttacagggacagatcagggtca

SEQ ID NO: 155620 - DNA, 25 bp, Artificial
  probe
  misc_feature (1)..(25): SEQ ID NO: 2644; WAN024DFD_at; Start 358; Stop 382
gattttcgtggtctgactgagctaa

SEQ ID NO: 155621 - DNA, 25 bp, Artificial
  probe
  misc_feature (1)..(25): SEQ ID NO: 2644; WAN024DFD_at; Start 826; Stop 850
gaaggcgtcagtgcttttgaccgca

SEQ ID NO: 155622 - DNA, 25 bp, Artificial
  probe
  misc_feature (1)..(25): SEQ ID NO: 2644; WAN024DFD_at; Start 424; Stop 448
tatgattttgagacaacagaccgga

SEQ ID NO: 155623 - DNA, 25 bp, Artificial
  probe
  misc_feature (1)..(25): SEQ ID NO: 2644; WAN024DFD_at; Start 259; Stop 283
gatttgcaggaaaaagagtcgaacc

SEQ ID NO: 155624 - DNA, 25 bp, Artificial
  probe
  misc_feature (1)..(25): SEQ ID NO: 2644; WAN024DFD_at; Start 909; Stop 933
ccgtgggaaattgcgctatattgac

SEQ ID NO: 155625 - DNA, 25 bp, Artificial
  probe
  misc_feature (1)..(25): SEQ ID NO: 2644; WAN024DFD_at; Start 588; Stop 612
cggaaacggcctctatatagaagac

SEQ ID NO: 155626 - DNA, 25 bp, Artificial
  probe
  misc_feature (1)..(25): SEQ ID NO: 2644; WAN024DFD_at; Start 132; Stop 156
taagacagcgaccttggacttccgt

SEQ ID NO: 155627 - DNA, 25 bp, Artificial
  probe
  misc_feature (1)..(25): SEQ ID NO: 2644; WAN024DFD_at; Start 657; Stop 681
tggagaatacatcaaaccgactgct

SEQ ID NO: 155628 - DNA, 25 bp, Artificial
  probe
  misc_feature (1)..(25): SEQ ID NO: 2644; WAN024DFD_at; Start 869; Stop 893
caatcatggtggaaaaaggctacga

SEQ ID NO: 155629 - DNA, 25 bp, Artificial
  probe
  misc_feature (1)..(25): SEQ ID NO: 2644; WAN024DFD_at; Start 437; Stop 461
caacagaccggattttggcagaagt

SEQ ID NO: 155630 - DNA, 25 bp, Artificial
  probe
  misc_feature (1)..(25): SEQ ID NO: 2644; WAN024DFD_at; Start 553; Stop 577
tatccgctcaagtttgtcaactgcg

SEQ ID NO: 155631 - DNA, 25 bp, Artificial
  probe
  misc_feature (1)..(25): SEQ ID NO: 2644; WAN024DFD_at; Start 92; Stop 116
tagaagaggtcaaaaactcagcggc

SEQ ID NO: 155632 - DNA, 25 bp, Artificial
  probe
  misc_feature (1)..(25): SEQ ID NO: 2644; WAN024DFD_at; Start 725; Stop 749
tccaaattatcggaacaggtggcgt

SEQ ID NO: 155633 - DNA, 25 bp, Artificial
  probe
  misc_feature (1)..(25): SEQ ID NO: 2644; WAN024DFD_at; Start 168; Stop 192
tgagccacgctaccaagatgttcca

SEQ ID NO: 155634 - DNA, 25 bp, Artificial
  probe
  misc_feature (1)..(25): SEQ ID NO: 2644; WAN024DFD_at; Start 613; Stop 637
gaatctgtcgttattcggcctaaga

SEQ ID NO: 155635 - DNA, 25 bp, Artificial
  probe
  misc_feature (1)..(25): SEQ ID NO: 2644; WAN024DFD_at; Start 42; Stop 66
caattgcttgatgaatgcagcaggt

SEQ ID NO: 155636 - DNA, 25 bp, Artificial
  probe
  misc_feature (1)..(25): SEQ ID NO: 2644; WAN024DFD_at; Start 376; Stop 400
gagctaaatctttcctgtccaaatg

SEQ ID NO: 155637 - DNA, 25 bp, Artificial
  probe
  misc_feature (1)..(25): SEQ ID NO: 2644; WAN024DFD_at; Start 464; Stop 488
ttgcttacttcaccaaacctcttgg

SEQ ID NO: 155638 - DNA, 25 bp, Artificial
  probe
  misc_feature (1)..(25): SEQ ID NO: 2644; WAN024DFD_at; Start 841; Stop 865
tttgaccgcattaccaatgaactga

SEQ ID NO: 155639 - DNA, 25 bp, Artificial
  probe
  misc_feature (1)..(25): SEQ ID NO: 2644; WAN024DFD_at; Start 307; Stop 331
ggcatgtctccagaggaaacccata

SEQ ID NO: 155640 - DNA, 25 bp, Artificial
  probe
  misc_feature (1)..(25): SEQ ID NO: 2644; WAN024DFD_at; Start 104; Stop 128
aaaactcagcggcaggaacctttgt

SEQ ID NO: 155641 - DNA, 25 bp, Artificial
  probe
  misc_feature (1)..(25): SEQ ID NO: 2644; WAN024DFD_at; Start 795; Stop 819
tatggtgcaggtgggaacgaccctt

SEQ ID NO: 155642 - DNA, 25 bp, Artificial
  probe
  misc_feature (1)..(25): SEQ ID NO: 2644; WAN024DFD_at; Start 738; Stop 762
aacaggtggcgttctgactggtcga

SEQ ID NO: 155643 - DNA, 25 bp, Artificial
  probe
  misc_feature (1)..(25): SEQ ID NO: 2644; WAN024DFD_at; Start 207; Stop 231
ctctatgggcttgccaaataatggc

SEQ ID NO: 155644 - DNA, 25 bp, Artificial
  probe
  misc_feature (1)..(25): SEQ ID NO: 2644; WAN024DFD_at; Start 62; Stop 86
caggtgtggcttgtatgacgataga

SEQ ID NO: 155645 - DNA, 25 bp, Artificial
  probe
  misc_feature (1)..(25): SEQ ID NO: 2644; WAN024DFD_at; Start 683; Stop 707
tagccaatgttcacgccttttatca

SEQ ID NO: 155646 - DNA, 25 bp, Artificial
  probe
  misc_feature (1)..(25): SEQ ID NO: 2644; WAN024DFD_at; Start 5; Stop 29
tatcaacgaaaacacaaattgctgg

SEQ ID NO: 155647 - DNA, 25 bp, Artificial
  probe
  misc_feature (1)..(25): SEQ ID NO: 2644; WAN024DFD_at; Start 191; Stop 215
cacttggttccatcaactctatggg

SEQ ID NO: 155648 - DNA, 25 bp, Artificial
  probe
  misc_feature (1)..(25): SEQ ID NO: 2644; WAN024DFD_at; Start 293; Stop 317
tcttatctctggtcggcatgtctcc

SEQ ID NO: 155649 - DNA, 25 bp, Artificial
  probe
  misc_feature (1)..(25): SEQ ID NO: 2644; WAN024DFD_at; Start 887; Stop 911
gctacgagagcttagaagatttccg

SEQ ID NO: 155650 - DNA, 25 bp, Artificial
  probe
  misc_feature (1)..(25): SEQ ID NO: 2644; WAN024DFD_at; Start 118; Stop 142
ggaacctttgttactaagacagcga

SEQ ID NO: 155651 - DNA, 25 bp, Artificial
  probe
  misc_feature (1)..(25): SEQ ID NO: 2644; WAN024DFD_at; Start 399; Stop 423
tgttccaggtaaacctcagattgcc

SEQ ID NO: 155652 - DNA, 25 bp, Artificial
  probe
  misc_feature (1)..(25): SEQ ID NO: 2644; WAN024DFD_at; Start 529; Stop 553
caagcggcagctattttcaacaaat

SEQ ID NO: 155653 - DNA, 25 bp, Artificial
  probe
  misc_feature (1)..(25): SEQ ID NO: 2644; WAN024DFD_at; Start 753; Stop 777
gactggtcgagatgcctttgaacac

SEQ ID NO: 155654 - DNA, 25 bp, Artificial
  probe
  misc_feature (1)..(25): SEQ ID NO: 2326; WAN024DFE_at; Start 531; Stop 555
caagttagcttcatttatccgtgtt

SEQ ID NO: 155655 - DNA, 25 bp, Artificial
  probe
  misc_feature (1)..(25): SEQ ID NO: 2326; WAN024DFE_at; Start 380; Stop 404
aaatctttgaaggagatgccaatcc

SEQ ID NO: 155656 - DNA, 25 bp, Artificial
  probe
  misc_feature (1)..(25): SEQ ID NO: 2326; WAN024DFE_at; Start 166; Stop 190
gatattgaaaataatgtccgtgtag

SEQ ID NO: 155657 - DNA, 25 bp, Artificial
  probe
  misc_feature (1)..(25): SEQ ID NO: 2326; WAN024DFE_at; Start 62; Stop 86
gaaatggttggatgacagtagctgc

SEQ ID NO: 155658 - DNA, 25 bp, Artificial
  probe
  misc_feature (1)..(25): SEQ ID NO: 2326; WAN024DFE_at; Start 142; Stop 166
ttcaatacagcgaaactagctacag

SEQ ID NO: 155659 - DNA, 25 bp, Artificial
  probe
  misc_feature (1)..(25): SEQ ID NO: 2326; WAN024DFE_at; Start 839; Stop 863
tatttagtccgttgatgattgccct

SEQ ID NO: 155660 - DNA, 25 bp, Artificial
  probe
  misc_feature (1)..(25): SEQ ID NO: 2326; WAN024DFE_at; Start 636; Stop 660
ccgcagtcgcgaaattcaaatcatg

SEQ ID NO: 155661 - DNA, 25 bp, Artificial
  probe
  misc_feature (1)..(25): SEQ ID NO: 2326; WAN024DFE_at; Start 896; Stop 920
tgggatcaggaatatccatgcgccg

SEQ ID NO: 155662 - DNA, 25 bp, Artificial
  probe
  misc_feature (1)..(25): SEQ ID NO: 2326; WAN024DFE_at; Start 516; Stop 540
tacagaaagactcttcaagttagct

SEQ ID NO: 155663 - DNA, 25 bp, Artificial
  probe
  misc_feature (1)..(25): SEQ ID NO: 2326; WAN024DFE_at; Start 713; Stop 737
gagcctttatcggtttattgggagc

SEQ ID NO: 155664 - DNA, 25 bp, Artificial
  probe
  misc_feature (1)..(25): SEQ ID NO: 2326; WAN024DFE_at; Start 99; Stop 123
catgattactttgaccttggtggca

SEQ ID NO: 155665 - DNA, 25 bp, Artificial
  probe
  misc_feature (1)..(25): SEQ ID NO: 2326; WAN024DFE_at; Start 283; Stop 307
gattctttgaagaacatgtctacgg

SEQ ID NO: 155666 - DNA, 25 bp, Artificial
  probe
  misc_feature (1)..(25): SEQ ID NO: 2326; WAN024DFE_at; Start 911; Stop 935
ccatgcgccgattcttgaagattta

SEQ ID NO: 155667 - DNA, 25 bp, Artificial
  probe
  misc_feature (1)..(25): SEQ ID NO: 2326; WAN024DFE_at; Start 476; Stop 500
aaattgaaggtgtctctgaggttca

SEQ ID NO: 155668 - DNA, 25 bp, Artificial
  probe
  misc_feature (1)..(25): SEQ ID NO: 2326; WAN024DFE_at; Start 222; Stop 246
tagtcagacaattgaaaaagaaggt

SEQ ID NO: 155669 - DNA, 25 bp, Artificial
  probe
  misc_feature (1)..(25): SEQ ID NO: 2326; WAN024DFE_at; Start 881; Stop 905
ttttcattggttcattgggatcagg

SEQ ID NO: 155670 - DNA, 25 bp, Artificial
  probe
  misc_feature (1)..(25): SEQ ID NO: 2326; WAN024DFE_at; Start 394; Stop 418
gatgccaatcctctctatgatgcct

SEQ ID NO: 155671 - DNA, 25 bp, Artificial
  probe
  misc_feature (1)..(25): SEQ ID NO: 2326; WAN024DFE_at; Start 693; Stop 717
tggaccgttcttgttagaaggagcc

SEQ ID NO: 155672 - DNA, 25 bp, Artificial
  probe
  misc_feature (1)..(25): SEQ ID NO: 2326; WAN024DFE_at; Start 200; Stop 224
tccgaaaggatgtggaagataatag

SEQ ID NO: 155673 - DNA, 25 bp, Artificial
  probe
  misc_feature (1)..(25): SEQ ID NO: 2326; WAN024DFE_at; Start 181; Stop 205
gtccgtgtagtagtttatatccgaa

SEQ ID NO: 155674 - DNA, 25 bp, Artificial
  probe
  misc_feature (1)..(25): SEQ ID NO: 2326; WAN024DFE_at; Start 787; Stop 811
tctgtcaacaaatcgttggtagggc

SEQ ID NO: 155675 - DNA, 25 bp, Artificial
  probe
  misc_feature (1)..(25): SEQ ID NO: 2326; WAN024DFE_at; Start 253; Stop 277
gttacaaataatgactaccacaagg

SEQ ID NO: 155676 - DNA, 25 bp, Artificial
  probe
  misc_feature (1)..(25): SEQ ID NO: 2326; WAN024DFE_at; Start 666; Stop 690
ggtcggagctaaaaacagttatatc

SEQ ID NO: 155677 - DNA, 25 bp, Artificial
  probe
  misc_feature (1)..(25): SEQ ID NO: 2326; WAN024DFE_at; Start 411; Stop 435
tgatgcctatattgtagaggcaaac

SEQ ID NO: 155678 - DNA, 25 bp, Artificial
  probe
  misc_feature (1)..(25): SEQ ID NO: 2326; WAN024DFE_at; Start 728; Stop 752
tattgggagctatcgcaccatctgt

SEQ ID NO: 155679 - DNA, 25 bp, Artificial
  probe
  misc_feature (1)..(25): SEQ ID NO: 2326; WAN024DFE_at; Start 681; Stop 705
cagttatatccgtggaccgttcttg

SEQ ID NO: 155680 - DNA, 25 bp, Artificial
  probe
  misc_feature (1)..(25): SEQ ID NO: 2326; WAN024DFE_at; Start 800; Stop 824
cgttggtagggcaaaatctatccat

SEQ ID NO: 155681 - DNA, 25 bp, Artificial
  probe
  misc_feature (1)..(25): SEQ ID NO: 2326; WAN024DFE_at; Start 77; Stop 101
cagtagctgctgtcagttcagtcat

SEQ ID NO: 155682 - DNA, 25 bp, Artificial
  probe
  misc_feature (1)..(25): SEQ ID NO: 2326; WAN024DFE_at; Start 651; Stop 675
tcaaatcatgcgcttggtcggagct

SEQ ID NO: 155683 - DNA, 25 bp, Artificial
  probe
  misc_feature (1)..(25): SEQ ID NO: 2326; WAN024DFE_at; Start 559; Stop 583
ggactagggattgctgctttgttaa

SEQ ID NO: 155684 - DNA, 25 bp, Artificial
  probe
  misc_feature (1)..(25): SEQ ID NO: 2326; WAN024DFE_at; Start 621; Stop 645
tattaccattatttcccgcagtcgc

SEQ ID NO: 155685 - DNA, 25 bp, Artificial
  probe
  misc_feature (1)..(25): SEQ ID NO: 2326; WAN024DFE_at; Start 447; Stop 471
tgtaaaaactatagccgaagatgct

SEQ ID NO: 155686 - DNA, 25 bp, Artificial
  probe
  misc_feature (1)..(25): SEQ ID NO: 2326; WAN024DFE_at; Start 825; Stop 849
gattagtccagatttatttagtccg

SEQ ID NO: 155687 - DNA, 25 bp, Artificial
  probe
  misc_feature (1)..(25): SEQ ID NO: 2326; WAN024DFE_at; Start 353; Stop 377
taaccgagataatgggagataactg

SEQ ID NO: 155688 - DNA, 25 bp, Artificial
  probe
  misc_feature (1)..(25): SEQ ID NO: 6860; WAN024DFF_at; Start 236; Stop 260
cagagtcaaatggtgagattcgcac

SEQ ID NO: 155689 - DNA, 25 bp, Artificial
  probe
  misc_feature (1)..(25): SEQ ID NO: 6860; WAN024DFF_at; Start 100; Stop 124
ttgacgttttgtccaccggcaccac

SEQ ID NO: 155690 - DNA, 25 bp, Artificial
  probe
  misc_feature (1)..(25): SEQ ID NO: 6860; WAN024DFF_at; Start 225; Stop 249
gcgacgtttggcagagtcaaatggt

SEQ ID NO: 155691 - DNA, 25 bp, Artificial
  probe
  misc_feature (1)..(25): SEQ ID NO: 6860; WAN024DFF_at; Start 118; Stop 142
gcaccacctgaacggaaggtatcca

SEQ ID NO: 155692 - DNA, 25 bp, Artificial
  probe
  misc_feature (1)..(25): SEQ ID NO: 6860; WAN024DFF_at; Start 172; Stop 196
tcaatagtatcatccaattctggca

SEQ ID NO: 155693 - DNA, 25 bp, Artificial
  probe
  misc_feature (1)..(25): SEQ ID NO: 6860; WAN024DFF_at; Start 158; Stop 182
cacggatttccacttcaatagtatc

SEQ ID NO: 155694 - DNA, 25 bp, Artificial
  probe
  misc_feature (1)..(25): SEQ ID NO: 6860; WAN024DFF_at; Start 176; Stop 200
tagtatcatccaattctggcatcac

SEQ ID NO: 155695 - DNA, 25 bp, Artificial
  probe
  misc_feature (1)..(25): SEQ ID NO: 6860; WAN024DFF_at; Start 229; Stop 253
cgtttggcagagtcaaatggtgaga

SEQ ID NO: 155696 - DNA, 25 bp, Artificial
  probe
  misc_feature (1)..(25): SEQ ID NO: 6860; WAN024DFF_at; Start 221; Stop 245
tatggcgacgtttggcagagtcaaa

SEQ ID NO: 155697 - DNA, 25 bp, Artificial
  probe
  misc_feature (1)..(25): SEQ ID NO: 6860; WAN024DFF_at; Start 68; Stop 92
tgtgggttaaacgtacacctgttga

SEQ ID NO: 155698 - DNA, 25 bp, Artificial
  probe
  misc_feature (1)..(25): SEQ ID NO: 6860; WAN024DFF_at; Start 198; Stop 222
cacttctacagatgtgaaagaggta

SEQ ID NO: 155699 - DNA, 25 bp, Artificial
  probe
  misc_feature (1)..(25): SEQ ID NO: 6860; WAN024DFF_at; Start 205; Stop 229
acagatgtgaaagaggtatggcgac

SEQ ID NO: 155700 - DNA, 25 bp, Artificial
  probe
  misc_feature (1)..(25): SEQ ID NO: 6860; WAN024DFF_at; Start 202; Stop 226
tctacagatgtgaaagaggtatggc

SEQ ID NO: 155701 - DNA, 25 bp, Artificial
  probe
  misc_feature (1)..(25): SEQ ID NO: 6860; WAN024DFF_at; Start 81; Stop 105
tacacctgttgaaaccttattgacg

SEQ ID NO: 155702 - DNA, 25 bp, Artificial
  probe
  misc_feature (1)..(25): SEQ ID NO: 6860; WAN024DFF_at; Start 139; Stop 163
tccatcttgatatcatcttcacgga

SEQ ID NO: 155703 - DNA, 25 bp, Artificial
  probe
  misc_feature (1)..(25): SEQ ID NO: 6860; WAN024DFF_at; Start 124; Stop 148
cctgaacggaaggtatccatcttga

SEQ ID NO: 155704 - DNA, 25 bp, Artificial
  probe
  misc_feature (1)..(25): SEQ ID NO: 6860; WAN024DFF_at; Start 190; Stop 214
tctggcatcacttctacagatgtga

SEQ ID NO: 155705 - DNA, 25 bp, Artificial
  probe
  misc_feature (1)..(25): SEQ ID NO: 6860; WAN024DFF_at; Start 3; Stop 27
ggcacgatctctatttccatactgg

SEQ ID NO: 155706 - DNA, 25 bp, Artificial
  probe
  misc_feature (1)..(25): SEQ ID NO: 6860; WAN024DFF_at; Start 244; Stop 268
aatggtgagattcgcactaagcggt

SEQ ID NO: 155707 - DNA, 25 bp, Artificial
  probe
  misc_feature (1)..(25): SEQ ID NO: 6860; WAN024DFF_at; Start 242; Stop 266
caaatggtgagattcgcactaagcg

SEQ ID NO: 155708 - DNA, 25 bp, Artificial
  probe
  misc_feature (1)..(25): SEQ ID NO: 6860; WAN024DFF_at; Start 147; Stop 171
gatatcatcttcacggatttccact

SEQ ID NO: 155709 - DNA, 25 bp, Artificial
  probe
  misc_feature (1)..(25): SEQ ID NO: 6860; WAN024DFF_at; Start 43; Stop 67
gattggacaacaattccagttggaa

SEQ ID NO: 155710 - DNA, 25 bp, Artificial
  probe
  misc_feature (1)..(25): SEQ ID NO: 6860; WAN024DFF_at; Start 130; Stop 154
cggaaggtatccatcttgatatcat

SEQ ID NO: 155711 - DNA, 25 bp, Artificial
  probe
  misc_feature (1)..(25): SEQ ID NO: 6860; WAN024DFF_at; Start 36; Stop 60
tactgttgattggacaacaattcca

SEQ ID NO: 155712 - DNA, 25 bp, Artificial
  probe
  misc_feature (1)..(25): SEQ ID NO: 6860; WAN024DFF_at; Start 23; Stop 47
actgggtacgatctactgttgattg

SEQ ID NO: 155713 - DNA, 25 bp, Artificial
  probe
  misc_feature (1)..(25): SEQ ID NO: 6860; WAN024DFF_at; Start 154; Stop 178
tcttcacggatttccacttcaatag

SEQ ID NO: 155714 - DNA, 25 bp, Artificial
  probe
  misc_feature (1)..(25): SEQ ID NO: 6860; WAN024DFF_at; Start 115; Stop 139
ccggcaccacctgaacggaaggtat

SEQ ID NO: 155715 - DNA, 25 bp, Artificial
  probe
  misc_feature (1)..(25): SEQ ID NO: 6860; WAN024DFF_at; Start 90; Stop 114
tgaaaccttattgacgttttgtcca

SEQ ID NO: 155716 - DNA, 25 bp, Artificial
  probe
  misc_feature (1)..(25): SEQ ID NO: 6860; WAN024DFF_at; Start 8; Stop 32
gatctctatttccatactgggtacg

SEQ ID NO: 155717 - DNA, 25 bp, Artificial
  probe
  misc_feature (1)..(25): SEQ ID NO: 6860; WAN024DFF_at; Start 209; Stop 233
atgtgaaagaggtatggcgacgttt

SEQ ID NO: 155718 - DNA, 25 bp, Artificial
  probe
  misc_feature (1)..(25): SEQ ID NO: 6860; WAN024DFF_at; Start 16; Stop 40
tttccatactgggtacgatctactg

SEQ ID NO: 155719 - DNA, 25 bp, Artificial
  probe
  misc_feature (1)..(25): SEQ ID NO: 6860; WAN024DFF_at; Start 29; Stop 53
tacgatctactgttgattggacaac

SEQ ID NO: 155720 - DNA, 25 bp, Artificial
  probe
  misc_feature (1)..(25): SEQ ID NO: 6860; WAN024DFF_at; Start 20; Stop 44
catactgggtacgatctactgttga

SEQ ID NO: 155721 - DNA, 25 bp, Artificial
  probe
  misc_feature (1)..(25): SEQ ID NO: 6860; WAN024DFF_at; Start 184; Stop 208
tccaattctggcatcacttctacag

SEQ ID NO: 155722 - DNA, 25 bp, Artificial
  probe
  misc_feature (1)..(25): SEQ ID NO: 5426; WAN024DFG_at; Start 32; Stop 56
ggaacgataatattgcggcccaaaa

SEQ ID NO: 155723 - DNA, 25 bp, Artificial
  probe
  misc_feature (1)..(25): SEQ ID NO: 5426; WAN024DFG_at; Start 149; Stop 173
ttttggctgaagacgagtcagtgca

SEQ ID NO: 155724 - DNA, 25 bp, Artificial
  probe
  misc_feature (1)..(25): SEQ ID NO: 5426; WAN024DFG_at; Start 537; Stop 561
cacatctgtagaagtgatgccagaa

SEQ ID NO: 155725 - DNA, 25 bp, Artificial
  probe
  misc_feature (1)..(25): SEQ ID NO: 5426; WAN024DFG_at; Start 267; Stop 291
tgccatcttggaaatccatccaggt

SEQ ID NO: 155726 - DNA, 25 bp, Artificial
  probe
  misc_feature (1)..(25): SEQ ID NO: 5426; WAN024DFG_at; Start 843; Stop 867
gggaagccaaatccgttcttatgtc

SEQ ID NO: 155727 - DNA, 25 bp, Artificial
  probe
  misc_feature (1)..(25): SEQ ID NO: 5426; WAN024DFG_at; Start 882; Stop 906
tatggtaaaagatcaccgaactagc

SEQ ID NO: 155728 - DNA, 25 bp, Artificial
  probe
  misc_feature (1)..(25): SEQ ID NO: 5426; WAN024DFG_at; Start 102; Stop 126
ccataagatggaagagttgcaggat

SEQ ID NO: 155729 - DNA, 25 bp, Artificial
  probe
  misc_feature (1)..(25): SEQ ID NO: 5426; WAN024DFG_at; Start 167; Stop 191
cagtgcatgatgaactggtagcgca

SEQ ID NO: 155730 - DNA, 25 bp, Artificial
  probe
  misc_feature (1)..(25): SEQ ID NO: 5426; WAN024DFG_at; Start 793; Stop 817
aaggctgcggaggtagattctctca

SEQ ID NO: 155731 - DNA, 25 bp, Artificial
  probe
  misc_feature (1)..(25): SEQ ID NO: 5426; WAN024DFG_at; Start 715; Stop 739
gatcgtacccagtatggaaatagag

SEQ ID NO: 155732 - DNA, 25 bp, Artificial
  probe
  misc_feature (1)..(25): SEQ ID NO: 5426; WAN024DFG_at; Start 568; Stop 592
gatactattgaagtggaaatccgtg

SEQ ID NO: 155733 - DNA, 25 bp, Artificial
  probe
  misc_feature (1)..(25): SEQ ID NO: 5426; WAN024DFG_at; Start 759; Stop 783
gcaggctaagctctatcaaatggag

SEQ ID NO: 155734 - DNA, 25 bp, Artificial
  probe
  misc_feature (1)..(25): SEQ ID NO: 5426; WAN024DFG_at; Start 864; Stop 888
tgtcttcacgccttatactatggta

SEQ ID NO: 155735 - DNA, 25 bp, Artificial
  probe
  misc_feature (1)..(25): SEQ ID NO: 5426; WAN024DFG_at; Start 182; Stop 206
tggtagcgcagttagccgaacttga

SEQ ID NO: 155736 - DNA, 25 bp, Artificial
  probe
  misc_feature (1)..(25): SEQ ID NO: 5426; WAN024DFG_at; Start 505; Stop 529
tttgactctgccaaacgtcgccata

SEQ ID NO: 155737 - DNA, 25 bp, Artificial
  probe
  misc_feature (1)..(25): SEQ ID NO: 5426; WAN024DFG_at; Start 247; Stop 271
gaaccttatgaccacaacaatgcca

SEQ ID NO: 155738 - DNA, 25 bp, Artificial
  probe
  misc_feature (1)..(25): SEQ ID NO: 5426; WAN024DFG_at; Start 941; Stop 965
gggacctagatggttttatcgatgc

SEQ ID NO: 155739 - DNA, 25 bp, Artificial
  probe
  misc_feature (1)..(25): SEQ ID NO: 5426; WAN024DFG_at; Start 436; Stop 460
gaagggcctaatgcctatggtctcc

SEQ ID NO: 155740 - DNA, 25 bp, Artificial
  probe
  misc_feature (1)..(25): SEQ ID NO: 5426; WAN024DFG_at; Start 402; Stop 426
tgaggctggtattaagtcggtaact

SEQ ID NO: 155741 - DNA, 25 bp, Artificial
  probe
  misc_feature (1)..(25): SEQ ID NO: 5426; WAN024DFG_at; Start 1; Stop 25
ttggaaaacaagatgacagaacctg

SEQ ID NO: 155742 - DNA, 25 bp, Artificial
  probe
  misc_feature (1)..(25): SEQ ID NO: 5426; WAN024DFG_at; Start 418; Stop 442
tcggtaactttatcatttgaagggc

SEQ ID NO: 155743 - DNA, 25 bp, Artificial
  probe
  misc_feature (1)..(25): SEQ ID NO: 5426; WAN024DFG_at; Start 342; Stop 366
tactcgttatggtaatgctaaaggc

SEQ ID NO: 155744 - DNA, 25 bp, Artificial
  probe
  misc_feature (1)..(25): SEQ ID NO: 5426; WAN024DFG_at; Start 284; Stop 308
atccaggttctggtggtactgaggc

SEQ ID NO: 155745 - DNA, 25 bp, Artificial
  probe
  misc_feature (1)..(25): SEQ ID NO: 5426; WAN024DFG_at; Start 626; Stop 650
gtggtgccggtggacaaaacgtcaa

SEQ ID NO: 155746 - DNA, 25 bp, Artificial
  probe
  misc_feature (1)..(25): SEQ ID NO: 5426; WAN024DFG_at; Start 485; Stop 509
gcttagtgcgaatctcaccatttga

SEQ ID NO: 155747 - DNA, 25 bp, Artificial
  probe
  misc_feature (1)..(25): SEQ ID NO: 5426; WAN024DFG_at; Start 595; Stop 619
gatgatatcaagatggataccttcc

SEQ ID NO: 155748 - DNA, 25 bp, Artificial
  probe
  misc_feature (1)..(25): SEQ ID NO: 5426; WAN024DFG_at; Start 957; Stop 981
tatcgatgcttatctcaagtggcga

SEQ ID NO: 155749 - DNA, 25 bp, Artificial
  probe
  misc_feature (1)..(25): SEQ ID NO: 5426; WAN024DFG_at; Start 897; Stop 921
ccgaactagctttgaggttgctcag

SEQ ID NO: 155750 - DNA, 25 bp, Artificial
  probe
  misc_feature (1)..(25): SEQ ID NO: 5426; WAN024DFG_at; Start 746; Stop 770
ccatgaagatgttgcaggctaagct

SEQ ID NO: 155751 - DNA, 25 bp, Artificial
  probe
  misc_feature (1)..(25): SEQ ID NO: 5426; WAN024DFG_at; Start 385; Stop 409
gattaccaagcaggtgatgaggctg

SEQ ID NO: 155752 - DNA, 25 bp, Artificial
  probe
  misc_feature (1)..(25): SEQ ID NO: 5426; WAN024DFG_at; Start 453; Stop 477
tggtctcctcaagtcagaaatgggt

SEQ ID NO: 155753 - DNA, 25 bp, Artificial
  probe
  misc_feature (1)..(25): SEQ ID NO: 5426; WAN024DFG_at; Start 210; Stop 234
gataatgaccagctacgagatgact

SEQ ID NO: 155754 - DNA, 25 bp, Artificial
  probe
  misc_feature (1)..(25): SEQ ID NO: 5426; WAN024DFG_at; Start 610; Stop 634
gataccttccgttcaggtggtgccg

SEQ ID NO: 155755 - DNA, 25 bp, Artificial
  probe
  misc_feature (1)..(25): SEQ ID NO: 5426; WAN024DFG_at; Start 17; Stop 41
cagaacctgatttttggaacgataa

SEQ ID NO: 155756 - DNA, 25 bp, Artificial
  probe
  misc_feature (1)..(25): SEQ ID NO: 2939; WAN024DFH_at; Start 129; Stop 153
aactattcttcgcaccttgtcaggt

SEQ ID NO: 155757 - DNA, 25 bp, Artificial
  probe
  misc_feature (1)..(25): SEQ ID NO: 2939; WAN024DFH_at; Start 32; Stop 56
tgcattacggtatgatccaagcagt

SEQ ID NO: 155758 - DNA, 25 bp, Artificial
  probe
  misc_feature (1)..(25): SEQ ID NO: 2939; WAN024DFH_at; Start 600; Stop 624
tgcaatctctgaccgaggatatgta

SEQ ID NO: 155759 - DNA, 25 bp, Artificial
  probe
  misc_feature (1)..(25): SEQ ID NO: 2939; WAN024DFH_at; Start 234; Stop 258
tggtctttcacaagttccagaagga

SEQ ID NO: 155760 - DNA, 25 bp, Artificial
  probe
  misc_feature (1)..(25): SEQ ID NO: 2939; WAN024DFH_at; Start 157; Stop 181
gttcgaccaagttcaggaaagattg

SEQ ID NO: 155761 - DNA, 25 bp, Artificial
  probe
  misc_feature (1)..(25): SEQ ID NO: 2939; WAN024DFH_at; Start 241; Stop 265
tcacaagttccagaaggacgccacg

SEQ ID NO: 155762 - DNA, 25 bp, Artificial
  probe
  misc_feature (1)..(25): SEQ ID NO: 2939; WAN024DFH_at; Start 475; Stop 499
cttttagatgaaccatcaatgggac

SEQ ID NO: 155763 - DNA, 25 bp, Artificial
  probe
  misc_feature (1)..(25): SEQ ID NO: 2939; WAN024DFH_at; Start 685; Stop 709
gtcagaaaagcatatctaggtggct

SEQ ID NO: 155764 - DNA, 25 bp, Artificial
  probe
  misc_feature (1)..(25): SEQ ID NO: 2939; WAN024DFH_at; Start 297; Stop 321
tgaaatgggagctttcttaaagaaa

SEQ ID NO: 155765 - DNA, 25 bp, Artificial
  probe
  misc_feature (1)..(25): SEQ ID NO: 2939; WAN024DFH_at; Start 424; Stop 448
caacaaatgcttgccatgggacgcg

SEQ ID NO: 155766 - DNA, 25 bp, Artificial
  probe
  misc_feature (1)..(25): SEQ ID NO: 2939; WAN024DFH_at; Start 271; Stop 295
cctggcttgactgttatggaaaatc

SEQ ID NO: 155767 - DNA, 25 bp, Artificial
  probe
  misc_feature (1)..(25): SEQ ID NO: 2939; WAN024DFH_at; Start 324; Stop 348
tcgtgaagaaaatcaagctaacttg

SEQ ID NO: 155768 - DNA, 25 bp, Artificial
  probe
  misc_feature (1)..(25): SEQ ID NO: 2939; WAN024DFH_at; Start 461; Stop 485
caccaaaacttcttcttttagatga

SEQ ID NO: 155769 - DNA, 25 bp, Artificial
  probe
  misc_feature (1)..(25): SEQ ID NO: 2939; WAN024DFH_at; Start 592; Stop 616
aaagcacttgcaatctctgaccgag

SEQ ID NO: 155770 - DNA, 25 bp, Artificial
  probe
  misc_feature (1)..(25): SEQ ID NO: 2939; WAN024DFH_at; Start 256; Stop 280
ggacgccacgtctttcctggcttga

SEQ ID NO: 155771 - DNA, 25 bp, Artificial
  probe
  misc_feature (1)..(25): SEQ ID NO: 2939; WAN024DFH_at; Start 141; Stop 165
caccttgtcaggtttggttcgacca

SEQ ID NO: 155772 - DNA, 25 bp, Artificial
  probe
  misc_feature (1)..(25): SEQ ID NO: 2939; WAN024DFH_at; Start 318; Stop 342
gaaaaatcgtgaagaaaatcaagct

SEQ ID NO: 155773 - DNA, 25 bp, Artificial
  probe
  misc_feature (1)..(25): SEQ ID NO: 2939; WAN024DFH_at; Start 285; Stop 309
tatggaaaatcttgaaatgggagct

SEQ ID NO: 155774 - DNA, 25 bp, Artificial
  probe
  misc_feature (1)..(25): SEQ ID NO: 2939; WAN024DFH_at; Start 577; Stop 601
gaacaaaatgccaataaagcacttg

SEQ ID NO: 155775 - DNA, 25 bp, Artificial
  probe
  misc_feature (1)..(25): SEQ ID NO: 2939; WAN024DFH_at; Start 673; Stop 697
tcatcagaagaagtcagaaaagcat

SEQ ID NO: 155776 - DNA, 25 bp, Artificial
  probe
  misc_feature (1)..(25): SEQ ID NO: 2939; WAN024DFH_at; Start 88; Stop 112
gaagttgtttcccttatcggtgcca

SEQ ID NO: 155777 - DNA, 25 bp, Artificial
  probe
  misc_feature (1)..(25): SEQ ID NO: 2939; WAN024DFH_at; Start 419; Stop 443
gggaacaacaaatgcttgccatggg

SEQ ID NO: 155778 - DNA, 25 bp, Artificial
  probe
  misc_feature (1)..(25): SEQ ID NO: 2939; WAN024DFH_at; Start 169; Stop 193
tcaggaaagattgaatttttaggtc

SEQ ID NO: 155779 - DNA, 25 bp, Artificial
  probe
  misc_feature (1)..(25): SEQ ID NO: 2939; WAN024DFH_at; Start 481; Stop 505
gatgaaccatcaatgggacttgccc

SEQ ID NO: 155780 - DNA, 25 bp, Artificial
  probe
  misc_feature (1)..(25): SEQ ID NO: 2939; WAN024DFH_at; Start 115; Stop 139
ggtgcaggtaagacaactattcttc

SEQ ID NO: 155781 - DNA, 25 bp, Artificial
  probe
  misc_feature (1)..(25): SEQ ID NO: 2939; WAN024DFH_at; Start 565; Stop 589
gtcctcttgattgaacaaaatgcca

SEQ ID NO: 155782 - DNA, 25 bp, Artificial
  probe
  misc_feature (1)..(25): SEQ ID NO: 2939; WAN024DFH_at; Start 692; Stop 716
aagcatatctaggtggctaactaat

SEQ ID NO: 155783 - DNA, 25 bp, Artificial
  probe
  misc_feature (1)..(25): SEQ ID NO: 2939; WAN024DFH_at; Start 337; Stop 361
caagctaacttgaagaaggttttct

SEQ ID NO: 155784 - DNA, 25 bp, Artificial
  probe
  misc_feature (1)..(25): SEQ ID NO: 2939; WAN024DFH_at; Start 19; Stop 43
gaaaatctttctgtgcattacggta

SEQ ID NO: 155785 - DNA, 25 bp, Artificial
  probe
  misc_feature (1)..(25): SEQ ID NO: 2939; WAN024DFH_at; Start 149; Stop 173
caggtttggttcgaccaagttcagg

SEQ ID NO: 155786 - DNA, 25 bp, Artificial
  probe
  misc_feature (1)..(25): SEQ ID NO: 2939; WAN024DFH_at; Start 180; Stop 204
tgaatttttaggtcaagaaatccaa

SEQ ID NO: 155787 - DNA, 25 bp, Artificial
  probe
  misc_feature (1)..(25): SEQ ID NO: 2939; WAN024DFH_at; Start 347; Stop 371
tgaagaaggttttctcacgctttcc

SEQ ID NO: 155788 - DNA, 25 bp, Artificial
  probe
  misc_feature (1)..(25): SEQ ID NO: 2939; WAN024DFH_at; Start 529; Stop 553
gatatcattcaagatattcagaagc

SEQ ID NO: 155789 - DNA, 25 bp, Artificial
  probe
  misc_feature (1)..(25): SEQ ID NO: 2939; WAN024DFH_at; Start 362; Stop 386
cacgctttcctcgtcttgaagaacg

SEQ ID NO: 155790 - DNA, 25 bp, Artificial
  probe
  misc_feature (1)..(25): SEQ ID NO: 2443; WAN024DFI_at; Start 742; Stop 766
gcttatctaggaggtgaagcctaac

SEQ ID NO: 155791 - DNA, 25 bp, Artificial
  probe
  misc_feature (1)..(25): SEQ ID NO: 2443; WAN024DFI_at; Start 496; Stop 520
cttgctacggaacctaaaattctct

SEQ ID NO: 155792 - DNA, 25 bp, Artificial
  probe
  misc_feature (1)..(25): SEQ ID NO: 2443; WAN024DFI_at; Start 350; Stop 374
gcttaccagctttttacaagagtga

SEQ ID NO: 155793 - DNA, 25 bp, Artificial
  probe
  misc_feature (1)..(25): SEQ ID NO: 2443; WAN024DFI_at; Start 481; Stop 505
gaaattgttcgtgcccttgctacgg

SEQ ID NO: 155794 - DNA, 25 bp, Artificial
  probe
  misc_feature (1)..(25): SEQ ID NO: 2443; WAN024DFI_at; Start 633; Stop 657
tatgaatctggtcatggaagtaaca

SEQ ID NO: 155795 - DNA, 25 bp, Artificial
  probe
  misc_feature (1)..(25): SEQ ID NO: 2443; WAN024DFI_at; Start 192; Stop 216
tcaccttttgaatgggaaatcacct

SEQ ID NO: 155796 - DNA, 25 bp, Artificial
  probe
  misc_feature (1)..(25): SEQ ID NO: 2443; WAN024DFI_at; Start 556; Stop 580
gaaacagccgaattgactgagttaa

SEQ ID NO: 155797 - DNA, 25 bp, Artificial
  probe
  misc_feature (1)..(25): SEQ ID NO: 2443; WAN024DFI_at; Start 30; Stop 54
caaacattttggtggtctaacagct

SEQ ID NO: 155798 - DNA, 25 bp, Artificial
  probe
  misc_feature (1)..(25): SEQ ID NO: 2443; WAN024DFI_at; Start 206; Stop 230
ggaaatcaccttataagattgcctc

SEQ ID NO: 155799 - DNA, 25 bp, Artificial
  probe
  misc_feature (1)..(25): SEQ ID NO: 2443; WAN024DFI_at; Start 63; Stop 87
tgtgactcttgaattgaacgaaggg

SEQ ID NO: 155800 - DNA, 25 bp, Artificial
  probe
  misc_feature (1)..(25): SEQ ID NO: 2443; WAN024DFI_at; Start 222; Stop 246
gattgcctctttgggacttggacgt

SEQ ID NO: 155801 - DNA, 25 bp, Artificial
  probe
  misc_feature (1)..(25): SEQ ID NO: 2443; WAN024DFI_at; Start 436; Stop 460
gagactcttgctaaaaatctttcct

SEQ ID NO: 155802 - DNA, 25 bp, Artificial
  probe
  misc_feature (1)..(25): SEQ ID NO: 2443; WAN024DFI_at; Start 137; Stop 161
tcaaccttttgaccggtgtttatga

SEQ ID NO: 155803 - DNA, 25 bp, Artificial
  probe
  misc_feature (1)..(25): SEQ ID NO: 2443; WAN024DFI_at; Start 101; Stop 125
taatcggtccaaacggagctgggaa

SEQ ID NO: 155804 - DNA, 25 bp, Artificial
  probe
  misc_feature (1)..(25): SEQ ID NO: 2443; WAN024DFI_at; Start 621; Stop 645
gattgaacacgatatgaatctggtc

SEQ ID NO: 155805 - DNA, 25 bp, Artificial
  probe
  misc_feature (1)..(25): SEQ ID NO: 2443; WAN024DFI_at; Start 387; Stop 411
ggctaaagctttggaattgttgaaa

SEQ ID NO: 155806 - DNA, 25 bp, Artificial
  probe
  misc_feature (1)..(25): SEQ ID NO: 2443; WAN024DFI_at; Start 716; Stop 740
ttaagaccaataaacgcgttatcga

SEQ ID NO: 155807 - DNA, 25 bp, Artificial
  probe
  misc_feature (1)..(25): SEQ ID NO: 2443; WAN024DFI_at; Start 574; Stop 598
gagttaattcgtcgtatcaaagatg

SEQ ID NO: 155808 - DNA, 25 bp, Artificial
  probe
  misc_feature (1)..(25): SEQ ID NO: 2443; WAN024DFI_at; Start 422; Stop 446
tagatggtgatgcagagactcttgc

SEQ ID NO: 155809 - DNA, 25 bp, Artificial
  probe
  misc_feature (1)..(25): SEQ ID NO: 2443; WAN024DFI_at; Start 87; Stop 111
ggaactggttggattaatcggtcca

SEQ ID NO: 155810 - DNA, 25 bp, Artificial
  probe
  misc_feature (1)..(25): SEQ ID NO: 2443; WAN024DFI_at; Start 469; Stop 493
caacgtcgtttggaaattgttcgtg

SEQ ID NO: 155811 - DNA, 25 bp, Artificial
  probe
  misc_feature (1)..(25): SEQ ID NO: 2443; WAN024DFI_at; Start 300; Stop 324
gattgcttttggaaaccatcacaaa

SEQ ID NO: 155812 - DNA, 25 bp, Artificial
  probe
  misc_feature (1)..(25): SEQ ID NO: 2443; WAN024DFI_at; Start 336; Stop 360
tactagtttcttacgcttaccagct

SEQ ID NO: 155813 - DNA, 25 bp, Artificial
  probe
  misc_feature (1)..(25): SEQ ID NO: 2443; WAN024DFI_at; Start 730; Stop 754
cgcgttatcgaagcttatctaggag

SEQ ID NO: 155814 - DNA, 25 bp, Artificial
  probe
  misc_feature (1)..(25): SEQ ID NO: 2443; WAN024DFI_at; Start 518; Stop 542
tcttcttagatgaaccagcagcagg

SEQ ID NO: 155815 - DNA, 25 bp, Artificial
  probe
  misc_feature (1)..(25): SEQ ID NO: 2443; WAN024DFI_at; Start 696; Stop 720
tcaaggaactccagacgaaattaag

SEQ ID NO: 155816 - DNA, 25 bp, Artificial
  probe
  misc_feature (1)..(25): SEQ ID NO: 2443; WAN024DFI_at; Start 46; Stop 70
ctaacagctgttggagatgtgactc

SEQ ID NO: 155817 - DNA, 25 bp, Artificial
  probe
  misc_feature (1)..(25): SEQ ID NO: 2443; WAN024DFI_at; Start 647; Stop 671
tggaagtaacagaacgtatctacgt

SEQ ID NO: 155818 - DNA, 25 bp, Artificial
  probe
  misc_feature (1)..(25): SEQ ID NO: 2443; WAN024DFI_at; Start 184; Stop 208
ctagatggtcaccttttgaatggga

SEQ ID NO: 155819 - DNA, 25 bp, Artificial
  probe
  misc_feature (1)..(25): SEQ ID NO: 2443; WAN024DFI_at; Start 662; Stop 686
gtatctacgtacttgaatatggccg

SEQ ID NO: 155820 - DNA, 25 bp, Artificial
  probe
  misc_feature (1)..(25): SEQ ID NO: 2443; WAN024DFI_at; Start 542; Stop 566
gtatgaacccacaggaaacagccga

SEQ ID NO: 155821 - DNA, 25 bp, Artificial
  probe
  misc_feature (1)..(25): SEQ ID NO: 2443; WAN024DFI_at; Start 452; Stop 476
atctttcctacggacaacaacgtcg

SEQ ID NO: 155822 - DNA, 25 bp, Artificial
  probe
  misc_feature (1)..(25): SEQ ID NO: 2443; WAN024DFI_at; Start 529; Stop 553
gaaccagcagcaggtatgaacccac

SEQ ID NO: 155823 - DNA, 25 bp, Artificial
  probe
  misc_feature (1)..(25): SEQ ID NO: 2443; WAN024DFI_at; Start 366; Stop 390
caagagtgaaaaagaattaaaggct

SEQ ID NO: 155824 - DNA, 25 bp, Artificial
  probe
  misc_feature (1)..(25): SEQ ID NO: 3912; WAN024DFJ_at; Start 509; Stop 533
cagtatcagtagatagcgacgcggc

SEQ ID NO: 155825 - DNA, 25 bp, Artificial
  probe
  misc_feature (1)..(25): SEQ ID NO: 3912; WAN024DFJ_at; Start 470; Stop 494
tcattgtccaaaagactaagatggg

SEQ ID NO: 155826 - DNA, 25 bp, Artificial
  probe
  misc_feature (1)..(25): SEQ ID NO: 3912; WAN024DFJ_at; Start 726; Stop 750
tcttggtggctttgtgattggtcta

SEQ ID NO: 155827 - DNA, 25 bp, Artificial
  probe
  misc_feature (1)..(25): SEQ ID NO: 3912; WAN024DFJ_at; Start 66; Stop 90
cctaggatataccatggtttacgga

SEQ ID NO: 155828 - DNA, 25 bp, Artificial
  probe
  misc_feature (1)..(25): SEQ ID NO: 3912; WAN024DFJ_at; Start 546; Stop 570
gatcaatgtaaaccgtacgattagc

SEQ ID NO: 155829 - DNA, 25 bp, Artificial
  probe
  misc_feature (1)..(25): SEQ ID NO: 3912; WAN024DFJ_at; Start 707; Stop 731
gaattattcctggtgcggctcttgg

SEQ ID NO: 155830 - DNA, 25 bp, Artificial
  probe
  misc_feature (1)..(25): SEQ ID NO: 3912; WAN024DFJ_at; Start 125; Stop 149
tttatatgatgggagcctttatcgg

SEQ ID NO: 155831 - DNA, 25 bp, Artificial
  probe
  misc_feature (1)..(25): SEQ ID NO: 3912; WAN024DFJ_at; Start 254; Stop 278
gacctttgcgccactctactcgtat

SEQ ID NO: 155832 - DNA, 25 bp, Artificial
  probe
  misc_feature (1)..(25): SEQ ID NO: 3912; WAN024DFJ_at; Start 494; Stop 518
ggaaagccatgcgtgcagtatcagt

SEQ ID NO: 155833 - DNA, 25 bp, Artificial
  probe
  misc_feature (1)..(25): SEQ ID NO: 3912; WAN024DFJ_at; Start 563; Stop 587
cgattagctttaccttcgctttggg

SEQ ID NO: 155834 - DNA, 25 bp, Artificial
  probe
  misc_feature (1)..(25): SEQ ID NO: 3912; WAN024DFJ_at; Start 339; Stop 363
ggttggtgccaatacccgtgccttc

SEQ ID NO: 155835 - DNA, 25 bp, Artificial
  probe
  misc_feature (1)..(25): SEQ ID NO: 3912; WAN024DFJ_at; Start 631; Stop 655
tataactctcttgagcctttgatgg

SEQ ID NO: 155836 - DNA, 25 bp, Artificial
  probe
  misc_feature (1)..(25): SEQ ID NO: 3912; WAN024DFJ_at; Start 667; Stop 691
ggtcttaaatctttcgttgccgcag

SEQ ID NO: 155837 - DNA, 25 bp, Artificial
  probe
  misc_feature (1)..(25): SEQ ID NO: 3912; WAN024DFJ_at; Start 679; Stop 703
ttcgttgccgcagtacttggtggta

SEQ ID NO: 155838 - DNA, 25 bp, Artificial
  probe
  misc_feature (1)..(25): SEQ ID NO: 3912; WAN024DFJ_at; Start 99; Stop 123
gctcatcaacttcgcccatggtgat

SEQ ID NO: 155839 - DNA, 25 bp, Artificial
  probe
  misc_feature (1)..(25): SEQ ID NO: 3912; WAN024DFJ_at; Start 603; Stop 627
tgcggctggtgttctgattgctctt

SEQ ID NO: 155840 - DNA, 25 bp, Artificial
  probe
  misc_feature (1)..(25): SEQ ID NO: 3912; WAN024DFJ_at; Start 1; Stop 25
gtgaatcttatgctccaacaactcg

SEQ ID NO: 155841 - DNA, 25 bp, Artificial
  probe
  misc_feature (1)..(25): SEQ ID NO: 3912; WAN024DFJ_at; Start 215; Stop 239
cagctattcttggtgtcgtgattga

SEQ ID NO: 155842 - DNA, 25 bp, Artificial
  probe
  misc_feature (1)..(25): SEQ ID NO: 3912; WAN024DFJ_at; Start 234; Stop 258
gattgagtttcttgcttaccgacct

SEQ ID NO: 155843 - DNA, 25 bp, Artificial
  probe
  misc_feature (1)..(25): SEQ ID NO: 3912; WAN024DFJ_at; Start 355; Stop 379
cgtgccttccctcaagcgattcaaa

SEQ ID NO: 155844 - DNA, 25 bp, Artificial
  probe
  misc_feature (1)..(25): SEQ ID NO: 3912; WAN024DFJ_at; Start 12; Stop 36
gctccaacaactcgtaaatggtttg

SEQ ID NO: 155845 - DNA, 25 bp, Artificial
  probe
  misc_feature (1)..(25): SEQ ID NO: 3912; WAN024DFJ_at; Start 397; Stop 421
ggaccaattagcttaacaaatgtgc

SEQ ID NO: 155846 - DNA, 25 bp, Artificial
  probe
  misc_feature (1)..(25): SEQ ID NO: 3912; WAN024DFJ_at; Start 818; Stop 842
tgttgatcttgattgtccgcccagc

SEQ ID NO: 155847 - DNA, 25 bp, Artificial
  probe
  misc_feature (1)..(25): SEQ ID NO: 3912; WAN024DFJ_at; Start 378; Stop 402
aacagttcgatatgatttgggacca

SEQ ID NO: 155848 - DNA, 25 bp, Artificial
  probe
  misc_feature (1)..(25): SEQ ID NO: 3912; WAN024DFJ_at; Start 52; Stop 76
tacgcgctgttagccctaggatata

SEQ ID NO: 155849 - DNA, 25 bp, Artificial
  probe
  misc_feature (1)..(25): SEQ ID NO: 3912; WAN024DFJ_at; Start 775; Stop 799
gggatgtcagatttccgtgatgcca

SEQ ID NO: 155850 - DNA, 25 bp, Artificial
  probe
  misc_feature (1)..(25): SEQ ID NO: 3912; WAN024DFJ_at; Start 81; Stop 105
ggtttacggaattatcaagctcatc

SEQ ID NO: 155851 - DNA, 25 bp, Artificial
  probe
  misc_feature (1)..(25): SEQ ID NO: 3912; WAN024DFJ_at; Start 326; Stop 350
gaatggtctatctggttggtgccaa

SEQ ID NO: 155852 - DNA, 25 bp, Artificial
  probe
  misc_feature (1)..(25): SEQ ID NO: 3912; WAN024DFJ_at; Start 741; Stop 765
gattggtctattggaaacctttgcg

SEQ ID NO: 155853 - DNA, 25 bp, Artificial
  probe
  misc_feature (1)..(25): SEQ ID NO: 3912; WAN024DFJ_at; Start 833; Stop 857
tccgcccagctggtatccttggtaa

SEQ ID NO: 155854 - DNA, 25 bp, Artificial
  probe
  misc_feature (1)..(25): SEQ ID NO: 3912; WAN024DFJ_at; Start 311; Stop 335
tcctattggagtatggaatggtcta

SEQ ID NO: 155855 - DNA, 25 bp, Artificial
  probe
  misc_feature (1)..(25): SEQ ID NO: 3912; WAN024DFJ_at; Start 36; Stop 60
gattctaggtagtgtttacgcgctg

SEQ ID NO: 155856 - DNA, 25 bp, Artificial
  probe
  misc_feature (1)..(25): SEQ ID NO: 3912; WAN024DFJ_at; Start 579; Stop 603
cgctttgggttctgctcttgcgggt

SEQ ID NO: 155857 - DNA, 25 bp, Artificial
  probe
  misc_feature (1)..(25): SEQ ID NO: 3912; WAN024DFJ_at; Start 692; Stop 716
tacttggtggtatcggaattattcc

SEQ ID NO: 155858 - DNA, 25 bp, Artificial
  probe
  misc_feature (1)..(25): SEQ ID NO: 1824; WAN024DFK_at; Start 37; Stop 61
gaacgttcttacgatatttactcac

SEQ ID NO: 155859 - DNA, 25 bp, Artificial
  probe
  misc_feature (1)..(25): SEQ ID NO: 1824; WAN024DFK_at; Start 258; Stop 282
ccaaaccattgttatgggaatggct

SEQ ID NO: 155860 - DNA, 25 bp, Artificial
  probe
  misc_feature (1)..(25): SEQ ID NO: 1824; WAN024DFK_at; Start 231; Stop 255
taccatgaactttatcaaggcagat

SEQ ID NO: 155861 - DNA, 25 bp, Artificial
  probe
  misc_feature (1)..(25): SEQ ID NO: 1824; WAN024DFK_at; Start 13; Stop 37
gttattgaacaaacaagccgtggag

SEQ ID NO: 155862 - DNA, 25 bp, Artificial
  probe
  misc_feature (1)..(25): SEQ ID NO: 1824; WAN024DFK_at; Start 177; Stop 201
cctttatgtcaatacaccaggtggt

SEQ ID NO: 155863 - DNA, 25 bp, Artificial
  probe
  misc_feature (1)..(25): SEQ ID NO: 1824; WAN024DFK_at; Start 204; Stop 228
tgtttcagctggtttggcaatcgta

SEQ ID NO: 155864 - DNA, 25 bp, Artificial
  probe
  misc_feature (1)..(25): SEQ ID NO: 1824; WAN024DFK_at; Start 335; Stop 359
tgcttccaaatgctgaatacatgat

SEQ ID NO: 155865 - DNA, 25 bp, Artificial
  probe
  misc_feature (1)..(25): SEQ ID NO: 1824; WAN024DFK_at; Start 477; Stop 501
tcagtcaatggaaaaagtccatgca

SEQ ID NO: 155866 - DNA, 25 bp, Artificial
  probe
  misc_feature (1)..(25): SEQ ID NO: 1824; WAN024DFK_at; Start 402; Stop 426
tgatatggctatcgctgcagaacac

SEQ ID NO: 155867 - DNA, 25 bp, Artificial
  probe
  misc_feature (1)..(25): SEQ ID NO: 1824; WAN024DFK_at; Start 2; Stop 26
tgattcctgtagttattgaacaaac

SEQ ID NO: 155868 - DNA, 25 bp, Artificial
  probe
  misc_feature (1)..(25): SEQ ID NO: 1824; WAN024DFK_at; Start 49; Stop 73
gatatttactcacgtcttctcaaag

SEQ ID NO: 155869 - DNA, 25 bp, Artificial
  probe
  misc_feature (1)..(25): SEQ ID NO: 1824; WAN024DFK_at; Start 63; Stop 87
tcttctcaaagaccgcatcattatg

SEQ ID NO: 155870 - DNA, 25 bp, Artificial
  probe
  misc_feature (1)..(25): SEQ ID NO: 1824; WAN024DFK_at; Start 569; Stop 593
tggccaacaattcattgaactaact

SEQ ID NO: 155871 - DNA, 25 bp, Artificial
  probe
  misc_feature (1)..(25): SEQ ID NO: 1824; WAN024DFK_at; Start 322; Stop 346
ggcaaacgtttcatgcttccaaatg

SEQ ID NO: 155872 - DNA, 25 bp, Artificial
  probe
  misc_feature (1)..(25): SEQ ID NO: 1824; WAN024DFK_at; Start 380; Stop 404
caggtggtggtacccaacaaactga

SEQ ID NO: 155873 - DNA, 25 bp, Artificial
  probe
  misc_feature (1)..(25): SEQ ID NO: 1824; WAN024DFK_at; Start 137; Stop 161
tgcttttcttggatgcccaagatag

SEQ ID NO: 155874 - DNA, 25 bp, Artificial
  probe
  misc_feature (1)..(25): SEQ ID NO: 1824; WAN024DFK_at; Start 111; Stop 135
tatggctaactctgttattgcccaa

SEQ ID NO: 155875 - DNA, 25 bp, Artificial
  probe
  misc_feature (1)..(25): SEQ ID NO: 1824; WAN024DFK_at; Start 508; Stop 532
gaacgtgataactggatgagcgccc

SEQ ID NO: 155876 - DNA, 25 bp, Artificial
  probe
  misc_feature (1)..(25): SEQ ID NO: 1824; WAN024DFK_at; Start 485; Stop 509
tggaaaaagtccatgcagatgcaga

SEQ ID NO: 155877 - DNA, 25 bp, Artificial
  probe
  misc_feature (1)..(25): SEQ ID NO: 1824; WAN024DFK_at; Start 411; Stop 435
tatcgctgcagaacacttgctcaaa

SEQ ID NO: 155878 - DNA, 25 bp, Artificial
  probe
  misc_feature (1)..(25): SEQ ID NO: 1824; WAN024DFK_at; Start 387; Stop 411
tggtacccaacaaactgatatggct

SEQ ID NO: 155879 - DNA, 25 bp, Artificial
  probe
  misc_feature (1)..(25): SEQ ID NO: 1824; WAN024DFK_at; Start 557; Stop 581
ttgatgaaattatggccaacaattc

SEQ ID NO: 155880 - DNA, 25 bp, Artificial
  probe
  misc_feature (1)..(25): SEQ ID NO: 1824; WAN024DFK_at; Start 26; Stop 50
caagccgtggagaacgttcttacga

SEQ ID NO: 155881 - DNA, 25 bp, Artificial
  probe
  misc_feature (1)..(25): SEQ ID NO: 1824; WAN024DFK_at; Start 189; Stop 213
tacaccaggtggttctgtttcagct

SEQ ID NO: 155882 - DNA, 25 bp, Artificial
  probe
  misc_feature (1)..(25): SEQ ID NO: 1824; WAN024DFK_at; Start 267; Stop 291
tgttatgggaatggctgcatctatg

SEQ ID NO: 155883 - DNA, 25 bp, Artificial
  probe
  misc_feature (1)..(25): SEQ ID NO: 1824; WAN024DFK_at; Start 96; Stop 120
tccggttgaagacaatatggctaac

SEQ ID NO: 155884 - DNA, 25 bp, Artificial
  probe
  misc_feature (1)..(25): SEQ ID NO: 1824; WAN024DFK_at; Start 496; Stop 520
catgcagatgcagaacgtgataact

SEQ ID NO: 155885 - DNA, 25 bp, Artificial
  probe
  misc_feature (1)..(25): SEQ ID NO: 1824; WAN024DFK_at; Start 514; Stop 538
gataactggatgagcgcccaggaaa

SEQ ID NO: 155886 - DNA, 25 bp, Artificial
  probe
  misc_feature (1)..(25): SEQ ID NO: 1824; WAN024DFK_at; Start 299; Stop 323
tcatcgcatcaagtggagcaaaagg

SEQ ID NO: 155887 - DNA, 25 bp, Artificial
  probe
  misc_feature (1)..(25): SEQ ID NO: 1824; WAN024DFK_at; Start 84; Stop 108
tatgctgacaggtccggttgaagac

SEQ ID NO: 155888 - DNA, 25 bp, Artificial
  probe
  misc_feature (1)..(25): SEQ ID NO: 1824; WAN024DFK_at; Start 146; Stop 170
tggatgcccaagatagtacaaaaga

SEQ ID NO: 155889 - DNA, 25 bp, Artificial
  probe
  misc_feature (1)..(25): SEQ ID NO: 1824; WAN024DFK_at; Start 308; Stop 332
caagtggagcaaaaggcaaacgttt

SEQ ID NO: 155890 - DNA, 25 bp, Artificial
  probe
  misc_feature (1)..(25): SEQ ID NO: 1824; WAN024DFK_at; Start 245; Stop 269
tcaaggcagatgtccaaaccattgt

SEQ ID NO: 155891 - DNA, 25 bp, Artificial
  probe
  misc_feature (1)..(25): SEQ ID NO: 1824; WAN024DFK_at; Start 77; Stop 101
gcatcattatgctgacaggtccggt

SEQ ID NO: 155892 - DNA, 25 bp, Artificial
  probe
  misc_feature (1)..(25): SEQ ID NO: 1484; WAN024DFL_at; Start 508; Stop 532
aagaacggccgtttgagcaagctta

SEQ ID NO: 155893 - DNA, 25 bp, Artificial
  probe
  misc_feature (1)..(25): SEQ ID NO: 1484; WAN024DFL_at; Start 521; Stop 545
tgagcaagcttatcggtacggtcgt

SEQ ID NO: 155894 - DNA, 25 bp, Artificial
  probe
  misc_feature (1)..(25): SEQ ID NO: 1484; WAN024DFL_at; Start 312; Stop 336
tctggaagaccatcctgacactaag

SEQ ID NO: 155895 - DNA, 25 bp, Artificial
  probe
  misc_feature (1)..(25): SEQ ID NO: 1484; WAN024DFL_at; Start 396; Stop 420
gaatgacttgattgaccagggcttg

SEQ ID NO: 155896 - DNA, 25 bp, Artificial
  probe
  misc_feature (1)..(25): SEQ ID NO: 1484; WAN024DFL_at; Start 659; Stop 683
taaaagctggatatgctggtggccg

SEQ ID NO: 155897 - DNA, 25 bp, Artificial
  probe
  misc_feature (1)..(25): SEQ ID NO: 1484; WAN024DFL_at; Start 594; Stop 618
tctcgaattgctacaaaaagcaagg

SEQ ID NO: 155898 - DNA, 25 bp, Artificial
  probe
  misc_feature (1)..(25): SEQ ID NO: 1484; WAN024DFL_at; Start 124; Stop 148
gacgccagtctcgatattgaccaaa

SEQ ID NO: 155899 - DNA, 25 bp, Artificial
  probe
  misc_feature (1)..(25): SEQ ID NO: 1484; WAN024DFL_at; Start 34; Stop 58
gattatcgtcaactgccaacaccag

SEQ ID NO: 155900 - DNA, 25 bp, Artificial
  probe
  misc_feature (1)..(25): SEQ ID NO: 1484; WAN024DFL_at; Start 494; Stop 518
tcgataacttggtgaagaacggccg

SEQ ID NO: 155901 - DNA, 25 bp, Artificial
  probe
  misc_feature (1)..(25): SEQ ID NO: 1484; WAN024DFL_at; Start 430; Stop 454
gaagtggttgaagctatcaccgcct

SEQ ID NO: 155902 - DNA, 25 bp, Artificial
  probe
  misc_feature (1)..(25): SEQ ID NO: 1484; WAN024DFL_at; Start 276; Stop 300
cagtcacaatagtgctcaactagca

SEQ ID NO: 155903 - DNA, 25 bp, Artificial
  probe
  misc_feature (1)..(25): SEQ ID NO: 1484; WAN024DFL_at; Start 728; Stop 752
tctcagagcgaatccgtgaaacctt

SEQ ID NO: 155904 - DNA, 25 bp, Artificial
  probe
  misc_feature (1)..(25): SEQ ID NO: 1484; WAN024DFL_at; Start 564; Stop 588
tatggtcggaaaagctagtgaaact

SEQ ID NO: 155905 - DNA, 25 bp, Artificial
  probe
  misc_feature (1)..(25): SEQ ID NO: 1484; WAN024DFL_at; Start 622; Stop 646
tcaaagaaatcagttcaagctgcct

SEQ ID NO: 155906 - DNA, 25 bp, Artificial
  probe
  misc_feature (1)..(25): SEQ ID NO: 1484; WAN024DFL_at; Start 18; Stop 42
tgctgactctggttgtgattatcgt

SEQ ID NO: 155907 - DNA, 25 bp, Artificial
  probe
  misc_feature (1)..(25): SEQ ID NO: 1484; WAN024DFL_at; Start 240; Stop 264
cattttcctagtaaccatcacaggt

SEQ ID NO: 155908 - DNA, 25 bp, Artificial
  probe
  misc_feature (1)..(25): SEQ ID NO: 1484; WAN024DFL_at; Start 356; Stop 380
tatctgctggtggtgaagttgacct

SEQ ID NO: 155909 - DNA, 25 bp, Artificial
  probe
  misc_feature (1)..(25): SEQ ID NO: 1484; WAN024DFL_at; Start 150; Stop 174
gatggaaaccatgtatgcaactgca

SEQ ID NO: 155910 - DNA, 25 bp, Artificial
  probe
  misc_feature (1)..(25): SEQ ID NO: 1484; WAN024DFL_at; Start 680; Stop 704
gccgtattgtcatggcccaacgcaa

SEQ ID NO: 155911 - DNA, 25 bp, Artificial
  probe
  misc_feature (1)..(25): SEQ ID NO: 1484; WAN024DFL_at; Start 692; Stop 716
tggcccaacgcaataacgaaaaatg

SEQ ID NO: 155912 - DNA, 25 bp, Artificial
  probe
  misc_feature (1)..(25): SEQ ID NO: 1484; WAN024DFL_at; Start 637; Stop 661
caagctgcctatgatgagttagtaa

SEQ ID NO: 155913 - DNA, 25 bp, Artificial
  probe
  misc_feature (1)..(25): SEQ ID NO: 1484; WAN024DFL_at; Start 194; Stop 218
gtccaagcccagatgactatttgcg

SEQ ID NO: 155914 - DNA, 25 bp, Artificial
  probe
  misc_feature (1)..(25): SEQ ID NO: 1484; WAN024DFL_at; Start 535; Stop 559
ggtacggtcgttggccttctcaaca

SEQ ID NO: 155915 - DNA, 25 bp, Artificial
  probe
  misc_feature (1)..(25): SEQ ID NO: 1484; WAN024DFL_at; Start 211; Stop 235
tatttgcgagcatttgaaggtgcca

SEQ ID NO: 155916 - DNA, 25 bp, Artificial
  probe
  misc_feature (1)..(25): SEQ ID NO: 1484; WAN024DFL_at; Start 549; Stop 573
ccttctcaacattcgtatggtcgga

SEQ ID NO: 155917 - DNA, 25 bp, Artificial
  probe
  misc_feature (1)..(25): SEQ ID NO: 1484; WAN024DFL_at; Start 260; Stop 284
caggtaccctttctggcagtcacaa

SEQ ID NO: 155918 - DNA, 25 bp, Artificial
  probe
  misc_feature (1)..(25): SEQ ID NO: 1484; WAN024DFL_at; Start 779; Stop 803
caacctctggtctctgcagtttcta

SEQ ID NO: 155919 - DNA, 25 bp, Artificial
  probe
  misc_feature (1)..(25): SEQ ID NO: 1484; WAN024DFL_at; Start 106; Stop 130
gatcaggtctttgttgatgacgcca

SEQ ID NO: 155920 - DNA, 25 bp, Artificial
  probe
  misc_feature (1)..(25): SEQ ID NO: 1484; WAN024DFL_at; Start 480; Stop 504
tgtcctagccaaagtcgataacttg

SEQ ID NO: 155921 - DNA, 25 bp, Artificial
  probe
  misc_feature (1)..(25): SEQ ID NO: 1484; WAN024DFL_at; Start 378; Stop 402
cctactcgtagaaaaattgaatgac

SEQ ID NO: 155922 - DNA, 25 bp, Artificial
  probe
  misc_feature (1)..(25): SEQ ID NO: 1484; WAN024DFL_at; Start 465; Stop 489
aactaagttgctctttgtcctagcc

SEQ ID NO: 155923 - DNA, 25 bp, Artificial
  probe
  misc_feature (1)..(25): SEQ ID NO: 1484; WAN024DFL_at; Start 743; Stop 767
gtgaaaccttcccacaagcggatat

SEQ ID NO: 155924 - DNA, 25 bp, Artificial
  probe
  misc_feature (1)..(25): SEQ ID NO: 1484; WAN024DFL_at; Start 88; Stop 112
ttaaccattcaagtagctgatcagg

SEQ ID NO: 155925 - DNA, 25 bp, Artificial
  probe
  misc_feature (1)..(25): SEQ ID NO: 1484; WAN024DFL_at; Start 444; Stop 468
tatcaccgcctatcaagaaaaaact

SEQ ID NO: 155926 - DNA, 25 bp, Artificial
  probe
  misc_feature (1)..(25): SEQ ID NO: 4631; WAN024DFM_at; Start 267; Stop 291
gccaacgactggctcagtgtccaag

SEQ ID NO: 155927 - DNA, 25 bp, Artificial
  probe
  misc_feature (1)..(25): SEQ ID NO: 4631; WAN024DFM_at; Start 383; Stop 407
gattatctacggtcacaatgccaag

SEQ ID NO: 155928 - DNA, 25 bp, Artificial
  probe
  misc_feature (1)..(25): SEQ ID NO: 4631; WAN024DFM_at; Start 147; Stop 171
tctaaagttgccaatggtcgttacg

SEQ ID NO: 155929 - DNA, 25 bp, Artificial
  probe
  misc_feature (1)..(25): SEQ ID NO: 4631; WAN024DFM_at; Start 277; Stop 301
ggctcagtgtccaagttcacccaga

SEQ ID NO: 155930 - DNA, 25 bp, Artificial
  probe
  misc_feature (1)..(25): SEQ ID NO: 4631; WAN024DFM_at; Start 245; Stop 269
acttttgaccaagatcctcgatgcc

SEQ ID NO: 155931 - DNA, 25 bp, Artificial
  probe
  misc_feature (1)..(25): SEQ ID NO: 4631; WAN024DFM_at; Start 222; Stop 246
aatcgtccagaacctgtatttccac

SEQ ID NO: 155932 - DNA, 25 bp, Artificial
  probe
  misc_feature (1)..(25): SEQ ID NO: 4631; WAN024DFM_at; Start 170; Stop 194
cgagggaacagatcttgctactttg

SEQ ID NO: 155933 - DNA, 25 bp, Artificial
  probe
  misc_feature (1)..(25): SEQ ID NO: 4631; WAN024DFM_at; Start 206; Stop 230
ccgtgaattatttggcaatcgtcca

SEQ ID NO: 155934 - DNA, 25 bp, Artificial
  probe
  misc_feature (1)..(25): SEQ ID NO: 4631; WAN024DFM_at; Start 30; Stop 54
tcagttatgcaagaaaaaatctggg

SEQ ID NO: 155935 - DNA, 25 bp, Artificial
  probe
  misc_feature (1)..(25): SEQ ID NO: 4631; WAN024DFM_at; Start 776; Stop 800
ctttgaaaagacagctgactacagc

SEQ ID NO: 155936 - DNA, 25 bp, Artificial
  probe
  misc_feature (1)..(25): SEQ ID NO: 4631; WAN024DFM_at; Start 199; Stop 223
cggaacaccgtgaattatttggcaa

SEQ ID NO: 155937 - DNA, 25 bp, Artificial
  probe
  misc_feature (1)..(25): SEQ ID NO: 4631; WAN024DFM_at; Start 298; Stop 322
cagacgatgcttatggactcgagca

SEQ ID NO: 155938 - DNA, 25 bp, Artificial
  probe
  misc_feature (1)..(25): SEQ ID NO: 4631; WAN024DFM_at; Start 401; Stop 425
tgccaagtcaaaagaagaactccgc

SEQ ID NO: 155939 - DNA, 25 bp, Artificial
  probe
  misc_feature (1)..(25): SEQ ID NO: 4631; WAN024DFM_at; Start 284; Stop 308
tgtccaagttcacccagacgatgct

SEQ ID NO: 155940 - DNA, 25 bp, Artificial
  probe
  misc_feature (1)..(25): SEQ ID NO: 4631; WAN024DFM_at; Start 164; Stop 188
tcgttacgagggaacagatcttgct

SEQ ID NO: 155941 - DNA, 25 bp, Artificial
  probe
  misc_feature (1)..(25): SEQ ID NO: 4631; WAN024DFM_at; Start 216; Stop 240
tttggcaatcgtccagaacctgtat

SEQ ID NO: 155942 - DNA, 25 bp, Artificial
  probe
  misc_feature (1)..(25): SEQ ID NO: 4631; WAN024DFM_at; Start 262; Stop 286
tcgatgccaacgactggctcagtgt

SEQ ID NO: 155943 - DNA, 25 bp, Artificial
  probe
  misc_feature (1)..(25): SEQ ID NO: 4631; WAN024DFM_at; Start 875; Stop 899
ctttatcctaccaagtgatgttgaa

SEQ ID NO: 155944 - DNA, 25 bp, Artificial
  probe
  misc_feature (1)..(25): SEQ ID NO: 4631; WAN024DFM_at; Start 2; Stop 26
cgacatgtcagaaccattattttta

SEQ ID NO: 155945 - DNA, 25 bp, Artificial
  probe
  misc_feature (1)..(25): SEQ ID NO: 4631; WAN024DFM_at; Start 80; Stop 104
tggctacgacatcccaagtgaaaaa

SEQ ID NO: 155946 - DNA, 25 bp, Artificial
  probe
  misc_feature (1)..(25): SEQ ID NO: 4631; WAN024DFM_at; Start 231; Stop 255
gaacctgtatttccacttttgacca

SEQ ID NO: 155947 - DNA, 25 bp, Artificial
  probe
  misc_feature (1)..(25): SEQ ID NO: 4631; WAN024DFM_at; Start 250; Stop 274
tgaccaagatcctcgatgccaacga

SEQ ID NO: 155948 - DNA, 25 bp, Artificial
  probe
  misc_feature (1)..(25): SEQ ID NO: 4631; WAN024DFM_at; Start 19; Stop 43
tatttttacaatcagttatgcaaga

SEQ ID NO: 155949 - DNA, 25 bp, Artificial
  probe
  misc_feature (1)..(25): SEQ ID NO: 4631; WAN024DFM_at; Start 309; Stop 333
tatggactcgagcatgaaggcgaac

SEQ ID NO: 155950 - DNA, 25 bp, Artificial
  probe
  misc_feature (1)..(25): SEQ ID NO: 4631; WAN024DFM_at; Start 62; Stop 86
caagctacgtgatgagtttggctac

SEQ ID NO: 155951 - DNA, 25 bp, Artificial
  probe
  misc_feature (1)..(25): SEQ ID NO: 4631; WAN024DFM_at; Start 290; Stop 314
agttcacccagacgatgcttatgga

SEQ ID NO: 155952 - DNA, 25 bp, Artificial
  probe
  misc_feature (1)..(25): SEQ ID NO: 4631; WAN024DFM_at; Start 369; Stop 393
gatgaaggttcagagattatctacg

SEQ ID NO: 155953 - DNA, 25 bp, Artificial
  probe
  misc_feature (1)..(25): SEQ ID NO: 4631; WAN024DFM_at; Start 414; Stop 438
gaagaactccgccagcaaatcgagg

SEQ ID NO: 155954 - DNA, 25 bp, Artificial
  probe
  misc_feature (1)..(25): SEQ ID NO: 4631; WAN024DFM_at; Start 72; Stop 96
gatgagtttggctacgacatcccaa

SEQ ID NO: 155955 - DNA, 25 bp, Artificial
  probe
  misc_feature (1)..(25): SEQ ID NO: 4631; WAN024DFM_at; Start 254; Stop 278
caagatcctcgatgccaacgactgg

SEQ ID NO: 155956 - DNA, 25 bp, Artificial
  probe
  misc_feature (1)..(25): SEQ ID NO: 4631; WAN024DFM_at; Start 186; Stop 210
gctactttgtatgcggaacaccgtg

SEQ ID NO: 155957 - DNA, 25 bp, Artificial
  probe
  misc_feature (1)..(25): SEQ ID NO: 4631; WAN024DFM_at; Start 178; Stop 202
cagatcttgctactttgtatgcgga

SEQ ID NO: 155958 - DNA, 25 bp, Artificial
  probe
  misc_feature (1)..(25): SEQ ID NO: 4631; WAN024DFM_at; Start 390; Stop 414
tacggtcacaatgccaagtcaaaag

SEQ ID NO: 155959 - DNA, 25 bp, Artificial
  probe
  misc_feature (1)..(25): SEQ ID NO: 4631; WAN024DFM_at; Start 157; Stop 181
ccaatggtcgttacgagggaacaga

SEQ ID NO: 155960 - DNA, 25 bp, Artificial
  probe
  misc_feature (1)..(25): SEQ ID NO: 7165; WAN024DFN_at; Start 40; Stop 64
ttcgaattgaactcttttttacatc

SEQ ID NO: 155961 - DNA, 25 bp, Artificial
  probe
  misc_feature (1)..(25): SEQ ID NO: 7165; WAN024DFN_at; Start 109; Stop 133
gctctactcgatgcttacaccattg

SEQ ID NO: 155962 - DNA, 25 bp, Artificial
  probe
  misc_feature (1)..(25): SEQ ID NO: 7165; WAN024DFN_at; Start 20; Stop 44
tcattatagcaaaaaaagagttcga

SEQ ID NO: 155963 - DNA, 25 bp, Artificial
  probe
  misc_feature (1)..(25): SEQ ID NO: 7165; WAN024DFN_at; Start 118; Stop 142
gatgcttacaccattgctataaatg

SEQ ID NO: 155964 - DNA, 25 bp, Artificial
  probe
  misc_feature (1)..(25): SEQ ID NO: 7165; WAN024DFN_at; Start 106; Stop 130
tgtgctctactcgatgcttacacca

SEQ ID NO: 155965 - DNA, 25 bp, Artificial
  probe
  misc_feature (1)..(25): SEQ ID NO: 7165; WAN024DFN_at; Start 24; Stop 48
tatagcaaaaaaagagttcgaattg

SEQ ID NO: 155966 - DNA, 25 bp, Artificial
  probe
  misc_feature (1)..(25): SEQ ID NO: 7165; WAN024DFN_at; Start 124; Stop 148
tacaccattgctataaatgacatgt

SEQ ID NO: 155967 - DNA, 25 bp, Artificial
  probe
  misc_feature (1)..(25): SEQ ID NO: 7165; WAN024DFN_at; Start 104; Stop 128
aatgtgctctactcgatgcttacac

SEQ ID NO: 155968 - DNA, 25 bp, Artificial
  probe
  misc_feature (1)..(25): SEQ ID NO: 7165; WAN024DFN_at; Start 63; Stop 87
tcttataaagcagggagaagatttt

SEQ ID NO: 155969 - DNA, 25 bp, Artificial
  probe
  misc_feature (1)..(25): SEQ ID NO: 7165; WAN024DFN_at; Start 7; Stop 31
gatttttctcccctcattatagcaa

SEQ ID NO: 155970 - DNA, 25 bp, Artificial
  probe
  misc_feature (1)..(25): SEQ ID NO: 7165; WAN024DFN_at; Start 87; Stop 111
tataaaaatagtaaacaaatgtgct

SEQ ID NO: 155971 - DNA, 25 bp, Artificial
  probe
  misc_feature (1)..(25): SEQ ID NO: 7165; WAN024DFN_at; Start 55; Stop 79
tttttacatcttataaagcagggag

SEQ ID NO: 155972 - DNA, 25 bp, Artificial
  probe
  misc_feature (1)..(25): SEQ ID NO: 7165; WAN024DFN_at; Start 56; Stop 80
ttttacatcttataaagcagggaga

SEQ ID NO: 155973 - DNA, 25 bp, Artificial
  probe
  misc_feature (1)..(25): SEQ ID NO: 7165; WAN024DFN_at; Start 99; Stop 123
aaacaaatgtgctctactcgatgct

SEQ ID NO: 155974 - DNA, 25 bp, Artificial
  probe
  misc_feature (1)..(25): SEQ ID NO: 7165; WAN024DFN_at; Start 116; Stop 140
tcgatgcttacaccattgctataaa

SEQ ID NO: 155975 - DNA, 25 bp, Artificial
  probe
  misc_feature (1)..(25): SEQ ID NO: 7165; WAN024DFN_at; Start 102; Stop 126
caaatgtgctctactcgatgcttac

SEQ ID NO: 155976 - DNA, 25 bp, Artificial
  probe
  misc_feature (1)..(25): SEQ ID NO: 7165; WAN024DFN_at; Start 1; Stop 25
ctgtctgatttttctcccctcatta

SEQ ID NO: 155977 - DNA, 25 bp, Artificial
  probe
  misc_feature (1)..(25): SEQ ID NO: 7165; WAN024DFN_at; Start 43; Stop 67
gaattgaactcttttttacatctta

SEQ ID NO: 155978 - DNA, 25 bp, Artificial
  probe
  misc_feature (1)..(25): SEQ ID NO: 7165; WAN024DFN_at; Start 129; Stop 153
cattgctataaatgacatgtaccaa

SEQ ID NO: 155979 - DNA, 25 bp, Artificial
  probe
  misc_feature (1)..(25): SEQ ID NO: 7165; WAN024DFN_at; Start 91; Stop 115
aaaatagtaaacaaatgtgctctac

SEQ ID NO: 155980 - DNA, 25 bp, Artificial
  probe
  misc_feature (1)..(25): SEQ ID NO: 7165; WAN024DFN_at; Start 113; Stop 137
tactcgatgcttacaccattgctat

SEQ ID NO: 155981 - DNA, 25 bp, Artificial
  probe
  misc_feature (1)..(25): SEQ ID NO: 7165; WAN024DFN_at; Start 61; Stop 85
catcttataaagcagggagaagatt

SEQ ID NO: 155982 - DNA, 25 bp, Artificial
  probe
  misc_feature (1)..(25): SEQ ID NO: 7165; WAN024DFN_at; Start 128; Stop 152
ccattgctataaatgacatgtacca

SEQ ID NO: 155983 - DNA, 25 bp, Artificial
  probe
  misc_feature (1)..(25): SEQ ID NO: 7165; WAN024DFN_at; Start 11; Stop 35
tttctcccctcattatagcaaaaaa

SEQ ID NO: 155984 - DNA, 25 bp, Artificial
  probe
  misc_feature (1)..(25): SEQ ID NO: 7165; WAN024DFN_at; Start 59; Stop 83
tacatcttataaagcagggagaaga

SEQ ID NO: 155985 - DNA, 25 bp, Artificial
  probe
  misc_feature (1)..(25): SEQ ID NO: 7165; WAN024DFN_at; Start 97; Stop 121
gtaaacaaatgtgctctactcgatg

SEQ ID NO: 155986 - DNA, 25 bp, Artificial
  probe
  misc_feature (1)..(25): SEQ ID NO: 7165; WAN024DFN_at; Start 95; Stop 119
tagtaaacaaatgtgctctactcga

SEQ ID NO: 155987 - DNA, 25 bp, Artificial
  probe
  misc_feature (1)..(25): SEQ ID NO: 7165; WAN024DFN_at; Start 126; Stop 150
caccattgctataaatgacatgtac

SEQ ID NO: 155988 - DNA, 25 bp, Artificial
  probe
  misc_feature (1)..(25): SEQ ID NO: 7165; WAN024DFN_at; Start 121; Stop 145
gcttacaccattgctataaatgaca

SEQ ID NO: 155989 - DNA, 25 bp, Artificial
  probe
  misc_feature (1)..(25): SEQ ID NO: 7165; WAN024DFN_at; Start 111; Stop 135
tctactcgatgcttacaccattgct

SEQ ID NO: 155990 - DNA, 25 bp, Artificial
  probe
  misc_feature (1)..(25): SEQ ID NO: 7165; WAN024DFN_at; Start 68; Stop 92
taaagcagggagaagattttataaa

SEQ ID NO: 155991 - DNA, 25 bp, Artificial
  probe
  misc_feature (1)..(25): SEQ ID NO: 7165; WAN024DFN_at; Start 72; Stop 96
gcagggagaagattttataaaaata

SEQ ID NO: 155992 - DNA, 25 bp, Artificial
  probe
  misc_feature (1)..(25): SEQ ID NO: 7165; WAN024DFN_at; Start 101; Stop 125
acaaatgtgctctactcgatgctta

SEQ ID NO: 155993 - DNA, 25 bp, Artificial
  probe
  misc_feature (1)..(25): SEQ ID NO: 7165; WAN024DFN_at; Start 98; Stop 122
taaacaaatgtgctctactcgatgc

SEQ ID NO: 155994 - DNA, 25 bp, Artificial
  probe
  misc_feature (1)..(25): SEQ ID NO: 2325; WAN024DFO_at; Start 22; Stop 46
ggttatgtagcagatgactatcgga

SEQ ID NO: 155995 - DNA, 25 bp, Artificial
  probe
  misc_feature (1)..(25): SEQ ID NO: 2325; WAN024DFO_at; Start 15; Stop 39
tgagaatggttatgtagcagatgac

SEQ ID NO: 155996 - DNA, 25 bp, Artificial
  probe
  misc_feature (1)..(25): SEQ ID NO: 2325; WAN024DFO_at; Start 1; Stop 25
atggatacaccggatgagaatggtt

SEQ ID NO: 155997 - DNA, 25 bp, Artificial
  probe
  misc_feature (1)..(25): SEQ ID NO: 2325; WAN024DFO_at; Start 10; Stop 34
ccggatgagaatggttatgtagcag

SEQ ID NO: 155998 - DNA, 25 bp, Artificial
  probe
  misc_feature (1)..(25): SEQ ID NO: 2325; WAN024DFO_at; Start 56; Stop 80
tagaggcccacatcaaggccatgcg

SEQ ID NO: 155999 - DNA, 25 bp, Artificial
  probe
  misc_feature (1)..(25): SEQ ID NO: 2325; WAN024DFO_at; Start 146; Stop 170
tttcagctggcacaggggaaatgaa

SEQ ID NO: 156000 - DNA, 25 bp, Artificial
  probe
  misc_feature (1)..(25): SEQ ID NO: 2325; WAN024DFO_at; Start 246; Stop 270
cttctattggtacaaggatgtcatt

SEQ ID NO: 156001 - DNA, 25 bp, Artificial
  probe
  misc_feature (1)..(25): SEQ ID NO: 2325; WAN024DFO_at; Start 161; Stop 185
gggaaatgaataagcgctatggctt

SEQ ID NO: 156002 - DNA, 25 bp, Artificial
  probe
  misc_feature (1)..(25): SEQ ID NO: 2325; WAN024DFO_at; Start 165; Stop 189
aatgaataagcgctatggctttatc

SEQ ID NO: 156003 - DNA, 25 bp, Artificial
  probe
  misc_feature (1)..(25): SEQ ID NO: 2325; WAN024DFO_at; Start 48; Stop 72
tacttacttagaggcccacatcaag

SEQ ID NO: 156004 - DNA, 25 bp, Artificial
  probe
  misc_feature (1)..(25): SEQ ID NO: 2325; WAN024DFO_at; Start 8; Stop 32
caccggatgagaatggttatgtagc

SEQ ID NO: 156005 - DNA, 25 bp, Artificial
  probe
  misc_feature (1)..(25): SEQ ID NO: 2325; WAN024DFO_at; Start 43; Stop 67
cggattacttacttagaggcccaca

SEQ ID NO: 156006 - DNA, 25 bp, Artificial
  probe
  misc_feature (1)..(25): SEQ ID NO: 2325; WAN024DFO_at; Start 4; Stop 28
gatacaccggatgagaatggttatg

SEQ ID NO: 156007 - DNA, 25 bp, Artificial
  probe
  misc_feature (1)..(25): SEQ ID NO: 2325; WAN024DFO_at; Start 101; Stop 125
gggttgacttgcttggttatacgac

SEQ ID NO: 156008 - DNA, 25 bp, Artificial
  probe
  misc_feature (1)..(25): SEQ ID NO: 2325; WAN024DFO_at; Start 69; Stop 93
caaggccatgcgagatgccatttac

SEQ ID NO: 156009 - DNA, 25 bp, Artificial
  probe
  misc_feature (1)..(25): SEQ ID NO: 2325; WAN024DFO_at; Start 37; Stop 61
gactatcggattacttacttagagg

SEQ ID NO: 156010 - DNA, 25 bp, Artificial
  probe
  misc_feature (1)..(25): SEQ ID NO: 2325; WAN024DFO_at; Start 40; Stop 64
tatcggattacttacttagaggccc

SEQ ID NO: 156011 - DNA, 25 bp, Artificial
  probe
  misc_feature (1)..(25): SEQ ID NO: 2325; WAN024DFO_at; Start 231; Stop 255
tagcaagaagaagtccttctattgg

SEQ ID NO: 156012 - DNA, 25 bp, Artificial
  probe
  misc_feature (1)..(25): SEQ ID NO: 2325; WAN024DFO_at; Start 19; Stop 43
aatggttatgtagcagatgactatc

SEQ ID NO: 156013 - DNA, 25 bp, Artificial
  probe
  misc_feature (1)..(25): SEQ ID NO: 2325; WAN024DFO_at; Start 237; Stop 261
gaagaagtccttctattggtacaag

SEQ ID NO: 156014 - DNA, 25 bp, Artificial
  probe
  misc_feature (1)..(25): SEQ ID NO: 2325; WAN024DFO_at; Start 66; Stop 90
catcaaggccatgcgagatgccatt

SEQ ID NO: 156015 - DNA, 25 bp, Artificial
  probe
  misc_feature (1)..(25): SEQ ID NO: 2325; WAN024DFO_at; Start 188; Stop 212
tctatgtagatcgagataatgtagg

SEQ ID NO: 156016 - DNA, 25 bp, Artificial
  probe
  misc_feature (1)..(25): SEQ ID NO: 2325; WAN024DFO_at; Start 64; Stop 88
cacatcaaggccatgcgagatgcca

SEQ ID NO: 156017 - DNA, 25 bp, Artificial
  probe
  misc_feature (1)..(25): SEQ ID NO: 2325; WAN024DFO_at; Start 31; Stop 55
gcagatgactatcggattacttact

SEQ ID NO: 156018 - DNA, 25 bp, Artificial
  probe
  misc_feature (1)..(25): SEQ ID NO: 2325; WAN024DFO_at; Start 240; Stop 264
gaagtccttctattggtacaaggat

SEQ ID NO: 156019 - DNA, 25 bp, Artificial
  probe
  misc_feature (1)..(25): SEQ ID NO: 2325; WAN024DFO_at; Start 60; Stop 84
ggcccacatcaaggccatgcgagat

SEQ ID NO: 156020 - DNA, 25 bp, Artificial
  probe
  misc_feature (1)..(25): SEQ ID NO: 2325; WAN024DFO_at; Start 173; Stop 197
agcgctatggctttatctatgtaga

SEQ ID NO: 156021 - DNA, 25 bp, Artificial
  probe
  misc_feature (1)..(25): SEQ ID NO: 2325; WAN024DFO_at; Start 244; Stop 268
tccttctattggtacaaggatgtca

SEQ ID NO: 156022 - DNA, 25 bp, Artificial
  probe
  misc_feature (1)..(25): SEQ ID NO: 2325; WAN024DFO_at; Start 178; Stop 202
tatggctttatctatgtagatcgag

SEQ ID NO: 156023 - DNA, 25 bp, Artificial
  probe
  misc_feature (1)..(25): SEQ ID NO: 2325; WAN024DFO_at; Start 45; Stop 69
gattacttacttagaggcccacatc

SEQ ID NO: 156024 - DNA, 25 bp, Artificial
  probe
  misc_feature (1)..(25): SEQ ID NO: 2325; WAN024DFO_at; Start 27; Stop 51
tgtagcagatgactatcggattact

SEQ ID NO: 156025 - DNA, 25 bp, Artificial
  probe
  misc_feature (1)..(25): SEQ ID NO: 2325; WAN024DFO_at; Start 58; Stop 82
gaggcccacatcaaggccatgcgag

SEQ ID NO: 156026 - DNA, 25 bp, Artificial
  probe
  misc_feature (1)..(25): SEQ ID NO: 2325; WAN024DFO_at; Start 190; Stop 214
tatgtagatcgagataatgtaggaa

SEQ ID NO: 156027 - DNA, 25 bp, Artificial
  probe
  misc_feature (1)..(25): SEQ ID NO: 2325; WAN024DFO_at; Start 52; Stop 76
tacttagaggcccacatcaaggcca

SEQ ID NO: 156028 - DNA, 25 bp, Artificial
  probe
  misc_feature (1)..(25): SEQ ID NO: 1277; WAN024DFP_at; Start 217; Stop 241
cagaactacaaacggttgaacgagc

SEQ ID NO: 156029 - DNA, 25 bp, Artificial
  probe
  misc_feature (1)..(25): SEQ ID NO: 1277; WAN024DFP_at; Start 302; Stop 326
ttcaaggacctgctggtctagtgct

SEQ ID NO: 156030 - DNA, 25 bp, Artificial
  probe
  misc_feature (1)..(25): SEQ ID NO: 1277; WAN024DFP_at; Start 125; Stop 149
gtcactgccttatgttgtcacaaaa

SEQ ID NO: 156031 - DNA, 25 bp, Artificial
  probe
  misc_feature (1)..(25): SEQ ID NO: 1277; WAN024DFP_at; Start 185; Stop 209
tcattattcatatcgaggttgagga

SEQ ID NO: 156032 - DNA, 25 bp, Artificial
  probe
  misc_feature (1)..(25): SEQ ID NO: 1277; WAN024DFP_at; Start 282; Stop 306
gggaacagagtccttattagttcaa

SEQ ID NO: 156033 - DNA, 25 bp, Artificial
  probe
  misc_feature (1)..(25): SEQ ID NO: 1277; WAN024DFP_at; Start 228; Stop 252
acggttgaacgagcttggtataaag

SEQ ID NO: 156034 - DNA, 25 bp, Artificial
  probe
  misc_feature (1)..(25): SEQ ID NO: 1277; WAN024DFP_at; Start 257; Stop 281
tacacggaccaactgtaaccgattg

SEQ ID NO: 156035 - DNA, 25 bp, Artificial
  probe
  misc_feature (1)..(25): SEQ ID NO: 1277; WAN024DFP_at; Start 193; Stop 217
catatcgaggttgaggatgtagacc

SEQ ID NO: 156036 - DNA, 25 bp, Artificial
  probe
  misc_feature (1)..(25): SEQ ID NO: 1277; WAN024DFP_at; Start 321; Stop 345
agtgcttgatttttatcgtatgaaa

SEQ ID NO: 156037 - DNA, 25 bp, Artificial
  probe
  misc_feature (1)..(25): SEQ ID NO: 1277; WAN024DFP_at; Start 201; Stop 225
ggttgaggatgtagaccagaactac

SEQ ID NO: 156038 - DNA, 25 bp, Artificial
  probe
  misc_feature (1)..(25): SEQ ID NO: 1277; WAN024DFP_at; Start 121; Stop 145
ggtagtcactgccttatgttgtcac

SEQ ID NO: 156039 - DNA, 25 bp, Artificial
  probe
  misc_feature (1)..(25): SEQ ID NO: 1277; WAN024DFP_at; Start 110; Stop 134
agtttacgattggtagtcactgcct

SEQ ID NO: 156040 - DNA, 25 bp, Artificial
  probe
  misc_feature (1)..(25): SEQ ID NO: 1277; WAN024DFP_at; Start 225; Stop 249
caaacggttgaacgagcttggtata

SEQ ID NO: 156041 - DNA, 25 bp, Artificial
  probe
  misc_feature (1)..(25): SEQ ID NO: 1277; WAN024DFP_at; Start 97; Stop 121
gatggttttgctcagtttacgattg

SEQ ID NO: 156042 - DNA, 25 bp, Artificial
  probe
  misc_feature (1)..(25): SEQ ID NO: 1277; WAN024DFP_at; Start 106; Stop 130
gctcagtttacgattggtagtcact

SEQ ID NO: 156043 - DNA, 25 bp, Artificial
  probe
  misc_feature (1)..(25): SEQ ID NO: 1277; WAN024DFP_at; Start 19; Stop 43
gatattatcgtttcaaatgttcccc

SEQ ID NO: 156044 - DNA, 25 bp, Artificial
  probe
  misc_feature (1)..(25): SEQ ID NO: 1277; WAN024DFP_at; Start 293; Stop 317
ccttattagttcaaggacctgctgg

SEQ ID NO: 156045 - DNA, 25 bp, Artificial
  probe
  misc_feature (1)..(25): SEQ ID NO: 1277; WAN024DFP_at; Start 221; Stop 245
actacaaacggttgaacgagcttgg

SEQ ID NO: 156046 - DNA, 25 bp, Artificial
  probe
  misc_feature (1)..(25): SEQ ID NO: 1277; WAN024DFP_at; Start 259; Stop 283
cacggaccaactgtaaccgattggg

SEQ ID NO: 156047 - DNA, 25 bp, Artificial
  probe
  misc_feature (1)..(25): SEQ ID NO: 1277; WAN024DFP_at; Start 179; Stop 203
caggaatcattattcatatcgaggt

SEQ ID NO: 156048 - DNA, 25 bp, Artificial
  probe
  misc_feature (1)..(25): SEQ ID NO: 1277; WAN024DFP_at; Start 159; Stop 183
tcctttggaaaactttcagtcagga

SEQ ID NO: 156049 - DNA, 25 bp, Artificial
  probe
  misc_feature (1)..(25): SEQ ID NO: 1277; WAN024DFP_at; Start 43; Stop 67
caagtctgtgctgacttggagcata

SEQ ID NO: 156050 - DNA, 25 bp, Artificial
  probe
  misc_feature (1)..(25): SEQ ID NO: 1277; WAN024DFP_at; Start 296; Stop 320
tattagttcaaggacctgctggtct

SEQ ID NO: 156051 - DNA, 25 bp, Artificial
  probe
  misc_feature (1)..(25): SEQ ID NO: 1277; WAN024DFP_at; Start 165; Stop 189
ggaaaactttcagtcaggaatcatt

SEQ ID NO: 156052 - DNA, 25 bp, Artificial
  probe
  misc_feature (1)..(25): SEQ ID NO: 1277; WAN024DFP_at; Start 313; Stop 337
gctggtctagtgcttgatttttatc

SEQ ID NO: 156053 - DNA, 25 bp, Artificial
  probe
  misc_feature (1)..(25): SEQ ID NO: 1277; WAN024DFP_at; Start 143; Stop 167
cacaaaatcatttggttcctttgga

SEQ ID NO: 156054 - DNA, 25 bp, Artificial
  probe
  misc_feature (1)..(25): SEQ ID NO: 1277; WAN024DFP_at; Start 28; Stop 52
gtttcaaatgttccccaagtctgtg

SEQ ID NO: 156055 - DNA, 25 bp, Artificial
  probe
  misc_feature (1)..(25): SEQ ID NO: 1277; WAN024DFP_at; Start 33; Stop 57
aaatgttccccaagtctgtgctgac

SEQ ID NO: 156056 - DNA, 25 bp, Artificial
  probe
  misc_feature (1)..(25): SEQ ID NO: 1277; WAN024DFP_at; Start 137; Stop 161
tgttgtcacaaaatcatttggttcc

SEQ ID NO: 156057 - DNA, 25 bp, Artificial
  probe
  misc_feature (1)..(25): SEQ ID NO: 1277; WAN024DFP_at; Start 210; Stop 234
tgtagaccagaactacaaacggttg

SEQ ID NO: 156058 - DNA, 25 bp, Artificial
  probe
  misc_feature (1)..(25): SEQ ID NO: 1277; WAN024DFP_at; Start 308; Stop 332
gacctgctggtctagtgcttgattt

SEQ ID NO: 156059 - DNA, 25 bp, Artificial
  probe
  misc_feature (1)..(25): SEQ ID NO: 1277; WAN024DFP_at; Start 198; Stop 222
cgaggttgaggatgtagaccagaac

SEQ ID NO: 156060 - DNA, 25 bp, Artificial
  probe
  misc_feature (1)..(25): SEQ ID NO: 1277; WAN024DFP_at; Start 24; Stop 48
tatcgtttcaaatgttccccaagtc

SEQ ID NO: 156061 - DNA, 25 bp, Artificial
  probe
  misc_feature (1)..(25): SEQ ID NO: 1277; WAN024DFP_at; Start 114; Stop 138
tacgattggtagtcactgccttatg

SEQ ID NO: 156062 - DNA, 25 bp, Artificial
  probe
  misc_feature (1)..(25): SEQ ID NO: 2987; WAN024DFQ_at; Start 207; Stop 231
ggatccttcaccatgtctggatcaa

SEQ ID NO: 156063 - DNA, 25 bp, Artificial
  probe
  misc_feature (1)..(25): SEQ ID NO: 2987; WAN024DFQ_at; Start 280; Stop 304
gagtatgtagtggaaatcacgcctg

SEQ ID NO: 156064 - DNA, 25 bp, Artificial
  probe
  misc_feature (1)..(25): SEQ ID NO: 2987; WAN024DFQ_at; Start 338; Stop 362
tgaacatgatgcacggcaagatgat

SEQ ID NO: 156065 - DNA, 25 bp, Artificial
  probe
  misc_feature (1)..(25): SEQ ID NO: 2987; WAN024DFQ_at; Start 323; Stop 347
gctttgcttgtggtatgaacatgat

SEQ ID NO: 156066 - DNA, 25 bp, Artificial
  probe
  misc_feature (1)..(25): SEQ ID NO: 2987; WAN024DFQ_at; Start 112; Stop 136
taccaagagattcgagtggaagtca

SEQ ID NO: 156067 - DNA, 25 bp, Artificial
  probe
  misc_feature (1)..(25): SEQ ID NO: 2987; WAN024DFQ_at; Start 292; Stop 316
gaaatcacgcctgaacaggctggag

SEQ ID NO: 156068 - DNA, 25 bp, Artificial
  probe
  misc_feature (1)..(25): SEQ ID NO: 2987; WAN024DFQ_at; Start 103; Stop 127
aaaaacggataccaagagattcgag

SEQ ID NO: 156069 - DNA, 25 bp, Artificial
  probe
  misc_feature (1)..(25): SEQ ID NO: 2987; WAN024DFQ_at; Start 203; Stop 227
gcaaggatccttcaccatgtctgga

SEQ ID NO: 156070 - DNA, 25 bp, Artificial
  probe
  misc_feature (1)..(25): SEQ ID NO: 2987; WAN024DFQ_at; Start 115; Stop 139
caagagattcgagtggaagtcatgg

SEQ ID NO: 156071 - DNA, 25 bp, Artificial
  probe
  misc_feature (1)..(25): SEQ ID NO: 2987; WAN024DFQ_at; Start 251; Stop 275
gtgtacatgcgaacctgccaatggg

SEQ ID NO: 156072 - DNA, 25 bp, Artificial
  probe
  misc_feature (1)..(25): SEQ ID NO: 2987; WAN024DFQ_at; Start 143; Stop 167
gctatactcctgagttgattgtcct

SEQ ID NO: 156073 - DNA, 25 bp, Artificial
  probe
  misc_feature (1)..(25): SEQ ID NO: 2987; WAN024DFQ_at; Start 130; Stop 154
gaagtcatgggaggctatactcctg

SEQ ID NO: 156074 - DNA, 25 bp, Artificial
  probe
  misc_feature (1)..(25): SEQ ID NO: 2987; WAN024DFQ_at; Start 229; Stop 253
caaattgtttttccagattttggtg

SEQ ID NO: 156075 - DNA, 25 bp, Artificial
  probe
  misc_feature (1)..(25): SEQ ID NO: 2987; WAN024DFQ_at; Start 277; Stop 301
gaagagtatgtagtggaaatcacgc

SEQ ID NO: 156076 - DNA, 25 bp, Artificial
  probe
  misc_feature (1)..(25): SEQ ID NO: 2987; WAN024DFQ_at; Start 198; Stop 222
tgaccgcaaggatccttcaccatgt

SEQ ID NO: 156077 - DNA, 25 bp, Artificial
  probe
  misc_feature (1)..(25): SEQ ID NO: 2987; WAN024DFQ_at; Start 211; Stop 235
ccttcaccatgtctggatcaaattg

SEQ ID NO: 156078 - DNA, 25 bp, Artificial
  probe
  misc_feature (1)..(25): SEQ ID NO: 2987; WAN024DFQ_at; Start 246; Stop 270
ttttggtgtacatgcgaacctgcca

SEQ ID NO: 156079 - DNA, 25 bp, Artificial
  probe
  misc_feature (1)..(25): SEQ ID NO: 2987; WAN024DFQ_at; Start 218; Stop 242
catgtctggatcaaattgtttttcc

SEQ ID NO: 156080 - DNA, 25 bp, Artificial
  probe
  misc_feature (1)..(25): SEQ ID NO: 2987; WAN024DFQ_at; Start 192; Stop 216
tgtctttgaccgcaaggatccttca

SEQ ID NO: 156081 - DNA, 25 bp, Artificial
  probe
  misc_feature (1)..(25): SEQ ID NO: 2987; WAN024DFQ_at; Start 327; Stop 351
tgcttgtggtatgaacatgatgcac

SEQ ID NO: 156082 - DNA, 25 bp, Artificial
  probe
  misc_feature (1)..(25): SEQ ID NO: 2987; WAN024DFQ_at; Start 187; Stop 211
cgcattgtctttgaccgcaaggatc

SEQ ID NO: 156083 - DNA, 25 bp, Artificial
  probe
  misc_feature (1)..(25): SEQ ID NO: 2987; WAN024DFQ_at; Start 260; Stop 284
cgaacctgccaatgggggaagagta

SEQ ID NO: 156084 - DNA, 25 bp, Artificial
  probe
  misc_feature (1)..(25): SEQ ID NO: 2987; WAN024DFQ_at; Start 135; Stop 159
catgggaggctatactcctgagttg

SEQ ID NO: 156085 - DNA, 25 bp, Artificial
  probe
  misc_feature (1)..(25): SEQ ID NO: 2987; WAN024DFQ_at; Start 347; Stop 371
tgcacggcaagatgattgtagagta

SEQ ID NO: 156086 - DNA, 25 bp, Artificial
  probe
  misc_feature (1)..(25): SEQ ID NO: 2987; WAN024DFQ_at; Start 283; Stop 307
tatgtagtggaaatcacgcctgaac

SEQ ID NO: 156087 - DNA, 25 bp, Artificial
  probe
  misc_feature (1)..(25): SEQ ID NO: 2987; WAN024DFQ_at; Start 334; Stop 358
ggtatgaacatgatgcacggcaaga

SEQ ID NO: 156088 - DNA, 25 bp, Artificial
  probe
  misc_feature (1)..(25): SEQ ID NO: 2987; WAN024DFQ_at; Start 297; Stop 321
cacgcctgaacaggctggagagttt

SEQ ID NO: 156089 - DNA, 25 bp, Artificial
  probe
  misc_feature (1)..(25): SEQ ID NO: 2987; WAN024DFQ_at; Start 244; Stop 268
gattttggtgtacatgcgaacctgc

SEQ ID NO: 156090 - DNA, 25 bp, Artificial
  probe
  misc_feature (1)..(25): SEQ ID NO: 2987; WAN024DFQ_at; Start 108; Stop 132
cggataccaagagattcgagtggaa

SEQ ID NO: 156091 - DNA, 25 bp, Artificial
  probe
  misc_feature (1)..(25): SEQ ID NO: 2987; WAN024DFQ_at; Start 331; Stop 355
tgtggtatgaacatgatgcacggca

SEQ ID NO: 156092 - DNA, 25 bp, Artificial
  probe
  misc_feature (1)..(25): SEQ ID NO: 2987; WAN024DFQ_at; Start 20; Stop 44
ccattatttgtattgcccttatcgc

SEQ ID NO: 156093 - DNA, 25 bp, Artificial
  probe
  misc_feature (1)..(25): SEQ ID NO: 2987; WAN024DFQ_at; Start 240; Stop 264
tccagattttggtgtacatgcgaac

SEQ ID NO: 156094 - DNA, 25 bp, Artificial
  probe
  misc_feature (1)..(25): SEQ ID NO: 2987; WAN024DFQ_at; Start 12; Stop 36
tattgtaaccattatttgtattgcc

SEQ ID NO: 156095 - DNA, 25 bp, Artificial
  probe
  misc_feature (1)..(25): SEQ ID NO: 2987; WAN024DFQ_at; Start 287; Stop 311
tagtggaaatcacgcctgaacaggc

SEQ ID NO: 156096 - DNA, 25 bp, Artificial
  probe
  misc_feature (1)..(25): SEQ ID NO: 5017; WAN024DFR_at; Start 374; Stop 398
tttcagagaagaaatcaagtgctgt

SEQ ID NO: 156097 - DNA, 25 bp, Artificial
  probe
  misc_feature (1)..(25): SEQ ID NO: 5017; WAN024DFR_at; Start 51; Stop 75
atggcaggtcatgaagattatttgg

SEQ ID NO: 156098 - DNA, 25 bp, Artificial
  probe
  misc_feature (1)..(25): SEQ ID NO: 5017; WAN024DFR_at; Start 362; Stop 386
tggaagctgtgatttcagagaagaa

SEQ ID NO: 156099 - DNA, 25 bp, Artificial
  probe
  misc_feature (1)..(25): SEQ ID NO: 5017; WAN024DFR_at; Start 393; Stop 417
tgctgtaacagaagtaagatgtaat

SEQ ID NO: 156100 - DNA, 25 bp, Artificial
  probe
  misc_feature (1)..(25): SEQ ID NO: 5017; WAN024DFR_at; Start 291; Stop 315
ccgtaggattaggaatttgttggct

SEQ ID NO: 156101 - DNA, 25 bp, Artificial
  probe
  misc_feature (1)..(25): SEQ ID NO: 5017; WAN024DFR_at; Start 268; Stop 292
gatatcaaagacaaggtttgttccc

SEQ ID NO: 156102 - DNA, 25 bp, Artificial
  probe
  misc_feature (1)..(25): SEQ ID NO: 5017; WAN024DFR_at; Start 297; Stop 321
gattaggaatttgttggctgacttg

SEQ ID NO: 156103 - DNA, 25 bp, Artificial
  probe
  misc_feature (1)..(25): SEQ ID NO: 5017; WAN024DFR_at; Start 83; Stop 107
gggagcagaccagtacagatttgat

SEQ ID NO: 156104 - DNA, 25 bp, Artificial
  probe
  misc_feature (1)..(25): SEQ ID NO: 5017; WAN024DFR_at; Start 203; Stop 227
aaggcaagtcctttgtttattcagc

SEQ ID NO: 156105 - DNA, 25 bp, Artificial
  probe
  misc_feature (1)..(25): SEQ ID NO: 5017; WAN024DFR_at; Start 11; Stop 35
tagattttggaggtatggtaatgca

SEQ ID NO: 156106 - DNA, 25 bp, Artificial
  probe
  misc_feature (1)..(25): SEQ ID NO: 5017; WAN024DFR_at; Start 88; Stop 112
cagaccagtacagatttgattaggg

SEQ ID NO: 156107 - DNA, 25 bp, Artificial
  probe
  misc_feature (1)..(25): SEQ ID NO: 5017; WAN024DFR_at; Start 303; Stop 327
gaatttgttggctgacttgattgta

SEQ ID NO: 156108 - DNA, 25 bp, Artificial
  probe
  misc_feature (1)..(25): SEQ ID NO: 5017; WAN024DFR_at; Start 101; Stop 125
atttgattagggttttggcagagcg

SEQ ID NO: 156109 - DNA, 25 bp, Artificial
  probe
  misc_feature (1)..(25): SEQ ID NO: 5017; WAN024DFR_at; Start 312; Stop 336
ggctgacttgattgtagaatgtgaa

SEQ ID NO: 156110 - DNA, 25 bp, Artificial
  probe
  misc_feature (1)..(25): SEQ ID NO: 5017; WAN024DFR_at; Start 253; Stop 277
gatttacttgtccaagatatcaaag

SEQ ID NO: 156111 - DNA, 25 bp, Artificial
  probe
  misc_feature (1)..(25): SEQ ID NO: 5017; WAN024DFR_at; Start 19; Stop 43
ggaggtatggtaatgcagatttcag

SEQ ID NO: 156112 - DNA, 25 bp, Artificial
  probe
  misc_feature (1)..(25): SEQ ID NO: 5017; WAN024DFR_at; Start 206; Stop 230
gcaagtcctttgtttattcagccct

SEQ ID NO: 156113 - DNA, 25 bp, Artificial
  probe
  misc_feature (1)..(25): SEQ ID NO: 5017; WAN024DFR_at; Start 26; Stop 50
tggtaatgcagatttcagatgcaga

SEQ ID NO: 156114 - DNA, 25 bp, Artificial
  probe
  misc_feature (1)..(25): SEQ ID NO: 5017; WAN024DFR_at; Start 401; Stop 425
cagaagtaagatgtaattgtatgta

SEQ ID NO: 156115 - DNA, 25 bp, Artificial
  probe
  misc_feature (1)..(25): SEQ ID NO: 5017; WAN024DFR_at; Start 244; Stop 268
caaagtcgggatttacttgtccaag

SEQ ID NO: 156116 - DNA, 25 bp, Artificial
  probe
  misc_feature (1)..(25): SEQ ID NO: 5017; WAN024DFR_at; Start 36; Stop 60
gatttcagatgcagaatggcaggtc

SEQ ID NO: 156117 - DNA, 25 bp, Artificial
  probe
  misc_feature (1)..(25): SEQ ID NO: 5017; WAN024DFR_at; Start 224; Stop 248
cagcccttttaactctagaccaaag

SEQ ID NO: 156118 - DNA, 25 bp, Artificial
  probe
  misc_feature (1)..(25): SEQ ID NO: 5017; WAN024DFR_at; Start 220; Stop 244
tattcagcccttttaactctagacc

SEQ ID NO: 156119 - DNA, 25 bp, Artificial
  probe
  misc_feature (1)..(25): SEQ ID NO: 5017; WAN024DFR_at; Start 349; Stop 373
gacttggaagacttggaagctgtga

SEQ ID NO: 156120 - DNA, 25 bp, Artificial
  probe
  misc_feature (1)..(25): SEQ ID NO: 5017; WAN024DFR_at; Start 382; Stop 406
aagaaatcaagtgctgtaacagaag

SEQ ID NO: 156121 - DNA, 25 bp, Artificial
  probe
  misc_feature (1)..(25): SEQ ID NO: 5017; WAN024DFR_at; Start 41; Stop 65
cagatgcagaatggcaggtcatgaa

SEQ ID NO: 156122 - DNA, 25 bp, Artificial
  probe
  misc_feature (1)..(25): SEQ ID NO: 5017; WAN024DFR_at; Start 188; Stop 212
tgactcggaaaaaagaaggcaagtc

SEQ ID NO: 156123 - DNA, 25 bp, Artificial
  probe
  misc_feature (1)..(25): SEQ ID NO: 5017; WAN024DFR_at; Start 98; Stop 122
cagatttgattagggttttggcaga

SEQ ID NO: 156124 - DNA, 25 bp, Artificial
  probe
  misc_feature (1)..(25): SEQ ID NO: 5017; WAN024DFR_at; Start 328; Stop 352
gaatgtgaatttactcagactgact

SEQ ID NO: 156125 - DNA, 25 bp, Artificial
  probe
  misc_feature (1)..(25): SEQ ID NO: 5017; WAN024DFR_at; Start 339; Stop 363
tactcagactgacttggaagacttg

SEQ ID NO: 156126 - DNA, 25 bp, Artificial
  probe
  misc_feature (1)..(25): SEQ ID NO: 5017; WAN024DFR_at; Start 236; Stop 260
ctctagaccaaagtcgggatttact

SEQ ID NO: 156127 - DNA, 25 bp, Artificial
  probe
  misc_feature (1)..(25): SEQ ID NO: 5017; WAN024DFR_at; Start 343; Stop 367
cagactgacttggaagacttggaag

SEQ ID NO: 156128 - DNA, 25 bp, Artificial
  probe
  misc_feature (1)..(25): SEQ ID NO: 5017; WAN024DFR_at; Start 46; Stop 70
gcagaatggcaggtcatgaagatta

SEQ ID NO: 156129 - DNA, 25 bp, Artificial
  probe
  misc_feature (1)..(25): SEQ ID NO: 5017; WAN024DFR_at; Start 355; Stop 379
gaagacttggaagctgtgatttcag

SEQ ID NO: 156130 - DNA, 25 bp, Artificial
  probe
  misc_feature (1)..(25): SEQ ID NO: 3356; WAN024DFS_at; Start 25; Stop 49
caagtcagccaacaaattcctaatc

SEQ ID NO: 156131 - DNA, 25 bp, Artificial
  probe
  misc_feature (1)..(25): SEQ ID NO: 3356; WAN024DFS_at; Start 59; Stop 83
caaaccttgtctttgatatcttgga

SEQ ID NO: 156132 - DNA, 25 bp, Artificial
  probe
  misc_feature (1)..(25): SEQ ID NO: 3356; WAN024DFS_at; Start 28; Stop 52
gtcagccaacaaattcctaatccta

SEQ ID NO: 156133 - DNA, 25 bp, Artificial
  probe
  misc_feature (1)..(25): SEQ ID NO: 3356; WAN024DFS_at; Start 12; Stop 36
cacattctacaatcaagtcagccaa

SEQ ID NO: 156134 - DNA, 25 bp, Artificial
  probe
  misc_feature (1)..(25): SEQ ID NO: 3356; WAN024DFS_at; Start 15; Stop 39
attctacaatcaagtcagccaacaa

SEQ ID NO: 156135 - DNA, 25 bp, Artificial
  probe
  misc_feature (1)..(25): SEQ ID NO: 3356; WAN024DFS_at; Start 54; Stop 78
gggaacaaaccttgtctttgatatc

SEQ ID NO: 156136 - DNA, 25 bp, Artificial
  probe
  misc_feature (1)..(25): SEQ ID NO: 3356; WAN024DFS_at; Start 27; Stop 51
agtcagccaacaaattcctaatcct

SEQ ID NO: 156137 - DNA, 25 bp, Artificial
  probe
  misc_feature (1)..(25): SEQ ID NO: 3356; WAN024DFS_at; Start 16; Stop 40
ttctacaatcaagtcagccaacaaa

SEQ ID NO: 156138 - DNA, 25 bp, Artificial
  probe
  misc_feature (1)..(25): SEQ ID NO: 3356; WAN024DFS_at; Start 20; Stop 44
acaatcaagtcagccaacaaattcc

SEQ ID NO: 156139 - DNA, 25 bp, Artificial
  probe
  misc_feature (1)..(25): SEQ ID NO: 3356; WAN024DFS_at; Start 13; Stop 37
acattctacaatcaagtcagccaac

SEQ ID NO: 156140 - DNA, 25 bp, Artificial
  probe
  misc_feature (1)..(25): SEQ ID NO: 3356; WAN024DFS_at; Start 31; Stop 55
agccaacaaattcctaatcctacgg

SEQ ID NO: 156141 - DNA, 25 bp, Artificial
  probe
  misc_feature (1)..(25): SEQ ID NO: 3356; WAN024DFS_at; Start 10; Stop 34
ttcacattctacaatcaagtcagcc

SEQ ID NO: 156142 - DNA, 25 bp, Artificial
  probe
  misc_feature (1)..(25): SEQ ID NO: 3356; WAN024DFS_at; Start 17; Stop 41
tctacaatcaagtcagccaacaaat

SEQ ID NO: 156143 - DNA, 25 bp, Artificial
  probe
  misc_feature (1)..(25): SEQ ID NO: 3356; WAN024DFS_at; Start 60; Stop 84
aaaccttgtctttgatatcttggac

SEQ ID NO: 156144 - DNA, 25 bp, Artificial
  probe
  misc_feature (1)..(25): SEQ ID NO: 3356; WAN024DFS_at; Start 3; Stop 27
gagtaaattcacattctacaatcaa

SEQ ID NO: 156145 - DNA, 25 bp, Artificial
  probe
  misc_feature (1)..(25): SEQ ID NO: 3356; WAN024DFS_at; Start 63; Stop 87
ccttgtctttgatatcttggacaag

SEQ ID NO: 156146 - DNA, 25 bp, Artificial
  probe
  misc_feature (1)..(25): SEQ ID NO: 3356; WAN024DFS_at; Start 6; Stop 30
taaattcacattctacaatcaagtc

SEQ ID NO: 156147 - DNA, 25 bp, Artificial
  probe
  misc_feature (1)..(25): SEQ ID NO: 3356; WAN024DFS_at; Start 22; Stop 46
aatcaagtcagccaacaaattccta

SEQ ID NO: 156148 - DNA, 25 bp, Artificial
  probe
  misc_feature (1)..(25): SEQ ID NO: 3356; WAN024DFS_at; Start 30; Stop 54
cagccaacaaattcctaatcctacg

SEQ ID NO: 156149 - DNA, 25 bp, Artificial
  probe
  misc_feature (1)..(25): SEQ ID NO: 3356; WAN024DFS_at; Start 61; Stop 85
aaccttgtctttgatatcttggaca

SEQ ID NO: 156150 - DNA, 25 bp, Artificial
  probe
  misc_feature (1)..(25): SEQ ID NO: 3356; WAN024DFS_at; Start 26; Stop 50
aagtcagccaacaaattcctaatcc

SEQ ID NO: 156151 - DNA, 25 bp, Artificial
  probe
  misc_feature (1)..(25): SEQ ID NO: 3356; WAN024DFS_at; Start 9; Stop 33
attcacattctacaatcaagtcagc

SEQ ID NO: 156152 - DNA, 25 bp, Artificial
  probe
  misc_feature (1)..(25): SEQ ID NO: 3356; WAN024DFS_at; Start 19; Stop 43
tacaatcaagtcagccaacaaattc

SEQ ID NO: 156153 - DNA, 25 bp, Artificial
  probe
  misc_feature (1)..(25): SEQ ID NO: 3356; WAN024DFS_at; Start 23; Stop 47
atcaagtcagccaacaaattcctaa

SEQ ID NO: 156154 - DNA, 25 bp, Artificial
  probe
  misc_feature (1)..(25): SEQ ID NO: 3356; WAN024DFS_at; Start 5; Stop 29
gtaaattcacattctacaatcaagt

SEQ ID NO: 156155 - DNA, 25 bp, Artificial
  probe
  misc_feature (1)..(25): SEQ ID NO: 3356; WAN024DFS_at; Start 14; Stop 38
cattctacaatcaagtcagccaaca

SEQ ID NO: 156156 - DNA, 25 bp, Artificial
  probe
  misc_feature (1)..(25): SEQ ID NO: 3356; WAN024DFS_at; Start 62; Stop 86
accttgtctttgatatcttggacaa

SEQ ID NO: 156157 - DNA, 25 bp, Artificial
  probe
  misc_feature (1)..(25): SEQ ID NO: 3356; WAN024DFS_at; Start 58; Stop 82
acaaaccttgtctttgatatcttgg

SEQ ID NO: 156158 - DNA, 25 bp, Artificial
  probe
  misc_feature (1)..(25): SEQ ID NO: 3356; WAN024DFS_at; Start 24; Stop 48
tcaagtcagccaacaaattcctaat

SEQ ID NO: 156159 - DNA, 25 bp, Artificial
  probe
  misc_feature (1)..(25): SEQ ID NO: 3356; WAN024DFS_at; Start 55; Stop 79
ggaacaaaccttgtctttgatatct

SEQ ID NO: 156160 - DNA, 25 bp, Artificial
  probe
  misc_feature (1)..(25): SEQ ID NO: 3356; WAN024DFS_at; Start 53; Stop 77
cgggaacaaaccttgtctttgatat

SEQ ID NO: 156161 - DNA, 25 bp, Artificial
  probe
  misc_feature (1)..(25): SEQ ID NO: 3356; WAN024DFS_at; Start 1; Stop 25
ctgagtaaattcacattctacaatc

SEQ ID NO: 156162 - DNA, 25 bp, Artificial
  probe
  misc_feature (1)..(25): SEQ ID NO: 3356; WAN024DFS_at; Start 8; Stop 32
aattcacattctacaatcaagtcag

SEQ ID NO: 156163 - DNA, 25 bp, Artificial
  probe
  misc_feature (1)..(25): SEQ ID NO: 3356; WAN024DFS_at; Start 11; Stop 35
tcacattctacaatcaagtcagcca

SEQ ID NO: 156164 - DNA, 25 bp, Artificial
  probe
  misc_feature (1)..(25): SEQ ID NO: 1477; WAN024DFT_at; Start 96; Stop 120
tgtctatggaatggctgttgtaacc

SEQ ID NO: 156165 - DNA, 25 bp, Artificial
  probe
  misc_feature (1)..(25): SEQ ID NO: 1477; WAN024DFT_at; Start 746; Stop 770
tcggtcatggttctggtccagtcaa

SEQ ID NO: 156166 - DNA, 25 bp, Artificial
  probe
  misc_feature (1)..(25): SEQ ID NO: 1477; WAN024DFT_at; Start 716; Stop 740
tcacaaaagctattcaagatgcccc

SEQ ID NO: 156167 - DNA, 25 bp, Artificial
  probe
  misc_feature (1)..(25): SEQ ID NO: 1477; WAN024DFT_at; Start 7; Stop 31
tatttacccgttgctttgaccattg

SEQ ID NO: 156168 - DNA, 25 bp, Artificial
  probe
  misc_feature (1)..(25): SEQ ID NO: 1477; WAN024DFT_at; Start 441; Stop 465
tggtttttcaatccatgaccccgaa

SEQ ID NO: 156169 - DNA, 25 bp, Artificial
  probe
  misc_feature (1)..(25): SEQ ID NO: 1477; WAN024DFT_at; Start 37; Stop 61
actgaccctagtggtggtgctggca

SEQ ID NO: 156170 - DNA, 25 bp, Artificial
  probe
  misc_feature (1)..(25): SEQ ID NO: 1477; WAN024DFT_at; Start 160; Stop 184
gagcacgtttctcctcaaatgttga

SEQ ID NO: 156171 - DNA, 25 bp, Artificial
  probe
  misc_feature (1)..(25): SEQ ID NO: 1477; WAN024DFT_at; Start 455; Stop 479
atgaccccgaagacatgcagcgtgc

SEQ ID NO: 156172 - DNA, 25 bp, Artificial
  probe
  misc_feature (1)..(25): SEQ ID NO: 1477; WAN024DFT_at; Start 627; Stop 651
tactggatgtacctttgctgcagtg

SEQ ID NO: 156173 - DNA, 25 bp, Artificial
  probe
  misc_feature (1)..(25): SEQ ID NO: 1477; WAN024DFT_at; Start 140; Stop 164
ccagaggtgttcagctaatcgagca

SEQ ID NO: 156174 - DNA, 25 bp, Artificial
  probe
  misc_feature (1)..(25): SEQ ID NO: 1477; WAN024DFT_at; Start 295; Stop 319
gattgtccctatgtccttgatcctg

SEQ ID NO: 156175 - DNA, 25 bp, Artificial
  probe
  misc_feature (1)..(25): SEQ ID NO: 1477; WAN024DFT_at; Start 21; Stop 45
tttgaccattgcagggactgaccct

SEQ ID NO: 156176 - DNA, 25 bp, Artificial
  probe
  misc_feature (1)..(25): SEQ ID NO: 1477; WAN024DFT_at; Start 175; Stop 199
caaatgttgaaagcccaattggaga

SEQ ID NO: 156177 - DNA, 25 bp, Artificial
  probe
  misc_feature (1)..(25): SEQ ID NO: 1477; WAN024DFT_at; Start 111; Stop 135
tgttgtaaccagtcttgtcgctcaa

SEQ ID NO: 156178 - DNA, 25 bp, Artificial
  probe
  misc_feature (1)..(25): SEQ ID NO: 1477; WAN024DFT_at; Start 477; Stop 501
tgctggtcgcctgattttaaaagaa

SEQ ID NO: 156179 - DNA, 25 bp, Artificial
  probe
  misc_feature (1)..(25): SEQ ID NO: 1477; WAN024DFT_at; Start 669; Stop 693
caagggcaagagtctttaccaggca

SEQ ID NO: 156180 - DNA, 25 bp, Artificial
  probe
  misc_feature (1)..(25): SEQ ID NO: 1477; WAN024DFT_at; Start 521; Stop 545
ttatcaaaggcggacatctcaaagg

SEQ ID NO: 156181 - DNA, 25 bp, Artificial
  probe
  misc_feature (1)..(25): SEQ ID NO: 1477; WAN024DFT_at; Start 511; Stop 535
cagtctgtggttatcaaaggcggac

SEQ ID NO: 156182 - DNA, 25 bp, Artificial
  probe
  misc_feature (1)..(25): SEQ ID NO: 1477; WAN024DFT_at; Start 650; Stop 674
tgattactgctgaactagccaaggg

SEQ ID NO: 156183 - DNA, 25 bp, Artificial
  probe
  misc_feature (1)..(25): SEQ ID NO: 1477; WAN024DFT_at; Start 234; Stop 258
aactggaatgttggctactactgaa

SEQ ID NO: 156184 - DNA, 25 bp, Artificial
  probe
  misc_feature (1)..(25): SEQ ID NO: 1477; WAN024DFT_at; Start 126; Stop 150
tgtcgctcaaaataccagaggtgtt

SEQ ID NO: 156185 - DNA, 25 bp, Artificial
  probe
  misc_feature (1)..(25): SEQ ID NO: 1477; WAN024DFT_at; Start 321; Stop 345
tatggttgctacaagtggagatgcc

SEQ ID NO: 156186 - DNA, 25 bp, Artificial
  probe
  misc_feature (1)..(25): SEQ ID NO: 1477; WAN024DFT_at; Start 685; Stop 709
taccaggcagttgataaggccaagg

SEQ ID NO: 156187 - DNA, 25 bp, Artificial
  probe
  misc_feature (1)..(25): SEQ ID NO: 1477; WAN024DFT_at; Start 405; Stop 429
tattacgccaaatcttcctgaagca

SEQ ID NO: 156188 - DNA, 25 bp, Artificial
  probe
  misc_feature (1)..(25): SEQ ID NO: 1477; WAN024DFT_at; Start 567; Stop 591
taccaagaatgaacaatttgtctgg

SEQ ID NO: 156189 - DNA, 25 bp, Artificial
  probe
  misc_feature (1)..(25): SEQ ID NO: 1477; WAN024DFT_at; Start 731; Stop 755
aagatgcccctcaactcggtcatgg

SEQ ID NO: 156190 - DNA, 25 bp, Artificial
  probe
  misc_feature (1)..(25): SEQ ID NO: 1477; WAN024DFT_at; Start 66; Stop 90
ggcagatttaaagtcattccaagcg

SEQ ID NO: 156191 - DNA, 25 bp, Artificial
  probe
  misc_feature (1)..(25): SEQ ID NO: 1477; WAN024DFT_at; Start 80; Stop 104
cattccaagcgagagatgtctatgg

SEQ ID NO: 156192 - DNA, 25 bp, Artificial
  probe
  misc_feature (1)..(25): SEQ ID NO: 1477; WAN024DFT_at; Start 217; Stop 241
ccacctcaggctgtaaaaactggaa

SEQ ID NO: 156193 - DNA, 25 bp, Artificial
  probe
  misc_feature (1)..(25): SEQ ID NO: 1477; WAN024DFT_at; Start 701; Stop 725
aggccaaggcctttatcacaaaagc

SEQ ID NO: 156194 - DNA, 25 bp, Artificial
  probe
  misc_feature (1)..(25): SEQ ID NO: 1477; WAN024DFT_at; Start 496; Stop 520
aaagaatttggtcctcagtctgtgg

SEQ ID NO: 156195 - DNA, 25 bp, Artificial
  probe
  misc_feature (1)..(25): SEQ ID NO: 1477; WAN024DFT_at; Start 587; Stop 611
tctgggaaagcccacgaattcaaac

SEQ ID NO: 156196 - DNA, 25 bp, Artificial
  probe
  misc_feature (1)..(25): SEQ ID NO: 1477; WAN024DFT_at; Start 420; Stop 444
tcctgaagcagaagagattgttggt

SEQ ID NO: 156197 - DNA, 25 bp, Artificial
  probe
  misc_feature (1)..(25): SEQ ID NO: 1477; WAN024DFT_at; Start 602; Stop 626
gaattcaaacctgtcacacccatgg

SEQ ID NO: 156198 - DNA, 25 bp, Artificial
  probe
  misc_feature (1)..(25): SEQ ID NO: 3079; WAN024DFU_at; Start 605; Stop 629
ctgttcgggaaatgagtgaacaata

SEQ ID NO: 156199 - DNA, 25 bp, Artificial
  probe
  misc_feature (1)..(25): SEQ ID NO: 3079; WAN024DFU_at; Start 500; Stop 524
caattggtgggatacagacgaaaca

SEQ ID NO: 156200 - DNA, 25 bp, Artificial
  probe
  misc_feature (1)..(25): SEQ ID NO: 3079; WAN024DFU_at; Start 308; Stop 332
tgatgccagataaaataattggtct

SEQ ID NO: 156201 - DNA, 25 bp, Artificial
  probe
  misc_feature (1)..(25): SEQ ID NO: 3079; WAN024DFU_at; Start 365; Stop 389
caaaagttgaatatgtagattatgt

SEQ ID NO: 156202 - DNA, 25 bp, Artificial
  probe
  misc_feature (1)..(25): SEQ ID NO: 3079; WAN024DFU_at; Start 602; Stop 626
aaactgttcgggaaatgagtgaaca

SEQ ID NO: 156203 - DNA, 25 bp, Artificial
  probe
  misc_feature (1)..(25): SEQ ID NO: 3079; WAN024DFU_at; Start 256; Stop 280
gatggcgtacatgtaggtcaagatg

SEQ ID NO: 156204 - DNA, 25 bp, Artificial
  probe
  misc_feature (1)..(25): SEQ ID NO: 3079; WAN024DFU_at; Start 514; Stop 538
cagacgaaacatattaaagacatta

SEQ ID NO: 156205 - DNA, 25 bp, Artificial
  probe
  misc_feature (1)..(25): SEQ ID NO: 3079; WAN024DFU_at; Start 70; Stop 94
tatacagtcgttgaggaagccttaa

SEQ ID NO: 156206 - DNA, 25 bp, Artificial
  probe
  misc_feature (1)..(25): SEQ ID NO: 3079; WAN024DFU_at; Start 265; Stop 289
catgtaggtcaagatgatattggtg

SEQ ID NO: 156207 - DNA, 25 bp, Artificial
  probe
  misc_feature (1)..(25): SEQ ID NO: 3079; WAN024DFU_at; Start 313; Stop 337
ccagataaaataattggtctttcta

SEQ ID NO: 156208 - DNA, 25 bp, Artificial
  probe
  misc_feature (1)..(25): SEQ ID NO: 3079; WAN024DFU_at; Start 154; Stop 178
gaaaaacttgagctagctatccaaa

SEQ ID NO: 156209 - DNA, 25 bp, Artificial
  probe
  misc_feature (1)..(25): SEQ ID NO: 3079; WAN024DFU_at; Start 274; Stop 298
caagatgatattggtgttgatgaaa

SEQ ID NO: 156210 - DNA, 25 bp, Artificial
  probe
  misc_feature (1)..(25): SEQ ID NO: 3079; WAN024DFU_at; Start 583; Stop 607
tatgcaaaaaatatagaaaaaactg

SEQ ID NO: 156211 - DNA, 25 bp, Artificial
  probe
  misc_feature (1)..(25): SEQ ID NO: 3079; WAN024DFU_at; Start 505; Stop 529
ggtgggatacagacgaaacatatta

SEQ ID NO: 156212 - DNA, 25 bp, Artificial
  probe
  misc_feature (1)..(25): SEQ ID NO: 3079; WAN024DFU_at; Start 162; Stop 186
tgagctagctatccaaattaaagaa

SEQ ID NO: 156213 - DNA, 25 bp, Artificial
  probe
  misc_feature (1)..(25): SEQ ID NO: 3079; WAN024DFU_at; Start 467; Stop 491
tgagaaaactattgccacaaatgcc

SEQ ID NO: 156214 - DNA, 25 bp, Artificial
  probe
  misc_feature (1)..(25): SEQ ID NO: 3079; WAN024DFU_at; Start 563; Stop 587
caatcatttcggcaatatcgtatgc

SEQ ID NO: 156215 - DNA, 25 bp, Artificial
  probe
  misc_feature (1)..(25): SEQ ID NO: 3079; WAN024DFU_at; Start 101; Stop 125
gtataaccttatttcaatttcgaga

SEQ ID NO: 156216 - DNA, 25 bp, Artificial
  probe
  misc_feature (1)..(25): SEQ ID NO: 3079; WAN024DFU_at; Start 35; Stop 59
tttgtggaacgactacttgccaagg

SEQ ID NO: 156217 - DNA, 25 bp, Artificial
  probe
  misc_feature (1)..(25): SEQ ID NO: 3079; WAN024DFU_at; Start 52; Stop 76
tgccaaggaaaaaatctatatacag

SEQ ID NO: 156218 - DNA, 25 bp, Artificial
  probe
  misc_feature (1)..(25): SEQ ID NO: 3079; WAN024DFU_at; Start 111; Stop 135
atttcaatttcgagaaaaaggtgag

SEQ ID NO: 156219 - DNA, 25 bp, Artificial
  probe
  misc_feature (1)..(25): SEQ ID NO: 3079; WAN024DFU_at; Start 169; Stop 193
gctatccaaattaaagaactttgta

SEQ ID NO: 156220 - DNA, 25 bp, Artificial
  probe
  misc_feature (1)..(25): SEQ ID NO: 3079; WAN024DFU_at; Start 148; Stop 172
ggcttagaaaaacttgagctagcta

SEQ ID NO: 156221 - DNA, 25 bp, Artificial
  probe
  misc_feature (1)..(25): SEQ ID NO: 3079; WAN024DFU_at; Start 31; Stop 55
tttatttgtggaacgactacttgcc

SEQ ID NO: 156222 - DNA, 25 bp, Artificial
  probe
  misc_feature (1)..(25): SEQ ID NO: 3079; WAN024DFU_at; Start 24; Stop 48
actatattttatttgtggaacgact

SEQ ID NO: 156223 - DNA, 25 bp, Artificial
  probe
  misc_feature (1)..(25): SEQ ID NO: 3079; WAN024DFU_at; Start 556; Stop 580
ggcgtttcaatcatttcggcaatat

SEQ ID NO: 156224 - DNA, 25 bp, Artificial
  probe
  misc_feature (1)..(25): SEQ ID NO: 3079; WAN024DFU_at; Start 349; Stop 373
gaagaatttcaacaatcaaaagttg

SEQ ID NO: 156225 - DNA, 25 bp, Artificial
  probe
  misc_feature (1)..(25): SEQ ID NO: 3079; WAN024DFU_at; Start 292; Stop 316
gatgaaattagaaaattgatgccag

SEQ ID NO: 156226 - DNA, 25 bp, Artificial
  probe
  misc_feature (1)..(25): SEQ ID NO: 3079; WAN024DFU_at; Start 66; Stop 90
tctatatacagtcgttgaggaagcc

SEQ ID NO: 156227 - DNA, 25 bp, Artificial
  probe
  misc_feature (1)..(25): SEQ ID NO: 3079; WAN024DFU_at; Start 142; Stop 166
ttagaaggcttagaaaaacttgagc

SEQ ID NO: 156228 - DNA, 25 bp, Artificial
  probe
  misc_feature (1)..(25): SEQ ID NO: 3079; WAN024DFU_at; Start 39; Stop 63
tggaacgactacttgccaaggaaaa

SEQ ID NO: 156229 - DNA, 25 bp, Artificial
  probe
  misc_feature (1)..(25): SEQ ID NO: 3079; WAN024DFU_at; Start 494; Stop 518
tagttgcaattggtgggatacagac

SEQ ID NO: 156230 - DNA, 25 bp, Artificial
  probe
  misc_feature (1)..(25): SEQ ID NO: 3079; WAN024DFU_at; Start 45; Stop 69
gactacttgccaaggaaaaaatcta

SEQ ID NO: 156231 - DNA, 25 bp, Artificial
  probe
  misc_feature (1)..(25): SEQ ID NO: 3079; WAN024DFU_at; Start 567; Stop 591
catttcggcaatatcgtatgcaaaa

SEQ ID NO: 156232 - DNA, 25 bp, Artificial
  probe
  misc_feature (1)..(25): SEQ ID NO: 2931; WAN024DFV_at; Start 692; Stop 716
cgcaaaccaaacgagcccaggaatt

SEQ ID NO: 156233 - DNA, 25 bp, Artificial
  probe
  misc_feature (1)..(25): SEQ ID NO: 2931; WAN024DFV_at; Start 495; Stop 519
cgaggtgactgcttcgctggatcca

SEQ ID NO: 156234 - DNA, 25 bp, Artificial
  probe
  misc_feature (1)..(25): SEQ ID NO: 2931; WAN024DFV_at; Start 392; Stop 416
tggataaacaacatagctttgcccg

SEQ ID NO: 156235 - DNA, 25 bp, Artificial
  probe
  misc_feature (1)..(25): SEQ ID NO: 2931; WAN024DFV_at; Start 144; Stop 168
tcgttgcctcaacggcttagaaagt

SEQ ID NO: 156236 - DNA, 25 bp, Artificial
  probe
  misc_feature (1)..(25): SEQ ID NO: 2931; WAN024DFV_at; Start 560; Stop 584
cccaagaaggccgtaccatgatttt

SEQ ID NO: 156237 - DNA, 25 bp, Artificial
  probe
  misc_feature (1)..(25): SEQ ID NO: 2931; WAN024DFV_at; Start 240; Stop 264
ccaaaagattggcatggtctttcaa

SEQ ID NO: 156238 - DNA, 25 bp, Artificial
  probe
  misc_feature (1)..(25): SEQ ID NO: 2931; WAN024DFV_at; Start 478; Stop 502
gaaatcatcctttttgacgaggtga

SEQ ID NO: 156239 - DNA, 25 bp, Artificial
  probe
  misc_feature (1)..(25): SEQ ID NO: 2931; WAN024DFV_at; Start 640; Stop 664
gaccaagggaaaatcgctgaagaag

SEQ ID NO: 156240 - DNA, 25 bp, Artificial
  probe
  misc_feature (1)..(25): SEQ ID NO: 2931; WAN024DFV_at; Start 339; Stop 363
caagaaagaagtaacggaagaagct

SEQ ID NO: 156241 - DNA, 25 bp, Artificial
  probe
  misc_feature (1)..(25): SEQ ID NO: 2931; WAN024DFV_at; Start 672; Stop 696
tcaagccttctttaccaatccgcaa

SEQ ID NO: 156242 - DNA, 25 bp, Artificial
  probe
  misc_feature (1)..(25): SEQ ID NO: 2931; WAN024DFV_at; Start 379; Stop 403
cgtgtcggtttgctggataaacaac

SEQ ID NO: 156243 - DNA, 25 bp, Artificial
  probe
  misc_feature (1)..(25): SEQ ID NO: 2931; WAN024DFV_at; Start 35; Stop 59
aaaaatccttcggagacaatcccat

SEQ ID NO: 156244 - DNA, 25 bp, Artificial
  probe
  misc_feature (1)..(25): SEQ ID NO: 2931; WAN024DFV_at; Start 4; Stop 28
tctgaaactatcttagaaatcaagg

SEQ ID NO: 156245 - DNA, 25 bp, Artificial
  probe
  misc_feature (1)..(25): SEQ ID NO: 2931; WAN024DFV_at; Start 571; Stop 595
cgtaccatgattttagtaacccacg

SEQ ID NO: 156246 - DNA, 25 bp, Artificial
  probe
  misc_feature (1)..(25): SEQ ID NO: 2931; WAN024DFV_at; Start 627; Stop 651
gattatcttcctcgaccaagggaaa

SEQ ID NO: 156247 - DNA, 25 bp, Artificial
  probe
  misc_feature (1)..(25): SEQ ID NO: 2931; WAN024DFV_at; Start 527; Stop 551
tgcgtgaggtgctggaacttatcaa

SEQ ID NO: 156248 - DNA, 25 bp, Artificial
  probe
  misc_feature (1)..(25): SEQ ID NO: 2931; WAN024DFV_at; Start 350; Stop 374
taacggaagaagctttgcaattact

SEQ ID NO: 156249 - DNA, 25 bp, Artificial
  probe
  misc_feature (1)..(25): SEQ ID NO: 2931; WAN024DFV_at; Start 283; Stop 307
catctggatgtcttacaaaacctca

SEQ ID NO: 156250 - DNA, 25 bp, Artificial
  probe
  misc_feature (1)..(25): SEQ ID NO: 2931; WAN024DFV_at; Start 158; Stop 182
gcttagaaagtattcaaggtggaga

SEQ ID NO: 156251 - DNA, 25 bp, Artificial
  probe
  misc_feature (1)..(25): SEQ ID NO: 2931; WAN024DFV_at; Start 407; Stop 431
gctttgcccgtcaattatctggtgg

SEQ ID NO: 156252 - DNA, 25 bp, Artificial
  probe
  misc_feature (1)..(25): SEQ ID NO: 2931; WAN024DFV_at; Start 226; Stop 250
tttcacctagttcgccaaaagattg

SEQ ID NO: 156253 - DNA, 25 bp, Artificial
  probe
  misc_feature (1)..(25): SEQ ID NO: 2931; WAN024DFV_at; Start 296; Stop 320
tacaaaacctcatcctaggccctat

SEQ ID NO: 156254 - DNA, 25 bp, Artificial
  probe
  misc_feature (1)..(25): SEQ ID NO: 2931; WAN024DFV_at; Start 655; Stop 679
gctgaagaaggaacagctcaagcct

SEQ ID NO: 156255 - DNA, 25 bp, Artificial
  probe
  misc_feature (1)..(25): SEQ ID NO: 2931; WAN024DFV_at; Start 47; Stop 71
gagacaatcccatcctccaaggact

SEQ ID NO: 156256 - DNA, 25 bp, Artificial
  probe
  misc_feature (1)..(25): SEQ ID NO: 2931; WAN024DFV_at; Start 447; Stop 471
tgcaattgtccgtgccctcctaatg

SEQ ID NO: 156257 - DNA, 25 bp, Artificial
  probe
  misc_feature (1)..(25): SEQ ID NO: 2931; WAN024DFV_at; Start 60; Stop 84
cctccaaggactttctctagaaatc

SEQ ID NO: 156258 - DNA, 25 bp, Artificial
  probe
  misc_feature (1)..(25): SEQ ID NO: 2931; WAN024DFV_at; Start 592; Stop 616
cacgaaatgcagtttgcccaagcca

SEQ ID NO: 156259 - DNA, 25 bp, Artificial
  probe
  misc_feature (1)..(25): SEQ ID NO: 2931; WAN024DFV_at; Start 584; Stop 608
tagtaacccacgaaatgcagtttgc

SEQ ID NO: 156260 - DNA, 25 bp, Artificial
  probe
  misc_feature (1)..(25): SEQ ID NO: 2931; WAN024DFV_at; Start 460; Stop 484
gccctcctaatgcatccagaaatca

SEQ ID NO: 156261 - DNA, 25 bp, Artificial
  probe
  misc_feature (1)..(25): SEQ ID NO: 2931; WAN024DFV_at; Start 417; Stop 441
tcaattatctggtggacagaagcaa

SEQ ID NO: 156262 - DNA, 25 bp, Artificial
  probe
  misc_feature (1)..(25): SEQ ID NO: 2931; WAN024DFV_at; Start 509; Stop 533
cgctggatccagaaatggtgcgtga

SEQ ID NO: 156263 - DNA, 25 bp, Artificial
  probe
  misc_feature (1)..(25): SEQ ID NO: 2931; WAN024DFV_at; Start 433; Stop 457
cagaagcaacgtgttgcaattgtcc

SEQ ID NO: 156264 - DNA, 25 bp, Artificial
  probe
  misc_feature (1)..(25): SEQ ID NO: 2931; WAN024DFV_at; Start 268; Stop 292
tatgaactctttccccatctggatg

SEQ ID NO: 156265 - DNA, 25 bp, Artificial
  probe
  misc_feature (1)..(25): SEQ ID NO: 2931; WAN024DFV_at; Start 189; Stop 213
tctggatggtcagtctatcgttgaa

SEQ ID NO: 156266 - DNA, 25 bp, Artificial
  probe
  misc_feature (1)..(25): SEQ ID NO: 1245; WAN024DFW_at; Start 509; Stop 533
tgagaacattgtttagaaagctctc

SEQ ID NO: 156267 - DNA, 25 bp, Artificial
  probe
  misc_feature (1)..(25): SEQ ID NO: 1245; WAN024DFW_at; Start 493; Stop 517
tcaagtgtagaaaatatgagaacat

SEQ ID NO: 156268 - DNA, 25 bp, Artificial
  probe
  misc_feature (1)..(25): SEQ ID NO: 1245; WAN024DFW_at; Start 91; Stop 115
gaaattataggaattactggtgcga

SEQ ID NO: 156269 - DNA, 25 bp, Artificial
  probe
  misc_feature (1)..(25): SEQ ID NO: 1245; WAN024DFW_at; Start 203; Stop 227
ttgttcctgagagaaaaattccagc

SEQ ID NO: 156270 - DNA, 25 bp, Artificial
  probe
  misc_feature (1)..(25): SEQ ID NO: 1245; WAN024DFW_at; Start 574; Stop 598
gaagaggatattcgtatcttatgtg

SEQ ID NO: 156271 - DNA, 25 bp, Artificial
  probe
  misc_feature (1)..(25): SEQ ID NO: 1245; WAN024DFW_at; Start 160; Stop 184
tatagtccgtcttatggagaagtgt

SEQ ID NO: 156272 - DNA, 25 bp, Artificial
  probe
  misc_feature (1)..(25): SEQ ID NO: 1245; WAN024DFW_at; Start 468; Stop 492
tgaacctatgaatgccttggataaa

SEQ ID NO: 156273 - DNA, 25 bp, Artificial
  probe
  misc_feature (1)..(25): SEQ ID NO: 1245; WAN024DFW_at; Start 524; Stop 548
gaaagctctctagtgaaaaagggac

SEQ ID NO: 156274 - DNA, 25 bp, Artificial
  probe
  misc_feature (1)..(25): SEQ ID NO: 1245; WAN024DFW_at; Start 481; Stop 505
gccttggataaatcaagtgtagaaa

SEQ ID NO: 156275 - DNA, 25 bp, Artificial
  probe
  misc_feature (1)..(25): SEQ ID NO: 1245; WAN024DFW_at; Start 337; Stop 361
aatgatacactgaaaatagttggtc

SEQ ID NO: 156276 - DNA, 25 bp, Artificial
  probe
  misc_feature (1)..(25): SEQ ID NO: 1245; WAN024DFW_at; Start 610; Stop 634
gcaatagaagataaagtatgtacac

SEQ ID NO: 156277 - DNA, 25 bp, Artificial
  probe
  misc_feature (1)..(25): SEQ ID NO: 1245; WAN024DFW_at; Start 545; Stop 569
ggacaacaattttgattgctagtca

SEQ ID NO: 156278 - DNA, 25 bp, Artificial
  probe
  misc_feature (1)..(25): SEQ ID NO: 1245; WAN024DFW_at; Start 441; Stop 465
ggagaatccctctattcttttacta

SEQ ID NO: 156279 - DNA, 25 bp, Artificial
  probe
  misc_feature (1)..(25): SEQ ID NO: 1245; WAN024DFW_at; Start 302; Stop 326
caagcatacgaggagtagttggtaa

SEQ ID NO: 156280 - DNA, 25 bp, Artificial
  probe
  misc_feature (1)..(25): SEQ ID NO: 1245; WAN024DFW_at; Start 619; Stop 643
gataaagtatgtacactgtgttcag

SEQ ID NO: 156281 - DNA, 25 bp, Artificial
  probe
  misc_feature (1)..(25): SEQ ID NO: 1245; WAN024DFW_at; Start 364; Stop 388
tatgagcaaaaagaccagaaagtta

SEQ ID NO: 156282 - DNA, 25 bp, Artificial
  probe
  misc_feature (1)..(25): SEQ ID NO: 1245; WAN024DFW_at; Start 401; Stop 425
taggtatgaggaaaaagctagggat

SEQ ID NO: 156283 - DNA, 25 bp, Artificial
  probe
  misc_feature (1)..(25): SEQ ID NO: 1245; WAN024DFW_at; Start 348; Stop 372
gaaaatagttggtctatatgagcaa

SEQ ID NO: 156284 - DNA, 25 bp, Artificial
  probe
  misc_feature (1)..(25): SEQ ID NO: 1245; WAN024DFW_at; Start 292; Stop 316
caatatttggcaagcatacgaggag

SEQ ID NO: 156285 - DNA, 25 bp, Artificial
  probe
  misc_feature (1)..(25): SEQ ID NO: 1245; WAN024DFW_at; Start 411; Stop 435
gaaaaagctagggattgctcaagca

SEQ ID NO: 156286 - DNA, 25 bp, Artificial
  probe
  misc_feature (1)..(25): SEQ ID NO: 1245; WAN024DFW_at; Start 102; Stop 126
aattactggtgcgaatggctcaggg

SEQ ID NO: 156287 - DNA, 25 bp, Artificial
  probe
  misc_feature (1)..(25): SEQ ID NO: 1245; WAN024DFW_at; Start 215; Stop 239
gaaaaattccagctaatttgggagc

SEQ ID NO: 156288 - DNA, 25 bp, Artificial
  probe
  misc_feature (1)..(25): SEQ ID NO: 1245; WAN024DFW_at; Start 324; Stop 348
taatcaggaaatcaatgatacactg

SEQ ID NO: 156289 - DNA, 25 bp, Artificial
  probe
  misc_feature (1)..(25): SEQ ID NO: 1245; WAN024DFW_at; Start 271; Stop 295
tatagtggctttaagaatttacaat

SEQ ID NO: 156290 - DNA, 25 bp, Artificial
  probe
  misc_feature (1)..(25): SEQ ID NO: 1245; WAN024DFW_at; Start 112; Stop 136
gcgaatggctcagggaaaagtgtat

SEQ ID NO: 156291 - DNA, 25 bp, Artificial
  probe
  misc_feature (1)..(25): SEQ ID NO: 1245; WAN024DFW_at; Start 426; Stop 450
tgctcaagcaattatggagaatccc

SEQ ID NO: 156292 - DNA, 25 bp, Artificial
  probe
  misc_feature (1)..(25): SEQ ID NO: 1245; WAN024DFW_at; Start 388; Stop 412
aaaacttattcgctaggtatgagga

SEQ ID NO: 156293 - DNA, 25 bp, Artificial
  probe
  misc_feature (1)..(25): SEQ ID NO: 1245; WAN024DFW_at; Start 314; Stop 338
gagtagttggtaatcaggaaatcaa

SEQ ID NO: 156294 - DNA, 25 bp, Artificial
  probe
  misc_feature (1)..(25): SEQ ID NO: 1245; WAN024DFW_at; Start 456; Stop 480
tcttttactagatgaacctatgaat

SEQ ID NO: 156295 - DNA, 25 bp, Artificial
  probe
  misc_feature (1)..(25): SEQ ID NO: 1245; WAN024DFW_at; Start 530; Stop 554
tctctagtgaaaaagggacaacaat

SEQ ID NO: 156296 - DNA, 25 bp, Artificial
  probe
  misc_feature (1)..(25): SEQ ID NO: 1245; WAN024DFW_at; Start 146; Stop 170
taatagctggtttatatagtccgtc

SEQ ID NO: 156297 - DNA, 25 bp, Artificial
  probe
  misc_feature (1)..(25): SEQ ID NO: 1245; WAN024DFW_at; Start 233; Stop 257
tgggagctttgattgaagaacctgg

SEQ ID NO: 156298 - DNA, 25 bp, Artificial
  probe
  misc_feature (1)..(25): SEQ ID NO: 1245; WAN024DFW_at; Start 595; Stop 619
tgtgataaagtatatgcaatagaag

SEQ ID NO: 156299 - DNA, 25 bp, Artificial
  probe
  misc_feature (1)..(25): SEQ ID NO: 1245; WAN024DFW_at; Start 166; Stop 190
ccgtcttatggagaagtgttaatca

SEQ ID NO: 156300 - DNA, 25 bp, Artificial
  probe
  misc_feature (1)..(25): SEQ ID NO: 5437; WAN024DFX_at; Start 115; Stop 139
tggttagaaggaaatgatagacttg

SEQ ID NO: 156301 - DNA, 25 bp, Artificial
  probe
  misc_feature (1)..(25): SEQ ID NO: 5437; WAN024DFX_at; Start 463; Stop 487
tgctttatgttatacgcactaggag

SEQ ID NO: 156302 - DNA, 25 bp, Artificial
  probe
  misc_feature (1)..(25): SEQ ID NO: 5437; WAN024DFX_at; Start 11; Stop 35
gaaagttaagtagtcacatgtggag

SEQ ID NO: 156303 - DNA, 25 bp, Artificial
  probe
  misc_feature (1)..(25): SEQ ID NO: 5437; WAN024DFX_at; Start 45; Stop 69
gataatctataccaagtacttttgg

SEQ ID NO: 156304 - DNA, 25 bp, Artificial
  probe
  misc_feature (1)..(25): SEQ ID NO: 5437; WAN024DFX_at; Start 494; Stop 518
tacaaatgaactttgcttgcgttag

SEQ ID NO: 156305 - DNA, 25 bp, Artificial
  probe
  misc_feature (1)..(25): SEQ ID NO: 5437; WAN024DFX_at; Start 325; Stop 349
tggacctgttttctttatggactca

SEQ ID NO: 156306 - DNA, 25 bp, Artificial
  probe
  misc_feature (1)..(25): SEQ ID NO: 5437; WAN024DFX_at; Start 295; Stop 319
tctattaagctctggattaggtatc

SEQ ID NO: 156307 - DNA, 25 bp, Artificial
  probe
  misc_feature (1)..(25): SEQ ID NO: 5437; WAN024DFX_at; Start 430; Stop 454
gattctttgaatgcttgtgtgttag

SEQ ID NO: 156308 - DNA, 25 bp, Artificial
  probe
  misc_feature (1)..(25): SEQ ID NO: 5437; WAN024DFX_at; Start 101; Stop 125
taggattatggtattggttagaagg

SEQ ID NO: 156309 - DNA, 25 bp, Artificial
  probe
  misc_feature (1)..(25): SEQ ID NO: 5437; WAN024DFX_at; Start 269; Stop 293
tctttatggaagtgattcgattttc

SEQ ID NO: 156310 - DNA, 25 bp, Artificial
  probe
  misc_feature (1)..(25): SEQ ID NO: 5437; WAN024DFX_at; Start 227; Stop 251
cattttttctagcagttgtatatcg

SEQ ID NO: 156311 - DNA, 25 bp, Artificial
  probe
  misc_feature (1)..(25): SEQ ID NO: 5437; WAN024DFX_at; Start 669; Stop 693
ctatttcactcgtcaaaagaggagg

SEQ ID NO: 156312 - DNA, 25 bp, Artificial
  probe
  misc_feature (1)..(25): SEQ ID NO: 5437; WAN024DFX_at; Start 185; Stop 209
tagtcttatctatatggttgcttca

SEQ ID NO: 156313 - DNA, 25 bp, Artificial
  probe
  misc_feature (1)..(25): SEQ ID NO: 5437; WAN024DFX_at; Start 204; Stop 228
gcttcattggtttattattcataca

SEQ ID NO: 156314 - DNA, 25 bp, Artificial
  probe
  misc_feature (1)..(25): SEQ ID NO: 5437; WAN024DFX_at; Start 527; Stop 551
tactcatgattgtgtttggtggtct

SEQ ID NO: 156315 - DNA, 25 bp, Artificial
  probe
  misc_feature (1)..(25): SEQ ID NO: 5437; WAN024DFX_at; Start 241; Stop 265
gttgtatatcgtagaagagcatccg

SEQ ID NO: 156316 - DNA, 25 bp, Artificial
  probe
  misc_feature (1)..(25): SEQ ID NO: 5437; WAN024DFX_at; Start 481; Stop 505
ctaggagcgaatgtacaaatgaact

SEQ ID NO: 156317 - DNA, 25 bp, Artificial
  probe
  misc_feature (1)..(25): SEQ ID NO: 5437; WAN024DFX_at; Start 286; Stop 310
cgattttcttctattaagctctgga

SEQ ID NO: 156318 - DNA, 25 bp, Artificial
  probe
  misc_feature (1)..(25): SEQ ID NO: 5437; WAN024DFX_at; Start 152; Stop 176
taaaagggcctaatctgagtcaaaa

SEQ ID NO: 156319 - DNA, 25 bp, Artificial
  probe
  misc_feature (1)..(25): SEQ ID NO: 5437; WAN024DFX_at; Start 256; Stop 280
agagcatccgatttctttatggaag

SEQ ID NO: 156320 - DNA, 25 bp, Artificial
  probe
  misc_feature (1)..(25): SEQ ID NO: 5437; WAN024DFX_at; Start 340; Stop 364
tatggactcattttaatcatggtaa

SEQ ID NO: 156321 - DNA, 25 bp, Artificial
  probe
  misc_feature (1)..(25): SEQ ID NO: 5437; WAN024DFX_at; Start 391; Stop 415
cagttaccaaactgggatataggag

SEQ ID NO: 156322 - DNA, 25 bp, Artificial
  probe
  misc_feature (1)..(25): SEQ ID NO: 5437; WAN024DFX_at; Start 306; Stop 330
ctggattaggtatcagatttggacc

SEQ ID NO: 156323 - DNA, 25 bp, Artificial
  probe
  misc_feature (1)..(25): SEQ ID NO: 5437; WAN024DFX_at; Start 613; Stop 637
ggacgagatttatttcttcagttgc

SEQ ID NO: 156324 - DNA, 25 bp, Artificial
  probe
  misc_feature (1)..(25): SEQ ID NO: 5437; WAN024DFX_at; Start 675; Stop 699
cactcgtcaaaagaggaggtttata

SEQ ID NO: 156325 - DNA, 25 bp, Artificial
  probe
  misc_feature (1)..(25): SEQ ID NO: 5437; WAN024DFX_at; Start 583; Stop 607
tatattttgaatcgagggaatggag

SEQ ID NO: 156326 - DNA, 25 bp, Artificial
  probe
  misc_feature (1)..(25): SEQ ID NO: 5437; WAN024DFX_at; Start 547; Stop 571
ggtctatttgtaggaaatcgaacta

SEQ ID NO: 156327 - DNA, 25 bp, Artificial
  probe
  misc_feature (1)..(25): SEQ ID NO: 5437; WAN024DFX_at; Start 600; Stop 624
gaatggagatataggacgagattta

SEQ ID NO: 156328 - DNA, 25 bp, Artificial
  probe
  misc_feature (1)..(25): SEQ ID NO: 5437; WAN024DFX_at; Start 357; Stop 381
catggtaaaagttctagtgattcaa

SEQ ID NO: 156329 - DNA, 25 bp, Artificial
  probe
  misc_feature (1)..(25): SEQ ID NO: 5437; WAN024DFX_at; Start 4; Stop 28
gaaatgggaaagttaagtagtcaca

SEQ ID NO: 156330 - DNA, 25 bp, Artificial
  probe
  misc_feature (1)..(25): SEQ ID NO: 5437; WAN024DFX_at; Start 375; Stop 399
gattcaatttatgttacagttacca

SEQ ID NO: 156331 - DNA, 25 bp, Artificial
  probe
  misc_feature (1)..(25): SEQ ID NO: 5437; WAN024DFX_at; Start 512; Stop 536
gcgttagtttctttttactcatgat

SEQ ID NO: 156332 - DNA, 25 bp, Artificial
  probe
  misc_feature (1)..(25): SEQ ID NO: 5437; WAN024DFX_at; Start 473; Stop 497
tatacgcactaggagcgaatgtaca

SEQ ID NO: 156333 - DNA, 25 bp, Artificial
  probe
  misc_feature (1)..(25): SEQ ID NO: 5437; WAN024DFX_at; Start 25; Stop 49
cacatgtggaggttgaatcagataa

SEQ ID NO: 156334 - DNA, 25 bp, Artificial
  probe
  misc_feature (1)..(25): SEQ ID NO: 5867; WAN024DFY_at; Start 103; Stop 127
tattttatattactgctatcctgtg

SEQ ID NO: 156335 - DNA, 25 bp, Artificial
  probe
  misc_feature (1)..(25): SEQ ID NO: 5867; WAN024DFY_at; Start 190; Stop 214
gaatggatcttagttttacttcaag

SEQ ID NO: 156336 - DNA, 25 bp, Artificial
  probe
  misc_feature (1)..(25): SEQ ID NO: 5867; WAN024DFY_at; Start 166; Stop 190
tattcaatccatccaaatgtattag

SEQ ID NO: 156337 - DNA, 25 bp, Artificial
  probe
  misc_feature (1)..(25): SEQ ID NO: 5867; WAN024DFY_at; Start 745; Stop 769
ctatctatcataattccattgactg

SEQ ID NO: 156338 - DNA, 25 bp, Artificial
  probe
  misc_feature (1)..(25): SEQ ID NO: 5867; WAN024DFY_at; Start 699; Stop 723
tatggtaaattccaatccgtatgca

SEQ ID NO: 156339 - DNA, 25 bp, Artificial
  probe
  misc_feature (1)..(25): SEQ ID NO: 5867; WAN024DFY_at; Start 153; Stop 177
gcgctgtcgccaatattcaatccat

SEQ ID NO: 156340 - DNA, 25 bp, Artificial
  probe
  misc_feature (1)..(25): SEQ ID NO: 5867; WAN024DFY_at; Start 140; Stop 164
cagtatatttattgcgctgtcgcca

SEQ ID NO: 156341 - DNA, 25 bp, Artificial
  probe
  misc_feature (1)..(25): SEQ ID NO: 5867; WAN024DFY_at; Start 297; Stop 321
ggagtgtcgcattcgtctgaaatca

SEQ ID NO: 156342 - DNA, 25 bp, Artificial
  probe
  misc_feature (1)..(25): SEQ ID NO: 5867; WAN024DFY_at; Start 227; Stop 251
gagtatattgctttccgttcacata

SEQ ID NO: 156343 - DNA, 25 bp, Artificial
  probe
  misc_feature (1)..(25): SEQ ID NO: 5867; WAN024DFY_at; Start 335; Stop 359
ccagttttagtttcaaattagcagc

SEQ ID NO: 156344 - DNA, 25 bp, Artificial
  probe
  misc_feature (1)..(25): SEQ ID NO: 5867; WAN024DFY_at; Start 785; Stop 809
gaaactggaggagagtgtaactaat

SEQ ID NO: 156345 - DNA, 25 bp, Artificial
  probe
  misc_feature (1)..(25): SEQ ID NO: 5867; WAN024DFY_at; Start 205; Stop 229
ttacttcaagatatgacgactggag

SEQ ID NO: 156346 - DNA, 25 bp, Artificial
  probe
  misc_feature (1)..(25): SEQ ID NO: 5867; WAN024DFY_at; Start 775; Stop 799
tctgttcatagaaactggaggagag

SEQ ID NO: 156347 - DNA, 25 bp, Artificial
  probe
  misc_feature (1)..(25): SEQ ID NO: 5867; WAN024DFY_at; Start 558; Stop 582
acttactattagcagtttttcttgg

SEQ ID NO: 156348 - DNA, 25 bp, Artificial
  probe
  misc_feature (1)..(25): SEQ ID NO: 5867; WAN024DFY_at; Start 347; Stop 371
tcaaattagcagctcttagtacggg

SEQ ID NO: 156349 - DNA, 25 bp, Artificial
  probe
  misc_feature (1)..(25): SEQ ID NO: 5867; WAN024DFY_at; Start 421; Stop 445
aatggttttagcttctctttggaga

SEQ ID NO: 156350 - DNA, 25 bp, Artificial
  probe
  misc_feature (1)..(25): SEQ ID NO: 5867; WAN024DFY_at; Start 548; Stop 572
ttttatccttacttactattagcag

SEQ ID NO: 156351 - DNA, 25 bp, Artificial
  probe
  misc_feature (1)..(25): SEQ ID NO: 5867; WAN024DFY_at; Start 592; Stop 616
tcaaacatgagcttagtatttctgt

SEQ ID NO: 156352 - DNA, 25 bp, Artificial
  probe
  misc_feature (1)..(25): SEQ ID NO: 5867; WAN024DFY_at; Start 413; Stop 437
catttagtaatggttttagcttctc

SEQ ID NO: 156353 - DNA, 25 bp, Artificial
  probe
  misc_feature (1)..(25): SEQ ID NO: 5867; WAN024DFY_at; Start 634; Stop 658
gaatccttattctggatttatcagt

SEQ ID NO: 156354 - DNA, 25 bp, Artificial
  probe
  misc_feature (1)..(25): SEQ ID NO: 5867; WAN024DFY_at; Start 663; Stop 687
caatgggataattggattattgcca

SEQ ID NO: 156355 - DNA, 25 bp, Artificial
  probe
  misc_feature (1)..(25): SEQ ID NO: 5867; WAN024DFY_at; Start 320; Stop 344
caattaagcactttaccagttttag

SEQ ID NO: 156356 - DNA, 25 bp, Artificial
  probe
  misc_feature (1)..(25): SEQ ID NO: 5867; WAN024DFY_at; Start 306; Stop 330
cattcgtctgaaatcaattaagcac

SEQ ID NO: 156357 - DNA, 25 bp, Artificial
  probe
  misc_feature (1)..(25): SEQ ID NO: 5867; WAN024DFY_at; Start 122; Stop 146
cctgtgttttatctagtacagtata

SEQ ID NO: 156358 - DNA, 25 bp, Artificial
  probe
  misc_feature (1)..(25): SEQ ID NO: 5867; WAN024DFY_at; Start 283; Stop 307
tattttaataggttggagtgtcgca

SEQ ID NO: 156359 - DNA, 25 bp, Artificial
  probe
  misc_feature (1)..(25): SEQ ID NO: 5867; WAN024DFY_at; Start 579; Stop 603
ttggtttaaaaaatcaaacatgagc

SEQ ID NO: 156360 - DNA, 25 bp, Artificial
  probe
  misc_feature (1)..(25): SEQ ID NO: 5867; WAN024DFY_at; Start 219; Stop 243
gacgactggagtatattgctttccg

SEQ ID NO: 156361 - DNA, 25 bp, Artificial
  probe
  misc_feature (1)..(25): SEQ ID NO: 5867; WAN024DFY_at; Start 712; Stop 736
aatccgtatgcattgatttattggc

SEQ ID NO: 156362 - DNA, 25 bp, Artificial
  probe
  misc_feature (1)..(25): SEQ ID NO: 5867; WAN024DFY_at; Start 482; Stop 506
taagtattgcaaacaatgctagttt

SEQ ID NO: 156363 - DNA, 25 bp, Artificial
  probe
  misc_feature (1)..(25): SEQ ID NO: 5867; WAN024DFY_at; Start 760; Stop 784
ccattgactgtattttctgttcata

SEQ ID NO: 156364 - DNA, 25 bp, Artificial
  probe
  misc_feature (1)..(25): SEQ ID NO: 5867; WAN024DFY_at; Start 491; Stop 515
caaacaatgctagtttctttatagg

SEQ ID NO: 156365 - DNA, 25 bp, Artificial
  probe
  misc_feature (1)..(25): SEQ ID NO: 5867; WAN024DFY_at; Start 683; Stop 707
tgccaatttttcagtatatggtaaa

SEQ ID NO: 156366 - DNA, 25 bp, Artificial
  probe
  misc_feature (1)..(25): SEQ ID NO: 5867; WAN024DFY_at; Start 178; Stop 202
ccaaatgtattagaatggatcttag

SEQ ID NO: 156367 - DNA, 25 bp, Artificial
  probe
  misc_feature (1)..(25): SEQ ID NO: 5867; WAN024DFY_at; Start 434; Stop 458
tctctttggagataaaggaggttga

SEQ ID NO: 156368 - DNA, 25 bp, Artificial
  probe
  misc_feature (1)..(25): SEQ ID NO: 2245; WAN024DFZ_at; Start 108; Stop 132
caatggtatttataaaattgaaggt

SEQ ID NO: 156369 - DNA, 25 bp, Artificial
  probe
  misc_feature (1)..(25): SEQ ID NO: 2245; WAN024DFZ_at; Start 166; Stop 190
ggattttcaccgattagcctagtag

SEQ ID NO: 156370 - DNA, 25 bp, Artificial
  probe
  misc_feature (1)..(25): SEQ ID NO: 2245; WAN024DFZ_at; Start 503; Stop 527
tctctatttttggactagctagtgc

SEQ ID NO: 156371 - DNA, 25 bp, Artificial
  probe
  misc_feature (1)..(25): SEQ ID NO: 2245; WAN024DFZ_at; Start 144; Stop 168
ttttgccgcttcttctattcgagga

SEQ ID NO: 156372 - DNA, 25 bp, Artificial
  probe
  misc_feature (1)..(25): SEQ ID NO: 2245; WAN024DFZ_at; Start 412; Stop 436
tatagtggtgccttaaaagaattat

SEQ ID NO: 156373 - DNA, 25 bp, Artificial
  probe
  misc_feature (1)..(25): SEQ ID NO: 2245; WAN024DFZ_at; Start 245; Stop 269
gtcattttctaacagcacaattgtg

SEQ ID NO: 156374 - DNA, 25 bp, Artificial
  probe
  misc_feature (1)..(25): SEQ ID NO: 2245; WAN024DFZ_at; Start 598; Stop 622
tgggctattttagggctatcttact

SEQ ID NO: 156375 - DNA, 25 bp, Artificial
  probe
  misc_feature (1)..(25): SEQ ID NO: 2245; WAN024DFZ_at; Start 492; Stop 516
gggcgctgtgttctctatttttgga

SEQ ID NO: 156376 - DNA, 25 bp, Artificial
  probe
  misc_feature (1)..(25): SEQ ID NO: 2245; WAN024DFZ_at; Start 11; Stop 35
tcatttgtaatcttgtacgagtcgt

SEQ ID NO: 156377 - DNA, 25 bp, Artificial
  probe
  misc_feature (1)..(25): SEQ ID NO: 2245; WAN024DFZ_at; Start 175; Stop 199
ccgattagcctagtagctgcactta

SEQ ID NO: 156378 - DNA, 25 bp, Artificial
  probe
  misc_feature (1)..(25): SEQ ID NO: 2245; WAN024DFZ_at; Start 235; Stop 259
gatgctgagagtcattttctaacag

SEQ ID NO: 156379 - DNA, 25 bp, Artificial
  probe
  misc_feature (1)..(25): SEQ ID NO: 2245; WAN024DFZ_at; Start 23; Stop 47
ttgtacgagtcgttcaatcacctcg

SEQ ID NO: 156380 - DNA, 25 bp, Artificial
  probe
  misc_feature (1)..(25): SEQ ID NO: 2245; WAN024DFZ_at; Start 182; Stop 206
gcctagtagctgcacttatctgtac

SEQ ID NO: 156381 - DNA, 25 bp, Artificial
  probe
  misc_feature (1)..(25): SEQ ID NO: 2245; WAN024DFZ_at; Start 202; Stop 226
tgtacactgccctattctagtcaga

SEQ ID NO: 156382 - DNA, 25 bp, Artificial
  probe
  misc_feature (1)..(25): SEQ ID NO: 2245; WAN024DFZ_at; Start 370; Stop 394
aatcttttagtgactccttatcagg

SEQ ID NO: 156383 - DNA, 25 bp, Artificial
  probe
  misc_feature (1)..(25): SEQ ID NO: 2245; WAN024DFZ_at; Start 572; Stop 596
cctatatgatggttggtggtatttt

SEQ ID NO: 156384 - DNA, 25 bp, Artificial
  probe
  misc_feature (1)..(25): SEQ ID NO: 2245; WAN024DFZ_at; Start 188; Stop 212
tagctgcacttatctgtacactgcc

SEQ ID NO: 156385 - DNA, 25 bp, Artificial
  probe
  misc_feature (1)..(25): SEQ ID NO: 2245; WAN024DFZ_at; Start 217; Stop 241
tctagtcagataatagaggatgctg

SEQ ID NO: 156386 - DNA, 25 bp, Artificial
  probe
  misc_feature (1)..(25): SEQ ID NO: 2245; WAN024DFZ_at; Start 223; Stop 247
cagataatagaggatgctgagagtc

SEQ ID NO: 156387 - DNA, 25 bp, Artificial
  probe
  misc_feature (1)..(25): SEQ ID NO: 2245; WAN024DFZ_at; Start 362; Stop 386
taggaattaatcttttagtgactcc

SEQ ID NO: 156388 - DNA, 25 bp, Artificial
  probe
  misc_feature (1)..(25): SEQ ID NO: 2245; WAN024DFZ_at; Start 342; Stop 366
tctcccctatttattattattagga

SEQ ID NO: 156389 - DNA, 25 bp, Artificial
  probe
  misc_feature (1)..(25): SEQ ID NO: 2245; WAN024DFZ_at; Start 614; Stop 638
tatcttacttagaacctgtgacaac

SEQ ID NO: 156390 - DNA, 25 bp, Artificial
  probe
  misc_feature (1)..(25): SEQ ID NO: 2245; WAN024DFZ_at; Start 377; Stop 401
tagtgactccttatcaggaaattta

SEQ ID NO: 156391 - DNA, 25 bp, Artificial
  probe
  misc_feature (1)..(25): SEQ ID NO: 2245; WAN024DFZ_at; Start 154; Stop 178
tcttctattcgaggattttcaccga

SEQ ID NO: 156392 - DNA, 25 bp, Artificial
  probe
  misc_feature (1)..(25): SEQ ID NO: 2245; WAN024DFZ_at; Start 240; Stop 264
tgagagtcattttctaacagcacaa

SEQ ID NO: 156393 - DNA, 25 bp, Artificial
  probe
  misc_feature (1)..(25): SEQ ID NO: 2245; WAN024DFZ_at; Start 522; Stop 546
tagtgctttgctagtgaagaaaaaa

SEQ ID NO: 156394 - DNA, 25 bp, Artificial
  probe
  misc_feature (1)..(25): SEQ ID NO: 2245; WAN024DFZ_at; Start 610; Stop 634
gggctatcttacttagaacctgtga

SEQ ID NO: 156395 - DNA, 25 bp, Artificial
  probe
  misc_feature (1)..(25): SEQ ID NO: 2245; WAN024DFZ_at; Start 416; Stop 440
gtggtgccttaaaagaattatttga

SEQ ID NO: 156396 - DNA, 25 bp, Artificial
  probe
  misc_feature (1)..(25): SEQ ID NO: 2245; WAN024DFZ_at; Start 661; Stop 685
gatatcagtctttccttagttagtg

SEQ ID NO: 156397 - DNA, 25 bp, Artificial
  probe
  misc_feature (1)..(25): SEQ ID NO: 2245; WAN024DFZ_at; Start 170; Stop 194
tttcaccgattagcctagtagctgc

SEQ ID NO: 156398 - DNA, 25 bp, Artificial
  probe
  misc_feature (1)..(25): SEQ ID NO: 2245; WAN024DFZ_at; Start 62; Stop 86
tatttttgacccttctttgcatgag

SEQ ID NO: 156399 - DNA, 25 bp, Artificial
  probe
  misc_feature (1)..(25): SEQ ID NO: 2245; WAN024DFZ_at; Start 71; Stop 95
cccttctttgcatgagtttaggaaa

SEQ ID NO: 156400 - DNA, 25 bp, Artificial
  probe
  misc_feature (1)..(25): SEQ ID NO: 2245; WAN024DFZ_at; Start 643; Stop 667
gctttgggatatcagaaagatatca

SEQ ID NO: 156401 - DNA, 25 bp, Artificial
  probe
  misc_feature (1)..(25): SEQ ID NO: 2245; WAN024DFZ_at; Start 518; Stop 542
tagctagtgctttgctagtgaagaa

SEQ ID NO: 156402 - DNA, 25 bp, Artificial
  probe
  misc_feature (1)..(25): SEQ ID NO: 5859; WAN024DG2_at; Start 12; Stop 36
tacagttttagctagacagattgga

SEQ ID NO: 156403 - DNA, 25 bp, Artificial
  probe
  misc_feature (1)..(25): SEQ ID NO: 5859; WAN024DG2_at; Start 68; Stop 92
cggatacaactagtgagcttgagaa

SEQ ID NO: 156404 - DNA, 25 bp, Artificial
  probe
  misc_feature (1)..(25): SEQ ID NO: 5859; WAN024DG2_at; Start 282; Stop 306
tatggcgccacaatttggaaatcat

SEQ ID NO: 156405 - DNA, 25 bp, Artificial
  probe
  misc_feature (1)..(25): SEQ ID NO: 5859; WAN024DG2_at; Start 215; Stop 239
gctctaggattgtcatgtactataa

SEQ ID NO: 156406 - DNA, 25 bp, Artificial
  probe
  misc_feature (1)..(25): SEQ ID NO: 5859; WAN024DG2_at; Start 242; Stop 266
gaggtggtgacaattatattggttc

SEQ ID NO: 156407 - DNA, 25 bp, Artificial
  probe
  misc_feature (1)..(25): SEQ ID NO: 5859; WAN024DG2_at; Start 228; Stop 252
catgtactataatggaggtggtgac

SEQ ID NO: 156408 - DNA, 25 bp, Artificial
  probe
  misc_feature (1)..(25): SEQ ID NO: 5859; WAN024DG2_at; Start 153; Stop 177
tacctctattcgtagcgcctatagt

SEQ ID NO: 156409 - DNA, 25 bp, Artificial
  probe
  misc_feature (1)..(25): SEQ ID NO: 5859; WAN024DG2_at; Start 65; Stop 89
gttcggatacaactagtgagcttga

SEQ ID NO: 156410 - DNA, 25 bp, Artificial
  probe
  misc_feature (1)..(25): SEQ ID NO: 5859; WAN024DG2_at; Start 280; Stop 304
gctatggcgccacaatttggaaatc

SEQ ID NO: 156411 - DNA, 25 bp, Artificial
  probe
  misc_feature (1)..(25): SEQ ID NO: 5859; WAN024DG2_at; Start 297; Stop 321
tggaaatcatgtaagaattcatact

SEQ ID NO: 156412 - DNA, 25 bp, Artificial
  probe
  misc_feature (1)..(25): SEQ ID NO: 5859; WAN024DG2_at; Start 310; Stop 334
agaattcatacttcaggttcttgga

SEQ ID NO: 156413 - DNA, 25 bp, Artificial
  probe
  misc_feature (1)..(25): SEQ ID NO: 5859; WAN024DG2_at; Start 163; Stop 187
cgtagcgcctatagtgggtcagata

SEQ ID NO: 156414 - DNA, 25 bp, Artificial
  probe
  misc_feature (1)..(25): SEQ ID NO: 5859; WAN024DG2_at; Start 285; Stop 309
ggcgccacaatttggaaatcatgta

SEQ ID NO: 156415 - DNA, 25 bp, Artificial
  probe
  misc_feature (1)..(25): SEQ ID NO: 5859; WAN024DG2_at; Start 193; Stop 217
ccggtatattcattggggtctggct

SEQ ID NO: 156416 - DNA, 25 bp, Artificial
  probe
  misc_feature (1)..(25): SEQ ID NO: 5859; WAN024DG2_at; Start 270; Stop 294
tactagattagctatggcgccacaa

SEQ ID NO: 156417 - DNA, 25 bp, Artificial
  probe
  misc_feature (1)..(25): SEQ ID NO: 5859; WAN024DG2_at; Start 72; Stop 96
tacaactagtgagcttgagaaagaa

SEQ ID NO: 156418 - DNA, 25 bp, Artificial
  probe
  misc_feature (1)..(25): SEQ ID NO: 5859; WAN024DG2_at; Start 232; Stop 256
tactataatggaggtggtgacaatt

SEQ ID NO: 156419 - DNA, 25 bp, Artificial
  probe
  misc_feature (1)..(25): SEQ ID NO: 5859; WAN024DG2_at; Start 208; Stop 232
gggtctggctctaggattgtcatgt

SEQ ID NO: 156420 - DNA, 25 bp, Artificial
  probe
  misc_feature (1)..(25): SEQ ID NO: 5859; WAN024DG2_at; Start 273; Stop 297
tagattagctatggcgccacaattt

SEQ ID NO: 156421 - DNA, 25 bp, Artificial
  probe
  misc_feature (1)..(25): SEQ ID NO: 5859; WAN024DG2_at; Start 252; Stop 276
caattatattggttctggtactaga

SEQ ID NO: 156422 - DNA, 25 bp, Artificial
  probe
  misc_feature (1)..(25): SEQ ID NO: 5859; WAN024DG2_at; Start 278; Stop 302
tagctatggcgccacaatttggaaa

SEQ ID NO: 156423 - DNA, 25 bp, Artificial
  probe
  misc_feature (1)..(25): SEQ ID NO: 5859; WAN024DG2_at; Start 268; Stop 292
ggtactagattagctatggcgccac

SEQ ID NO: 156424 - DNA, 25 bp, Artificial
  probe
  misc_feature (1)..(25): SEQ ID NO: 5859; WAN024DG2_at; Start 288; Stop 312
gccacaatttggaaatcatgtaaga

SEQ ID NO: 156425 - DNA, 25 bp, Artificial
  probe
  misc_feature (1)..(25): SEQ ID NO: 5859; WAN024DG2_at; Start 166; Stop 190
agcgcctatagtgggtcagatatta

SEQ ID NO: 156426 - DNA, 25 bp, Artificial
  probe
  misc_feature (1)..(25): SEQ ID NO: 5859; WAN024DG2_at; Start 211; Stop 235
tctggctctaggattgtcatgtact

SEQ ID NO: 156427 - DNA, 25 bp, Artificial
  probe
  misc_feature (1)..(25): SEQ ID NO: 5859; WAN024DG2_at; Start 303; Stop 327
tcatgtaagaattcatacttcaggt

SEQ ID NO: 156428 - DNA, 25 bp, Artificial
  probe
  misc_feature (1)..(25): SEQ ID NO: 5859; WAN024DG2_at; Start 221; Stop 245
ggattgtcatgtactataatggagg

SEQ ID NO: 156429 - DNA, 25 bp, Artificial
  probe
  misc_feature (1)..(25): SEQ ID NO: 5859; WAN024DG2_at; Start 63; Stop 87
gggttcggatacaactagtgagctt

SEQ ID NO: 156430 - DNA, 25 bp, Artificial
  probe
  misc_feature (1)..(25): SEQ ID NO: 5859; WAN024DG2_at; Start 159; Stop 183
tattcgtagcgcctatagtgggtca

SEQ ID NO: 156431 - DNA, 25 bp, Artificial
  probe
  misc_feature (1)..(25): SEQ ID NO: 5859; WAN024DG2_at; Start 75; Stop 99
aactagtgagcttgagaaagaaaac

SEQ ID NO: 156432 - DNA, 25 bp, Artificial
  probe
  misc_feature (1)..(25): SEQ ID NO: 5859; WAN024DG2_at; Start 149; Stop 173
taaatacctctattcgtagcgccta

SEQ ID NO: 156433 - DNA, 25 bp, Artificial
  probe
  misc_feature (1)..(25): SEQ ID NO: 5859; WAN024DG2_at; Start 161; Stop 185
ttcgtagcgcctatagtgggtcaga

SEQ ID NO: 156434 - DNA, 25 bp, Artificial
  probe
  misc_feature (1)..(25): SEQ ID NO: 5859; WAN024DG2_at; Start 265; Stop 289
tctggtactagattagctatggcgc

SEQ ID NO: 156435 - DNA, 25 bp, Artificial
  probe
  misc_feature (1)..(25): SEQ ID NO: 5859; WAN024DG2_at; Start 258; Stop 282
tattggttctggtactagattagct

SEQ ID NO: 156436 - DNA, 25 bp, Artificial
  probe
  misc_feature (1)..(25): SEQ ID NO: 1353; WAN024DG3_at; Start 43; Stop 67
caagccgtttacctcaaaccagagg

SEQ ID NO: 156437 - DNA, 25 bp, Artificial
  probe
  misc_feature (1)..(25): SEQ ID NO: 1353; WAN024DG3_at; Start 2; Stop 26
tgacacttgctaaagatatcgctag

SEQ ID NO: 156438 - DNA, 25 bp, Artificial
  probe
  misc_feature (1)..(25): SEQ ID NO: 1353; WAN024DG3_at; Start 226; Stop 250
gcagggattccacacggagccatta

SEQ ID NO: 156439 - DNA, 25 bp, Artificial
  probe
  misc_feature (1)..(25): SEQ ID NO: 1353; WAN024DG3_at; Start 493; Stop 517
gatgctggtgttaaacttgtgacgc

SEQ ID NO: 156440 - DNA, 25 bp, Artificial
  probe
  misc_feature (1)..(25): SEQ ID NO: 1353; WAN024DG3_at; Start 310; Stop 334
gctggtaatcaaatcgaaggtcgcg

SEQ ID NO: 156441 - DNA, 25 bp, Artificial
  probe
  misc_feature (1)..(25): SEQ ID NO: 1353; WAN024DG3_at; Start 57; Stop 81
caaaccagaggaacccttcacttgg

SEQ ID NO: 156442 - DNA, 25 bp, Artificial
  probe
  misc_feature (1)..(25): SEQ ID NO: 1353; WAN024DG3_at; Start 604; Stop 628
gaagaccaagaaaattggcaagaag

SEQ ID NO: 156443 - DNA, 25 bp, Artificial
  probe
  misc_feature (1)..(25): SEQ ID NO: 1353; WAN024DG3_at; Start 463; Stop 487
caattgccaaaagcagataagaact

SEQ ID NO: 156444 - DNA, 25 bp, Artificial
  probe
  misc_feature (1)..(25): SEQ ID NO: 1353; WAN024DG3_at; Start 448; Stop 472
gcgattttcagctaccaattgccaa

SEQ ID NO: 156445 - DNA, 25 bp, Artificial
  probe
  misc_feature (1)..(25): SEQ ID NO: 1353; WAN024DG3_at; Start 108; Stop 132
cactgataatcgtgtgacactagcc

SEQ ID NO: 156446 - DNA, 25 bp, Artificial
  probe
  misc_feature (1)..(25): SEQ ID NO: 1353; WAN024DG3_at; Start 123; Stop 147
gacactagcctatccagaaactcgt

SEQ ID NO: 156447 - DNA, 25 bp, Artificial
  probe
  misc_feature (1)..(25): SEQ ID NO: 1353; WAN024DG3_at; Start 325; Stop 349
gaaggtcgcgtagctcaaggtcaaa

SEQ ID NO: 156448 - DNA, 25 bp, Artificial
  probe
  misc_feature (1)..(25): SEQ ID NO: 1353; WAN024DG3_at; Start 135; Stop 159
tccagaaactcgtaccctaattgaa

SEQ ID NO: 156449 - DNA, 25 bp, Artificial
  probe
  misc_feature (1)..(25): SEQ ID NO: 1353; WAN024DG3_at; Start 16; Stop 40
gatatcgctagccacctcttgaaaa

SEQ ID NO: 156450 - DNA, 25 bp, Artificial
  probe
  misc_feature (1)..(25): SEQ ID NO: 1353; WAN024DG3_at; Start 210; Stop 234
tgcaggaactgcaacagcagggatt

SEQ ID NO: 156451 - DNA, 25 bp, Artificial
  probe
  misc_feature (1)..(25): SEQ ID NO: 1353; WAN024DG3_at; Start 197; Stop 221
aagtagaagtgattgcaggaactgc

SEQ ID NO: 156452 - DNA, 25 bp, Artificial
  probe
  misc_feature (1)..(25): SEQ ID NO: 1353; WAN024DG3_at; Start 397; Stop 421
gaagctgtagcagcagccaagcgag

SEQ ID NO: 156453 - DNA, 25 bp, Artificial
  probe
  misc_feature (1)..(25): SEQ ID NO: 1353; WAN024DG3_at; Start 337; Stop 361
gctcaaggtcaaaaaatggtagtgg

SEQ ID NO: 156454 - DNA, 25 bp, Artificial
  probe
  misc_feature (1)..(25): SEQ ID NO: 1353; WAN024DG3_at; Start 180; Stop 204
caaagaagcctttcctgaagtagaa

SEQ ID NO: 156455 - DNA, 25 bp, Artificial
  probe
  misc_feature (1)..(25): SEQ ID NO: 1353; WAN024DG3_at; Start 555; Stop 579
agaaggttacatcacgccagagggc

SEQ ID NO: 156456 - DNA, 25 bp, Artificial
  probe
  misc_feature (1)..(25): SEQ ID NO: 1353; WAN024DG3_at; Start 436; Stop 460
cttggagttgtagcgattttcagct

SEQ ID NO: 156457 - DNA, 25 bp, Artificial
  probe
  misc_feature (1)..(25): SEQ ID NO: 1353; WAN024DG3_at; Start 354; Stop 378
ggtagtggttgaagaccttatttca

SEQ ID NO: 156458 - DNA, 25 bp, Artificial
  probe
  misc_feature (1)..(25): SEQ ID NO: 1353; WAN024DG3_at; Start 79; Stop 103
tgggcatctggtatcaagtcaccga

SEQ ID NO: 156459 - DNA, 25 bp, Artificial
  probe
  misc_feature (1)..(25): SEQ ID NO: 1353; WAN024DG3_at; Start 67; Stop 91
gaacccttcacttgggcatctggta

SEQ ID NO: 156460 - DNA, 25 bp, Artificial
  probe
  misc_feature (1)..(25): SEQ ID NO: 1353; WAN024DG3_at; Start 92; Stop 116
tcaagtcaccgatttacactgataa

SEQ ID NO: 156461 - DNA, 25 bp, Artificial
  probe
  misc_feature (1)..(25): SEQ ID NO: 1353; WAN024DG3_at; Start 28; Stop 52
cacctcttgaaaatccaagccgttt

SEQ ID NO: 156462 - DNA, 25 bp, Artificial
  probe
  misc_feature (1)..(25): SEQ ID NO: 1353; WAN024DG3_at; Start 377; Stop 401
caacgggtggttcagttcttgaagc

SEQ ID NO: 156463 - DNA, 25 bp, Artificial
  probe
  misc_feature (1)..(25): SEQ ID NO: 1353; WAN024DG3_at; Start 540; Stop 564
ccatctagcccaagaagaaggttac

SEQ ID NO: 156464 - DNA, 25 bp, Artificial
  probe
  misc_feature (1)..(25): SEQ ID NO: 1353; WAN024DG3_at; Start 296; Stop 320
caaaagaccacggagctggtaatca

SEQ ID NO: 156465 - DNA, 25 bp, Artificial
  probe
  misc_feature (1)..(25): SEQ ID NO: 1353; WAN024DG3_at; Start 508; Stop 532
cttgtgacgctttcaaactatagcg

SEQ ID NO: 156466 - DNA, 25 bp, Artificial
  probe
  misc_feature (1)..(25): SEQ ID NO: 1353; WAN024DG3_at; Start 478; Stop 502
gataagaactttgcagatgctggtg

SEQ ID NO: 156467 - DNA, 25 bp, Artificial
  probe
  misc_feature (1)..(25): SEQ ID NO: 1353; WAN024DG3_at; Start 388; Stop 412
tcagttcttgaagctgtagcagcag

SEQ ID NO: 156468 - DNA, 25 bp, Artificial
  probe
  misc_feature (1)..(25): SEQ ID NO: 1353; WAN024DG3_at; Start 410; Stop 434
cagccaagcgagaaggagcagatgt

SEQ ID NO: 156469 - DNA, 25 bp, Artificial
  probe
  misc_feature (1)..(25): SEQ ID NO: 1353; WAN024DG3_at; Start 238; Stop 262
cacggagccattattgctgataaga

SEQ ID NO: 156470 - DNA, 25 bp, Artificial
  probe
  misc_feature (1)..(25): SEQ ID NO: 2539; WAN024DG4_at; Start 70; Stop 94
ggacttcttcgtgagtattttctta

SEQ ID NO: 156471 - DNA, 25 bp, Artificial
  probe
  misc_feature (1)..(25): SEQ ID NO: 2539; WAN024DG4_at; Start 71; Stop 95
gacttcttcgtgagtattttcttaa

SEQ ID NO: 156472 - DNA, 25 bp, Artificial
  probe
  misc_feature (1)..(25): SEQ ID NO: 2539; WAN024DG4_at; Start 16; Stop 40
tattttgcggatgcctattcatctt

SEQ ID NO: 156473 - DNA, 25 bp, Artificial
  probe
  misc_feature (1)..(25): SEQ ID NO: 2539; WAN024DG4_at; Start 25; Stop 49
gatgcctattcatcttggcaaaggg

SEQ ID NO: 156474 - DNA, 25 bp, Artificial
  probe
  misc_feature (1)..(25): SEQ ID NO: 2539; WAN024DG4_at; Start 50; Stop 74
gaagtaatgagaatgcgaatggact

SEQ ID NO: 156475 - DNA, 25 bp, Artificial
  probe
  misc_feature (1)..(25): SEQ ID NO: 2539; WAN024DG4_at; Start 2; Stop 26
tgggaattctgttttattttgcgga

SEQ ID NO: 156476 - DNA, 25 bp, Artificial
  probe
  misc_feature (1)..(25): SEQ ID NO: 2539; WAN024DG4_at; Start 8; Stop 32
ttctgttttattttgcggatgccta

SEQ ID NO: 156477 - DNA, 25 bp, Artificial
  probe
  misc_feature (1)..(25): SEQ ID NO: 2539; WAN024DG4_at; Start 52; Stop 76
agtaatgagaatgcgaatggacttc

SEQ ID NO: 156478 - DNA, 25 bp, Artificial
  probe
  misc_feature (1)..(25): SEQ ID NO: 2539; WAN024DG4_at; Start 60; Stop 84
gaatgcgaatggacttcttcgtgag

SEQ ID NO: 156479 - DNA, 25 bp, Artificial
  probe
  misc_feature (1)..(25): SEQ ID NO: 2539; WAN024DG4_at; Start 9; Stop 33
tctgttttattttgcggatgcctat

SEQ ID NO: 156480 - DNA, 25 bp, Artificial
  probe
  misc_feature (1)..(25): SEQ ID NO: 2539; WAN024DG4_at; Start 55; Stop 79
aatgagaatgcgaatggacttcttc

SEQ ID NO: 156481 - DNA, 25 bp, Artificial
  probe
  misc_feature (1)..(25): SEQ ID NO: 2539; WAN024DG4_at; Start 18; Stop 42
ttttgcggatgcctattcatcttgg

SEQ ID NO: 156482 - DNA, 25 bp, Artificial
  probe
  misc_feature (1)..(25): SEQ ID NO: 2539; WAN024DG4_at; Start 23; Stop 47
cggatgcctattcatcttggcaaag

SEQ ID NO: 156483 - DNA, 25 bp, Artificial
  probe
  misc_feature (1)..(25): SEQ ID NO: 2539; WAN024DG4_at; Start 67; Stop 91
aatggacttcttcgtgagtattttc

SEQ ID NO: 156484 - DNA, 25 bp, Artificial
  probe
  misc_feature (1)..(25): SEQ ID NO: 2539; WAN024DG4_at; Start 10; Stop 34
ctgttttattttgcggatgcctatt

SEQ ID NO: 156485 - DNA, 25 bp, Artificial
  probe
  misc_feature (1)..(25): SEQ ID NO: 2539; WAN024DG4_at; Start 61; Stop 85
aatgcgaatggacttcttcgtgagt

SEQ ID NO: 156486 - DNA, 25 bp, Artificial
  probe
  misc_feature (1)..(25): SEQ ID NO: 2539; WAN024DG4_at; Start 21; Stop 45
tgcggatgcctattcatcttggcaa

SEQ ID NO: 156487 - DNA, 25 bp, Artificial
  probe
  misc_feature (1)..(25): SEQ ID NO: 2539; WAN024DG4_at; Start 20; Stop 44
ttgcggatgcctattcatcttggca

SEQ ID NO: 156488 - DNA, 25 bp, Artificial
  probe
  misc_feature (1)..(25): SEQ ID NO: 2539; WAN024DG4_at; Start 64; Stop 88
gcgaatggacttcttcgtgagtatt

SEQ ID NO: 156489 - DNA, 25 bp, Artificial
  probe
  misc_feature (1)..(25): SEQ ID NO: 2539; WAN024DG4_at; Start 28; Stop 52
gcctattcatcttggcaaaggggaa

SEQ ID NO: 156490 - DNA, 25 bp, Artificial
  probe
  misc_feature (1)..(25): SEQ ID NO: 2539; WAN024DG4_at; Start 90; Stop 114
tcttaaaccgatttggcaacaatta

SEQ ID NO: 156491 - DNA, 25 bp, Artificial
  probe
  misc_feature (1)..(25): SEQ ID NO: 2539; WAN024DG4_at; Start 34; Stop 58
tcatcttggcaaaggggaagtaatg

SEQ ID NO: 156492 - DNA, 25 bp, Artificial
  probe
  misc_feature (1)..(25): SEQ ID NO: 2539; WAN024DG4_at; Start 13; Stop 37
ttttattttgcggatgcctattcat

SEQ ID NO: 156493 - DNA, 25 bp, Artificial
  probe
  misc_feature (1)..(25): SEQ ID NO: 2539; WAN024DG4_at; Start 14; Stop 38
tttattttgcggatgcctattcatc

SEQ ID NO: 156494 - DNA, 25 bp, Artificial
  probe
  misc_feature (1)..(25): SEQ ID NO: 2539; WAN024DG4_at; Start 63; Stop 87
tgcgaatggacttcttcgtgagtat

SEQ ID NO: 156495 - DNA, 25 bp, Artificial
  probe
  misc_feature (1)..(25): SEQ ID NO: 2539; WAN024DG4_at; Start 19; Stop 43
tttgcggatgcctattcatcttggc

SEQ ID NO: 156496 - DNA, 25 bp, Artificial
  probe
  misc_feature (1)..(25): SEQ ID NO: 2539; WAN024DG4_at; Start 58; Stop 82
gagaatgcgaatggacttcttcgtg

SEQ ID NO: 156497 - DNA, 25 bp, Artificial
  probe
  misc_feature (1)..(25): SEQ ID NO: 2539; WAN024DG4_at; Start 6; Stop 30
aattctgttttattttgcggatgcc

SEQ ID NO: 156498 - DNA, 25 bp, Artificial
  probe
  misc_feature (1)..(25): SEQ ID NO: 2539; WAN024DG4_at; Start 57; Stop 81
tgagaatgcgaatggacttcttcgt

SEQ ID NO: 156499 - DNA, 25 bp, Artificial
  probe
  misc_feature (1)..(25): SEQ ID NO: 2539; WAN024DG4_at; Start 24; Stop 48
ggatgcctattcatcttggcaaagg

SEQ ID NO: 156500 - DNA, 25 bp, Artificial
  probe
  misc_feature (1)..(25): SEQ ID NO: 2539; WAN024DG4_at; Start 54; Stop 78
taatgagaatgcgaatggacttctt

SEQ ID NO: 156501 - DNA, 25 bp, Artificial
  probe
  misc_feature (1)..(25): SEQ ID NO: 2539; WAN024DG4_at; Start 49; Stop 73
ggaagtaatgagaatgcgaatggac

SEQ ID NO: 156502 - DNA, 25 bp, Artificial
  probe
  misc_feature (1)..(25): SEQ ID NO: 2539; WAN024DG4_at; Start 22; Stop 46
gcggatgcctattcatcttggcaaa

SEQ ID NO: 156503 - DNA, 25 bp, Artificial
  probe
  misc_feature (1)..(25): SEQ ID NO: 2539; WAN024DG4_at; Start 65; Stop 89
cgaatggacttcttcgtgagtattt

SEQ ID NO: 156504 - DNA, 25 bp, Artificial
  probe
  misc_feature (1)..(25): SEQ ID NO: 2104; WAN024DG5_at; Start 137; Stop 161
tcaacgatcaacaggcattagttct

SEQ ID NO: 156505 - DNA, 25 bp, Artificial
  probe
  misc_feature (1)..(25): SEQ ID NO: 2104; WAN024DG5_at; Start 388; Stop 412
tatattacaatcgttcttctaacct

SEQ ID NO: 156506 - DNA, 25 bp, Artificial
  probe
  misc_feature (1)..(25): SEQ ID NO: 2104; WAN024DG5_at; Start 467; Stop 491
tagtagctcaggttatcagtcttcc

SEQ ID NO: 156507 - DNA, 25 bp, Artificial
  probe
  misc_feature (1)..(25): SEQ ID NO: 2104; WAN024DG5_at; Start 461; Stop 485
gccaagtagtagctcaggttatcag

SEQ ID NO: 156508 - DNA, 25 bp, Artificial
  probe
  misc_feature (1)..(25): SEQ ID NO: 2104; WAN024DG5_at; Start 63; Stop 87
tattttattgcaagttttagtgcct

SEQ ID NO: 156509 - DNA, 25 bp, Artificial
  probe
  misc_feature (1)..(25): SEQ ID NO: 2104; WAN024DG5_at; Start 155; Stop 179
tagttcttttgatgatgtgtttacc

SEQ ID NO: 156510 - DNA, 25 bp, Artificial
  probe
  misc_feature (1)..(25): SEQ ID NO: 2104; WAN024DG5_at; Start 208; Stop 232
cctataactattatcttgtctgaag

SEQ ID NO: 156511 - DNA, 25 bp, Artificial
  probe
  misc_feature (1)..(25): SEQ ID NO: 2104; WAN024DG5_at; Start 10; Stop 34
cggtttctggctttggtatggttgc

SEQ ID NO: 156512 - DNA, 25 bp, Artificial
  probe
  misc_feature (1)..(25): SEQ ID NO: 2104; WAN024DG5_at; Start 221; Stop 245
tcttgtctgaagaaaaagaaaagta

SEQ ID NO: 156513 - DNA, 25 bp, Artificial
  probe
  misc_feature (1)..(25): SEQ ID NO: 2104; WAN024DG5_at; Start 257; Stop 281
ctcttctgttgagtggtgttaaagg

SEQ ID NO: 156514 - DNA, 25 bp, Artificial
  probe
  misc_feature (1)..(25): SEQ ID NO: 2104; WAN024DG5_at; Start 540; Stop 564
gacagttgcgaagataacagattat

SEQ ID NO: 156515 - DNA, 25 bp, Artificial
  probe
  misc_feature (1)..(25): SEQ ID NO: 2104; WAN024DG5_at; Start 356; Stop 380
ttttaggagttacaattgtacatac

SEQ ID NO: 156516 - DNA, 25 bp, Artificial
  probe
  misc_feature (1)..(25): SEQ ID NO: 2104; WAN024DG5_at; Start 130; Stop 154
gggaaggtcaacgatcaacaggcat

SEQ ID NO: 156517 - DNA, 25 bp, Artificial
  probe
  misc_feature (1)..(25): SEQ ID NO: 2104; WAN024DG5_at; Start 1; Stop 25
atgcttaaacggtttctggctttgg

SEQ ID NO: 156518 - DNA, 25 bp, Artificial
  probe
  misc_feature (1)..(25): SEQ ID NO: 2104; WAN024DG5_at; Start 400; Stop 424
gttcttctaacctctttatccatca

SEQ ID NO: 156519 - DNA, 25 bp, Artificial
  probe
  misc_feature (1)..(25): SEQ ID NO: 2104; WAN024DG5_at; Start 329; Stop 353
ttgtgattatgggaactactcctct

SEQ ID NO: 156520 - DNA, 25 bp, Artificial
  probe
  misc_feature (1)..(25): SEQ ID NO: 2104; WAN024DG5_at; Start 644; Stop 668
cactacttatttggattgttcttct

SEQ ID NO: 156521 - DNA, 25 bp, Artificial
  probe
  misc_feature (1)..(25): SEQ ID NO: 2104; WAN024DG5_at; Start 533; Stop 557
tggataagacagttgcgaagataac

SEQ ID NO: 156522 - DNA, 25 bp, Artificial
  probe
  misc_feature (1)..(25): SEQ ID NO: 2104; WAN024DG5_at; Start 440; Stop 464
tgataggtttaaccgcgaagagcca

SEQ ID NO: 156523 - DNA, 25 bp, Artificial
  probe
  misc_feature (1)..(25): SEQ ID NO: 2104; WAN024DG5_at; Start 19; Stop 43
gctttggtatggttgcgttgtcaaa

SEQ ID NO: 156524 - DNA, 25 bp, Artificial
  probe
  misc_feature (1)..(25): SEQ ID NO: 2104; WAN024DG5_at; Start 554; Stop 578
taacagattatagttttatgggact

SEQ ID NO: 156525 - DNA, 25 bp, Artificial
  probe
  misc_feature (1)..(25): SEQ ID NO: 2104; WAN024DG5_at; Start 634; Stop 658
cctaatctaacactacttatttgga

SEQ ID NO: 156526 - DNA, 25 bp, Artificial
  probe
  misc_feature (1)..(25): SEQ ID NO: 2104; WAN024DG5_at; Start 320; Stop 344
tgctaacttttgtgattatgggaac

SEQ ID NO: 156527 - DNA, 25 bp, Artificial
  probe
  misc_feature (1)..(25): SEQ ID NO: 2104; WAN024DG5_at; Start 482; Stop 506
tcagtcttcctgctatgattttagt

SEQ ID NO: 156528 - DNA, 25 bp, Artificial
  probe
  misc_feature (1)..(25): SEQ ID NO: 2104; WAN024DG5_at; Start 243; Stop 267
gtacaatttacaaactcttctgttg

SEQ ID NO: 156529 - DNA, 25 bp, Artificial
  probe
  misc_feature (1)..(25): SEQ ID NO: 2104; WAN024DG5_at; Start 337; Stop 361
atgggaactactcctcttattttag

SEQ ID NO: 156530 - DNA, 25 bp, Artificial
  probe
  misc_feature (1)..(25): SEQ ID NO: 2104; WAN024DG5_at; Start 107; Stop 131
ataaatatcttatggaaacacaggg

SEQ ID NO: 156531 - DNA, 25 bp, Artificial
  probe
  misc_feature (1)..(25): SEQ ID NO: 2104; WAN024DG5_at; Start 433; Stop 457
tatttattgataggtttaaccgcga

SEQ ID NO: 156532 - DNA, 25 bp, Artificial
  probe
  misc_feature (1)..(25): SEQ ID NO: 2104; WAN024DG5_at; Start 75; Stop 99
agttttagtgccttttgctttcaca

SEQ ID NO: 156533 - DNA, 25 bp, Artificial
  probe
  misc_feature (1)..(25): SEQ ID NO: 2104; WAN024DG5_at; Start 191; Stop 215
ctttggctgttggaagtcctataac

SEQ ID NO: 156534 - DNA, 25 bp, Artificial
  probe
  misc_feature (1)..(25): SEQ ID NO: 2104; WAN024DG5_at; Start 503; Stop 527
tagttgctttcttaccgatgctatc

SEQ ID NO: 156535 - DNA, 25 bp, Artificial
  probe
  misc_feature (1)..(25): SEQ ID NO: 2104; WAN024DG5_at; Start 498; Stop 522
gattttagttgctttcttaccgatg

SEQ ID NO: 156536 - DNA, 25 bp, Artificial
  probe
  misc_feature (1)..(25): SEQ ID NO: 2104; WAN024DG5_at; Start 145; Stop 169
caacaggcattagttcttttgatga

SEQ ID NO: 156537 - DNA, 25 bp, Artificial
  probe
  misc_feature (1)..(25): SEQ ID NO: 2104; WAN024DG5_at; Start 449; Stop 473
taaccgcgaagagccaagtagtagc

SEQ ID NO: 156538 - DNA, 25 bp, Artificial
  probe
  misc_feature (1)..(25): SEQ ID NO: 3344; WAN024DG6_at; Start 260; Stop 284
tgaggcaacgaatgcttttagcacg

SEQ ID NO: 156539 - DNA, 25 bp, Artificial
  probe
  misc_feature (1)..(25): SEQ ID NO: 3344; WAN024DG6_at; Start 413; Stop 437
cgactcatgatatgaatgaagcaac

SEQ ID NO: 156540 - DNA, 25 bp, Artificial
  probe
  misc_feature (1)..(25): SEQ ID NO: 3344; WAN024DG6_at; Start 121; Stop 145
gagaaaatgtctctgtataacaatc

SEQ ID NO: 156541 - DNA, 25 bp, Artificial
  probe
  misc_feature (1)..(25): SEQ ID NO: 3344; WAN024DG6_at; Start 182; Stop 206
cacgtgttgataatttgttaaagcg

SEQ ID NO: 156542 - DNA, 25 bp, Artificial
  probe
  misc_feature (1)..(25): SEQ ID NO: 3344; WAN024DG6_at; Start 430; Stop 454
gaagcaactcttttatgtgattatg

SEQ ID NO: 156543 - DNA, 25 bp, Artificial
  probe
  misc_feature (1)..(25): SEQ ID NO: 3344; WAN024DG6_at; Start 474; Stop 498
gaaattagttgagcaaggagctcct

SEQ ID NO: 156544 - DNA, 25 bp, Artificial
  probe
  misc_feature (1)..(25): SEQ ID NO: 3344; WAN024DG6_at; Start 670; Stop 694
ttaacaggaggaaagctaaatgctt

SEQ ID NO: 156545 - DNA, 25 bp, Artificial
  probe
  misc_feature (1)..(25): SEQ ID NO: 3344; WAN024DG6_at; Start 313; Stop 337
tttctggatgaaccgacctcaggtc

SEQ ID NO: 156546 - DNA, 25 bp, Artificial
  probe
  misc_feature (1)..(25): SEQ ID NO: 3344; WAN024DG6_at; Start 205; Stop 229
cgagtaggattatatgatagtcgca

SEQ ID NO: 156547 - DNA, 25 bp, Artificial
  probe
  misc_feature (1)..(25): SEQ ID NO: 3344; WAN024DG6_at; Start 375; Stop 399
tttagaattgaaaacagcagggaca

SEQ ID NO: 156548 - DNA, 25 bp, Artificial
  probe
  misc_feature (1)..(25): SEQ ID NO: 3344; WAN024DG6_at; Start 635; Stop 659
catgtgagcctactttagaagatat

SEQ ID NO: 156549 - DNA, 25 bp, Artificial
  probe
  misc_feature (1)..(25): SEQ ID NO: 3344; WAN024DG6_at; Start 65; Stop 89
taacaagcggtgaattaaagagaat

SEQ ID NO: 156550 - DNA, 25 bp, Artificial
  probe
  misc_feature (1)..(25): SEQ ID NO: 3344; WAN024DG6_at; Start 248; Stop 272
tatccactggaatgaggcaacgaat

SEQ ID NO: 156551 - DNA, 25 bp, Artificial
  probe
  misc_feature (1)..(25): SEQ ID NO: 3344; WAN024DG6_at; Start 29; Stop 53
gacaatctattattttgggacaaaa

SEQ ID NO: 156552 - DNA, 25 bp, Artificial
  probe
  misc_feature (1)..(25): SEQ ID NO: 3344; WAN024DG6_at; Start 101; Stop 125
gcgatacaagtggattttatgagaa

SEQ ID NO: 156553 - DNA, 25 bp, Artificial
  probe
  misc_feature (1)..(25): SEQ ID NO: 3344; WAN024DG6_at; Start 52; Stop 76
aaatctcaaaatttaacaagcggtg

SEQ ID NO: 156554 - DNA, 25 bp, Artificial
  probe
  misc_feature (1)..(25): SEQ ID NO: 3344; WAN024DG6_at; Start 334; Stop 358
ggtctagatcccacaacttctcgaa

SEQ ID NO: 156555 - DNA, 25 bp, Artificial
  probe
  misc_feature (1)..(25): SEQ ID NO: 3344; WAN024DG6_at; Start 301; Stop 325
cccgctgtactctttctggatgaac

SEQ ID NO: 156556 - DNA, 25 bp, Artificial
  probe
  misc_feature (1)..(25): SEQ ID NO: 3344; WAN024DG6_at; Start 398; Stop 422
caacgatttttctaacgactcatga

SEQ ID NO: 156557 - DNA, 25 bp, Artificial
  probe
  misc_feature (1)..(25): SEQ ID NO: 3344; WAN024DG6_at; Start 327; Stop 351
gacctcaggtctagatcccacaact

SEQ ID NO: 156558 - DNA, 25 bp, Artificial
  probe
  misc_feature (1)..(25): SEQ ID NO: 3344; WAN024DG6_at; Start 387; Stop 411
aacagcagggacaacgatttttcta

SEQ ID NO: 156559 - DNA, 25 bp, Artificial
  probe
  misc_feature (1)..(25): SEQ ID NO: 3344; WAN024DG6_at; Start 233; Stop 257
tggtagcaggaaaattatccactgg

SEQ ID NO: 156560 - DNA, 25 bp, Artificial
  probe
  misc_feature (1)..(25): SEQ ID NO: 3344; WAN024DG6_at; Start 84; Stop 108
gagaattggattggttagcgataca

SEQ ID NO: 156561 - DNA, 25 bp, Artificial
  probe
  misc_feature (1)..(25): SEQ ID NO: 3344; WAN024DG6_at; Start 451; Stop 475
tatgttgccttattaaataaaggga

SEQ ID NO: 156562 - DNA, 25 bp, Artificial
  probe
  misc_feature (1)..(25): SEQ ID NO: 3344; WAN024DG6_at; Start 579; Stop 603
tacatcactagaacaggtatctcag

SEQ ID NO: 156563 - DNA, 25 bp, Artificial
  probe
  misc_feature (1)..(25): SEQ ID NO: 3344; WAN024DG6_at; Start 540; Stop 564
ggttacagattataatgggaatcag

SEQ ID NO: 156564 - DNA, 25 bp, Artificial
  probe
  misc_feature (1)..(25): SEQ ID NO: 3344; WAN024DG6_at; Start 655; Stop 679
gatatttttatcacattaacaggag

SEQ ID NO: 156565 - DNA, 25 bp, Artificial
  probe
  misc_feature (1)..(25): SEQ ID NO: 3344; WAN024DG6_at; Start 219; Stop 243
tgatagtcgcaagatggtagcagga

SEQ ID NO: 156566 - DNA, 25 bp, Artificial
  probe
  misc_feature (1)..(25): SEQ ID NO: 3344; WAN024DG6_at; Start 3; Stop 27
gactgggcagttccttgccgataaa

SEQ ID NO: 156567 - DNA, 25 bp, Artificial
  probe
  misc_feature (1)..(25): SEQ ID NO: 3344; WAN024DG6_at; Start 490; Stop 514
ggagctccttctgaactcattcaaa

SEQ ID NO: 156568 - DNA, 25 bp, Artificial
  probe
  misc_feature (1)..(25): SEQ ID NO: 3344; WAN024DG6_at; Start 273; Stop 297
gcttttagcacgagctcttatcaac

SEQ ID NO: 156569 - DNA, 25 bp, Artificial
  probe
  misc_feature (1)..(25): SEQ ID NO: 3344; WAN024DG6_at; Start 623; Stop 647
tttcaattcattcatgtgagcctac

SEQ ID NO: 156570 - DNA, 25 bp, Artificial
  probe
  misc_feature (1)..(25): SEQ ID NO: 3344; WAN024DG6_at; Start 345; Stop 369
cacaacttctcgaacaattcatgag

SEQ ID NO: 156571 - DNA, 25 bp, Artificial
  probe
  misc_feature (1)..(25): SEQ ID NO: 3344; WAN024DG6_at; Start 15; Stop 39
ccttgccgataaaggacaatctatt

SEQ ID NO: 156572 - DNA, 25 bp, Artificial
  probe
  misc_feature (1)..(25): SEQ ID NO: 2994; WAN024DG7_at; Start 12; Stop 36
aaatgtagaatataaaggaggtgca

SEQ ID NO: 156573 - DNA, 25 bp, Artificial
  probe
  misc_feature (1)..(25): SEQ ID NO: 2994; WAN024DG7_at; Start 27; Stop 51
aggaggtgcaatgagtatgattgaa

SEQ ID NO: 156574 - DNA, 25 bp, Artificial
  probe
  misc_feature (1)..(25): SEQ ID NO: 2994; WAN024DG7_at; Start 38; Stop 62
tgagtatgattgaagttagccattt

SEQ ID NO: 156575 - DNA, 25 bp, Artificial
  probe
  misc_feature (1)..(25): SEQ ID NO: 2994; WAN024DG7_at; Start 13; Stop 37
aatgtagaatataaaggaggtgcaa

SEQ ID NO: 156576 - DNA, 25 bp, Artificial
  probe
  misc_feature (1)..(25): SEQ ID NO: 2994; WAN024DG7_at; Start 23; Stop 47
ataaaggaggtgcaatgagtatgat

SEQ ID NO: 156577 - DNA, 25 bp, Artificial
  probe
  misc_feature (1)..(25): SEQ ID NO: 2994; WAN024DG7_at; Start 44; Stop 68
tgattgaagttagccatttatcaaa

SEQ ID NO: 156578 - DNA, 25 bp, Artificial
  probe
  misc_feature (1)..(25): SEQ ID NO: 2994; WAN024DG7_at; Start 88; Stop 112
gctttaaataatataagcttcactg

SEQ ID NO: 156579 - DNA, 25 bp, Artificial
  probe
  misc_feature (1)..(25): SEQ ID NO: 2994; WAN024DG7_at; Start 41; Stop 65
gtatgattgaagttagccatttatc

SEQ ID NO: 156580 - DNA, 25 bp, Artificial
  probe
  misc_feature (1)..(25): SEQ ID NO: 2994; WAN024DG7_at; Start 26; Stop 50
aaggaggtgcaatgagtatgattga

SEQ ID NO: 156581 - DNA, 25 bp, Artificial
  probe
  misc_feature (1)..(25): SEQ ID NO: 2994; WAN024DG7_at; Start 89; Stop 113
ctttaaataatataagcttcactgt

SEQ ID NO: 156582 - DNA, 25 bp, Artificial
  probe
  misc_feature (1)..(25): SEQ ID NO: 2994; WAN024DG7_at; Start 94; Stop 118
aataatataagcttcactgttaaag

SEQ ID NO: 156583 - DNA, 25 bp, Artificial
  probe
  misc_feature (1)..(25): SEQ ID NO: 2994; WAN024DG7_at; Start 24; Stop 48
taaaggaggtgcaatgagtatgatt

SEQ ID NO: 156584 - DNA, 25 bp, Artificial
  probe
  misc_feature (1)..(25): SEQ ID NO: 2994; WAN024DG7_at; Start 18; Stop 42
agaatataaaggaggtgcaatgagt

SEQ ID NO: 156585 - DNA, 25 bp, Artificial
  probe
  misc_feature (1)..(25): SEQ ID NO: 2994; WAN024DG7_at; Start 25; Stop 49
aaaggaggtgcaatgagtatgattg

SEQ ID NO: 156586 - DNA, 25 bp, Artificial
  probe
  misc_feature (1)..(25): SEQ ID NO: 2994; WAN024DG7_at; Start 42; Stop 66
tatgattgaagttagccatttatca

SEQ ID NO: 156587 - DNA, 25 bp, Artificial
  probe
  misc_feature (1)..(25): SEQ ID NO: 2994; WAN024DG7_at; Start 98; Stop 122
atataagcttcactgttaaagaagg

SEQ ID NO: 156588 - DNA, 25 bp, Artificial
  probe
  misc_feature (1)..(25): SEQ ID NO: 2994; WAN024DG7_at; Start 39; Stop 63
gagtatgattgaagttagccattta

SEQ ID NO: 156589 - DNA, 25 bp, Artificial
  probe
  misc_feature (1)..(25): SEQ ID NO: 2994; WAN024DG7_at; Start 11; Stop 35
aaaatgtagaatataaaggaggtgc

SEQ ID NO: 156590 - DNA, 25 bp, Artificial
  probe
  misc_feature (1)..(25): SEQ ID NO: 2994; WAN024DG7_at; Start 17; Stop 41
tagaatataaaggaggtgcaatgag

SEQ ID NO: 156591 - DNA, 25 bp, Artificial
  probe
  misc_feature (1)..(25): SEQ ID NO: 2994; WAN024DG7_at; Start 20; Stop 44
aatataaaggaggtgcaatgagtat

SEQ ID NO: 156592 - DNA, 25 bp, Artificial
  probe
  misc_feature (1)..(25): SEQ ID NO: 2994; WAN024DG7_at; Start 92; Stop 116
taaataatataagcttcactgttaa

SEQ ID NO: 156593 - DNA, 25 bp, Artificial
  probe
  misc_feature (1)..(25): SEQ ID NO: 2994; WAN024DG7_at; Start 97; Stop 121
aatataagcttcactgttaaagaag

SEQ ID NO: 156594 - DNA, 25 bp, Artificial
  probe
  misc_feature (1)..(25): SEQ ID NO: 2994; WAN024DG7_at; Start 31; Stop 55
ggtgcaatgagtatgattgaagtta

SEQ ID NO: 156595 - DNA, 25 bp, Artificial
  probe
  misc_feature (1)..(25): SEQ ID NO: 2994; WAN024DG7_at; Start 96; Stop 120
taatataagcttcactgttaaagaa

SEQ ID NO: 156596 - DNA, 25 bp, Artificial
  probe
  misc_feature (1)..(25): SEQ ID NO: 2994; WAN024DG7_at; Start 36; Stop 60
aatgagtatgattgaagttagccat

SEQ ID NO: 156597 - DNA, 25 bp, Artificial
  probe
  misc_feature (1)..(25): SEQ ID NO: 2994; WAN024DG7_at; Start 19; Stop 43
gaatataaaggaggtgcaatgagta

SEQ ID NO: 156598 - DNA, 25 bp, Artificial
  probe
  misc_feature (1)..(25): SEQ ID NO: 2994; WAN024DG7_at; Start 29; Stop 53
gaggtgcaatgagtatgattgaagt

SEQ ID NO: 156599 - DNA, 25 bp, Artificial
  probe
  misc_feature (1)..(25): SEQ ID NO: 2994; WAN024DG7_at; Start 74; Stop 98
ttggtgataaaatagctttaaataa

SEQ ID NO: 156600 - DNA, 25 bp, Artificial
  probe
  misc_feature (1)..(25): SEQ ID NO: 2994; WAN024DG7_at; Start 33; Stop 57
tgcaatgagtatgattgaagttagc

SEQ ID NO: 156601 - DNA, 25 bp, Artificial
  probe
  misc_feature (1)..(25): SEQ ID NO: 2994; WAN024DG7_at; Start 35; Stop 59
caatgagtatgattgaagttagcca

SEQ ID NO: 156602 - DNA, 25 bp, Artificial
  probe
  misc_feature (1)..(25): SEQ ID NO: 2994; WAN024DG7_at; Start 15; Stop 39
tgtagaatataaaggaggtgcaatg

SEQ ID NO: 156603 - DNA, 25 bp, Artificial
  probe
  misc_feature (1)..(25): SEQ ID NO: 2994; WAN024DG7_at; Start 22; Stop 46
tataaaggaggtgcaatgagtatga

SEQ ID NO: 156604 - DNA, 25 bp, Artificial
  probe
  misc_feature (1)..(25): SEQ ID NO: 2994; WAN024DG7_at; Start 34; Stop 58
gcaatgagtatgattgaagttagcc

SEQ ID NO: 156605 - DNA, 25 bp, Artificial
  probe
  misc_feature (1)..(25): SEQ ID NO: 2994; WAN024DG7_at; Start 16; Stop 40
gtagaatataaaggaggtgcaatga

SEQ ID NO: 156606 - DNA, 25 bp, Artificial
  probe
  misc_feature (1)..(25): SEQ ID NO: 7226; WAN024DG8_at; Start 173; Stop 197
tctcatattataaacgtaagcgtta

SEQ ID NO: 156607 - DNA, 25 bp, Artificial
  probe
  misc_feature (1)..(25): SEQ ID NO: 7226; WAN024DG8_at; Start 210; Stop 234
tcattataacatcccagaaatattt

SEQ ID NO: 156608 - DNA, 25 bp, Artificial
  probe
  misc_feature (1)..(25): SEQ ID NO: 7226; WAN024DG8_at; Start 124; Stop 148
gacattctccgttttccagaacata

SEQ ID NO: 156609 - DNA, 25 bp, Artificial
  probe
  misc_feature (1)..(25): SEQ ID NO: 7226; WAN024DG8_at; Start 30; Stop 54
tactcctcctgataataagcaaaaa

SEQ ID NO: 156610 - DNA, 25 bp, Artificial
  probe
  misc_feature (1)..(25): SEQ ID NO: 7226; WAN024DG8_at; Start 42; Stop 66
taataagcaaaaacaaactgaacga

SEQ ID NO: 156611 - DNA, 25 bp, Artificial
  probe
  misc_feature (1)..(25): SEQ ID NO: 7226; WAN024DG8_at; Start 169; Stop 193
gatttctcatattataaacgtaagc

SEQ ID NO: 156612 - DNA, 25 bp, Artificial
  probe
  misc_feature (1)..(25): SEQ ID NO: 7226; WAN024DG8_at; Start 163; Stop 187
gagcatgatttctcatattataaac

SEQ ID NO: 156613 - DNA, 25 bp, Artificial
  probe
  misc_feature (1)..(25): SEQ ID NO: 7226; WAN024DG8_at; Start 126; Stop 150
cattctccgttttccagaacatatt

SEQ ID NO: 156614 - DNA, 25 bp, Artificial
  probe
  misc_feature (1)..(25): SEQ ID NO: 7226; WAN024DG8_at; Start 69; Stop 93
aaatgttttcgctctaatattgtta

SEQ ID NO: 156615 - DNA, 25 bp, Artificial
  probe
  misc_feature (1)..(25): SEQ ID NO: 7226; WAN024DG8_at; Start 184; Stop 208
aaacgtaagcgttatctattaggat

SEQ ID NO: 156616 - DNA, 25 bp, Artificial
  probe
  misc_feature (1)..(25): SEQ ID NO: 7226; WAN024DG8_at; Start 145; Stop 169
catatttttcttgacttagagcatg

SEQ ID NO: 156617 - DNA, 25 bp, Artificial
  probe
  misc_feature (1)..(25): SEQ ID NO: 7226; WAN024DG8_at; Start 153; Stop 177
tcttgacttagagcatgatttctca

SEQ ID NO: 156618 - DNA, 25 bp, Artificial
  probe
  misc_feature (1)..(25): SEQ ID NO: 7226; WAN024DG8_at; Start 24; Stop 48
aaaagctactcctcctgataataag

SEQ ID NO: 156619 - DNA, 25 bp, Artificial
  probe
  misc_feature (1)..(25): SEQ ID NO: 7226; WAN024DG8_at; Start 49; Stop 73
caaaaacaaactgaacgaataaatg

SEQ ID NO: 156620 - DNA, 25 bp, Artificial
  probe
  misc_feature (1)..(25): SEQ ID NO: 7226; WAN024DG8_at; Start 205; Stop 229
ggatttcattataacatcccagaaa

SEQ ID NO: 156621 - DNA, 25 bp, Artificial
  probe
  misc_feature (1)..(25): SEQ ID NO: 7226; WAN024DG8_at; Start 119; Stop 143
aattggacattctccgttttccaga

SEQ ID NO: 156622 - DNA, 25 bp, Artificial
  probe
  misc_feature (1)..(25): SEQ ID NO: 7226; WAN024DG8_at; Start 115; Stop 139
tacaaattggacattctccgttttc

SEQ ID NO: 156623 - DNA, 25 bp, Artificial
  probe
  misc_feature (1)..(25): SEQ ID NO: 7226; WAN024DG8_at; Start 122; Stop 146
tggacattctccgttttccagaaca

SEQ ID NO: 156624 - DNA, 25 bp, Artificial
  probe
  misc_feature (1)..(25): SEQ ID NO: 7226; WAN024DG8_at; Start 78; Stop 102
cgctctaatattgttatctttcact

SEQ ID NO: 156625 - DNA, 25 bp, Artificial
  probe
  misc_feature (1)..(25): SEQ ID NO: 7226; WAN024DG8_at; Start 33; Stop 57
tcctcctgataataagcaaaaacaa

SEQ ID NO: 156626 - DNA, 25 bp, Artificial
  probe
  misc_feature (1)..(25): SEQ ID NO: 7226; WAN024DG8_at; Start 19; Stop 43
gataaaaaagctactcctcctgata

SEQ ID NO: 156627 - DNA, 25 bp, Artificial
  probe
  misc_feature (1)..(25): SEQ ID NO: 7226; WAN024DG8_at; Start 17; Stop 41
cagataaaaaagctactcctcctga

SEQ ID NO: 156628 - DNA, 25 bp, Artificial
  probe
  misc_feature (1)..(25): SEQ ID NO: 7226; WAN024DG8_at; Start 188; Stop 212
gtaagcgttatctattaggatttca

SEQ ID NO: 156629 - DNA, 25 bp, Artificial
  probe
  misc_feature (1)..(25): SEQ ID NO: 7226; WAN024DG8_at; Start 142; Stop 166
gaacatatttttcttgacttagagc

SEQ ID NO: 156630 - DNA, 25 bp, Artificial
  probe
  misc_feature (1)..(25): SEQ ID NO: 7226; WAN024DG8_at; Start 21; Stop 45
taaaaaagctactcctcctgataat

SEQ ID NO: 156631 - DNA, 25 bp, Artificial
  probe
  misc_feature (1)..(25): SEQ ID NO: 7226; WAN024DG8_at; Start 6; Stop 30
ctgcccaatagcagataaaaaagct

SEQ ID NO: 156632 - DNA, 25 bp, Artificial
  probe
  misc_feature (1)..(25): SEQ ID NO: 7226; WAN024DG8_at; Start 28; Stop 52
gctactcctcctgataataagcaaa

SEQ ID NO: 156633 - DNA, 25 bp, Artificial
  probe
  misc_feature (1)..(25): SEQ ID NO: 7226; WAN024DG8_at; Start 1; Stop 25
gtgaactgcccaatagcagataaaa

SEQ ID NO: 156634 - DNA, 25 bp, Artificial
  probe
  misc_feature (1)..(25): SEQ ID NO: 7226; WAN024DG8_at; Start 37; Stop 61
cctgataataagcaaaaacaaactg

SEQ ID NO: 156635 - DNA, 25 bp, Artificial
  probe
  misc_feature (1)..(25): SEQ ID NO: 7226; WAN024DG8_at; Start 45; Stop 69
taagcaaaaacaaactgaacgaata

SEQ ID NO: 156636 - DNA, 25 bp, Artificial
  probe
  misc_feature (1)..(25): SEQ ID NO: 7226; WAN024DG8_at; Start 55; Stop 79
caaactgaacgaataaatgttttcg

SEQ ID NO: 156637 - DNA, 25 bp, Artificial
  probe
  misc_feature (1)..(25): SEQ ID NO: 7226; WAN024DG8_at; Start 203; Stop 227
taggatttcattataacatcccaga

SEQ ID NO: 156638 - DNA, 25 bp, Artificial
  probe
  misc_feature (1)..(25): SEQ ID NO: 7226; WAN024DG8_at; Start 61; Stop 85
gaacgaataaatgttttcgctctaa

SEQ ID NO: 156639 - DNA, 25 bp, Artificial
  probe
  misc_feature (1)..(25): SEQ ID NO: 7226; WAN024DG8_at; Start 157; Stop 181
gacttagagcatgatttctcatatt

SEQ ID NO: 156640 - DNA, 25 bp, Artificial
  probe
  misc_feature (1)..(25): SEQ ID NO: 3862; WAN024DG9_at; Start 54; Stop 78
cttattatcaggaggagtagctttt

SEQ ID NO: 156641 - DNA, 25 bp, Artificial
  probe
  misc_feature (1)..(25): SEQ ID NO: 3862; WAN024DG9_at; Start 83; Stop 107
ctgctattgggcagttcactgttat

SEQ ID NO: 156642 - DNA, 25 bp, Artificial
  probe
  misc_feature (1)..(25): SEQ ID NO: 3862; WAN024DG9_at; Start 20; Stop 44
gagcgaaaacatttattcgttcagt

SEQ ID NO: 156643 - DNA, 25 bp, Artificial
  probe
  misc_feature (1)..(25): SEQ ID NO: 3862; WAN024DG9_at; Start 85; Stop 109
gctattgggcagttcactgttatag

SEQ ID NO: 156644 - DNA, 25 bp, Artificial
  probe
  misc_feature (1)..(25): SEQ ID NO: 3862; WAN024DG9_at; Start 64; Stop 88
ggaggagtagcttttttatctgcta

SEQ ID NO: 156645 - DNA, 25 bp, Artificial
  probe
  misc_feature (1)..(25): SEQ ID NO: 3862; WAN024DG9_at; Start 125; Stop 149
tattgttcttgggtattatttttgc

SEQ ID NO: 156646 - DNA, 25 bp, Artificial
  probe
  misc_feature (1)..(25): SEQ ID NO: 3862; WAN024DG9_at; Start 332; Stop 356
tagtgtgtcttagttattatataac

SEQ ID NO: 156647 - DNA, 25 bp, Artificial
  probe
  misc_feature (1)..(25): SEQ ID NO: 3862; WAN024DG9_at; Start 46; Stop 70
tgtttttgcttattatcaggaggag

SEQ ID NO: 156648 - DNA, 25 bp, Artificial
  probe
  misc_feature (1)..(25): SEQ ID NO: 3862; WAN024DG9_at; Start 7; Stop 31
gataacaatattagagcgaaaacat

SEQ ID NO: 156649 - DNA, 25 bp, Artificial
  probe
  misc_feature (1)..(25): SEQ ID NO: 3862; WAN024DG9_at; Start 15; Stop 39
tattagagcgaaaacatttattcgt

SEQ ID NO: 156650 - DNA, 25 bp, Artificial
  probe
  misc_feature (1)..(25): SEQ ID NO: 3862; WAN024DG9_at; Start 261; Stop 285
tcagttaccagtggatatttttatt

SEQ ID NO: 156651 - DNA, 25 bp, Artificial
  probe
  misc_feature (1)..(25): SEQ ID NO: 3862; WAN024DG9_at; Start 72; Stop 96
agcttttttatctgctattgggcag

SEQ ID NO: 156652 - DNA, 25 bp, Artificial
  probe
  misc_feature (1)..(25): SEQ ID NO: 3862; WAN024DG9_at; Start 41; Stop 65
cagtttgtttttgcttattatcagg

SEQ ID NO: 156653 - DNA, 25 bp, Artificial
  probe
  misc_feature (1)..(25): SEQ ID NO: 3862; WAN024DG9_at; Start 316; Stop 340
tttattatgttaggtatagtgtgtc

SEQ ID NO: 156654 - DNA, 25 bp, Artificial
  probe
  misc_feature (1)..(25): SEQ ID NO: 3862; WAN024DG9_at; Start 202; Stop 226
gtatggcttttttcatcgtttgaga

SEQ ID NO: 156655 - DNA, 25 bp, Artificial
  probe
  misc_feature (1)..(25): SEQ ID NO: 3862; WAN024DG9_at; Start 50; Stop 74
tttgcttattatcaggaggagtagc

SEQ ID NO: 156656 - DNA, 25 bp, Artificial
  probe
  misc_feature (1)..(25): SEQ ID NO: 3862; WAN024DG9_at; Start 59; Stop 83
tatcaggaggagtagcttttttatc

SEQ ID NO: 156657 - DNA, 25 bp, Artificial
  probe
  misc_feature (1)..(25): SEQ ID NO: 3862; WAN024DG9_at; Start 79; Stop 103
ttatctgctattgggcagttcactg

SEQ ID NO: 156658 - DNA, 25 bp, Artificial
  probe
  misc_feature (1)..(25): SEQ ID NO: 3862; WAN024DG9_at; Start 185; Stop 209
catcattggaaaatatagtatggct

SEQ ID NO: 156659 - DNA, 25 bp, Artificial
  probe
  misc_feature (1)..(25): SEQ ID NO: 3862; WAN024DG9_at; Start 321; Stop 345
tatgttaggtatagtgtgtcttagt

SEQ ID NO: 156660 - DNA, 25 bp, Artificial
  probe
  misc_feature (1)..(25): SEQ ID NO: 3862; WAN024DG9_at; Start 254; Stop 278
catttattcagttaccagtggatat

SEQ ID NO: 156661 - DNA, 25 bp, Artificial
  probe
  misc_feature (1)..(25): SEQ ID NO: 3862; WAN024DG9_at; Start 187; Stop 211
tcattggaaaatatagtatggcttt

SEQ ID NO: 156662 - DNA, 25 bp, Artificial
  probe
  misc_feature (1)..(25): SEQ ID NO: 3862; WAN024DG9_at; Start 62; Stop 86
caggaggagtagcttttttatctgc

SEQ ID NO: 156663 - DNA, 25 bp, Artificial
  probe
  misc_feature (1)..(25): SEQ ID NO: 3862; WAN024DG9_at; Start 147; Stop 171
tgctatatattatgcttactacaat

SEQ ID NO: 156664 - DNA, 25 bp, Artificial
  probe
  misc_feature (1)..(25): SEQ ID NO: 3862; WAN024DG9_at; Start 249; Stop 273
tagaacatttattcagttaccagtg

SEQ ID NO: 156665 - DNA, 25 bp, Artificial
  probe
  misc_feature (1)..(25): SEQ ID NO: 3862; WAN024DG9_at; Start 215; Stop 239
catcgtttgagattttatttttgct

SEQ ID NO: 156666 - DNA, 25 bp, Artificial
  probe
  misc_feature (1)..(25): SEQ ID NO: 3862; WAN024DG9_at; Start 305; Stop 329
tgctgtggatatttattatgttagg

SEQ ID NO: 156667 - DNA, 25 bp, Artificial
  probe
  misc_feature (1)..(25): SEQ ID NO: 3862; WAN024DG9_at; Start 77; Stop 101
ttttatctgctattgggcagttcac

SEQ ID NO: 156668 - DNA, 25 bp, Artificial
  probe
  misc_feature (1)..(25): SEQ ID NO: 3862; WAN024DG9_at; Start 23; Stop 47
cgaaaacatttattcgttcagtttg

SEQ ID NO: 156669 - DNA, 25 bp, Artificial
  probe
  misc_feature (1)..(25): SEQ ID NO: 3862; WAN024DG9_at; Start 33; Stop 57
tattcgttcagtttgtttttgctta

SEQ ID NO: 156670 - DNA, 25 bp, Artificial
  probe
  misc_feature (1)..(25): SEQ ID NO: 3862; WAN024DG9_at; Start 251; Stop 275
gaacatttattcagttaccagtgga

SEQ ID NO: 156671 - DNA, 25 bp, Artificial
  probe
  misc_feature (1)..(25): SEQ ID NO: 3862; WAN024DG9_at; Start 52; Stop 76
tgcttattatcaggaggagtagctt

SEQ ID NO: 156672 - DNA, 25 bp, Artificial
  probe
  misc_feature (1)..(25): SEQ ID NO: 3862; WAN024DG9_at; Start 2; Stop 26
tgaaagataacaatattagagcgaa

SEQ ID NO: 156673 - DNA, 25 bp, Artificial
  probe
  misc_feature (1)..(25): SEQ ID NO: 3862; WAN024DG9_at; Start 171; Stop 195
taaaaatattcaaacatcattggaa

SEQ ID NO: 156674 - DNA, 25 bp, Artificial
  probe
  misc_feature (1)..(25): SEQ ID NO: 2803; WAN024DGA_at; Start 130; Stop 154
cacaagtataattcagatgttcagg

SEQ ID NO: 156675 - DNA, 25 bp, Artificial
  probe
  misc_feature (1)..(25): SEQ ID NO: 2803; WAN024DGA_at; Start 444; Stop 468
gactacaccagagatgcctgctatt

SEQ ID NO: 156676 - DNA, 25 bp, Artificial
  probe
  misc_feature (1)..(25): SEQ ID NO: 2803; WAN024DGA_at; Start 297; Stop 321
taagatatcctacatatcaggaggg

SEQ ID NO: 156677 - DNA, 25 bp, Artificial
  probe
  misc_feature (1)..(25): SEQ ID NO: 2803; WAN024DGA_at; Start 91; Stop 115
gttggtaaggagaagattaatgttc

SEQ ID NO: 156678 - DNA, 25 bp, Artificial
  probe
  misc_feature (1)..(25): SEQ ID NO: 2803; WAN024DGA_at; Start 151; Stop 175
caggtagtacctatttctattaaag

SEQ ID NO: 156679 - DNA, 25 bp, Artificial
  probe
  misc_feature (1)..(25): SEQ ID NO: 2803; WAN024DGA_at; Start 247; Stop 271
gatacgcccattgatattataaaaa

SEQ ID NO: 156680 - DNA, 25 bp, Artificial
  probe
  misc_feature (1)..(25): SEQ ID NO: 2803; WAN024DGA_at; Start 523; Stop 547
gaaatcctaatagataacgcttacg

SEQ ID NO: 156681 - DNA, 25 bp, Artificial
  probe
  misc_feature (1)..(25): SEQ ID NO: 2803; WAN024DGA_at; Start 4; Stop 28
tatggagtgaggaaacttattgtcg

SEQ ID NO: 156682 - DNA, 25 bp, Artificial
  probe
  misc_feature (1)..(25): SEQ ID NO: 2803; WAN024DGA_at; Start 272; Stop 296
ttgtcaatcaatttgctgtatcgca

SEQ ID NO: 156683 - DNA, 25 bp, Artificial
  probe
  misc_feature (1)..(25): SEQ ID NO: 2803; WAN024DGA_at; Start 366; Stop 390
catcggttcttgctttggttgtcgg

SEQ ID NO: 156684 - DNA, 25 bp, Artificial
  probe
  misc_feature (1)..(25): SEQ ID NO: 2803; WAN024DGA_at; Start 44; Stop 68
tagaaccatcaaatttaaataggca

SEQ ID NO: 156685 - DNA, 25 bp, Artificial
  probe
  misc_feature (1)..(25): SEQ ID NO: 2803; WAN024DGA_at; Start 455; Stop 479
agatgcctgctattttgggagggat

SEQ ID NO: 156686 - DNA, 25 bp, Artificial
  probe
  misc_feature (1)..(25): SEQ ID NO: 2803; WAN024DGA_at; Start 595; Stop 619
gaaaacggagaatgtccaatttgta

SEQ ID NO: 156687 - DNA, 25 bp, Artificial
  probe
  misc_feature (1)..(25): SEQ ID NO: 2803; WAN024DGA_at; Start 572; Stop 596
taagtcaagaaaaatatgttctgga

SEQ ID NO: 156688 - DNA, 25 bp, Artificial
  probe
  misc_feature (1)..(25): SEQ ID NO: 2803; WAN024DGA_at; Start 166; Stop 190
tctattaaagtttcttcagtagaag

SEQ ID NO: 156689 - DNA, 25 bp, Artificial
  probe
  misc_feature (1)..(25): SEQ ID NO: 2803; WAN024DGA_at; Start 507; Stop 531
tctgggatgttataatgaaatccta

SEQ ID NO: 156690 - DNA, 25 bp, Artificial
  probe
  misc_feature (1)..(25): SEQ ID NO: 2803; WAN024DGA_at; Start 211; Stop 235
gaatatgggagtatagattttatcg

SEQ ID NO: 156691 - DNA, 25 bp, Artificial
  probe
  misc_feature (1)..(25): SEQ ID NO: 2803; WAN024DGA_at; Start 348; Stop 372
taatatatatatccctaccatcggt

SEQ ID NO: 156692 - DNA, 25 bp, Artificial
  probe
  misc_feature (1)..(25): SEQ ID NO: 2803; WAN024DGA_at; Start 138; Stop 162
taattcagatgttcaggtagtacct

SEQ ID NO: 156693 - DNA, 25 bp, Artificial
  probe
  misc_feature (1)..(25): SEQ ID NO: 2803; WAN024DGA_at; Start 26; Stop 50
tcgctgattacgatataatagaacc

SEQ ID NO: 156694 - DNA, 25 bp, Artificial
  probe
  misc_feature (1)..(25): SEQ ID NO: 2803; WAN024DGA_at; Start 586; Stop 610
tatgttctggaaaacggagaatgtc

SEQ ID NO: 156695 - DNA, 25 bp, Artificial
  probe
  misc_feature (1)..(25): SEQ ID NO: 2803; WAN024DGA_at; Start 422; Stop 446
tatctgataagacaaagtggccgac

SEQ ID NO: 156696 - DNA, 25 bp, Artificial
  probe
  misc_feature (1)..(25): SEQ ID NO: 2803; WAN024DGA_at; Start 557; Stop 581
tgagaaatcatgctctaagtcaaga

SEQ ID NO: 156697 - DNA, 25 bp, Artificial
  probe
  misc_feature (1)..(25): SEQ ID NO: 2803; WAN024DGA_at; Start 199; Stop 223
aaaattgttgcggaatatgggagta

SEQ ID NO: 156698 - DNA, 25 bp, Artificial
  probe
  misc_feature (1)..(25): SEQ ID NO: 2803; WAN024DGA_at; Start 537; Stop 561
taacgcttacgtttataatatgaga

SEQ ID NO: 156699 - DNA, 25 bp, Artificial
  probe
  misc_feature (1)..(25): SEQ ID NO: 2803; WAN024DGA_at; Start 470; Stop 494
tgggagggataatgactaatttaat

SEQ ID NO: 156700 - DNA, 25 bp, Artificial
  probe
  misc_feature (1)..(25): SEQ ID NO: 2803; WAN024DGA_at; Start 286; Stop 310
gctgtatcgcataagatatcctaca

SEQ ID NO: 156701 - DNA, 25 bp, Artificial
  probe
  misc_feature (1)..(25): SEQ ID NO: 2803; WAN024DGA_at; Start 382; Stop 406
ggttgtcggaatataaacaaagata

SEQ ID NO: 156702 - DNA, 25 bp, Artificial
  probe
  misc_feature (1)..(25): SEQ ID NO: 2803; WAN024DGA_at; Start 114; Stop 138
tctttctgaaaaaatacacaagtat

SEQ ID NO: 156703 - DNA, 25 bp, Artificial
  probe
  misc_feature (1)..(25): SEQ ID NO: 2803; WAN024DGA_at; Start 14; Stop 38
ggaaacttattgtcgctgattacga

SEQ ID NO: 156704 - DNA, 25 bp, Artificial
  probe
  misc_feature (1)..(25): SEQ ID NO: 2803; WAN024DGA_at; Start 434; Stop 458
caaagtggccgactacaccagagat

SEQ ID NO: 156705 - DNA, 25 bp, Artificial
  probe
  misc_feature (1)..(25): SEQ ID NO: 2803; WAN024DGA_at; Start 63; Stop 87
taggcaaattctttatacagagtcg

SEQ ID NO: 156706 - DNA, 25 bp, Artificial
  probe
  misc_feature (1)..(25): SEQ ID NO: 2803; WAN024DGA_at; Start 313; Stop 337
tcaggagggtttaatggatgctatc

SEQ ID NO: 156707 - DNA, 25 bp, Artificial
  probe
  misc_feature (1)..(25): SEQ ID NO: 2803; WAN024DGA_at; Start 231; Stop 255
tatcgttaaagcaattgatacgccc

SEQ ID NO: 156708 - DNA, 25 bp, Artificial
  probe
  misc_feature (1)..(25): SEQ ID NO: 4863; WAN024DGB_at; Start 331; Stop 355
cagtatgatagtggtattattttaa

SEQ ID NO: 156709 - DNA, 25 bp, Artificial
  probe
  misc_feature (1)..(25): SEQ ID NO: 4863; WAN024DGB_at; Start 384; Stop 408
gaattttcaatatatagttcaactt

SEQ ID NO: 156710 - DNA, 25 bp, Artificial
  probe
  misc_feature (1)..(25): SEQ ID NO: 4863; WAN024DGB_at; Start 519; Stop 543
tatattatatatgataggaaggacg

SEQ ID NO: 156711 - DNA, 25 bp, Artificial
  probe
  misc_feature (1)..(25): SEQ ID NO: 4863; WAN024DGB_at; Start 89; Stop 113
tcccaaattgtggaataatgctact

SEQ ID NO: 156712 - DNA, 25 bp, Artificial
  probe
  misc_feature (1)..(25): SEQ ID NO: 4863; WAN024DGB_at; Start 362; Stop 386
tgaattctaacaataataacttgaa

SEQ ID NO: 156713 - DNA, 25 bp, Artificial
  probe
  misc_feature (1)..(25): SEQ ID NO: 4863; WAN024DGB_at; Start 471; Stop 495
tattattgttcgtagtataggaggg

SEQ ID NO: 156714 - DNA, 25 bp, Artificial
  probe
  misc_feature (1)..(25): SEQ ID NO: 4863; WAN024DGB_at; Start 248; Stop 272
tgttcacatcgtataaattgcttgg

SEQ ID NO: 156715 - DNA, 25 bp, Artificial
  probe
  misc_feature (1)..(25): SEQ ID NO: 4863; WAN024DGB_at; Start 445; Stop 469
caactattacagtttttgacaccca

SEQ ID NO: 156716 - DNA, 25 bp, Artificial
  probe
  misc_feature (1)..(25): SEQ ID NO: 4863; WAN024DGB_at; Start 186; Stop 210
aattatgttagcaggaattgcttca

SEQ ID NO: 156717 - DNA, 25 bp, Artificial
  probe
  misc_feature (1)..(25): SEQ ID NO: 4863; WAN024DGB_at; Start 528; Stop 552
tatgataggaaggacgaaatatgtt

SEQ ID NO: 156718 - DNA, 25 bp, Artificial
  probe
  misc_feature (1)..(25): SEQ ID NO: 4863; WAN024DGB_at; Start 539; Stop 563
ggacgaaatatgttctacgtaaata

SEQ ID NO: 156719 - DNA, 25 bp, Artificial
  probe
  misc_feature (1)..(25): SEQ ID NO: 4863; WAN024DGB_at; Start 104; Stop 128
taatgctacttttgtttaatttggc

SEQ ID NO: 156720 - DNA, 25 bp, Artificial
  probe
  misc_feature (1)..(25): SEQ ID NO: 4863; WAN024DGB_at; Start 194; Stop 218
tagcaggaattgcttcaaattcgat

SEQ ID NO: 156721 - DNA, 25 bp, Artificial
  probe
  misc_feature (1)..(25): SEQ ID NO: 4863; WAN024DGB_at; Start 67; Stop 91
gctaataattatcaaattgagatcc

SEQ ID NO: 156722 - DNA, 25 bp, Artificial
  probe
  misc_feature (1)..(25): SEQ ID NO: 4863; WAN024DGB_at; Start 533; Stop 557
taggaaggacgaaatatgttctacg

SEQ ID NO: 156723 - DNA, 25 bp, Artificial
  probe
  misc_feature (1)..(25): SEQ ID NO: 4863; WAN024DGB_at; Start 398; Stop 422
tagttcaacttttaatagcatttgt

SEQ ID NO: 156724 - DNA, 25 bp, Artificial
  probe
  misc_feature (1)..(25): SEQ ID NO: 4863; WAN024DGB_at; Start 51; Stop 75
tagtcatgcaataattgctaataat

SEQ ID NO: 156725 - DNA, 25 bp, Artificial
  probe
  misc_feature (1)..(25): SEQ ID NO: 4863; WAN024DGB_at; Start 252; Stop 276
cacatcgtataaattgcttggactc

SEQ ID NO: 156726 - DNA, 25 bp, Artificial
  probe
  misc_feature (1)..(25): SEQ ID NO: 4863; WAN024DGB_at; Start 270; Stop 294
tggactcttattttttatcattaac

SEQ ID NO: 156727 - DNA, 25 bp, Artificial
  probe
  misc_feature (1)..(25): SEQ ID NO: 4863; WAN024DGB_at; Start 494; Stop 518
gggtggttgtttctatactgctttc

SEQ ID NO: 156728 - DNA, 25 bp, Artificial
  probe
  misc_feature (1)..(25): SEQ ID NO: 4863; WAN024DGB_at; Start 139; Stop 163
gatttaagtggggtgcaattcctaa

SEQ ID NO: 156729 - DNA, 25 bp, Artificial
  probe
  misc_feature (1)..(25): SEQ ID NO: 4863; WAN024DGB_at; Start 215; Stop 239
cgattttatcacttacaggtttact

SEQ ID NO: 156730 - DNA, 25 bp, Artificial
  probe
  misc_feature (1)..(25): SEQ ID NO: 4863; WAN024DGB_at; Start 498; Stop 522
ggttgtttctatactgctttctata

SEQ ID NO: 156731 - DNA, 25 bp, Artificial
  probe
  misc_feature (1)..(25): SEQ ID NO: 4863; WAN024DGB_at; Start 209; Stop 233
caaattcgattttatcacttacagg

SEQ ID NO: 156732 - DNA, 25 bp, Artificial
  probe
  misc_feature (1)..(25): SEQ ID NO: 4863; WAN024DGB_at; Start 317; Stop 341
caattcctttttttcagtatgatag

SEQ ID NO: 156733 - DNA, 25 bp, Artificial
  probe
  misc_feature (1)..(25): SEQ ID NO: 4863; WAN024DGB_at; Start 466; Stop 490
cccaatattattgttcgtagtatag

SEQ ID NO: 156734 - DNA, 25 bp, Artificial
  probe
  misc_feature (1)..(25): SEQ ID NO: 4863; WAN024DGB_at; Start 236; Stop 260
tacttgttttattgttcacatcgta

SEQ ID NO: 156735 - DNA, 25 bp, Artificial
  probe
  misc_feature (1)..(25): SEQ ID NO: 4863; WAN024DGB_at; Start 91; Stop 115
ccaaattgtggaataatgctacttt

SEQ ID NO: 156736 - DNA, 25 bp, Artificial
  probe
  misc_feature (1)..(25): SEQ ID NO: 4863; WAN024DGB_at; Start 454; Stop 478
cagtttttgacacccaatattattg

SEQ ID NO: 156737 - DNA, 25 bp, Artificial
  probe
  misc_feature (1)..(25): SEQ ID NO: 4863; WAN024DGB_at; Start 78; Stop 102
tcaaattgagatcccaaattgtgga

SEQ ID NO: 156738 - DNA, 25 bp, Artificial
  probe
  misc_feature (1)..(25): SEQ ID NO: 4863; WAN024DGB_at; Start 436; Stop 460
cctttgagtcaactattacagtttt

SEQ ID NO: 156739 - DNA, 25 bp, Artificial
  probe
  misc_feature (1)..(25): SEQ ID NO: 4863; WAN024DGB_at; Start 254; Stop 278
catcgtataaattgcttggactctt

SEQ ID NO: 156740 - DNA, 25 bp, Artificial
  probe
  misc_feature (1)..(25): SEQ ID NO: 4863; WAN024DGB_at; Start 182; Stop 206
tgaaaattatgttagcaggaattgc

SEQ ID NO: 156741 - DNA, 25 bp, Artificial
  probe
  misc_feature (1)..(25): SEQ ID NO: 4863; WAN024DGB_at; Start 257; Stop 281
cgtataaattgcttggactcttatt

SEQ ID NO: 156742 - DNA, 25 bp, Artificial
  probe
  misc_feature (1)..(25): SEQ ID NO: 1833; WAN024DGC_at; Start 158; Stop 182
atgatgggacgattttttaccgagg

SEQ ID NO: 156743 - DNA, 25 bp, Artificial
  probe
  misc_feature (1)..(25): SEQ ID NO: 1833; WAN024DGC_at; Start 373; Stop 397
tatcttgacctagataagcgcatct

SEQ ID NO: 156744 - DNA, 25 bp, Artificial
  probe
  misc_feature (1)..(25): SEQ ID NO: 1833; WAN024DGC_at; Start 478; Stop 502
gagccaacagcttcaatagacccag

SEQ ID NO: 156745 - DNA, 25 bp, Artificial
  probe
  misc_feature (1)..(25): SEQ ID NO: 1833; WAN024DGC_at; Start 535; Stop 559
tctcttcgagatgataataggctaa

SEQ ID NO: 156746 - DNA, 25 bp, Artificial
  probe
  misc_feature (1)..(25): SEQ ID NO: 1833; WAN024DGC_at; Start 6; Stop 30
tgaacttaaacaggtgagtaaatct

SEQ ID NO: 156747 - DNA, 25 bp, Artificial
  probe
  misc_feature (1)..(25): SEQ ID NO: 1833; WAN024DGC_at; Start 604; Stop 628
gaagtgttcacgatggatcatctga

SEQ ID NO: 156748 - DNA, 25 bp, Artificial
  probe
  misc_feature (1)..(25): SEQ ID NO: 1833; WAN024DGC_at; Start 34; Stop 58
ggagaacgagagttattttcgaatc

SEQ ID NO: 156749 - DNA, 25 bp, Artificial
  probe
  misc_feature (1)..(25): SEQ ID NO: 1833; WAN024DGC_at; Start 564; Stop 588
tatcgcaacacataatccggcaatt

SEQ ID NO: 156750 - DNA, 25 bp, Artificial
  probe
  misc_feature (1)..(25): SEQ ID NO: 1833; WAN024DGC_at; Start 387; Stop 411
taagcgcatctttgagttatcgggc

SEQ ID NO: 156751 - DNA, 25 bp, Artificial
  probe
  misc_feature (1)..(25): SEQ ID NO: 1833; WAN024DGC_at; Start 288; Stop 312
taagctaggtctcattggtcaaaag

SEQ ID NO: 156752 - DNA, 25 bp, Artificial
  probe
  misc_feature (1)..(25): SEQ ID NO: 1833; WAN024DGC_at; Start 427; Stop 451
gttgccttggcaaaaattatcttaa

SEQ ID NO: 156753 - DNA, 25 bp, Artificial
  probe
  misc_feature (1)..(25): SEQ ID NO: 1833; WAN024DGC_at; Start 401; Stop 425
agttatcgggcggagaatcgcaacg

SEQ ID NO: 156754 - DNA, 25 bp, Artificial
  probe
  misc_feature (1)..(25): SEQ ID NO: 1833; WAN024DGC_at; Start 307; Stop 331
caaaagttgagtcggtcggaacagc

SEQ ID NO: 156755 - DNA, 25 bp, Artificial
  probe
  misc_feature (1)..(25): SEQ ID NO: 1833; WAN024DGC_at; Start 216; Stop 240
tttccgtcacgaattgggctacctc

SEQ ID NO: 156756 - DNA, 25 bp, Artificial
  probe
  misc_feature (1)..(25): SEQ ID NO: 1833; WAN024DGC_at; Start 68; Stop 92
catttgaggctggaaaagtctatgc

SEQ ID NO: 156757 - DNA, 25 bp, Artificial
  probe
  misc_feature (1)..(25): SEQ ID NO: 1833; WAN024DGC_at; Start 144; Stop 168
gaaattagaaccttatgatgggacg

SEQ ID NO: 156758 - DNA, 25 bp, Artificial
  probe
  misc_feature (1)..(25): SEQ ID NO: 1833; WAN024DGC_at; Start 276; Stop 300
tgaagaaaaccttaagctaggtctc

SEQ ID NO: 156759 - DNA, 25 bp, Artificial
  probe
  misc_feature (1)..(25): SEQ ID NO: 1833; WAN024DGC_at; Start 254; Stop 278
gcttaattgaaaaccaaagtattga

SEQ ID NO: 156760 - DNA, 25 bp, Artificial
  probe
  misc_feature (1)..(25): SEQ ID NO: 1833; WAN024DGC_at; Start 451; Stop 475
aagaatccaccctttattctggcag

SEQ ID NO: 156761 - DNA, 25 bp, Artificial
  probe
  misc_feature (1)..(25): SEQ ID NO: 1833; WAN024DGC_at; Start 592; Stop 616
gagatggctgatgaagtgttcacga

SEQ ID NO: 156762 - DNA, 25 bp, Artificial
  probe
  misc_feature (1)..(25): SEQ ID NO: 1833; WAN024DGC_at; Start 464; Stop 488
ttattctggcagatgagccaacagc

SEQ ID NO: 156763 - DNA, 25 bp, Artificial
  probe
  misc_feature (1)..(25): SEQ ID NO: 1833; WAN024DGC_at; Start 108; Stop 132
tggtagcggaaaaacaaccttgatg

SEQ ID NO: 156764 - DNA, 25 bp, Artificial
  probe
  misc_feature (1)..(25): SEQ ID NO: 1833; WAN024DGC_at; Start 122; Stop 146
caaccttgatgaacatgattgggaa

SEQ ID NO: 156765 - DNA, 25 bp, Artificial
  probe
  misc_feature (1)..(25): SEQ ID NO: 1833; WAN024DGC_at; Start 502; Stop 526
gcaacctctcagttgattatggaga

SEQ ID NO: 156766 - DNA, 25 bp, Artificial
  probe
  misc_feature (1)..(25): SEQ ID NO: 1833; WAN024DGC_at; Start 549; Stop 573
taataggctaatcattatcgcaaca

SEQ ID NO: 156767 - DNA, 25 bp, Artificial
  probe
  misc_feature (1)..(25): SEQ ID NO: 1833; WAN024DGC_at; Start 523; Stop 547
gagattttgctatctcttcgagatg

SEQ ID NO: 156768 - DNA, 25 bp, Artificial
  probe
  misc_feature (1)..(25): SEQ ID NO: 1833; WAN024DGC_at; Start 92; Stop 116
ccttaattggttcaagtggtagcgg

SEQ ID NO: 156769 - DNA, 25 bp, Artificial
  probe
  misc_feature (1)..(25): SEQ ID NO: 1833; WAN024DGC_at; Start 177; Stop 201
ccgaggtaaagacttggccaattat

SEQ ID NO: 156770 - DNA, 25 bp, Artificial
  probe
  misc_feature (1)..(25): SEQ ID NO: 1833; WAN024DGC_at; Start 342; Stop 366
gaagcaggctttagaacaggtcggc

SEQ ID NO: 156771 - DNA, 25 bp, Artificial
  probe
  misc_feature (1)..(25): SEQ ID NO: 1833; WAN024DGC_at; Start 230; Stop 254
tgggctacctcttccagaactttgg

SEQ ID NO: 156772 - DNA, 25 bp, Artificial
  probe
  misc_feature (1)..(25): SEQ ID NO: 1833; WAN024DGC_at; Start 53; Stop 77
cgaatctttcaatgacatttgaggc

SEQ ID NO: 156773 - DNA, 25 bp, Artificial
  probe
  misc_feature (1)..(25): SEQ ID NO: 1833; WAN024DGC_at; Start 489; Stop 513
ttcaatagacccagcaacctctcag

SEQ ID NO: 156774 - DNA, 25 bp, Artificial
  probe
  misc_feature (1)..(25): SEQ ID NO: 1833; WAN024DGC_at; Start 576; Stop 600
taatccggcaatttgggagatggct

SEQ ID NO: 156775 - DNA, 25 bp, Artificial
  probe
  misc_feature (1)..(25): SEQ ID NO: 1833; WAN024DGC_at; Start 21; Stop 45
gagtaaatcttttggagaacgagag

SEQ ID NO: 156776 - DNA, 25 bp, Artificial
  probe
  misc_feature (1)..(25): SEQ ID NO: 1832; WAN024DGD_at; Start 381; Stop 405
ggatttgaagcaacctatatttgag

SEQ ID NO: 156777 - DNA, 25 bp, Artificial
  probe
  misc_feature (1)..(25): SEQ ID NO: 1832; WAN024DGD_at; Start 242; Stop 266
tatttcaagattttggcttaattga

SEQ ID NO: 156778 - DNA, 25 bp, Artificial
  probe
  misc_feature (1)..(25): SEQ ID NO: 1832; WAN024DGD_at; Start 590; Stop 614
tttgggagcaagtggatcaggtcat

SEQ ID NO: 156779 - DNA, 25 bp, Artificial
  probe
  misc_feature (1)..(25): SEQ ID NO: 1832; WAN024DGD_at; Start 270; Stop 294
ccaaaccgtcaaagagaatctcaat

SEQ ID NO: 156780 - DNA, 25 bp, Artificial
  probe
  misc_feature (1)..(25): SEQ ID NO: 1832; WAN024DGD_at; Start 594; Stop 618
ggagcaagtggatcaggtcattcga

SEQ ID NO: 156781 - DNA, 25 bp, Artificial
  probe
  misc_feature (1)..(25): SEQ ID NO: 1832; WAN024DGD_at; Start 20; Stop 44
tatctaaaaaatttggaagccgtca

SEQ ID NO: 156782 - DNA, 25 bp, Artificial
  probe
  misc_feature (1)..(25): SEQ ID NO: 1832; WAN024DGD_at; Start 87; Stop 111
ttatgccttaatcggtacaagtggc

SEQ ID NO: 156783 - DNA, 25 bp, Artificial
  probe
  misc_feature (1)..(25): SEQ ID NO: 1832; WAN024DGD_at; Start 409; Stop 433
tcaggaggagaagcacaacgtgttg

SEQ ID NO: 156784 - DNA, 25 bp, Artificial
  probe
  misc_feature (1)..(25): SEQ ID NO: 1832; WAN024DGD_at; Start 400; Stop 424
tttgagttatcaggaggagaagcac

SEQ ID NO: 156785 - DNA, 25 bp, Artificial
  probe
  misc_feature (1)..(25): SEQ ID NO: 1832; WAN024DGD_at; Start 437; Stop 461
tagcgaagataattttaaaggatcc

SEQ ID NO: 156786 - DNA, 25 bp, Artificial
  probe
  misc_feature (1)..(25): SEQ ID NO: 1832; WAN024DGD_at; Start 209; Stop 233
cttctgttttctttagagattactt

SEQ ID NO: 156787 - DNA, 25 bp, Artificial
  probe
  misc_feature (1)..(25): SEQ ID NO: 1832; WAN024DGD_at; Start 390; Stop 414
gcaacctatatttgagttatcagga

SEQ ID NO: 156788 - DNA, 25 bp, Artificial
  probe
  misc_feature (1)..(25): SEQ ID NO: 1832; WAN024DGD_at; Start 511; Stop 535
tctgaggaattactttccatcctag

SEQ ID NO: 156789 - DNA, 25 bp, Artificial
  probe
  misc_feature (1)..(25): SEQ ID NO: 1832; WAN024DGD_at; Start 3; Stop 27
gattgaactaaagaatatatctaaa

SEQ ID NO: 156790 - DNA, 25 bp, Artificial
  probe
  misc_feature (1)..(25): SEQ ID NO: 1832; WAN024DGD_at; Start 549; Stop 573
tccgaatcggaccattattattgcg

SEQ ID NO: 156791 - DNA, 25 bp, Artificial
  probe
  misc_feature (1)..(25): SEQ ID NO: 1832; WAN024DGD_at; Start 411; Stop 435
aggaggagaagcacaacgtgttgca

SEQ ID NO: 156792 - DNA, 25 bp, Artificial
  probe
  misc_feature (1)..(25): SEQ ID NO: 1832; WAN024DGD_at; Start 102; Stop 126
tacaagtggctgtggtaagacaaca

SEQ ID NO: 156793 - DNA, 25 bp, Artificial
  probe
  misc_feature (1)..(25): SEQ ID NO: 1832; WAN024DGD_at; Start 279; Stop 303
caaagagaatctcaatctgggttta

SEQ ID NO: 156794 - DNA, 25 bp, Artificial
  probe
  misc_feature (1)..(25): SEQ ID NO: 1832; WAN024DGD_at; Start 95; Stop 119
taatcggtacaagtggctgtggtaa

SEQ ID NO: 156795 - DNA, 25 bp, Artificial
  probe
  misc_feature (1)..(25): SEQ ID NO: 1832; WAN024DGD_at; Start 363; Stop 387
tgtaaacctctcttatttggatttg

SEQ ID NO: 156796 - DNA, 25 bp, Artificial
  probe
  misc_feature (1)..(25): SEQ ID NO: 1832; WAN024DGD_at; Start 72; Stop 96
tgaaggtgggaaaatttatgcctta

SEQ ID NO: 156797 - DNA, 25 bp, Artificial
  probe
  misc_feature (1)..(25): SEQ ID NO: 1832; WAN024DGD_at; Start 336; Stop 360
ctctttgatgaaacaagctctaaac

SEQ ID NO: 156798 - DNA, 25 bp, Artificial
  probe
  misc_feature (1)..(25): SEQ ID NO: 1832; WAN024DGD_at; Start 603; Stop 627
ggatcaggtcattcgagttaccgat

SEQ ID NO: 156799 - DNA, 25 bp, Artificial
  probe
  misc_feature (1)..(25): SEQ ID NO: 1832; WAN024DGD_at; Start 580; Stop 604
aatcctctgatttgggagcaagtgg

SEQ ID NO: 156800 - DNA, 25 bp, Artificial
  probe
  misc_feature (1)..(25): SEQ ID NO: 1832; WAN024DGD_at; Start 330; Stop 354
gaaaatctctttgatgaaacaagct

SEQ ID NO: 156801 - DNA, 25 bp, Artificial
  probe
  misc_feature (1)..(25): SEQ ID NO: 1832; WAN024DGD_at; Start 406; Stop 430
ttatcaggaggagaagcacaacgtg

SEQ ID NO: 156802 - DNA, 25 bp, Artificial
  probe
  misc_feature (1)..(25): SEQ ID NO: 1832; WAN024DGD_at; Start 554; Stop 578
atcggaccattattattgcgaccca

SEQ ID NO: 156803 - DNA, 25 bp, Artificial
  probe
  misc_feature (1)..(25): SEQ ID NO: 1832; WAN024DGD_at; Start 516; Stop 540
ggaattactttccatcctagaatct

SEQ ID NO: 156804 - DNA, 25 bp, Artificial
  probe
  misc_feature (1)..(25): SEQ ID NO: 1832; WAN024DGD_at; Start 92; Stop 116
ccttaatcggtacaagtggctgtgg

SEQ ID NO: 156805 - DNA, 25 bp, Artificial
  probe
  misc_feature (1)..(25): SEQ ID NO: 1832; WAN024DGD_at; Start 615; Stop 639
tcgagttaccgatttatcacataga

SEQ ID NO: 156806 - DNA, 25 bp, Artificial
  probe
  misc_feature (1)..(25): SEQ ID NO: 1832; WAN024DGD_at; Start 288; Stop 312
tctcaatctgggtttagttggtaaa

SEQ ID NO: 156807 - DNA, 25 bp, Artificial
  probe
  misc_feature (1)..(25): SEQ ID NO: 1832; WAN024DGD_at; Start 583; Stop 607
cctctgatttgggagcaagtggatc

SEQ ID NO: 156808 - DNA, 25 bp, Artificial
  probe
  misc_feature (1)..(25): SEQ ID NO: 1832; WAN024DGD_at; Start 598; Stop 622
caagtggatcaggtcattcgagtta

SEQ ID NO: 156809 - DNA, 25 bp, Artificial
  probe
  misc_feature (1)..(25): SEQ ID NO: 1832; WAN024DGD_at; Start 371; Stop 395
tctcttatttggatttgaagcaacc

SEQ ID NO: 156810 - DNA, 25 bp, Artificial
  probe
  misc_feature (1)..(25): SEQ ID NO: 5832; WAN024DGE_at; Start 195; Stop 219
ttactatcatggtaaaaaatatcat

SEQ ID NO: 156811 - DNA, 25 bp, Artificial
  probe
  misc_feature (1)..(25): SEQ ID NO: 5832; WAN024DGE_at; Start 191; Stop 215
caaattactatcatggtaaaaaata

SEQ ID NO: 156812 - DNA, 25 bp, Artificial
  probe
  misc_feature (1)..(25): SEQ ID NO: 5832; WAN024DGE_at; Start 100; Stop 124
acattattgggagctgcatcagctg

SEQ ID NO: 156813 - DNA, 25 bp, Artificial
  probe
  misc_feature (1)..(25): SEQ ID NO: 5832; WAN024DGE_at; Start 57; Stop 81
gaaaaaacatagattacttgctcta

SEQ ID NO: 156814 - DNA, 25 bp, Artificial
  probe
  misc_feature (1)..(25): SEQ ID NO: 5832; WAN024DGE_at; Start 98; Stop 122
ttacattattgggagctgcatcagc

SEQ ID NO: 156815 - DNA, 25 bp, Artificial
  probe
  misc_feature (1)..(25): SEQ ID NO: 5832; WAN024DGE_at; Start 97; Stop 121
tttacattattgggagctgcatcag

SEQ ID NO: 156816 - DNA, 25 bp, Artificial
  probe
  misc_feature (1)..(25): SEQ ID NO: 5832; WAN024DGE_at; Start 183; Stop 207
ggctttttcaaattactatcatggt

SEQ ID NO: 156817 - DNA, 25 bp, Artificial
  probe
  misc_feature (1)..(25): SEQ ID NO: 5832; WAN024DGE_at; Start 193; Stop 217
aattactatcatggtaaaaaatatc

SEQ ID NO: 156818 - DNA, 25 bp, Artificial
  probe
  misc_feature (1)..(25): SEQ ID NO: 5832; WAN024DGE_at; Start 188; Stop 212
tttcaaattactatcatggtaaaaa

SEQ ID NO: 156819 - DNA, 25 bp, Artificial
  probe
  misc_feature (1)..(25): SEQ ID NO: 5832; WAN024DGE_at; Start 131; Stop 155
aatatccagatggaggagtatggac

SEQ ID NO: 156820 - DNA, 25 bp, Artificial
  probe
  misc_feature (1)..(25): SEQ ID NO: 5832; WAN024DGE_at; Start 194; Stop 218
attactatcatggtaaaaaatatca

SEQ ID NO: 156821 - DNA, 25 bp, Artificial
  probe
  misc_feature (1)..(25): SEQ ID NO: 5832; WAN024DGE_at; Start 157; Stop 181
tatggagaaggttcaggaggtggtt

SEQ ID NO: 156822 - DNA, 25 bp, Artificial
  probe
  misc_feature (1)..(25): SEQ ID NO: 5832; WAN024DGE_at; Start 58; Stop 82
aaaaaacatagattacttgctctag

SEQ ID NO: 156823 - DNA, 25 bp, Artificial
  probe
  misc_feature (1)..(25): SEQ ID NO: 5832; WAN024DGE_at; Start 184; Stop 208
gctttttcaaattactatcatggta

SEQ ID NO: 156824 - DNA, 25 bp, Artificial
  probe
  misc_feature (1)..(25): SEQ ID NO: 5832; WAN024DGE_at; Start 189; Stop 213
ttcaaattactatcatggtaaaaaa

SEQ ID NO: 156825 - DNA, 25 bp, Artificial
  probe
  misc_feature (1)..(25): SEQ ID NO: 5832; WAN024DGE_at; Start 197; Stop 221
actatcatggtaaaaaatatcatta

SEQ ID NO: 156826 - DNA, 25 bp, Artificial
  probe
  misc_feature (1)..(25): SEQ ID NO: 5832; WAN024DGE_at; Start 200; Stop 224
atcatggtaaaaaatatcattattc

SEQ ID NO: 156827 - DNA, 25 bp, Artificial
  probe
  misc_feature (1)..(25): SEQ ID NO: 5832; WAN024DGE_at; Start 102; Stop 126
attattgggagctgcatcagctgct

SEQ ID NO: 156828 - DNA, 25 bp, Artificial
  probe
  misc_feature (1)..(25): SEQ ID NO: 5832; WAN024DGE_at; Start 104; Stop 128
tattgggagctgcatcagctgctgt

SEQ ID NO: 156829 - DNA, 25 bp, Artificial
  probe
  misc_feature (1)..(25): SEQ ID NO: 5832; WAN024DGE_at; Start 101; Stop 125
cattattgggagctgcatcagctgc

SEQ ID NO: 156830 - DNA, 25 bp, Artificial
  probe
  misc_feature (1)..(25): SEQ ID NO: 5832; WAN024DGE_at; Start 199; Stop 223
tatcatggtaaaaaatatcattatt

SEQ ID NO: 156831 - DNA, 25 bp, Artificial
  probe
  misc_feature (1)..(25): SEQ ID NO: 5832; WAN024DGE_at; Start 196; Stop 220
tactatcatggtaaaaaatatcatt

SEQ ID NO: 156832 - DNA, 25 bp, Artificial
  probe
  misc_feature (1)..(25): SEQ ID NO: 5832; WAN024DGE_at; Start 198; Stop 222
ctatcatggtaaaaaatatcattat

SEQ ID NO: 156833 - DNA, 25 bp, Artificial
  probe
  misc_feature (1)..(25): SEQ ID NO: 5832; WAN024DGE_at; Start 187; Stop 211
ttttcaaattactatcatggtaaaa

SEQ ID NO: 156834 - DNA, 25 bp, Artificial
  probe
  misc_feature (1)..(25): SEQ ID NO: 5832; WAN024DGE_at; Start 190; Stop 214
tcaaattactatcatggtaaaaaat

SEQ ID NO: 156835 - DNA, 25 bp, Artificial
  probe
  misc_feature (1)..(25): SEQ ID NO: 5832; WAN024DGE_at; Start 185; Stop 209
ctttttcaaattactatcatggtaa

SEQ ID NO: 156836 - DNA, 25 bp, Artificial
  probe
  misc_feature (1)..(25): SEQ ID NO: 5832; WAN024DGE_at; Start 192; Stop 216
aaattactatcatggtaaaaaatat

SEQ ID NO: 156837 - DNA, 25 bp, Artificial
  probe
  misc_feature (1)..(25): SEQ ID NO: 5832; WAN024DGE_at; Start 103; Stop 127
ttattgggagctgcatcagctgctg

SEQ ID NO: 156838 - DNA, 25 bp, Artificial
  probe
  misc_feature (1)..(25): SEQ ID NO: 5832; WAN024DGE_at; Start 186; Stop 210
tttttcaaattactatcatggtaaa

SEQ ID NO: 156839 - DNA, 25 bp, Artificial
  probe
  misc_feature (1)..(25): SEQ ID NO: 5832; WAN024DGE_at; Start 99; Stop 123
tacattattgggagctgcatcagct

SEQ ID NO: 156840 - DNA, 25 bp, Artificial
  probe
  misc_feature (1)..(25): SEQ ID NO: 5832; WAN024DGE_at; Start 105; Stop 129
attgggagctgcatcagctgctgta

SEQ ID NO: 156841 - DNA, 25 bp, Artificial
  probe
  misc_feature (1)..(25): SEQ ID NO: 4189; WAN024DGF_at; Start 144; Stop 168
aattgtgatttctgtagttaactgg

SEQ ID NO: 156842 - DNA, 25 bp, Artificial
  probe
  misc_feature (1)..(25): SEQ ID NO: 4189; WAN024DGF_at; Start 27; Stop 51
tttgttatttccaattgtaggcctg

SEQ ID NO: 156843 - DNA, 25 bp, Artificial
  probe
  misc_feature (1)..(25): SEQ ID NO: 4189; WAN024DGF_at; Start 165; Stop 189
ctggattgtagcaatcgccttaatt

SEQ ID NO: 156844 - DNA, 25 bp, Artificial
  probe
  misc_feature (1)..(25): SEQ ID NO: 4189; WAN024DGF_at; Start 51; Stop 75
gattttgggtatcataggattggtc

SEQ ID NO: 156845 - DNA, 25 bp, Artificial
  probe
  misc_feature (1)..(25): SEQ ID NO: 4189; WAN024DGF_at; Start 2; Stop 26
tgggtatcttgtcgattattcttgg

SEQ ID NO: 156846 - DNA, 25 bp, Artificial
  probe
  misc_feature (1)..(25): SEQ ID NO: 4189; WAN024DGF_at; Start 33; Stop 57
atttccaattgtaggcctgattttg

SEQ ID NO: 156847 - DNA, 25 bp, Artificial
  probe
  misc_feature (1)..(25): SEQ ID NO: 4189; WAN024DGF_at; Start 53; Stop 77
ttttgggtatcataggattggtctt

SEQ ID NO: 156848 - DNA, 25 bp, Artificial
  probe
  misc_feature (1)..(25): SEQ ID NO: 4189; WAN024DGF_at; Start 97; Stop 121
gagtcacaattagactataaaatag

SEQ ID NO: 156849 - DNA, 25 bp, Artificial
  probe
  misc_feature (1)..(25): SEQ ID NO: 4189; WAN024DGF_at; Start 81; Stop 105
tatttcataccaaaaagagtcacaa

SEQ ID NO: 156850 - DNA, 25 bp, Artificial
  probe
  misc_feature (1)..(25): SEQ ID NO: 4189; WAN024DGF_at; Start 150; Stop 174
gatttctgtagttaactggattgta

SEQ ID NO: 156851 - DNA, 25 bp, Artificial
  probe
  misc_feature (1)..(25): SEQ ID NO: 4189; WAN024DGF_at; Start 30; Stop 54
gttatttccaattgtaggcctgatt

SEQ ID NO: 156852 - DNA, 25 bp, Artificial
  probe
  misc_feature (1)..(25): SEQ ID NO: 4189; WAN024DGF_at; Start 6; Stop 30
tatcttgtcgattattcttggtttg

SEQ ID NO: 156853 - DNA, 25 bp, Artificial
  probe
  misc_feature (1)..(25): SEQ ID NO: 4189; WAN024DGF_at; Start 160; Stop 184
gttaactggattgtagcaatcgcct

SEQ ID NO: 156854 - DNA, 25 bp, Artificial
  probe
  misc_feature (1)..(25): SEQ ID NO: 4189; WAN024DGF_at; Start 156; Stop 180
tgtagttaactggattgtagcaatc

SEQ ID NO: 156855 - DNA, 25 bp, Artificial
  probe
  misc_feature (1)..(25): SEQ ID NO: 4189; WAN024DGF_at; Start 24; Stop 48
tggtttgttatttccaattgtaggc

SEQ ID NO: 156856 - DNA, 25 bp, Artificial
  probe
  misc_feature (1)..(25): SEQ ID NO: 4189; WAN024DGF_at; Start 37; Stop 61
ccaattgtaggcctgattttgggta

SEQ ID NO: 156857 - DNA, 25 bp, Artificial
  probe
  misc_feature (1)..(25): SEQ ID NO: 4189; WAN024DGF_at; Start 126; Stop 150
gattcttaatatcttaggaattgtg

SEQ ID NO: 156858 - DNA, 25 bp, Artificial
  probe
  misc_feature (1)..(25): SEQ ID NO: 4189; WAN024DGF_at; Start 48; Stop 72
cctgattttgggtatcataggattg

SEQ ID NO: 156859 - DNA, 25 bp, Artificial
  probe
  misc_feature (1)..(25): SEQ ID NO: 4189; WAN024DGF_at; Start 85; Stop 109
tcataccaaaaagagtcacaattag

SEQ ID NO: 156860 - DNA, 25 bp, Artificial
  probe
  misc_feature (1)..(25): SEQ ID NO: 4189; WAN024DGF_at; Start 168; Stop 192
gattgtagcaatcgccttaattttt

SEQ ID NO: 156861 - DNA, 25 bp, Artificial
  probe
  misc_feature (1)..(25): SEQ ID NO: 4189; WAN024DGF_at; Start 88; Stop 112
taccaaaaagagtcacaattagact

SEQ ID NO: 156862 - DNA, 25 bp, Artificial
  probe
  misc_feature (1)..(25): SEQ ID NO: 4189; WAN024DGF_at; Start 121; Stop 145
gaaaagattcttaatatcttaggaa

SEQ ID NO: 156863 - DNA, 25 bp, Artificial
  probe
  misc_feature (1)..(25): SEQ ID NO: 4189; WAN024DGF_at; Start 153; Stop 177
ttctgtagttaactggattgtagca

SEQ ID NO: 156864 - DNA, 25 bp, Artificial
  probe
  misc_feature (1)..(25): SEQ ID NO: 4189; WAN024DGF_at; Start 42; Stop 66
tgtaggcctgattttgggtatcata

SEQ ID NO: 156865 - DNA, 25 bp, Artificial
  probe
  misc_feature (1)..(25): SEQ ID NO: 4189; WAN024DGF_at; Start 109; Stop 133
gactataaaatagaaaagattctta

SEQ ID NO: 156866 - DNA, 25 bp, Artificial
  probe
  misc_feature (1)..(25): SEQ ID NO: 4189; WAN024DGF_at; Start 39; Stop 63
aattgtaggcctgattttgggtatc

SEQ ID NO: 156867 - DNA, 25 bp, Artificial
  probe
  misc_feature (1)..(25): SEQ ID NO: 4189; WAN024DGF_at; Start 9; Stop 33
cttgtcgattattcttggtttgtta

SEQ ID NO: 156868 - DNA, 25 bp, Artificial
  probe
  misc_feature (1)..(25): SEQ ID NO: 4189; WAN024DGF_at; Start 90; Stop 114
ccaaaaagagtcacaattagactat

SEQ ID NO: 156869 - DNA, 25 bp, Artificial
  probe
  misc_feature (1)..(25): SEQ ID NO: 4189; WAN024DGF_at; Start 79; Stop 103
gctatttcataccaaaaagagtcac

SEQ ID NO: 156870 - DNA, 25 bp, Artificial
  probe
  misc_feature (1)..(25): SEQ ID NO: 4189; WAN024DGF_at; Start 44; Stop 68
taggcctgattttgggtatcatagg

SEQ ID NO: 156871 - DNA, 25 bp, Artificial
  probe
  misc_feature (1)..(25): SEQ ID NO: 4189; WAN024DGF_at; Start 29; Stop 53
tgttatttccaattgtaggcctgat

SEQ ID NO: 156872 - DNA, 25 bp, Artificial
  probe
  misc_feature (1)..(25): SEQ ID NO: 4189; WAN024DGF_at; Start 133; Stop 157
aatatcttaggaattgtgatttctg

SEQ ID NO: 156873 - DNA, 25 bp, Artificial
  probe
  misc_feature (1)..(25): SEQ ID NO: 4189; WAN024DGF_at; Start 163; Stop 187
aactggattgtagcaatcgccttaa

SEQ ID NO: 156874 - DNA, 25 bp, Artificial
  probe
  misc_feature (1)..(25): SEQ ID NO: 4189; WAN024DGF_at; Start 158; Stop 182
tagttaactggattgtagcaatcgc

SEQ ID NO: 156875 - DNA, 25 bp, Artificial
  probe
  misc_feature (1)..(25): SEQ ID NO: 3533; WAN024DGG_at; Start 12; Stop 36
tatgcctactattctcattaccgga

SEQ ID NO: 156876 - DNA, 25 bp, Artificial
  probe
  misc_feature (1)..(25): SEQ ID NO: 3533; WAN024DGG_at; Start 90; Stop 114
catcttgcttggtagaaataaggaa

SEQ ID NO: 156877 - DNA, 25 bp, Artificial
  probe
  misc_feature (1)..(25): SEQ ID NO: 3533; WAN024DGG_at; Start 74; Stop 98
tgcccaatgaccaactcatcttgct

SEQ ID NO: 156878 - DNA, 25 bp, Artificial
  probe
  misc_feature (1)..(25): SEQ ID NO: 3533; WAN024DGG_at; Start 440; Stop 464
tttactcagcgaccaagtttgcggc

SEQ ID NO: 156879 - DNA, 25 bp, Artificial
  probe
  misc_feature (1)..(25): SEQ ID NO: 3533; WAN024DGG_at; Start 476; Stop 500
caaatgctctgcgactcgaacttat

SEQ ID NO: 156880 - DNA, 25 bp, Artificial
  probe
  misc_feature (1)..(25): SEQ ID NO: 3533; WAN024DGG_at; Start 398; Stop 422
tcgtcagcatggcaggtctaatagc

SEQ ID NO: 156881 - DNA, 25 bp, Artificial
  probe
  misc_feature (1)..(25): SEQ ID NO: 3533; WAN024DGG_at; Start 412; Stop 436
ggtctaatagctactggcaagtcta

SEQ ID NO: 156882 - DNA, 25 bp, Artificial
  probe
  misc_feature (1)..(25): SEQ ID NO: 3533; WAN024DGG_at; Start 59; Stop 83
aaatggtcaaactcctgcccaatga

SEQ ID NO: 156883 - DNA, 25 bp, Artificial
  probe
  misc_feature (1)..(25): SEQ ID NO: 3533; WAN024DGG_at; Start 133; Stop 157
ggaaattattcccatgcagaattga

SEQ ID NO: 156884 - DNA, 25 bp, Artificial
  probe
  misc_feature (1)..(25): SEQ ID NO: 3533; WAN024DGG_at; Start 453; Stop 477
caagtttgcggctattggtttttca

SEQ ID NO: 156885 - DNA, 25 bp, Artificial
  probe
  misc_feature (1)..(25): SEQ ID NO: 3533; WAN024DGG_at; Start 574; Stop 598
gatggaacttatcttaaatcggttg

SEQ ID NO: 156886 - DNA, 25 bp, Artificial
  probe
  misc_feature (1)..(25): SEQ ID NO: 3533; WAN024DGG_at; Start 119; Stop 143
tagcccaactctacggaaattattc

SEQ ID NO: 156887 - DNA, 25 bp, Artificial
  probe
  misc_feature (1)..(25): SEQ ID NO: 3533; WAN024DGG_at; Start 469; Stop 493
ggtttttcaaatgctctgcgactcg

SEQ ID NO: 156888 - DNA, 25 bp, Artificial
  probe
  misc_feature (1)..(25): SEQ ID NO: 3533; WAN024DGG_at; Start 171; Stop 195
taccgacgattcagccctagaagct

SEQ ID NO: 156889 - DNA, 25 bp, Artificial
  probe
  misc_feature (1)..(25): SEQ ID NO: 3533; WAN024DGG_at; Start 166; Stop 190
gatattaccgacgattcagccctag

SEQ ID NO: 156890 - DNA, 25 bp, Artificial
  probe
  misc_feature (1)..(25): SEQ ID NO: 3533; WAN024DGG_at; Start 154; Stop 178
ttgattgaaattgatattaccgacg

SEQ ID NO: 156891 - DNA, 25 bp, Artificial
  probe
  misc_feature (1)..(25): SEQ ID NO: 3533; WAN024DGG_at; Start 323; Stop 347
cctttgccctgatgaatctgtctcg

SEQ ID NO: 156892 - DNA, 25 bp, Artificial
  probe
  misc_feature (1)..(25): SEQ ID NO: 3533; WAN024DGG_at; Start 236; Stop 260
tcttgattaacaacgctggttacgg

SEQ ID NO: 156893 - DNA, 25 bp, Artificial
  probe
  misc_feature (1)..(25): SEQ ID NO: 3533; WAN024DGG_at; Start 663; Stop 687
acgagaactcaatctcccgattttg

SEQ ID NO: 156894 - DNA, 25 bp, Artificial
  probe
  misc_feature (1)..(25): SEQ ID NO: 3533; WAN024DGG_at; Start 300; Stop 324
tcaccagatgtttgaggtcaatacc

SEQ ID NO: 156895 - DNA, 25 bp, Artificial
  probe
  misc_feature (1)..(25): SEQ ID NO: 3533; WAN024DGG_at; Start 355; Stop 379
gcggctcgtatgaaggaaagcagca

SEQ ID NO: 156896 - DNA, 25 bp, Artificial
  probe
  misc_feature (1)..(25): SEQ ID NO: 3533; WAN024DGG_at; Start 673; Stop 697
aatctcccgattttgttgaacctag

SEQ ID NO: 156897 - DNA, 25 bp, Artificial
  probe
  misc_feature (1)..(25): SEQ ID NO: 3533; WAN024DGG_at; Start 335; Stop 359
tgaatctgtctcgtcaccttgcggc

SEQ ID NO: 156898 - DNA, 25 bp, Artificial
  probe
  misc_feature (1)..(25): SEQ ID NO: 3533; WAN024DGG_at; Start 42; Stop 66
cggtggtctagctcaagaaatggtc

SEQ ID NO: 156899 - DNA, 25 bp, Artificial
  probe
  misc_feature (1)..(25): SEQ ID NO: 3533; WAN024DGG_at; Start 1; Stop 25
gaaaggataagtatgcctactattc

SEQ ID NO: 156900 - DNA, 25 bp, Artificial
  probe
  misc_feature (1)..(25): SEQ ID NO: 3533; WAN024DGG_at; Start 427; Stop 451
ggcaagtctagtctttactcagcga

SEQ ID NO: 156901 - DNA, 25 bp, Artificial
  probe
  misc_feature (1)..(25): SEQ ID NO: 3533; WAN024DGG_at; Start 200; Stop 224
taactgatctttatctccgctatgg

SEQ ID NO: 156902 - DNA, 25 bp, Artificial
  probe
  misc_feature (1)..(25): SEQ ID NO: 3533; WAN024DGG_at; Start 54; Stop 78
tcaagaaatggtcaaactcctgccc

SEQ ID NO: 156903 - DNA, 25 bp, Artificial
  probe
  misc_feature (1)..(25): SEQ ID NO: 3533; WAN024DGG_at; Start 343; Stop 367
tctcgtcaccttgcggctcgtatga

SEQ ID NO: 156904 - DNA, 25 bp, Artificial
  probe
  misc_feature (1)..(25): SEQ ID NO: 3533; WAN024DGG_at; Start 385; Stop 409
catatcatcaacatcgtcagcatgg

SEQ ID NO: 156905 - DNA, 25 bp, Artificial
  probe
  misc_feature (1)..(25): SEQ ID NO: 3533; WAN024DGG_at; Start 313; Stop 337
gaggtcaatacctttgccctgatga

SEQ ID NO: 156906 - DNA, 25 bp, Artificial
  probe
  misc_feature (1)..(25): SEQ ID NO: 3533; WAN024DGG_at; Start 619; Stop 643
gatgcagtggctaaaaagattgtca

SEQ ID NO: 156907 - DNA, 25 bp, Artificial
  probe
  misc_feature (1)..(25): SEQ ID NO: 3533; WAN024DGG_at; Start 27; Stop 51
cattaccggagctagcggtggtcta

SEQ ID NO: 156908 - DNA, 25 bp, Artificial
  probe
  misc_feature (1)..(25): SEQ ID NO: 3533; WAN024DGG_at; Start 213; Stop 237
tctccgctatggcaagattgatgtc

SEQ ID NO: 156909 - DNA, 25 bp, Artificial
  probe
  misc_feature (1)..(25): SEQ ID NO: 1465; WAN024DGH_at; Start 155; Stop 179
tctatcagaaaaagagtcctcaggc

SEQ ID NO: 156910 - DNA, 25 bp, Artificial
  probe
  misc_feature (1)..(25): SEQ ID NO: 1465; WAN024DGH_at; Start 17; Stop 41
ctttggctctaaagtatggaggtta

SEQ ID NO: 156911 - DNA, 25 bp, Artificial
  probe
  misc_feature (1)..(25): SEQ ID NO: 1465; WAN024DGH_at; Start 104; Stop 128
taacacttattacacctccgccaag

SEQ ID NO: 156912 - DNA, 25 bp, Artificial
  probe
  misc_feature (1)..(25): SEQ ID NO: 1465; WAN024DGH_at; Start 512; Stop 536
gaaaacgtctcaaaggctacagcca

SEQ ID NO: 156913 - DNA, 25 bp, Artificial
  probe
  misc_feature (1)..(25): SEQ ID NO: 1465; WAN024DGH_at; Start 540; Stop 564
ggatttattgcaagaagctgctgct

SEQ ID NO: 156914 - DNA, 25 bp, Artificial
  probe
  misc_feature (1)..(25): SEQ ID NO: 1465; WAN024DGH_at; Start 181; Stop 205
gcgacggattattttgcagaactca

SEQ ID NO: 156915 - DNA, 25 bp, Artificial
  probe
  misc_feature (1)..(25): SEQ ID NO: 1465; WAN024DGH_at; Start 358; Stop 382
gatgacttgctctttgaaattgcgc

SEQ ID NO: 156916 - DNA, 25 bp, Artificial
  probe
  misc_feature (1)..(25): SEQ ID NO: 1465; WAN024DGH_at; Start 67; Stop 91
gatcagcttctagctggtaaaacag

SEQ ID NO: 156917 - DNA, 25 bp, Artificial
  probe
  misc_feature (1)..(25): SEQ ID NO: 1465; WAN024DGH_at; Start 210; Stop 234
ggaactgaatctttacaatactgag

SEQ ID NO: 156918 - DNA, 25 bp, Artificial
  probe
  misc_feature (1)..(25): SEQ ID NO: 1465; WAN024DGH_at; Start 568; Stop 592
tctggcaaacgctatttccgatcgg

SEQ ID NO: 156919 - DNA, 25 bp, Artificial
  probe
  misc_feature (1)..(25): SEQ ID NO: 1465; WAN024DGH_at; Start 44; Stop 68
caagtctggacaaggtctatctgga

SEQ ID NO: 156920 - DNA, 25 bp, Artificial
  probe
  misc_feature (1)..(25): SEQ ID NO: 1465; WAN024DGH_at; Start 459; Stop 483
cagcctagaaagtctcacagctttg

SEQ ID NO: 156921 - DNA, 25 bp, Artificial
  probe
  misc_feature (1)..(25): SEQ ID NO: 1465; WAN024DGH_at; Start 165; Stop 189
aaagagtcctcaggctgcgacggat

SEQ ID NO: 156922 - DNA, 25 bp, Artificial
  probe
  misc_feature (1)..(25): SEQ ID NO: 1465; WAN024DGH_at; Start 139; Stop 163
gcctactttgcagaactctatcaga

SEQ ID NO: 156923 - DNA, 25 bp, Artificial
  probe
  misc_feature (1)..(25): SEQ ID NO: 1465; WAN024DGH_at; Start 295; Stop 319
ggtttttgttatgagagtgacggcc

SEQ ID NO: 156924 - DNA, 25 bp, Artificial
  probe
  misc_feature (1)..(25): SEQ ID NO: 1465; WAN024DGH_at; Start 273; Stop 297
taatctgtctggtaaatcctttggt

SEQ ID NO: 156925 - DNA, 25 bp, Artificial
  probe
  misc_feature (1)..(25): SEQ ID NO: 1465; WAN024DGH_at; Start 474; Stop 498
cacagctttgactgatttggaaaga

SEQ ID NO: 156926 - DNA, 25 bp, Artificial
  probe
  misc_feature (1)..(25): SEQ ID NO: 1465; WAN024DGH_at; Start 221; Stop 245
tttacaatactgagccaagtttcac

SEQ ID NO: 156927 - DNA, 25 bp, Artificial
  probe
  misc_feature (1)..(25): SEQ ID NO: 1465; WAN024DGH_at; Start 343; Stop 367
gaggagaaaatctcggatgacttgc

SEQ ID NO: 156928 - DNA, 25 bp, Artificial
  probe
  misc_feature (1)..(25): SEQ ID NO: 1465; WAN024DGH_at; Start 309; Stop 333
gagtgacggccttggtcggattttc

SEQ ID NO: 156929 - DNA, 25 bp, Artificial
  probe
  misc_feature (1)..(25): SEQ ID NO: 1465; WAN024DGH_at; Start 120; Stop 144
tccgccaagtgttgttaatgcctac

SEQ ID NO: 156930 - DNA, 25 bp, Artificial
  probe
  misc_feature (1)..(25): SEQ ID NO: 1465; WAN024DGH_at; Start 3; Stop 27
gactgatattaaaactttggctcta

SEQ ID NO: 156931 - DNA, 25 bp, Artificial
  probe
  misc_feature (1)..(25): SEQ ID NO: 1465; WAN024DGH_at; Start 31; Stop 55
tatggaggttatacaagtctggaca

SEQ ID NO: 156932 - DNA, 25 bp, Artificial
  probe
  misc_feature (1)..(25): SEQ ID NO: 1465; WAN024DGH_at; Start 497; Stop 521
gattggctgatggtcgaaaacgtct

SEQ ID NO: 156933 - DNA, 25 bp, Artificial
  probe
  misc_feature (1)..(25): SEQ ID NO: 1465; WAN024DGH_at; Start 412; Stop 436
gagtctggtaagatttacatgaagc

SEQ ID NO: 156934 - DNA, 25 bp, Artificial
  probe
  misc_feature (1)..(25): SEQ ID NO: 1465; WAN024DGH_at; Start 597; Stop 621
ccgcacagccatgttatatattgat

SEQ ID NO: 156935 - DNA, 25 bp, Artificial
  probe
  misc_feature (1)..(25): SEQ ID NO: 1465; WAN024DGH_at; Start 553; Stop 577
gaagctgctgctttttctggcaaac

SEQ ID NO: 156936 - DNA, 25 bp, Artificial
  probe
  misc_feature (1)..(25): SEQ ID NO: 1465; WAN024DGH_at; Start 94; Stop 118
caggagcagttaacacttattacac

SEQ ID NO: 156937 - DNA, 25 bp, Artificial
  probe
  misc_feature (1)..(25): SEQ ID NO: 1465; WAN024DGH_at; Start 397; Stop 421
caattagtctttgaagagtctggta

SEQ ID NO: 156938 - DNA, 25 bp, Artificial
  probe
  misc_feature (1)..(25): SEQ ID NO: 1465; WAN024DGH_at; Start 54; Stop 78
caaggtctatctggatcagcttcta

SEQ ID NO: 156939 - DNA, 25 bp, Artificial
  probe
  misc_feature (1)..(25): SEQ ID NO: 1465; WAN024DGH_at; Start 260; Stop 284
cttttattcggcttaatctgtctgg

SEQ ID NO: 156940 - DNA, 25 bp, Artificial
  probe
  misc_feature (1)..(25): SEQ ID NO: 1465; WAN024DGH_at; Start 195; Stop 219
tgcagaactcagtcaggaactgaat

SEQ ID NO: 156941 - DNA, 25 bp, Artificial
  probe
  misc_feature (1)..(25): SEQ ID NO: 1465; WAN024DGH_at; Start 582; Stop 606
tttccgatcggaaaaccgcacagcc

SEQ ID NO: 156942 - DNA, 25 bp, Artificial
  probe
  misc_feature (1)..(25): SEQ ID NO: 1465; WAN024DGH_at; Start 527; Stop 551
gctacagccaagaggatttattgca

SEQ ID NO: 156943 - DNA, 25 bp, Artificial
  probe
  misc_feature (1)..(25): SEQ ID NO: 898; WAN024DGI_at; Start 2; Stop 26
tgaaagctgctttttgctcttctgg

SEQ ID NO: 156944 - DNA, 25 bp, Artificial
  probe
  misc_feature (1)..(25): SEQ ID NO: 898; WAN024DGI_at; Start 87; Stop 111
gacacctgttacaagacctttagcg

SEQ ID NO: 156945 - DNA, 25 bp, Artificial
  probe
  misc_feature (1)..(25): SEQ ID NO: 898; WAN024DGI_at; Start 48; Stop 72
tgcgtatactgcacctgcaacggca

SEQ ID NO: 156946 - DNA, 25 bp, Artificial
  probe
  misc_feature (1)..(25): SEQ ID NO: 898; WAN024DGI_at; Start 66; Stop 90
aacggcagcgacagttcctgcgaca

SEQ ID NO: 156947 - DNA, 25 bp, Artificial
  probe
  misc_feature (1)..(25): SEQ ID NO: 898; WAN024DGI_at; Start 45; Stop 69
aaatgcgtatactgcacctgcaacg

SEQ ID NO: 156948 - DNA, 25 bp, Artificial
  probe
  misc_feature (1)..(25): SEQ ID NO: 898; WAN024DGI_at; Start 63; Stop 87
tgcaacggcagcgacagttcctgcg

SEQ ID NO: 156949 - DNA, 25 bp, Artificial
  probe
  misc_feature (1)..(25): SEQ ID NO: 898; WAN024DGI_at; Start 77; Stop 101
cagttcctgcgacacctgttacaag

SEQ ID NO: 156950 - DNA, 25 bp, Artificial
  probe
  misc_feature (1)..(25): SEQ ID NO: 898; WAN024DGI_at; Start 17; Stop 41
gctcttctggttcgattactttctt

SEQ ID NO: 156951 - DNA, 25 bp, Artificial
  probe
  misc_feature (1)..(25): SEQ ID NO: 898; WAN024DGI_at; Start 109; Stop 133
gcgaatcctttagccatgagtcttc

SEQ ID NO: 156952 - DNA, 25 bp, Artificial
  probe
  misc_feature (1)..(25): SEQ ID NO: 898; WAN024DGI_at; Start 85; Stop 109
gcgacacctgttacaagacctttag

SEQ ID NO: 156953 - DNA, 25 bp, Artificial
  probe
  misc_feature (1)..(25): SEQ ID NO: 898; WAN024DGI_at; Start 126; Stop 150
gagtcttcctcctttatattctcaa

SEQ ID NO: 156954 - DNA, 25 bp, Artificial
  probe
  misc_feature (1)..(25): SEQ ID NO: 898; WAN024DGI_at; Start 112; Stop 136
aatcctttagccatgagtcttcctc

SEQ ID NO: 156955 - DNA, 25 bp, Artificial
  probe
  misc_feature (1)..(25): SEQ ID NO: 898; WAN024DGI_at; Start 135; Stop 159
tcctttatattctcaatcagccagc

SEQ ID NO: 156956 - DNA, 25 bp, Artificial
  probe
  misc_feature (1)..(25): SEQ ID NO: 898; WAN024DGI_at; Start 93; Stop 117
tgttacaagacctttagcgaatcct

SEQ ID NO: 156957 - DNA, 25 bp, Artificial
  probe
  misc_feature (1)..(25): SEQ ID NO: 898; WAN024DGI_at; Start 41; Stop 65
ttttaaatgcgtatactgcacctgc

SEQ ID NO: 156958 - DNA, 25 bp, Artificial
  probe
  misc_feature (1)..(25): SEQ ID NO: 898; WAN024DGI_at; Start 160; Stop 184
ctcctcaagaggtcacatttttctg

SEQ ID NO: 156959 - DNA, 25 bp, Artificial
  probe
  misc_feature (1)..(25): SEQ ID NO: 898; WAN024DGI_at; Start 100; Stop 124
agacctttagcgaatcctttagcca

SEQ ID NO: 156960 - DNA, 25 bp, Artificial
  probe
  misc_feature (1)..(25): SEQ ID NO: 898; WAN024DGI_at; Start 162; Stop 186
cctcaagaggtcacatttttctgac

SEQ ID NO: 156961 - DNA, 25 bp, Artificial
  probe
  misc_feature (1)..(25): SEQ ID NO: 898; WAN024DGI_at; Start 70; Stop 94
gcagcgacagttcctgcgacacctg

SEQ ID NO: 156962 - DNA, 25 bp, Artificial
  probe
  misc_feature (1)..(25): SEQ ID NO: 898; WAN024DGI_at; Start 106; Stop 130
ttagcgaatcctttagccatgagtc

SEQ ID NO: 156963 - DNA, 25 bp, Artificial
  probe
  misc_feature (1)..(25): SEQ ID NO: 898; WAN024DGI_at; Start 10; Stop 34
gctttttgctcttctggttcgatta

SEQ ID NO: 156964 - DNA, 25 bp, Artificial
  probe
  misc_feature (1)..(25): SEQ ID NO: 898; WAN024DGI_at; Start 81; Stop 105
tcctgcgacacctgttacaagacct

SEQ ID NO: 156965 - DNA, 25 bp, Artificial
  probe
  misc_feature (1)..(25): SEQ ID NO: 898; WAN024DGI_at; Start 73; Stop 97
gcgacagttcctgcgacacctgtta

SEQ ID NO: 156966 - DNA, 25 bp, Artificial
  probe
  misc_feature (1)..(25): SEQ ID NO: 898; WAN024DGI_at; Start 140; Stop 164
tatattctcaatcagccagcctcct

SEQ ID NO: 156967 - DNA, 25 bp, Artificial
  probe
  misc_feature (1)..(25): SEQ ID NO: 898; WAN024DGI_at; Start 35; Stop 59
ctttctttttaaatgcgtatactgc

SEQ ID NO: 156968 - DNA, 25 bp, Artificial
  probe
  misc_feature (1)..(25): SEQ ID NO: 898; WAN024DGI_at; Start 103; Stop 127
cctttagcgaatcctttagccatga

SEQ ID NO: 156969 - DNA, 25 bp, Artificial
  probe
  misc_feature (1)..(25): SEQ ID NO: 898; WAN024DGI_at; Start 119; Stop 143
tagccatgagtcttcctcctttata

SEQ ID NO: 156970 - DNA, 25 bp, Artificial
  probe
  misc_feature (1)..(25): SEQ ID NO: 898; WAN024DGI_at; Start 148; Stop 172
caatcagccagcctcctcaagaggt

SEQ ID NO: 156971 - DNA, 25 bp, Artificial
  probe
  misc_feature (1)..(25): SEQ ID NO: 898; WAN024DGI_at; Start 52; Stop 76
tatactgcacctgcaacggcagcga

SEQ ID NO: 156972 - DNA, 25 bp, Artificial
  probe
  misc_feature (1)..(25): SEQ ID NO: 898; WAN024DGI_at; Start 89; Stop 113
cacctgttacaagacctttagcgaa

SEQ ID NO: 156973 - DNA, 25 bp, Artificial
  probe
  misc_feature (1)..(25): SEQ ID NO: 898; WAN024DGI_at; Start 7; Stop 31
gctgctttttgctcttctggttcga

SEQ ID NO: 156974 - DNA, 25 bp, Artificial
  probe
  misc_feature (1)..(25): SEQ ID NO: 898; WAN024DGI_at; Start 154; Stop 178
gccagcctcctcaagaggtcacatt

SEQ ID NO: 156975 - DNA, 25 bp, Artificial
  probe
  misc_feature (1)..(25): SEQ ID NO: 898; WAN024DGI_at; Start 97; Stop 121
acaagacctttagcgaatcctttag

SEQ ID NO: 156976 - DNA, 25 bp, Artificial
  probe
  misc_feature (1)..(25): SEQ ID NO: 898; WAN024DGI_at; Start 56; Stop 80
ctgcacctgcaacggcagcgacagt

SEQ ID NO: 156977 - DNA, 25 bp, Artificial
  probe
  misc_feature (1)..(25): SEQ ID NO: 2479; WAN024DGJ_at; Start 84; Stop 108
aaagaaagtaatcgaaccagaagag

SEQ ID NO: 156978 - DNA, 25 bp, Artificial
  probe
  misc_feature (1)..(25): SEQ ID NO: 2479; WAN024DGJ_at; Start 2; Stop 26
tggctaaaggattcgctaaaggtct

SEQ ID NO: 156979 - DNA, 25 bp, Artificial
  probe
  misc_feature (1)..(25): SEQ ID NO: 2479; WAN024DGJ_at; Start 36; Stop 60
tgtcgcaggaactgtcgctgccgtt

SEQ ID NO: 156980 - DNA, 25 bp, Artificial
  probe
  misc_feature (1)..(25): SEQ ID NO: 2479; WAN024DGJ_at; Start 32; Stop 56
caggtgtcgcaggaactgtcgctgc

SEQ ID NO: 156981 - DNA, 25 bp, Artificial
  probe
  misc_feature (1)..(25): SEQ ID NO: 2479; WAN024DGJ_at; Start 11; Stop 35
gattcgctaaaggtcttgtaacagg

SEQ ID NO: 156982 - DNA, 25 bp, Artificial
  probe
  misc_feature (1)..(25): SEQ ID NO: 2479; WAN024DGJ_at; Start 68; Stop 92
cagtatacgcatttaaaaagaaagt

SEQ ID NO: 156983 - DNA, 25 bp, Artificial
  probe
  misc_feature (1)..(25): SEQ ID NO: 2479; WAN024DGJ_at; Start 21; Stop 45
aggtcttgtaacaggtgtcgcagga

SEQ ID NO: 156984 - DNA, 25 bp, Artificial
  probe
  misc_feature (1)..(25): SEQ ID NO: 2479; WAN024DGJ_at; Start 29; Stop 53
taacaggtgtcgcaggaactgtcgc

SEQ ID NO: 156985 - DNA, 25 bp, Artificial
  probe
  misc_feature (1)..(25): SEQ ID NO: 2479; WAN024DGJ_at; Start 48; Stop 72
tgtcgctgccgttgcaggtgcagta

SEQ ID NO: 156986 - DNA, 25 bp, Artificial
  probe
  misc_feature (1)..(25): SEQ ID NO: 2479; WAN024DGJ_at; Start 116; Stop 140
cagctttcatcgaagaaaaccgtaa

SEQ ID NO: 156987 - DNA, 25 bp, Artificial
  probe
  misc_feature (1)..(25): SEQ ID NO: 2479; WAN024DGJ_at; Start 139; Stop 163
aaaaaagcagctcgtcgccgcgtat

SEQ ID NO: 156988 - DNA, 25 bp, Artificial
  probe
  misc_feature (1)..(25): SEQ ID NO: 2479; WAN024DGJ_at; Start 97; Stop 121
gaaccagaagagcaaaaagcagctt

SEQ ID NO: 156989 - DNA, 25 bp, Artificial
  probe
  misc_feature (1)..(25): SEQ ID NO: 2479; WAN024DGJ_at; Start 18; Stop 42
taaaggtcttgtaacaggtgtcgca

SEQ ID NO: 156990 - DNA, 25 bp, Artificial
  probe
  misc_feature (1)..(25): SEQ ID NO: 2479; WAN024DGJ_at; Start 150; Stop 174
tcgtcgccgcgtatcacgttaacta

SEQ ID NO: 156991 - DNA, 25 bp, Artificial
  probe
  misc_feature (1)..(25): SEQ ID NO: 2479; WAN024DGJ_at; Start 103; Stop 127
gaagagcaaaaagcagctttcatcg

SEQ ID NO: 156992 - DNA, 25 bp, Artificial
  probe
  misc_feature (1)..(25): SEQ ID NO: 2479; WAN024DGJ_at; Start 95; Stop 119
tcgaaccagaagagcaaaaagcagc

SEQ ID NO: 156993 - DNA, 25 bp, Artificial
  probe
  misc_feature (1)..(25): SEQ ID NO: 2479; WAN024DGJ_at; Start 109; Stop 133
caaaaagcagctttcatcgaagaaa

SEQ ID NO: 156994 - DNA, 25 bp, Artificial
  probe
  misc_feature (1)..(25): SEQ ID NO: 2479; WAN024DGJ_at; Start 87; Stop 111
gaaagtaatcgaaccagaagagcaa

SEQ ID NO: 156995 - DNA, 25 bp, Artificial
  probe
  misc_feature (1)..(25): SEQ ID NO: 2479; WAN024DGJ_at; Start 42; Stop 66
aggaactgtcgctgccgttgcaggt

SEQ ID NO: 156996 - DNA, 25 bp, Artificial
  probe
  misc_feature (1)..(25): SEQ ID NO: 2479; WAN024DGJ_at; Start 24; Stop 48
tcttgtaacaggtgtcgcaggaact

SEQ ID NO: 156997 - DNA, 25 bp, Artificial
  probe
  misc_feature (1)..(25): SEQ ID NO: 2479; WAN024DGJ_at; Start 5; Stop 29
ctaaaggattcgctaaaggtcttgt

SEQ ID NO: 156998 - DNA, 25 bp, Artificial
  probe
  misc_feature (1)..(25): SEQ ID NO: 2479; WAN024DGJ_at; Start 51; Stop 75
cgctgccgttgcaggtgcagtatac

SEQ ID NO: 156999 - DNA, 25 bp, Artificial
  probe
  misc_feature (1)..(25): SEQ ID NO: 2479; WAN024DGJ_at; Start 137; Stop 161
gtaaaaaagcagctcgtcgccgcgt

SEQ ID NO: 157000 - DNA, 25 bp, Artificial
  probe
  misc_feature (1)..(25): SEQ ID NO: 2479; WAN024DGJ_at; Start 152; Stop 176
gtcgccgcgtatcacgttaactaat

SEQ ID NO: 157001 - DNA, 25 bp, Artificial
  probe
  misc_feature (1)..(25): SEQ ID NO: 2479; WAN024DGJ_at; Start 54; Stop 78
tgccgttgcaggtgcagtatacgca

SEQ ID NO: 157002 - DNA, 25 bp, Artificial
  probe
  misc_feature (1)..(25): SEQ ID NO: 2479; WAN024DGJ_at; Start 57; Stop 81
cgttgcaggtgcagtatacgcattt

SEQ ID NO: 157003 - DNA, 25 bp, Artificial
  probe
  misc_feature (1)..(25): SEQ ID NO: 2479; WAN024DGJ_at; Start 113; Stop 137
aagcagctttcatcgaagaaaaccg

SEQ ID NO: 157004 - DNA, 25 bp, Artificial
  probe
  misc_feature (1)..(25): SEQ ID NO: 2479; WAN024DGJ_at; Start 15; Stop 39
cgctaaaggtcttgtaacaggtgtc

SEQ ID NO: 157005 - DNA, 25 bp, Artificial
  probe
  misc_feature (1)..(25): SEQ ID NO: 2479; WAN024DGJ_at; Start 100; Stop 124
ccagaagagcaaaaagcagctttca

SEQ ID NO: 157006 - DNA, 25 bp, Artificial
  probe
  misc_feature (1)..(25): SEQ ID NO: 2479; WAN024DGJ_at; Start 134; Stop 158
accgtaaaaaagcagctcgtcgccg

SEQ ID NO: 157007 - DNA, 25 bp, Artificial
  probe
  misc_feature (1)..(25): SEQ ID NO: 2479; WAN024DGJ_at; Start 61; Stop 85
gcaggtgcagtatacgcatttaaaa

SEQ ID NO: 157008 - DNA, 25 bp, Artificial
  probe
  misc_feature (1)..(25): SEQ ID NO: 2479; WAN024DGJ_at; Start 39; Stop 63
cgcaggaactgtcgctgccgttgca

SEQ ID NO: 157009 - DNA, 25 bp, Artificial
  probe
  misc_feature (1)..(25): SEQ ID NO: 2479; WAN024DGJ_at; Start 92; Stop 116
taatcgaaccagaagagcaaaaagc

SEQ ID NO: 157010 - DNA, 25 bp, Artificial
  probe
  misc_feature (1)..(25): SEQ ID NO: 2479; WAN024DGJ_at; Start 142; Stop 166
aaagcagctcgtcgccgcgtatcac

SEQ ID NO: 157011 - DNA, 25 bp, Artificial
  probe
  misc_feature (1)..(25): SEQ ID NO: 657; WAN024DGK_at; Start 181; Stop 205
gatggcaagacctaccgtttatctg

SEQ ID NO: 157012 - DNA, 25 bp, Artificial
  probe
  misc_feature (1)..(25): SEQ ID NO: 657; WAN024DGK_at; Start 292; Stop 316
gctaaagaagctggtgatgactatg

SEQ ID NO: 157013 - DNA, 25 bp, Artificial
  probe
  misc_feature (1)..(25): SEQ ID NO: 657; WAN024DGK_at; Start 219; Stop 243
gaaagtctatctcaaattctgggct

SEQ ID NO: 157014 - DNA, 25 bp, Artificial
  probe
  misc_feature (1)..(25): SEQ ID NO: 657; WAN024DGK_at; Start 480; Stop 504
tatagacaaagaaggcaagctggtc

SEQ ID NO: 157015 - DNA, 25 bp, Artificial
  probe
  misc_feature (1)..(25): SEQ ID NO: 657; WAN024DGK_at; Start 421; Stop 445
gacccatcaggcaaacttttggaaa

SEQ ID NO: 157016 - DNA, 25 bp, Artificial
  probe
  misc_feature (1)..(25): SEQ ID NO: 657; WAN024DGK_at; Start 410; Stop 434
cagtcctagttgacccatcaggcaa

SEQ ID NO: 157017 - DNA, 25 bp, Artificial
  probe
  misc_feature (1)..(25): SEQ ID NO: 657; WAN024DGK_at; Start 247; Stop 271
tggtgttccatctgtctggctagtc

SEQ ID NO: 157018 - DNA, 25 bp, Artificial
  probe
  misc_feature (1)..(25): SEQ ID NO: 657; WAN024DGK_at; Start 77; Stop 101
ctagtgaacaccaaacgaaagatga

SEQ ID NO: 157019 - DNA, 25 bp, Artificial
  probe
  misc_feature (1)..(25): SEQ ID NO: 657; WAN024DGK_at; Start 494; Stop 518
gcaagctggtcaaaacacatccagg

SEQ ID NO: 157020 - DNA, 25 bp, Artificial
  probe
  misc_feature (1)..(25): SEQ ID NO: 657; WAN024DGK_at; Start 48; Stop 72
tttgacggcttgttcaggcaagtcc

SEQ ID NO: 157021 - DNA, 25 bp, Artificial
  probe
  misc_feature (1)..(25): SEQ ID NO: 657; WAN024DGK_at; Start 131; Stop 155
caagcgcagctaaagggaaagaggt

SEQ ID NO: 157022 - DNA, 25 bp, Artificial
  probe
  misc_feature (1)..(25): SEQ ID NO: 657; WAN024DGK_at; Start 394; Stop 418
gattataaaaatctcccagtcctag

SEQ ID NO: 157023 - DNA, 25 bp, Artificial
  probe
  misc_feature (1)..(25): SEQ ID NO: 657; WAN024DGK_at; Start 92; Stop 116
cgaaagatgaaatgaagacggagca

SEQ ID NO: 157024 - DNA, 25 bp, Artificial
  probe
  misc_feature (1)..(25): SEQ ID NO: 657; WAN024DGK_at; Start 279; Stop 303
tacggatgagattgctaaagaagct

SEQ ID NO: 157025 - DNA, 25 bp, Artificial
  probe
  misc_feature (1)..(25): SEQ ID NO: 657; WAN024DGK_at; Start 169; Stop 193
ttgatgggagtagatggcaagacct

SEQ ID NO: 157026 - DNA, 25 bp, Artificial
  probe
  misc_feature (1)..(25): SEQ ID NO: 657; WAN024DGK_at; Start 440; Stop 464
tggaaacttatggtgtccgttctta

SEQ ID NO: 157027 - DNA, 25 bp, Artificial
  probe
  misc_feature (1)..(25): SEQ ID NO: 657; WAN024DGK_at; Start 208; Stop 232
tacaagggcaagaaagtctatctca

SEQ ID NO: 157028 - DNA, 25 bp, Artificial
  probe
  misc_feature (1)..(25): SEQ ID NO: 657; WAN024DGK_at; Start 345; Stop 369
taagggagagcaatctgaagcggac

SEQ ID NO: 157029 - DNA, 25 bp, Artificial
  probe
  misc_feature (1)..(25): SEQ ID NO: 657; WAN024DGK_at; Start 2; Stop 26
tgaaaaaatggcaaacatgtgttct

SEQ ID NO: 157030 - DNA, 25 bp, Artificial
  probe
  misc_feature (1)..(25): SEQ ID NO: 657; WAN024DGK_at; Start 320; Stop 344
tcttgacagtagtgtcaccaggaca

SEQ ID NO: 157031 - DNA, 25 bp, Artificial
  probe
  misc_feature (1)..(25): SEQ ID NO: 657; WAN024DGK_at; Start 117; Stop 141
gacagctagtaaaacaagcgcagct

SEQ ID NO: 157032 - DNA, 25 bp, Artificial
  probe
  misc_feature (1)..(25): SEQ ID NO: 657; WAN024DGK_at; Start 335; Stop 359
caccaggacataagggagagcaatc

SEQ ID NO: 157033 - DNA, 25 bp, Artificial
  probe
  misc_feature (1)..(25): SEQ ID NO: 657; WAN024DGK_at; Start 196; Stop 220
cgtttatctgattacaagggcaaga

SEQ ID NO: 157034 - DNA, 25 bp, Artificial
  probe
  misc_feature (1)..(25): SEQ ID NO: 657; WAN024DGK_at; Start 231; Stop 255
caaattctgggcttcttggtgttcc

SEQ ID NO: 157035 - DNA, 25 bp, Artificial
  probe
  misc_feature (1)..(25): SEQ ID NO: 657; WAN024DGK_at; Start 17; Stop 41
catgtgttcttggagcaggttcgct

SEQ ID NO: 157036 - DNA, 25 bp, Artificial
  probe
  misc_feature (1)..(25): SEQ ID NO: 657; WAN024DGK_at; Start 306; Stop 330
tgatgactatgtggtcttgacagta

SEQ ID NO: 157037 - DNA, 25 bp, Artificial
  probe
  misc_feature (1)..(25): SEQ ID NO: 657; WAN024DGK_at; Start 104; Stop 128
tgaagacggagcagacagctagtaa

SEQ ID NO: 157038 - DNA, 25 bp, Artificial
  probe
  misc_feature (1)..(25): SEQ ID NO: 657; WAN024DGK_at; Start 264; Stop 288
ggctagtcttccagatacggatgag

SEQ ID NO: 157039 - DNA, 25 bp, Artificial
  probe
  misc_feature (1)..(25): SEQ ID NO: 657; WAN024DGK_at; Start 62; Stop 86
caggcaagtccgtgactagtgaaca

SEQ ID NO: 157040 - DNA, 25 bp, Artificial
  probe
  misc_feature (1)..(25): SEQ ID NO: 657; WAN024DGK_at; Start 467; Stop 491
caacccaagcctttatagacaaaga

SEQ ID NO: 157041 - DNA, 25 bp, Artificial
  probe
  misc_feature (1)..(25): SEQ ID NO: 657; WAN024DGK_at; Start 358; Stop 382
tctgaagcggactttaagaattggt

SEQ ID NO: 157042 - DNA, 25 bp, Artificial
  probe
  misc_feature (1)..(25): SEQ ID NO: 657; WAN024DGK_at; Start 532; Stop 556
gatgcaattttgcaaactttgaagg

SEQ ID NO: 157043 - DNA, 25 bp, Artificial
  probe
  misc_feature (1)..(25): SEQ ID NO: 657; WAN024DGK_at; Start 514; Stop 538
ccaggattcatggaaaaagatgcaa

SEQ ID NO: 157044 - DNA, 25 bp, Artificial
  probe
  misc_feature (1)..(25): SEQ ID NO: 657; WAN024DGK_at; Start 32; Stop 56
caggttcgctcctttgtttgacggc

SEQ ID NO: 157045 - DNA, 25 bp, Artificial
  probe
  misc_feature (1)..(25): SEQ ID NO: 2606; WAN024DGL_at; Start 169; Stop 193
cgaactctggcctttatagcaggaa

SEQ ID NO: 157046 - DNA, 25 bp, Artificial
  probe
  misc_feature (1)..(25): SEQ ID NO: 2606; WAN024DGL_at; Start 176; Stop 200
tggcctttatagcaggaatttcctt

SEQ ID NO: 157047 - DNA, 25 bp, Artificial
  probe
  misc_feature (1)..(25): SEQ ID NO: 2606; WAN024DGL_at; Start 111; Stop 135
taaggatggtgctcaggcttctagc

SEQ ID NO: 157048 - DNA, 25 bp, Artificial
  probe
  misc_feature (1)..(25): SEQ ID NO: 2606; WAN024DGL_at; Start 420; Stop 444
tagttttgcttggacgccttgcgtg

SEQ ID NO: 157049 - DNA, 25 bp, Artificial
  probe
  misc_feature (1)..(25): SEQ ID NO: 2606; WAN024DGL_at; Start 546; Stop 570
accattcttgcttctagctctgacc

SEQ ID NO: 157050 - DNA, 25 bp, Artificial
  probe
  misc_feature (1)..(25): SEQ ID NO: 2606; WAN024DGL_at; Start 36; Stop 60
ggcagggattctatccttcttttct

SEQ ID NO: 157051 - DNA, 25 bp, Artificial
  probe
  misc_feature (1)..(25): SEQ ID NO: 2606; WAN024DGL_at; Start 121; Stop 145
gctcaggcttctagcggcaaatttt

SEQ ID NO: 157052 - DNA, 25 bp, Artificial
  probe
  misc_feature (1)..(25): SEQ ID NO: 2606; WAN024DGL_at; Start 22; Stop 46
ctaagtgtctttttggcagggattc

SEQ ID NO: 157053 - DNA, 25 bp, Artificial
  probe
  misc_feature (1)..(25): SEQ ID NO: 2606; WAN024DGL_at; Start 223; Stop 247
ggagctggttttttaggcgatttgc

SEQ ID NO: 157054 - DNA, 25 bp, Artificial
  probe
  misc_feature (1)..(25): SEQ ID NO: 2606; WAN024DGL_at; Start 505; Stop 529
ggagctggtctcatgttggtgtata

SEQ ID NO: 157055 - DNA, 25 bp, Artificial
  probe
  misc_feature (1)..(25): SEQ ID NO: 2606; WAN024DGL_at; Start 526; Stop 550
tatacgctgggcttggcgctaccat

SEQ ID NO: 157056 - DNA, 25 bp, Artificial
  probe
  misc_feature (1)..(25): SEQ ID NO: 2606; WAN024DGL_at; Start 98; Stop 122
tgttactagatgataaggatggtgc

SEQ ID NO: 157057 - DNA, 25 bp, Artificial
  probe
  misc_feature (1)..(25): SEQ ID NO: 2606; WAN024DGL_at; Start 156; Stop 180
tactagtttattacgaactctggcc

SEQ ID NO: 157058 - DNA, 25 bp, Artificial
  probe
  misc_feature (1)..(25): SEQ ID NO: 2606; WAN024DGL_at; Start 404; Stop 428
tattgggcttgacctttagttttgc

SEQ ID NO: 157059 - DNA, 25 bp, Artificial
  probe
  misc_feature (1)..(25): SEQ ID NO: 2606; WAN024DGL_at; Start 595; Stop 619
cgaaaacttcatccctatctcggaa

SEQ ID NO: 157060 - DNA, 25 bp, Artificial
  probe
  misc_feature (1)..(25): SEQ ID NO: 2606; WAN024DGL_at; Start 285; Stop 309
tattatccttcttggtttgcaccaa

SEQ ID NO: 157061 - DNA, 25 bp, Artificial
  probe
  misc_feature (1)..(25): SEQ ID NO: 2606; WAN024DGL_at; Start 203; Stop 227
tatttattttgttgggctatggagc

SEQ ID NO: 157062 - DNA, 25 bp, Artificial
  probe
  misc_feature (1)..(25): SEQ ID NO: 2606; WAN024DGL_at; Start 298; Stop 322
ggtttgcaccaaatggagattctac

SEQ ID NO: 157063 - DNA, 25 bp, Artificial
  probe
  misc_feature (1)..(25): SEQ ID NO: 2606; WAN024DGL_at; Start 308; Stop 332
aaatggagattctacactttaaggg

SEQ ID NO: 157064 - DNA, 25 bp, Artificial
  probe
  misc_feature (1)..(25): SEQ ID NO: 2606; WAN024DGL_at; Start 346; Stop 370
aagaggctacaactgcaaggacagg

SEQ ID NO: 157065 - DNA, 25 bp, Artificial
  probe
  misc_feature (1)..(25): SEQ ID NO: 2606; WAN024DGL_at; Start 533; Stop 557
tgggcttggcgctaccattcttgct

SEQ ID NO: 157066 - DNA, 25 bp, Artificial
  probe
  misc_feature (1)..(25): SEQ ID NO: 2606; WAN024DGL_at; Start 513; Stop 537
tctcatgttggtgtatacgctgggc

SEQ ID NO: 157067 - DNA, 25 bp, Artificial
  probe
  misc_feature (1)..(25): SEQ ID NO: 2606; WAN024DGL_at; Start 460; Stop 484
tctgttttggccttggcggcttcag

SEQ ID NO: 157068 - DNA, 25 bp, Artificial
  probe
  misc_feature (1)..(25): SEQ ID NO: 2606; WAN024DGL_at; Start 255; Stop 279
ttcttggttccaatatcttactggg

SEQ ID NO: 157069 - DNA, 25 bp, Artificial
  probe
  misc_feature (1)..(25): SEQ ID NO: 2606; WAN024DGL_at; Start 387; Stop 411
ctatagtcaggcatttttattgggc

SEQ ID NO: 157070 - DNA, 25 bp, Artificial
  probe
  misc_feature (1)..(25): SEQ ID NO: 2606; WAN024DGL_at; Start 73; Stop 97
cctttgttaccggtctatacaggag

SEQ ID NO: 157071 - DNA, 25 bp, Artificial
  probe
  misc_feature (1)..(25): SEQ ID NO: 2606; WAN024DGL_at; Start 562; Stop 586
gctctgacctctagttatgttttga

SEQ ID NO: 157072 - DNA, 25 bp, Artificial
  probe
  misc_feature (1)..(25): SEQ ID NO: 2606; WAN024DGL_at; Start 613; Stop 637
ctcggaatcctcaaaaaagtgggtg

SEQ ID NO: 157073 - DNA, 25 bp, Artificial
  probe
  misc_feature (1)..(25): SEQ ID NO: 2606; WAN024DGL_at; Start 337; Stop 361
tataaggaaaagaggctacaactgc

SEQ ID NO: 157074 - DNA, 25 bp, Artificial
  probe
  misc_feature (1)..(25): SEQ ID NO: 2606; WAN024DGL_at; Start 628; Stop 652
aaagtgggtggttttctcattattg

SEQ ID NO: 157075 - DNA, 25 bp, Artificial
  probe
  misc_feature (1)..(25): SEQ ID NO: 2606; WAN024DGL_at; Start 371; Stop 395
ggcaaaatggtaagggctatagtca

SEQ ID NO: 157076 - DNA, 25 bp, Artificial
  probe
  misc_feature (1)..(25): SEQ ID NO: 2606; WAN024DGL_at; Start 241; Stop 265
gatttgctttatgcttcttggttcc

SEQ ID NO: 157077 - DNA, 25 bp, Artificial
  probe
  misc_feature (1)..(25): SEQ ID NO: 2606; WAN024DGL_at; Start 662; Stop 686
tcttggttctgtttggaaatgcttc

SEQ ID NO: 157078 - DNA, 25 bp, Artificial
  probe
  misc_feature (1)..(25): SEQ ID NO: 2606; WAN024DGL_at; Start 82; Stop 106
ccggtctatacaggagtgttactag

SEQ ID NO: 157079 - DNA, 25 bp, Artificial
  probe
  misc_feature (1)..(25): SEQ ID NO: 1123; WAN024DGM_at; Start 294; Stop 318
attgagtttttctgttttatcggcg

SEQ ID NO: 157080 - DNA, 25 bp, Artificial
  probe
  misc_feature (1)..(25): SEQ ID NO: 1123; WAN024DGM_at; Start 240; Stop 264
tgaaggtgtggaaaaaatagccaga

SEQ ID NO: 157081 - DNA, 25 bp, Artificial
  probe
  misc_feature (1)..(25): SEQ ID NO: 1123; WAN024DGM_at; Start 473; Stop 497
tcttatttggtcagatgattttggc

SEQ ID NO: 157082 - DNA, 25 bp, Artificial
  probe
  misc_feature (1)..(25): SEQ ID NO: 1123; WAN024DGM_at; Start 68; Stop 92
tgcattattatcaagcatcagatag

SEQ ID NO: 157083 - DNA, 25 bp, Artificial
  probe
  misc_feature (1)..(25): SEQ ID NO: 1123; WAN024DGM_at; Start 153; Stop 177
ggtggtggtcaatatcctcccctat

SEQ ID NO: 157084 - DNA, 25 bp, Artificial
  probe
  misc_feature (1)..(25): SEQ ID NO: 1123; WAN024DGM_at; Start 754; Stop 778
ggttccgttcttcttgttgttatga

SEQ ID NO: 157085 - DNA, 25 bp, Artificial
  probe
  misc_feature (1)..(25): SEQ ID NO: 1123; WAN024DGM_at; Start 311; Stop 335
tatcggcgttatggagtttttcaaa

SEQ ID NO: 157086 - DNA, 25 bp, Artificial
  probe
  misc_feature (1)..(25): SEQ ID NO: 1123; WAN024DGM_at; Start 367; Stop 391
aaggcttatggcgtcgaaaagagtc

SEQ ID NO: 157087 - DNA, 25 bp, Artificial
  probe
  misc_feature (1)..(25): SEQ ID NO: 1123; WAN024DGM_at; Start 554; Stop 578
tggcaggtcctctgatttacgccct

SEQ ID NO: 157088 - DNA, 25 bp, Artificial
  probe
  misc_feature (1)..(25): SEQ ID NO: 1123; WAN024DGM_at; Start 142; Stop 166
cccctgcttttggtggtggtcaata

SEQ ID NO: 157089 - DNA, 25 bp, Artificial
  probe
  misc_feature (1)..(25): SEQ ID NO: 1123; WAN024DGM_at; Start 98; Stop 122
tgaccagtgtcgcagtagcctacta

SEQ ID NO: 157090 - DNA, 25 bp, Artificial
  probe
  misc_feature (1)..(25): SEQ ID NO: 1123; WAN024DGM_at; Start 112; Stop 136
gtagcctactattggttgatttcga

SEQ ID NO: 157091 - DNA, 25 bp, Artificial
  probe
  misc_feature (1)..(25): SEQ ID NO: 1123; WAN024DGM_at; Start 800; Stop 824
ctaaaattgttatcctaggcgcggt

SEQ ID NO: 157092 - DNA, 25 bp, Artificial
  probe
  misc_feature (1)..(25): SEQ ID NO: 1123; WAN024DGM_at; Start 391; Stop 415
cgtggacttatttcccatcagatgc

SEQ ID NO: 157093 - DNA, 25 bp, Artificial
  probe
  misc_feature (1)..(25): SEQ ID NO: 1123; WAN024DGM_at; Start 571; Stop 595
tacgccctcctctttgctatcttgg

SEQ ID NO: 157094 - DNA, 25 bp, Artificial
  probe
  misc_feature (1)..(25): SEQ ID NO: 1123; WAN024DGM_at; Start 510; Stop 534
ttattggacaaaagatggcattatc

SEQ ID NO: 157095 - DNA, 25 bp, Artificial
  probe
  misc_feature (1)..(25): SEQ ID NO: 1123; WAN024DGM_at; Start 495; Stop 519
ggctttacttgctcattattggaca

SEQ ID NO: 157096 - DNA, 25 bp, Artificial
  probe
  misc_feature (1)..(25): SEQ ID NO: 1123; WAN024DGM_at; Start 406; Stop 430
catcagatgctaagtctcctagtca

SEQ ID NO: 157097 - DNA, 25 bp, Artificial
  probe
  misc_feature (1)..(25): SEQ ID NO: 1123; WAN024DGM_at; Start 581; Stop 605
tctttgctatcttggtcatgcttta

SEQ ID NO: 157098 - DNA, 25 bp, Artificial
  probe
  misc_feature (1)..(25): SEQ ID NO: 1123; WAN024DGM_at; Start 528; Stop 552
cattatctatcaggctttacaaggg

SEQ ID NO: 157099 - DNA, 25 bp, Artificial
  probe
  misc_feature (1)..(25): SEQ ID NO: 1123; WAN024DGM_at; Start 734; Stop 758
tggtggatgtccgaattttaggttc

SEQ ID NO: 157100 - DNA, 25 bp, Artificial
  probe
  misc_feature (1)..(25): SEQ ID NO: 1123; WAN024DGM_at; Start 22; Stop 46
aagtggtggaaagagctgatagaca

SEQ ID NO: 157101 - DNA, 25 bp, Artificial
  probe
  misc_feature (1)..(25): SEQ ID NO: 1123; WAN024DGM_at; Start 420; Stop 444
tctcctagtcagttttggcttgcag

SEQ ID NO: 157102 - DNA, 25 bp, Artificial
  probe
  misc_feature (1)..(25): SEQ ID NO: 1123; WAN024DGM_at; Start 173; Stop 197
cctattttcagattcctgtgggaga

SEQ ID NO: 157103 - DNA, 25 bp, Artificial
  probe
  misc_feature (1)..(25): SEQ ID NO: 1123; WAN024DGM_at; Start 227; Stop 251
ccccaagcctctatgaaggtgtgga

SEQ ID NO: 157104 - DNA, 25 bp, Artificial
  probe
  misc_feature (1)..(25): SEQ ID NO: 1123; WAN024DGM_at; Start 633; Stop 657
gaaaattagctataccctaccaggc

SEQ ID NO: 157105 - DNA, 25 bp, Artificial
  probe
  misc_feature (1)..(25): SEQ ID NO: 1123; WAN024DGM_at; Start 453; Stop 477
tgcgtttgccttgtttttgatctta

SEQ ID NO: 157106 - DNA, 25 bp, Artificial
  probe
  misc_feature (1)..(25): SEQ ID NO: 1123; WAN024DGM_at; Start 86; Stop 110
cagatagtgagttgaccagtgtcgc

SEQ ID NO: 157107 - DNA, 25 bp, Artificial
  probe
  misc_feature (1)..(25): SEQ ID NO: 1123; WAN024DGM_at; Start 376; Stop 400
ggcgtcgaaaagagtcgtggactta

SEQ ID NO: 157108 - DNA, 25 bp, Artificial
  probe
  misc_feature (1)..(25): SEQ ID NO: 1123; WAN024DGM_at; Start 721; Stop 745
tatgtccatcatttggtggatgtcc

SEQ ID NO: 157109 - DNA, 25 bp, Artificial
  probe
  misc_feature (1)..(25): SEQ ID NO: 1123; WAN024DGM_at; Start 643; Stop 667
tataccctaccaggcagtgcctttg

SEQ ID NO: 157110 - DNA, 25 bp, Artificial
  probe
  misc_feature (1)..(25): SEQ ID NO: 1123; WAN024DGM_at; Start 7; Stop 31
gagtatgacatgaaaaagtggtgga

SEQ ID NO: 157111 - DNA, 25 bp, Artificial
  probe
  misc_feature (1)..(25): SEQ ID NO: 1123; WAN024DGM_at; Start 541; Stop 565
gctttacaagggttggcaggtcctc

SEQ ID NO: 157112 - DNA, 25 bp, Artificial
  probe
  misc_feature (1)..(25): SEQ ID NO: 1123; WAN024DGM_at; Start 707; Stop 731
gttatctcaattactatgtccatca

SEQ ID NO: 157113 - DNA, 25 bp, Artificial
  probe
  misc_feature (1)..(25): SEQ ID NO: 7438; WAN024DGN_at; Start 18; Stop 42
tagcttttctaatgcctcaatcgtt

SEQ ID NO: 157114 - DNA, 25 bp, Artificial
  probe
  misc_feature (1)..(25): SEQ ID NO: 7438; WAN024DGN_at; Start 30; Stop 54
tgcctcaatcgttgtctgcggtcgg

SEQ ID NO: 157115 - DNA, 25 bp, Artificial
  probe
  misc_feature (1)..(25): SEQ ID NO: 7438; WAN024DGN_at; Start 5; Stop 29
caagtaagccacatagcttttctaa

SEQ ID NO: 157116 - DNA, 25 bp, Artificial
  probe
  misc_feature (1)..(25): SEQ ID NO: 7438; WAN024DGN_at; Start 31; Stop 55
gcctcaatcgttgtctgcggtcggg

SEQ ID NO: 157117 - DNA, 25 bp, Artificial
  probe
  misc_feature (1)..(25): SEQ ID NO: 7438; WAN024DGN_at; Start 32; Stop 56
cctcaatcgttgtctgcggtcgggt

SEQ ID NO: 157118 - DNA, 25 bp, Artificial
  probe
  misc_feature (1)..(25): SEQ ID NO: 7438; WAN024DGN_at; Start 48; Stop 72
cggtcgggtgatgacagacttatca

SEQ ID NO: 157119 - DNA, 25 bp, Artificial
  probe
  misc_feature (1)..(25): SEQ ID NO: 7438; WAN024DGN_at; Start 56; Stop 80
tgatgacagacttatcagctgacgg

SEQ ID NO: 157120 - DNA, 25 bp, Artificial
  probe
  misc_feature (1)..(25): SEQ ID NO: 7438; WAN024DGN_at; Start 59; Stop 83
tgacagacttatcagctgacggcaa

SEQ ID NO: 157121 - DNA, 25 bp, Artificial
  probe
  misc_feature (1)..(25): SEQ ID NO: 7438; WAN024DGN_at; Start 3; Stop 27
gacaagtaagccacatagcttttct

SEQ ID NO: 157122 - DNA, 25 bp, Artificial
  probe
  misc_feature (1)..(25): SEQ ID NO: 7438; WAN024DGN_at; Start 57; Stop 81
gatgacagacttatcagctgacggc

SEQ ID NO: 157123 - DNA, 25 bp, Artificial
  probe
  misc_feature (1)..(25): SEQ ID NO: 7438; WAN024DGN_at; Start 54; Stop 78
ggtgatgacagacttatcagctgac

SEQ ID NO: 157124 - DNA, 25 bp, Artificial
  probe
  misc_feature (1)..(25): SEQ ID NO: 7438; WAN024DGN_at; Start 27; Stop 51
taatgcctcaatcgttgtctgcggt

SEQ ID NO: 157125 - DNA, 25 bp, Artificial
  probe
  misc_feature (1)..(25): SEQ ID NO: 7438; WAN024DGN_at; Start 25; Stop 49
tctaatgcctcaatcgttgtctgcg

SEQ ID NO: 157126 - DNA, 25 bp, Artificial
  probe
  misc_feature (1)..(25): SEQ ID NO: 7438; WAN024DGN_at; Start 19; Stop 43
agcttttctaatgcctcaatcgttg

SEQ ID NO: 157127 - DNA, 25 bp, Artificial
  probe
  misc_feature (1)..(25): SEQ ID NO: 7438; WAN024DGN_at; Start 12; Stop 36
gccacatagcttttctaatgcctca

SEQ ID NO: 157128 - DNA, 25 bp, Artificial
  probe
  misc_feature (1)..(25): SEQ ID NO: 7438; WAN024DGN_at; Start 34; Stop 58
tcaatcgttgtctgcggtcgggtga

SEQ ID NO: 157129 - DNA, 25 bp, Artificial
  probe
  misc_feature (1)..(25): SEQ ID NO: 7438; WAN024DGN_at; Start 16; Stop 40
catagcttttctaatgcctcaatcg

SEQ ID NO: 157130 - DNA, 25 bp, Artificial
  probe
  misc_feature (1)..(25): SEQ ID NO: 7438; WAN024DGN_at; Start 53; Stop 77
gggtgatgacagacttatcagctga

SEQ ID NO: 157131 - DNA, 25 bp, Artificial
  probe
  misc_feature (1)..(25): SEQ ID NO: 7438; WAN024DGN_at; Start 23; Stop 47
tttctaatgcctcaatcgttgtctg

SEQ ID NO: 157132 - DNA, 25 bp, Artificial
  probe
  misc_feature (1)..(25): SEQ ID NO: 7438; WAN024DGN_at; Start 58; Stop 82
atgacagacttatcagctgacggca

SEQ ID NO: 157133 - DNA, 25 bp, Artificial
  probe
  misc_feature (1)..(25): SEQ ID NO: 7438; WAN024DGN_at; Start 46; Stop 70
tgcggtcgggtgatgacagacttat

SEQ ID NO: 157134 - DNA, 25 bp, Artificial
  probe
  misc_feature (1)..(25): SEQ ID NO: 7438; WAN024DGN_at; Start 28; Stop 52
aatgcctcaatcgttgtctgcggtc

SEQ ID NO: 157135 - DNA, 25 bp, Artificial
  probe
  misc_feature (1)..(25): SEQ ID NO: 7438; WAN024DGN_at; Start 60; Stop 84
gacagacttatcagctgacggcaaa

SEQ ID NO: 157136 - DNA, 25 bp, Artificial
  probe
  misc_feature (1)..(25): SEQ ID NO: 7438; WAN024DGN_at; Start 44; Stop 68
tctgcggtcgggtgatgacagactt

SEQ ID NO: 157137 - DNA, 25 bp, Artificial
  probe
  misc_feature (1)..(25): SEQ ID NO: 7438; WAN024DGN_at; Start 35; Stop 59
caatcgttgtctgcggtcgggtgat

SEQ ID NO: 157138 - DNA, 25 bp, Artificial
  probe
  misc_feature (1)..(25): SEQ ID NO: 7438; WAN024DGN_at; Start 13; Stop 37
ccacatagcttttctaatgcctcaa

SEQ ID NO: 157139 - DNA, 25 bp, Artificial
  probe
  misc_feature (1)..(25): SEQ ID NO: 7438; WAN024DGN_at; Start 47; Stop 71
gcggtcgggtgatgacagacttatc

SEQ ID NO: 157140 - DNA, 25 bp, Artificial
  probe
  misc_feature (1)..(25): SEQ ID NO: 7438; WAN024DGN_at; Start 26; Stop 50
ctaatgcctcaatcgttgtctgcgg

SEQ ID NO: 157141 - DNA, 25 bp, Artificial
  probe
  misc_feature (1)..(25): SEQ ID NO: 7438; WAN024DGN_at; Start 51; Stop 75
tcgggtgatgacagacttatcagct

SEQ ID NO: 157142 - DNA, 25 bp, Artificial
  probe
  misc_feature (1)..(25): SEQ ID NO: 7438; WAN024DGN_at; Start 21; Stop 45
cttttctaatgcctcaatcgttgtc

SEQ ID NO: 157143 - DNA, 25 bp, Artificial
  probe
  misc_feature (1)..(25): SEQ ID NO: 7438; WAN024DGN_at; Start 9; Stop 33
taagccacatagcttttctaatgcc

SEQ ID NO: 157144 - DNA, 25 bp, Artificial
  probe
  misc_feature (1)..(25): SEQ ID NO: 7438; WAN024DGN_at; Start 49; Stop 73
ggtcgggtgatgacagacttatcag

SEQ ID NO: 157145 - DNA, 25 bp, Artificial
  probe
  misc_feature (1)..(25): SEQ ID NO: 7438; WAN024DGN_at; Start 2; Stop 26
tgacaagtaagccacatagcttttc

SEQ ID NO: 157146 - DNA, 25 bp, Artificial
  probe
  misc_feature (1)..(25): SEQ ID NO: 7438; WAN024DGN_at; Start 45; Stop 69
ctgcggtcgggtgatgacagactta

SEQ ID NO: 157147 - DNA, 25 bp, Artificial
  probe
  misc_feature (1)..(25): SEQ ID NO: 4883; WAN024DGO_at; Start 56; Stop 80
caaaagaggatgtcgtagtggatgc

SEQ ID NO: 157148 - DNA, 25 bp, Artificial
  probe
  misc_feature (1)..(25): SEQ ID NO: 4883; WAN024DGO_at; Start 469; Stop 493
gagtacacagctgccatttaccgaa

SEQ ID NO: 157149 - DNA, 25 bp, Artificial
  probe
  misc_feature (1)..(25): SEQ ID NO: 4883; WAN024DGO_at; Start 229; Stop 253
catgagacactggaccagtttgtga

SEQ ID NO: 157150 - DNA, 25 bp, Artificial
  probe
  misc_feature (1)..(25): SEQ ID NO: 4883; WAN024DGO_at; Start 130; Stop 154
caagtctatgcctttgatattcaga

SEQ ID NO: 157151 - DNA, 25 bp, Artificial
  probe
  misc_feature (1)..(25): SEQ ID NO: 4883; WAN024DGO_at; Start 304; Stop 328
aagtctgtcatcacccgaccgcaga

SEQ ID NO: 157152 - DNA, 25 bp, Artificial
  probe
  misc_feature (1)..(25): SEQ ID NO: 4883; WAN024DGO_at; Start 199; Stop 223
ttgacaaatgcccagttaatcttgc

SEQ ID NO: 157153 - DNA, 25 bp, Artificial
  probe
  misc_feature (1)..(25): SEQ ID NO: 4883; WAN024DGO_at; Start 218; Stop 242
tcttgcaaggccatgagacactgga

SEQ ID NO: 157154 - DNA, 25 bp, Artificial
  probe
  misc_feature (1)..(25): SEQ ID NO: 4883; WAN024DGO_at; Start 395; Stop 419
tttactatggtcatgaaggaggcga

SEQ ID NO: 157155 - DNA, 25 bp, Artificial
  probe
  misc_feature (1)..(25): SEQ ID NO: 4883; WAN024DGO_at; Start 167; Stop 191
aaaagacccaagagcgtttgcatca

SEQ ID NO: 157156 - DNA, 25 bp, Artificial
  probe
  misc_feature (1)..(25): SEQ ID NO: 4883; WAN024DGO_at; Start 421; Stop 445
ctcgagagagatgctgtcttggatt

SEQ ID NO: 157157 - DNA, 25 bp, Artificial
  probe
  misc_feature (1)..(25): SEQ ID NO: 4883; WAN024DGO_at; Start 45; Stop 69
tgaggtcgtgacaaaagaggatgtc

SEQ ID NO: 157158 - DNA, 25 bp, Artificial
  probe
  misc_feature (1)..(25): SEQ ID NO: 4883; WAN024DGO_at; Start 111; Stop 135
tttagccaagctagccaagcaagtc

SEQ ID NO: 157159 - DNA, 25 bp, Artificial
  probe
  misc_feature (1)..(25): SEQ ID NO: 4883; WAN024DGO_at; Start 172; Stop 196
acccaagagcgtttgcatcaggctg

SEQ ID NO: 157160 - DNA, 25 bp, Artificial
  probe
  misc_feature (1)..(25): SEQ ID NO: 4883; WAN024DGO_at; Start 300; Stop 324
tgataagtctgtcatcacccgaccg

SEQ ID NO: 157161 - DNA, 25 bp, Artificial
  probe
  misc_feature (1)..(25): SEQ ID NO: 4883; WAN024DGO_at; Start 542; Stop 566
tagagagatacagacatggataact

SEQ ID NO: 157162 - DNA, 25 bp, Artificial
  probe
  misc_feature (1)..(25): SEQ ID NO: 4883; WAN024DGO_at; Start 535; Stop 559
gaaaaattagagagatacagacatg

SEQ ID NO: 157163 - DNA, 25 bp, Artificial
  probe
  misc_feature (1)..(25): SEQ ID NO: 4883; WAN024DGO_at; Start 28; Stop 52
gcacatgattttttggctgaggtcg

SEQ ID NO: 157164 - DNA, 25 bp, Artificial
  probe
  misc_feature (1)..(25): SEQ ID NO: 4883; WAN024DGO_at; Start 513; Stop 537
cccgccgtttttagtgatgattgaa

SEQ ID NO: 157165 - DNA, 25 bp, Artificial
  probe
  misc_feature (1)..(25): SEQ ID NO: 4883; WAN024DGO_at; Start 88; Stop 112
ggaaatggtcatgacacgctttttt

SEQ ID NO: 157166 - DNA, 25 bp, Artificial
  probe
  misc_feature (1)..(25): SEQ ID NO: 4883; WAN024DGO_at; Start 459; Stop 483
gaaccaacaagagtacacagctgcc

SEQ ID NO: 157167 - DNA, 25 bp, Artificial
  probe
  misc_feature (1)..(25): SEQ ID NO: 4883; WAN024DGO_at; Start 34; Stop 58
gattttttggctgaggtcgtgacaa

SEQ ID NO: 157168 - DNA, 25 bp, Artificial
  probe
  misc_feature (1)..(25): SEQ ID NO: 4883; WAN024DGO_at; Start 69; Stop 93
cgtagtggatgcgactatgggaaat

SEQ ID NO: 157169 - DNA, 25 bp, Artificial
  probe
  misc_feature (1)..(25): SEQ ID NO: 4883; WAN024DGO_at; Start 380; Stop 404
gaattgctattatgatttactatgg

SEQ ID NO: 157170 - DNA, 25 bp, Artificial
  probe
  misc_feature (1)..(25): SEQ ID NO: 4883; WAN024DGO_at; Start 507; Stop 531
caacaacccgccgtttttagtgatg

SEQ ID NO: 157171 - DNA, 25 bp, Artificial
  probe
  misc_feature (1)..(25): SEQ ID NO: 4883; WAN024DGO_at; Start 82; Stop 106
actatgggaaatggtcatgacacgc

SEQ ID NO: 157172 - DNA, 25 bp, Artificial
  probe
  misc_feature (1)..(25): SEQ ID NO: 4883; WAN024DGO_at; Start 141; Stop 165
ctttgatattcagaagcaagccttg

SEQ ID NO: 157173 - DNA, 25 bp, Artificial
  probe
  misc_feature (1)..(25): SEQ ID NO: 4883; WAN024DGO_at; Start 211; Stop 235
cagttaatcttgcaaggccatgaga

SEQ ID NO: 157174 - DNA, 25 bp, Artificial
  probe
  misc_feature (1)..(25): SEQ ID NO: 4883; WAN024DGO_at; Start 14; Stop 38
gaccacttgagatggcacatgattt

SEQ ID NO: 157175 - DNA, 25 bp, Artificial
  probe
  misc_feature (1)..(25): SEQ ID NO: 4883; WAN024DGO_at; Start 6; Stop 30
aatgaaaagaccacttgagatggca

SEQ ID NO: 157176 - DNA, 25 bp, Artificial
  probe
  misc_feature (1)..(25): SEQ ID NO: 4883; WAN024DGO_at; Start 476; Stop 500
cagctgccatttaccgaactttaaa

SEQ ID NO: 157177 - DNA, 25 bp, Artificial
  probe
  misc_feature (1)..(25): SEQ ID NO: 4883; WAN024DGO_at; Start 452; Stop 476
tccagttgaaccaacaagagtacac

SEQ ID NO: 157178 - DNA, 25 bp, Artificial
  probe
  misc_feature (1)..(25): SEQ ID NO: 4883; WAN024DGO_at; Start 117; Stop 141
caagctagccaagcaagtctatgcc

SEQ ID NO: 157179 - DNA, 25 bp, Artificial
  probe
  misc_feature (1)..(25): SEQ ID NO: 4883; WAN024DGO_at; Start 223; Stop 247
caaggccatgagacactggaccagt

SEQ ID NO: 157180 - DNA, 25 bp, Artificial
  probe
  misc_feature (1)..(25): SEQ ID NO: 4883; WAN024DGO_at; Start 373; Stop 397
ggtggacgaattgctattatgattt

SEQ ID NO: 157181 - DNA, 25 bp, Artificial
  probe
  misc_feature (1)..(25): SEQ ID NO: 1299; WAN024DGP_at; Start 370; Stop 394
aaattccaagttgttgaggctgcga

SEQ ID NO: 157182 - DNA, 25 bp, Artificial
  probe
  misc_feature (1)..(25): SEQ ID NO: 1299; WAN024DGP_at; Start 691; Stop 715
tattctggtagtgatgattgggcaa

SEQ ID NO: 157183 - DNA, 25 bp, Artificial
  probe
  misc_feature (1)..(25): SEQ ID NO: 1299; WAN024DGP_at; Start 461; Stop 485
cagagctttatattggtgtttcaac

SEQ ID NO: 157184 - DNA, 25 bp, Artificial
  probe
  misc_feature (1)..(25): SEQ ID NO: 1299; WAN024DGP_at; Start 43; Stop 67
gaacctgaactagtaaagcaattag

SEQ ID NO: 157185 - DNA, 25 bp, Artificial
  probe
  misc_feature (1)..(25): SEQ ID NO: 1299; WAN024DGP_at; Start 28; Stop 52
tcatctgttactattgaacctgaac

SEQ ID NO: 157186 - DNA, 25 bp, Artificial
  probe
  misc_feature (1)..(25): SEQ ID NO: 1299; WAN024DGP_at; Start 279; Stop 303
ttcgggtacggtagaagcagcacgc

SEQ ID NO: 157187 - DNA, 25 bp, Artificial
  probe
  misc_feature (1)..(25): SEQ ID NO: 1299; WAN024DGP_at; Start 355; Stop 379
actgaccaagccctgaaattccaag

SEQ ID NO: 157188 - DNA, 25 bp, Artificial
  probe
  misc_feature (1)..(25): SEQ ID NO: 1299; WAN024DGP_at; Start 402; Stop 426
tcaagaaggtaaagatatggaggca

SEQ ID NO: 157189 - DNA, 25 bp, Artificial
  probe
  misc_feature (1)..(25): SEQ ID NO: 1299; WAN024DGP_at; Start 808; Stop 832
gcttgggctattttgatacgttacc

SEQ ID NO: 157190 - DNA, 25 bp, Artificial
  probe
  misc_feature (1)..(25): SEQ ID NO: 1299; WAN024DGP_at; Start 340; Stop 364
gttgatagttccttcactgaccaag

SEQ ID NO: 157191 - DNA, 25 bp, Artificial
  probe
  misc_feature (1)..(25): SEQ ID NO: 1299; WAN024DGP_at; Start 139; Stop 163
ggtaaatttcttcagttgatgcaag

SEQ ID NO: 157192 - DNA, 25 bp, Artificial
  probe
  misc_feature (1)..(25): SEQ ID NO: 1299; WAN024DGP_at; Start 264; Stop 288
tatgtcccatgctctttcgggtacg

SEQ ID NO: 157193 - DNA, 25 bp, Artificial
  probe
  misc_feature (1)..(25): SEQ ID NO: 1299; WAN024DGP_at; Start 734; Stop 758
tacaagcttatgttgaaaagccaat

SEQ ID NO: 157194 - DNA, 25 bp, Artificial
  probe
  misc_feature (1)..(25): SEQ ID NO: 1299; WAN024DGP_at; Start 652; Stop 676
tcgctttctgaacgtgctgtagcag

SEQ ID NO: 157195 - DNA, 25 bp, Artificial
  probe
  misc_feature (1)..(25): SEQ ID NO: 1299; WAN024DGP_at; Start 295; Stop 319
gcagcacgccaaggtgctagcctat

SEQ ID NO: 157196 - DNA, 25 bp, Artificial
  probe
  misc_feature (1)..(25): SEQ ID NO: 1299; WAN024DGP_at; Start 709; Stop 733
tgggcaaaagagatgaaagaaagct

SEQ ID NO: 157197 - DNA, 25 bp, Artificial
  probe
  misc_feature (1)..(25): SEQ ID NO: 1299; WAN024DGP_at; Start 156; Stop 180
gatgcaagaaagtaagaatcttccg

SEQ ID NO: 157198 - DNA, 25 bp, Artificial
  probe
  misc_feature (1)..(25): SEQ ID NO: 1299; WAN024DGP_at; Start 589; Stop 613
cagccaatggttaaaggtcgtggaa

SEQ ID NO: 157199 - DNA, 25 bp, Artificial
  probe
  misc_feature (1)..(25): SEQ ID NO: 1299; WAN024DGP_at; Start 434; Stop 458
ctcatgtagaagaggttaaaaacca

SEQ ID NO: 157200 - DNA, 25 bp, Artificial
  probe
  misc_feature (1)..(25): SEQ ID NO: 1299; WAN024DGP_at; Start 792; Stop 816
tcacacgggtgagaacgcttgggct

SEQ ID NO: 157201 - DNA, 25 bp, Artificial
  probe
  misc_feature (1)..(25): SEQ ID NO: 1299; WAN024DGP_at; Start 171; Stop 195
gaatcttccgaaaacaagtcagcca

SEQ ID NO: 157202 - DNA, 25 bp, Artificial
  probe
  misc_feature (1)..(25): SEQ ID NO: 1299; WAN024DGP_at; Start 115; Stop 139
tctgatgcggatttgaaagaagaag

SEQ ID NO: 157203 - DNA, 25 bp, Artificial
  probe
  misc_feature (1)..(25): SEQ ID NO: 1299; WAN024DGP_at; Start 637; Stop 661
gatgagttgataacatcgctttctg

SEQ ID NO: 157204 - DNA, 25 bp, Artificial
  probe
  misc_feature (1)..(25): SEQ ID NO: 1299; WAN024DGP_at; Start 488; Stop 512
tggaaaatcttgtcaaaggtggacg

SEQ ID NO: 157205 - DNA, 25 bp, Artificial
  probe
  misc_feature (1)..(25): SEQ ID NO: 1299; WAN024DGP_at; Start 310; Stop 334
gctagcctatctactgcagatgtga

SEQ ID NO: 157206 - DNA, 25 bp, Artificial
  probe
  misc_feature (1)..(25): SEQ ID NO: 1299; WAN024DGP_at; Start 778; Stop 802
tccattattcaaactcacacgggtg

SEQ ID NO: 157207 - DNA, 25 bp, Artificial
  probe
  misc_feature (1)..(25): SEQ ID NO: 1299; WAN024DGP_at; Start 194; Stop 218
cacctgtaggtgtctttgctgagat

SEQ ID NO: 157208 - DNA, 25 bp, Artificial
  probe
  misc_feature (1)..(25): SEQ ID NO: 1299; WAN024DGP_at; Start 211; Stop 235
gctgagatttttgaagacctatgca

SEQ ID NO: 157209 - DNA, 25 bp, Artificial
  probe
  misc_feature (1)..(25): SEQ ID NO: 1299; WAN024DGP_at; Start 226; Stop 250
gacctatgcaaagatggtggccaga

SEQ ID NO: 157210 - DNA, 25 bp, Artificial
  probe
  misc_feature (1)..(25): SEQ ID NO: 1299; WAN024DGP_at; Start 385; Stop 409
gaggctgcgaagttagctcaagaag

SEQ ID NO: 157211 - DNA, 25 bp, Artificial
  probe
  misc_feature (1)..(25): SEQ ID NO: 1299; WAN024DGP_at; Start 180; Stop 204
gaaaacaagtcagccacctgtaggt

SEQ ID NO: 157212 - DNA, 25 bp, Artificial
  probe
  misc_feature (1)..(25): SEQ ID NO: 1299; WAN024DGP_at; Start 666; Stop 690
tgctgtagcagagattggaatttca

SEQ ID NO: 157213 - DNA, 25 bp, Artificial
  probe
  misc_feature (1)..(25): SEQ ID NO: 1299; WAN024DGP_at; Start 241; Stop 265
ggtggccagattcttgctattcata

SEQ ID NO: 157214 - DNA, 25 bp, Artificial
  probe
  misc_feature (1)..(25): SEQ ID NO: 1299; WAN024DGP_at; Start 420; Stop 444
ggaggcaattttatctcatgtagaa

SEQ ID NO: 157215 - DNA, 25 bp, Artificial
  probe
  misc_feature (1)..(25): SEQ ID NO: 3707; WAN024DGQ_at; Start 22; Stop 46
ctgcaggtcaaaacagtggcagaag

SEQ ID NO: 157216 - DNA, 25 bp, Artificial
  probe
  misc_feature (1)..(25): SEQ ID NO: 3707; WAN024DGQ_at; Start 13; Stop 37
gttggttatctgcaggtcaaaacag

SEQ ID NO: 157217 - DNA, 25 bp, Artificial
  probe
  misc_feature (1)..(25): SEQ ID NO: 3707; WAN024DGQ_at; Start 148; Stop 172
cagattttgattaaaaagcttgaat

SEQ ID NO: 157218 - DNA, 25 bp, Artificial
  probe
  misc_feature (1)..(25): SEQ ID NO: 3707; WAN024DGQ_at; Start 15; Stop 39
tggttatctgcaggtcaaaacagtg

SEQ ID NO: 157219 - DNA, 25 bp, Artificial
  probe
  misc_feature (1)..(25): SEQ ID NO: 3707; WAN024DGQ_at; Start 1; Stop 25
gctcgtaaaaaagttggttatctgc

SEQ ID NO: 157220 - DNA, 25 bp, Artificial
  probe
  misc_feature (1)..(25): SEQ ID NO: 3707; WAN024DGQ_at; Start 54; Stop 78
taaagattatgatcgaacaaatgac

SEQ ID NO: 157221 - DNA, 25 bp, Artificial
  probe
  misc_feature (1)..(25): SEQ ID NO: 3707; WAN024DGQ_at; Start 64; Stop 88
gatcgaacaaatgacttttatcgag

SEQ ID NO: 157222 - DNA, 25 bp, Artificial
  probe
  misc_feature (1)..(25): SEQ ID NO: 3707; WAN024DGQ_at; Start 61; Stop 85
tatgatcgaacaaatgacttttatc

SEQ ID NO: 157223 - DNA, 25 bp, Artificial
  probe
  misc_feature (1)..(25): SEQ ID NO: 3707; WAN024DGQ_at; Start 6; Stop 30
taaaaaagttggttatctgcaggtc

SEQ ID NO: 157224 - DNA, 25 bp, Artificial
  probe
  misc_feature (1)..(25): SEQ ID NO: 3707; WAN024DGQ_at; Start 68; Stop 92
gaacaaatgacttttatcgaggtct

SEQ ID NO: 157225 - DNA, 25 bp, Artificial
  probe
  misc_feature (1)..(25): SEQ ID NO: 3707; WAN024DGQ_at; Start 21; Stop 45
tctgcaggtcaaaacagtggcagaa

SEQ ID NO: 157226 - DNA, 25 bp, Artificial
  probe
  misc_feature (1)..(25): SEQ ID NO: 3707; WAN024DGQ_at; Start 67; Stop 91
cgaacaaatgacttttatcgaggtc

SEQ ID NO: 157227 - DNA, 25 bp, Artificial
  probe
  misc_feature (1)..(25): SEQ ID NO: 3707; WAN024DGQ_at; Start 124; Stop 148
ctatggaatccgcaaaatccttgtc

SEQ ID NO: 157228 - DNA, 25 bp, Artificial
  probe
  misc_feature (1)..(25): SEQ ID NO: 3707; WAN024DGQ_at; Start 145; Stop 169
tgtcagattttgattaaaaagcttg

SEQ ID NO: 157229 - DNA, 25 bp, Artificial
  probe
  misc_feature (1)..(25): SEQ ID NO: 3707; WAN024DGQ_at; Start 4; Stop 28
cgtaaaaaagttggttatctgcagg

SEQ ID NO: 157230 - DNA, 25 bp, Artificial
  probe
  misc_feature (1)..(25): SEQ ID NO: 3707; WAN024DGQ_at; Start 142; Stop 166
ccttgtcagattttgattaaaaagc

SEQ ID NO: 157231 - DNA, 25 bp, Artificial
  probe
  misc_feature (1)..(25): SEQ ID NO: 3707; WAN024DGQ_at; Start 133; Stop 157
ccgcaaaatccttgtcagattttga

SEQ ID NO: 157232 - DNA, 25 bp, Artificial
  probe
  misc_feature (1)..(25): SEQ ID NO: 3707; WAN024DGQ_at; Start 128; Stop 152
ggaatccgcaaaatccttgtcagat

SEQ ID NO: 157233 - DNA, 25 bp, Artificial
  probe
  misc_feature (1)..(25): SEQ ID NO: 3707; WAN024DGQ_at; Start 16; Stop 40
ggttatctgcaggtcaaaacagtgg

SEQ ID NO: 157234 - DNA, 25 bp, Artificial
  probe
  misc_feature (1)..(25): SEQ ID NO: 3707; WAN024DGQ_at; Start 155; Stop 179
tgattaaaaagcttgaataactaat

SEQ ID NO: 157235 - DNA, 25 bp, Artificial
  probe
  misc_feature (1)..(25): SEQ ID NO: 3707; WAN024DGQ_at; Start 129; Stop 153
gaatccgcaaaatccttgtcagatt

SEQ ID NO: 157236 - DNA, 25 bp, Artificial
  probe
  misc_feature (1)..(25): SEQ ID NO: 3707; WAN024DGQ_at; Start 71; Stop 95
caaatgacttttatcgaggtcttgg

SEQ ID NO: 157237 - DNA, 25 bp, Artificial
  probe
  misc_feature (1)..(25): SEQ ID NO: 3707; WAN024DGQ_at; Start 73; Stop 97
aatgacttttatcgaggtcttggct

SEQ ID NO: 157238 - DNA, 25 bp, Artificial
  probe
  misc_feature (1)..(25): SEQ ID NO: 3707; WAN024DGQ_at; Start 17; Stop 41
gttatctgcaggtcaaaacagtggc

SEQ ID NO: 157239 - DNA, 25 bp, Artificial
  probe
  misc_feature (1)..(25): SEQ ID NO: 3707; WAN024DGQ_at; Start 9; Stop 33
aaaagttggttatctgcaggtcaaa

SEQ ID NO: 157240 - DNA, 25 bp, Artificial
  probe
  misc_feature (1)..(25): SEQ ID NO: 3707; WAN024DGQ_at; Start 127; Stop 151
tggaatccgcaaaatccttgtcaga

SEQ ID NO: 157241 - DNA, 25 bp, Artificial
  probe
  misc_feature (1)..(25): SEQ ID NO: 3707; WAN024DGQ_at; Start 49; Stop 73
tctaataaagattatgatcgaacaa

SEQ ID NO: 157242 - DNA, 25 bp, Artificial
  probe
  misc_feature (1)..(25): SEQ ID NO: 3707; WAN024DGQ_at; Start 11; Stop 35
aagttggttatctgcaggtcaaaac

SEQ ID NO: 157243 - DNA, 25 bp, Artificial
  probe
  misc_feature (1)..(25): SEQ ID NO: 3707; WAN024DGQ_at; Start 7; Stop 31
aaaaaagttggttatctgcaggtca

SEQ ID NO: 157244 - DNA, 25 bp, Artificial
  probe
  misc_feature (1)..(25): SEQ ID NO: 3707; WAN024DGQ_at; Start 76; Stop 100
gacttttatcgaggtcttggcttta

SEQ ID NO: 157245 - DNA, 25 bp, Artificial
  probe
  misc_feature (1)..(25): SEQ ID NO: 3707; WAN024DGQ_at; Start 58; Stop 82
gattatgatcgaacaaatgactttt

SEQ ID NO: 157246 - DNA, 25 bp, Artificial
  probe
  misc_feature (1)..(25): SEQ ID NO: 3707; WAN024DGQ_at; Start 19; Stop 43
tatctgcaggtcaaaacagtggcag

SEQ ID NO: 157247 - DNA, 25 bp, Artificial
  probe
  misc_feature (1)..(25): SEQ ID NO: 3707; WAN024DGQ_at; Start 18; Stop 42
ttatctgcaggtcaaaacagtggca

SEQ ID NO: 157248 - DNA, 25 bp, Artificial
  probe
  misc_feature (1)..(25): SEQ ID NO: 3707; WAN024DGQ_at; Start 125; Stop 149
tatggaatccgcaaaatccttgtca

SEQ ID NO: 157249 - DNA, 25 bp, Artificial
  probe
  misc_feature (1)..(25): SEQ ID NO: 654; WAN024DGR_at; Start 689; Stop 713
acgtaggaggtttgatgttgatttc

SEQ ID NO: 157250 - DNA, 25 bp, Artificial
  probe
  misc_feature (1)..(25): SEQ ID NO: 654; WAN024DGR_at; Start 337; Stop 361
gaaacctttcagattgatgccttgg

SEQ ID NO: 157251 - DNA, 25 bp, Artificial
  probe
  misc_feature (1)..(25): SEQ ID NO: 654; WAN024DGR_at; Start 661; Stop 685
ttcttacaggaaaaggatgtgttct

SEQ ID NO: 157252 - DNA, 25 bp, Artificial
  probe
  misc_feature (1)..(25): SEQ ID NO: 654; WAN024DGR_at; Start 526; Stop 550
ggcgccatgatttacatcttctata

SEQ ID NO: 157253 - DNA, 25 bp, Artificial
  probe
  misc_feature (1)..(25): SEQ ID NO: 654; WAN024DGR_at; Start 143; Stop 167
ttcaacatattccattcctagaagg

SEQ ID NO: 157254 - DNA, 25 bp, Artificial
  probe
  misc_feature (1)..(25): SEQ ID NO: 654; WAN024DGR_at; Start 445; Stop 469
gtttgtattccttttgcgaccttga

SEQ ID NO: 157255 - DNA, 25 bp, Artificial
  probe
  misc_feature (1)..(25): SEQ ID NO: 654; WAN024DGR_at; Start 513; Stop 537
gactaagcagtcaggcgccatgatt

SEQ ID NO: 157256 - DNA, 25 bp, Artificial
  probe
  misc_feature (1)..(25): SEQ ID NO: 654; WAN024DGR_at; Start 366; Stop 390
actcttagtcggtggtattttattg

SEQ ID NO: 157257 - DNA, 25 bp, Artificial
  probe
  misc_feature (1)..(25): SEQ ID NO: 654; WAN024DGR_at; Start 498; Stop 522
cagtatcgccttttggactaagcag

SEQ ID NO: 157258 - DNA, 25 bp, Artificial
  probe
  misc_feature (1)..(25): SEQ ID NO: 654; WAN024DGR_at; Start 758; Stop 782
tagattcctacgaaagtgcgggttc

SEQ ID NO: 157259 - DNA, 25 bp, Artificial
  probe
  misc_feature (1)..(25): SEQ ID NO: 654; WAN024DGR_at; Start 324; Stop 348
tcacatcctagttgaaacctttcag

SEQ ID NO: 157260 - DNA, 25 bp, Artificial
  probe
  misc_feature (1)..(25): SEQ ID NO: 654; WAN024DGR_at; Start 253; Stop 277
gcactagggcaacgcctagtccgaa

SEQ ID NO: 157261 - DNA, 25 bp, Artificial
  probe
  misc_feature (1)..(25): SEQ ID NO: 654; WAN024DGR_at; Start 352; Stop 376
gatgccttgggtgaactcttagtcg

SEQ ID NO: 157262 - DNA, 25 bp, Artificial
  probe
  misc_feature (1)..(25): SEQ ID NO: 654; WAN024DGR_at; Start 38; Stop 62
gacaatacatcaaacaaatcatgga

SEQ ID NO: 157263 - DNA, 25 bp, Artificial
  probe
  misc_feature (1)..(25): SEQ ID NO: 654; WAN024DGR_at; Start 592; Stop 616
tctcttcttcgttggttgattagct

SEQ ID NO: 157264 - DNA, 25 bp, Artificial
  probe
  misc_feature (1)..(25): SEQ ID NO: 654; WAN024DGR_at; Start 210; Stop 234
gattcccaagggaatggaccatctc

SEQ ID NO: 157265 - DNA, 25 bp, Artificial
  probe
  misc_feature (1)..(25): SEQ ID NO: 654; WAN024DGR_at; Start 401; Stop 425
tgaccagcattgtttggactcttcc

SEQ ID NO: 157266 - DNA, 25 bp, Artificial
  probe
  misc_feature (1)..(25): SEQ ID NO: 654; WAN024DGR_at; Start 384; Stop 408
tttattgggaacaacagtgaccagc

SEQ ID NO: 157267 - DNA, 25 bp, Artificial
  probe
  misc_feature (1)..(25): SEQ ID NO: 654; WAN024DGR_at; Start 559; Stop 583
gactttgctaagtatccgatttcta

SEQ ID NO: 157268 - DNA, 25 bp, Artificial
  probe
  misc_feature (1)..(25): SEQ ID NO: 654; WAN024DGR_at; Start 169; Stop 193
tggacctttcaagagatagctttca

SEQ ID NO: 157269 - DNA, 25 bp, Artificial
  probe
  misc_feature (1)..(25): SEQ ID NO: 654; WAN024DGR_at; Start 745; Stop 769
tgggataagggcttagattcctacg

SEQ ID NO: 157270 - DNA, 25 bp, Artificial
  probe
  misc_feature (1)..(25): SEQ ID NO: 654; WAN024DGR_at; Start 460; Stop 484
gcgaccttgatttatacttctctta

SEQ ID NO: 157271 - DNA, 25 bp, Artificial
  probe
  misc_feature (1)..(25): SEQ ID NO: 654; WAN024DGR_at; Start 238; Stop 262
tttgacaatctctgggcactagggc

SEQ ID NO: 157272 - DNA, 25 bp, Artificial
  probe
  misc_feature (1)..(25): SEQ ID NO: 654; WAN024DGR_at; Start 634; Stop 658
tttacagcctactatccagctagct

SEQ ID NO: 157273 - DNA, 25 bp, Artificial
  probe
  misc_feature (1)..(25): SEQ ID NO: 654; WAN024DGR_at; Start 80; Stop 104
tggttggtgtcttgggagtctttct

SEQ ID NO: 157274 - DNA, 25 bp, Artificial
  probe
  misc_feature (1)..(25): SEQ ID NO: 654; WAN024DGR_at; Start 673; Stop 697
aaggatgtgttctttaacgtaggag

SEQ ID NO: 157275 - DNA, 25 bp, Artificial
  probe
  misc_feature (1)..(25): SEQ ID NO: 654; WAN024DGR_at; Start 618; Stop 642
tatcgtgcctttcgcctttacagcc

SEQ ID NO: 157276 - DNA, 25 bp, Artificial
  probe
  misc_feature (1)..(25): SEQ ID NO: 654; WAN024DGR_at; Start 196; Stop 220
tatggattttccttgattcccaagg

SEQ ID NO: 157277 - DNA, 25 bp, Artificial
  probe
  misc_feature (1)..(25): SEQ ID NO: 654; WAN024DGR_at; Start 483; Stop 507
taaaatcgcaacagccagtatcgcc

SEQ ID NO: 157278 - DNA, 25 bp, Artificial
  probe
  misc_feature (1)..(25): SEQ ID NO: 654; WAN024DGR_at; Start 646; Stop 670
tatccagctagctatttcttacagg

SEQ ID NO: 157279 - DNA, 25 bp, Artificial
  probe
  misc_feature (1)..(25): SEQ ID NO: 654; WAN024DGR_at; Start 221; Stop 245
gaatggaccatctcttttttgacaa

SEQ ID NO: 157280 - DNA, 25 bp, Artificial
  probe
  misc_feature (1)..(25): SEQ ID NO: 654; WAN024DGR_at; Start 3; Stop 27
gaaaaaatatcaacgaatgcatctg

SEQ ID NO: 157281 - DNA, 25 bp, Artificial
  probe
  misc_feature (1)..(25): SEQ ID NO: 654; WAN024DGR_at; Start 109; Stop 133
caaggcttgaatctcttgtttctca

SEQ ID NO: 157282 - DNA, 25 bp, Artificial
  probe
  misc_feature (1)..(25): SEQ ID NO: 654; WAN024DGR_at; Start 609; Stop 633
gattagctttatcgtgcctttcgcc

SEQ ID NO: 157283 - DNA, 25 bp, Artificial
  probe
  misc_feature (1)..(25): SEQ ID NO: 5451; WAN024DGS_at; Start 99; Stop 123
tgtccagggtggcatgttagccttt

SEQ ID NO: 157284 - DNA, 25 bp, Artificial
  probe
  misc_feature (1)..(25): SEQ ID NO: 5451; WAN024DGS_at; Start 83; Stop 107
gttataatgttatcaatgtccaggg

SEQ ID NO: 157285 - DNA, 25 bp, Artificial
  probe
  misc_feature (1)..(25): SEQ ID NO: 5451; WAN024DGS_at; Start 106; Stop 130
ggtggcatgttagcctttgaagaac

SEQ ID NO: 157286 - DNA, 25 bp, Artificial
  probe
  misc_feature (1)..(25): SEQ ID NO: 5451; WAN024DGS_at; Start 29; Stop 53
tttgcaaatctggaatgagatcggc

SEQ ID NO: 157287 - DNA, 25 bp, Artificial
  probe
  misc_feature (1)..(25): SEQ ID NO: 5451; WAN024DGS_at; Start 1; Stop 25
ttggacaaagatcgcttgcattata

SEQ ID NO: 157288 - DNA, 25 bp, Artificial
  probe
  misc_feature (1)..(25): SEQ ID NO: 5451; WAN024DGS_at; Start 52; Stop 76
gcgcgtgcttgccaattcctattag

SEQ ID NO: 157289 - DNA, 25 bp, Artificial
  probe
  misc_feature (1)..(25): SEQ ID NO: 5451; WAN024DGS_at; Start 49; Stop 73
tcggcgcgtgcttgccaattcctat

SEQ ID NO: 157290 - DNA, 25 bp, Artificial
  probe
  misc_feature (1)..(25): SEQ ID NO: 5451; WAN024DGS_at; Start 85; Stop 109
tataatgttatcaatgtccagggtg

SEQ ID NO: 157291 - DNA, 25 bp, Artificial
  probe
  misc_feature (1)..(25): SEQ ID NO: 5451; WAN024DGS_at; Start 4; Stop 28
gacaaagatcgcttgcattatatta

SEQ ID NO: 157292 - DNA, 25 bp, Artificial
  probe
  misc_feature (1)..(25): SEQ ID NO: 5451; WAN024DGS_at; Start 44; Stop 68
tgagatcggcgcgtgcttgccaatt

SEQ ID NO: 157293 - DNA, 25 bp, Artificial
  probe
  misc_feature (1)..(25): SEQ ID NO: 5451; WAN024DGS_at; Start 47; Stop 71
gatcggcgcgtgcttgccaattcct

SEQ ID NO: 157294 - DNA, 25 bp, Artificial
  probe
  misc_feature (1)..(25): SEQ ID NO: 5451; WAN024DGS_at; Start 37; Stop 61
tctggaatgagatcggcgcgtgctt

SEQ ID NO: 157295 - DNA, 25 bp, Artificial
  probe
  misc_feature (1)..(25): SEQ ID NO: 5451; WAN024DGS_at; Start 111; Stop 135
catgttagcctttgaagaacttcta

SEQ ID NO: 157296 - DNA, 25 bp, Artificial
  probe
  misc_feature (1)..(25): SEQ ID NO: 5451; WAN024DGS_at; Start 87; Stop 111
taatgttatcaatgtccagggtggc

SEQ ID NO: 157297 - DNA, 25 bp, Artificial
  probe
  misc_feature (1)..(25): SEQ ID NO: 5451; WAN024DGS_at; Start 33; Stop 57
caaatctggaatgagatcggcgcgt

SEQ ID NO: 157298 - DNA, 25 bp, Artificial
  probe
  misc_feature (1)..(25): SEQ ID NO: 5451; WAN024DGS_at; Start 54; Stop 78
gcgtgcttgccaattcctattagaa

SEQ ID NO: 157299 - DNA, 25 bp, Artificial
  probe
  misc_feature (1)..(25): SEQ ID NO: 5451; WAN024DGS_at; Start 31; Stop 55
tgcaaatctggaatgagatcggcgc

SEQ ID NO: 157300 - DNA, 25 bp, Artificial
  probe
  misc_feature (1)..(25): SEQ ID NO: 5451; WAN024DGS_at; Start 109; Stop 133
ggcatgttagcctttgaagaacttc

SEQ ID NO: 157301 - DNA, 25 bp, Artificial
  probe
  misc_feature (1)..(25): SEQ ID NO: 5451; WAN024DGS_at; Start 18; Stop 42
gcattatattatttgcaaatctgga

SEQ ID NO: 157302 - DNA, 25 bp, Artificial
  probe
  misc_feature (1)..(25): SEQ ID NO: 5451; WAN024DGS_at; Start 96; Stop 120
caatgtccagggtggcatgttagcc

SEQ ID NO: 157303 - DNA, 25 bp, Artificial
  probe
  misc_feature (1)..(25): SEQ ID NO: 5451; WAN024DGS_at; Start 102; Stop 126
ccagggtggcatgttagcctttgaa

SEQ ID NO: 157304 - DNA, 25 bp, Artificial
  probe
  misc_feature (1)..(25): SEQ ID NO: 5451; WAN024DGS_at; Start 116; Stop 140
tagcctttgaagaacttctaactaa

SEQ ID NO: 157305 - DNA, 25 bp, Artificial
  probe
  misc_feature (1)..(25): SEQ ID NO: 5451; WAN024DGS_at; Start 35; Stop 59
aatctggaatgagatcggcgcgtgc

SEQ ID NO: 157306 - DNA, 25 bp, Artificial
  probe
  misc_feature (1)..(25): SEQ ID NO: 5451; WAN024DGS_at; Start 88; Stop 112
aatgttatcaatgtccagggtggca

SEQ ID NO: 157307 - DNA, 25 bp, Artificial
  probe
  misc_feature (1)..(25): SEQ ID NO: 5451; WAN024DGS_at; Start 10; Stop 34
gatcgcttgcattatattatttgca

SEQ ID NO: 157308 - DNA, 25 bp, Artificial
  probe
  misc_feature (1)..(25): SEQ ID NO: 5451; WAN024DGS_at; Start 68; Stop 92
tcctattagaacaaggttataatgt

SEQ ID NO: 157309 - DNA, 25 bp, Artificial
  probe
  misc_feature (1)..(25): SEQ ID NO: 5451; WAN024DGS_at; Start 55; Stop 79
cgtgcttgccaattcctattagaac

SEQ ID NO: 157310 - DNA, 25 bp, Artificial
  probe
  misc_feature (1)..(25): SEQ ID NO: 5451; WAN024DGS_at; Start 93; Stop 117
tatcaatgtccagggtggcatgtta

SEQ ID NO: 157311 - DNA, 25 bp, Artificial
  probe
  misc_feature (1)..(25): SEQ ID NO: 5451; WAN024DGS_at; Start 113; Stop 137
tgttagcctttgaagaacttctaac

SEQ ID NO: 157312 - DNA, 25 bp, Artificial
  probe
  misc_feature (1)..(25): SEQ ID NO: 5451; WAN024DGS_at; Start 27; Stop 51
tatttgcaaatctggaatgagatcg

SEQ ID NO: 157313 - DNA, 25 bp, Artificial
  probe
  misc_feature (1)..(25): SEQ ID NO: 5451; WAN024DGS_at; Start 103; Stop 127
cagggtggcatgttagcctttgaag

SEQ ID NO: 157314 - DNA, 25 bp, Artificial
  probe
  misc_feature (1)..(25): SEQ ID NO: 5451; WAN024DGS_at; Start 90; Stop 114
tgttatcaatgtccagggtggcatg

SEQ ID NO: 157315 - DNA, 25 bp, Artificial
  probe
  misc_feature (1)..(25): SEQ ID NO: 5451; WAN024DGS_at; Start 95; Stop 119
tcaatgtccagggtggcatgttagc

SEQ ID NO: 157316 - DNA, 25 bp, Artificial
  probe
  misc_feature (1)..(25): SEQ ID NO: 5451; WAN024DGS_at; Start 97; Stop 121
aatgtccagggtggcatgttagcct

SEQ ID NO: 157317 - DNA, 25 bp, Artificial
  probe
  misc_feature (1)..(25): SEQ ID NO: 1028; WAN024DGT_at; Start 179; Stop 203
caagtgttcgaggcaattgggatga

SEQ ID NO: 157318 - DNA, 25 bp, Artificial
  probe
  misc_feature (1)..(25): SEQ ID NO: 1028; WAN024DGT_at; Start 473; Stop 497
cagtttatggtcatgttcacaagca

SEQ ID NO: 157319 - DNA, 25 bp, Artificial
  probe
  misc_feature (1)..(25): SEQ ID NO: 1028; WAN024DGT_at; Start 55; Stop 79
gaagcagtgattgcagatgctaaaa

SEQ ID NO: 157320 - DNA, 25 bp, Artificial
  probe
  misc_feature (1)..(25): SEQ ID NO: 1028; WAN024DGT_at; Start 358; Stop 382
ggattgcgcttttctatctctcata

SEQ ID NO: 157321 - DNA, 25 bp, Artificial
  probe
  misc_feature (1)..(25): SEQ ID NO: 1028; WAN024DGT_at; Start 478; Stop 502
tatggtcatgttcacaagcagttgc

SEQ ID NO: 157322 - DNA, 25 bp, Artificial
  probe
  misc_feature (1)..(25): SEQ ID NO: 1028; WAN024DGT_at; Start 409; Stop 433
gacttgctagttgagaatgatacag

SEQ ID NO: 157323 - DNA, 25 bp, Artificial
  probe
  misc_feature (1)..(25): SEQ ID NO: 1028; WAN024DGT_at; Start 15; Stop 39
cgcaattttatcagatgttcatggc

SEQ ID NO: 157324 - DNA, 25 bp, Artificial
  probe
  misc_feature (1)..(25): SEQ ID NO: 1028; WAN024DGT_at; Start 303; Stop 327
tgcaacgattgtctggctacgaagc

SEQ ID NO: 157325 - DNA, 25 bp, Artificial
  probe
  misc_feature (1)..(25): SEQ ID NO: 1028; WAN024DGT_at; Start 23; Stop 47
tatcagatgttcatggcaatgcgac

SEQ ID NO: 157326 - DNA, 25 bp, Artificial
  probe
  misc_feature (1)..(25): SEQ ID NO: 1028; WAN024DGT_at; Start 322; Stop 346
cgaagcttgcctttgctggaaaaga

SEQ ID NO: 157327 - DNA, 25 bp, Artificial
  probe
  misc_feature (1)..(25): SEQ ID NO: 1028; WAN024DGT_at; Start 514; Stop 538
agtcaagggcaacaaatcatcaatc

SEQ ID NO: 157328 - DNA, 25 bp, Artificial
  probe
  misc_feature (1)..(25): SEQ ID NO: 1028; WAN024DGT_at; Start 50; Stop 74
cgctagaagcagtgattgcagatgc

SEQ ID NO: 157329 - DNA, 25 bp, Artificial
  probe
  misc_feature (1)..(25): SEQ ID NO: 1028; WAN024DGT_at; Start 445; Stop 469
caactgctagatgcggaaacggacg

SEQ ID NO: 157330 - DNA, 25 bp, Artificial
  probe
  misc_feature (1)..(25): SEQ ID NO: 1028; WAN024DGT_at; Start 461; Stop 485
aaacggacgtggcagtttatggtca

SEQ ID NO: 157331 - DNA, 25 bp, Artificial
  probe
  misc_feature (1)..(25): SEQ ID NO: 1028; WAN024DGT_at; Start 388; Stop 412
cctgacaaaaactatggtggtgact

SEQ ID NO: 157332 - DNA, 25 bp, Artificial
  probe
  misc_feature (1)..(25): SEQ ID NO: 1028; WAN024DGT_at; Start 282; Stop 306
tttgatggagcgaatggatcctgca

SEQ ID NO: 157333 - DNA, 25 bp, Artificial
  probe
  misc_feature (1)..(25): SEQ ID NO: 1028; WAN024DGT_at; Start 483; Stop 507
tcatgttcacaagcagttgcttcgt

SEQ ID NO: 157334 - DNA, 25 bp, Artificial
  probe
  misc_feature (1)..(25): SEQ ID NO: 1028; WAN024DGT_at; Start 309; Stop 333
gattgtctggctacgaagcttgcct

SEQ ID NO: 157335 - DNA, 25 bp, Artificial
  probe
  misc_feature (1)..(25): SEQ ID NO: 1028; WAN024DGT_at; Start 552; Stop 576
catgccctattttaattgggaggcg

SEQ ID NO: 157336 - DNA, 25 bp, Artificial
  probe
  misc_feature (1)..(25): SEQ ID NO: 1028; WAN024DGT_at; Start 703; Stop 727
ccctttatcgaaatgtatgaagaac

SEQ ID NO: 157337 - DNA, 25 bp, Artificial
  probe
  misc_feature (1)..(25): SEQ ID NO: 1028; WAN024DGT_at; Start 421; Stop 445
gagaatgatacagagaaatttgacc

SEQ ID NO: 157338 - DNA, 25 bp, Artificial
  probe
  misc_feature (1)..(25): SEQ ID NO: 1028; WAN024DGT_at; Start 294; Stop 318
aatggatcctgcaacgattgtctgg

SEQ ID NO: 157339 - DNA, 25 bp, Artificial
  probe
  misc_feature (1)..(25): SEQ ID NO: 1028; WAN024DGT_at; Start 42; Stop 66
tgcgacggcgctagaagcagtgatt

SEQ ID NO: 157340 - DNA, 25 bp, Artificial
  probe
  misc_feature (1)..(25): SEQ ID NO: 1028; WAN024DGT_at; Start 436; Stop 460
aaatttgaccaactgctagatgcgg

SEQ ID NO: 157341 - DNA, 25 bp, Artificial
  probe
  misc_feature (1)..(25): SEQ ID NO: 1028; WAN024DGT_at; Start 343; Stop 367
aagaaagaaattgacggattgcgct

SEQ ID NO: 157342 - DNA, 25 bp, Artificial
  probe
  misc_feature (1)..(25): SEQ ID NO: 1028; WAN024DGT_at; Start 794; Stop 818
ggtatgtagaggatgtgaagaattt

SEQ ID NO: 157343 - DNA, 25 bp, Artificial
  probe
  misc_feature (1)..(25): SEQ ID NO: 1028; WAN024DGT_at; Start 30; Stop 54
tgttcatggcaatgcgacggcgcta

SEQ ID NO: 157344 - DNA, 25 bp, Artificial
  probe
  misc_feature (1)..(25): SEQ ID NO: 1028; WAN024DGT_at; Start 289; Stop 313
gagcgaatggatcctgcaacgattg

SEQ ID NO: 157345 - DNA, 25 bp, Artificial
  probe
  misc_feature (1)..(25): SEQ ID NO: 1028; WAN024DGT_at; Start 393; Stop 417
caaaaactatggtggtgacttgcta

SEQ ID NO: 157346 - DNA, 25 bp, Artificial
  probe
  misc_feature (1)..(25): SEQ ID NO: 1028; WAN024DGT_at; Start 522; Stop 546
gcaacaaatcatcaatccagggtcg

SEQ ID NO: 157347 - DNA, 25 bp, Artificial
  probe
  misc_feature (1)..(25): SEQ ID NO: 1028; WAN024DGT_at; Start 533; Stop 557
tcaatccagggtcgattggcatgcc

SEQ ID NO: 157348 - DNA, 25 bp, Artificial
  probe
  misc_feature (1)..(25): SEQ ID NO: 1028; WAN024DGT_at; Start 370; Stop 394
tctatctctcataatttacctgaca

SEQ ID NO: 157349 - DNA, 25 bp, Artificial
  probe
  misc_feature (1)..(25): SEQ ID NO: 1028; WAN024DGT_at; Start 542; Stop 566
ggtcgattggcatgccctattttaa

SEQ ID NO: 157350 - DNA, 25 bp, Artificial
  probe
  misc_feature (1)..(25): SEQ ID NO: 1028; WAN024DGT_at; Start 335; Stop 359
tgctggaaaagaaagaaattgacgg

SEQ ID NO: 157351 - DNA, 25 bp, Artificial
  probe
  misc_feature (1)..(25): SEQ ID NO: 5380; WAN024DGU_at; Start 82; Stop 106
cgtctggtttggatagttgtgctct

SEQ ID NO: 157352 - DNA, 25 bp, Artificial
  probe
  misc_feature (1)..(25): SEQ ID NO: 5380; WAN024DGU_at; Start 358; Stop 382
cagaactggaatcaaactggtgctt

SEQ ID NO: 157353 - DNA, 25 bp, Artificial
  probe
  misc_feature (1)..(25): SEQ ID NO: 5380; WAN024DGU_at; Start 255; Stop 279
tagtcaccagcattctgaaggaagg

SEQ ID NO: 157354 - DNA, 25 bp, Artificial
  probe
  misc_feature (1)..(25): SEQ ID NO: 5380; WAN024DGU_at; Start 162; Stop 186
gctaaagcaagcagaacggtcagta

SEQ ID NO: 157355 - DNA, 25 bp, Artificial
  probe
  misc_feature (1)..(25): SEQ ID NO: 5380; WAN024DGU_at; Start 396; Stop 420
cgtgactgagtctagtaaggcggat

SEQ ID NO: 157356 - DNA, 25 bp, Artificial
  probe
  misc_feature (1)..(25): SEQ ID NO: 5380; WAN024DGU_at; Start 304; Stop 328
tacctggatccgcagatggattcac

SEQ ID NO: 157357 - DNA, 25 bp, Artificial
  probe
  misc_feature (1)..(25): SEQ ID NO: 5380; WAN024DGU_at; Start 619; Stop 643
gaccatacagatgagaagtctgtca

SEQ ID NO: 157358 - DNA, 25 bp, Artificial
  probe
  misc_feature (1)..(25): SEQ ID NO: 5380; WAN024DGU_at; Start 173; Stop 197
cagaacggtcagtaaaaattggtca

SEQ ID NO: 157359 - DNA, 25 bp, Artificial
  probe
  misc_feature (1)..(25): SEQ ID NO: 5380; WAN024DGU_at; Start 461; Stop 485
caggagaggcggaaagtcaaactaa

SEQ ID NO: 157360 - DNA, 25 bp, Artificial
  probe
  misc_feature (1)..(25): SEQ ID NO: 5380; WAN024DGU_at; Start 196; Stop 220
caacaaagtattgaccaatgggaga

SEQ ID NO: 157361 - DNA, 25 bp, Artificial
  probe
  misc_feature (1)..(25): SEQ ID NO: 5380; WAN024DGU_at; Start 603; Stop 627
tcatgcgattggcttggaccataca

SEQ ID NO: 157362 - DNA, 25 bp, Artificial
  probe
  misc_feature (1)..(25): SEQ ID NO: 5380; WAN024DGU_at; Start 287; Stop 311
aggcctctgctcgtatttacctgga

SEQ ID NO: 157363 - DNA, 25 bp, Artificial
  probe
  misc_feature (1)..(25): SEQ ID NO: 5380; WAN024DGU_at; Start 211; Stop 235
caatgggagaaaacagggcaactgc

SEQ ID NO: 157364 - DNA, 25 bp, Artificial
  probe
  misc_feature (1)..(25): SEQ ID NO: 5380; WAN024DGU_at; Start 435; Stop 459
gatgaacgacggaggcactcctgtg

SEQ ID NO: 157365 - DNA, 25 bp, Artificial
  probe
  misc_feature (1)..(25): SEQ ID NO: 5380; WAN024DGU_at; Start 148; Stop 172
gattttcaaggagcgctaaagcaag

SEQ ID NO: 157366 - DNA, 25 bp, Artificial
  probe
  misc_feature (1)..(25): SEQ ID NO: 5380; WAN024DGU_at; Start 19; Stop 43
gacatgcgctggctttttcgtttga

SEQ ID NO: 157367 - DNA, 25 bp, Artificial
  probe
  misc_feature (1)..(25): SEQ ID NO: 5380; WAN024DGU_at; Start 240; Stop 264
gttaagccagacagatagtcaccag

SEQ ID NO: 157368 - DNA, 25 bp, Artificial
  probe
  misc_feature (1)..(25): SEQ ID NO: 5380; WAN024DGU_at; Start 650; Stop 674
cagcaggttccttttatggtatcca

SEQ ID NO: 157369 - DNA, 25 bp, Artificial
  probe
  misc_feature (1)..(25): SEQ ID NO: 5380; WAN024DGU_at; Start 565; Stop 589
tatgaacgccttgtccatacggcag

SEQ ID NO: 157370 - DNA, 25 bp, Artificial
  probe
  misc_feature (1)..(25): SEQ ID NO: 5380; WAN024DGU_at; Start 4; Stop 28
ctagaaaggtggagagacatgcgct

SEQ ID NO: 157371 - DNA, 25 bp, Artificial
  probe
  misc_feature (1)..(25): SEQ ID NO: 5380; WAN024DGU_at; Start 318; Stop 342
gatggattcacgctttcaagaggct

SEQ ID NO: 157372 - DNA, 25 bp, Artificial
  probe
  misc_feature (1)..(25): SEQ ID NO: 5380; WAN024DGU_at; Start 507; Stop 531
gtccgtaacggtgcggttgaatcat

SEQ ID NO: 157373 - DNA, 25 bp, Artificial
  probe
  misc_feature (1)..(25): SEQ ID NO: 5380; WAN024DGU_at; Start 379; Stop 403
gcttttaactttgaactcgtgactg

SEQ ID NO: 157374 - DNA, 25 bp, Artificial
  probe
  misc_feature (1)..(25): SEQ ID NO: 5380; WAN024DGU_at; Start 476; Stop 500
gtcaaactaatctcttaacagggca

SEQ ID NO: 157375 - DNA, 25 bp, Artificial
  probe
  misc_feature (1)..(25): SEQ ID NO: 5380; WAN024DGU_at; Start 492; Stop 516
aacagggcaattcttgtccgtaacg

SEQ ID NO: 157376 - DNA, 25 bp, Artificial
  probe
  misc_feature (1)..(25): SEQ ID NO: 5380; WAN024DGU_at; Start 122; Stop 146
tcggacttctctggtatctgaacgg

SEQ ID NO: 157377 - DNA, 25 bp, Artificial
  probe
  misc_feature (1)..(25): SEQ ID NO: 5380; WAN024DGU_at; Start 684; Stop 708
tgttgcaaacctccgaaaaatatat

SEQ ID NO: 157378 - DNA, 25 bp, Artificial
  probe
  misc_feature (1)..(25): SEQ ID NO: 5380; WAN024DGU_at; Start 422; Stop 446
ttacggctacggagatgaacgacgg

SEQ ID NO: 157379 - DNA, 25 bp, Artificial
  probe
  misc_feature (1)..(25): SEQ ID NO: 5380; WAN024DGU_at; Start 102; Stop 126
gctcttatgtgtgcttgctttcgga

SEQ ID NO: 157380 - DNA, 25 bp, Artificial
  probe
  misc_feature (1)..(25): SEQ ID NO: 5380; WAN024DGU_at; Start 671; Stop 695
tccaggaagaggatgttgcaaacct

SEQ ID NO: 157381 - DNA, 25 bp, Artificial
  probe
  misc_feature (1)..(25): SEQ ID NO: 5380; WAN024DGU_at; Start 550; Stop 574
tactatggctactcctatgaacgcc

SEQ ID NO: 157382 - DNA, 25 bp, Artificial
  probe
  misc_feature (1)..(25): SEQ ID NO: 5380; WAN024DGU_at; Start 633; Stop 657
gaagtctgtcatgcaaccagcaggt

SEQ ID NO: 157383 - DNA, 25 bp, Artificial
  probe
  misc_feature (1)..(25): SEQ ID NO: 5380; WAN024DGU_at; Start 411; Stop 435
taaggcggatattacggctacggag

SEQ ID NO: 157384 - DNA, 25 bp, Artificial
  probe
  misc_feature (1)..(25): SEQ ID NO: 5380; WAN024DGU_at; Start 580; Stop 604
catacggcagaacatgagttaggtc

SEQ ID NO: 157385 - DNA, 25 bp, Artificial
  probe
  misc_feature (1)..(25): SEQ ID NO: 2732; WAN024DGV_at; Start 902; Stop 926
atggagaagaagatattgttttagc

SEQ ID NO: 157386 - DNA, 25 bp, Artificial
  probe
  misc_feature (1)..(25): SEQ ID NO: 2732; WAN024DGV_at; Start 952; Stop 976
caggaaacgacttatctctttagtg

SEQ ID NO: 157387 - DNA, 25 bp, Artificial
  probe
  misc_feature (1)..(25): SEQ ID NO: 2732; WAN024DGV_at; Start 823; Stop 847
aatcaactgagagaatattctagtc

SEQ ID NO: 157388 - DNA, 25 bp, Artificial
  probe
  misc_feature (1)..(25): SEQ ID NO: 2732; WAN024DGV_at; Start 724; Stop 748
tatatgagcaaattgcaaggtgaac

SEQ ID NO: 157389 - DNA, 25 bp, Artificial
  probe
  misc_feature (1)..(25): SEQ ID NO: 2732; WAN024DGV_at; Start 124; Stop 148
tatcttgctttgaaacaagaaggag

SEQ ID NO: 157390 - DNA, 25 bp, Artificial
  probe
  misc_feature (1)..(25): SEQ ID NO: 2732; WAN024DGV_at; Start 988; Stop 1012
gagtttaataagttctatgcccctg

SEQ ID NO: 157391 - DNA, 25 bp, Artificial
  probe
  misc_feature (1)..(25): SEQ ID NO: 2732; WAN024DGV_at; Start 433; Stop 457
ccaggtggagaaccagattggttat

SEQ ID NO: 157392 - DNA, 25 bp, Artificial
  probe
  misc_feature (1)..(25): SEQ ID NO: 2732; WAN024DGV_at; Start 1192; Stop 1216
tacaaagctatccagttactcaaaa

SEQ ID NO: 157393 - DNA, 25 bp, Artificial
  probe
  misc_feature (1)..(25): SEQ ID NO: 2732; WAN024DGV_at; Start 236; Stop 260
aagatgctcttccagttttttatgc

SEQ ID NO: 157394 - DNA, 25 bp, Artificial
  probe
  misc_feature (1)..(25): SEQ ID NO: 2732; WAN024DGV_at; Start 566; Stop 590
agttaaaacgtgaagaactatcgat

SEQ ID NO: 157395 - DNA, 25 bp, Artificial
  probe
  misc_feature (1)..(25): SEQ ID NO: 2732; WAN024DGV_at; Start 1021; Stop 1045
caaaaatatgttatgttggaaagca

SEQ ID NO: 157396 - DNA, 25 bp, Artificial
  probe
  misc_feature (1)..(25): SEQ ID NO: 2732; WAN024DGV_at; Start 1074; Stop 1098
cctaggcattcaagggatttttgat

SEQ ID NO: 157397 - DNA, 25 bp, Artificial
  probe
  misc_feature (1)..(25): SEQ ID NO: 2732; WAN024DGV_at; Start 1037; Stop 1061
tggaaagcataaaacgtggaatacc

SEQ ID NO: 157398 - DNA, 25 bp, Artificial
  probe
  misc_feature (1)..(25): SEQ ID NO: 2732; WAN024DGV_at; Start 51; Stop 75
ggtttcttctcgttcctttatgcaa

SEQ ID NO: 157399 - DNA, 25 bp, Artificial
  probe
  misc_feature (1)..(25): SEQ ID NO: 2732; WAN024DGV_at; Start 807; Stop 831
ttctgagaaaaaacaaaatcaactg

SEQ ID NO: 157400 - DNA, 25 bp, Artificial
  probe
  misc_feature (1)..(25): SEQ ID NO: 2732; WAN024DGV_at; Start 1084; Stop 1108
caagggatttttgatggaagtgatg

SEQ ID NO: 157401 - DNA, 25 bp, Artificial
  probe
  misc_feature (1)..(25): SEQ ID NO: 2732; WAN024DGV_at; Start 442; Stop 466
gaaccagattggttatactataaag

SEQ ID NO: 157402 - DNA, 25 bp, Artificial
  probe
  misc_feature (1)..(25): SEQ ID NO: 2732; WAN024DGV_at; Start 226; Stop 250
tatacccaacaagatgctcttccag

SEQ ID NO: 157403 - DNA, 25 bp, Artificial
  probe
  misc_feature (1)..(25): SEQ ID NO: 2732; WAN024DGV_at; Start 1053; Stop 1077
tggaatacctaaatacaacttccta

SEQ ID NO: 157404 - DNA, 25 bp, Artificial
  probe
  misc_feature (1)..(25): SEQ ID NO: 2732; WAN024DGV_at; Start 153; Stop 177
tcaagttgcagctctggtttatagc

SEQ ID NO: 157405 - DNA, 25 bp, Artificial
  probe
  misc_feature (1)..(25): SEQ ID NO: 2732; WAN024DGV_at; Start 574; Stop 598
cgtgaagaactatcgatttttaaga

SEQ ID NO: 157406 - DNA, 25 bp, Artificial
  probe
  misc_feature (1)..(25): SEQ ID NO: 2732; WAN024DGV_at; Start 774; Stop 798
caagttgcgacttgatttgagtaaa

SEQ ID NO: 157407 - DNA, 25 bp, Artificial
  probe
  misc_feature (1)..(25): SEQ ID NO: 2732; WAN024DGV_at; Start 1100; Stop 1124
gaagtgatggtgttttgcgttttaa

SEQ ID NO: 157408 - DNA, 25 bp, Artificial
  probe
  misc_feature (1)..(25): SEQ ID NO: 2732; WAN024DGV_at; Start 614; Stop 638
cctctgaacgtagagaatatagtga

SEQ ID NO: 157409 - DNA, 25 bp, Artificial
  probe
  misc_feature (1)..(25): SEQ ID NO: 2732; WAN024DGV_at; Start 833; Stop 857
gagaatattctagtcaatttgaaac

SEQ ID NO: 157410 - DNA, 25 bp, Artificial
  probe
  misc_feature (1)..(25): SEQ ID NO: 2732; WAN024DGV_at; Start 884; Stop 908
gagacttgattgaaaaatatggaga

SEQ ID NO: 157411 - DNA, 25 bp, Artificial
  probe
  misc_feature (1)..(25): SEQ ID NO: 2732; WAN024DGV_at; Start 1066; Stop 1090
tacaacttcctaggcattcaaggga

SEQ ID NO: 157412 - DNA, 25 bp, Artificial
  probe
  misc_feature (1)..(25): SEQ ID NO: 2732; WAN024DGV_at; Start 1133; Stop 1157
ttaatggctatattgtacgcaaagc

SEQ ID NO: 157413 - DNA, 25 bp, Artificial
  probe
  misc_feature (1)..(25): SEQ ID NO: 2732; WAN024DGV_at; Start 737; Stop 761
tgcaaggtgaacaaagtaaactaga

SEQ ID NO: 157414 - DNA, 25 bp, Artificial
  probe
  misc_feature (1)..(25): SEQ ID NO: 2732; WAN024DGV_at; Start 1183; Stop 1207
cctttaaaatacaaagctatccagt

SEQ ID NO: 157415 - DNA, 25 bp, Artificial
  probe
  misc_feature (1)..(25): SEQ ID NO: 2732; WAN024DGV_at; Start 792; Stop 816
gagtaaaaatcctcattctgagaaa

SEQ ID NO: 157416 - DNA, 25 bp, Artificial
  probe
  misc_feature (1)..(25): SEQ ID NO: 2732; WAN024DGV_at; Start 290; Stop 314
gtgtattagagttgcttgtaaaacc

SEQ ID NO: 157417 - DNA, 25 bp, Artificial
  probe
  misc_feature (1)..(25): SEQ ID NO: 2732; WAN024DGV_at; Start 38; Stop 62
cttattctgatcaggtttcttctcg

SEQ ID NO: 157418 - DNA, 25 bp, Artificial
  probe
  misc_feature (1)..(25): SEQ ID NO: 2732; WAN024DGV_at; Start 605; Stop 629
caaaagaaacctctgaacgtagaga

SEQ ID NO: 157419 - DNA, 25 bp, Artificial
  probe
  misc_feature (1)..(25): SEQ ID NO: 6943; WAN024DGW_at; Start 878; Stop 902
tgggaaaatcaaacattcccttagc

SEQ ID NO: 157420 - DNA, 25 bp, Artificial
  probe
  misc_feature (1)..(25): SEQ ID NO: 6943; WAN024DGW_at; Start 118; Stop 142
catgagaaatttggtgtctatgaag

SEQ ID NO: 157421 - DNA, 25 bp, Artificial
  probe
  misc_feature (1)..(25): SEQ ID NO: 6943; WAN024DGW_at; Start 873; Stop 897
gaatatgggaaaatcaaacattccc

SEQ ID NO: 157422 - DNA, 25 bp, Artificial
  probe
  misc_feature (1)..(25): SEQ ID NO: 6943; WAN024DGW_at; Start 345; Stop 369
tttggtcaatcaagataagatagaa

SEQ ID NO: 157423 - DNA, 25 bp, Artificial
  probe
  misc_feature (1)..(25): SEQ ID NO: 6943; WAN024DGW_at; Start 734; Stop 758
gagaattagaggaacagttagaaaa

SEQ ID NO: 157424 - DNA, 25 bp, Artificial
  probe
  misc_feature (1)..(25): SEQ ID NO: 6943; WAN024DGW_at; Start 351; Stop 375
caatcaagataagatagaatatcct

SEQ ID NO: 157425 - DNA, 25 bp, Artificial
  probe
  misc_feature (1)..(25): SEQ ID NO: 6943; WAN024DGW_at; Start 731; Stop 755
taagagaattagaggaacagttaga

SEQ ID NO: 157426 - DNA, 25 bp, Artificial
  probe
  misc_feature (1)..(25): SEQ ID NO: 6943; WAN024DGW_at; Start 781; Stop 805
tttaatgatgccaccaaaccttcaa

SEQ ID NO: 157427 - DNA, 25 bp, Artificial
  probe
  misc_feature (1)..(25): SEQ ID NO: 6943; WAN024DGW_at; Start 881; Stop 905
gaaaatcaaacattcccttagcggc

SEQ ID NO: 157428 - DNA, 25 bp, Artificial
  probe
  misc_feature (1)..(25): SEQ ID NO: 6943; WAN024DGW_at; Start 120; Stop 144
tgagaaatttggtgtctatgaagag

SEQ ID NO: 157429 - DNA, 25 bp, Artificial
  probe
  misc_feature (1)..(25): SEQ ID NO: 6943; WAN024DGW_at; Start 777; Stop 801
aaaatttaatgatgccaccaaacct

SEQ ID NO: 157430 - DNA, 25 bp, Artificial
  probe
  misc_feature (1)..(25): SEQ ID NO: 6943; WAN024DGW_at; Start 775; Stop 799
gaaaaatttaatgatgccaccaaac

SEQ ID NO: 157431 - DNA, 25 bp, Artificial
  probe
  misc_feature (1)..(25): SEQ ID NO: 6943; WAN024DGW_at; Start 773; Stop 797
cagaaaaatttaatgatgccaccaa

SEQ ID NO: 157432 - DNA, 25 bp, Artificial
  probe
  misc_feature (1)..(25): SEQ ID NO: 6943; WAN024DGW_at; Start 348; Stop 372
ggtcaatcaagataagatagaatat

SEQ ID NO: 157433 - DNA, 25 bp, Artificial
  probe
  misc_feature (1)..(25): SEQ ID NO: 6943; WAN024DGW_at; Start 680; Stop 704
ttaaagaagattcttatatcacgct

SEQ ID NO: 157434 - DNA, 25 bp, Artificial
  probe
  misc_feature (1)..(25): SEQ ID NO: 6943; WAN024DGW_at; Start 780; Stop 804
atttaatgatgccaccaaaccttca

SEQ ID NO: 157435 - DNA, 25 bp, Artificial
  probe
  misc_feature (1)..(25): SEQ ID NO: 6943; WAN024DGW_at; Start 122; Stop 146
agaaatttggtgtctatgaagaggg

SEQ ID NO: 157436 - DNA, 25 bp, Artificial
  probe
  misc_feature (1)..(25): SEQ ID NO: 6943; WAN024DGW_at; Start 340; Stop 364
caatatttggtcaatcaagataaga

SEQ ID NO: 157437 - DNA, 25 bp, Artificial
  probe
  misc_feature (1)..(25): SEQ ID NO: 6943; WAN024DGW_at; Start 343; Stop 367
tatttggtcaatcaagataagatag

SEQ ID NO: 157438 - DNA, 25 bp, Artificial
  probe
  misc_feature (1)..(25): SEQ ID NO: 6943; WAN024DGW_at; Start 671; Stop 695
tagataactttaaagaagattctta

SEQ ID NO: 157439 - DNA, 25 bp, Artificial
  probe
  misc_feature (1)..(25): SEQ ID NO: 6943; WAN024DGW_at; Start 223; Stop 247
cctatattggattacagggatatag

SEQ ID NO: 157440 - DNA, 25 bp, Artificial
  probe
  misc_feature (1)..(25): SEQ ID NO: 6943; WAN024DGW_at; Start 748; Stop 772
cagttagaaaaaaatagagtagttg

SEQ ID NO: 157441 - DNA, 25 bp, Artificial
  probe
  misc_feature (1)..(25): SEQ ID NO: 6943; WAN024DGW_at; Start 414; Stop 438
agtgaaatggtctgggcggacaacc

SEQ ID NO: 157442 - DNA, 25 bp, Artificial
  probe
  misc_feature (1)..(25): SEQ ID NO: 6943; WAN024DGW_at; Start 110; Stop 134
attggaatcatgagaaatttggtgt

SEQ ID NO: 157443 - DNA, 25 bp, Artificial
  probe
  misc_feature (1)..(25): SEQ ID NO: 6943; WAN024DGW_at; Start 339; Stop 363
tcaatatttggtcaatcaagataag

SEQ ID NO: 157444 - DNA, 25 bp, Artificial
  probe
  misc_feature (1)..(25): SEQ ID NO: 6943; WAN024DGW_at; Start 757; Stop 781
aaaaatagagtagttgcagaaaaat

SEQ ID NO: 157445 - DNA, 25 bp, Artificial
  probe
  misc_feature (1)..(25): SEQ ID NO: 6943; WAN024DGW_at; Start 419; Stop 443
aatggtctgggcggacaaccgagat

SEQ ID NO: 157446 - DNA, 25 bp, Artificial
  probe
  misc_feature (1)..(25): SEQ ID NO: 6943; WAN024DGW_at; Start 772; Stop 796
gcagaaaaatttaatgatgccacca

SEQ ID NO: 157447 - DNA, 25 bp, Artificial
  probe
  misc_feature (1)..(25): SEQ ID NO: 6943; WAN024DGW_at; Start 225; Stop 249
tatattggattacagggatatagaa

SEQ ID NO: 157448 - DNA, 25 bp, Artificial
  probe
  misc_feature (1)..(25): SEQ ID NO: 6943; WAN024DGW_at; Start 114; Stop 138
gaatcatgagaaatttggtgtctat

SEQ ID NO: 157449 - DNA, 25 bp, Artificial
  probe
  misc_feature (1)..(25): SEQ ID NO: 6943; WAN024DGW_at; Start 221; Stop 245
gtcctatattggattacagggatat

SEQ ID NO: 157450 - DNA, 25 bp, Artificial
  probe
  misc_feature (1)..(25): SEQ ID NO: 6943; WAN024DGW_at; Start 783; Stop 807
taatgatgccaccaaaccttcaaaa

SEQ ID NO: 157451 - DNA, 25 bp, Artificial
  probe
  misc_feature (1)..(25): SEQ ID NO: 6943; WAN024DGW_at; Start 637; Stop 661
catttaagaaatgaaacctattata

SEQ ID NO: 157452 - DNA, 25 bp, Artificial
  probe
  misc_feature (1)..(25): SEQ ID NO: 6943; WAN024DGW_at; Start 135; Stop 159
ctatgaagaggggaagttactggct

SEQ ID NO: 157453 - DNA, 25 bp, Artificial
  probe
  misc_feature (1)..(25): SEQ ID NO: 2772; WAN024DGX_at; Start 1046; Stop 1070
aatttaggaggcgtcgagaatgctt

SEQ ID NO: 157454 - DNA, 25 bp, Artificial
  probe
  misc_feature (1)..(25): SEQ ID NO: 2772; WAN024DGX_at; Start 940; Stop 964
caatctatacgcaggaatggatgaa

SEQ ID NO: 157455 - DNA, 25 bp, Artificial
  probe
  misc_feature (1)..(25): SEQ ID NO: 2772; WAN024DGX_at; Start 1077; Stop 1101
gtggactctatcgttttaaagctaa

SEQ ID NO: 157456 - DNA, 25 bp, Artificial
  probe
  misc_feature (1)..(25): SEQ ID NO: 2772; WAN024DGX_at; Start 945; Stop 969
tatacgcaggaatggatgaagattt

SEQ ID NO: 157457 - DNA, 25 bp, Artificial
  probe
  misc_feature (1)..(25): SEQ ID NO: 2772; WAN024DGX_at; Start 935; Stop 959
tctgtcaatctatacgcaggaatgg

SEQ ID NO: 157458 - DNA, 25 bp, Artificial
  probe
  misc_feature (1)..(25): SEQ ID NO: 2772; WAN024DGX_at; Start 1037; Stop 1061
ttatggcaaaatttaggaggcgtcg

SEQ ID NO: 157459 - DNA, 25 bp, Artificial
  probe
  misc_feature (1)..(25): SEQ ID NO: 2772; WAN024DGX_at; Start 1054; Stop 1078
aggcgtcgagaatgctttagatggt

SEQ ID NO: 157460 - DNA, 25 bp, Artificial
  probe
  misc_feature (1)..(25): SEQ ID NO: 2772; WAN024DGX_at; Start 1024; Stop 1048
tgaacgtggcattttatggcaaaat

SEQ ID NO: 157461 - DNA, 25 bp, Artificial
  probe
  misc_feature (1)..(25): SEQ ID NO: 2772; WAN024DGX_at; Start 904; Stop 928
ggctaccttgactttagaattcgga

SEQ ID NO: 157462 - DNA, 25 bp, Artificial
  probe
  misc_feature (1)..(25): SEQ ID NO: 2772; WAN024DGX_at; Start 937; Stop 961
tgtcaatctatacgcaggaatggat

SEQ ID NO: 157463 - DNA, 25 bp, Artificial
  probe
  misc_feature (1)..(25): SEQ ID NO: 2772; WAN024DGX_at; Start 900; Stop 924
tagcggctaccttgactttagaatt

SEQ ID NO: 157464 - DNA, 25 bp, Artificial
  probe
  misc_feature (1)..(25): SEQ ID NO: 2772; WAN024DGX_at; Start 907; Stop 931
taccttgactttagaattcggacaa

SEQ ID NO: 157465 - DNA, 25 bp, Artificial
  probe
  misc_feature (1)..(25): SEQ ID NO: 2772; WAN024DGX_at; Start 879; Stop 903
caggtcaagcaagagttcccttagc

SEQ ID NO: 157466 - DNA, 25 bp, Artificial
  probe
  misc_feature (1)..(25): SEQ ID NO: 2772; WAN024DGX_at; Start 1050; Stop 1074
taggaggcgtcgagaatgctttaga

SEQ ID NO: 157467 - DNA, 25 bp, Artificial
  probe
  misc_feature (1)..(25): SEQ ID NO: 2772; WAN024DGX_at; Start 896; Stop 920
cccttagcggctaccttgactttag

SEQ ID NO: 157468 - DNA, 25 bp, Artificial
  probe
  misc_feature (1)..(25): SEQ ID NO: 2772; WAN024DGX_at; Start 1059; Stop 1083
tcgagaatgctttagatggtggact

SEQ ID NO: 157469 - DNA, 25 bp, Artificial
  probe
  misc_feature (1)..(25): SEQ ID NO: 2772; WAN024DGX_at; Start 1067; Stop 1091
gctttagatggtggactctatcgtt

SEQ ID NO: 157470 - DNA, 25 bp, Artificial
  probe
  misc_feature (1)..(25): SEQ ID NO: 2772; WAN024DGX_at; Start 991; Stop 1015
tttgacttggtatgagacagctcga

SEQ ID NO: 157471 - DNA, 25 bp, Artificial
  probe
  misc_feature (1)..(25): SEQ ID NO: 2772; WAN024DGX_at; Start 514; Stop 538
caagtcaacaaaacaggctattcga

SEQ ID NO: 157472 - DNA, 25 bp, Artificial
  probe
  misc_feature (1)..(25): SEQ ID NO: 2772; WAN024DGX_at; Start 500; Stop 524
gaagataaactttccaagtcaacaa

SEQ ID NO: 157473 - DNA, 25 bp, Artificial
  probe
  misc_feature (1)..(25): SEQ ID NO: 2772; WAN024DGX_at; Start 1063; Stop 1087
gaatgctttagatggtggactctat

SEQ ID NO: 157474 - DNA, 25 bp, Artificial
  probe
  misc_feature (1)..(25): SEQ ID NO: 2772; WAN024DGX_at; Start 994; Stop 1018
gacttggtatgagacagctcgatat

SEQ ID NO: 157475 - DNA, 25 bp, Artificial
  probe
  misc_feature (1)..(25): SEQ ID NO: 2772; WAN024DGX_at; Start 510; Stop 534
tttccaagtcaacaaaacaggctat

SEQ ID NO: 157476 - DNA, 25 bp, Artificial
  probe
  misc_feature (1)..(25): SEQ ID NO: 2772; WAN024DGX_at; Start 1021; Stop 1045
ctttgaacgtggcattttatggcaa

SEQ ID NO: 157477 - DNA, 25 bp, Artificial
  probe
  misc_feature (1)..(25): SEQ ID NO: 2772; WAN024DGX_at; Start 977; Stop 1001
tataaagctcctattttgacttggt

SEQ ID NO: 157478 - DNA, 25 bp, Artificial
  probe
  misc_feature (1)..(25): SEQ ID NO: 2772; WAN024DGX_at; Start 520; Stop 544
aacaaaacaggctattcgaacagca

SEQ ID NO: 157479 - DNA, 25 bp, Artificial
  probe
  misc_feature (1)..(25): SEQ ID NO: 2772; WAN024DGX_at; Start 986; Stop 1010
cctattttgacttggtatgagacag

SEQ ID NO: 157480 - DNA, 25 bp, Artificial
  probe
  misc_feature (1)..(25): SEQ ID NO: 2772; WAN024DGX_at; Start 1073; Stop 1097
gatggtggactctatcgttttaaag

SEQ ID NO: 157481 - DNA, 25 bp, Artificial
  probe
  misc_feature (1)..(25): SEQ ID NO: 2772; WAN024DGX_at; Start 1041; Stop 1065
ggcaaaatttaggaggcgtcgagaa

SEQ ID NO: 157482 - DNA, 25 bp, Artificial
  probe
  misc_feature (1)..(25): SEQ ID NO: 2772; WAN024DGX_at; Start 875; Stop 899
gatgcaggtcaagcaagagttccct

SEQ ID NO: 157483 - DNA, 25 bp, Artificial
  probe
  misc_feature (1)..(25): SEQ ID NO: 2772; WAN024DGX_at; Start 910; Stop 934
cttgactttagaattcggacaaact

SEQ ID NO: 157484 - DNA, 25 bp, Artificial
  probe
  misc_feature (1)..(25): SEQ ID NO: 2772; WAN024DGX_at; Start 918; Stop 942
tagaattcggacaaacttctgtcaa

SEQ ID NO: 157485 - DNA, 25 bp, Artificial
  probe
  misc_feature (1)..(25): SEQ ID NO: 2772; WAN024DGX_at; Start 930; Stop 954
aaacttctgtcaatctatacgcagg

SEQ ID NO: 157486 - DNA, 25 bp, Artificial
  probe
  misc_feature (1)..(25): SEQ ID NO: 2772; WAN024DGX_at; Start 926; Stop 950
ggacaaacttctgtcaatctatacg

SEQ ID NO: 157487 - DNA, 25 bp, Artificial
  probe
  misc_feature (1)..(25): SEQ ID NO: 2771; WAN024DGY_s_at; Start 805; Stop 829
aaagtagaagcgcagaagaaggaaa

SEQ ID NO: 157488 - DNA, 25 bp, Artificial
  probe
  misc_feature (1)..(25): SEQ ID NO: 2771; WAN024DGY_s_at; Start 810; Stop 834
agaagcgcagaagaaggaaaaagaa

SEQ ID NO: 157489 - DNA, 25 bp, Artificial
  probe
  misc_feature (1)..(25): SEQ ID NO: 2771; WAN024DGY_s_at; Start 628; Stop 652
aaagagattcatttgaggaatgaag

SEQ ID NO: 157490 - DNA, 25 bp, Artificial
  probe
  misc_feature (1)..(25): SEQ ID NO: 2771; WAN024DGY_s_at; Start 802; Stop 826
tcaaaagtagaagcgcagaagaagg

SEQ ID NO: 157491 - DNA, 25 bp, Artificial
  probe
  misc_feature (1)..(25): SEQ ID NO: 2771; WAN024DGY_s_at; Start 812; Stop 836
aagcgcagaagaaggaaaaagaacg

SEQ ID NO: 157492 - DNA, 25 bp, Artificial
  probe
  misc_feature (1)..(25): SEQ ID NO: 2771; WAN024DGY_s_at; Start 803; Stop 827
caaaagtagaagcgcagaagaagga

SEQ ID NO: 157493 - DNA, 25 bp, Artificial
  probe
  misc_feature (1)..(25): SEQ ID NO: 2771; WAN024DGY_s_at; Start 801; Stop 825
ttcaaaagtagaagcgcagaagaag

SEQ ID NO: 157494 - DNA, 25 bp, Artificial
  probe
  misc_feature (1)..(25): SEQ ID NO: 2771; WAN024DGY_s_at; Start 634; Stop 658
attcatttgaggaatgaagcctatt

SEQ ID NO: 157495 - DNA, 25 bp, Artificial
  probe
  misc_feature (1)..(25): SEQ ID NO: 2771; WAN024DGY_s_at; Start 629; Stop 653
aagagattcatttgaggaatgaagc

SEQ ID NO: 157496 - DNA, 25 bp, Artificial
  probe
  misc_feature (1)..(25): SEQ ID NO: 2771; WAN024DGY_s_at; Start 633; Stop 657
gattcatttgaggaatgaagcctat

SEQ ID NO: 157497 - DNA, 25 bp, Artificial
  probe
  misc_feature (1)..(25): SEQ ID NO: 2771; WAN024DGY_s_at; Start 632; Stop 656
agattcatttgaggaatgaagccta

SEQ ID NO: 157498 - DNA, 25 bp, Artificial
  probe
  misc_feature (1)..(25): SEQ ID NO: 2771; WAN024DGY_s_at; Start 813; Stop 837
agcgcagaagaaggaaaaagaacgt

SEQ ID NO: 157499 - DNA, 25 bp, Artificial
  probe
  misc_feature (1)..(25): SEQ ID NO: 2771; WAN024DGY_s_at; Start 631; Stop 655
gagattcatttgaggaatgaagcct

SEQ ID NO: 157500 - DNA, 25 bp, Artificial
  probe
  misc_feature (1)..(25): SEQ ID NO: 2771; WAN024DGY_s_at; Start 637; Stop 661
catttgaggaatgaagcctattata

SEQ ID NO: 157501 - DNA, 25 bp, Artificial
  probe
  misc_feature (1)..(25): SEQ ID NO: 2771; WAN024DGY_s_at; Start 804; Stop 828
aaaagtagaagcgcagaagaaggaa

SEQ ID NO: 157502 - DNA, 25 bp, Artificial
  probe
  misc_feature (1)..(25): SEQ ID NO: 2771; WAN024DGY_s_at; Start 638; Stop 662
atttgaggaatgaagcctattataa

SEQ ID NO: 157503 - DNA, 25 bp, Artificial
  probe
  misc_feature (1)..(25): SEQ ID NO: 2771; WAN024DGY_s_at; Start 640; Stop 664
ttgaggaatgaagcctattataaaa

SEQ ID NO: 157504 - DNA, 25 bp, Artificial
  probe
  misc_feature (1)..(25): SEQ ID NO: 2771; WAN024DGY_s_at; Start 641; Stop 665
tgaggaatgaagcctattataaaaa

SEQ ID NO: 157505 - DNA, 25 bp, Artificial
  probe
  misc_feature (1)..(25): SEQ ID NO: 2771; WAN024DGY_s_at; Start 635; Stop 659
ttcatttgaggaatgaagcctatta

SEQ ID NO: 157506 - DNA, 25 bp, Artificial
  probe
  misc_feature (1)..(25): SEQ ID NO: 2771; WAN024DGY_s_at; Start 811; Stop 835
gaagcgcagaagaaggaaaaagaac

SEQ ID NO: 157507 - DNA, 25 bp, Artificial
  probe
  misc_feature (1)..(25): SEQ ID NO: 2771; WAN024DGY_s_at; Start 806; Stop 830
aagtagaagcgcagaagaaggaaaa

SEQ ID NO: 157508 - DNA, 25 bp, Artificial
  probe
  misc_feature (1)..(25): SEQ ID NO: 2771; WAN024DGY_s_at; Start 807; Stop 831
agtagaagcgcagaagaaggaaaaa

SEQ ID NO: 157509 - DNA, 25 bp, Artificial
  probe
  misc_feature (1)..(25): SEQ ID NO: 2771; WAN024DGY_s_at; Start 639; Stop 663
tttgaggaatgaagcctattataaa

SEQ ID NO: 157510 - DNA, 25 bp, Artificial
  probe
  misc_feature (1)..(25): SEQ ID NO: 2771; WAN024DGY_s_at; Start 630; Stop 654
agagattcatttgaggaatgaagcc

SEQ ID NO: 157511 - DNA, 25 bp, Artificial
  probe
  misc_feature (1)..(25): SEQ ID NO: 2771; WAN024DGY_s_at; Start 809; Stop 833
tagaagcgcagaagaaggaaaaaga

SEQ ID NO: 157512 - DNA, 25 bp, Artificial
  probe
  misc_feature (1)..(25): SEQ ID NO: 2771; WAN024DGY_s_at; Start 636; Stop 660
tcatttgaggaatgaagcctattat

SEQ ID NO: 157513 - DNA, 25 bp, Artificial
  probe
  misc_feature (1)..(25): SEQ ID NO: 2771; WAN024DGY_s_at; Start 808; Stop 832
gtagaagcgcagaagaaggaaaaag

SEQ ID NO: 157514 - DNA, 25 bp, Artificial
  probe
  misc_feature (1)..(25): SEQ ID NO: 2812; WAN024DGZ_at; Start 130; Stop 154
tggtgtctatgaaggggagaactta

SEQ ID NO: 157515 - DNA, 25 bp, Artificial
  probe
  misc_feature (1)..(25): SEQ ID NO: 2812; WAN024DGZ_at; Start 129; Stop 153
ttggtgtctatgaaggggagaactt

SEQ ID NO: 157516 - DNA, 25 bp, Artificial
  probe
  misc_feature (1)..(25): SEQ ID NO: 2812; WAN024DGZ_at; Start 635; Stop 659
attcatttaagaaacgaagcttatt

SEQ ID NO: 157517 - DNA, 25 bp, Artificial
  probe
  misc_feature (1)..(25): SEQ ID NO: 2812; WAN024DGZ_at; Start 134; Stop 158
gtctatgaaggggagaacttactgg

SEQ ID NO: 157518 - DNA, 25 bp, Artificial
  probe
  misc_feature (1)..(25): SEQ ID NO: 2812; WAN024DGZ_at; Start 137; Stop 161
tatgaaggggagaacttactggctg

SEQ ID NO: 157519 - DNA, 25 bp, Artificial
  probe
  misc_feature (1)..(25): SEQ ID NO: 2812; WAN024DGZ_at; Start 135; Stop 159
tctatgaaggggagaacttactggc

SEQ ID NO: 157520 - DNA, 25 bp, Artificial
  probe
  misc_feature (1)..(25): SEQ ID NO: 2812; WAN024DGZ_at; Start 131; Stop 155
ggtgtctatgaaggggagaacttac

SEQ ID NO: 157521 - DNA, 25 bp, Artificial
  probe
  misc_feature (1)..(25): SEQ ID NO: 2812; WAN024DGZ_at; Start 136; Stop 160
ctatgaaggggagaacttactggct

SEQ ID NO: 157522 - DNA, 25 bp, Artificial
  probe
  misc_feature (1)..(25): SEQ ID NO: 2812; WAN024DGZ_at; Start 142; Stop 166
aggggagaacttactggctgtggct

SEQ ID NO: 157523 - DNA, 25 bp, Artificial
  probe
  misc_feature (1)..(25): SEQ ID NO: 2812; WAN024DGZ_at; Start 138; Stop 162
atgaaggggagaacttactggctgt

SEQ ID NO: 157524 - DNA, 25 bp, Artificial
  probe
  misc_feature (1)..(25): SEQ ID NO: 2812; WAN024DGZ_at; Start 636; Stop 660
ttcatttaagaaacgaagcttatta

SEQ ID NO: 157525 - DNA, 25 bp, Artificial
  probe
  misc_feature (1)..(25): SEQ ID NO: 2812; WAN024DGZ_at; Start 634; Stop 658
gattcatttaagaaacgaagcttat

SEQ ID NO: 157526 - DNA, 25 bp, Artificial
  probe
  misc_feature (1)..(25): SEQ ID NO: 2812; WAN024DGZ_at; Start 141; Stop 165
aaggggagaacttactggctgtggc

SEQ ID NO: 157527 - DNA, 25 bp, Artificial
  probe
  misc_feature (1)..(25): SEQ ID NO: 2812; WAN024DGZ_at; Start 133; Stop 157
tgtctatgaaggggagaacttactg

SEQ ID NO: 157528 - DNA, 25 bp, Artificial
  probe
  misc_feature (1)..(25): SEQ ID NO: 2812; WAN024DGZ_at; Start 132; Stop 156
gtgtctatgaaggggagaacttact

SEQ ID NO: 157529 - DNA, 25 bp, Artificial
  probe
  misc_feature (1)..(25): SEQ ID NO: 2812; WAN024DGZ_at; Start 128; Stop 152
cttggtgtctatgaaggggagaact

SEQ ID NO: 157530 - DNA, 25 bp, Artificial
  probe
  misc_feature (1)..(25): SEQ ID NO: 2812; WAN024DGZ_at; Start 139; Stop 163
tgaaggggagaacttactggctgtg

SEQ ID NO: 157531 - DNA, 25 bp, Artificial
  probe
  misc_feature (1)..(25): SEQ ID NO: 2812; WAN024DGZ_at; Start 638; Stop 662
catttaagaaacgaagcttattata

SEQ ID NO: 157532 - DNA, 25 bp, Artificial
  probe
  misc_feature (1)..(25): SEQ ID NO: 2812; WAN024DGZ_at; Start 140; Stop 164
gaaggggagaacttactggctgtgg

SEQ ID NO: 157533 - DNA, 25 bp, Artificial
  probe
  misc_feature (1)..(25): SEQ ID NO: 2812; WAN024DGZ_at; Start 637; Stop 661
tcatttaagaaacgaagcttattat

SEQ ID NO: 157534 - DNA, 25 bp, Artificial
  probe
  misc_feature (1)..(25): SEQ ID NO: 2770; WAN024DH2_at; Start 869; Stop 893
atatagatgtaggtcaagcgagagt

SEQ ID NO: 157535 - DNA, 25 bp, Artificial
  probe
  misc_feature (1)..(25): SEQ ID NO: 2770; WAN024DH2_at; Start 885; Stop 909
agcgagagttcctttagcggctact

SEQ ID NO: 157536 - DNA, 25 bp, Artificial
  probe
  misc_feature (1)..(25): SEQ ID NO: 2770; WAN024DH2_at; Start 867; Stop 891
atatatagatgtaggtcaagcgaga

SEQ ID NO: 157537 - DNA, 25 bp, Artificial
  probe
  misc_feature (1)..(25): SEQ ID NO: 2770; WAN024DH2_at; Start 878; Stop 902
taggtcaagcgagagttcctttagc

SEQ ID NO: 157538 - DNA, 25 bp, Artificial
  probe
  misc_feature (1)..(25): SEQ ID NO: 2770; WAN024DH2_at; Start 887; Stop 911
cgagagttcctttagcggctacttt

SEQ ID NO: 157539 - DNA, 25 bp, Artificial
  probe
  misc_feature (1)..(25): SEQ ID NO: 2770; WAN024DH2_at; Start 851; Stop 875
tgaccttcttgcaggaatatataga

SEQ ID NO: 157540 - DNA, 25 bp, Artificial
  probe
  misc_feature (1)..(25): SEQ ID NO: 2770; WAN024DH2_at; Start 852; Stop 876
gaccttcttgcaggaatatatagat

SEQ ID NO: 157541 - DNA, 25 bp, Artificial
  probe
  misc_feature (1)..(25): SEQ ID NO: 2770; WAN024DH2_at; Start 868; Stop 892
tatatagatgtaggtcaagcgagag

SEQ ID NO: 157542 - DNA, 25 bp, Artificial
  probe
  misc_feature (1)..(25): SEQ ID NO: 2770; WAN024DH2_at; Start 849; Stop 873
attgaccttcttgcaggaatatata

SEQ ID NO: 157543 - DNA, 25 bp, Artificial
  probe
  misc_feature (1)..(25): SEQ ID NO: 2770; WAN024DH2_at; Start 874; Stop 898
gatgtaggtcaagcgagagttcctt

SEQ ID NO: 157544 - DNA, 25 bp, Artificial
  probe
  misc_feature (1)..(25): SEQ ID NO: 2770; WAN024DH2_at; Start 856; Stop 880
ttcttgcaggaatatatagatgtag

SEQ ID NO: 157545 - DNA, 25 bp, Artificial
  probe
  misc_feature (1)..(25): SEQ ID NO: 2770; WAN024DH2_at; Start 875; Stop 899
atgtaggtcaagcgagagttccttt

SEQ ID NO: 157546 - DNA, 25 bp, Artificial
  probe
  misc_feature (1)..(25): SEQ ID NO: 2770; WAN024DH2_at; Start 855; Stop 879
cttcttgcaggaatatatagatgta

SEQ ID NO: 157547 - DNA, 25 bp, Artificial
  probe
  misc_feature (1)..(25): SEQ ID NO: 2770; WAN024DH2_at; Start 859; Stop 883
ttgcaggaatatatagatgtaggtc

SEQ ID NO: 157548 - DNA, 25 bp, Artificial
  probe
  misc_feature (1)..(25): SEQ ID NO: 2770; WAN024DH2_at; Start 871; Stop 895
atagatgtaggtcaagcgagagttc

SEQ ID NO: 157549 - DNA, 25 bp, Artificial
  probe
  misc_feature (1)..(25): SEQ ID NO: 2770; WAN024DH2_at; Start 865; Stop 889
gaatatatagatgtaggtcaagcga

SEQ ID NO: 157550 - DNA, 25 bp, Artificial
  probe
  misc_feature (1)..(25): SEQ ID NO: 2770; WAN024DH2_at; Start 872; Stop 896
tagatgtaggtcaagcgagagttcc

SEQ ID NO: 157551 - DNA, 25 bp, Artificial
  probe
  misc_feature (1)..(25): SEQ ID NO: 2770; WAN024DH2_at; Start 876; Stop 900
tgtaggtcaagcgagagttccttta

SEQ ID NO: 157552 - DNA, 25 bp, Artificial
  probe
  misc_feature (1)..(25): SEQ ID NO: 2770; WAN024DH2_at; Start 696; Stop 720
tatcaccttggccaccttggatgtt

SEQ ID NO: 157553 - DNA, 25 bp, Artificial
  probe
  misc_feature (1)..(25): SEQ ID NO: 2770; WAN024DH2_at; Start 857; Stop 881
tcttgcaggaatatatagatgtagg

SEQ ID NO: 157554 - DNA, 25 bp, Artificial
  probe
  misc_feature (1)..(25): SEQ ID NO: 2770; WAN024DH2_at; Start 873; Stop 897
agatgtaggtcaagcgagagttcct

SEQ ID NO: 157555 - DNA, 25 bp, Artificial
  probe
  misc_feature (1)..(25): SEQ ID NO: 2770; WAN024DH2_at; Start 858; Stop 882
cttgcaggaatatatagatgtaggt

SEQ ID NO: 157556 - DNA, 25 bp, Artificial
  probe
  misc_feature (1)..(25): SEQ ID NO: 2770; WAN024DH2_at; Start 866; Stop 890
aatatatagatgtaggtcaagcgag

SEQ ID NO: 157557 - DNA, 25 bp, Artificial
  probe
  misc_feature (1)..(25): SEQ ID NO: 2770; WAN024DH2_at; Start 877; Stop 901
gtaggtcaagcgagagttcctttag

SEQ ID NO: 157558 - DNA, 25 bp, Artificial
  probe
  misc_feature (1)..(25): SEQ ID NO: 2770; WAN024DH2_at; Start 888; Stop 912
gagagttcctttagcggctactttg

SEQ ID NO: 157559 - DNA, 25 bp, Artificial
  probe
  misc_feature (1)..(25): SEQ ID NO: 2770; WAN024DH2_at; Start 850; Stop 874
ttgaccttcttgcaggaatatatag

SEQ ID NO: 157560 - DNA, 25 bp, Artificial
  probe
  misc_feature (1)..(25): SEQ ID NO: 2770; WAN024DH2_at; Start 864; Stop 888
ggaatatatagatgtaggtcaagcg

SEQ ID NO: 157561 - DNA, 25 bp, Artificial
  probe
  misc_feature (1)..(25): SEQ ID NO: 2770; WAN024DH2_at; Start 854; Stop 878
ccttcttgcaggaatatatagatgt

SEQ ID NO: 157562 - DNA, 25 bp, Artificial
  probe
  misc_feature (1)..(25): SEQ ID NO: 2770; WAN024DH2_at; Start 886; Stop 910
gcgagagttcctttagcggctactt

SEQ ID NO: 157563 - DNA, 25 bp, Artificial
  probe
  misc_feature (1)..(25): SEQ ID NO: 2770; WAN024DH2_at; Start 853; Stop 877
accttcttgcaggaatatatagatg

SEQ ID NO: 157564 - DNA, 25 bp, Artificial
  probe
  misc_feature (1)..(25): SEQ ID NO: 2770; WAN024DH2_at; Start 870; Stop 894
tatagatgtaggtcaagcgagagtt

SEQ ID NO: 157565 - DNA, 25 bp, Artificial
  probe
  misc_feature (1)..(25): SEQ ID NO: 1371; WAN024DH3_at; Start 290; Stop 314
ttctctgcgtgggactctatcacgg

SEQ ID NO: 157566 - DNA, 25 bp, Artificial
  probe
  misc_feature (1)..(25): SEQ ID NO: 1371; WAN024DH3_at; Start 627; Stop 651
ccagtttggtcgcaagatggagcaa

SEQ ID NO: 157567 - DNA, 25 bp, Artificial
  probe
  misc_feature (1)..(25): SEQ ID NO: 1371; WAN024DH3_at; Start 515; Stop 539
ctggagtagacttgatgtttgtgac

SEQ ID NO: 157568 - DNA, 25 bp, Artificial
  probe
  misc_feature (1)..(25): SEQ ID NO: 1371; WAN024DH3_at; Start 359; Stop 383
ctagtggtcagatggaggccgcctt

SEQ ID NO: 157569 - DNA, 25 bp, Artificial
  probe
  misc_feature (1)..(25): SEQ ID NO: 1371; WAN024DH3_at; Start 617; Stop 641
tccctgttgcccagtttggtcgcaa

SEQ ID NO: 157570 - DNA, 25 bp, Artificial
  probe
  misc_feature (1)..(25): SEQ ID NO: 1371; WAN024DH3_at; Start 345; Stop 369
gattcagtctattcctagtggtcag

SEQ ID NO: 157571 - DNA, 25 bp, Artificial
  probe
  misc_feature (1)..(25): SEQ ID NO: 1371; WAN024DH3_at; Start 298; Stop 322
gtgggactctatcacggcgcttata

SEQ ID NO: 157572 - DNA, 25 bp, Artificial
  probe
  misc_feature (1)..(25): SEQ ID NO: 1371; WAN024DH3_at; Start 118; Stop 142
atcttctttggtgccatgtcaacca

SEQ ID NO: 157573 - DNA, 25 bp, Artificial
  probe
  misc_feature (1)..(25): SEQ ID NO: 1371; WAN024DH3_at; Start 307; Stop 331
tatcacggcgcttatatcgctgagg

SEQ ID NO: 157574 - DNA, 25 bp, Artificial
  probe
  misc_feature (1)..(25): SEQ ID NO: 1371; WAN024DH3_at; Start 263; Stop 287
tcatgattccaatttattggacagc

SEQ ID NO: 157575 - DNA, 25 bp, Artificial
  probe
  misc_feature (1)..(25): SEQ ID NO: 1371; WAN024DH3_at; Start 42; Stop 66
tggacaatttttcaatggtttcctc

SEQ ID NO: 157576 - DNA, 25 bp, Artificial
  probe
  misc_feature (1)..(25): SEQ ID NO: 1371; WAN024DH3_at; Start 202; Stop 226
cccctcttggtgcagtttgttattg

SEQ ID NO: 157577 - DNA, 25 bp, Artificial
  probe
  misc_feature (1)..(25): SEQ ID NO: 1371; WAN024DH3_at; Start 611; Stop 635
tatgcttccctgttgcccagtttgg

SEQ ID NO: 157578 - DNA, 25 bp, Artificial
  probe
  misc_feature (1)..(25): SEQ ID NO: 1371; WAN024DH3_at; Start 3; Stop 27
gacagatttatcatcttggacagcc

SEQ ID NO: 157579 - DNA, 25 bp, Artificial
  probe
  misc_feature (1)..(25): SEQ ID NO: 1371; WAN024DH3_at; Start 468; Stop 492
ccaaattgttaacctcatcaagaac

SEQ ID NO: 157580 - DNA, 25 bp, Artificial
  probe
  misc_feature (1)..(25): SEQ ID NO: 1371; WAN024DH3_at; Start 632; Stop 656
ttggtcgcaagatggagcaagccaa

SEQ ID NO: 157581 - DNA, 25 bp, Artificial
  probe
  misc_feature (1)..(25): SEQ ID NO: 1371; WAN024DH3_at; Start 388; Stop 412
caaggttttacctatatcagtgcca

SEQ ID NO: 157582 - DNA, 25 bp, Artificial
  probe
  misc_feature (1)..(25): SEQ ID NO: 1371; WAN024DH3_at; Start 584; Stop 608
taggtgctgctcttctctactttgc

SEQ ID NO: 157583 - DNA, 25 bp, Artificial
  probe
  misc_feature (1)..(25): SEQ ID NO: 1371; WAN024DH3_at; Start 496; Stop 520
tctactgtagctatcatctctggag

SEQ ID NO: 157584 - DNA, 25 bp, Artificial
  probe
  misc_feature (1)..(25): SEQ ID NO: 1371; WAN024DH3_at; Start 533; Stop 557
ttgtgactaagtcttggtcggctct

SEQ ID NO: 157585 - DNA, 25 bp, Artificial
  probe
  misc_feature (1)..(25): SEQ ID NO: 1371; WAN024DH3_at; Start 400; Stop 424
tatatcagtgccatgcgcttgatta

SEQ ID NO: 157586 - DNA, 25 bp, Artificial
  probe
  misc_feature (1)..(25): SEQ ID NO: 1371; WAN024DH3_at; Start 127; Stop 151
ggtgccatgtcaaccagtaaacgtc

SEQ ID NO: 157587 - DNA, 25 bp, Artificial
  probe
  misc_feature (1)..(25): SEQ ID NO: 1371; WAN024DH3_at; Start 13; Stop 37
tcatcttggacagcctattttcagg

SEQ ID NO: 157588 - DNA, 25 bp, Artificial
  probe
  misc_feature (1)..(25): SEQ ID NO: 1371; WAN024DH3_at; Start 132; Stop 156
catgtcaaccagtaaacgtccaatt

SEQ ID NO: 157589 - DNA, 25 bp, Artificial
  probe
  misc_feature (1)..(25): SEQ ID NO: 1371; WAN024DH3_at; Start 330; Stop 354
ggttattcgttcagggattcagtct

SEQ ID NO: 157590 - DNA, 25 bp, Artificial
  probe
  misc_feature (1)..(25): SEQ ID NO: 1371; WAN024DH3_at; Start 396; Stop 420
tacctatatcagtgccatgcgcttg

SEQ ID NO: 157591 - DNA, 25 bp, Artificial
  probe
  misc_feature (1)..(25): SEQ ID NO: 1371; WAN024DH3_at; Start 505; Stop 529
gctatcatctctggagtagacttga

SEQ ID NO: 157592 - DNA, 25 bp, Artificial
  probe
  misc_feature (1)..(25): SEQ ID NO: 1371; WAN024DH3_at; Start 452; Stop 476
tccctccattgaccaaccaaattgt

SEQ ID NO: 157593 - DNA, 25 bp, Artificial
  probe
  misc_feature (1)..(25): SEQ ID NO: 1371; WAN024DH3_at; Start 354; Stop 378
tattcctagtggtcagatggaggcc

SEQ ID NO: 157594 - DNA, 25 bp, Artificial
  probe
  misc_feature (1)..(25): SEQ ID NO: 1371; WAN024DH3_at; Start 23; Stop 47
cagcctattttcaggattttggaca

SEQ ID NO: 157595 - DNA, 25 bp, Artificial
  probe
  misc_feature (1)..(25): SEQ ID NO: 1371; WAN024DH3_at; Start 148; Stop 172
cgtccaattttacgcattttagctc

SEQ ID NO: 157596 - DNA, 25 bp, Artificial
  probe
  misc_feature (1)..(25): SEQ ID NO: 1371; WAN024DH3_at; Start 321; Stop 345
tatcgctgaggttattcgttcaggg

SEQ ID NO: 157597 - DNA, 25 bp, Artificial
  probe
  misc_feature (1)..(25): SEQ ID NO: 1371; WAN024DH3_at; Start 232; Stop 256
tatggcctacctcttatcagtgacc

SEQ ID NO: 157598 - DNA, 25 bp, Artificial
  probe
  misc_feature (1)..(25): SEQ ID NO: 1371; WAN024DH3_at; Start 373; Stop 397
gaggccgccttgtcgcaaggtttta

SEQ ID NO: 157599 - DNA, 25 bp, Artificial
  probe
  misc_feature (1)..(25): SEQ ID NO: 794; WAN024DH4_at; Start 448; Stop 472
gccaaagagttggaaattctggact

SEQ ID NO: 157600 - DNA, 25 bp, Artificial
  probe
  misc_feature (1)..(25): SEQ ID NO: 794; WAN024DH4_at; Start 551; Stop 575
cctttgaccgtgttattgatgttta

SEQ ID NO: 157601 - DNA, 25 bp, Artificial
  probe
  misc_feature (1)..(25): SEQ ID NO: 794; WAN024DH4_at; Start 458; Stop 482
tggaaattctggactatctagtgaa

SEQ ID NO: 157602 - DNA, 25 bp, Artificial
  probe
  misc_feature (1)..(25): SEQ ID NO: 794; WAN024DH4_at; Start 283; Stop 307
gatggctatctggaaaaacctttct

SEQ ID NO: 157603 - DNA, 25 bp, Artificial
  probe
  misc_feature (1)..(25): SEQ ID NO: 794; WAN024DH4_at; Start 114; Stop 138
gcaattttctagctatgaggtggcc

SEQ ID NO: 157604 - DNA, 25 bp, Artificial
  probe
  misc_feature (1)..(25): SEQ ID NO: 794; WAN024DH4_at; Start 584; Stop 608
aattgcggaaaaagctagacttgga

SEQ ID NO: 157605 - DNA, 25 bp, Artificial
  probe
  misc_feature (1)..(25): SEQ ID NO: 794; WAN024DH4_at; Start 48; Stop 72
cagtgattatttgacggattgtggc

SEQ ID NO: 157606 - DNA, 25 bp, Artificial
  probe
  misc_feature (1)..(25): SEQ ID NO: 794; WAN024DH4_at; Start 516; Stop 540
tatcgatgccgtctggaaagcgaca

SEQ ID NO: 157607 - DNA, 25 bp, Artificial
  probe
  misc_feature (1)..(25): SEQ ID NO: 794; WAN024DH4_at; Start 618; Stop 642
cactgtgcgcaatgttggttataaa

SEQ ID NO: 157608 - DNA, 25 bp, Artificial
  probe
  misc_feature (1)..(25): SEQ ID NO: 794; WAN024DH4_at; Start 385; Stop 409
gataccaaggtggactttgaaagct

SEQ ID NO: 157609 - DNA, 25 bp, Artificial
  probe
  misc_feature (1)..(25): SEQ ID NO: 794; WAN024DH4_at; Start 78; Stop 102
aactattgaggcagcggacggtcag

SEQ ID NO: 157610 - DNA, 25 bp, Artificial
  probe
  misc_feature (1)..(25): SEQ ID NO: 794; WAN024DH4_at; Start 94; Stop 118
gacggtcaggaagctctggagcaat

SEQ ID NO: 157611 - DNA, 25 bp, Artificial
  probe
  misc_feature (1)..(25): SEQ ID NO: 794; WAN024DH4_at; Start 334; Stop 358
gacgcgattttcaagcgctactacg

SEQ ID NO: 157612 - DNA, 25 bp, Artificial
  probe
  misc_feature (1)..(25): SEQ ID NO: 794; WAN024DH4_at; Start 630; Stop 654
tgttggttataaattggagcgaaaa

SEQ ID NO: 157613 - DNA, 25 bp, Artificial
  probe
  misc_feature (1)..(25): SEQ ID NO: 794; WAN024DH4_at; Start 422; Stop 446
tcgcaggtcaagaagtgcctatcaa

SEQ ID NO: 157614 - DNA, 25 bp, Artificial
  probe
  misc_feature (1)..(25): SEQ ID NO: 794; WAN024DH4_at; Start 60; Stop 84
gacggattgtggctatgaaactatt

SEQ ID NO: 157615 - DNA, 25 bp, Artificial
  probe
  misc_feature (1)..(25): SEQ ID NO: 794; WAN024DH4_at; Start 395; Stop 419
tggactttgaaagctacagtgcaag

SEQ ID NO: 157616 - DNA, 25 bp, Artificial
  probe
  misc_feature (1)..(25): SEQ ID NO: 794; WAN024DH4_at; Start 187; Stop 211
ctagctgagattcgtaaaaccagtc

SEQ ID NO: 157617 - DNA, 25 bp, Artificial
  probe
  misc_feature (1)..(25): SEQ ID NO: 794; WAN024DH4_at; Start 527; Stop 551
tctggaaagcgacagatgaggttcc

SEQ ID NO: 157618 - DNA, 25 bp, Artificial
  probe
  misc_feature (1)..(25): SEQ ID NO: 794; WAN024DH4_at; Start 345; Stop 369
caagcgctactacgatacaggacga

SEQ ID NO: 157619 - DNA, 25 bp, Artificial
  probe
  misc_feature (1)..(25): SEQ ID NO: 794; WAN024DH4_at; Start 201; Stop 225
taaaaccagtcaggttcctgtcttg

SEQ ID NO: 157620 - DNA, 25 bp, Artificial
  probe
  misc_feature (1)..(25): SEQ ID NO: 794; WAN024DH4_at; Start 605; Stop 629
tggattgtatcctcactgtgcgcaa

SEQ ID NO: 157621 - DNA, 25 bp, Artificial
  probe
  misc_feature (1)..(25): SEQ ID NO: 794; WAN024DH4_at; Start 322; Stop 346
aaagtgagggtggacgcgattttca

SEQ ID NO: 157622 - DNA, 25 bp, Artificial
  probe
  misc_feature (1)..(25): SEQ ID NO: 794; WAN024DH4_at; Start 217; Stop 241
cctgtcttgatgttgacagcttttc

SEQ ID NO: 157623 - DNA, 25 bp, Artificial
  probe
  misc_feature (1)..(25): SEQ ID NO: 794; WAN024DH4_at; Start 541; Stop 565
gatgaggttccctttgaccgtgtta

SEQ ID NO: 157624 - DNA, 25 bp, Artificial
  probe
  misc_feature (1)..(25): SEQ ID NO: 794; WAN024DH4_at; Start 375; Stop 399
ttcttacaaggataccaaggtggac

SEQ ID NO: 157625 - DNA, 25 bp, Artificial
  probe
  misc_feature (1)..(25): SEQ ID NO: 794; WAN024DH4_at; Start 14; Stop 38
ttgtagaagatgaagagatgatccg

SEQ ID NO: 157626 - DNA, 25 bp, Artificial
  probe
  misc_feature (1)..(25): SEQ ID NO: 794; WAN024DH4_at; Start 362; Stop 386
caggacgaatcttttcttacaagga

SEQ ID NO: 157627 - DNA, 25 bp, Artificial
  probe
  misc_feature (1)..(25): SEQ ID NO: 794; WAN024DH4_at; Start 508; Stop 532
tctcagattatcgatgccgtctgga

SEQ ID NO: 157628 - DNA, 25 bp, Artificial
  probe
  misc_feature (1)..(25): SEQ ID NO: 794; WAN024DH4_at; Start 141; Stop 165
ggttttactggatatccagatgccc

SEQ ID NO: 157629 - DNA, 25 bp, Artificial
  probe
  misc_feature (1)..(25): SEQ ID NO: 794; WAN024DH4_at; Start 244; Stop 268
gatgaggaatacaagatgagtgcct

SEQ ID NO: 157630 - DNA, 25 bp, Artificial
  probe
  misc_feature (1)..(25): SEQ ID NO: 794; WAN024DH4_at; Start 73; Stop 97
tatgaaactattgaggcagcggacg

SEQ ID NO: 157631 - DNA, 25 bp, Artificial
  probe
  misc_feature (1)..(25): SEQ ID NO: 794; WAN024DH4_at; Start 474; Stop 498
tctagtgaaaaatgaaggccgggcc

SEQ ID NO: 157632 - DNA, 25 bp, Artificial
  probe
  misc_feature (1)..(25): SEQ ID NO: 794; WAN024DH4_at; Start 433; Stop 457
gaagtgcctatcaatgccaaagagt

SEQ ID NO: 157633 - DNA, 25 bp, Artificial
  probe
  misc_feature (1)..(25): SEQ ID NO: 4213; WAN024DH5_at; Start 39; Stop 63
tataatagaaaatagagtaggtatt

SEQ ID NO: 157634 - DNA, 25 bp, Artificial
  probe
  misc_feature (1)..(25): SEQ ID NO: 4213; WAN024DH5_at; Start 45; Stop 69
agaaaatagagtaggtatttattct

SEQ ID NO: 157635 - DNA, 25 bp, Artificial
  probe
  misc_feature (1)..(25): SEQ ID NO: 4213; WAN024DH5_at; Start 49; Stop 73
aatagagtaggtatttattctaaga

SEQ ID NO: 157636 - DNA, 25 bp, Artificial
  probe
  misc_feature (1)..(25): SEQ ID NO: 4213; WAN024DH5_at; Start 44; Stop 68
tagaaaatagagtaggtatttattc

SEQ ID NO: 157637 - DNA, 25 bp, Artificial
  probe
  misc_feature (1)..(25): SEQ ID NO: 4213; WAN024DH5_at; Start 48; Stop 72
aaatagagtaggtatttattctaag

SEQ ID NO: 157638 - DNA, 25 bp, Artificial
  probe
  misc_feature (1)..(25): SEQ ID NO: 4213; WAN024DH5_at; Start 51; Stop 75
tagagtaggtatttattctaagaaa

SEQ ID NO: 157639 - DNA, 25 bp, Artificial
  probe
  misc_feature (1)..(25): SEQ ID NO: 4213; WAN024DH5_at; Start 42; Stop 66
aatagaaaatagagtaggtatttat

SEQ ID NO: 157640 - DNA, 25 bp, Artificial
  probe
  misc_feature (1)..(25): SEQ ID NO: 4213; WAN024DH5_at; Start 41; Stop 65
taatagaaaatagagtaggtattta

SEQ ID NO: 157641 - DNA, 25 bp, Artificial
  probe
  misc_feature (1)..(25): SEQ ID NO: 4213; WAN024DH5_at; Start 46; Stop 70
gaaaatagagtaggtatttattcta

SEQ ID NO: 157642 - DNA, 25 bp, Artificial
  probe
  misc_feature (1)..(25): SEQ ID NO: 4213; WAN024DH5_at; Start 40; Stop 64
ataatagaaaatagagtaggtattt

SEQ ID NO: 157643 - DNA, 25 bp, Artificial
  probe
  misc_feature (1)..(25): SEQ ID NO: 4213; WAN024DH5_at; Start 50; Stop 74
atagagtaggtatttattctaagaa

SEQ ID NO: 157644 - DNA, 25 bp, Artificial
  probe
  misc_feature (1)..(25): SEQ ID NO: 1506; WAN024DH6_at; Start 10; Stop 34
gaatttcacaacgttttatctagtg

SEQ ID NO: 157645 - DNA, 25 bp, Artificial
  probe
  misc_feature (1)..(25): SEQ ID NO: 1506; WAN024DH6_at; Start 1; Stop 25
atgagaaaggaatttcacaacgttt

SEQ ID NO: 157646 - DNA, 25 bp, Artificial
  probe
  misc_feature (1)..(25): SEQ ID NO: 1506; WAN024DH6_at; Start 8; Stop 32
aggaatttcacaacgttttatctag

SEQ ID NO: 157647 - DNA, 25 bp, Artificial
  probe
  misc_feature (1)..(25): SEQ ID NO: 1772; WAN024DH7_at; Start 1171; Stop 1195
caatgtgacttcaggtgttgccaaa

SEQ ID NO: 157648 - DNA, 25 bp, Artificial
  probe
  misc_feature (1)..(25): SEQ ID NO: 1772; WAN024DH7_at; Start 1208; Stop 1232
gcggctcaagcctctaaccttggtg

SEQ ID NO: 157649 - DNA, 25 bp, Artificial
  probe
  misc_feature (1)..(25): SEQ ID NO: 1772; WAN024DH7_at; Start 1124; Stop 1148
ttcctagctaattacactgcccgtg

SEQ ID NO: 157650 - DNA, 25 bp, Artificial
  probe
  misc_feature (1)..(25): SEQ ID NO: 1772; WAN024DH7_at; Start 1332; Stop 1356
tagtggttctcgttatggcgcttgc

SEQ ID NO: 157651 - DNA, 25 bp, Artificial
  probe
  misc_feature (1)..(25): SEQ ID NO: 1772; WAN024DH7_at; Start 595; Stop 619
cgatgcagataatgaaaaaggagcc

SEQ ID NO: 157652 - DNA, 25 bp, Artificial
  probe
  misc_feature (1)..(25): SEQ ID NO: 1772; WAN024DH7_at; Start 986; Stop 1010
ttgctcagcctttggatcaacgccc

SEQ ID NO: 157653 - DNA, 25 bp, Artificial
  probe
  misc_feature (1)..(25): SEQ ID NO: 1772; WAN024DH7_at; Start 576; Stop 600
aactggactctaatatctacgatgc

SEQ ID NO: 157654 - DNA, 25 bp, Artificial
  probe
  misc_feature (1)..(25): SEQ ID NO: 1772; WAN024DH7_at; Start 919; Stop 943
tatgtacaagatggccaacctcctc

SEQ ID NO: 157655 - DNA, 25 bp, Artificial
  probe
  misc_feature (1)..(25): SEQ ID NO: 1772; WAN024DH7_at; Start 1048; Stop 1072
caagcaggcaagtatcttgggtcaa

SEQ ID NO: 157656 - DNA, 25 bp, Artificial
  probe
  misc_feature (1)..(25): SEQ ID NO: 1772; WAN024DH7_at; Start 1255; Stop 1279
tagcaagaccttgtcgagcctagac

SEQ ID NO: 157657 - DNA, 25 bp, Artificial
  probe
  misc_feature (1)..(25): SEQ ID NO: 1772; WAN024DH7_at; Start 1154; Stop 1178
ggaaacactgtccttgccaatgtga

SEQ ID NO: 157658 - DNA, 25 bp, Artificial
  probe
  misc_feature (1)..(25): SEQ ID NO: 1772; WAN024DH7_at; Start 148; Stop 172
tactgccaaggcttctcaggagacc

SEQ ID NO: 157659 - DNA, 25 bp, Artificial
  probe
  misc_feature (1)..(25): SEQ ID NO: 1772; WAN024DH7_at; Start 118; Stop 142
gagtttggtcggcttgtcaatcaag

SEQ ID NO: 157660 - DNA, 25 bp, Artificial
  probe
  misc_feature (1)..(25): SEQ ID NO: 1772; WAN024DH7_at; Start 1001; Stop 1025
atcaacgcccgtcgcaaggaagtgg

SEQ ID NO: 157661 - DNA, 25 bp, Artificial
  probe
  misc_feature (1)..(25): SEQ ID NO: 1772; WAN024DH7_at; Start 192; Stop 216
gcttctccatgcaaatcaatcgtcg

SEQ ID NO: 157662 - DNA, 25 bp, Artificial
  probe
  misc_feature (1)..(25): SEQ ID NO: 1772; WAN024DH7_at; Start 134; Stop 158
tcaatcaagggagctactgccaagg

SEQ ID NO: 157663 - DNA, 25 bp, Artificial
  probe
  misc_feature (1)..(25): SEQ ID NO: 1772; WAN024DH7_at; Start 94; Stop 118
gattattctcctcatggcgagcttg

SEQ ID NO: 157664 - DNA, 25 bp, Artificial
  probe
  misc_feature (1)..(25): SEQ ID NO: 1772; WAN024DH7_at; Start 838; Stop 862
catcagtggtatcaactggaagagc

SEQ ID NO: 157665 - DNA, 25 bp, Artificial
  probe
  misc_feature (1)..(25): SEQ ID NO: 1772; WAN024DH7_at; Start 208; Stop 232
caatcgtcgcgtcaaccaaggaacg

SEQ ID NO: 157666 - DNA, 25 bp, Artificial
  probe
  misc_feature (1)..(25): SEQ ID NO: 1772; WAN024DH7_at; Start 1192; Stop 1216
caaacaggctagtaaggcggctcaa

SEQ ID NO: 157667 - DNA, 25 bp, Artificial
  probe
  misc_feature (1)..(25): SEQ ID NO: 1772; WAN024DH7_at; Start 742; Stop 766
ttatggatacacagaagacacagcc

SEQ ID NO: 157668 - DNA, 25 bp, Artificial
  probe
  misc_feature (1)..(25): SEQ ID NO: 1772; WAN024DH7_at; Start 352; Stop 376
tgaaacgccagaaaccaagaagaat

SEQ ID NO: 157669 - DNA, 25 bp, Artificial
  probe
  misc_feature (1)..(25): SEQ ID NO: 1772; WAN024DH7_at; Start 20; Stop 44
gaaagggaatctatgttacacaacg

SEQ ID NO: 157670 - DNA, 25 bp, Artificial
  probe
  misc_feature (1)..(25): SEQ ID NO: 1772; WAN024DH7_at; Start 307; Stop 331
caaacgtatcaacgctatcggagat

SEQ ID NO: 157671 - DNA, 25 bp, Artificial
  probe
  misc_feature (1)..(25): SEQ ID NO: 1772; WAN024DH7_at; Start 425; Stop 449
ggtgtcaatgactcctctaaagaag

SEQ ID NO: 157672 - DNA, 25 bp, Artificial
  probe
  misc_feature (1)..(25): SEQ ID NO: 1772; WAN024DH7_at; Start 1139; Stop 1163
actgcccgtgcaattggaaacactg

SEQ ID NO: 157673 - DNA, 25 bp, Artificial
  probe
  misc_feature (1)..(25): SEQ ID NO: 1772; WAN024DH7_at; Start 533; Stop 557
gacttggcagccaaacacggctgga

SEQ ID NO: 157674 - DNA, 25 bp, Artificial
  probe
  misc_feature (1)..(25): SEQ ID NO: 1772; WAN024DH7_at; Start 370; Stop 394
gaagaatctcactgctgatcgtgcc

SEQ ID NO: 157675 - DNA, 25 bp, Artificial
  probe
  misc_feature (1)..(25): SEQ ID NO: 1772; WAN024DH7_at; Start 1241; Stop 1265
gaagtagatggctttagcaagacct

SEQ ID NO: 157676 - DNA, 25 bp, Artificial
  probe
  misc_feature (1)..(25): SEQ ID NO: 1772; WAN024DH7_at; Start 855; Stop 879
ggaagagctacacactcgtcaagag

SEQ ID NO: 157677 - DNA, 25 bp, Artificial
  probe
  misc_feature (1)..(25): SEQ ID NO: 1772; WAN024DH7_at; Start 485; Stop 509
ggagagcacttaaccaacgacgaca

SEQ ID NO: 157678 - DNA, 25 bp, Artificial
  probe
  misc_feature (1)..(25): SEQ ID NO: 1772; WAN024DH7_at; Start 324; Stop 348
tcggagatttgactggatatgacct

SEQ ID NO: 157679 - DNA, 25 bp, Artificial
  probe
  misc_feature (1)..(25): SEQ ID NO: 1772; WAN024DH7_at; Start 632; Stop 656
gaagtgacaatcaagggactctttg

SEQ ID NO: 157680 - DNA, 25 bp, Artificial
  probe
  misc_feature (1)..(25): SEQ ID NO: 1772; WAN024DH7_at; Start 1023; Stop 1047
tgggaattctcctctctatcggcct

SEQ ID NO: 157681 - DNA, 25 bp, Artificial
  probe
  misc_feature (1)..(25): SEQ ID NO: 1487; WAN024DH8_at; Start 403; Stop 427
cagcaacgtgttgccattgctcgca

SEQ ID NO: 157682 - DNA, 25 bp, Artificial
  probe
  misc_feature (1)..(25): SEQ ID NO: 1487; WAN024DH8_at; Start 431; Stop 455
tggtctcagaagctccagttattct

SEQ ID NO: 157683 - DNA, 25 bp, Artificial
  probe
  misc_feature (1)..(25): SEQ ID NO: 1487; WAN024DH8_at; Start 625; Stop 649
gaaacgcgcaatactagtaaataac

SEQ ID NO: 157684 - DNA, 25 bp, Artificial
  probe
  misc_feature (1)..(25): SEQ ID NO: 1487; WAN024DH8_at; Start 280; Stop 304
tatctttctccgctggaaaatatcc

SEQ ID NO: 157685 - DNA, 25 bp, Artificial
  probe
  misc_feature (1)..(25): SEQ ID NO: 1487; WAN024DH8_at; Start 9; Stop 33
attacaattacaagatgttacctac

SEQ ID NO: 157686 - DNA, 25 bp, Artificial
  probe
  misc_feature (1)..(25): SEQ ID NO: 1487; WAN024DH8_at; Start 159; Stop 183
tctagatagtcctgttgaaggttct

SEQ ID NO: 157687 - DNA, 25 bp, Artificial
  probe
  misc_feature (1)..(25): SEQ ID NO: 1487; WAN024DH8_at; Start 445; Stop 469
ccagttattctagctgatgagccaa

SEQ ID NO: 157688 - DNA, 25 bp, Artificial
  probe
  misc_feature (1)..(25): SEQ ID NO: 1487; WAN024DH8_at; Start 520; Stop 544
tcacttgcccagaaaacaggtaaat

SEQ ID NO: 157689 - DNA, 25 bp, Artificial
  probe
  misc_feature (1)..(25): SEQ ID NO: 1487; WAN024DH8_at; Start 136; Stop 160
acactcttgtccctacttgctggtc

SEQ ID NO: 157690 - DNA, 25 bp, Artificial
  probe
  misc_feature (1)..(25): SEQ ID NO: 1487; WAN024DH8_at; Start 504; Stop 528
tgtcgaactactcaaatcacttgcc

SEQ ID NO: 157691 - DNA, 25 bp, Artificial
  probe
  misc_feature (1)..(25): SEQ ID NO: 1487; WAN024DH8_at; Start 473; Stop 497
gaaatctggatcctaaaactgctgg

SEQ ID NO: 157692 - DNA, 25 bp, Artificial
  probe
  misc_feature (1)..(25): SEQ ID NO: 1487; WAN024DH8_at; Start 536; Stop 560
caggtaaatgtgtgattgtcgtaac

SEQ ID NO: 157693 - DNA, 25 bp, Artificial
  probe
  misc_feature (1)..(25): SEQ ID NO: 1487; WAN024DH8_at; Start 488; Stop 512
aaactgctggagatattgtcgaact

SEQ ID NO: 157694 - DNA, 25 bp, Artificial
  probe
  misc_feature (1)..(25): SEQ ID NO: 1487; WAN024DH8_at; Start 615; Stop 639
gaaactgactgaaacgcgcaatact

SEQ ID NO: 157695 - DNA, 25 bp, Artificial
  probe
  misc_feature (1)..(25): SEQ ID NO: 1487; WAN024DH8_at; Start 26; Stop 50
ttacctaccgttataagaatactgc

SEQ ID NO: 157696 - DNA, 25 bp, Artificial
  probe
  misc_feature (1)..(25): SEQ ID NO: 1487; WAN024DH8_at; Start 564; Stop 588
cagtaaagaagtggcacaagcgtca

SEQ ID NO: 157697 - DNA, 25 bp, Artificial
  probe
  misc_feature (1)..(25): SEQ ID NO: 1487; WAN024DH8_at; Start 575; Stop 599
tggcacaagcgtcagatattacact

SEQ ID NO: 157698 - DNA, 25 bp, Artificial
  probe
  misc_feature (1)..(25): SEQ ID NO: 1487; WAN024DH8_at; Start 249; Stop 273
cctggtctttcaaaattataacttg

SEQ ID NO: 157699 - DNA, 25 bp, Artificial
  probe
  misc_feature (1)..(25): SEQ ID NO: 1487; WAN024DH8_at; Start 197; Stop 221
gagaggatattcgtaagaagggcta

SEQ ID NO: 157700 - DNA, 25 bp, Artificial
  probe
  misc_feature (1)..(25): SEQ ID NO: 1487; WAN024DH8_at; Start 149; Stop 173
tacttgctggtctagatagtcctgt

SEQ ID NO: 157701 - DNA, 25 bp, Artificial
  probe
  misc_feature (1)..(25): SEQ ID NO: 1487; WAN024DH8_at; Start 335; Stop 359
cacttcttgagcttggtttggatga

SEQ ID NO: 157702 - DNA, 25 bp, Artificial
  probe
  misc_feature (1)..(25): SEQ ID NO: 1487; WAN024DH8_at; Start 364; Stop 388
cagatcaagcggaatgttctccagt

SEQ ID NO: 157703 - DNA, 25 bp, Artificial
  probe
  misc_feature (1)..(25): SEQ ID NO: 1487; WAN024DH8_at; Start 33; Stop 57
ccgttataagaatactgctgaagca

SEQ ID NO: 157704 - DNA, 25 bp, Artificial
  probe
  misc_feature (1)..(25): SEQ ID NO: 1487; WAN024DH8_at; Start 381; Stop 405
tctccagttatcaggtggtcaacag

SEQ ID NO: 157705 - DNA, 25 bp, Artificial
  probe
  misc_feature (1)..(25): SEQ ID NO: 1487; WAN024DH8_at; Start 229; Stop 253
catcgcatgcaccatatttccctgg

SEQ ID NO: 157706 - DNA, 25 bp, Artificial
  probe
  misc_feature (1)..(25): SEQ ID NO: 1487; WAN024DH8_at; Start 417; Stop 441
cattgctcgcagtttggtctcagaa

SEQ ID NO: 157707 - DNA, 25 bp, Artificial
  probe
  misc_feature (1)..(25): SEQ ID NO: 1487; WAN024DH8_at; Start 48; Stop 72
tgctgaagcagtcctatatcagatc

SEQ ID NO: 157708 - DNA, 25 bp, Artificial
  probe
  misc_feature (1)..(25): SEQ ID NO: 1487; WAN024DH8_at; Start 123; Stop 147
agcaggaaaatccacactcttgtcc

SEQ ID NO: 157709 - DNA, 25 bp, Artificial
  probe
  misc_feature (1)..(25): SEQ ID NO: 1487; WAN024DH8_at; Start 273; Stop 297
gatagattatctttctccgctggaa

SEQ ID NO: 157710 - DNA, 25 bp, Artificial
  probe
  misc_feature (1)..(25): SEQ ID NO: 1487; WAN024DH8_at; Start 174; Stop 198
tgaaggttctatcctttttcaagga

SEQ ID NO: 157711 - DNA, 25 bp, Artificial
  probe
  misc_feature (1)..(25): SEQ ID NO: 1487; WAN024DH8_at; Start 186; Stop 210
cctttttcaaggagaggatattcgt

SEQ ID NO: 157712 - DNA, 25 bp, Artificial
  probe
  misc_feature (1)..(25): SEQ ID NO: 1487; WAN024DH8_at; Start 213; Stop 237
gaagggctattcttaccatcgcatg

SEQ ID NO: 157713 - DNA, 25 bp, Artificial
  probe
  misc_feature (1)..(25): SEQ ID NO: 1487; WAN024DH8_at; Start 549; Stop 573
gattgtcgtaactcacagtaaagaa

SEQ ID NO: 157714 - DNA, 25 bp, Artificial
  probe
  misc_feature (1)..(25): SEQ ID NO: 1487; WAN024DH8_at; Start 601; Stop 625
gaattaaaggataagaaactgactg

SEQ ID NO: 157715 - DNA, 25 bp, Artificial
  probe
  misc_feature (1)..(25): SEQ ID NO: 2841; WAN024DH9_at; Start 624; Stop 648
tgtcattgccattgaaaatggccgt

SEQ ID NO: 157716 - DNA, 25 bp, Artificial
  probe
  misc_feature (1)..(25): SEQ ID NO: 2841; WAN024DH9_at; Start 89; Stop 113
gggaatttgcttacatcgtaggacc

SEQ ID NO: 157717 - DNA, 25 bp, Artificial
  probe
  misc_feature (1)..(25): SEQ ID NO: 2841; WAN024DH9_at; Start 638; Stop 662
aaaatggccgtgtcgttcgtgacga

SEQ ID NO: 157718 - DNA, 25 bp, Artificial
  probe
  misc_feature (1)..(25): SEQ ID NO: 2841; WAN024DH9_at; Start 141; Stop 165
tcgttctctgtatcgtgaagtaaaa

SEQ ID NO: 157719 - DNA, 25 bp, Artificial
  probe
  misc_feature (1)..(25): SEQ ID NO: 2841; WAN024DH9_at; Start 524; Stop 548
catgggaaattatgaatctcttgga

SEQ ID NO: 157720 - DNA, 25 bp, Artificial
  probe
  misc_feature (1)..(25): SEQ ID NO: 2841; WAN024DH9_at; Start 107; Stop 131
taggaccttcaggagcagggaagtc

SEQ ID NO: 157721 - DNA, 25 bp, Artificial
  probe
  misc_feature (1)..(25): SEQ ID NO: 2841; WAN024DH9_at; Start 275; Stop 299
tgttaccaaagaaaactgtctatga

SEQ ID NO: 157722 - DNA, 25 bp, Artificial
  probe
  misc_feature (1)..(25): SEQ ID NO: 2841; WAN024DH9_at; Start 665; Stop 689
caaaaggagagtatggatacgatga

SEQ ID NO: 157723 - DNA, 25 bp, Artificial
  probe
  misc_feature (1)..(25): SEQ ID NO: 2841; WAN024DH9_at; Start 507; Stop 531
tctggatccggataattcatgggaa

SEQ ID NO: 157724 - DNA, 25 bp, Artificial
  probe
  misc_feature (1)..(25): SEQ ID NO: 2841; WAN024DH9_at; Start 223; Stop 247
gatgtcccgcttctacgtcgtagtg

SEQ ID NO: 157725 - DNA, 25 bp, Artificial
  probe
  misc_feature (1)..(25): SEQ ID NO: 2841; WAN024DH9_at; Start 185; Stop 209
cagttgctggttttaatctggttaa

SEQ ID NO: 157726 - DNA, 25 bp, Artificial
  probe
  misc_feature (1)..(25): SEQ ID NO: 2841; WAN024DH9_at; Start 371; Stop 395
tggacttggttggattgaagcataa

SEQ ID NO: 157727 - DNA, 25 bp, Artificial
  probe
  misc_feature (1)..(25): SEQ ID NO: 2841; WAN024DH9_at; Start 534; Stop 558
tatgaatctcttggaacggattaac

SEQ ID NO: 157728 - DNA, 25 bp, Artificial
  probe
  misc_feature (1)..(25): SEQ ID NO: 2841; WAN024DH9_at; Start 387; Stop 411
gaagcataaggttcgttctttccca

SEQ ID NO: 157729 - DNA, 25 bp, Artificial
  probe
  misc_feature (1)..(25): SEQ ID NO: 2841; WAN024DH9_at; Start 403; Stop 427
tctttcccaaatgaactctcaggtg

SEQ ID NO: 157730 - DNA, 25 bp, Artificial
  probe
  misc_feature (1)..(25): SEQ ID NO: 2841; WAN024DH9_at; Start 651; Stop 675
cgttcgtgacgaatcaaaaggagag

SEQ ID NO: 157731 - DNA, 25 bp, Artificial
  probe
  misc_feature (1)..(25): SEQ ID NO: 2841; WAN024DH9_at; Start 430; Stop 454
gagcaacagcggattgcgattgcgc

SEQ ID NO: 157732 - DNA, 25 bp, Artificial
  probe
  misc_feature (1)..(25): SEQ ID NO: 2841; WAN024DH9_at; Start 436; Stop 460
cagcggattgcgattgcgcgtgcaa

SEQ ID NO: 157733 - DNA, 25 bp, Artificial
  probe
  misc_feature (1)..(25): SEQ ID NO: 2841; WAN024DH9_at; Start 17; Stop 41
tgagagatgtcgttaaaaaatacga

SEQ ID NO: 157734 - DNA, 25 bp, Artificial
  probe
  misc_feature (1)..(25): SEQ ID NO: 2841; WAN024DH9_at; Start 153; Stop 177
tcgtgaagtaaaaatcgataaagga

SEQ ID NO: 157735 - DNA, 25 bp, Artificial
  probe
  misc_feature (1)..(25): SEQ ID NO: 2841; WAN024DH9_at; Start 615; Stop 639
gcgccaccgtgtcattgccattgaa

SEQ ID NO: 157736 - DNA, 25 bp, Artificial
  probe
  misc_feature (1)..(25): SEQ ID NO: 2841; WAN024DH9_at; Start 474; Stop 498
caaagtattgatagctgatgagcca

SEQ ID NO: 157737 - DNA, 25 bp, Artificial
  probe
  misc_feature (1)..(25): SEQ ID NO: 2841; WAN024DH9_at; Start 450; Stop 474
tgcgcgtgcaattgtaaataatccc

SEQ ID NO: 157738 - DNA, 25 bp, Artificial
  probe
  misc_feature (1)..(25): SEQ ID NO: 2841; WAN024DH9_at; Start 306; Stop 330
tgcttacgctatggaagtaatcggg

SEQ ID NO: 157739 - DNA, 25 bp, Artificial
  probe
  misc_feature (1)..(25): SEQ ID NO: 2841; WAN024DH9_at; Start 354; Stop 378
acgagtgatggaagttttggacttg

SEQ ID NO: 157740 - DNA, 25 bp, Artificial
  probe
  misc_feature (1)..(25): SEQ ID NO: 2841; WAN024DH9_at; Start 600; Stop 624
gattgtaaataccttgcgccaccgt

SEQ ID NO: 157741 - DNA, 25 bp, Artificial
  probe
  misc_feature (1)..(25): SEQ ID NO: 2841; WAN024DH9_at; Start 126; Stop 150
gaagtcaacttttattcgttctctg

SEQ ID NO: 157742 - DNA, 25 bp, Artificial
  probe
  misc_feature (1)..(25): SEQ ID NO: 2841; WAN024DH9_at; Start 207; Stop 231
taagatcaaaaagaaagatgtcccg

SEQ ID NO: 157743 - DNA, 25 bp, Artificial
  probe
  misc_feature (1)..(25): SEQ ID NO: 2841; WAN024DH9_at; Start 115; Stop 139
tcaggagcagggaagtcaactttta

SEQ ID NO: 157744 - DNA, 25 bp, Artificial
  probe
  misc_feature (1)..(25): SEQ ID NO: 2841; WAN024DH9_at; Start 569; Stop 593
caactattttgatggcgactcataa

SEQ ID NO: 157745 - DNA, 25 bp, Artificial
  probe
  misc_feature (1)..(25): SEQ ID NO: 2841; WAN024DH9_at; Start 295; Stop 319
tatgaaaatattgcttacgctatgg

SEQ ID NO: 157746 - DNA, 25 bp, Artificial
  probe
  misc_feature (1)..(25): SEQ ID NO: 2841; WAN024DH9_at; Start 583; Stop 607
gcgactcataatagccagattgtaa

SEQ ID NO: 157747 - DNA, 25 bp, Artificial
  probe
  misc_feature (1)..(25): SEQ ID NO: 2841; WAN024DH9_at; Start 464; Stop 488
taaataatcccaaagtattgatagc

SEQ ID NO: 157748 - DNA, 25 bp, Artificial
  probe
  misc_feature (1)..(25): SEQ ID NO: 2841; WAN024DH9_at; Start 94; Stop 118
tttgcttacatcgtaggaccttcag

SEQ ID NO: 157749 - DNA, 25 bp, Artificial
  probe
  misc_feature (1)..(25): SEQ ID NO: 1587; WAN024DHA_at; Start 433; Stop 457
gaagcggttgagtatgactttggac

SEQ ID NO: 157750 - DNA, 25 bp, Artificial
  probe
  misc_feature (1)..(25): SEQ ID NO: 1587; WAN024DHA_at; Start 720; Stop 744
tgttctcactaaaacagcccagcaa

SEQ ID NO: 157751 - DNA, 25 bp, Artificial
  probe
  misc_feature (1)..(25): SEQ ID NO: 1587; WAN024DHA_at; Start 499; Stop 523
ggacatcaagccctatcagacttaa

SEQ ID NO: 157752 - DNA, 25 bp, Artificial
  probe
  misc_feature (1)..(25): SEQ ID NO: 1587; WAN024DHA_at; Start 700; Stop 724
tctctttgggaaaatagtgctgttc

SEQ ID NO: 157753 - DNA, 25 bp, Artificial
  probe
  misc_feature (1)..(25): SEQ ID NO: 1587; WAN024DHA_at; Start 783; Stop 807
taaatgggaagagttgacagggctt

SEQ ID NO: 157754 - DNA, 25 bp, Artificial
  probe
  misc_feature (1)..(25): SEQ ID NO: 1587; WAN024DHA_at; Start 455; Stop 479
gacttcgtctttctatcatgttggg

SEQ ID NO: 157755 - DNA, 25 bp, Artificial
  probe
  misc_feature (1)..(25): SEQ ID NO: 1587; WAN024DHA_at; Start 515; Stop 539
cagacttaatcaaagctgagcggga

SEQ ID NO: 157756 - DNA, 25 bp, Artificial
  probe
  misc_feature (1)..(25): SEQ ID NO: 1587; WAN024DHA_at; Start 186; Stop 210
gctaaacccttggtattcctatctg

SEQ ID NO: 157757 - DNA, 25 bp, Artificial
  probe
  misc_feature (1)..(25): SEQ ID NO: 1587; WAN024DHA_at; Start 171; Stop 195
ggagcaggctcgttcgctaaaccct

SEQ ID NO: 157758 - DNA, 25 bp, Artificial
  probe
  misc_feature (1)..(25): SEQ ID NO: 1587; WAN024DHA_at; Start 805; Stop 829
cttcagttgaaagagttgaccgacc

SEQ ID NO: 157759 - DNA, 25 bp, Artificial
  probe
  misc_feature (1)..(25): SEQ ID NO: 1587; WAN024DHA_at; Start 34; Stop 58
gaggctcggatttcagaccaaccag

SEQ ID NO: 157760 - DNA, 25 bp, Artificial
  probe
  misc_feature (1)..(25): SEQ ID NO: 1587; WAN024DHA_at; Start 470; Stop 494
tcatgttgggtcaggtttggtctca

SEQ ID NO: 157761 - DNA, 25 bp, Artificial
  probe
  misc_feature (1)..(25): SEQ ID NO: 1587; WAN024DHA_at; Start 529; Stop 553
gctgagcgggatttgttcaagacat

SEQ ID NO: 157762 - DNA, 25 bp, Artificial
  probe
  misc_feature (1)..(25): SEQ ID NO: 1587; WAN024DHA_at; Start 558; Stop 582
gcgtcagggtcaccaaggtgttcat

SEQ ID NO: 157763 - DNA, 25 bp, Artificial
  probe
  misc_feature (1)..(25): SEQ ID NO: 1587; WAN024DHA_at; Start 336; Stop 360
ttgtcagacagtgctacaggtcgga

SEQ ID NO: 157764 - DNA, 25 bp, Artificial
  probe
  misc_feature (1)..(25): SEQ ID NO: 1587; WAN024DHA_at; Start 600; Stop 624
tctttggagtatgggagaaagactc

SEQ ID NO: 157765 - DNA, 25 bp, Artificial
  probe
  misc_feature (1)..(25): SEQ ID NO: 1587; WAN024DHA_at; Start 52; Stop 76
caaccagtagagaaagagggctatc

SEQ ID NO: 157766 - DNA, 25 bp, Artificial
  probe
  misc_feature (1)..(25): SEQ ID NO: 1587; WAN024DHA_at; Start 17; Stop 41
tacaagactggtttcctgaggctcg

SEQ ID NO: 157767 - DNA, 25 bp, Artificial
  probe
  misc_feature (1)..(25): SEQ ID NO: 1587; WAN024DHA_at; Start 364; Stop 388
caggattatgttttcgtgcttcaac

SEQ ID NO: 157768 - DNA, 25 bp, Artificial
  probe
  misc_feature (1)..(25): SEQ ID NO: 1587; WAN024DHA_at; Start 753; Stop 777
gcaccgcaattctctccaatacaag

SEQ ID NO: 157769 - DNA, 25 bp, Artificial
  probe
  misc_feature (1)..(25): SEQ ID NO: 1587; WAN024DHA_at; Start 128; Stop 152
tcagcgagcgtgaaaagcagttggt

SEQ ID NO: 157770 - DNA, 25 bp, Artificial
  probe
  misc_feature (1)..(25): SEQ ID NO: 1587; WAN024DHA_at; Start 822; Stop 846
gaccgacctgaccttgtgttatcaa

SEQ ID NO: 157771 - DNA, 25 bp, Artificial
  probe
  misc_feature (1)..(25): SEQ ID NO: 1587; WAN024DHA_at; Start 301; Stop 325
tcttggctagatatgatgcggactc

SEQ ID NO: 157772 - DNA, 25 bp, Artificial
  probe
  misc_feature (1)..(25): SEQ ID NO: 1587; WAN024DHA_at; Start 646; Stop 670
gaatgtctacaccagatgattttgg

SEQ ID NO: 157773 - DNA, 25 bp, Artificial
  probe
  misc_feature (1)..(25): SEQ ID NO: 1587; WAN024DHA_at; Start 157; Stop 181
cttttgacccagcaggagcaggctc

SEQ ID NO: 157774 - DNA, 25 bp, Artificial
  probe
  misc_feature (1)..(25): SEQ ID NO: 1587; WAN024DHA_at; Start 321; Stop 345
gactctttttccgaattgtcagaca

SEQ ID NO: 157775 - DNA, 25 bp, Artificial
  probe
  misc_feature (1)..(25): SEQ ID NO: 1587; WAN024DHA_at; Start 544; Stop 568
ttcaagacatggtggcgtcagggtc

SEQ ID NO: 157776 - DNA, 25 bp, Artificial
  probe
  misc_feature (1)..(25): SEQ ID NO: 1587; WAN024DHA_at; Start 380; Stop 404
tgcttcaacaagacaaatacacttc

SEQ ID NO: 157777 - DNA, 25 bp, Artificial
  probe
  misc_feature (1)..(25): SEQ ID NO: 1587; WAN024DHA_at; Start 669; Stop 693
ggatcaagatcagattcaggaaatc

SEQ ID NO: 157778 - DNA, 25 bp, Artificial
  probe
  misc_feature (1)..(25): SEQ ID NO: 1587; WAN024DHA_at; Start 616; Stop 640
gaaagactcgtggacttgaagccaa

SEQ ID NO: 157779 - DNA, 25 bp, Artificial
  probe
  misc_feature (1)..(25): SEQ ID NO: 1587; WAN024DHA_at; Start 145; Stop 169
cagttggttgcccttttgacccagc

SEQ ID NO: 157780 - DNA, 25 bp, Artificial
  probe
  misc_feature (1)..(25): SEQ ID NO: 1587; WAN024DHA_at; Start 219; Stop 243
caagggacaggcaccgcaagttttt

SEQ ID NO: 157781 - DNA, 25 bp, Artificial
  probe
  misc_feature (1)..(25): SEQ ID NO: 1587; WAN024DHA_at; Start 685; Stop 709
caggaaatcattctctctctttggg

SEQ ID NO: 157782 - DNA, 25 bp, Artificial
  probe
  misc_feature (1)..(25): SEQ ID NO: 1587; WAN024DHA_at; Start 88; Stop 112
ttagcttctcagcagtggattttgc

SEQ ID NO: 157783 - DNA, 25 bp, Artificial
  probe
  misc_feature (1)..(25): SEQ ID NO: 4027; WAN024DHB_at; Start 265; Stop 289
gatgtcgtgacttatcgtatgtcca

SEQ ID NO: 157784 - DNA, 25 bp, Artificial
  probe
  misc_feature (1)..(25): SEQ ID NO: 4027; WAN024DHB_at; Start 244; Stop 268
cacacaaaggctaaaaatgcagatg

SEQ ID NO: 157785 - DNA, 25 bp, Artificial
  probe
  misc_feature (1)..(25): SEQ ID NO: 4027; WAN024DHB_at; Start 19; Stop 43
attaacgggattgcgctagcctttg

SEQ ID NO: 157786 - DNA, 25 bp, Artificial
  probe
  misc_feature (1)..(25): SEQ ID NO: 4027; WAN024DHB_at; Start 362; Stop 386
ggtgcatccaaaaagtggagggcta

SEQ ID NO: 157787 - DNA, 25 bp, Artificial
  probe
  misc_feature (1)..(25): SEQ ID NO: 4027; WAN024DHB_at; Start 23; Stop 47
acgggattgcgctagcctttgaggg

SEQ ID NO: 157788 - DNA, 25 bp, Artificial
  probe
  misc_feature (1)..(25): SEQ ID NO: 4027; WAN024DHB_at; Start 358; Stop 382
tcatggtgcatccaaaaagtggagg

SEQ ID NO: 157789 - DNA, 25 bp, Artificial
  probe
  misc_feature (1)..(25): SEQ ID NO: 4027; WAN024DHB_at; Start 218; Stop 242
acaaacgtggccgcaataccaatag

SEQ ID NO: 157790 - DNA, 25 bp, Artificial
  probe
  misc_feature (1)..(25): SEQ ID NO: 4027; WAN024DHB_at; Start 165; Stop 189
gattgctctcatgttggaggagcag

SEQ ID NO: 157791 - DNA, 25 bp, Artificial
  probe
  misc_feature (1)..(25): SEQ ID NO: 4027; WAN024DHB_at; Start 306; Stop 330
tatgggctatctccatatgactgag

SEQ ID NO: 157792 - DNA, 25 bp, Artificial
  probe
  misc_feature (1)..(25): SEQ ID NO: 4027; WAN024DHB_at; Start 324; Stop 348
gactgagaatctggaacgtcttgag

SEQ ID NO: 157793 - DNA, 25 bp, Artificial
  probe
  misc_feature (1)..(25): SEQ ID NO: 4027; WAN024DHB_at; Start 252; Stop 276
ggctaaaaatgcagatgtcgtgact

SEQ ID NO: 157794 - DNA, 25 bp, Artificial
  probe
  misc_feature (1)..(25): SEQ ID NO: 4027; WAN024DHB_at; Start 211; Stop 235
gaaatctacaaacgtggccgcaata

SEQ ID NO: 157795 - DNA, 25 bp, Artificial
  probe
  misc_feature (1)..(25): SEQ ID NO: 4027; WAN024DHB_at; Start 205; Stop 229
gaagaagaaatctacaaacgtggcc

SEQ ID NO: 157796 - DNA, 25 bp, Artificial
  probe
  misc_feature (1)..(25): SEQ ID NO: 4027; WAN024DHB_at; Start 327; Stop 351
tgagaatctggaacgtcttgagagt

SEQ ID NO: 157797 - DNA, 25 bp, Artificial
  probe
  misc_feature (1)..(25): SEQ ID NO: 4027; WAN024DHB_at; Start 308; Stop 332
tgggctatctccatatgactgagaa

SEQ ID NO: 157798 - DNA, 25 bp, Artificial
  probe
  misc_feature (1)..(25): SEQ ID NO: 4027; WAN024DHB_at; Start 273; Stop 297
gacttatcgtatgtccacgggattt

SEQ ID NO: 157799 - DNA, 25 bp, Artificial
  probe
  misc_feature (1)..(25): SEQ ID NO: 4027; WAN024DHB_at; Start 270; Stop 294
cgtgacttatcgtatgtccacggga

SEQ ID NO: 157800 - DNA, 25 bp, Artificial
  probe
  misc_feature (1)..(25): SEQ ID NO: 4027; WAN024DHB_at; Start 330; Stop 354
gaatctggaacgtcttgagagtttg

SEQ ID NO: 157801 - DNA, 25 bp, Artificial
  probe
  misc_feature (1)..(25): SEQ ID NO: 4027; WAN024DHB_at; Start 313; Stop 337
tatctccatatgactgagaatctgg

SEQ ID NO: 157802 - DNA, 25 bp, Artificial
  probe
  misc_feature (1)..(25): SEQ ID NO: 4027; WAN024DHB_at; Start 354; Stop 378
ggtttcatggtgcatccaaaaagtg

SEQ ID NO: 157803 - DNA, 25 bp, Artificial
  probe
  misc_feature (1)..(25): SEQ ID NO: 4027; WAN024DHB_at; Start 208; Stop 232
gaagaaatctacaaacgtggccgca

SEQ ID NO: 157804 - DNA, 25 bp, Artificial
  probe
  misc_feature (1)..(25): SEQ ID NO: 4027; WAN024DHB_at; Start 277; Stop 301
tatcgtatgtccacgggatttgaag

SEQ ID NO: 157805 - DNA, 25 bp, Artificial
  probe
  misc_feature (1)..(25): SEQ ID NO: 4027; WAN024DHB_at; Start 214; Stop 238
atctacaaacgtggccgcaatacca

SEQ ID NO: 157806 - DNA, 25 bp, Artificial
  probe
  misc_feature (1)..(25): SEQ ID NO: 4027; WAN024DHB_at; Start 319; Stop 343
catatgactgagaatctggaacgtc

SEQ ID NO: 157807 - DNA, 25 bp, Artificial
  probe
  misc_feature (1)..(25): SEQ ID NO: 4027; WAN024DHB_at; Start 79; Stop 103
cacctcatcctcaaaggtatgacca

SEQ ID NO: 157808 - DNA, 25 bp, Artificial
  probe
  misc_feature (1)..(25): SEQ ID NO: 4027; WAN024DHB_at; Start 163; Stop 187
ctgattgctctcatgttggaggagc

SEQ ID NO: 157809 - DNA, 25 bp, Artificial
  probe
  misc_feature (1)..(25): SEQ ID NO: 4027; WAN024DHB_at; Start 346; Stop 370
gagagtttggtttcatggtgcatcc

SEQ ID NO: 157810 - DNA, 25 bp, Artificial
  probe
  misc_feature (1)..(25): SEQ ID NO: 4027; WAN024DHB_at; Start 17; Stop 41
tcattaacgggattgcgctagcctt

SEQ ID NO: 157811 - DNA, 25 bp, Artificial
  probe
  misc_feature (1)..(25): SEQ ID NO: 4027; WAN024DHB_at; Start 3; Stop 27
gattgatgtcaatctcattaacggg

SEQ ID NO: 157812 - DNA, 25 bp, Artificial
  probe
  misc_feature (1)..(25): SEQ ID NO: 4027; WAN024DHB_at; Start 52; Stop 76
gcggtgtattctatgtatattcgcc

SEQ ID NO: 157813 - DNA, 25 bp, Artificial
  probe
  misc_feature (1)..(25): SEQ ID NO: 4027; WAN024DHB_at; Start 336; Stop 360
ggaacgtcttgagagtttggtttca

SEQ ID NO: 157814 - DNA, 25 bp, Artificial
  probe
  misc_feature (1)..(25): SEQ ID NO: 4027; WAN024DHB_at; Start 248; Stop 272
caaaggctaaaaatgcagatgtcgt

SEQ ID NO: 157815 - DNA, 25 bp, Artificial
  probe
  misc_feature (1)..(25): SEQ ID NO: 4027; WAN024DHB_at; Start 15; Stop 39
tctcattaacgggattgcgctagcc

SEQ ID NO: 157816 - DNA, 25 bp, Artificial
  probe
  misc_feature (1)..(25): SEQ ID NO: 4027; WAN024DHB_at; Start 257; Stop 281
aaaatgcagatgtcgtgacttatcg

SEQ ID NO: 157817 - DNA, 25 bp, Artificial
  probe
  misc_feature (1)..(25): SEQ ID NO: 1814; WAN024DHC_at; Start 757; Stop 781
aaggaatttcagattgcagtggaag

SEQ ID NO: 157818 - DNA, 25 bp, Artificial
  probe
  misc_feature (1)..(25): SEQ ID NO: 1814; WAN024DHC_at; Start 523; Stop 547
gaacatgaatcgagagaagttgtgg

SEQ ID NO: 157819 - DNA, 25 bp, Artificial
  probe
  misc_feature (1)..(25): SEQ ID NO: 1814; WAN024DHC_at; Start 1; Stop 25
atgattcaagcaagaaacaagttaa

SEQ ID NO: 157820 - DNA, 25 bp, Artificial
  probe
  misc_feature (1)..(25): SEQ ID NO: 1814; WAN024DHC_at; Start 250; Stop 274
gggattgcgcgtgcattgtttacta

SEQ ID NO: 157821 - DNA, 25 bp, Artificial
  probe
  misc_feature (1)..(25): SEQ ID NO: 1814; WAN024DHC_at; Start 703; Stop 727
tatggaagctacttagcaaaatccc

SEQ ID NO: 157822 - DNA, 25 bp, Artificial
  probe
  misc_feature (1)..(25): SEQ ID NO: 1814; WAN024DHC_at; Start 263; Stop 287
cattgtttactagttttgagagaga

SEQ ID NO: 157823 - DNA, 25 bp, Artificial
  probe
  misc_feature (1)..(25): SEQ ID NO: 1814; WAN024DHC_at; Start 71; Stop 95
aaaactatgacggtacctatcgcga

SEQ ID NO: 157824 - DNA, 25 bp, Artificial
  probe
  misc_feature (1)..(25): SEQ ID NO: 1814; WAN024DHC_at; Start 377; Stop 401
taatcgaggatgaagagacagaaac

SEQ ID NO: 157825 - DNA, 25 bp, Artificial
  probe
  misc_feature (1)..(25): SEQ ID NO: 1814; WAN024DHC_at; Start 730; Stop 754
gtcaaccaactaattgagcaaaatg

SEQ ID NO: 157826 - DNA, 25 bp, Artificial
  probe
  misc_feature (1)..(25): SEQ ID NO: 1814; WAN024DHC_at; Start 538; Stop 562
gaagttgtggatagatatgtcgctg

SEQ ID NO: 157827 - DNA, 25 bp, Artificial
  probe
  misc_feature (1)..(25): SEQ ID NO: 1814; WAN024DHC_at; Start 79; Stop 103
gacggtacctatcgcgatccctatc

SEQ ID NO: 157828 - DNA, 25 bp, Artificial
  probe
  misc_feature (1)..(25): SEQ ID NO: 1814; WAN024DHC_at; Start 811; Stop 835
gaaaaaattggctttgtcaaacaga

SEQ ID NO: 157829 - DNA, 25 bp, Artificial
  probe
  misc_feature (1)..(25): SEQ ID NO: 1814; WAN024DHC_at; Start 791; Stop 815
taggtgccaaacgtttgtatgaaaa

SEQ ID NO: 157830 - DNA, 25 bp, Artificial
  probe
  misc_feature (1)..(25): SEQ ID NO: 1814; WAN024DHC_at; Start 341; Stop 365
tagagaatcatcctgactttgccag

SEQ ID NO: 157831 - DNA, 25 bp, Artificial
  probe
  misc_feature (1)..(25): SEQ ID NO: 1814; WAN024DHC_at; Start 198; Stop 222
tgaccaagatgtagaagtgacgata

SEQ ID NO: 157832 - DNA, 25 bp, Artificial
  probe
  misc_feature (1)..(25): SEQ ID NO: 1814; WAN024DHC_at; Start 546; Stop 570
ggatagatatgtcgctgaagctctg

SEQ ID NO: 157833 - DNA, 25 bp, Artificial
  probe
  misc_feature (1)..(25): SEQ ID NO: 1814; WAN024DHC_at; Start 273; Stop 297
tagttttgagagagaaacagcttct

SEQ ID NO: 157834 - DNA, 25 bp, Artificial
  probe
  misc_feature (1)..(25): SEQ ID NO: 1814; WAN024DHC_at; Start 190; Stop 214
tatgcagatgaccaagatgtagaag

SEQ ID NO: 157835 - DNA, 25 bp, Artificial
  probe
  misc_feature (1)..(25): SEQ ID NO: 1814; WAN024DHC_at; Start 838; Stop 862
caggtggtttatctgaatgagaaag

SEQ ID NO: 157836 - DNA, 25 bp, Artificial
  probe
  misc_feature (1)..(25): SEQ ID NO: 1814; WAN024DHC_at; Start 461; Stop 485
tgttagcagatagttcgtatcagga

SEQ ID NO: 157837 - DNA, 25 bp, Artificial
  probe
  misc_feature (1)..(25): SEQ ID NO: 1814; WAN024DHC_at; Start 349; Stop 373
catcctgactttgccagtaactggg

SEQ ID NO: 157838 - DNA, 25 bp, Artificial
  probe
  misc_feature (1)..(25): SEQ ID NO: 1814; WAN024DHC_at; Start 179; Stop 203
tattaactgtctatgcagatgacca

SEQ ID NO: 157839 - DNA, 25 bp, Artificial
  probe
  misc_feature (1)..(25): SEQ ID NO: 1814; WAN024DHC_at; Start 224; Stop 248
tggttcatccaggtcatcgccgtca

SEQ ID NO: 157840 - DNA, 25 bp, Artificial
  probe
  misc_feature (1)..(25): SEQ ID NO: 1814; WAN024DHC_at; Start 134; Stop 158
tgcccgcctttttcctttattatga

SEQ ID NO: 157841 - DNA, 25 bp, Artificial
  probe
  misc_feature (1)..(25): SEQ ID NO: 1814; WAN024DHC_at; Start 783; Stop 807
tagcaatgtaggtgccaaacgtttg

SEQ ID NO: 157842 - DNA, 25 bp, Artificial
  probe
  misc_feature (1)..(25): SEQ ID NO: 1814; WAN024DHC_at; Start 697; Stop 721
aaaggctatggaagctacttagcaa

SEQ ID NO: 157843 - DNA, 25 bp, Artificial
  probe
  misc_feature (1)..(25): SEQ ID NO: 1814; WAN024DHC_at; Start 860; Stop 884
aaggagcaagggattccgaagtgta

SEQ ID NO: 157844 - DNA, 25 bp, Artificial
  probe
  misc_feature (1)..(25): SEQ ID NO: 1814; WAN024DHC_at; Start 284; Stop 308
gagaaacagcttctttccccattcg

SEQ ID NO: 157845 - DNA, 25 bp, Artificial
  probe
  misc_feature (1)..(25): SEQ ID NO: 1814; WAN024DHC_at; Start 773; Stop 797
cagtggaagatagcaatgtaggtgc

SEQ ID NO: 157846 - DNA, 25 bp, Artificial
  probe
  misc_feature (1)..(25): SEQ ID NO: 1814; WAN024DHC_at; Start 60; Stop 84
taactgttgccaaaactatgacggt

SEQ ID NO: 157847 - DNA, 25 bp, Artificial
  probe
  misc_feature (1)..(25): SEQ ID NO: 1814; WAN024DHC_at; Start 310; Stop 334
tcagtcacttttcagacagaacgta

SEQ ID NO: 157848 - DNA, 25 bp, Artificial
  probe
  misc_feature (1)..(25): SEQ ID NO: 1814; WAN024DHC_at; Start 94; Stop 118
gatccctatctctctaacatgctta

SEQ ID NO: 157849 - DNA, 25 bp, Artificial
  probe
  misc_feature (1)..(25): SEQ ID NO: 1814; WAN024DHC_at; Start 36; Stop 60
gctatctgaggcgaaaaaagtaatt

SEQ ID NO: 157850 - DNA, 25 bp, Artificial
  probe
  misc_feature (1)..(25): SEQ ID NO: 1814; WAN024DHC_at; Start 849; Stop 873
tctgaatgagaaaggagcaagggat

SEQ ID NO: 157851 - DNA, 25 bp, Artificial
  probe
  misc_feature (1)..(25): SEQ ID NO: 5443; WAN024DHD_at; Start 23; Stop 47
tctttagcaaggaggaaatccttga

SEQ ID NO: 157852 - DNA, 25 bp, Artificial
  probe
  misc_feature (1)..(25): SEQ ID NO: 5443; WAN024DHD_at; Start 100; Stop 124
caaggaatcagtcagaaaaagctgg

SEQ ID NO: 157853 - DNA, 25 bp, Artificial
  probe
  misc_feature (1)..(25): SEQ ID NO: 5443; WAN024DHD_at; Start 19; Stop 43
gagctctttagcaaggaggaaatcc

SEQ ID NO: 157854 - DNA, 25 bp, Artificial
  probe
  misc_feature (1)..(25): SEQ ID NO: 5443; WAN024DHD_at; Start 81; Stop 105
gattgaggctaggtatgaacaagga

SEQ ID NO: 157855 - DNA, 25 bp, Artificial
  probe
  misc_feature (1)..(25): SEQ ID NO: 5443; WAN024DHD_at; Start 84; Stop 108
tgaggctaggtatgaacaaggaatc

SEQ ID NO: 157856 - DNA, 25 bp, Artificial
  probe
  misc_feature (1)..(25): SEQ ID NO: 5443; WAN024DHD_at; Start 30; Stop 54
caaggaggaaatccttgaaagtgat

SEQ ID NO: 157857 - DNA, 25 bp, Artificial
  probe
  misc_feature (1)..(25): SEQ ID NO: 5443; WAN024DHD_at; Start 68; Stop 92
tcatgagcgagttgattgaggctag

SEQ ID NO: 157858 - DNA, 25 bp, Artificial
  probe
  misc_feature (1)..(25): SEQ ID NO: 5443; WAN024DHD_at; Start 37; Stop 61
gaaatccttgaaagtgatatgcgag

SEQ ID NO: 157859 - DNA, 25 bp, Artificial
  probe
  misc_feature (1)..(25): SEQ ID NO: 5443; WAN024DHD_at; Start 6; Stop 30
aggatgtccatctgagctctttagc

SEQ ID NO: 157860 - DNA, 25 bp, Artificial
  probe
  misc_feature (1)..(25): SEQ ID NO: 5443; WAN024DHD_at; Start 3; Stop 27
ggaaggatgtccatctgagctcttt

SEQ ID NO: 157861 - DNA, 25 bp, Artificial
  probe
  misc_feature (1)..(25): SEQ ID NO: 5443; WAN024DHD_at; Start 10; Stop 34
tgtccatctgagctctttagcaagg

SEQ ID NO: 157862 - DNA, 25 bp, Artificial
  probe
  misc_feature (1)..(25): SEQ ID NO: 5443; WAN024DHD_at; Start 14; Stop 38
catctgagctctttagcaaggagga

SEQ ID NO: 157863 - DNA, 25 bp, Artificial
  probe
  misc_feature (1)..(25): SEQ ID NO: 5443; WAN024DHD_at; Start 108; Stop 132
cagtcagaaaaagctggaagaagtc

SEQ ID NO: 157864 - DNA, 25 bp, Artificial
  probe
  misc_feature (1)..(25): SEQ ID NO: 5443; WAN024DHD_at; Start 90; Stop 114
taggtatgaacaaggaatcagtcag

SEQ ID NO: 157865 - DNA, 25 bp, Artificial
  probe
  misc_feature (1)..(25): SEQ ID NO: 5443; WAN024DHD_at; Start 1; Stop 25
ttggaaggatgtccatctgagctct

SEQ ID NO: 157866 - DNA, 25 bp, Artificial
  probe
  misc_feature (1)..(25): SEQ ID NO: 5443; WAN024DHD_at; Start 92; Stop 116
ggtatgaacaaggaatcagtcagaa

SEQ ID NO: 157867 - DNA, 25 bp, Artificial
  probe
  misc_feature (1)..(25): SEQ ID NO: 5443; WAN024DHD_at; Start 43; Stop 67
cttgaaagtgatatgcgagtggcta

SEQ ID NO: 157868 - DNA, 25 bp, Artificial
  probe
  misc_feature (1)..(25): SEQ ID NO: 5443; WAN024DHD_at; Start 27; Stop 51
tagcaaggaggaaatccttgaaagt

SEQ ID NO: 157869 - DNA, 25 bp, Artificial
  probe
  misc_feature (1)..(25): SEQ ID NO: 5443; WAN024DHD_at; Start 8; Stop 32
gatgtccatctgagctctttagcaa

SEQ ID NO: 157870 - DNA, 25 bp, Artificial
  probe
  misc_feature (1)..(25): SEQ ID NO: 5443; WAN024DHD_at; Start 97; Stop 121
gaacaaggaatcagtcagaaaaagc

SEQ ID NO: 157871 - DNA, 25 bp, Artificial
  probe
  misc_feature (1)..(25): SEQ ID NO: 5443; WAN024DHD_at; Start 88; Stop 112
gctaggtatgaacaaggaatcagtc

SEQ ID NO: 157872 - DNA, 25 bp, Artificial
  probe
  misc_feature (1)..(25): SEQ ID NO: 5443; WAN024DHD_at; Start 56; Stop 80
tgcgagtggctatcatgagcgagtt

SEQ ID NO: 157873 - DNA, 25 bp, Artificial
  probe
  misc_feature (1)..(25): SEQ ID NO: 5443; WAN024DHD_at; Start 114; Stop 138
gaaaaagctggaagaagtcagtgga

SEQ ID NO: 157874 - DNA, 25 bp, Artificial
  probe
  misc_feature (1)..(25): SEQ ID NO: 5443; WAN024DHD_at; Start 12; Stop 36
tccatctgagctctttagcaaggag

SEQ ID NO: 157875 - DNA, 25 bp, Artificial
  probe
  misc_feature (1)..(25): SEQ ID NO: 5443; WAN024DHD_at; Start 104; Stop 128
gaatcagtcagaaaaagctggaaga

SEQ ID NO: 157876 - DNA, 25 bp, Artificial
  probe
  misc_feature (1)..(25): SEQ ID NO: 5443; WAN024DHD_at; Start 16; Stop 40
tctgagctctttagcaaggaggaaa

SEQ ID NO: 157877 - DNA, 25 bp, Artificial
  probe
  misc_feature (1)..(25): SEQ ID NO: 5443; WAN024DHD_at; Start 41; Stop 65
tccttgaaagtgatatgcgagtggc

SEQ ID NO: 157878 - DNA, 25 bp, Artificial
  probe
  misc_feature (1)..(25): SEQ ID NO: 5443; WAN024DHD_at; Start 111; Stop 135
tcagaaaaagctggaagaagtcagt

SEQ ID NO: 157879 - DNA, 25 bp, Artificial
  probe
  misc_feature (1)..(25): SEQ ID NO: 5443; WAN024DHD_at; Start 66; Stop 90
tatcatgagcgagttgattgaggct

SEQ ID NO: 157880 - DNA, 25 bp, Artificial
  probe
  misc_feature (1)..(25): SEQ ID NO: 5443; WAN024DHD_at; Start 58; Stop 82
cgagtggctatcatgagcgagttga

SEQ ID NO: 157881 - DNA, 25 bp, Artificial
  probe
  misc_feature (1)..(25): SEQ ID NO: 5443; WAN024DHD_at; Start 59; Stop 83
gagtggctatcatgagcgagttgat

SEQ ID NO: 157882 - DNA, 25 bp, Artificial
  probe
  misc_feature (1)..(25): SEQ ID NO: 5443; WAN024DHD_at; Start 21; Stop 45
gctctttagcaaggaggaaatcctt

SEQ ID NO: 157883 - DNA, 25 bp, Artificial
  probe
  misc_feature (1)..(25): SEQ ID NO: 5443; WAN024DHD_at; Start 62; Stop 86
tggctatcatgagcgagttgattga

SEQ ID NO: 157884 - DNA, 25 bp, Artificial
  probe
  misc_feature (1)..(25): SEQ ID NO: 5443; WAN024DHD_at; Start 75; Stop 99
cgagttgattgaggctaggtatgaa

SEQ ID NO: 157885 - DNA, 25 bp, Artificial
  probe
  misc_feature (1)..(25): SEQ ID NO: 1802; WAN024DHE_at; Start 237; Stop 261
aactgagagagaattagaggacgct

SEQ ID NO: 157886 - DNA, 25 bp, Artificial
  probe
  misc_feature (1)..(25): SEQ ID NO: 1802; WAN024DHE_at; Start 318; Stop 342
gcaactgtttgaattcgcacttgaa

SEQ ID NO: 157887 - DNA, 25 bp, Artificial
  probe
  misc_feature (1)..(25): SEQ ID NO: 1802; WAN024DHE_at; Start 328; Stop 352
gaattcgcacttgaacttgctacaa

SEQ ID NO: 157888 - DNA, 25 bp, Artificial
  probe
  misc_feature (1)..(25): SEQ ID NO: 1802; WAN024DHE_at; Start 436; Stop 460
aaatttagccaacatcattttatgg

SEQ ID NO: 157889 - DNA, 25 bp, Artificial
  probe
  misc_feature (1)..(25): SEQ ID NO: 1802; WAN024DHE_at; Start 458; Stop 482
tggttggtcaaaaagtagatacgga

SEQ ID NO: 157890 - DNA, 25 bp, Artificial
  probe
  misc_feature (1)..(25): SEQ ID NO: 1802; WAN024DHE_at; Start 99; Stop 123
gttacaggaatactttgaagaggct

SEQ ID NO: 157891 - DNA, 25 bp, Artificial
  probe
  misc_feature (1)..(25): SEQ ID NO: 1802; WAN024DHE_at; Start 202; Stop 226
gctggttttctcaaagtcaactggg

SEQ ID NO: 157892 - DNA, 25 bp, Artificial
  probe
  misc_feature (1)..(25): SEQ ID NO: 1802; WAN024DHE_at; Start 187; Stop 211
catgaggaggagatagctggttttc

SEQ ID NO: 157893 - DNA, 25 bp, Artificial
  probe
  misc_feature (1)..(25): SEQ ID NO: 1802; WAN024DHE_at; Start 445; Stop 469
caacatcattttatggttggtcaaa

SEQ ID NO: 157894 - DNA, 25 bp, Artificial
  probe
  misc_feature (1)..(25): SEQ ID NO: 1802; WAN024DHE_at; Start 313; Stop 337
ggtaagcaactgtttgaattcgcac

SEQ ID NO: 157895 - DNA, 25 bp, Artificial
  probe
  misc_feature (1)..(25): SEQ ID NO: 1802; WAN024DHE_at; Start 422; Stop 446
gatatggttttgaaaaatttagcca

SEQ ID NO: 157896 - DNA, 25 bp, Artificial
  probe
  misc_feature (1)..(25): SEQ ID NO: 1802; WAN024DHE_at; Start 87; Stop 111
tacggaagagcagttacaggaatac

SEQ ID NO: 157897 - DNA, 25 bp, Artificial
  probe
  misc_feature (1)..(25): SEQ ID NO: 1802; WAN024DHE_at; Start 110; Stop 134
actttgaagaggcttatagtctgaa

SEQ ID NO: 157898 - DNA, 25 bp, Artificial
  probe
  misc_feature (1)..(25): SEQ ID NO: 1802; WAN024DHE_at; Start 198; Stop 222
gatagctggttttctcaaagtcaac

SEQ ID NO: 157899 - DNA, 25 bp, Artificial
  probe
  misc_feature (1)..(25): SEQ ID NO: 1802; WAN024DHE_at; Start 251; Stop 275
tagaggacgcttttgaaattcaacg

SEQ ID NO: 157900 - DNA, 25 bp, Artificial
  probe
  misc_feature (1)..(25): SEQ ID NO: 1802; WAN024DHE_at; Start 79; Stop 103
tatgataatacggaagagcagttac

SEQ ID NO: 157901 - DNA, 25 bp, Artificial
  probe
  misc_feature (1)..(25): SEQ ID NO: 1802; WAN024DHE_at; Start 332; Stop 356
tcgcacttgaacttgctacaaaaaa

SEQ ID NO: 157902 - DNA, 25 bp, Artificial
  probe
  misc_feature (1)..(25): SEQ ID NO: 1802; WAN024DHE_at; Start 278; Stop 302
tctatgtgctacaaaaattccaagg

SEQ ID NO: 157903 - DNA, 25 bp, Artificial
  probe
  misc_feature (1)..(25): SEQ ID NO: 1802; WAN024DHE_at; Start 179; Stop 203
tcattatgcatgaggaggagatagc

SEQ ID NO: 157904 - DNA, 25 bp, Artificial
  probe
  misc_feature (1)..(25): SEQ ID NO: 1802; WAN024DHE_at; Start 169; Stop 193
gaaacctatttcattatgcatgagg

SEQ ID NO: 157905 - DNA, 25 bp, Artificial
  probe
  misc_feature (1)..(25): SEQ ID NO: 1802; WAN024DHE_at; Start 386; Stop 410
gggagcataatacaaaagctcaagc

SEQ ID NO: 157906 - DNA, 25 bp, Artificial
  probe
  misc_feature (1)..(25): SEQ ID NO: 1802; WAN024DHE_at; Start 22; Stop 46
gcagatgttgaggtgttggctaaaa

SEQ ID NO: 157907 - DNA, 25 bp, Artificial
  probe
  misc_feature (1)..(25): SEQ ID NO: 1802; WAN024DHE_at; Start 153; Stop 177
gggaaatcctgactctgaaacctat

SEQ ID NO: 157908 - DNA, 25 bp, Artificial
  probe
  misc_feature (1)..(25): SEQ ID NO: 1802; WAN024DHE_at; Start 306; Stop 330
tggactaggtaagcaactgtttgaa

SEQ ID NO: 157909 - DNA, 25 bp, Artificial
  probe
  misc_feature (1)..(25): SEQ ID NO: 1802; WAN024DHE_at; Start 377; Stop 401
taggtgtttgggagcataatacaaa

SEQ ID NO: 157910 - DNA, 25 bp, Artificial
  probe
  misc_feature (1)..(25): SEQ ID NO: 1802; WAN024DHE_at; Start 132; Stop 156
gaaaactttgtcaactgagttggga

SEQ ID NO: 157911 - DNA, 25 bp, Artificial
  probe
  misc_feature (1)..(25): SEQ ID NO: 1802; WAN024DHE_at; Start 120; Stop 144
ggcttatagtctgaaaactttgtca

SEQ ID NO: 157912 - DNA, 25 bp, Artificial
  probe
  misc_feature (1)..(25): SEQ ID NO: 1802; WAN024DHE_at; Start 282; Stop 306
tgtgctacaaaaattccaaggattt

SEQ ID NO: 157913 - DNA, 25 bp, Artificial
  probe
  misc_feature (1)..(25): SEQ ID NO: 1802; WAN024DHE_at; Start 33; Stop 57
ggtgttggctaaaattgccaaacaa

SEQ ID NO: 157914 - DNA, 25 bp, Artificial
  probe
  misc_feature (1)..(25): SEQ ID NO: 1802; WAN024DHE_at; Start 143; Stop 167
caactgagttgggaaatcctgactc

SEQ ID NO: 157915 - DNA, 25 bp, Artificial
  probe
  misc_feature (1)..(25): SEQ ID NO: 1802; WAN024DHE_at; Start 225; Stop 249
gggaagtgctcaaactgagagagaa

SEQ ID NO: 157916 - DNA, 25 bp, Artificial
  probe
  misc_feature (1)..(25): SEQ ID NO: 1802; WAN024DHE_at; Start 479; Stop 503
cggattggttactgagaaagaaatt

SEQ ID NO: 157917 - DNA, 25 bp, Artificial
  probe
  misc_feature (1)..(25): SEQ ID NO: 1802; WAN024DHE_at; Start 473; Stop 497
tagatacggattggttactgagaaa

SEQ ID NO: 157918 - DNA, 25 bp, Artificial
  probe
  misc_feature (1)..(25): SEQ ID NO: 1802; WAN024DHE_at; Start 297; Stop 321
ccaaggatttggactaggtaagcaa

SEQ ID NO: 157919 - DNA, 25 bp, Artificial
  probe
  misc_feature (1)..(25): SEQ ID NO: 6808; WAN024DHF_at; Start 44; Stop 68
tagtccaattggatcaatttgccat

SEQ ID NO: 157920 - DNA, 25 bp, Artificial
  probe
  misc_feature (1)..(25): SEQ ID NO: 6808; WAN024DHF_at; Start 3; Stop 27
ggaatttgataacggtcataatatc

SEQ ID NO: 157921 - DNA, 25 bp, Artificial
  probe
  misc_feature (1)..(25): SEQ ID NO: 6808; WAN024DHF_at; Start 34; Stop 58
aaattatacgtagtccaattggatc

SEQ ID NO: 157922 - DNA, 25 bp, Artificial
  probe
  misc_feature (1)..(25): SEQ ID NO: 6808; WAN024DHF_at; Start 78; Stop 102
gaagactctaaataaggatttacta

SEQ ID NO: 157923 - DNA, 25 bp, Artificial
  probe
  misc_feature (1)..(25): SEQ ID NO: 6808; WAN024DHF_at; Start 46; Stop 70
gtccaattggatcaatttgccatcc

SEQ ID NO: 157924 - DNA, 25 bp, Artificial
  probe
  misc_feature (1)..(25): SEQ ID NO: 6808; WAN024DHF_at; Start 10; Stop 34
gataacggtcataatatctatttaa

SEQ ID NO: 157925 - DNA, 25 bp, Artificial
  probe
  misc_feature (1)..(25): SEQ ID NO: 6808; WAN024DHF_at; Start 43; Stop 67
gtagtccaattggatcaatttgcca

SEQ ID NO: 157926 - DNA, 25 bp, Artificial
  probe
  misc_feature (1)..(25): SEQ ID NO: 6808; WAN024DHF_at; Start 12; Stop 36
taacggtcataatatctatttaaaa

SEQ ID NO: 157927 - DNA, 25 bp, Artificial
  probe
  misc_feature (1)..(25): SEQ ID NO: 6808; WAN024DHF_at; Start 32; Stop 56
taaaattatacgtagtccaattgga

SEQ ID NO: 157928 - DNA, 25 bp, Artificial
  probe
  misc_feature (1)..(25): SEQ ID NO: 6808; WAN024DHF_at; Start 47; Stop 71
tccaattggatcaatttgccatccc

SEQ ID NO: 157929 - DNA, 25 bp, Artificial
  probe
  misc_feature (1)..(25): SEQ ID NO: 6808; WAN024DHF_at; Start 73; Stop 97
actcagaagactctaaataaggatt

SEQ ID NO: 157930 - DNA, 25 bp, Artificial
  probe
  misc_feature (1)..(25): SEQ ID NO: 6808; WAN024DHF_at; Start 48; Stop 72
ccaattggatcaatttgccatcccc

SEQ ID NO: 157931 - DNA, 25 bp, Artificial
  probe
  misc_feature (1)..(25): SEQ ID NO: 6808; WAN024DHF_at; Start 72; Stop 96
cactcagaagactctaaataaggat

SEQ ID NO: 157932 - DNA, 25 bp, Artificial
  probe
  misc_feature (1)..(25): SEQ ID NO: 6808; WAN024DHF_at; Start 45; Stop 69
agtccaattggatcaatttgccatc

SEQ ID NO: 157933 - DNA, 25 bp, Artificial
  probe
  misc_feature (1)..(25): SEQ ID NO: 6808; WAN024DHF_at; Start 54; Stop 78
ggatcaatttgccatccccactcag

SEQ ID NO: 157934 - DNA, 25 bp, Artificial
  probe
  misc_feature (1)..(25): SEQ ID NO: 6808; WAN024DHF_at; Start 37; Stop 61
ttatacgtagtccaattggatcaat

SEQ ID NO: 157935 - DNA, 25 bp, Artificial
  probe
  misc_feature (1)..(25): SEQ ID NO: 6808; WAN024DHF_at; Start 38; Stop 62
tatacgtagtccaattggatcaatt

SEQ ID NO: 157936 - DNA, 25 bp, Artificial
  probe
  misc_feature (1)..(25): SEQ ID NO: 6808; WAN024DHF_at; Start 71; Stop 95
ccactcagaagactctaaataagga

SEQ ID NO: 157937 - DNA, 25 bp, Artificial
  probe
  misc_feature (1)..(25): SEQ ID NO: 6808; WAN024DHF_at; Start 2; Stop 26
tggaatttgataacggtcataatat

SEQ ID NO: 157938 - DNA, 25 bp, Artificial
  probe
  misc_feature (1)..(25): SEQ ID NO: 6808; WAN024DHF_at; Start 76; Stop 100
cagaagactctaaataaggatttac

SEQ ID NO: 157939 - DNA, 25 bp, Artificial
  probe
  misc_feature (1)..(25): SEQ ID NO: 6808; WAN024DHF_at; Start 57; Stop 81
tcaatttgccatccccactcagaag

SEQ ID NO: 157940 - DNA, 25 bp, Artificial
  probe
  misc_feature (1)..(25): SEQ ID NO: 6808; WAN024DHF_at; Start 56; Stop 80
atcaatttgccatccccactcagaa

SEQ ID NO: 157941 - DNA, 25 bp, Artificial
  probe
  misc_feature (1)..(25): SEQ ID NO: 6808; WAN024DHF_at; Start 50; Stop 74
aattggatcaatttgccatccccac

SEQ ID NO: 157942 - DNA, 25 bp, Artificial
  probe
  misc_feature (1)..(25): SEQ ID NO: 6808; WAN024DHF_at; Start 49; Stop 73
caattggatcaatttgccatcccca

SEQ ID NO: 157943 - DNA, 25 bp, Artificial
  probe
  misc_feature (1)..(25): SEQ ID NO: 6808; WAN024DHF_at; Start 26; Stop 50
tctatttaaaattatacgtagtcca

SEQ ID NO: 157944 - DNA, 25 bp, Artificial
  probe
  misc_feature (1)..(25): SEQ ID NO: 6808; WAN024DHF_at; Start 35; Stop 59
aattatacgtagtccaattggatca

SEQ ID NO: 157945 - DNA, 25 bp, Artificial
  probe
  misc_feature (1)..(25): SEQ ID NO: 6808; WAN024DHF_at; Start 42; Stop 66
cgtagtccaattggatcaatttgcc

SEQ ID NO: 157946 - DNA, 25 bp, Artificial
  probe
  misc_feature (1)..(25): SEQ ID NO: 6808; WAN024DHF_at; Start 70; Stop 94
cccactcagaagactctaaataagg

SEQ ID NO: 157947 - DNA, 25 bp, Artificial
  probe
  misc_feature (1)..(25): SEQ ID NO: 6808; WAN024DHF_at; Start 60; Stop 84
atttgccatccccactcagaagact

SEQ ID NO: 157948 - DNA, 25 bp, Artificial
  probe
  misc_feature (1)..(25): SEQ ID NO: 6808; WAN024DHF_at; Start 74; Stop 98
ctcagaagactctaaataaggattt

SEQ ID NO: 157949 - DNA, 25 bp, Artificial
  probe
  misc_feature (1)..(25): SEQ ID NO: 6808; WAN024DHF_at; Start 68; Stop 92
tccccactcagaagactctaaataa

SEQ ID NO: 157950 - DNA, 25 bp, Artificial
  probe
  misc_feature (1)..(25): SEQ ID NO: 6808; WAN024DHF_at; Start 55; Stop 79
gatcaatttgccatccccactcaga

SEQ ID NO: 157951 - DNA, 25 bp, Artificial
  probe
  misc_feature (1)..(25): SEQ ID NO: 6808; WAN024DHF_at; Start 40; Stop 64
tacgtagtccaattggatcaatttg

SEQ ID NO: 157952 - DNA, 25 bp, Artificial
  probe
  misc_feature (1)..(25): SEQ ID NO: 6808; WAN024DHF_at; Start 41; Stop 65
acgtagtccaattggatcaatttgc

SEQ ID NO: 157953 - DNA, 25 bp, Artificial
  probe
  misc_feature (1)..(25): SEQ ID NO: 1404; WAN024DHG_at; Start 1013; Stop 1037
ggcaaattgatccaattggactacg

SEQ ID NO: 157954 - DNA, 25 bp, Artificial
  probe
  misc_feature (1)..(25): SEQ ID NO: 1404; WAN024DHG_at; Start 935; Stop 959
caacacagtataattcaggagaagg

SEQ ID NO: 157955 - DNA, 25 bp, Artificial
  probe
  misc_feature (1)..(25): SEQ ID NO: 1404; WAN024DHG_at; Start 110; Stop 134
ccaaaggtggattaggagaagcaac

SEQ ID NO: 157956 - DNA, 25 bp, Artificial
  probe
  misc_feature (1)..(25): SEQ ID NO: 1404; WAN024DHG_at; Start 829; Stop 853
gacattaacatagagtttgcagctg

SEQ ID NO: 157957 - DNA, 25 bp, Artificial
  probe
  misc_feature (1)..(25): SEQ ID NO: 1404; WAN024DHG_at; Start 1383; Stop 1407
gattgaatcaaatggagaatcctta

SEQ ID NO: 157958 - DNA, 25 bp, Artificial
  probe
  misc_feature (1)..(25): SEQ ID NO: 1404; WAN024DHG_at; Start 540; Stop 564
tactagtggaggaatagatatacct

SEQ ID NO: 157959 - DNA, 25 bp, Artificial
  probe
  misc_feature (1)..(25): SEQ ID NO: 1404; WAN024DHG_at; Start 393; Stop 417
tttagcaagaaaatatcatggatgg

SEQ ID NO: 157960 - DNA, 25 bp, Artificial
  probe
  misc_feature (1)..(25): SEQ ID NO: 1404; WAN024DHG_at; Start 1102; Stop 1126
ggtgctaaagatcaactaataaaag

SEQ ID NO: 157961 - DNA, 25 bp, Artificial
  probe
  misc_feature (1)..(25): SEQ ID NO: 1404; WAN024DHG_at; Start 598; Stop 622
gctatacatcatgaattagtcgcct

SEQ ID NO: 157962 - DNA, 25 bp, Artificial
  probe
  misc_feature (1)..(25): SEQ ID NO: 1404; WAN024DHG_at; Start 245; Stop 269
ctattgcatggagtagaatttttcc

SEQ ID NO: 157963 - DNA, 25 bp, Artificial
  probe
  misc_feature (1)..(25): SEQ ID NO: 1404; WAN024DHG_at; Start 703; Stop 727
ccaatgactccaaatccaaaagatg

SEQ ID NO: 157964 - DNA, 25 bp, Artificial
  probe
  misc_feature (1)..(25): SEQ ID NO: 1404; WAN024DHG_at; Start 676; Stop 700
tgtatggtattagctatgccagctt

SEQ ID NO: 157965 - DNA, 25 bp, Artificial
  probe
  misc_feature (1)..(25): SEQ ID NO: 1404; WAN024DHG_at; Start 717; Stop 741
tccaaaagatgtatgggcgactcat

SEQ ID NO: 157966 - DNA, 25 bp, Artificial
  probe
  misc_feature (1)..(25): SEQ ID NO: 1404; WAN024DHG_at; Start 643; Stop 667
gctcgtgagattaattcagagttta

SEQ ID NO: 157967 - DNA, 25 bp, Artificial
  probe
  misc_feature (1)..(25): SEQ ID NO: 1404; WAN024DHG_at; Start 379; Stop 403
gagactccattatatttagcaagaa

SEQ ID NO: 157968 - DNA, 25 bp, Artificial
  probe
  misc_feature (1)..(25): SEQ ID NO: 1404; WAN024DHG_at; Start 912; Stop 936
gagtgtgactcaatctgctcttcca

SEQ ID NO: 157969 - DNA, 25 bp, Artificial
  probe
  misc_feature (1)..(25): SEQ ID NO: 1404; WAN024DHG_at; Start 95; Stop 119
ttcaggatgtgttacccaaaggtgg

SEQ ID NO: 157970 - DNA, 25 bp, Artificial
  probe
  misc_feature (1)..(25): SEQ ID NO: 1404; WAN024DHG_at; Start 328; Stop 352
gatgaactacatgctcacgggatag

SEQ ID NO: 157971 - DNA, 25 bp, Artificial
  probe
  misc_feature (1)..(25): SEQ ID NO: 1404; WAN024DHG_at; Start 690; Stop 714
tatgccagcttatccaatgactcca

SEQ ID NO: 157972 - DNA, 25 bp, Artificial
  probe
  misc_feature (1)..(25): SEQ ID NO: 1404; WAN024DHG_at; Start 732; Stop 756
ggcgactcatgagtatgagaatcta

SEQ ID NO: 157973 - DNA, 25 bp, Artificial
  probe
  misc_feature (1)..(25): SEQ ID NO: 1404; WAN024DHG_at; Start 577; Stop 601
tcgaaacaagaattatatcaagcta

SEQ ID NO: 157974 - DNA, 25 bp, Artificial
  probe
  misc_feature (1)..(25): SEQ ID NO: 1404; WAN024DHG_at; Start 847; Stop 871
gcagctgaagatgcagagttattaa

SEQ ID NO: 157975 - DNA, 25 bp, Artificial
  probe
  misc_feature (1)..(25): SEQ ID NO: 1404; WAN024DHG_at; Start 627; Stop 651
tttggttacaaaaattgctcgtgag

SEQ ID NO: 157976 - DNA, 25 bp, Artificial
  probe
  misc_feature (1)..(25): SEQ ID NO: 1404; WAN024DHG_at; Start 562; Stop 586
cctaaggagaatctttcgaaacaag

SEQ ID NO: 157977 - DNA, 25 bp, Artificial
  probe
  misc_feature (1)..(25): SEQ ID NO: 1404; WAN024DHG_at; Start 232; Stop 256
gtttttcgtacttctattgcatgga

SEQ ID NO: 157978 - DNA, 25 bp, Artificial
  probe
  misc_feature (1)..(25): SEQ ID NO: 1404; WAN024DHG_at; Start 896; Stop 920
cctttagctattacatgagtgtgac

SEQ ID NO: 157979 - DNA, 25 bp, Artificial
  probe
  misc_feature (1)..(25): SEQ ID NO: 1404; WAN024DHG_at; Start 764; Stop 788
tattttcagatgtgcatgttagagg

SEQ ID NO: 157980 - DNA, 25 bp, Artificial
  probe
  misc_feature (1)..(25): SEQ ID NO: 1404; WAN024DHG_at; Start 454; Stop 478
gctcgaacagttttagaaaggtata

SEQ ID NO: 157981 - DNA, 25 bp, Artificial
  probe
  misc_feature (1)..(25): SEQ ID NO: 1404; WAN024DHG_at; Start 1292; Stop 1316
ggtacggtctcatttatgttgatcg

SEQ ID NO: 157982 - DNA, 25 bp, Artificial
  probe
  misc_feature (1)..(25): SEQ ID NO: 1404; WAN024DHG_at; Start 783; Stop 807
tagaggttattatccgaattatgca

SEQ ID NO: 157983 - DNA, 25 bp, Artificial
  probe
  misc_feature (1)..(25): SEQ ID NO: 1404; WAN024DHG_at; Start 127; Stop 151
gaagcaacagaaaatcctacagaag

SEQ ID NO: 157984 - DNA, 25 bp, Artificial
  probe
  misc_feature (1)..(25): SEQ ID NO: 1404; WAN024DHG_at; Start 362; Stop 386
taactctttcacactatgagactcc

SEQ ID NO: 157985 - DNA, 25 bp, Artificial
  probe
  misc_feature (1)..(25): SEQ ID NO: 1404; WAN024DHG_at; Start 490; Stop 514
aaatattggcttacatttaacgaag

SEQ ID NO: 157986 - DNA, 25 bp, Artificial
  probe
  misc_feature (1)..(25): SEQ ID NO: 1404; WAN024DHG_at; Start 89; Stop 113
tatcagttcaggatgtgttacccaa

SEQ ID NO: 157987 - DNA, 25 bp, Artificial
  probe
  misc_feature (1)..(25): SEQ ID NO: 1643; WAN024DHH_at; Start 1081; Stop 1105
gggattaccgaacctgcattatatg

SEQ ID NO: 157988 - DNA, 25 bp, Artificial
  probe
  misc_feature (1)..(25): SEQ ID NO: 1643; WAN024DHH_at; Start 1461; Stop 1485
taaactaattggagacggagtagcg

SEQ ID NO: 157989 - DNA, 25 bp, Artificial
  probe
  misc_feature (1)..(25): SEQ ID NO: 1643; WAN024DHH_at; Start 127; Stop 151
gatgatgtgaagaagataccaggtg

SEQ ID NO: 157990 - DNA, 25 bp, Artificial
  probe
  misc_feature (1)..(25): SEQ ID NO: 1643; WAN024DHH_at; Start 927; Stop 951
ggcatctattgctactccagacgta

SEQ ID NO: 157991 - DNA, 25 bp, Artificial
  probe
  misc_feature (1)..(25): SEQ ID NO: 1643; WAN024DHH_at; Start 882; Stop 906
tgttatgactggaatgcattgggct

SEQ ID NO: 157992 - DNA, 25 bp, Artificial
  probe
  misc_feature (1)..(25): SEQ ID NO: 1643; WAN024DHH_at; Start 1435; Stop 1459
gatgtccaggataaaacattttcag

SEQ ID NO: 157993 - DNA, 25 bp, Artificial
  probe
  misc_feature (1)..(25): SEQ ID NO: 1643; WAN024DHH_at; Start 1421; Stop 1445
tcattccgttaagcgatgtccagga

SEQ ID NO: 157994 - DNA, 25 bp, Artificial
  probe
  misc_feature (1)..(25): SEQ ID NO: 1643; WAN024DHH_at; Start 382; Stop 406
ccaatgcttggtatattgcaatcag

SEQ ID NO: 157995 - DNA, 25 bp, Artificial
  probe
  misc_feature (1)..(25): SEQ ID NO: 1643; WAN024DHH_at; Start 1404; Stop 1428
tcctatatcaggagaaatcattccg

SEQ ID NO: 157996 - DNA, 25 bp, Artificial
  probe
  misc_feature (1)..(25): SEQ ID NO: 1643; WAN024DHH_at; Start 968; Stop 992
tgttagggtcaaacttagctcaagg

SEQ ID NO: 157997 - DNA, 25 bp, Artificial
  probe
  misc_feature (1)..(25): SEQ ID NO: 1643; WAN024DHH_at; Start 1612; Stop 1636
gatactgttgagctaaaaggtcaag

SEQ ID NO: 157998 - DNA, 25 bp, Artificial
  probe
  misc_feature (1)..(25): SEQ ID NO: 1643; WAN024DHH_at; Start 527; Stop 551
tagcaggtgtacttctccatccaaa

SEQ ID NO: 157999 - DNA, 25 bp, Artificial
  probe
  misc_feature (1)..(25): SEQ ID NO: 1643; WAN024DHH_at; Start 1709; Stop 1733
taatcaagactaaaggctacgaaac

SEQ ID NO: 158000 - DNA, 25 bp, Artificial
  probe
  misc_feature (1)..(25): SEQ ID NO: 1643; WAN024DHH_at; Start 1648; Stop 1672
catgtagaagaaggagacagagttt

SEQ ID NO: 158001 - DNA, 25 bp, Artificial
  probe
  misc_feature (1)..(25): SEQ ID NO: 1643; WAN024DHH_at; Start 1787; Stop 1811
tacctaataatcagacaatcgagca

SEQ ID NO: 158002 - DNA, 25 bp, Artificial
  probe
  misc_feature (1)..(25): SEQ ID NO: 1643; WAN024DHH_at; Start 711; Stop 735
gagttttttgcaacctacgctagta

SEQ ID NO: 158003 - DNA, 25 bp, Artificial
  probe
  misc_feature (1)..(25): SEQ ID NO: 1643; WAN024DHH_at; Start 998; Stop 1022
cttcgatggctgttgcattaaagag

SEQ ID NO: 158004 - DNA, 25 bp, Artificial
  probe
  misc_feature (1)..(25): SEQ ID NO: 1643; WAN024DHH_at; Start 324; Stop 348
tccaatcattccagcaatgttaggg

SEQ ID NO: 158005 - DNA, 25 bp, Artificial
  probe
  misc_feature (1)..(25): SEQ ID NO: 1643; WAN024DHH_at; Start 1493; Stop 1517
caagtgaaggtaaggtttatgcacc

SEQ ID NO: 158006 - DNA, 25 bp, Artificial
  probe
  misc_feature (1)..(25): SEQ ID NO: 1643; WAN024DHH_at; Start 835; Stop 859
gctggatggcttacattagctattc

SEQ ID NO: 158007 - DNA, 25 bp, Artificial
  probe
  misc_feature (1)..(25): SEQ ID NO: 1643; WAN024DHH_at; Start 22; Stop 46
caaaaaatcctcgatgtaattggag

SEQ ID NO: 158008 - DNA, 25 bp, Artificial
  probe
  misc_feature (1)..(25): SEQ ID NO: 1643; WAN024DHH_at; Start 1541; Stop 1565
tttttccgactaagcacgcaattgg

SEQ ID NO: 158009 - DNA, 25 bp, Artificial
  probe
  misc_feature (1)..(25): SEQ ID NO: 1643; WAN024DHH_at; Start 1162; Stop 1186
gcgggattatttgcaggtcttacta

SEQ ID NO: 158010 - DNA, 25 bp, Artificial
  probe
  misc_feature (1)..(25): SEQ ID NO: 1643; WAN024DHH_at; Start 1037; Stop 1061
caaaacaaattgcttttgcagcagg

SEQ ID NO: 158011 - DNA, 25 bp, Artificial
  probe
  misc_feature (1)..(25): SEQ ID NO: 1643; WAN024DHH_at; Start 1122; Stop 1146
taaaaaaccgctttatgcagctatg

SEQ ID NO: 158012 - DNA, 25 bp, Artificial
  probe
  misc_feature (1)..(25): SEQ ID NO: 1643; WAN024DHH_at; Start 1066; Stop 1090
tcagccttacttgcagggattaccg

SEQ ID NO: 158013 - DNA, 25 bp, Artificial
  probe
  misc_feature (1)..(25): SEQ ID NO: 1643; WAN024DHH_at; Start 304; Stop 328
tatatcgctggttccatgactccaa

SEQ ID NO: 158014 - DNA, 25 bp, Artificial
  probe
  misc_feature (1)..(25): SEQ ID NO: 1643; WAN024DHH_at; Start 289; Stop 313
gaaagaatcattgagtatatcgctg

SEQ ID NO: 158015 - DNA, 25 bp, Artificial
  probe
  misc_feature (1)..(25): SEQ ID NO: 1643; WAN024DHH_at; Start 953; Stop 977
taattcttccagcaatgttagggtc

SEQ ID NO: 158016 - DNA, 25 bp, Artificial
  probe
  misc_feature (1)..(25): SEQ ID NO: 1643; WAN024DHH_at; Start 1051; Stop 1075
tttgcagcaggtttctcagccttac

SEQ ID NO: 158017 - DNA, 25 bp, Artificial
  probe
  misc_feature (1)..(25): SEQ ID NO: 1643; WAN024DHH_at; Start 231; Stop 255
taaacttggcaattttgaatccgat

SEQ ID NO: 158018 - DNA, 25 bp, Artificial
  probe
  misc_feature (1)..(25): SEQ ID NO: 1643; WAN024DHH_at; Start 1723; Stop 1747
ggctacgaaacagttacaccagtaa

SEQ ID NO: 158019 - DNA, 25 bp, Artificial
  probe
  misc_feature (1)..(25): SEQ ID NO: 1643; WAN024DHH_at; Start 559; Stop 583
caaatggtgcaatcagggaatcctc

SEQ ID NO: 158020 - DNA, 25 bp, Artificial
  probe
  misc_feature (1)..(25): SEQ ID NO: 1643; WAN024DHH_at; Start 1206; Stop 1230
tgctgtcccatctttgatagcgttg

SEQ ID NO: 158021 - DNA, 25 bp, Artificial
  probe
  misc_feature (1)..(25): SEQ ID NO: 5225; WAN024DHI_at; Start 161; Stop 185
ctggagttgtaaaaaatagaatgga

SEQ ID NO: 158022 - DNA, 25 bp, Artificial
  probe
  misc_feature (1)..(25): SEQ ID NO: 5225; WAN024DHI_at; Start 286; Stop 310
gaagatgttcatagttatgctgaaa

SEQ ID NO: 158023 - DNA, 25 bp, Artificial
  probe
  misc_feature (1)..(25): SEQ ID NO: 5225; WAN024DHI_at; Start 470; Stop 494
gacagttaaccgatgcccgtcttta

SEQ ID NO: 158024 - DNA, 25 bp, Artificial
  probe
  misc_feature (1)..(25): SEQ ID NO: 5225; WAN024DHI_at; Start 139; Stop 163
tctctgggaattgctgaaacaactg

SEQ ID NO: 158025 - DNA, 25 bp, Artificial
  probe
  misc_feature (1)..(25): SEQ ID NO: 5225; WAN024DHI_at; Start 6; Stop 30
ggagaaagtgatgtccaaacaccct

SEQ ID NO: 158026 - DNA, 25 bp, Artificial
  probe
  misc_feature (1)..(25): SEQ ID NO: 5225; WAN024DHI_at; Start 390; Stop 414
caaacgtctacaggaaacgggaatg

SEQ ID NO: 158027 - DNA, 25 bp, Artificial
  probe
  misc_feature (1)..(25): SEQ ID NO: 5225; WAN024DHI_at; Start 14; Stop 38
tgatgtccaaacaccctcattatga

SEQ ID NO: 158028 - DNA, 25 bp, Artificial
  probe
  misc_feature (1)..(25): SEQ ID NO: 5225; WAN024DHI_at; Start 503; Stop 527
gatatgactttcaggtagatgtcca

SEQ ID NO: 158029 - DNA, 25 bp, Artificial
  probe
  misc_feature (1)..(25): SEQ ID NO: 5225; WAN024DHI_at; Start 638; Stop 662
tatccttggtcacaaatctagatga

SEQ ID NO: 158030 - DNA, 25 bp, Artificial
  probe
  misc_feature (1)..(25): SEQ ID NO: 5225; WAN024DHI_at; Start 111; Stop 135
caagtcggagttttatcgctatgtg

SEQ ID NO: 158031 - DNA, 25 bp, Artificial
  probe
  misc_feature (1)..(25): SEQ ID NO: 5225; WAN024DHI_at; Start 205; Stop 229
gacaataatcgaaaaggttggtggc

SEQ ID NO: 158032 - DNA, 25 bp, Artificial
  probe
  misc_feature (1)..(25): SEQ ID NO: 5225; WAN024DHI_at; Start 146; Stop 170
gaattgctgaaacaactggagttgt

SEQ ID NO: 158033 - DNA, 25 bp, Artificial
  probe
  misc_feature (1)..(25): SEQ ID NO: 5225; WAN024DHI_at; Start 527; Stop 551
aagagtattcttaccttgccgaagt

SEQ ID NO: 158034 - DNA, 25 bp, Artificial
  probe
  misc_feature (1)..(25): SEQ ID NO: 5225; WAN024DHI_at; Start 575; Stop 599
ggcgtgtgcgtttaactgcaaaaga

SEQ ID NO: 158035 - DNA, 25 bp, Artificial
  probe
  misc_feature (1)..(25): SEQ ID NO: 5225; WAN024DHI_at; Start 46; Stop 70
aatttaattggctacggtcttgcca

SEQ ID NO: 158036 - DNA, 25 bp, Artificial
  probe
  misc_feature (1)..(25): SEQ ID NO: 5225; WAN024DHI_at; Start 606; Stop 630
aaaagtcaaggagtttcaatcggat

SEQ ID NO: 158037 - DNA, 25 bp, Artificial
  probe
  misc_feature (1)..(25): SEQ ID NO: 5225; WAN024DHI_at; Start 58; Stop 82
tacggtcttgccaagtttgacaagc

SEQ ID NO: 158038 - DNA, 25 bp, Artificial
  probe
  misc_feature (1)..(25): SEQ ID NO: 5225; WAN024DHI_at; Start 450; Stop 474
agaagaaaaattccaaggtggacag

SEQ ID NO: 158039 - DNA, 25 bp, Artificial
  probe
  misc_feature (1)..(25): SEQ ID NO: 5225; WAN024DHI_at; Start 684; Stop 708
cgataatcctttaaaacattttgag

SEQ ID NO: 158040 - DNA, 25 bp, Artificial
  probe
  misc_feature (1)..(25): SEQ ID NO: 5225; WAN024DHI_at; Start 463; Stop 487
caaggtggacagttaaccgatgccc

SEQ ID NO: 158041 - DNA, 25 bp, Artificial
  probe
  misc_feature (1)..(25): SEQ ID NO: 5225; WAN024DHI_at; Start 738; Stop 762
cattgaatatagaagcgtagaggat

SEQ ID NO: 158042 - DNA, 25 bp, Artificial
  probe
  misc_feature (1)..(25): SEQ ID NO: 5225; WAN024DHI_at; Start 325; Stop 349
cttgccagtgaagggaagaaaacag

SEQ ID NO: 158043 - DNA, 25 bp, Artificial
  probe
  misc_feature (1)..(25): SEQ ID NO: 5225; WAN024DHI_at; Start 315; Stop 339
taaaatgttacttgccagtgaaggg

SEQ ID NO: 158044 - DNA, 25 bp, Artificial
  probe
  misc_feature (1)..(25): SEQ ID NO: 5225; WAN024DHI_at; Start 124; Stop 148
tatcgctatgtggtttctctgggaa

SEQ ID NO: 158045 - DNA, 25 bp, Artificial
  probe
  misc_feature (1)..(25): SEQ ID NO: 5225; WAN024DHI_at; Start 342; Stop 366
gaaaacaggcataaccatcgttgaa

SEQ ID NO: 158046 - DNA, 25 bp, Artificial
  probe
  misc_feature (1)..(25): SEQ ID NO: 5225; WAN024DHI_at; Start 379; Stop 403
cgaactaaattcaaacgtctacagg

SEQ ID NO: 158047 - DNA, 25 bp, Artificial
  probe
  misc_feature (1)..(25): SEQ ID NO: 5225; WAN024DHI_at; Start 213; Stop 237
tcgaaaaggttggtggcagaaagct

SEQ ID NO: 158048 - DNA, 25 bp, Artificial
  probe
  misc_feature (1)..(25): SEQ ID NO: 5225; WAN024DHI_at; Start 405; Stop 429
aacgggaatggaggctgagaattat

SEQ ID NO: 158049 - DNA, 25 bp, Artificial
  probe
  misc_feature (1)..(25): SEQ ID NO: 5225; WAN024DHI_at; Start 512; Stop 536
ttcaggtagatgtccaagagtattc

SEQ ID NO: 158050 - DNA, 25 bp, Artificial
  probe
  misc_feature (1)..(25): SEQ ID NO: 5225; WAN024DHI_at; Start 357; Stop 381
catcgttgaaaaaccaatagttcga

SEQ ID NO: 158051 - DNA, 25 bp, Artificial
  probe
  misc_feature (1)..(25): SEQ ID NO: 5225; WAN024DHI_at; Start 485; Stop 509
cccgtctttatggtgatggatatga

SEQ ID NO: 158052 - DNA, 25 bp, Artificial
  probe
  misc_feature (1)..(25): SEQ ID NO: 5225; WAN024DHI_at; Start 668; Stop 692
caaagttagtgttaatcgataatcc

SEQ ID NO: 158053 - DNA, 25 bp, Artificial
  probe
  misc_feature (1)..(25): SEQ ID NO: 5225; WAN024DHI_at; Start 227; Stop 251
ggcagaaagctgaagtttatcgttt

SEQ ID NO: 158054 - DNA, 25 bp, Artificial
  probe
  misc_feature (1)..(25): SEQ ID NO: 5225; WAN024DHI_at; Start 654; Stop 678
tctagatgatattccaaagttagtg

SEQ ID NO: 158055 - DNA, 25 bp, Artificial
  probe
  misc_feature (1)..(25): SEQ ID NO: 7648; WAN024DHJ_at; Start 67; Stop 91
catactgatagcttgcaaaaccatg

SEQ ID NO: 158056 - DNA, 25 bp, Artificial
  probe
  misc_feature (1)..(25): SEQ ID NO: 7648; WAN024DHJ_at; Start 83; Stop 107
aaaaccatgtatacaatcaaactcc

SEQ ID NO: 158057 - DNA, 25 bp, Artificial
  probe
  misc_feature (1)..(25): SEQ ID NO: 7648; WAN024DHJ_at; Start 106; Stop 130
cctcactatctttggaatatttttg

SEQ ID NO: 158058 - DNA, 25 bp, Artificial
  probe
  misc_feature (1)..(25): SEQ ID NO: 7648; WAN024DHJ_at; Start 47; Stop 71
tcgataagcaaaattggtatcatac

SEQ ID NO: 158059 - DNA, 25 bp, Artificial
  probe
  misc_feature (1)..(25): SEQ ID NO: 7648; WAN024DHJ_at; Start 20; Stop 44
cgaataatttctcaaagaatggcaa

SEQ ID NO: 158060 - DNA, 25 bp, Artificial
  probe
  misc_feature (1)..(25): SEQ ID NO: 7648; WAN024DHJ_at; Start 81; Stop 105
gcaaaaccatgtatacaatcaaact

SEQ ID NO: 158061 - DNA, 25 bp, Artificial
  probe
  misc_feature (1)..(25): SEQ ID NO: 7648; WAN024DHJ_at; Start 10; Stop 34
cagtatgttgcgaataatttctcaa

SEQ ID NO: 158062 - DNA, 25 bp, Artificial
  probe
  misc_feature (1)..(25): SEQ ID NO: 7648; WAN024DHJ_at; Start 36; Stop 60
gaatggcaaaatcgataagcaaaat

SEQ ID NO: 158063 - DNA, 25 bp, Artificial
  probe
  misc_feature (1)..(25): SEQ ID NO: 7648; WAN024DHJ_at; Start 72; Stop 96
tgatagcttgcaaaaccatgtatac

SEQ ID NO: 158064 - DNA, 25 bp, Artificial
  probe
  misc_feature (1)..(25): SEQ ID NO: 7648; WAN024DHJ_at; Start 18; Stop 42
tgcgaataatttctcaaagaatggc

SEQ ID NO: 158065 - DNA, 25 bp, Artificial
  probe
  misc_feature (1)..(25): SEQ ID NO: 7648; WAN024DHJ_at; Start 42; Stop 66
caaaatcgataagcaaaattggtat

SEQ ID NO: 158066 - DNA, 25 bp, Artificial
  probe
  misc_feature (1)..(25): SEQ ID NO: 7648; WAN024DHJ_at; Start 24; Stop 48
taatttctcaaagaatggcaaaatc

SEQ ID NO: 158067 - DNA, 25 bp, Artificial
  probe
  misc_feature (1)..(25): SEQ ID NO: 7648; WAN024DHJ_at; Start 39; Stop 63
tggcaaaatcgataagcaaaattgg

SEQ ID NO: 158068 - DNA, 25 bp, Artificial
  probe
  misc_feature (1)..(25): SEQ ID NO: 7648; WAN024DHJ_at; Start 51; Stop 75
taagcaaaattggtatcatactgat

SEQ ID NO: 158069 - DNA, 25 bp, Artificial
  probe
  misc_feature (1)..(25): SEQ ID NO: 7648; WAN024DHJ_at; Start 73; Stop 97
gatagcttgcaaaaccatgtataca

SEQ ID NO: 158070 - DNA, 25 bp, Artificial
  probe
  misc_feature (1)..(25): SEQ ID NO: 7648; WAN024DHJ_at; Start 66; Stop 90
tcatactgatagcttgcaaaaccat

SEQ ID NO: 158071 - DNA, 25 bp, Artificial
  probe
  misc_feature (1)..(25): SEQ ID NO: 7648; WAN024DHJ_at; Start 12; Stop 36
gtatgttgcgaataatttctcaaag

SEQ ID NO: 158072 - DNA, 25 bp, Artificial
  probe
  misc_feature (1)..(25): SEQ ID NO: 7648; WAN024DHJ_at; Start 87; Stop 111
ccatgtatacaatcaaactcctcac

SEQ ID NO: 158073 - DNA, 25 bp, Artificial
  probe
  misc_feature (1)..(25): SEQ ID NO: 7648; WAN024DHJ_at; Start 100; Stop 124
caaactcctcactatctttggaata

SEQ ID NO: 158074 - DNA, 25 bp, Artificial
  probe
  misc_feature (1)..(25): SEQ ID NO: 7648; WAN024DHJ_at; Start 70; Stop 94
actgatagcttgcaaaaccatgtat

SEQ ID NO: 158075 - DNA, 25 bp, Artificial
  probe
  misc_feature (1)..(25): SEQ ID NO: 7648; WAN024DHJ_at; Start 96; Stop 120
caatcaaactcctcactatctttgg

SEQ ID NO: 158076 - DNA, 25 bp, Artificial
  probe
  misc_feature (1)..(25): SEQ ID NO: 7648; WAN024DHJ_at; Start 6; Stop 30
aagtcagtatgttgcgaataatttc

SEQ ID NO: 158077 - DNA, 25 bp, Artificial
  probe
  misc_feature (1)..(25): SEQ ID NO: 7648; WAN024DHJ_at; Start 58; Stop 82
aattggtatcatactgatagcttgc

SEQ ID NO: 158078 - DNA, 25 bp, Artificial
  probe
  misc_feature (1)..(25): SEQ ID NO: 7648; WAN024DHJ_at; Start 54; Stop 78
gcaaaattggtatcatactgatagc

SEQ ID NO: 158079 - DNA, 25 bp, Artificial
  probe
  misc_feature (1)..(25): SEQ ID NO: 7648; WAN024DHJ_at; Start 1; Stop 25
ttggtaagtcagtatgttgcgaata

SEQ ID NO: 158080 - DNA, 25 bp, Artificial
  probe
  misc_feature (1)..(25): SEQ ID NO: 7648; WAN024DHJ_at; Start 69; Stop 93
tactgatagcttgcaaaaccatgta

SEQ ID NO: 158081 - DNA, 25 bp, Artificial
  probe
  misc_feature (1)..(25): SEQ ID NO: 7648; WAN024DHJ_at; Start 41; Stop 65
gcaaaatcgataagcaaaattggta

SEQ ID NO: 158082 - DNA, 25 bp, Artificial
  probe
  misc_feature (1)..(25): SEQ ID NO: 7648; WAN024DHJ_at; Start 75; Stop 99
tagcttgcaaaaccatgtatacaat

SEQ ID NO: 158083 - DNA, 25 bp, Artificial
  probe
  misc_feature (1)..(25): SEQ ID NO: 7648; WAN024DHJ_at; Start 77; Stop 101
gcttgcaaaaccatgtatacaatca

SEQ ID NO: 158084 - DNA, 25 bp, Artificial
  probe
  misc_feature (1)..(25): SEQ ID NO: 7648; WAN024DHJ_at; Start 64; Stop 88
tatcatactgatagcttgcaaaacc

SEQ ID NO: 158085 - DNA, 25 bp, Artificial
  probe
  misc_feature (1)..(25): SEQ ID NO: 7648; WAN024DHJ_at; Start 9; Stop 33
tcagtatgttgcgaataatttctca

SEQ ID NO: 158086 - DNA, 25 bp, Artificial
  probe
  misc_feature (1)..(25): SEQ ID NO: 7648; WAN024DHJ_at; Start 3; Stop 27
ggtaagtcagtatgttgcgaataat

SEQ ID NO: 158087 - DNA, 25 bp, Artificial
  probe
  misc_feature (1)..(25): SEQ ID NO: 7648; WAN024DHJ_at; Start 61; Stop 85
tggtatcatactgatagcttgcaaa

SEQ ID NO: 158088 - DNA, 25 bp, Artificial
  probe
  misc_feature (1)..(25): SEQ ID NO: 7648; WAN024DHJ_at; Start 90; Stop 114
tgtatacaatcaaactcctcactat

SEQ ID NO: 158089 - DNA, 25 bp, Artificial
  probe
  misc_feature (1)..(25): SEQ ID NO: 3913; WAN024DHK_at; Start 68; Stop 92
gccaaattgatgttgagtatgctga

SEQ ID NO: 158090 - DNA, 25 bp, Artificial
  probe
  misc_feature (1)..(25): SEQ ID NO: 3913; WAN024DHK_at; Start 809; Stop 833
cattaaaattgaaacactctaggta

SEQ ID NO: 158091 - DNA, 25 bp, Artificial
  probe
  misc_feature (1)..(25): SEQ ID NO: 3913; WAN024DHK_at; Start 164; Stop 188
tctctgatattgaaccaaccaagga

SEQ ID NO: 158092 - DNA, 25 bp, Artificial
  probe
  misc_feature (1)..(25): SEQ ID NO: 3913; WAN024DHK_at; Start 37; Stop 61
gaagtaagctctctatctgagaagc

SEQ ID NO: 158093 - DNA, 25 bp, Artificial
  probe
  misc_feature (1)..(25): SEQ ID NO: 3913; WAN024DHK_at; Start 8; Stop 32
ggaggaataagatgagcgatgtaaa

SEQ ID NO: 158094 - DNA, 25 bp, Artificial
  probe
  misc_feature (1)..(25): SEQ ID NO: 3913; WAN024DHK_at; Start 196; Stop 220
tcagtctcggaccaaatttttgaga

SEQ ID NO: 158095 - DNA, 25 bp, Artificial
  probe
  misc_feature (1)..(25): SEQ ID NO: 3913; WAN024DHK_at; Start 709; Stop 733
gaatactttaatgctcttacagagc

SEQ ID NO: 158096 - DNA, 25 bp, Artificial
  probe
  misc_feature (1)..(25): SEQ ID NO: 3913; WAN024DHK_at; Start 720; Stop 744
tgctcttacagagctctatggtaat

SEQ ID NO: 158097 - DNA, 25 bp, Artificial
  probe
  misc_feature (1)..(25): SEQ ID NO: 3913; WAN024DHK_at; Start 311; Stop 335
caaaggaattagaaattgaagaggc

SEQ ID NO: 158098 - DNA, 25 bp, Artificial
  probe
  misc_feature (1)..(25): SEQ ID NO: 3913; WAN024DHK_at; Start 656; Stop 680
tgataaaactaaaccaagaaacatc

SEQ ID NO: 158099 - DNA, 25 bp, Artificial
  probe
  misc_feature (1)..(25): SEQ ID NO: 3913; WAN024DHK_at; Start 447; Stop 471
tatacatggttttgcaagctatcag

SEQ ID NO: 158100 - DNA, 25 bp, Artificial
  probe
  misc_feature (1)..(25): SEQ ID NO: 3913; WAN024DHK_at; Start 148; Stop 172
gaaaaacgtattgtcatctctgata

SEQ ID NO: 158101 - DNA, 25 bp, Artificial
  probe
  misc_feature (1)..(25): SEQ ID NO: 3913; WAN024DHK_at; Start 855; Stop 879
gtatgatcttaaatataatcctgga

SEQ ID NO: 158102 - DNA, 25 bp, Artificial
  probe
  misc_feature (1)..(25): SEQ ID NO: 3913; WAN024DHK_at; Start 521; Stop 545
cgcaacatactgacttaccaataaa

SEQ ID NO: 158103 - DNA, 25 bp, Artificial
  probe
  misc_feature (1)..(25): SEQ ID NO: 3913; WAN024DHK_at; Start 354; Stop 378
gattcatttattatccagtggaaaa

SEQ ID NO: 158104 - DNA, 25 bp, Artificial
  probe
  misc_feature (1)..(25): SEQ ID NO: 3913; WAN024DHK_at; Start 688; Stop 712
gacgctatagctctagtgaaagaat

SEQ ID NO: 158105 - DNA, 25 bp, Artificial
  probe
  misc_feature (1)..(25): SEQ ID NO: 3913; WAN024DHK_at; Start 331; Stop 355
gaggcagatgtaaatcgtttcatga

SEQ ID NO: 158106 - DNA, 25 bp, Artificial
  probe
  misc_feature (1)..(25): SEQ ID NO: 3913; WAN024DHK_at; Start 412; Stop 436
caaaaatattccaaagatagtgagg

SEQ ID NO: 158107 - DNA, 25 bp, Artificial
  probe
  misc_feature (1)..(25): SEQ ID NO: 3913; WAN024DHK_at; Start 901; Stop 925
gcagcatttgctgaaattgaagaga

SEQ ID NO: 158108 - DNA, 25 bp, Artificial
  probe
  misc_feature (1)..(25): SEQ ID NO: 3913; WAN024DHK_at; Start 871; Stop 895
aatcctggaaattatactatgtcac

SEQ ID NO: 158109 - DNA, 25 bp, Artificial
  probe
  misc_feature (1)..(25): SEQ ID NO: 3913; WAN024DHK_at; Start 509; Stop 533
tgagaaattattcgcaacatactga

SEQ ID NO: 158110 - DNA, 25 bp, Artificial
  probe
  misc_feature (1)..(25): SEQ ID NO: 3913; WAN024DHK_at; Start 432; Stop 456
tgaggagtttgattgtatacatggt

SEQ ID NO: 158111 - DNA, 25 bp, Artificial
  probe
  misc_feature (1)..(25): SEQ ID NO: 3913; WAN024DHK_at; Start 268; Stop 292
tcagatgtctcggattttttaagta

SEQ ID NO: 158112 - DNA, 25 bp, Artificial
  probe
  misc_feature (1)..(25): SEQ ID NO: 3913; WAN024DHK_at; Start 111; Stop 135
tatcgagcgattagcttatttagaa

SEQ ID NO: 158113 - DNA, 25 bp, Artificial
  probe
  misc_feature (1)..(25): SEQ ID NO: 3913; WAN024DHK_at; Start 182; Stop 206
ccaaggaaataatgtcagtctcgga

SEQ ID NO: 158114 - DNA, 25 bp, Artificial
  probe
  misc_feature (1)..(25): SEQ ID NO: 3913; WAN024DHK_at; Start 673; Stop 697
gaaacatctaagattgacgctatag

SEQ ID NO: 158115 - DNA, 25 bp, Artificial
  probe
  misc_feature (1)..(25): SEQ ID NO: 3913; WAN024DHK_at; Start 542; Stop 566
taaatgaggtaaaagctgttagccc

SEQ ID NO: 158116 - DNA, 25 bp, Artificial
  probe
  misc_feature (1)..(25): SEQ ID NO: 3913; WAN024DHK_at; Start 563; Stop 587
gcccagatgatgagactgttataat

SEQ ID NO: 158117 - DNA, 25 bp, Artificial
  probe
  misc_feature (1)..(25): SEQ ID NO: 3913; WAN024DHK_at; Start 835; Stop 859
tatatttcaaagataagcaagtatg

SEQ ID NO: 158118 - DNA, 25 bp, Artificial
  probe
  misc_feature (1)..(25): SEQ ID NO: 3913; WAN024DHK_at; Start 886; Stop 910
actatgtcaccacttgcagcatttg

SEQ ID NO: 158119 - DNA, 25 bp, Artificial
  probe
  misc_feature (1)..(25): SEQ ID NO: 3913; WAN024DHK_at; Start 23; Stop 47
gcgatgtaaaagaggaagtaagctc

SEQ ID NO: 158120 - DNA, 25 bp, Artificial
  probe
  misc_feature (1)..(25): SEQ ID NO: 3913; WAN024DHK_at; Start 95; Stop 119
taaatgatagtgatattatcgagcg

SEQ ID NO: 158121 - DNA, 25 bp, Artificial
  probe
  misc_feature (1)..(25): SEQ ID NO: 3913; WAN024DHK_at; Start 52; Stop 76
tctgagaagcagttacgccaaattg

SEQ ID NO: 158122 - DNA, 25 bp, Artificial
  probe
  misc_feature (1)..(25): SEQ ID NO: 3913; WAN024DHK_at; Start 551; Stop 575
taaaagctgttagcccagatgatga

SEQ ID NO: 158123 - DNA, 25 bp, Artificial
  probe
  misc_feature (1)..(25): SEQ ID NO: 7294; WAN024DHL_at; Start 169; Stop 193
ggcaaggagttctttttcagtccag

SEQ ID NO: 158124 - DNA, 25 bp, Artificial
  probe
  misc_feature (1)..(25): SEQ ID NO: 7294; WAN024DHL_at; Start 8; Stop 32
tctcagcgccgccactttctgtaaa

SEQ ID NO: 158125 - DNA, 25 bp, Artificial
  probe
  misc_feature (1)..(25): SEQ ID NO: 7294; WAN024DHL_at; Start 76; Stop 100
ttttctcggaaatgcaaggctcaag

SEQ ID NO: 158126 - DNA, 25 bp, Artificial
  probe
  misc_feature (1)..(25): SEQ ID NO: 7294; WAN024DHL_at; Start 132; Stop 156
tcaatttcttgatggtagctgggcc

SEQ ID NO: 158127 - DNA, 25 bp, Artificial
  probe
  misc_feature (1)..(25): SEQ ID NO: 7294; WAN024DHL_at; Start 134; Stop 158
aatttcttgatggtagctgggccga

SEQ ID NO: 158128 - DNA, 25 bp, Artificial
  probe
  misc_feature (1)..(25): SEQ ID NO: 7294; WAN024DHL_at; Start 171; Stop 195
caaggagttctttttcagtccagtt

SEQ ID NO: 158129 - DNA, 25 bp, Artificial
  probe
  misc_feature (1)..(25): SEQ ID NO: 7294; WAN024DHL_at; Start 39; Stop 63
gattcaaaacacctctaatggctct

SEQ ID NO: 158130 - DNA, 25 bp, Artificial
  probe
  misc_feature (1)..(25): SEQ ID NO: 7294; WAN024DHL_at; Start 107; Stop 131
tacttgaacttgatgccattttctt

SEQ ID NO: 158131 - DNA, 25 bp, Artificial
  probe
  misc_feature (1)..(25): SEQ ID NO: 7294; WAN024DHL_at; Start 66; Stop 90
tgtagcaagtttttctcggaaatgc

SEQ ID NO: 158132 - DNA, 25 bp, Artificial
  probe
  misc_feature (1)..(25): SEQ ID NO: 7294; WAN024DHL_at; Start 79; Stop 103
tctcggaaatgcaaggctcaagaaa

SEQ ID NO: 158133 - DNA, 25 bp, Artificial
  probe
  misc_feature (1)..(25): SEQ ID NO: 7294; WAN024DHL_at; Start 118; Stop 142
gatgccattttctttcaatttcttg

SEQ ID NO: 158134 - DNA, 25 bp, Artificial
  probe
  misc_feature (1)..(25): SEQ ID NO: 7294; WAN024DHL_at; Start 13; Stop 37
gcgccgccactttctgtaaaatgtg

SEQ ID NO: 158135 - DNA, 25 bp, Artificial
  probe
  misc_feature (1)..(25): SEQ ID NO: 7294; WAN024DHL_at; Start 20; Stop 44
cactttctgtaaaatgtgggattca

SEQ ID NO: 158136 - DNA, 25 bp, Artificial
  probe
  misc_feature (1)..(25): SEQ ID NO: 7294; WAN024DHL_at; Start 149; Stop 173
gctgggccgattcctttcaaggcaa

SEQ ID NO: 158137 - DNA, 25 bp, Artificial
  probe
  misc_feature (1)..(25): SEQ ID NO: 7294; WAN024DHL_at; Start 151; Stop 175
tgggccgattcctttcaaggcaagg

SEQ ID NO: 158138 - DNA, 25 bp, Artificial
  probe
  misc_feature (1)..(25): SEQ ID NO: 7294; WAN024DHL_at; Start 29; Stop 53
taaaatgtgggattcaaaacacctc

SEQ ID NO: 158139 - DNA, 25 bp, Artificial
  probe
  misc_feature (1)..(25): SEQ ID NO: 7294; WAN024DHL_at; Start 86; Stop 110
aatgcaaggctcaagaaaaattact

SEQ ID NO: 158140 - DNA, 25 bp, Artificial
  probe
  misc_feature (1)..(25): SEQ ID NO: 7294; WAN024DHL_at; Start 138; Stop 162
tcttgatggtagctgggccgattcc

SEQ ID NO: 158141 - DNA, 25 bp, Artificial
  probe
  misc_feature (1)..(25): SEQ ID NO: 7294; WAN024DHL_at; Start 140; Stop 164
ttgatggtagctgggccgattcctt

SEQ ID NO: 158142 - DNA, 25 bp, Artificial
  probe
  misc_feature (1)..(25): SEQ ID NO: 7294; WAN024DHL_at; Start 100; Stop 124
gaaaaattacttgaacttgatgcca

SEQ ID NO: 158143 - DNA, 25 bp, Artificial
  probe
  misc_feature (1)..(25): SEQ ID NO: 7294; WAN024DHL_at; Start 46; Stop 70
aacacctctaatggctctattgtag

SEQ ID NO: 158144 - DNA, 25 bp, Artificial
  probe
  misc_feature (1)..(25): SEQ ID NO: 7294; WAN024DHL_at; Start 62; Stop 86
ctattgtagcaagtttttctcggaa

SEQ ID NO: 158145 - DNA, 25 bp, Artificial
  probe
  misc_feature (1)..(25): SEQ ID NO: 7294; WAN024DHL_at; Start 70; Stop 94
gcaagtttttctcggaaatgcaagg

SEQ ID NO: 158146 - DNA, 25 bp, Artificial
  probe
  misc_feature (1)..(25): SEQ ID NO: 7294; WAN024DHL_at; Start 166; Stop 190
caaggcaaggagttctttttcagtc

SEQ ID NO: 158147 - DNA, 25 bp, Artificial
  probe
  misc_feature (1)..(25): SEQ ID NO: 7294; WAN024DHL_at; Start 154; Stop 178
gccgattcctttcaaggcaaggagt

SEQ ID NO: 158148 - DNA, 25 bp, Artificial
  probe
  misc_feature (1)..(25): SEQ ID NO: 7294; WAN024DHL_at; Start 81; Stop 105
tcggaaatgcaaggctcaagaaaaa

SEQ ID NO: 158149 - DNA, 25 bp, Artificial
  probe
  misc_feature (1)..(25): SEQ ID NO: 7294; WAN024DHL_at; Start 11; Stop 35
cagcgccgccactttctgtaaaatg

SEQ ID NO: 158150 - DNA, 25 bp, Artificial
  probe
  misc_feature (1)..(25): SEQ ID NO: 7294; WAN024DHL_at; Start 34; Stop 58
tgtgggattcaaaacacctctaatg

SEQ ID NO: 158151 - DNA, 25 bp, Artificial
  probe
  misc_feature (1)..(25): SEQ ID NO: 7294; WAN024DHL_at; Start 16; Stop 40
ccgccactttctgtaaaatgtggga

SEQ ID NO: 158152 - DNA, 25 bp, Artificial
  probe
  misc_feature (1)..(25): SEQ ID NO: 7294; WAN024DHL_at; Start 145; Stop 169
ggtagctgggccgattcctttcaag

SEQ ID NO: 158153 - DNA, 25 bp, Artificial
  probe
  misc_feature (1)..(25): SEQ ID NO: 7294; WAN024DHL_at; Start 59; Stop 83
gctctattgtagcaagtttttctcg

SEQ ID NO: 158154 - DNA, 25 bp, Artificial
  probe
  misc_feature (1)..(25): SEQ ID NO: 7294; WAN024DHL_at; Start 157; Stop 181
gattcctttcaaggcaaggagttct

SEQ ID NO: 158155 - DNA, 25 bp, Artificial
  probe
  misc_feature (1)..(25): SEQ ID NO: 7294; WAN024DHL_at; Start 36; Stop 60
tgggattcaaaacacctctaatggc

SEQ ID NO: 158156 - DNA, 25 bp, Artificial
  probe
  misc_feature (1)..(25): SEQ ID NO: 7294; WAN024DHL_at; Start 50; Stop 74
cctctaatggctctattgtagcaag

SEQ ID NO: 158157 - DNA, 25 bp, Artificial
  probe
  misc_feature (1)..(25): SEQ ID NO: 2822; WAN024DHM_at; Start 207; Stop 231
taattctgtagaagattttgcagca

SEQ ID NO: 158158 - DNA, 25 bp, Artificial
  probe
  misc_feature (1)..(25): SEQ ID NO: 2822; WAN024DHM_at; Start 342; Stop 366
aatcggcccagctaccatcaagaaa

SEQ ID NO: 158159 - DNA, 25 bp, Artificial
  probe
  misc_feature (1)..(25): SEQ ID NO: 2822; WAN024DHM_at; Start 131; Stop 155
gcgcagctggtaaggctgtttctaa

SEQ ID NO: 158160 - DNA, 25 bp, Artificial
  probe
  misc_feature (1)..(25): SEQ ID NO: 2822; WAN024DHM_at; Start 128; Stop 152
caagcgcagctggtaaggctgtttc

SEQ ID NO: 158161 - DNA, 25 bp, Artificial
  probe
  misc_feature (1)..(25): SEQ ID NO: 2822; WAN024DHM_at; Start 175; Stop 199
gaagctaccaaagagcaagctcaaa

SEQ ID NO: 158162 - DNA, 25 bp, Artificial
  probe
  misc_feature (1)..(25): SEQ ID NO: 2822; WAN024DHM_at; Start 114; Stop 138
tgcagaacagtcagcaagcgcagct

SEQ ID NO: 158163 - DNA, 25 bp, Artificial
  probe
  misc_feature (1)..(25): SEQ ID NO: 2822; WAN024DHM_at; Start 269; Stop 293
tctatgatgaaggaatcaagtctgc

SEQ ID NO: 158164 - DNA, 25 bp, Artificial
  probe
  misc_feature (1)..(25): SEQ ID NO: 2822; WAN024DHM_at; Start 277; Stop 301
gaaggaatcaagtctgcttcagatt

SEQ ID NO: 158165 - DNA, 25 bp, Artificial
  probe
  misc_feature (1)..(25): SEQ ID NO: 2822; WAN024DHM_at; Start 235; Stop 259
ttgggtggacttccacttgatcgtg

SEQ ID NO: 158166 - DNA, 25 bp, Artificial
  probe
  misc_feature (1)..(25): SEQ ID NO: 2822; WAN024DHM_at; Start 84; Stop 108
tgtagatgagacaaaaaaagtcgtg

SEQ ID NO: 158167 - DNA, 25 bp, Artificial
  probe
  misc_feature (1)..(25): SEQ ID NO: 2822; WAN024DHM_at; Start 274; Stop 298
gatgaaggaatcaagtctgcttcag

SEQ ID NO: 158168 - DNA, 25 bp, Artificial
  probe
  misc_feature (1)..(25): SEQ ID NO: 2822; WAN024DHM_at; Start 338; Stop 362
aaggaatcggcccagctaccatcaa

SEQ ID NO: 158169 - DNA, 25 bp, Artificial
  probe
  misc_feature (1)..(25): SEQ ID NO: 2822; WAN024DHM_at; Start 266; Stop 290
ctttctatgatgaaggaatcaagtc

SEQ ID NO: 158170 - DNA, 25 bp, Artificial
  probe
  misc_feature (1)..(25): SEQ ID NO: 2822; WAN024DHM_at; Start 190; Stop 214
caagctcaaaaagtagctaattctg

SEQ ID NO: 158171 - DNA, 25 bp, Artificial
  probe
  misc_feature (1)..(25): SEQ ID NO: 2822; WAN024DHM_at; Start 373; Stop 397
gaaaatggcatcaagttcaagtaac

SEQ ID NO: 158172 - DNA, 25 bp, Artificial
  probe
  misc_feature (1)..(25): SEQ ID NO: 2822; WAN024DHM_at; Start 160; Stop 184
gttgaacaagcagtagaagctacca

SEQ ID NO: 158173 - DNA, 25 bp, Artificial
  probe
  misc_feature (1)..(25): SEQ ID NO: 2822; WAN024DHM_at; Start 346; Stop 370
ggcccagctaccatcaagaaattga

SEQ ID NO: 158174 - DNA, 25 bp, Artificial
  probe
  misc_feature (1)..(25): SEQ ID NO: 2822; WAN024DHM_at; Start 376; Stop 400
aatggcatcaagttcaagtaactaa

SEQ ID NO: 158175 - DNA, 25 bp, Artificial
  probe
  misc_feature (1)..(25): SEQ ID NO: 2822; WAN024DHM_at; Start 26; Stop 50
aacaattacgaaatggcctccgtcg

SEQ ID NO: 158176 - DNA, 25 bp, Artificial
  probe
  misc_feature (1)..(25): SEQ ID NO: 2822; WAN024DHM_at; Start 134; Stop 158
cagctggtaaggctgtttctaaaaa

SEQ ID NO: 158177 - DNA, 25 bp, Artificial
  probe
  misc_feature (1)..(25): SEQ ID NO: 2822; WAN024DHM_at; Start 124; Stop 148
tcagcaagcgcagctggtaaggctg

SEQ ID NO: 158178 - DNA, 25 bp, Artificial
  probe
  misc_feature (1)..(25): SEQ ID NO: 2822; WAN024DHM_at; Start 74; Stop 98
tgactaaggttgtagatgagacaaa

SEQ ID NO: 158179 - DNA, 25 bp, Artificial
  probe
  misc_feature (1)..(25): SEQ ID NO: 2822; WAN024DHM_at; Start 183; Stop 207
caaagagcaagctcaaaaagtagct

SEQ ID NO: 158180 - DNA, 25 bp, Artificial
  probe
  misc_feature (1)..(25): SEQ ID NO: 2822; WAN024DHM_at; Start 239; Stop 263
gtggacttccacttgatcgtgccaa

SEQ ID NO: 158181 - DNA, 25 bp, Artificial
  probe
  misc_feature (1)..(25): SEQ ID NO: 2822; WAN024DHM_at; Start 307; Stop 331
aactggactgaaaaagaactccttg

SEQ ID NO: 158182 - DNA, 25 bp, Artificial
  probe
  misc_feature (1)..(25): SEQ ID NO: 2822; WAN024DHM_at; Start 166; Stop 190
caagcagtagaagctaccaaagagc

SEQ ID NO: 158183 - DNA, 25 bp, Artificial
  probe
  misc_feature (1)..(25): SEQ ID NO: 2822; WAN024DHM_at; Start 2; Stop 26
tgtcaaagaaactcaatcgtaaaaa

SEQ ID NO: 158184 - DNA, 25 bp, Artificial
  probe
  misc_feature (1)..(25): SEQ ID NO: 2822; WAN024DHM_at; Start 170; Stop 194
cagtagaagctaccaaagagcaagc

SEQ ID NO: 158185 - DNA, 25 bp, Artificial
  probe
  misc_feature (1)..(25): SEQ ID NO: 2822; WAN024DHM_at; Start 360; Stop 384
caagaaattgaaagaaaatggcatc

SEQ ID NO: 158186 - DNA, 25 bp, Artificial
  probe
  misc_feature (1)..(25): SEQ ID NO: 2822; WAN024DHM_at; Start 118; Stop 142
gaacagtcagcaagcgcagctggta

SEQ ID NO: 158187 - DNA, 25 bp, Artificial
  probe
  misc_feature (1)..(25): SEQ ID NO: 2822; WAN024DHM_at; Start 151; Stop 175
tctaaaaaagttgaacaagcagtag

SEQ ID NO: 158188 - DNA, 25 bp, Artificial
  probe
  misc_feature (1)..(25): SEQ ID NO: 2822; WAN024DHM_at; Start 333; Stop 357
cttgaaaggaatcggcccagctacc

SEQ ID NO: 158189 - DNA, 25 bp, Artificial
  probe
  misc_feature (1)..(25): SEQ ID NO: 2822; WAN024DHM_at; Start 349; Stop 373
ccagctaccatcaagaaattgaaag

SEQ ID NO: 158190 - DNA, 25 bp, Artificial
  probe
  misc_feature (1)..(25): SEQ ID NO: 2822; WAN024DHM_at; Start 27; Stop 51
acaattacgaaatggcctccgtcgc

SEQ ID NO: 158191 - DNA, 25 bp, Artificial
  probe
  misc_feature (1)..(25): SEQ ID NO: 1543; WAN024DHN_at; Start 316; Stop 340
gacggtgagattgatcgcttgtatc

SEQ ID NO: 158192 - DNA, 25 bp, Artificial
  probe
  misc_feature (1)..(25): SEQ ID NO: 1543; WAN024DHN_at; Start 577; Stop 601
tacgagcaaaaattctcaaacaagg

SEQ ID NO: 158193 - DNA, 25 bp, Artificial
  probe
  misc_feature (1)..(25): SEQ ID NO: 1543; WAN024DHN_at; Start 274; Stop 298
ctcttgtgggtagatggttctgact

SEQ ID NO: 158194 - DNA, 25 bp, Artificial
  probe
  misc_feature (1)..(25): SEQ ID NO: 1543; WAN024DHN_at; Start 347; Stop 371
tttcagatccatggccgaaaaaacg

SEQ ID NO: 158195 - DNA, 25 bp, Artificial
  probe
  misc_feature (1)..(25): SEQ ID NO: 1543; WAN024DHN_at; Start 491; Stop 515
tgagcttttctcaatatggcatgaa

SEQ ID NO: 158196 - DNA, 25 bp, Artificial
  probe
  misc_feature (1)..(25): SEQ ID NO: 1543; WAN024DHN_at; Start 23; Stop 47
gggcaacagaattactagaggcaaa

SEQ ID NO: 158197 - DNA, 25 bp, Artificial
  probe
  misc_feature (1)..(25): SEQ ID NO: 1543; WAN024DHN_at; Start 106; Stop 130
ggcaatgataatcccattcatgtgg

SEQ ID NO: 158198 - DNA, 25 bp, Artificial
  probe
  misc_feature (1)..(25): SEQ ID NO: 1543; WAN024DHN_at; Start 37; Stop 61
ctagaggcaaatccccagtatgtgg

SEQ ID NO: 158199 - DNA, 25 bp, Artificial
  probe
  misc_feature (1)..(25): SEQ ID NO: 1543; WAN024DHN_at; Start 139; Stop 163
agtggaaagggtgcctttgtttcag

SEQ ID NO: 158200 - DNA, 25 bp, Artificial
  probe
  misc_feature (1)..(25): SEQ ID NO: 1543; WAN024DHN_at; Start 52; Stop 76
cagtatgtggtcctcaatcccttgg

SEQ ID NO: 158201 - DNA, 25 bp, Artificial
  probe
  misc_feature (1)..(25): SEQ ID NO: 1543; WAN024DHN_at; Start 362; Stop 386
cgaaaaaacgccatgaaaagcgtcg

SEQ ID NO: 158202 - DNA, 25 bp, Artificial
  probe
  misc_feature (1)..(25): SEQ ID NO: 1543; WAN024DHN_at; Start 228; Stop 252
ctacgctttggacaaggtgcttgaa

SEQ ID NO: 158203 - DNA, 25 bp, Artificial
  probe
  misc_feature (1)..(25): SEQ ID NO: 1543; WAN024DHN_at; Start 72; Stop 96
cttggaagccaaggcaaaatggcgg

SEQ ID NO: 158204 - DNA, 25 bp, Artificial
  probe
  misc_feature (1)..(25): SEQ ID NO: 1543; WAN024DHN_at; Start 612; Stop 636
ctaccgagttgaggcagaattttaa

SEQ ID NO: 158205 - DNA, 25 bp, Artificial
  probe
  misc_feature (1)..(25): SEQ ID NO: 1543; WAN024DHN_at; Start 477; Stop 501
tgagtacagtttagtgagcttttct

SEQ ID NO: 158206 - DNA, 25 bp, Artificial
  probe
  misc_feature (1)..(25): SEQ ID NO: 1543; WAN024DHN_at; Start 118; Stop 142
cccattcatgtggaagttggaagtg

SEQ ID NO: 158207 - DNA, 25 bp, Artificial
  probe
  misc_feature (1)..(25): SEQ ID NO: 1543; WAN024DHN_at; Start 376; Stop 400
gaaaagcgtcgtttgacctacaaga

SEQ ID NO: 158208 - DNA, 25 bp, Artificial
  probe
  misc_feature (1)..(25): SEQ ID NO: 1543; WAN024DHN_at; Start 217; Stop 241
tctgttttgagctacgctttggaca

SEQ ID NO: 158209 - DNA, 25 bp, Artificial
  probe
  misc_feature (1)..(25): SEQ ID NO: 1543; WAN024DHN_at; Start 462; Stop 486
taaccgtggcttgtttgagtacagt

SEQ ID NO: 158210 - DNA, 25 bp, Artificial
  probe
  misc_feature (1)..(25): SEQ ID NO: 1543; WAN024DHN_at; Start 341; Stop 365
tgaacttttcagatccatggccgaa

SEQ ID NO: 158211 - DNA, 25 bp, Artificial
  probe
  misc_feature (1)..(25): SEQ ID NO: 1543; WAN024DHN_at; Start 535; Stop 559
gatttgcatgccagtgattttgaag

SEQ ID NO: 158212 - DNA, 25 bp, Artificial
  probe
  misc_feature (1)..(25): SEQ ID NO: 1543; WAN024DHN_at; Start 416; Stop 440
tcaaacgtatcttgcctgaaaatgg

SEQ ID NO: 158213 - DNA, 25 bp, Artificial
  probe
  misc_feature (1)..(25): SEQ ID NO: 1543; WAN024DHN_at; Start 505; Stop 529
tatggcatgaaactcaatggtgtct

SEQ ID NO: 158214 - DNA, 25 bp, Artificial
  probe
  misc_feature (1)..(25): SEQ ID NO: 1543; WAN024DHN_at; Start 60; Stop 84
ggtcctcaatcccttggaagccaag

SEQ ID NO: 158215 - DNA, 25 bp, Artificial
  probe
  misc_feature (1)..(25): SEQ ID NO: 1543; WAN024DHN_at; Start 561; Stop 585
caatgtcatgacagaatacgagcaa

SEQ ID NO: 158216 - DNA, 25 bp, Artificial
  probe
  misc_feature (1)..(25): SEQ ID NO: 1543; WAN024DHN_at; Start 152; Stop 176
cctttgtttcaggtatggccaagca

SEQ ID NO: 158217 - DNA, 25 bp, Artificial
  probe
  misc_feature (1)..(25): SEQ ID NO: 1543; WAN024DHN_at; Start 263; Stop 287
ctaacatcaagctcttgtgggtaga

SEQ ID NO: 158218 - DNA, 25 bp, Artificial
  probe
  misc_feature (1)..(25): SEQ ID NO: 1543; WAN024DHN_at; Start 550; Stop 574
gattttgaaggcaatgtcatgacag

SEQ ID NO: 158219 - DNA, 25 bp, Artificial
  probe
  misc_feature (1)..(25): SEQ ID NO: 1543; WAN024DHN_at; Start 97; Stop 121
gacttgtttggcaatgataatccca

SEQ ID NO: 158220 - DNA, 25 bp, Artificial
  probe
  misc_feature (1)..(25): SEQ ID NO: 1543; WAN024DHN_at; Start 86; Stop 110
caaaatggcgggacttgtttggcaa

SEQ ID NO: 158221 - DNA, 25 bp, Artificial
  probe
  misc_feature (1)..(25): SEQ ID NO: 1543; WAN024DHN_at; Start 328; Stop 352
gatcgcttgtatctgaacttttcag

SEQ ID NO: 158222 - DNA, 25 bp, Artificial
  probe
  misc_feature (1)..(25): SEQ ID NO: 1543; WAN024DHN_at; Start 181; Stop 205
cctgacatcaactatatcgggattg

SEQ ID NO: 158223 - DNA, 25 bp, Artificial
  probe
  misc_feature (1)..(25): SEQ ID NO: 1543; WAN024DHN_at; Start 603; Stop 627
gcaagttatctaccgagttgaggca

SEQ ID NO: 158224 - DNA, 25 bp, Artificial
  probe
  misc_feature (1)..(25): SEQ ID NO: 1543; WAN024DHN_at; Start 310; Stop 334
tttgaagacggtgagattgatcgct

SEQ ID NO: 158225 - DNA, 25 bp, Artificial
  probe
  misc_feature (1)..(25): SEQ ID NO: 4154; WAN024DHO_at; Start 20; Stop 44
tagctatcctgatgggaagcgcatc

SEQ ID NO: 158226 - DNA, 25 bp, Artificial
  probe
  misc_feature (1)..(25): SEQ ID NO: 4154; WAN024DHO_at; Start 672; Stop 696
caagatttagaaaatgtcaatcggg

SEQ ID NO: 158227 - DNA, 25 bp, Artificial
  probe
  misc_feature (1)..(25): SEQ ID NO: 4154; WAN024DHO_at; Start 189; Stop 213
gatatgaatcgtaagcaaatcgtca

SEQ ID NO: 158228 - DNA, 25 bp, Artificial
  probe
  misc_feature (1)..(25): SEQ ID NO: 4154; WAN024DHO_at; Start 412; Stop 436
ccattgtccatggagatgtacgaca

SEQ ID NO: 158229 - DNA, 25 bp, Artificial
  probe
  misc_feature (1)..(25): SEQ ID NO: 4154; WAN024DHO_at; Start 345; Stop 369
cattttatcagtgaagtgatggctg

SEQ ID NO: 158230 - DNA, 25 bp, Artificial
  probe
  misc_feature (1)..(25): SEQ ID NO: 4154; WAN024DHO_at; Start 540; Stop 564
tatatttcagaacatcagtggaagg

SEQ ID NO: 158231 - DNA, 25 bp, Artificial
  probe
  misc_feature (1)..(25): SEQ ID NO: 4154; WAN024DHO_at; Start 719; Stop 743
ccgagacaagtatggaaagagaaga

SEQ ID NO: 158232 - DNA, 25 bp, Artificial
  probe
  misc_feature (1)..(25): SEQ ID NO: 4154; WAN024DHO_at; Start 704; Stop 728
tggtttgcgtcatttccgagacaag

SEQ ID NO: 158233 - DNA, 25 bp, Artificial
  probe
  misc_feature (1)..(25): SEQ ID NO: 4154; WAN024DHO_at; Start 381; Stop 405
actattccaggatttagagaggacc

SEQ ID NO: 158234 - DNA, 25 bp, Artificial
  probe
  misc_feature (1)..(25): SEQ ID NO: 4154; WAN024DHO_at; Start 270; Stop 294
ggctatgccatggaaacacctgtag

SEQ ID NO: 158235 - DNA, 25 bp, Artificial
  probe
  misc_feature (1)..(25): SEQ ID NO: 4154; WAN024DHO_at; Start 486; Stop 510
gattcggttcgcttgaccgatcgca

SEQ ID NO: 158236 - DNA, 25 bp, Artificial
  probe
  misc_feature (1)..(25): SEQ ID NO: 4154; WAN024DHO_at; Start 109; Stop 133
tattatggagtcgtcgtttggcaga

SEQ ID NO: 158237 - DNA, 25 bp, Artificial
  probe
  misc_feature (1)..(25): SEQ ID NO: 4154; WAN024DHO_at; Start 240; Stop 264
cgtccgttgatgacacaattgagtc

SEQ ID NO: 158238 - DNA, 25 bp, Artificial
  probe
  misc_feature (1)..(25): SEQ ID NO: 4154; WAN024DHO_at; Start 225; Stop 249
cgtcttcatcgctcacgtccgttga

SEQ ID NO: 158239 - DNA, 25 bp, Artificial
  probe
  misc_feature (1)..(25): SEQ ID NO: 4154; WAN024DHO_at; Start 578; Stop 602
ctacggttacaagtacaatcaaacg

SEQ ID NO: 158240 - DNA, 25 bp, Artificial
  probe
  misc_feature (1)..(25): SEQ ID NO: 4154; WAN024DHO_at; Start 474; Stop 498
ttagtagattgggattcggttcgct

SEQ ID NO: 158241 - DNA, 25 bp, Artificial
  probe
  misc_feature (1)..(25): SEQ ID NO: 4154; WAN024DHO_at; Start 130; Stop 154
cagatgggcgtgatatgtgtgctca

SEQ ID NO: 158242 - DNA, 25 bp, Artificial
  probe
  misc_feature (1)..(25): SEQ ID NO: 4154; WAN024DHO_at; Start 430; Stop 454
tacgacatagtaattggattgagac

SEQ ID NO: 158243 - DNA, 25 bp, Artificial
  probe
  misc_feature (1)..(25): SEQ ID NO: 4154; WAN024DHO_at; Start 160; Stop 184
ggttgacaggcaagatattgacccc

SEQ ID NO: 158244 - DNA, 25 bp, Artificial
  probe
  misc_feature (1)..(25): SEQ ID NO: 4154; WAN024DHO_at; Start 319; Stop 343
cggctccagatgctttgcgtaaaaa

SEQ ID NO: 158245 - DNA, 25 bp, Artificial
  probe
  misc_feature (1)..(25): SEQ ID NO: 4154; WAN024DHO_at; Start 255; Stop 279
caattgagtcgtttgggctatgcca

SEQ ID NO: 158246 - DNA, 25 bp, Artificial
  probe
  misc_feature (1)..(25): SEQ ID NO: 4154; WAN024DHO_at; Start 690; Stop 714
aatcgggagattcatggtttgcgtc

SEQ ID NO: 158247 - DNA, 25 bp, Artificial
  probe
  misc_feature (1)..(25): SEQ ID NO: 4154; WAN024DHO_at; Start 502; Stop 526
ccgatcgcatgtttgatgtggccca

SEQ ID NO: 158248 - DNA, 25 bp, Artificial
  probe
  misc_feature (1)..(25): SEQ ID NO: 4154; WAN024DHO_at; Start 4; Stop 28
gcaaggcttatatgggtagctatcc

SEQ ID NO: 158249 - DNA, 25 bp, Artificial
  probe
  misc_feature (1)..(25): SEQ ID NO: 4154; WAN024DHO_at; Start 208; Stop 232
tcgtcaatattttaacccgtcttca

SEQ ID NO: 158250 - DNA, 25 bp, Artificial
  probe
  misc_feature (1)..(25): SEQ ID NO: 4154; WAN024DHO_at; Start 145; Stop 169
tgtgtgctcaagaatggttgacagg

SEQ ID NO: 158251 - DNA, 25 bp, Artificial
  probe
  misc_feature (1)..(25): SEQ ID NO: 4154; WAN024DHO_at; Start 516; Stop 540
gatgtggcccatatgctctgccatt

SEQ ID NO: 158252 - DNA, 25 bp, Artificial
  probe
  misc_feature (1)..(25): SEQ ID NO: 4154; WAN024DHO_at; Start 552; Stop 576
catcagtggaaggaatggttgacct

SEQ ID NO: 158253 - DNA, 25 bp, Artificial
  probe
  misc_feature (1)..(25): SEQ ID NO: 4154; WAN024DHO_at; Start 43; Stop 67
tctttgtaaaaatgaacacctctcc

SEQ ID NO: 158254 - DNA, 25 bp, Artificial
  probe
  misc_feature (1)..(25): SEQ ID NO: 4154; WAN024DHO_at; Start 444; Stop 468
tggattgagacagatagtggcttga

SEQ ID NO: 158255 - DNA, 25 bp, Artificial
  probe
  misc_feature (1)..(25): SEQ ID NO: 4154; WAN024DHO_at; Start 80; Stop 104
tctagctagagaacaaattgctcca

SEQ ID NO: 158256 - DNA, 25 bp, Artificial
  probe
  misc_feature (1)..(25): SEQ ID NO: 4154; WAN024DHO_at; Start 395; Stop 419
tagagaggaccatgcgaccattgtc

SEQ ID NO: 158257 - DNA, 25 bp, Artificial
  probe
  misc_feature (1)..(25): SEQ ID NO: 4154; WAN024DHO_at; Start 67; Stop 91
caatcctacctggtctagctagaga

SEQ ID NO: 158258 - DNA, 25 bp, Artificial
  probe
  misc_feature (1)..(25): SEQ ID NO: 4154; WAN024DHO_at; Start 564; Stop 588
gaatggttgacctactacggttaca

SEQ ID NO: 158259 - DNA, 25 bp, Artificial
  probe
  misc_feature (1)..(25): SEQ ID NO: 2305; WAN024DHP_at; Start 310; Stop 334
gaagtcagcagaggaatttccctgt

SEQ ID NO: 158260 - DNA, 25 bp, Artificial
  probe
  misc_feature (1)..(25): SEQ ID NO: 2305; WAN024DHP_at; Start 254; Stop 278
tggtttatattcatttcttcgctgt

SEQ ID NO: 158261 - DNA, 25 bp, Artificial
  probe
  misc_feature (1)..(25): SEQ ID NO: 2305; WAN024DHP_at; Start 66; Stop 90
agttccttatacgattaaccatggg

SEQ ID NO: 158262 - DNA, 25 bp, Artificial
  probe
  misc_feature (1)..(25): SEQ ID NO: 2305; WAN024DHP_at; Start 174; Stop 198
aatgatttcttttgggatgttaagc

SEQ ID NO: 158263 - DNA, 25 bp, Artificial
  probe
  misc_feature (1)..(25): SEQ ID NO: 2305; WAN024DHP_at; Start 384; Stop 408
tttcagaggacttcttcaaggtgcg

SEQ ID NO: 158264 - DNA, 25 bp, Artificial
  probe
  misc_feature (1)..(25): SEQ ID NO: 2305; WAN024DHP_at; Start 234; Stop 258
tctaagtgtacttgagacgctggtt

SEQ ID NO: 158265 - DNA, 25 bp, Artificial
  probe
  misc_feature (1)..(25): SEQ ID NO: 2305; WAN024DHP_at; Start 186; Stop 210
tgggatgttaagcaagaaacaactt

SEQ ID NO: 158266 - DNA, 25 bp, Artificial
  probe
  misc_feature (1)..(25): SEQ ID NO: 2305; WAN024DHP_at; Start 143; Stop 167
cgctgagtgttgcttatgctagaaa

SEQ ID NO: 158267 - DNA, 25 bp, Artificial
  probe
  misc_feature (1)..(25): SEQ ID NO: 2305; WAN024DHP_at; Start 465; Stop 489
gcatggaccttctaatgtcccttcg

SEQ ID NO: 158268 - DNA, 25 bp, Artificial
  probe
  misc_feature (1)..(25): SEQ ID NO: 2305; WAN024DHP_at; Start 269; Stop 293
tcttcgctgtttcttctggctcagg

SEQ ID NO: 158269 - DNA, 25 bp, Artificial
  probe
  misc_feature (1)..(25): SEQ ID NO: 2305; WAN024DHP_at; Start 449; Stop 473
ctctcttttctttcatgcatggacc

SEQ ID NO: 158270 - DNA, 25 bp, Artificial
  probe
  misc_feature (1)..(25): SEQ ID NO: 2305; WAN024DHP_at; Start 428; Stop 452
tagggcttgtgctaacttcctctct

SEQ ID NO: 158271 - DNA, 25 bp, Artificial
  probe
  misc_feature (1)..(25): SEQ ID NO: 2305; WAN024DHP_at; Start 298; Stop 322
caacacttggcggaagtcagcagag

SEQ ID NO: 158272 - DNA, 25 bp, Artificial
  probe
  misc_feature (1)..(25): SEQ ID NO: 2305; WAN024DHP_at; Start 125; Stop 149
taagtcttcttgtaacctcgctgag

SEQ ID NO: 158273 - DNA, 25 bp, Artificial
  probe
  misc_feature (1)..(25): SEQ ID NO: 2305; WAN024DHP_at; Start 242; Stop 266
tacttgagacgctggtttatattca

SEQ ID NO: 158274 - DNA, 25 bp, Artificial
  probe
  misc_feature (1)..(25): SEQ ID NO: 2305; WAN024DHP_at; Start 548; Stop 572
acctatgggtttctactctagtcca

SEQ ID NO: 158275 - DNA, 25 bp, Artificial
  probe
  misc_feature (1)..(25): SEQ ID NO: 2305; WAN024DHP_at; Start 137; Stop 161
taacctcgctgagtgttgcttatgc

SEQ ID NO: 158276 - DNA, 25 bp, Artificial
  probe
  misc_feature (1)..(25): SEQ ID NO: 2305; WAN024DHP_at; Start 201; Stop 225
gaaacaacttttgcttttcattgca

SEQ ID NO: 158277 - DNA, 25 bp, Artificial
  probe
  misc_feature (1)..(25): SEQ ID NO: 2305; WAN024DHP_at; Start 219; Stop 243
cattgcaatctttcttctaagtgta

SEQ ID NO: 158278 - DNA, 25 bp, Artificial
  probe
  misc_feature (1)..(25): SEQ ID NO: 2305; WAN024DHP_at; Start 544; Stop 568
caaaacctatgggtttctactctag

SEQ ID NO: 158279 - DNA, 25 bp, Artificial
  probe
  misc_feature (1)..(25): SEQ ID NO: 2305; WAN024DHP_at; Start 370; Stop 394
caggaggaactcattttcagaggac

SEQ ID NO: 158280 - DNA, 25 bp, Artificial
  probe
  misc_feature (1)..(25): SEQ ID NO: 2305; WAN024DHP_at; Start 348; Stop 372
tacctcagtttttggccccatccag

SEQ ID NO: 158281 - DNA, 25 bp, Artificial
  probe
  misc_feature (1)..(25): SEQ ID NO: 2305; WAN024DHP_at; Start 319; Stop 343
agaggaatttccctgtctttgattt

SEQ ID NO: 158282 - DNA, 25 bp, Artificial
  probe
  misc_feature (1)..(25): SEQ ID NO: 2305; WAN024DHP_at; Start 15; Stop 39
taaatttcatgccttgtgttttgga

SEQ ID NO: 158283 - DNA, 25 bp, Artificial
  probe
  misc_feature (1)..(25): SEQ ID NO: 2305; WAN024DHP_at; Start 293; Stop 317
gggtccaacacttggcggaagtcag

SEQ ID NO: 158284 - DNA, 25 bp, Artificial
  probe
  misc_feature (1)..(25): SEQ ID NO: 2305; WAN024DHP_at; Start 392; Stop 416
gacttcttcaaggtgcggtttttga

SEQ ID NO: 158285 - DNA, 25 bp, Artificial
  probe
  misc_feature (1)..(25): SEQ ID NO: 2305; WAN024DHP_at; Start 54; Stop 78
aattgtcattacagttccttatacg

SEQ ID NO: 158286 - DNA, 25 bp, Artificial
  probe
  misc_feature (1)..(25): SEQ ID NO: 2305; WAN024DHP_at; Start 3; Stop 27
ggagttttttgataaatttcatgcc

SEQ ID NO: 158287 - DNA, 25 bp, Artificial
  probe
  misc_feature (1)..(25): SEQ ID NO: 2305; WAN024DHP_at; Start 400; Stop 424
caaggtgcggtttttgacaattctt

SEQ ID NO: 158288 - DNA, 25 bp, Artificial
  probe
  misc_feature (1)..(25): SEQ ID NO: 2305; WAN024DHP_at; Start 417; Stop 441
caattcttggttagggcttgtgcta

SEQ ID NO: 158289 - DNA, 25 bp, Artificial
  probe
  misc_feature (1)..(25): SEQ ID NO: 2305; WAN024DHP_at; Start 22; Stop 46
catgccttgtgttttggatttttag

SEQ ID NO: 158290 - DNA, 25 bp, Artificial
  probe
  misc_feature (1)..(25): SEQ ID NO: 2305; WAN024DHP_at; Start 154; Stop 178
gcttatgctagaaagtttgaaatga

SEQ ID NO: 158291 - DNA, 25 bp, Artificial
  probe
  misc_feature (1)..(25): SEQ ID NO: 2305; WAN024DHP_at; Start 95; Stop 119
tttttcaaaatgaatctgcattgat

SEQ ID NO: 158292 - DNA, 25 bp, Artificial
  probe
  misc_feature (1)..(25): SEQ ID NO: 2305; WAN024DHP_at; Start 357; Stop 381
ttttggccccatccaggaggaactc

SEQ ID NO: 158293 - DNA, 25 bp, Artificial
  probe
  misc_feature (1)..(25): SEQ ID NO: 6836; WAN024DHQ_at; Start 125; Stop 149
caaaagcacttgaactacctattca

SEQ ID NO: 158294 - DNA, 25 bp, Artificial
  probe
  misc_feature (1)..(25): SEQ ID NO: 6836; WAN024DHQ_at; Start 122; Stop 146
tcacaaaagcacttgaactacctat

SEQ ID NO: 158295 - DNA, 25 bp, Artificial
  probe
  misc_feature (1)..(25): SEQ ID NO: 6836; WAN024DHQ_at; Start 126; Stop 150
aaaagcacttgaactacctattcag

SEQ ID NO: 158296 - DNA, 25 bp, Artificial
  probe
  misc_feature (1)..(25): SEQ ID NO: 6836; WAN024DHQ_at; Start 80; Stop 104
gggaagaactcttacatgaaacaat

SEQ ID NO: 158297 - DNA, 25 bp, Artificial
  probe
  misc_feature (1)..(25): SEQ ID NO: 6836; WAN024DHQ_at; Start 123; Stop 147
cacaaaagcacttgaactacctatt

SEQ ID NO: 158298 - DNA, 25 bp, Artificial
  probe
  misc_feature (1)..(25): SEQ ID NO: 6836; WAN024DHQ_at; Start 130; Stop 154
gcacttgaactacctattcagctat

SEQ ID NO: 158299 - DNA, 25 bp, Artificial
  probe
  misc_feature (1)..(25): SEQ ID NO: 6836; WAN024DHQ_at; Start 131; Stop 155
cacttgaactacctattcagctata

SEQ ID NO: 158300 - DNA, 25 bp, Artificial
  probe
  misc_feature (1)..(25): SEQ ID NO: 6836; WAN024DHQ_at; Start 127; Stop 151
aaagcacttgaactacctattcagc

SEQ ID NO: 158301 - DNA, 25 bp, Artificial
  probe
  misc_feature (1)..(25): SEQ ID NO: 6836; WAN024DHQ_at; Start 118; Stop 142
aaaatcacaaaagcacttgaactac

SEQ ID NO: 158302 - DNA, 25 bp, Artificial
  probe
  misc_feature (1)..(25): SEQ ID NO: 6836; WAN024DHQ_at; Start 119; Stop 143
aaatcacaaaagcacttgaactacc

SEQ ID NO: 158303 - DNA, 25 bp, Artificial
  probe
  misc_feature (1)..(25): SEQ ID NO: 6836; WAN024DHQ_at; Start 77; Stop 101
ggtgggaagaactcttacatgaaac

SEQ ID NO: 158304 - DNA, 25 bp, Artificial
  probe
  misc_feature (1)..(25): SEQ ID NO: 6836; WAN024DHQ_at; Start 85; Stop 109
gaactcttacatgaaacaattttaa

SEQ ID NO: 158305 - DNA, 25 bp, Artificial
  probe
  misc_feature (1)..(25): SEQ ID NO: 6836; WAN024DHQ_at; Start 81; Stop 105
ggaagaactcttacatgaaacaatt

SEQ ID NO: 158306 - DNA, 25 bp, Artificial
  probe
  misc_feature (1)..(25): SEQ ID NO: 6836; WAN024DHQ_at; Start 113; Stop 137
aatttaaaatcacaaaagcacttga

SEQ ID NO: 158307 - DNA, 25 bp, Artificial
  probe
  misc_feature (1)..(25): SEQ ID NO: 6836; WAN024DHQ_at; Start 79; Stop 103
tgggaagaactcttacatgaaacaa

SEQ ID NO: 158308 - DNA, 25 bp, Artificial
  probe
  misc_feature (1)..(25): SEQ ID NO: 6836; WAN024DHQ_at; Start 75; Stop 99
atggtgggaagaactcttacatgaa

SEQ ID NO: 158309 - DNA, 25 bp, Artificial
  probe
  misc_feature (1)..(25): SEQ ID NO: 6836; WAN024DHQ_at; Start 112; Stop 136
aaatttaaaatcacaaaagcacttg

SEQ ID NO: 158310 - DNA, 25 bp, Artificial
  probe
  misc_feature (1)..(25): SEQ ID NO: 6836; WAN024DHQ_at; Start 124; Stop 148
acaaaagcacttgaactacctattc

SEQ ID NO: 158311 - DNA, 25 bp, Artificial
  probe
  misc_feature (1)..(25): SEQ ID NO: 6836; WAN024DHQ_at; Start 121; Stop 145
atcacaaaagcacttgaactaccta

SEQ ID NO: 158312 - DNA, 25 bp, Artificial
  probe
  misc_feature (1)..(25): SEQ ID NO: 6836; WAN024DHQ_at; Start 88; Stop 112
ctcttacatgaaacaattttaagta

SEQ ID NO: 158313 - DNA, 25 bp, Artificial
  probe
  misc_feature (1)..(25): SEQ ID NO: 6836; WAN024DHQ_at; Start 120; Stop 144
aatcacaaaagcacttgaactacct

SEQ ID NO: 158314 - DNA, 25 bp, Artificial
  probe
  misc_feature (1)..(25): SEQ ID NO: 6836; WAN024DHQ_at; Start 78; Stop 102
gtgggaagaactcttacatgaaaca

SEQ ID NO: 158315 - DNA, 25 bp, Artificial
  probe
  misc_feature (1)..(25): SEQ ID NO: 6836; WAN024DHQ_at; Start 117; Stop 141
taaaatcacaaaagcacttgaacta

SEQ ID NO: 158316 - DNA, 25 bp, Artificial
  probe
  misc_feature (1)..(25): SEQ ID NO: 6836; WAN024DHQ_at; Start 82; Stop 106
gaagaactcttacatgaaacaattt

SEQ ID NO: 158317 - DNA, 25 bp, Artificial
  probe
  misc_feature (1)..(25): SEQ ID NO: 6836; WAN024DHQ_at; Start 116; Stop 140
ttaaaatcacaaaagcacttgaact

SEQ ID NO: 158318 - DNA, 25 bp, Artificial
  probe
  misc_feature (1)..(25): SEQ ID NO: 6836; WAN024DHQ_at; Start 73; Stop 97
ggatggtgggaagaactcttacatg

SEQ ID NO: 158319 - DNA, 25 bp, Artificial
  probe
  misc_feature (1)..(25): SEQ ID NO: 6836; WAN024DHQ_at; Start 74; Stop 98
gatggtgggaagaactcttacatga

SEQ ID NO: 158320 - DNA, 25 bp, Artificial
  probe
  misc_feature (1)..(25): SEQ ID NO: 6836; WAN024DHQ_at; Start 86; Stop 110
aactcttacatgaaacaattttaag

SEQ ID NO: 158321 - DNA, 25 bp, Artificial
  probe
  misc_feature (1)..(25): SEQ ID NO: 6836; WAN024DHQ_at; Start 128; Stop 152
aagcacttgaactacctattcagct

SEQ ID NO: 158322 - DNA, 25 bp, Artificial
  probe
  misc_feature (1)..(25): SEQ ID NO: 6836; WAN024DHQ_at; Start 72; Stop 96
aggatggtgggaagaactcttacat

SEQ ID NO: 158323 - DNA, 25 bp, Artificial
  probe
  misc_feature (1)..(25): SEQ ID NO: 6836; WAN024DHQ_at; Start 76; Stop 100
tggtgggaagaactcttacatgaaa

SEQ ID NO: 158324 - DNA, 25 bp, Artificial
  probe
  misc_feature (1)..(25): SEQ ID NO: 6836; WAN024DHQ_at; Start 115; Stop 139
tttaaaatcacaaaagcacttgaac

SEQ ID NO: 158325 - DNA, 25 bp, Artificial
  probe
  misc_feature (1)..(25): SEQ ID NO: 6836; WAN024DHQ_at; Start 129; Stop 153
agcacttgaactacctattcagcta

SEQ ID NO: 158326 - DNA, 25 bp, Artificial
  probe
  misc_feature (1)..(25): SEQ ID NO: 6836; WAN024DHQ_at; Start 132; Stop 156
acttgaactacctattcagctataa

SEQ ID NO: 158327 - DNA, 25 bp, Artificial
  probe
  misc_feature (1)..(25): SEQ ID NO: 2314; WAN024DHR_at; Start 99; Stop 123
cattaatagatatgctcattacatc

SEQ ID NO: 158328 - DNA, 25 bp, Artificial
  probe
  misc_feature (1)..(25): SEQ ID NO: 2314; WAN024DHR_at; Start 107; Stop 131
gatatgctcattacatcacataact

SEQ ID NO: 158329 - DNA, 25 bp, Artificial
  probe
  misc_feature (1)..(25): SEQ ID NO: 2314; WAN024DHR_at; Start 98; Stop 122
acattaatagatatgctcattacat

SEQ ID NO: 158330 - DNA, 25 bp, Artificial
  probe
  misc_feature (1)..(25): SEQ ID NO: 2314; WAN024DHR_at; Start 77; Stop 101
tgtgggaagatttattatataacat

SEQ ID NO: 158331 - DNA, 25 bp, Artificial
  probe
  misc_feature (1)..(25): SEQ ID NO: 2314; WAN024DHR_at; Start 91; Stop 115
ttatataacattaatagatatgctc

SEQ ID NO: 158332 - DNA, 25 bp, Artificial
  probe
  misc_feature (1)..(25): SEQ ID NO: 2314; WAN024DHR_at; Start 81; Stop 105
ggaagatttattatataacattaat

SEQ ID NO: 158333 - DNA, 25 bp, Artificial
  probe
  misc_feature (1)..(25): SEQ ID NO: 2314; WAN024DHR_at; Start 100; Stop 124
attaatagatatgctcattacatca

SEQ ID NO: 158334 - DNA, 25 bp, Artificial
  probe
  misc_feature (1)..(25): SEQ ID NO: 2314; WAN024DHR_at; Start 109; Stop 133
tatgctcattacatcacataactaa

SEQ ID NO: 158335 - DNA, 25 bp, Artificial
  probe
  misc_feature (1)..(25): SEQ ID NO: 2314; WAN024DHR_at; Start 94; Stop 118
tataacattaatagatatgctcatt

SEQ ID NO: 158336 - DNA, 25 bp, Artificial
  probe
  misc_feature (1)..(25): SEQ ID NO: 2314; WAN024DHR_at; Start 95; Stop 119
ataacattaatagatatgctcatta

SEQ ID NO: 158337 - DNA, 25 bp, Artificial
  probe
  misc_feature (1)..(25): SEQ ID NO: 2314; WAN024DHR_at; Start 101; Stop 125
ttaatagatatgctcattacatcac

SEQ ID NO: 158338 - DNA, 25 bp, Artificial
  probe
  misc_feature (1)..(25): SEQ ID NO: 2314; WAN024DHR_at; Start 103; Stop 127
aatagatatgctcattacatcacat

SEQ ID NO: 158339 - DNA, 25 bp, Artificial
  probe
  misc_feature (1)..(25): SEQ ID NO: 2314; WAN024DHR_at; Start 80; Stop 104
gggaagatttattatataacattaa

SEQ ID NO: 158340 - DNA, 25 bp, Artificial
  probe
  misc_feature (1)..(25): SEQ ID NO: 2314; WAN024DHR_at; Start 105; Stop 129
tagatatgctcattacatcacataa

SEQ ID NO: 158341 - DNA, 25 bp, Artificial
  probe
  misc_feature (1)..(25): SEQ ID NO: 2314; WAN024DHR_at; Start 106; Stop 130
agatatgctcattacatcacataac

SEQ ID NO: 158342 - DNA, 25 bp, Artificial
  probe
  misc_feature (1)..(25): SEQ ID NO: 2314; WAN024DHR_at; Start 92; Stop 116
tatataacattaatagatatgctca

SEQ ID NO: 158343 - DNA, 25 bp, Artificial
  probe
  misc_feature (1)..(25): SEQ ID NO: 2314; WAN024DHR_at; Start 93; Stop 117
atataacattaatagatatgctcat

SEQ ID NO: 158344 - DNA, 25 bp, Artificial
  probe
  misc_feature (1)..(25): SEQ ID NO: 2314; WAN024DHR_at; Start 79; Stop 103
tgggaagatttattatataacatta

SEQ ID NO: 158345 - DNA, 25 bp, Artificial
  probe
  misc_feature (1)..(25): SEQ ID NO: 2314; WAN024DHR_at; Start 90; Stop 114
attatataacattaatagatatgct

SEQ ID NO: 158346 - DNA, 25 bp, Artificial
  probe
  misc_feature (1)..(25): SEQ ID NO: 2314; WAN024DHR_at; Start 96; Stop 120
taacattaatagatatgctcattac

SEQ ID NO: 158347 - DNA, 25 bp, Artificial
  probe
  misc_feature (1)..(25): SEQ ID NO: 2314; WAN024DHR_at; Start 89; Stop 113
tattatataacattaatagatatgc

SEQ ID NO: 158348 - DNA, 25 bp, Artificial
  probe
  misc_feature (1)..(25): SEQ ID NO: 2314; WAN024DHR_at; Start 108; Stop 132
atatgctcattacatcacataacta

SEQ ID NO: 158349 - DNA, 25 bp, Artificial
  probe
  misc_feature (1)..(25): SEQ ID NO: 2314; WAN024DHR_at; Start 97; Stop 121
aacattaatagatatgctcattaca

SEQ ID NO: 158350 - DNA, 25 bp, Artificial
  probe
  misc_feature (1)..(25): SEQ ID NO: 2314; WAN024DHR_at; Start 104; Stop 128
atagatatgctcattacatcacata

SEQ ID NO: 158351 - DNA, 25 bp, Artificial
  probe
  misc_feature (1)..(25): SEQ ID NO: 2314; WAN024DHR_at; Start 102; Stop 126
taatagatatgctcattacatcaca

SEQ ID NO: 158352 - DNA, 25 bp, Artificial
  probe
  misc_feature (1)..(25): SEQ ID NO: 2314; WAN024DHR_at; Start 110; Stop 134
atgctcattacatcacataactaat

SEQ ID NO: 158353 - DNA, 25 bp, Artificial
  probe
  misc_feature (1)..(25): SEQ ID NO: 2314; WAN024DHR_at; Start 78; Stop 102
gtgggaagatttattatataacatt

SEQ ID NO: 158354 - DNA, 25 bp, Artificial
  probe
  misc_feature (1)..(25): SEQ ID NO: 2314; WAN024DHR_at; Start 76; Stop 100
ttgtgggaagatttattatataaca

SEQ ID NO: 158355 - DNA, 25 bp, Artificial
  probe
  misc_feature (1)..(25): SEQ ID NO: 6425; WAN024DHS_at; Start 1257; Stop 1281
ggaaagtcatcccaataccaatcta

SEQ ID NO: 158356 - DNA, 25 bp, Artificial
  probe
  misc_feature (1)..(25): SEQ ID NO: 6425; WAN024DHS_at; Start 1245; Stop 1269
tatgaaaattgtggaaagtcatccc

SEQ ID NO: 158357 - DNA, 25 bp, Artificial
  probe
  misc_feature (1)..(25): SEQ ID NO: 6425; WAN024DHS_at; Start 525; Stop 549
gatgcaaagtctatcttaccttgaa

SEQ ID NO: 158358 - DNA, 25 bp, Artificial
  probe
  misc_feature (1)..(25): SEQ ID NO: 6425; WAN024DHS_at; Start 298; Stop 322
tacagaggtgtttcctattttgtgc

SEQ ID NO: 158359 - DNA, 25 bp, Artificial
  probe
  misc_feature (1)..(25): SEQ ID NO: 6425; WAN024DHS_at; Start 822; Stop 846
gataaaagagatctacgactcggtc

SEQ ID NO: 158360 - DNA, 25 bp, Artificial
  probe
  misc_feature (1)..(25): SEQ ID NO: 6425; WAN024DHS_at; Start 265; Stop 289
ggtctcttcccaatgatattagtag

SEQ ID NO: 158361 - DNA, 25 bp, Artificial
  probe
  misc_feature (1)..(25): SEQ ID NO: 6425; WAN024DHS_at; Start 741; Stop 765
ggaaattcggagttttcgccatgac

SEQ ID NO: 158362 - DNA, 25 bp, Artificial
  probe
  misc_feature (1)..(25): SEQ ID NO: 6425; WAN024DHS_at; Start 63; Stop 87
ctttaaagtagatggaattggtctc

SEQ ID NO: 158363 - DNA, 25 bp, Artificial
  probe
  misc_feature (1)..(25): SEQ ID NO: 6425; WAN024DHS_at; Start 76; Stop 100
ggaattggtctcactttcgatagaa

SEQ ID NO: 158364 - DNA, 25 bp, Artificial
  probe
  misc_feature (1)..(25): SEQ ID NO: 6425; WAN024DHS_at; Start 921; Stop 945
cctcaagagtctcctagctggaaaa

SEQ ID NO: 158365 - DNA, 25 bp, Artificial
  probe
  misc_feature (1)..(25): SEQ ID NO: 6425; WAN024DHS_at; Start 1294; Stop 1318
caaaatcaagtctttcgtcaggtac

SEQ ID NO: 158366 - DNA, 25 bp, Artificial
  probe
  misc_feature (1)..(25): SEQ ID NO: 6425; WAN024DHS_at; Start 879; Stop 903
taaatatgacctgggcagattggtg

SEQ ID NO: 158367 - DNA, 25 bp, Artificial
  probe
  misc_feature (1)..(25): SEQ ID NO: 6425; WAN024DHS_at; Start 1312; Stop 1336
caggtacttactgtgatacatgcag

SEQ ID NO: 158368 - DNA, 25 bp, Artificial
  probe
  misc_feature (1)..(25): SEQ ID NO: 6425; WAN024DHS_at; Start 27; Stop 51
tgcacttgttattaatggactagaa

SEQ ID NO: 158369 - DNA, 25 bp, Artificial
  probe
  misc_feature (1)..(25): SEQ ID NO: 6425; WAN024DHS_at; Start 686; Stop 710
ccttgcgctacagagatatggaacg

SEQ ID NO: 158370 - DNA, 25 bp, Artificial
  probe
  misc_feature (1)..(25): SEQ ID NO: 6425; WAN024DHS_at; Start 676; Stop 700
caagagcagaccttgcgctacagag

SEQ ID NO: 158371 - DNA, 25 bp, Artificial
  probe
  misc_feature (1)..(25): SEQ ID NO: 6425; WAN024DHS_at; Start 221; Stop 245
tcttattgttaagagggcttcctaa

SEQ ID NO: 158372 - DNA, 25 bp, Artificial
  probe
  misc_feature (1)..(25): SEQ ID NO: 6425; WAN024DHS_at; Start 702; Stop 726
tatggaacgctatagtcggcatata

SEQ ID NO: 158373 - DNA, 25 bp, Artificial
  probe
  misc_feature (1)..(25): SEQ ID NO: 6425; WAN024DHS_at; Start 1077; Stop 1101
tgcagaggccagtcaacctcatgtt

SEQ ID NO: 158374 - DNA, 25 bp, Artificial
  probe
  misc_feature (1)..(25): SEQ ID NO: 6425; WAN024DHS_at; Start 853; Stop 877
gattccagtcagaaattgcaggaca

SEQ ID NO: 158375 - DNA, 25 bp, Artificial
  probe
  misc_feature (1)..(25): SEQ ID NO: 6425; WAN024DHS_at; Start 661; Stop 685
caggaggaactgaaccaagagcaga

SEQ ID NO: 158376 - DNA, 25 bp, Artificial
  probe
  misc_feature (1)..(25): SEQ ID NO: 6425; WAN024DHS_at; Start 436; Stop 460
ttcactagattgagaagggagtttc

SEQ ID NO: 158377 - DNA, 25 bp, Artificial
  probe
  misc_feature (1)..(25): SEQ ID NO: 6425; WAN024DHS_at; Start 780; Stop 804
aaccagcttacgtttgggcattgaa

SEQ ID NO: 158378 - DNA, 25 bp, Artificial
  probe
  misc_feature (1)..(25): SEQ ID NO: 6425; WAN024DHS_at; Start 281; Stop 305
tattagtagagctcttttacagagg

SEQ ID NO: 158379 - DNA, 25 bp, Artificial
  probe
  misc_feature (1)..(25): SEQ ID NO: 6425; WAN024DHS_at; Start 559; Stop 583
ggtattcaatcaacgactgttcgcc

SEQ ID NO: 158380 - DNA, 25 bp, Artificial
  probe
  misc_feature (1)..(25): SEQ ID NO: 6425; WAN024DHS_at; Start 894; Stop 918
cagattggtgaatattcgtgaccgt

SEQ ID NO: 158381 - DNA, 25 bp, Artificial
  probe
  misc_feature (1)..(25): SEQ ID NO: 6425; WAN024DHS_at; Start 835; Stop 859
tacgactcggtcttaagggattcca

SEQ ID NO: 158382 - DNA, 25 bp, Artificial
  probe
  misc_feature (1)..(25): SEQ ID NO: 6425; WAN024DHS_at; Start 1280; Stop 1304
taaatactacctgccaaaatcaagt

SEQ ID NO: 158383 - DNA, 25 bp, Artificial
  probe
  misc_feature (1)..(25): SEQ ID NO: 6425; WAN024DHS_at; Start 906; Stop 930
tattcgtgaccgtgccctcaagagt

SEQ ID NO: 158384 - DNA, 25 bp, Artificial
  probe
  misc_feature (1)..(25): SEQ ID NO: 6425; WAN024DHS_at; Start 762; Stop 786
tgactacactaacctcttaaccagc

SEQ ID NO: 158385 - DNA, 25 bp, Artificial
  probe
  misc_feature (1)..(25): SEQ ID NO: 6425; WAN024DHS_at; Start 452; Stop 476
gggagtttctagatacaggttttca

SEQ ID NO: 158386 - DNA, 25 bp, Artificial
  probe
  misc_feature (1)..(25): SEQ ID NO: 6425; WAN024DHS_at; Start 126; Stop 150
tcttctagggatcatttttacgact

SEQ ID NO: 158387 - DNA, 25 bp, Artificial
  probe
  misc_feature (1)..(25): SEQ ID NO: 6425; WAN024DHS_at; Start 485; Stop 509
ttactaagattaactgggcaatggg

SEQ ID NO: 158388 - DNA, 25 bp, Artificial
  probe
  misc_feature (1)..(25): SEQ ID NO: 6425; WAN024DHS_at; Start 1063; Stop 1087
gctattgaagctagtgcagaggcca

SEQ ID NO: 158389 - DNA, 25 bp, Artificial
  probe
  misc_feature (1)..(25): SEQ ID NO: 6953; WAN024DHT_at; Start 91; Stop 115
ggtatagagaccaactcctctctcc

SEQ ID NO: 158390 - DNA, 25 bp, Artificial
  probe
  misc_feature (1)..(25): SEQ ID NO: 6953; WAN024DHT_at; Start 21; Stop 45
gacgaaaaacgtgatcttggcaggt

SEQ ID NO: 158391 - DNA, 25 bp, Artificial
  probe
  misc_feature (1)..(25): SEQ ID NO: 6953; WAN024DHT_at; Start 18; Stop 42
cctgacgaaaaacgtgatcttggca

SEQ ID NO: 158392 - DNA, 25 bp, Artificial
  probe
  misc_feature (1)..(25): SEQ ID NO: 6953; WAN024DHT_at; Start 58; Stop 82
ggtattgggatgactttccacaatt

SEQ ID NO: 158393 - DNA, 25 bp, Artificial
  probe
  misc_feature (1)..(25): SEQ ID NO: 6953; WAN024DHT_at; Start 34; Stop 58
atcttggcaggtggtattgagactg

SEQ ID NO: 158394 - DNA, 25 bp, Artificial
  probe
  misc_feature (1)..(25): SEQ ID NO: 6953; WAN024DHT_at; Start 87; Stop 111
taacggtatagagaccaactcctct

SEQ ID NO: 158395 - DNA, 25 bp, Artificial
  probe
  misc_feature (1)..(25): SEQ ID NO: 6953; WAN024DHT_at; Start 92; Stop 116
gtatagagaccaactcctctctcct

SEQ ID NO: 158396 - DNA, 25 bp, Artificial
  probe
  misc_feature (1)..(25): SEQ ID NO: 6953; WAN024DHT_at; Start 2; Stop 26
tgtattacagtaagtacctgacgaa

SEQ ID NO: 158397 - DNA, 25 bp, Artificial
  probe
  misc_feature (1)..(25): SEQ ID NO: 6953; WAN024DHT_at; Start 12; Stop 36
taagtacctgacgaaaaacgtgatc

SEQ ID NO: 158398 - DNA, 25 bp, Artificial
  probe
  misc_feature (1)..(25): SEQ ID NO: 6953; WAN024DHT_at; Start 16; Stop 40
tacctgacgaaaaacgtgatcttgg

SEQ ID NO: 158399 - DNA, 25 bp, Artificial
  probe
  misc_feature (1)..(25): SEQ ID NO: 6953; WAN024DHT_at; Start 9; Stop 33
cagtaagtacctgacgaaaaacgtg

SEQ ID NO: 158400 - DNA, 25 bp, Artificial
  probe
  misc_feature (1)..(25): SEQ ID NO: 6953; WAN024DHT_at; Start 81; Stop 105
ttttcataacggtatagagaccaac

SEQ ID NO: 158401 - DNA, 25 bp, Artificial
  probe
  misc_feature (1)..(25): SEQ ID NO: 6953; WAN024DHT_at; Start 85; Stop 109
cataacggtatagagaccaactcct

SEQ ID NO: 158402 - DNA, 25 bp, Artificial
  probe
  misc_feature (1)..(25): SEQ ID NO: 6953; WAN024DHT_at; Start 89; Stop 113
acggtatagagaccaactcctctct

SEQ ID NO: 158403 - DNA, 25 bp, Artificial
  probe
  misc_feature (1)..(25): SEQ ID NO: 6953; WAN024DHT_at; Start 68; Stop 92
tgactttccacaattttcataacgg

SEQ ID NO: 158404 - DNA, 25 bp, Artificial
  probe
  misc_feature (1)..(25): SEQ ID NO: 6953; WAN024DHT_at; Start 78; Stop 102
caattttcataacggtatagagacc

SEQ ID NO: 158405 - DNA, 25 bp, Artificial
  probe
  misc_feature (1)..(25): SEQ ID NO: 6953; WAN024DHT_at; Start 4; Stop 28
tattacagtaagtacctgacgaaaa

SEQ ID NO: 158406 - DNA, 25 bp, Artificial
  probe
  misc_feature (1)..(25): SEQ ID NO: 6953; WAN024DHT_at; Start 25; Stop 49
aaaaacgtgatcttggcaggtggta

SEQ ID NO: 158407 - DNA, 25 bp, Artificial
  probe
  misc_feature (1)..(25): SEQ ID NO: 6953; WAN024DHT_at; Start 23; Stop 47
cgaaaaacgtgatcttggcaggtgg

SEQ ID NO: 158408 - DNA, 25 bp, Artificial
  probe
  misc_feature (1)..(25): SEQ ID NO: 6953; WAN024DHT_at; Start 17; Stop 41
acctgacgaaaaacgtgatcttggc

SEQ ID NO: 158409 - DNA, 25 bp, Artificial
  probe
  misc_feature (1)..(25): SEQ ID NO: 6953; WAN024DHT_at; Start 15; Stop 39
gtacctgacgaaaaacgtgatcttg

SEQ ID NO: 158410 - DNA, 25 bp, Artificial
  probe
  misc_feature (1)..(25): SEQ ID NO: 6953; WAN024DHT_at; Start 73; Stop 97
ttccacaattttcataacggtatag

SEQ ID NO: 158411 - DNA, 25 bp, Artificial
  probe
  misc_feature (1)..(25): SEQ ID NO: 6953; WAN024DHT_at; Start 27; Stop 51
aaacgtgatcttggcaggtggtatt

SEQ ID NO: 158412 - DNA, 25 bp, Artificial
  probe
  misc_feature (1)..(25): SEQ ID NO: 6953; WAN024DHT_at; Start 33; Stop 57
gatcttggcaggtggtattgagact

SEQ ID NO: 158413 - DNA, 25 bp, Artificial
  probe
  misc_feature (1)..(25): SEQ ID NO: 6953; WAN024DHT_at; Start 32; Stop 56
tgatcttggcaggtggtattgagac

SEQ ID NO: 158414 - DNA, 25 bp, Artificial
  probe
  misc_feature (1)..(25): SEQ ID NO: 6953; WAN024DHT_at; Start 84; Stop 108
tcataacggtatagagaccaactcc

SEQ ID NO: 158415 - DNA, 25 bp, Artificial
  probe
  misc_feature (1)..(25): SEQ ID NO: 6953; WAN024DHT_at; Start 64; Stop 88
gggatgactttccacaattttcata

SEQ ID NO: 158416 - DNA, 25 bp, Artificial
  probe
  misc_feature (1)..(25): SEQ ID NO: 6953; WAN024DHT_at; Start 83; Stop 107
ttcataacggtatagagaccaactc

SEQ ID NO: 158417 - DNA, 25 bp, Artificial
  probe
  misc_feature (1)..(25): SEQ ID NO: 6953; WAN024DHT_at; Start 26; Stop 50
aaaacgtgatcttggcaggtggtat

SEQ ID NO: 158418 - DNA, 25 bp, Artificial
  probe
  misc_feature (1)..(25): SEQ ID NO: 6953; WAN024DHT_at; Start 13; Stop 37
aagtacctgacgaaaaacgtgatct

SEQ ID NO: 158419 - DNA, 25 bp, Artificial
  probe
  misc_feature (1)..(25): SEQ ID NO: 6953; WAN024DHT_at; Start 20; Stop 44
tgacgaaaaacgtgatcttggcagg

SEQ ID NO: 158420 - DNA, 25 bp, Artificial
  probe
  misc_feature (1)..(25): SEQ ID NO: 6953; WAN024DHT_at; Start 47; Stop 71
gtattgagactggtattgggatgac

SEQ ID NO: 158421 - DNA, 25 bp, Artificial
  probe
  misc_feature (1)..(25): SEQ ID NO: 6953; WAN024DHT_at; Start 75; Stop 99
ccacaattttcataacggtatagag

SEQ ID NO: 158422 - DNA, 25 bp, Artificial
  probe
  misc_feature (1)..(25): SEQ ID NO: 6953; WAN024DHT_at; Start 62; Stop 86
ttgggatgactttccacaattttca

SEQ ID NO: 158423 - DNA, 25 bp, Artificial
  probe
  misc_feature (1)..(25): SEQ ID NO: 3352; WAN024DHU_at; Start 444; Stop 468
tctagcttttttgaaatggttggac

SEQ ID NO: 158424 - DNA, 25 bp, Artificial
  probe
  misc_feature (1)..(25): SEQ ID NO: 3352; WAN024DHU_at; Start 426; Stop 450
tttcaatttcttcatttctctagct

SEQ ID NO: 158425 - DNA, 25 bp, Artificial
  probe
  misc_feature (1)..(25): SEQ ID NO: 3352; WAN024DHU_at; Start 534; Stop 558
taactggataatgggtggctactat

SEQ ID NO: 158426 - DNA, 25 bp, Artificial
  probe
  misc_feature (1)..(25): SEQ ID NO: 3352; WAN024DHU_at; Start 511; Stop 535
tttcaaaagtccctgactcagatta

SEQ ID NO: 158427 - DNA, 25 bp, Artificial
  probe
  misc_feature (1)..(25): SEQ ID NO: 3352; WAN024DHU_at; Start 808; Stop 832
accaacctcttgactagcttacgtc

SEQ ID NO: 158428 - DNA, 25 bp, Artificial
  probe
  misc_feature (1)..(25): SEQ ID NO: 3352; WAN024DHU_at; Start 365; Stop 389
catttttgggacaagggcaagtata

SEQ ID NO: 158429 - DNA, 25 bp, Artificial
  probe
  misc_feature (1)..(25): SEQ ID NO: 3352; WAN024DHU_at; Start 231; Stop 255
ggaacccttgtacggcataggctta

SEQ ID NO: 158430 - DNA, 25 bp, Artificial
  probe
  misc_feature (1)..(25): SEQ ID NO: 3352; WAN024DHU_at; Start 528; Stop 552
tcagattaactggataatgggtggc

SEQ ID NO: 158431 - DNA, 25 bp, Artificial
  probe
  misc_feature (1)..(25): SEQ ID NO: 3352; WAN024DHU_at; Start 216; Stop 240
cctatcttattttatggaacccttg

SEQ ID NO: 158432 - DNA, 25 bp, Artificial
  probe
  misc_feature (1)..(25): SEQ ID NO: 3352; WAN024DHU_at; Start 10; Stop 34
tcaataaattacactgagctaggag

SEQ ID NO: 158433 - DNA, 25 bp, Artificial
  probe
  misc_feature (1)..(25): SEQ ID NO: 3352; WAN024DHU_at; Start 20; Stop 44
acactgagctaggagaatttatgaa

SEQ ID NO: 158434 - DNA, 25 bp, Artificial
  probe
  misc_feature (1)..(25): SEQ ID NO: 3352; WAN024DHU_at; Start 11; Stop 35
caataaattacactgagctaggaga

SEQ ID NO: 158435 - DNA, 25 bp, Artificial
  probe
  misc_feature (1)..(25): SEQ ID NO: 3352; WAN024DHU_at; Start 363; Stop 387
tccatttttgggacaagggcaagta

SEQ ID NO: 158436 - DNA, 25 bp, Artificial
  probe
  misc_feature (1)..(25): SEQ ID NO: 3352; WAN024DHU_at; Start 517; Stop 541
aagtccctgactcagattaactgga

SEQ ID NO: 158437 - DNA, 25 bp, Artificial
  probe
  misc_feature (1)..(25): SEQ ID NO: 3352; WAN024DHU_at; Start 816; Stop 840
cttgactagcttacgtctgggcatt

SEQ ID NO: 158438 - DNA, 25 bp, Artificial
  probe
  misc_feature (1)..(25): SEQ ID NO: 3352; WAN024DHU_at; Start 223; Stop 247
tattttatggaacccttgtacggca

SEQ ID NO: 158439 - DNA, 25 bp, Artificial
  probe
  misc_feature (1)..(25): SEQ ID NO: 3352; WAN024DHU_at; Start 531; Stop 555
gattaactggataatgggtggctac

SEQ ID NO: 158440 - DNA, 25 bp, Artificial
  probe
  misc_feature (1)..(25): SEQ ID NO: 3352; WAN024DHU_at; Start 811; Stop 835
aacctcttgactagcttacgtctgg

SEQ ID NO: 158441 - DNA, 25 bp, Artificial
  probe
  misc_feature (1)..(25): SEQ ID NO: 3352; WAN024DHU_at; Start 240; Stop 264
gtacggcataggcttatctttctta

SEQ ID NO: 158442 - DNA, 25 bp, Artificial
  probe
  misc_feature (1)..(25): SEQ ID NO: 3352; WAN024DHU_at; Start 819; Stop 843
gactagcttacgtctgggcattgaa

SEQ ID NO: 158443 - DNA, 25 bp, Artificial
  probe
  misc_feature (1)..(25): SEQ ID NO: 3352; WAN024DHU_at; Start 519; Stop 543
gtccctgactcagattaactggata

SEQ ID NO: 158444 - DNA, 25 bp, Artificial
  probe
  misc_feature (1)..(25): SEQ ID NO: 3352; WAN024DHU_at; Start 18; Stop 42
ttacactgagctaggagaatttatg

SEQ ID NO: 158445 - DNA, 25 bp, Artificial
  probe
  misc_feature (1)..(25): SEQ ID NO: 3352; WAN024DHU_at; Start 814; Stop 838
ctcttgactagcttacgtctgggca

SEQ ID NO: 158446 - DNA, 25 bp, Artificial
  probe
  misc_feature (1)..(25): SEQ ID NO: 3352; WAN024DHU_at; Start 360; Stop 384
gcttccatttttgggacaagggcaa

SEQ ID NO: 158447 - DNA, 25 bp, Artificial
  probe
  misc_feature (1)..(25): SEQ ID NO: 3352; WAN024DHU_at; Start 242; Stop 266
acggcataggcttatctttcttatt

SEQ ID NO: 158448 - DNA, 25 bp, Artificial
  probe
  misc_feature (1)..(25): SEQ ID NO: 3352; WAN024DHU_at; Start 235; Stop 259
cccttgtacggcataggcttatctt

SEQ ID NO: 158449 - DNA, 25 bp, Artificial
  probe
  misc_feature (1)..(25): SEQ ID NO: 3352; WAN024DHU_at; Start 14; Stop 38
taaattacactgagctaggagaatt

SEQ ID NO: 158450 - DNA, 25 bp, Artificial
  probe
  misc_feature (1)..(25): SEQ ID NO: 3352; WAN024DHU_at; Start 367; Stop 391
tttttgggacaagggcaagtatatg

SEQ ID NO: 158451 - DNA, 25 bp, Artificial
  probe
  misc_feature (1)..(25): SEQ ID NO: 3352; WAN024DHU_at; Start 521; Stop 545
ccctgactcagattaactggataat

SEQ ID NO: 158452 - DNA, 25 bp, Artificial
  probe
  misc_feature (1)..(25): SEQ ID NO: 3352; WAN024DHU_at; Start 228; Stop 252
tatggaacccttgtacggcataggc

SEQ ID NO: 158453 - DNA, 25 bp, Artificial
  probe
  misc_feature (1)..(25): SEQ ID NO: 3352; WAN024DHU_at; Start 524; Stop 548
tgactcagattaactggataatggg

SEQ ID NO: 158454 - DNA, 25 bp, Artificial
  probe
  misc_feature (1)..(25): SEQ ID NO: 3352; WAN024DHU_at; Start 226; Stop 250
tttatggaacccttgtacggcatag

SEQ ID NO: 158455 - DNA, 25 bp, Artificial
  probe
  misc_feature (1)..(25): SEQ ID NO: 3352; WAN024DHU_at; Start 446; Stop 470
tagcttttttgaaatggttggacta

SEQ ID NO: 158456 - DNA, 25 bp, Artificial
  probe
  misc_feature (1)..(25): SEQ ID NO: 3352; WAN024DHU_at; Start 237; Stop 261
cttgtacggcataggcttatctttc

SEQ ID NO: 158457 - DNA, 25 bp, Artificial
  probe
  misc_feature (1)..(25): SEQ ID NO: 994; WAN024DHV_at; Start 286; Stop 310
gccagacgtcgctatagagaaattc

SEQ ID NO: 158458 - DNA, 25 bp, Artificial
  probe
  misc_feature (1)..(25): SEQ ID NO: 994; WAN024DHV_at; Start 266; Stop 290
gtcaatacgctgtcaagtatgccag

SEQ ID NO: 158459 - DNA, 25 bp, Artificial
  probe
  misc_feature (1)..(25): SEQ ID NO: 994; WAN024DHV_at; Start 71; Stop 95
aaacacatccaactaaagcccatac

SEQ ID NO: 158460 - DNA, 25 bp, Artificial
  probe
  misc_feature (1)..(25): SEQ ID NO: 994; WAN024DHV_at; Start 167; Stop 191
gggaaaccttgatgagatgtcatcg

SEQ ID NO: 158461 - DNA, 25 bp, Artificial
  probe
  misc_feature (1)..(25): SEQ ID NO: 994; WAN024DHV_at; Start 269; Stop 293
aatacgctgtcaagtatgccagacg

SEQ ID NO: 158462 - DNA, 25 bp, Artificial
  probe
  misc_feature (1)..(25): SEQ ID NO: 994; WAN024DHV_at; Start 288; Stop 312
cagacgtcgctatagagaaattcgt

SEQ ID NO: 158463 - DNA, 25 bp, Artificial
  probe
  misc_feature (1)..(25): SEQ ID NO: 994; WAN024DHV_at; Start 173; Stop 197
ccttgatgagatgtcatcgaaattg

SEQ ID NO: 158464 - DNA, 25 bp, Artificial
  probe
  misc_feature (1)..(25): SEQ ID NO: 994; WAN024DHV_at; Start 66; Stop 90
tatccaaacacatccaactaaagcc

SEQ ID NO: 158465 - DNA, 25 bp, Artificial
  probe
  misc_feature (1)..(25): SEQ ID NO: 994; WAN024DHV_at; Start 259; Stop 283
gaagaaggtcaatacgctgtcaagt

SEQ ID NO: 158466 - DNA, 25 bp, Artificial
  probe
  misc_feature (1)..(25): SEQ ID NO: 994; WAN024DHV_at; Start 295; Stop 319
cgctatagagaaattcgtcaaaaat

SEQ ID NO: 158467 - DNA, 25 bp, Artificial
  probe
  misc_feature (1)..(25): SEQ ID NO: 994; WAN024DHV_at; Start 292; Stop 316
cgtcgctatagagaaattcgtcaaa

SEQ ID NO: 158468 - DNA, 25 bp, Artificial
  probe
  misc_feature (1)..(25): SEQ ID NO: 994; WAN024DHV_at; Start 223; Stop 247
tcgattgattttcaagaaagaatcc

SEQ ID NO: 158469 - DNA, 25 bp, Artificial
  probe
  misc_feature (1)..(25): SEQ ID NO: 994; WAN024DHV_at; Start 257; Stop 281
gagaagaaggtcaatacgctgtcaa

SEQ ID NO: 158470 - DNA, 25 bp, Artificial
  probe
  misc_feature (1)..(25): SEQ ID NO: 994; WAN024DHV_at; Start 225; Stop 249
gattgattttcaagaaagaatcctt

SEQ ID NO: 158471 - DNA, 25 bp, Artificial
  probe
  misc_feature (1)..(25): SEQ ID NO: 994; WAN024DHV_at; Start 279; Stop 303
caagtatgccagacgtcgctataga

SEQ ID NO: 158472 - DNA, 25 bp, Artificial
  probe
  misc_feature (1)..(25): SEQ ID NO: 994; WAN024DHV_at; Start 139; Stop 163
aatttaagtaatcttgagaaccaat

SEQ ID NO: 158473 - DNA, 25 bp, Artificial
  probe
  misc_feature (1)..(25): SEQ ID NO: 994; WAN024DHV_at; Start 273; Stop 297
cgctgtcaagtatgccagacgtcgc

SEQ ID NO: 158474 - DNA, 25 bp, Artificial
  probe
  misc_feature (1)..(25): SEQ ID NO: 994; WAN024DHV_at; Start 64; Stop 88
tatatccaaacacatccaactaaag

SEQ ID NO: 158475 - DNA, 25 bp, Artificial
  probe
  misc_feature (1)..(25): SEQ ID NO: 994; WAN024DHV_at; Start 278; Stop 302
tcaagtatgccagacgtcgctatag

SEQ ID NO: 158476 - DNA, 25 bp, Artificial
  probe
  misc_feature (1)..(25): SEQ ID NO: 994; WAN024DHV_at; Start 263; Stop 287
aaggtcaatacgctgtcaagtatgc

SEQ ID NO: 158477 - DNA, 25 bp, Artificial
  probe
  misc_feature (1)..(25): SEQ ID NO: 994; WAN024DHV_at; Start 169; Stop 193
gaaaccttgatgagatgtcatcgaa

SEQ ID NO: 158478 - DNA, 25 bp, Artificial
  probe
  misc_feature (1)..(25): SEQ ID NO: 994; WAN024DHV_at; Start 274; Stop 298
gctgtcaagtatgccagacgtcgct

SEQ ID NO: 158479 - DNA, 25 bp, Artificial
  probe
  misc_feature (1)..(25): SEQ ID NO: 994; WAN024DHV_at; Start 290; Stop 314
gacgtcgctatagagaaattcgtca

SEQ ID NO: 158480 - DNA, 25 bp, Artificial
  probe
  misc_feature (1)..(25): SEQ ID NO: 994; WAN024DHV_at; Start 281; Stop 305
agtatgccagacgtcgctatagaga

SEQ ID NO: 158481 - DNA, 25 bp, Artificial
  probe
  misc_feature (1)..(25): SEQ ID NO: 994; WAN024DHV_at; Start 135; Stop 159
tcaaaatttaagtaatcttgagaac

SEQ ID NO: 158482 - DNA, 25 bp, Artificial
  probe
  misc_feature (1)..(25): SEQ ID NO: 994; WAN024DHV_at; Start 268; Stop 292
caatacgctgtcaagtatgccagac

SEQ ID NO: 158483 - DNA, 25 bp, Artificial
  probe
  misc_feature (1)..(25): SEQ ID NO: 994; WAN024DHV_at; Start 59; Stop 83
tctactatatccaaacacatccaac

SEQ ID NO: 158484 - DNA, 25 bp, Artificial
  probe
  misc_feature (1)..(25): SEQ ID NO: 994; WAN024DHV_at; Start 179; Stop 203
tgagatgtcatcgaaattgtttggt

SEQ ID NO: 158485 - DNA, 25 bp, Artificial
  probe
  misc_feature (1)..(25): SEQ ID NO: 994; WAN024DHV_at; Start 302; Stop 326
gagaaattcgtcaaaaatggttgaa

SEQ ID NO: 158486 - DNA, 25 bp, Artificial
  probe
  misc_feature (1)..(25): SEQ ID NO: 994; WAN024DHV_at; Start 283; Stop 307
tatgccagacgtcgctatagagaaa

SEQ ID NO: 158487 - DNA, 25 bp, Artificial
  probe
  misc_feature (1)..(25): SEQ ID NO: 994; WAN024DHV_at; Start 256; Stop 280
ggagaagaaggtcaatacgctgtca

SEQ ID NO: 158488 - DNA, 25 bp, Artificial
  probe
  misc_feature (1)..(25): SEQ ID NO: 994; WAN024DHV_at; Start 271; Stop 295
tacgctgtcaagtatgccagacgtc

SEQ ID NO: 158489 - DNA, 25 bp, Artificial
  probe
  misc_feature (1)..(25): SEQ ID NO: 994; WAN024DHV_at; Start 276; Stop 300
tgtcaagtatgccagacgtcgctat

SEQ ID NO: 158490 - DNA, 25 bp, Artificial
  probe
  misc_feature (1)..(25): SEQ ID NO: 994; WAN024DHV_at; Start 300; Stop 324
tagagaaattcgtcaaaaatggttg

SEQ ID NO: 158491 - DNA, 25 bp, Artificial
  probe
  misc_feature (1)..(25): SEQ ID NO: 979; WAN024DHW_at; Start 245; Stop 269
gactagctgtgataaaagaaatgca

SEQ ID NO: 158492 - DNA, 25 bp, Artificial
  probe
  misc_feature (1)..(25): SEQ ID NO: 979; WAN024DHW_at; Start 240; Stop 264
gactagactagctgtgataaaagaa

SEQ ID NO: 158493 - DNA, 25 bp, Artificial
  probe
  misc_feature (1)..(25): SEQ ID NO: 979; WAN024DHW_at; Start 257; Stop 281
taaaagaaatgcagggaactgaaga

SEQ ID NO: 158494 - DNA, 25 bp, Artificial
  probe
  misc_feature (1)..(25): SEQ ID NO: 979; WAN024DHW_at; Start 88; Stop 112
gtcttgaataccactgaccgcgttc

SEQ ID NO: 158495 - DNA, 25 bp, Artificial
  probe
  misc_feature (1)..(25): SEQ ID NO: 979; WAN024DHW_at; Start 221; Stop 245
tcttggaaaaggatatccagactag

SEQ ID NO: 158496 - DNA, 25 bp, Artificial
  probe
  misc_feature (1)..(25): SEQ ID NO: 979; WAN024DHW_at; Start 98; Stop 122
ccactgaccgcgttcaagctatcaa

SEQ ID NO: 158497 - DNA, 25 bp, Artificial
  probe
  misc_feature (1)..(25): SEQ ID NO: 979; WAN024DHW_at; Start 203; Stop 227
tgacttacaagtttaaggtcttgga

SEQ ID NO: 158498 - DNA, 25 bp, Artificial
  probe
  misc_feature (1)..(25): SEQ ID NO: 979; WAN024DHW_at; Start 183; Stop 207
caaggaataccaagaagacttgact

SEQ ID NO: 158499 - DNA, 25 bp, Artificial
  probe
  misc_feature (1)..(25): SEQ ID NO: 979; WAN024DHW_at; Start 216; Stop 240
taaggtcttggaaaaggatatccag

SEQ ID NO: 158500 - DNA, 25 bp, Artificial
  probe
  misc_feature (1)..(25): SEQ ID NO: 979; WAN024DHW_at; Start 82; Stop 106
gatgaagtcttgaataccactgacc

SEQ ID NO: 158501 - DNA, 25 bp, Artificial
  probe
  misc_feature (1)..(25): SEQ ID NO: 979; WAN024DHW_at; Start 12; Stop 36
caacctactgctatttgcaggagct

SEQ ID NO: 158502 - DNA, 25 bp, Artificial
  probe
  misc_feature (1)..(25): SEQ ID NO: 979; WAN024DHW_at; Start 68; Stop 92
gccaaaccatcacagatgaagtctt

SEQ ID NO: 158503 - DNA, 25 bp, Artificial
  probe
  misc_feature (1)..(25): SEQ ID NO: 979; WAN024DHW_at; Start 190; Stop 214
taccaagaagacttgacttacaagt

SEQ ID NO: 158504 - DNA, 25 bp, Artificial
  probe
  misc_feature (1)..(25): SEQ ID NO: 979; WAN024DHW_at; Start 17; Stop 41
tactgctatttgcaggagctgcagc

SEQ ID NO: 158505 - DNA, 25 bp, Artificial
  probe
  misc_feature (1)..(25): SEQ ID NO: 979; WAN024DHW_at; Start 77; Stop 101
tcacagatgaagtcttgaataccac

SEQ ID NO: 158506 - DNA, 25 bp, Artificial
  probe
  misc_feature (1)..(25): SEQ ID NO: 979; WAN024DHW_at; Start 180; Stop 204
tatcaaggaataccaagaagacttg

SEQ ID NO: 158507 - DNA, 25 bp, Artificial
  probe
  misc_feature (1)..(25): SEQ ID NO: 979; WAN024DHW_at; Start 85; Stop 109
gaagtcttgaataccactgaccgcg

SEQ ID NO: 158508 - DNA, 25 bp, Artificial
  probe
  misc_feature (1)..(25): SEQ ID NO: 979; WAN024DHW_at; Start 32; Stop 56
gagctgcagccggaagttatctggt

SEQ ID NO: 158509 - DNA, 25 bp, Artificial
  probe
  misc_feature (1)..(25): SEQ ID NO: 979; WAN024DHW_at; Start 232; Stop 256
gatatccagactagactagctgtga

SEQ ID NO: 158510 - DNA, 25 bp, Artificial
  probe
  misc_feature (1)..(25): SEQ ID NO: 979; WAN024DHW_at; Start 27; Stop 51
tgcaggagctgcagccggaagttat

SEQ ID NO: 158511 - DNA, 25 bp, Artificial
  probe
  misc_feature (1)..(25): SEQ ID NO: 979; WAN024DHW_at; Start 8; Stop 32
tatccaacctactgctatttgcagg

SEQ ID NO: 158512 - DNA, 25 bp, Artificial
  probe
  misc_feature (1)..(25): SEQ ID NO: 979; WAN024DHW_at; Start 175; Stop 199
gaacttatcaaggaataccaagaag

SEQ ID NO: 158513 - DNA, 25 bp, Artificial
  probe
  misc_feature (1)..(25): SEQ ID NO: 979; WAN024DHW_at; Start 227; Stop 251
aaaaggatatccagactagactagc

SEQ ID NO: 158514 - DNA, 25 bp, Artificial
  probe
  misc_feature (1)..(25): SEQ ID NO: 979; WAN024DHW_at; Start 64; Stop 88
aatcgccaaaccatcacagatgaag

SEQ ID NO: 158515 - DNA, 25 bp, Artificial
  probe
  misc_feature (1)..(25): SEQ ID NO: 979; WAN024DHW_at; Start 268; Stop 292
cagggaactgaagataagtaactaa

SEQ ID NO: 158516 - DNA, 25 bp, Artificial
  probe
  misc_feature (1)..(25): SEQ ID NO: 979; WAN024DHW_at; Start 20; Stop 44
tgctatttgcaggagctgcagccgg

SEQ ID NO: 158517 - DNA, 25 bp, Artificial
  probe
  misc_feature (1)..(25): SEQ ID NO: 979; WAN024DHW_at; Start 22; Stop 46
ctatttgcaggagctgcagccggaa

SEQ ID NO: 158518 - DNA, 25 bp, Artificial
  probe
  misc_feature (1)..(25): SEQ ID NO: 979; WAN024DHW_at; Start 93; Stop 117
gaataccactgaccgcgttcaagct

SEQ ID NO: 158519 - DNA, 25 bp, Artificial
  probe
  misc_feature (1)..(25): SEQ ID NO: 979; WAN024DHW_at; Start 252; Stop 276
tgtgataaaagaaatgcagggaact

SEQ ID NO: 158520 - DNA, 25 bp, Artificial
  probe
  misc_feature (1)..(25): SEQ ID NO: 979; WAN024DHW_at; Start 266; Stop 290
tgcagggaactgaagataagtaact

SEQ ID NO: 158521 - DNA, 25 bp, Artificial
  probe
  misc_feature (1)..(25): SEQ ID NO: 979; WAN024DHW_at; Start 2; Stop 26
tgaaattatccaacctactgctatt

SEQ ID NO: 158522 - DNA, 25 bp, Artificial
  probe
  misc_feature (1)..(25): SEQ ID NO: 979; WAN024DHW_at; Start 186; Stop 210
ggaataccaagaagacttgacttac

SEQ ID NO: 158523 - DNA, 25 bp, Artificial
  probe
  misc_feature (1)..(25): SEQ ID NO: 979; WAN024DHW_at; Start 59; Stop 83
caaaaaatcgccaaaccatcacaga

SEQ ID NO: 158524 - DNA, 25 bp, Artificial
  probe
  misc_feature (1)..(25): SEQ ID NO: 979; WAN024DHW_at; Start 165; Stop 189
ccagcaaaaagaacttatcaaggaa

SEQ ID NO: 158525 - DNA, 25 bp, Artificial
  probe
  misc_feature (1)..(25): SEQ ID NO: 1207; WAN024DHX_at; Start 233; Stop 257
taggagcaggttcttgttcgattct

SEQ ID NO: 158526 - DNA, 25 bp, Artificial
  probe
  misc_feature (1)..(25): SEQ ID NO: 1207; WAN024DHX_at; Start 367; Stop 391
ggtggtcttgttgtttgtatgagtt

SEQ ID NO: 158527 - DNA, 25 bp, Artificial
  probe
  misc_feature (1)..(25): SEQ ID NO: 1207; WAN024DHX_at; Start 65; Stop 89
tacatgagatgcatttgaaaggttg

SEQ ID NO: 158528 - DNA, 25 bp, Artificial
  probe
  misc_feature (1)..(25): SEQ ID NO: 1207; WAN024DHX_at; Start 485; Stop 509
aaaggaaataccgagtagatgaata

SEQ ID NO: 158529 - DNA, 25 bp, Artificial
  probe
  misc_feature (1)..(25): SEQ ID NO: 1207; WAN024DHX_at; Start 239; Stop 263
caggttcttgttcgattcttcgtaa

SEQ ID NO: 158530 - DNA, 25 bp, Artificial
  probe
  misc_feature (1)..(25): SEQ ID NO: 1207; WAN024DHX_at; Start 27; Stop 51
tttcaccattgttgatttggacaag

SEQ ID NO: 158531 - DNA, 25 bp, Artificial
  probe
  misc_feature (1)..(25): SEQ ID NO: 1207; WAN024DHX_at; Start 328; Stop 352
atgcgatctagacttcgttcctgta

SEQ ID NO: 158532 - DNA, 25 bp, Artificial
  probe
  misc_feature (1)..(25): SEQ ID NO: 1207; WAN024DHX_at; Start 310; Stop 334
gggctcaaatgggaagttatgcgat

SEQ ID NO: 158533 - DNA, 25 bp, Artificial
  probe
  misc_feature (1)..(25): SEQ ID NO: 1207; WAN024DHX_at; Start 76; Stop 100
catttgaaaggttggaggtatagaa

SEQ ID NO: 158534 - DNA, 25 bp, Artificial
  probe
  misc_feature (1)..(25): SEQ ID NO: 1207; WAN024DHX_at; Start 317; Stop 341
aatgggaagttatgcgatctagact

SEQ ID NO: 158535 - DNA, 25 bp, Artificial
  probe
  misc_feature (1)..(25): SEQ ID NO: 1207; WAN024DHX_at; Start 314; Stop 338
tcaaatgggaagttatgcgatctag

SEQ ID NO: 158536 - DNA, 25 bp, Artificial
  probe
  misc_feature (1)..(25): SEQ ID NO: 1207; WAN024DHX_at; Start 387; Stop 411
gagtttgtttagagaggatctttct

SEQ ID NO: 158537 - DNA, 25 bp, Artificial
  probe
  misc_feature (1)..(25): SEQ ID NO: 1207; WAN024DHX_at; Start 324; Stop 348
agttatgcgatctagacttcgttcc

SEQ ID NO: 158538 - DNA, 25 bp, Artificial
  probe
  misc_feature (1)..(25): SEQ ID NO: 1207; WAN024DHX_at; Start 312; Stop 336
gctcaaatgggaagttatgcgatct

SEQ ID NO: 158539 - DNA, 25 bp, Artificial
  probe
  misc_feature (1)..(25): SEQ ID NO: 1207; WAN024DHX_at; Start 207; Stop 231
ttttagagatagaggttgggaattg

SEQ ID NO: 158540 - DNA, 25 bp, Artificial
  probe
  misc_feature (1)..(25): SEQ ID NO: 1207; WAN024DHX_at; Start 202; Stop 226
caagattttagagatagaggttggg

SEQ ID NO: 158541 - DNA, 25 bp, Artificial
  probe
  misc_feature (1)..(25): SEQ ID NO: 1207; WAN024DHX_at; Start 251; Stop 275
cgattcttcgtaaatcgtcttctga

SEQ ID NO: 158542 - DNA, 25 bp, Artificial
  probe
  misc_feature (1)..(25): SEQ ID NO: 1207; WAN024DHX_at; Start 236; Stop 260
gagcaggttcttgttcgattcttcg

SEQ ID NO: 158543 - DNA, 25 bp, Artificial
  probe
  misc_feature (1)..(25): SEQ ID NO: 1207; WAN024DHX_at; Start 382; Stop 406
tgtatgagtttgtttagagaggatc

SEQ ID NO: 158544 - DNA, 25 bp, Artificial
  probe
  misc_feature (1)..(25): SEQ ID NO: 1207; WAN024DHX_at; Start 265; Stop 289
tcgtcttctgatttacttccagagg

SEQ ID NO: 158545 - DNA, 25 bp, Artificial
  probe
  misc_feature (1)..(25): SEQ ID NO: 1207; WAN024DHX_at; Start 157; Stop 181
cgtatctatgattctagatttctta

SEQ ID NO: 158546 - DNA, 25 bp, Artificial
  probe
  misc_feature (1)..(25): SEQ ID NO: 1207; WAN024DHX_at; Start 481; Stop 505
ctaaaaaggaaataccgagtagatg

SEQ ID NO: 158547 - DNA, 25 bp, Artificial
  probe
  misc_feature (1)..(25): SEQ ID NO: 1207; WAN024DHX_at; Start 222; Stop 246
ttgggaattgataggagcaggttct

SEQ ID NO: 158548 - DNA, 25 bp, Artificial
  probe
  misc_feature (1)..(25): SEQ ID NO: 1207; WAN024DHX_at; Start 16; Stop 40
gaatttcggattttcaccattgttg

SEQ ID NO: 158549 - DNA, 25 bp, Artificial
  probe
  misc_feature (1)..(25): SEQ ID NO: 1207; WAN024DHX_at; Start 403; Stop 427
gatctttctatgtctttctttctta

SEQ ID NO: 158550 - DNA, 25 bp, Artificial
  probe
  misc_feature (1)..(25): SEQ ID NO: 1207; WAN024DHX_at; Start 196; Stop 220
gaactgcaagattttagagatagag

SEQ ID NO: 158551 - DNA, 25 bp, Artificial
  probe
  misc_feature (1)..(25): SEQ ID NO: 1207; WAN024DHX_at; Start 24; Stop 48
gattttcaccattgttgatttggac

SEQ ID NO: 158552 - DNA, 25 bp, Artificial
  probe
  misc_feature (1)..(25): SEQ ID NO: 1207; WAN024DHX_at; Start 67; Stop 91
catgagatgcatttgaaaggttgga

SEQ ID NO: 158553 - DNA, 25 bp, Artificial
  probe
  misc_feature (1)..(25): SEQ ID NO: 1207; WAN024DHX_at; Start 2; Stop 26
tgaatagcagagtagaatttcggat

SEQ ID NO: 158554 - DNA, 25 bp, Artificial
  probe
  misc_feature (1)..(25): SEQ ID NO: 1207; WAN024DHX_at; Start 396; Stop 420
tagagaggatctttctatgtctttc

SEQ ID NO: 158555 - DNA, 25 bp, Artificial
  probe
  misc_feature (1)..(25): SEQ ID NO: 1207; WAN024DHX_at; Start 439; Stop 463
tatgcttttctgatttcttatctaa

SEQ ID NO: 158556 - DNA, 25 bp, Artificial
  probe
  misc_feature (1)..(25): SEQ ID NO: 1207; WAN024DHX_at; Start 227; Stop 251
aattgataggagcaggttcttgttc

SEQ ID NO: 158557 - DNA, 25 bp, Artificial
  probe
  misc_feature (1)..(25): SEQ ID NO: 1207; WAN024DHX_at; Start 230; Stop 254
tgataggagcaggttcttgttcgat

SEQ ID NO: 158558 - DNA, 25 bp, Artificial
  probe
  misc_feature (1)..(25): SEQ ID NO: 1207; WAN024DHX_at; Start 9; Stop 33
cagagtagaatttcggattttcacc

SEQ ID NO: 158559 - DNA, 25 bp, Artificial
  probe
  misc_feature (1)..(25): SEQ ID NO: 2043; WAN024DHY_at; Start 149; Stop 173
cttatattttttggagattgagtca

SEQ ID NO: 158560 - DNA, 25 bp, Artificial
  probe
  misc_feature (1)..(25): SEQ ID NO: 2043; WAN024DHY_at; Start 158; Stop 182
tttggagattgagtcaaaagtggaa

SEQ ID NO: 158561 - DNA, 25 bp, Artificial
  probe
  misc_feature (1)..(25): SEQ ID NO: 2043; WAN024DHY_at; Start 167; Stop 191
tgagtcaaaagtggaaagaattatc

SEQ ID NO: 158562 - DNA, 25 bp, Artificial
  probe
  misc_feature (1)..(25): SEQ ID NO: 2043; WAN024DHY_at; Start 53; Stop 77
caaagtttgtcactggaggtagttc

SEQ ID NO: 158563 - DNA, 25 bp, Artificial
  probe
  misc_feature (1)..(25): SEQ ID NO: 2043; WAN024DHY_at; Start 60; Stop 84
tgtcactggaggtagttctttcagt

SEQ ID NO: 158564 - DNA, 25 bp, Artificial
  probe
  misc_feature (1)..(25): SEQ ID NO: 2043; WAN024DHY_at; Start 51; Stop 75
ctcaaagtttgtcactggaggtagt

SEQ ID NO: 158565 - DNA, 25 bp, Artificial
  probe
  misc_feature (1)..(25): SEQ ID NO: 2043; WAN024DHY_at; Start 59; Stop 83
ttgtcactggaggtagttctttcag

SEQ ID NO: 158566 - DNA, 25 bp, Artificial
  probe
  misc_feature (1)..(25): SEQ ID NO: 2043; WAN024DHY_at; Start 99; Stop 123
gattttcataatagattgggtttta

SEQ ID NO: 158567 - DNA, 25 bp, Artificial
  probe
  misc_feature (1)..(25): SEQ ID NO: 2043; WAN024DHY_at; Start 172; Stop 196
caaaagtggaaagaattatctaata

SEQ ID NO: 158568 - DNA, 25 bp, Artificial
  probe
  misc_feature (1)..(25): SEQ ID NO: 2043; WAN024DHY_at; Start 50; Stop 74
tctcaaagtttgtcactggaggtag

SEQ ID NO: 158569 - DNA, 25 bp, Artificial
  probe
  misc_feature (1)..(25): SEQ ID NO: 2043; WAN024DHY_at; Start 170; Stop 194
gtcaaaagtggaaagaattatctaa

SEQ ID NO: 158570 - DNA, 25 bp, Artificial
  probe
  misc_feature (1)..(25): SEQ ID NO: 2043; WAN024DHY_at; Start 128; Stop 152
tagtttttgcgattcagatttctta

SEQ ID NO: 158571 - DNA, 25 bp, Artificial
  probe
  misc_feature (1)..(25): SEQ ID NO: 2043; WAN024DHY_at; Start 47; Stop 71
ttttctcaaagtttgtcactggagg

SEQ ID NO: 158572 - DNA, 25 bp, Artificial
  probe
  misc_feature (1)..(25): SEQ ID NO: 2043; WAN024DHY_at; Start 95; Stop 119
ttttgattttcataatagattgggt

SEQ ID NO: 158573 - DNA, 25 bp, Artificial
  probe
  misc_feature (1)..(25): SEQ ID NO: 2043; WAN024DHY_at; Start 153; Stop 177
tattttttggagattgagtcaaaag

SEQ ID NO: 158574 - DNA, 25 bp, Artificial
  probe
  misc_feature (1)..(25): SEQ ID NO: 2043; WAN024DHY_at; Start 52; Stop 76
tcaaagtttgtcactggaggtagtt

SEQ ID NO: 158575 - DNA, 25 bp, Artificial
  probe
  misc_feature (1)..(25): SEQ ID NO: 2043; WAN024DHY_at; Start 64; Stop 88
actggaggtagttctttcagttggg

SEQ ID NO: 158576 - DNA, 25 bp, Artificial
  probe
  misc_feature (1)..(25): SEQ ID NO: 2043; WAN024DHY_at; Start 164; Stop 188
gattgagtcaaaagtggaaagaatt

SEQ ID NO: 158577 - DNA, 25 bp, Artificial
  probe
  misc_feature (1)..(25): SEQ ID NO: 2043; WAN024DHY_at; Start 162; Stop 186
gagattgagtcaaaagtggaaagaa

SEQ ID NO: 158578 - DNA, 25 bp, Artificial
  probe
  misc_feature (1)..(25): SEQ ID NO: 2043; WAN024DHY_at; Start 44; Stop 68
cgtttttctcaaagtttgtcactgg

SEQ ID NO: 158579 - DNA, 25 bp, Artificial
  probe
  misc_feature (1)..(25): SEQ ID NO: 2043; WAN024DHY_at; Start 54; Stop 78
aaagtttgtcactggaggtagttct

SEQ ID NO: 158580 - DNA, 25 bp, Artificial
  probe
  misc_feature (1)..(25): SEQ ID NO: 2043; WAN024DHY_at; Start 55; Stop 79
aagtttgtcactggaggtagttctt

SEQ ID NO: 158581 - DNA, 25 bp, Artificial
  probe
  misc_feature (1)..(25): SEQ ID NO: 2043; WAN024DHY_at; Start 1; Stop 25
atgcggatgcttcctattttgcttc

SEQ ID NO: 158582 - DNA, 25 bp, Artificial
  probe
  misc_feature (1)..(25): SEQ ID NO: 2043; WAN024DHY_at; Start 57; Stop 81
gtttgtcactggaggtagttctttc

SEQ ID NO: 158583 - DNA, 25 bp, Artificial
  probe
  misc_feature (1)..(25): SEQ ID NO: 2043; WAN024DHY_at; Start 6; Stop 30
gatgcttcctattttgcttctcttt

SEQ ID NO: 158584 - DNA, 25 bp, Artificial
  probe
  misc_feature (1)..(25): SEQ ID NO: 2043; WAN024DHY_at; Start 63; Stop 87
cactggaggtagttctttcagttgg

SEQ ID NO: 158585 - DNA, 25 bp, Artificial
  probe
  misc_feature (1)..(25): SEQ ID NO: 2043; WAN024DHY_at; Start 130; Stop 154
gtttttgcgattcagatttcttata

SEQ ID NO: 158586 - DNA, 25 bp, Artificial
  probe
  misc_feature (1)..(25): SEQ ID NO: 2043; WAN024DHY_at; Start 49; Stop 73
ttctcaaagtttgtcactggaggta

SEQ ID NO: 158587 - DNA, 25 bp, Artificial
  probe
  misc_feature (1)..(25): SEQ ID NO: 2043; WAN024DHY_at; Start 21; Stop 45
gcttctctttttagctctactaccg

SEQ ID NO: 158588 - DNA, 25 bp, Artificial
  probe
  misc_feature (1)..(25): SEQ ID NO: 2043; WAN024DHY_at; Start 178; Stop 202
tggaaagaattatctaataaataac

SEQ ID NO: 158589 - DNA, 25 bp, Artificial
  probe
  misc_feature (1)..(25): SEQ ID NO: 2043; WAN024DHY_at; Start 3; Stop 27
gcggatgcttcctattttgcttctc

SEQ ID NO: 158590 - DNA, 25 bp, Artificial
  probe
  misc_feature (1)..(25): SEQ ID NO: 2043; WAN024DHY_at; Start 4; Stop 28
cggatgcttcctattttgcttctct

SEQ ID NO: 158591 - DNA, 25 bp, Artificial
  probe
  misc_feature (1)..(25): SEQ ID NO: 2043; WAN024DHY_at; Start 168; Stop 192
gagtcaaaagtggaaagaattatct

SEQ ID NO: 158592 - DNA, 25 bp, Artificial
  probe
  misc_feature (1)..(25): SEQ ID NO: 2043; WAN024DHY_at; Start 33; Stop 57
agctctactaccgtttttctcaaag

SEQ ID NO: 158593 - DNA, 25 bp, Artificial
  probe
  misc_feature (1)..(25): SEQ ID NO: 131; WAN024DHZ_at; Start 79; Stop 103
tactatttctggtttgtcaggctat

SEQ ID NO: 158594 - DNA, 25 bp, Artificial
  probe
  misc_feature (1)..(25): SEQ ID NO: 131; WAN024DHZ_at; Start 1; Stop 25
aaagctttcctatatatcgcaaggt

SEQ ID NO: 158595 - DNA, 25 bp, Artificial
  probe
  misc_feature (1)..(25): SEQ ID NO: 131; WAN024DHZ_at; Start 167; Stop 191
gatggccaccgtttttatcactatg

SEQ ID NO: 158596 - DNA, 25 bp, Artificial
  probe
  misc_feature (1)..(25): SEQ ID NO: 131; WAN024DHZ_at; Start 661; Stop 685
caaggcttctggtatgaatgtggaa

SEQ ID NO: 158597 - DNA, 25 bp, Artificial
  probe
  misc_feature (1)..(25): SEQ ID NO: 131; WAN024DHZ_at; Start 455; Stop 479
tatctccttgcccatagtgccctag

SEQ ID NO: 158598 - DNA, 25 bp, Artificial
  probe
  misc_feature (1)..(25): SEQ ID NO: 131; WAN024DHZ_at; Start 281; Stop 305
gatggttttaagcttgagaatccct

SEQ ID NO: 158599 - DNA, 25 bp, Artificial
  probe
  misc_feature (1)..(25): SEQ ID NO: 131; WAN024DHZ_at; Start 587; Stop 611
gataagggaattttaggtgcaacca

SEQ ID NO: 158600 - DNA, 25 bp, Artificial
  probe
  misc_feature (1)..(25): SEQ ID NO: 131; WAN024DHZ_at; Start 491; Stop 515
ggaagaagtaaaattgccaaagata

SEQ ID NO: 158601 - DNA, 25 bp, Artificial
  probe
  misc_feature (1)..(25): SEQ ID NO: 131; WAN024DHZ_at; Start 205; Stop 229
tagtatcccagtagcttctcatctt

SEQ ID NO: 158602 - DNA, 25 bp, Artificial
  probe
  misc_feature (1)..(25): SEQ ID NO: 131; WAN024DHZ_at; Start 152; Stop 176
ccttattatgagagtgatggccacc

SEQ ID NO: 158603 - DNA, 25 bp, Artificial
  probe
  misc_feature (1)..(25): SEQ ID NO: 131; WAN024DHZ_at; Start 309; Stop 333
ttttcaaagatttaacagaggctac

SEQ ID NO: 158604 - DNA, 25 bp, Artificial
  probe
  misc_feature (1)..(25): SEQ ID NO: 131; WAN024DHZ_at; Start 129; Stop 153
tagatgctagtaaggactttatccc

SEQ ID NO: 158605 - DNA, 25 bp, Artificial
  probe
  misc_feature (1)..(25): SEQ ID NO: 131; WAN024DHZ_at; Start 324; Stop 348
cagaggctacaaactacagtgctga

SEQ ID NO: 158606 - DNA, 25 bp, Artificial
  probe
  misc_feature (1)..(25): SEQ ID NO: 131; WAN024DHZ_at; Start 51; Stop 75
gaaaaagtgatgacaagcgcttggc

SEQ ID NO: 158607 - DNA, 25 bp, Artificial
  probe
  misc_feature (1)..(25): SEQ ID NO: 131; WAN024DHZ_at; Start 648; Stop 672
ctttccttggaaacaaggcttctgg

SEQ ID NO: 158608 - DNA, 25 bp, Artificial
  probe
  misc_feature (1)..(25): SEQ ID NO: 131; WAN024DHZ_at; Start 600; Stop 624
taggtgcaaccaagtggattaagga

SEQ ID NO: 158609 - DNA, 25 bp, Artificial
  probe
  misc_feature (1)..(25): SEQ ID NO: 131; WAN024DHZ_at; Start 224; Stop 248
catctttctgatatggaagtaggca

SEQ ID NO: 158610 - DNA, 25 bp, Artificial
  probe
  misc_feature (1)..(25): SEQ ID NO: 131; WAN024DHZ_at; Start 340; Stop 364
cagtgctgaagaattggataaggta

SEQ ID NO: 158611 - DNA, 25 bp, Artificial
  probe
  misc_feature (1)..(25): SEQ ID NO: 131; WAN024DHZ_at; Start 93; Stop 117
tgtcaggctatatgaaaacagaaga

SEQ ID NO: 158612 - DNA, 25 bp, Artificial
  probe
  misc_feature (1)..(25): SEQ ID NO: 131; WAN024DHZ_at; Start 709; Stop 733
cgaaaaaattgctagtgtgatgatg

SEQ ID NO: 158613 - DNA, 25 bp, Artificial
  probe
  misc_feature (1)..(25): SEQ ID NO: 131; WAN024DHZ_at; Start 248; Stop 272
aagaaatattattcggcagatggcc

SEQ ID NO: 158614 - DNA, 25 bp, Artificial
  probe
  misc_feature (1)..(25): SEQ ID NO: 131; WAN024DHZ_at; Start 676; Stop 700
gaatgtggaatatgcttcagaccct

SEQ ID NO: 158615 - DNA, 25 bp, Artificial
  probe
  misc_feature (1)..(25): SEQ ID NO: 131; WAN024DHZ_at; Start 193; Stop 217
ggctcagaatgctagtatcccagta

SEQ ID NO: 158616 - DNA, 25 bp, Artificial
  probe
  misc_feature (1)..(25): SEQ ID NO: 131; WAN024DHZ_at; Start 111; Stop 135
cagaagatttacaagcgctagatgc

SEQ ID NO: 158617 - DNA, 25 bp, Artificial
  probe
  misc_feature (1)..(25): SEQ ID NO: 131; WAN024DHZ_at; Start 15; Stop 39
tatcgcaaggtagtgtcgtatggct

SEQ ID NO: 158618 - DNA, 25 bp, Artificial
  probe
  misc_feature (1)..(25): SEQ ID NO: 131; WAN024DHZ_at; Start 467; Stop 491
catagtgccctagaaagtaactggg

SEQ ID NO: 158619 - DNA, 25 bp, Artificial
  probe
  misc_feature (1)..(25): SEQ ID NO: 131; WAN024DHZ_at; Start 543; Stop 567
atgatacgaccccttacctttctgc

SEQ ID NO: 158620 - DNA, 25 bp, Artificial
  probe
  misc_feature (1)..(25): SEQ ID NO: 131; WAN024DHZ_at; Start 181; Stop 205
ttatcactatgtggctcagaatgct

SEQ ID NO: 158621 - DNA, 25 bp, Artificial
  probe
  misc_feature (1)..(25): SEQ ID NO: 131; WAN024DHZ_at; Start 66; Stop 90
agcgcttggctattactatttctgg

SEQ ID NO: 158622 - DNA, 25 bp, Artificial
  probe
  misc_feature (1)..(25): SEQ ID NO: 131; WAN024DHZ_at; Start 408; Stop 432
gcgctacttttaaggaagccgaaga

SEQ ID NO: 158623 - DNA, 25 bp, Artificial
  probe
  misc_feature (1)..(25): SEQ ID NO: 131; WAN024DHZ_at; Start 683; Stop 707
gaatatgcttcagacccttattggg

SEQ ID NO: 158624 - DNA, 25 bp, Artificial
  probe
  misc_feature (1)..(25): SEQ ID NO: 131; WAN024DHZ_at; Start 392; Stop 416
cttttggagaacaagggcgctactt

SEQ ID NO: 158625 - DNA, 25 bp, Artificial
  probe
  misc_feature (1)..(25): SEQ ID NO: 131; WAN024DHZ_at; Start 28; Stop 52
tgtcgtatggctagataaggataga

SEQ ID NO: 158626 - DNA, 25 bp, Artificial
  probe
  misc_feature (1)..(25): SEQ ID NO: 131; WAN024DHZ_at; Start 529; Stop 553
tggcattacagcctatgatacgacc

SEQ ID NO: 158627 - DNA, 25 bp, Artificial
  probe
  misc_feature (1)..(25): SEQ ID NO: 1645; WAN024DI2_at; Start 143; Stop 167
cagccgtttttagcctgagggagag

SEQ ID NO: 158628 - DNA, 25 bp, Artificial
  probe
  misc_feature (1)..(25): SEQ ID NO: 1645; WAN024DI2_at; Start 264; Stop 288
ccacgaagccttttgggtgaccttg

SEQ ID NO: 158629 - DNA, 25 bp, Artificial
  probe
  misc_feature (1)..(25): SEQ ID NO: 1645; WAN024DI2_at; Start 305; Stop 329
gcaccatgttaaccattatgacaaa

SEQ ID NO: 158630 - DNA, 25 bp, Artificial
  probe
  misc_feature (1)..(25): SEQ ID NO: 1645; WAN024DI2_at; Start 184; Stop 208
cattttgggacttcgcgtattctag

SEQ ID NO: 158631 - DNA, 25 bp, Artificial
  probe
  misc_feature (1)..(25): SEQ ID NO: 1645; WAN024DI2_at; Start 317; Stop 341
ccattatgacaaatgtagccatgaa

SEQ ID NO: 158632 - DNA, 25 bp, Artificial
  probe
  misc_feature (1)..(25): SEQ ID NO: 1645; WAN024DI2_at; Start 68; Stop 92
caggtattgctgtttttctagttct

SEQ ID NO: 158633 - DNA, 25 bp, Artificial
  probe
  misc_feature (1)..(25): SEQ ID NO: 1645; WAN024DI2_at; Start 176; Stop 200
agagtgttcattttgggacttcgcg

SEQ ID NO: 158634 - DNA, 25 bp, Artificial
  probe
  misc_feature (1)..(25): SEQ ID NO: 1645; WAN024DI2_at; Start 450; Stop 474
tatgggagtttttgtcgcaattatc

SEQ ID NO: 158635 - DNA, 25 bp, Artificial
  probe
  misc_feature (1)..(25): SEQ ID NO: 1645; WAN024DI2_at; Start 36; Stop 60
ccagttcaaacttggtatgcgaacc

SEQ ID NO: 158636 - DNA, 25 bp, Artificial
  probe
  misc_feature (1)..(25): SEQ ID NO: 1645; WAN024DI2_at; Start 481; Stop 505
tacgatattgatcgtattcgtctct

SEQ ID NO: 158637 - DNA, 25 bp, Artificial
  probe
  misc_feature (1)..(25): SEQ ID NO: 1645; WAN024DI2_at; Start 140; Stop 164
tgacagccgtttttagcctgaggga

SEQ ID NO: 158638 - DNA, 25 bp, Artificial
  probe
  misc_feature (1)..(25): SEQ ID NO: 1645; WAN024DI2_at; Start 290; Stop 314
tagttgttccaatctgcaccatgtt

SEQ ID NO: 158639 - DNA, 25 bp, Artificial
  probe
  misc_feature (1)..(25): SEQ ID NO: 1645; WAN024DI2_at; Start 204; Stop 228
tctaggaaatagtatcggtggactc

SEQ ID NO: 158640 - DNA, 25 bp, Artificial
  probe
  misc_feature (1)..(25): SEQ ID NO: 1645; WAN024DI2_at; Start 55; Stop 79
cgaacctttaaaacaggtattgctg

SEQ ID NO: 158641 - DNA, 25 bp, Artificial
  probe
  misc_feature (1)..(25): SEQ ID NO: 1645; WAN024DI2_at; Start 81; Stop 105
ttttctagttctcttgatttttggc

SEQ ID NO: 158642 - DNA, 25 bp, Artificial
  probe
  misc_feature (1)..(25): SEQ ID NO: 1645; WAN024DI2_at; Start 152; Stop 176
ttagcctgagggagagttttgatga

SEQ ID NO: 158643 - DNA, 25 bp, Artificial
  probe
  misc_feature (1)..(25): SEQ ID NO: 1645; WAN024DI2_at; Start 330; Stop 354
tgtagccatgaataacaaagcaggg

SEQ ID NO: 158644 - DNA, 25 bp, Artificial
  probe
  misc_feature (1)..(25): SEQ ID NO: 1645; WAN024DI2_at; Start 191; Stop 215
ggacttcgcgtattctaggaaatag

SEQ ID NO: 158645 - DNA, 25 bp, Artificial
  probe
  misc_feature (1)..(25): SEQ ID NO: 1645; WAN024DI2_at; Start 104; Stop 128
gcttttttggctggaaaggtcttca

SEQ ID NO: 158646 - DNA, 25 bp, Artificial
  probe
  misc_feature (1)..(25): SEQ ID NO: 1645; WAN024DI2_at; Start 232; Stop 256
gccttggtcttcttcttattaaata

SEQ ID NO: 158647 - DNA, 25 bp, Artificial
  probe
  misc_feature (1)..(25): SEQ ID NO: 1645; WAN024DI2_at; Start 19; Stop 43
tataaattcgataaatcccagttca

SEQ ID NO: 158648 - DNA, 25 bp, Artificial
  probe
  misc_feature (1)..(25): SEQ ID NO: 1645; WAN024DI2_at; Start 95; Stop 119
tgatttttggcttttttggctggaa

SEQ ID NO: 158649 - DNA, 25 bp, Artificial
  probe
  misc_feature (1)..(25): SEQ ID NO: 1645; WAN024DI2_at; Start 220; Stop 244
ggtggactctatgccttggtcttct

SEQ ID NO: 158650 - DNA, 25 bp, Artificial
  probe
  misc_feature (1)..(25): SEQ ID NO: 1645; WAN024DI2_at; Start 213; Stop 237
tagtatcggtggactctatgccttg

SEQ ID NO: 158651 - DNA, 25 bp, Artificial
  probe
  misc_feature (1)..(25): SEQ ID NO: 1645; WAN024DI2_at; Start 26; Stop 50
tcgataaatcccagttcaaacttgg

SEQ ID NO: 158652 - DNA, 25 bp, Artificial
  probe
  misc_feature (1)..(25): SEQ ID NO: 1645; WAN024DI2_at; Start 277; Stop 301
tgggtgaccttggtagttgttccaa

SEQ ID NO: 158653 - DNA, 25 bp, Artificial
  probe
  misc_feature (1)..(25): SEQ ID NO: 1645; WAN024DI2_at; Start 355; Stop 379
gttattggtggtgtagcagctatgt

SEQ ID NO: 158654 - DNA, 25 bp, Artificial
  probe
  misc_feature (1)..(25): SEQ ID NO: 1645; WAN024DI2_at; Start 297; Stop 321
tccaatctgcaccatgttaaccatt

SEQ ID NO: 158655 - DNA, 25 bp, Artificial
  probe
  misc_feature (1)..(25): SEQ ID NO: 1645; WAN024DI2_at; Start 126; Stop 150
tcaaattggtgctttgacagccgtt

SEQ ID NO: 158656 - DNA, 25 bp, Artificial
  probe
  misc_feature (1)..(25): SEQ ID NO: 1645; WAN024DI2_at; Start 461; Stop 485
ttgtcgcaattatcgtaaattacga

SEQ ID NO: 158657 - DNA, 25 bp, Artificial
  probe
  misc_feature (1)..(25): SEQ ID NO: 1645; WAN024DI2_at; Start 46; Stop 70
cttggtatgcgaacctttaaaacag

SEQ ID NO: 158658 - DNA, 25 bp, Artificial
  probe
  misc_feature (1)..(25): SEQ ID NO: 1645; WAN024DI2_at; Start 113; Stop 137
gctggaaaggtcttcaaattggtgc

SEQ ID NO: 158659 - DNA, 25 bp, Artificial
  probe
  misc_feature (1)..(25): SEQ ID NO: 1645; WAN024DI2_at; Start 490; Stop 514
gatcgtattcgtctctttttagaga

SEQ ID NO: 158660 - DNA, 25 bp, Artificial
  probe
  misc_feature (1)..(25): SEQ ID NO: 1645; WAN024DI2_at; Start 162; Stop 186
ggagagttttgatgagagtgttcat

SEQ ID NO: 158661 - DNA, 25 bp, Artificial
  probe
  misc_feature (1)..(25): SEQ ID NO: 5779; WAN024DI3_at; Start 55; Stop 79
tatcaggatgtgaacttggtttacc

SEQ ID NO: 158662 - DNA, 25 bp, Artificial
  probe
  misc_feature (1)..(25): SEQ ID NO: 5779; WAN024DI3_at; Start 40; Stop 64
gaagcttttgcttggtatcaggatg

SEQ ID NO: 158663 - DNA, 25 bp, Artificial
  probe
  misc_feature (1)..(25): SEQ ID NO: 5779; WAN024DI3_at; Start 292; Stop 316
gctttgattgaattggctcgagtaa

SEQ ID NO: 158664 - DNA, 25 bp, Artificial
  probe
  misc_feature (1)..(25): SEQ ID NO: 5779; WAN024DI3_at; Start 203; Stop 227
gggatattacactatctcaggataa

SEQ ID NO: 158665 - DNA, 25 bp, Artificial
  probe
  misc_feature (1)..(25): SEQ ID NO: 5779; WAN024DI3_at; Start 250; Stop 274
tccgcttaccaacatcgaggacttg

SEQ ID NO: 158666 - DNA, 25 bp, Artificial
  probe
  misc_feature (1)..(25): SEQ ID NO: 5779; WAN024DI3_at; Start 109; Stop 133
caagcgaccttggaagccatgtatt

SEQ ID NO: 158667 - DNA, 25 bp, Artificial
  probe
  misc_feature (1)..(25): SEQ ID NO: 5779; WAN024DI3_at; Start 21; Stop 45
taaggtcaatcattgtgaggaagct

SEQ ID NO: 158668 - DNA, 25 bp, Artificial
  probe
  misc_feature (1)..(25): SEQ ID NO: 5779; WAN024DI3_at; Start 13; Stop 37
ccttattataaggtcaatcattgtg

SEQ ID NO: 158669 - DNA, 25 bp, Artificial
  probe
  misc_feature (1)..(25): SEQ ID NO: 5779; WAN024DI3_at; Start 234; Stop 258
cattgtgattgggaattccgcttac

SEQ ID NO: 158670 - DNA, 25 bp, Artificial
  probe
  misc_feature (1)..(25): SEQ ID NO: 5779; WAN024DI3_at; Start 99; Stop 123
tccttacagtcaagcgaccttggaa

SEQ ID NO: 158671 - DNA, 25 bp, Artificial
  probe
  misc_feature (1)..(25): SEQ ID NO: 5779; WAN024DI3_at; Start 166; Stop 190
attgaagtcaaggagaagggagaat

SEQ ID NO: 158672 - DNA, 25 bp, Artificial
  probe
  misc_feature (1)..(25): SEQ ID NO: 5779; WAN024DI3_at; Start 103; Stop 127
tacagtcaagcgaccttggaagcca

SEQ ID NO: 158673 - DNA, 25 bp, Artificial
  probe
  misc_feature (1)..(25): SEQ ID NO: 5779; WAN024DI3_at; Start 76; Stop 100
tacctcgtagatggggtgaagcttc

SEQ ID NO: 158674 - DNA, 25 bp, Artificial
  probe
  misc_feature (1)..(25): SEQ ID NO: 5779; WAN024DI3_at; Start 287; Stop 311
taagtgctttgattgaattggctcg

SEQ ID NO: 158675 - DNA, 25 bp, Artificial
  probe
  misc_feature (1)..(25): SEQ ID NO: 5779; WAN024DI3_at; Start 307; Stop 331
gctcgagtaaaaggatggaaagaat

SEQ ID NO: 158676 - DNA, 25 bp, Artificial
  probe
  misc_feature (1)..(25): SEQ ID NO: 5779; WAN024DI3_at; Start 426; Stop 450
gagttttatattggaattagtctaa

SEQ ID NO: 158677 - DNA, 25 bp, Artificial
  probe
  misc_feature (1)..(25): SEQ ID NO: 5779; WAN024DI3_at; Start 114; Stop 138
gaccttggaagccatgtattcctat

SEQ ID NO: 158678 - DNA, 25 bp, Artificial
  probe
  misc_feature (1)..(25): SEQ ID NO: 5779; WAN024DI3_at; Start 253; Stop 277
gcttaccaacatcgaggacttggaa

SEQ ID NO: 158679 - DNA, 25 bp, Artificial
  probe
  misc_feature (1)..(25): SEQ ID NO: 5779; WAN024DI3_at; Start 262; Stop 286
catcgaggacttggaaaaaagattc

SEQ ID NO: 158680 - DNA, 25 bp, Artificial
  probe
  misc_feature (1)..(25): SEQ ID NO: 5779; WAN024DI3_at; Start 271; Stop 295
cttggaaaaaagattctaagtgctt

SEQ ID NO: 158681 - DNA, 25 bp, Artificial
  probe
  misc_feature (1)..(25): SEQ ID NO: 5779; WAN024DI3_at; Start 179; Stop 203
agaagggagaatggtttccaattgg

SEQ ID NO: 158682 - DNA, 25 bp, Artificial
  probe
  misc_feature (1)..(25): SEQ ID NO: 5779; WAN024DI3_at; Start 230; Stop 254
tccccattgtgattgggaattccgc

SEQ ID NO: 158683 - DNA, 25 bp, Artificial
  probe
  misc_feature (1)..(25): SEQ ID NO: 5779; WAN024DI3_at; Start 173; Stop 197
tcaaggagaagggagaatggtttcc

SEQ ID NO: 158684 - DNA, 25 bp, Artificial
  probe
  misc_feature (1)..(25): SEQ ID NO: 5779; WAN024DI3_at; Start 316; Stop 340
aaaggatggaaagaattgagagtca

SEQ ID NO: 158685 - DNA, 25 bp, Artificial
  probe
  misc_feature (1)..(25): SEQ ID NO: 5779; WAN024DI3_at; Start 90; Stop 114
ggtgaagcttccttacagtcaagcg

SEQ ID NO: 158686 - DNA, 25 bp, Artificial
  probe
  misc_feature (1)..(25): SEQ ID NO: 5779; WAN024DI3_at; Start 27; Stop 51
caatcattgtgaggaagcttttgct

SEQ ID NO: 158687 - DNA, 25 bp, Artificial
  probe
  misc_feature (1)..(25): SEQ ID NO: 5779; WAN024DI3_at; Start 65; Stop 89
tgaacttggtttacctcgtagatgg

SEQ ID NO: 158688 - DNA, 25 bp, Artificial
  probe
  misc_feature (1)..(25): SEQ ID NO: 5779; WAN024DI3_at; Start 301; Stop 325
gaattggctcgagtaaaaggatgga

SEQ ID NO: 158689 - DNA, 25 bp, Artificial
  probe
  misc_feature (1)..(25): SEQ ID NO: 5779; WAN024DI3_at; Start 392; Stop 416
gatttgtggaaaatggagcaacaga

SEQ ID NO: 158690 - DNA, 25 bp, Artificial
  probe
  misc_feature (1)..(25): SEQ ID NO: 5779; WAN024DI3_at; Start 215; Stop 239
tatctcaggataatctccccattgt

SEQ ID NO: 158691 - DNA, 25 bp, Artificial
  probe
  misc_feature (1)..(25): SEQ ID NO: 5779; WAN024DI3_at; Start 395; Stop 419
ttgtggaaaatggagcaacagaaaa

SEQ ID NO: 158692 - DNA, 25 bp, Artificial
  probe
  misc_feature (1)..(25): SEQ ID NO: 5779; WAN024DI3_at; Start 245; Stop 269
ggaattccgcttaccaacatcgagg

SEQ ID NO: 158693 - DNA, 25 bp, Artificial
  probe
  misc_feature (1)..(25): SEQ ID NO: 5779; WAN024DI3_at; Start 223; Stop 247
gataatctccccattgtgattggga

SEQ ID NO: 158694 - DNA, 25 bp, Artificial
  probe
  misc_feature (1)..(25): SEQ ID NO: 5779; WAN024DI3_at; Start 48; Stop 72
tgcttggtatcaggatgtgaacttg

SEQ ID NO: 158695 - DNA, 25 bp, Artificial
  probe
  misc_feature (1)..(25): SEQ ID NO: 928; WAN024DI4_at; Start 298; Stop 322
gatcgtatcctagctcaagatgggt

SEQ ID NO: 158696 - DNA, 25 bp, Artificial
  probe
  misc_feature (1)..(25): SEQ ID NO: 928; WAN024DI4_at; Start 147; Stop 171
tacagatgggcatcacagggcttat

SEQ ID NO: 158697 - DNA, 25 bp, Artificial
  probe
  misc_feature (1)..(25): SEQ ID NO: 928; WAN024DI4_at; Start 218; Stop 242
gagatggtggtgatgaactatatca

SEQ ID NO: 158698 - DNA, 25 bp, Artificial
  probe
  misc_feature (1)..(25): SEQ ID NO: 928; WAN024DI4_at; Start 141; Stop 165
gctgattacagatgggcatcacagg

SEQ ID NO: 158699 - DNA, 25 bp, Artificial
  probe
  misc_feature (1)..(25): SEQ ID NO: 928; WAN024DI4_at; Start 251; Stop 275
cgcaagcttgcgaggaaagaaagat

SEQ ID NO: 158700 - DNA, 25 bp, Artificial
  probe
  misc_feature (1)..(25): SEQ ID NO: 928; WAN024DI4_at; Start 232; Stop 256
gaactatatcatctctatgcgcaag

SEQ ID NO: 158701 - DNA, 25 bp, Artificial
  probe
  misc_feature (1)..(25): SEQ ID NO: 928; WAN024DI4_at; Start 309; Stop 333
agctcaagatgggtatgaagcaaaa

SEQ ID NO: 158702 - DNA, 25 bp, Artificial
  probe
  misc_feature (1)..(25): SEQ ID NO: 928; WAN024DI4_at; Start 30; Stop 54
gactcaactatatttatcagaaaag

SEQ ID NO: 158703 - DNA, 25 bp, Artificial
  probe
  misc_feature (1)..(25): SEQ ID NO: 928; WAN024DI4_at; Start 357; Stop 381
taatcaagcagcaactcttttgttg

SEQ ID NO: 158704 - DNA, 25 bp, Artificial
  probe
  misc_feature (1)..(25): SEQ ID NO: 928; WAN024DI4_at; Start 40; Stop 64
tatttatcagaaaagaagttgcaag

SEQ ID NO: 158705 - DNA, 25 bp, Artificial
  probe
  misc_feature (1)..(25): SEQ ID NO: 928; WAN024DI4_at; Start 329; Stop 353
caaaatggtataactggtgtgatgg

SEQ ID NO: 158706 - DNA, 25 bp, Artificial
  probe
  misc_feature (1)..(25): SEQ ID NO: 928; WAN024DI4_at; Start 136; Stop 160
tgtttgctgattacagatgggcatc

SEQ ID NO: 158707 - DNA, 25 bp, Artificial
  probe
  misc_feature (1)..(25): SEQ ID NO: 928; WAN024DI4_at; Start 349; Stop 373
gatggttttaatcaagcagcaactc

SEQ ID NO: 158708 - DNA, 25 bp, Artificial
  probe
  misc_feature (1)..(25): SEQ ID NO: 928; WAN024DI4_at; Start 69; Stop 93
tcagatgctttaccagtcggcagaa

SEQ ID NO: 158709 - DNA, 25 bp, Artificial
  probe
  misc_feature (1)..(25): SEQ ID NO: 928; WAN024DI4_at; Start 293; Stop 317
tagaagatcgtatcctagctcaaga

SEQ ID NO: 158710 - DNA, 25 bp, Artificial
  probe
  misc_feature (1)..(25): SEQ ID NO: 928; WAN024DI4_at; Start 72; Stop 96
gatgctttaccagtcggcagaaaca

SEQ ID NO: 158711 - DNA, 25 bp, Artificial
  probe
  misc_feature (1)..(25): SEQ ID NO: 928; WAN024DI4_at; Start 110; Stop 134
caatcagtattcttgcctttggaga

SEQ ID NO: 158712 - DNA, 25 bp, Artificial
  probe
  misc_feature (1)..(25): SEQ ID NO: 928; WAN024DI4_at; Start 64; Stop 88
gatattcagatgctttaccagtcgg

SEQ ID NO: 158713 - DNA, 25 bp, Artificial
  probe
  misc_feature (1)..(25): SEQ ID NO: 928; WAN024DI4_at; Start 365; Stop 389
cagcaactcttttgttgaaaaggta

SEQ ID NO: 158714 - DNA, 25 bp, Artificial
  probe
  misc_feature (1)..(25): SEQ ID NO: 928; WAN024DI4_at; Start 344; Stop 368
ggtgtgatggttttaatcaagcagc

SEQ ID NO: 158715 - DNA, 25 bp, Artificial
  probe
  misc_feature (1)..(25): SEQ ID NO: 928; WAN024DI4_at; Start 261; Stop 285
cgaggaaagaaagatttactctgtt

SEQ ID NO: 158716 - DNA, 25 bp, Artificial
  probe
  misc_feature (1)..(25): SEQ ID NO: 928; WAN024DI4_at; Start 193; Stop 217
gatacgatttctgctgagtgggata

SEQ ID NO: 158717 - DNA, 25 bp, Artificial
  probe
  misc_feature (1)..(25): SEQ ID NO: 928; WAN024DI4_at; Start 101; Stop 125
aagtcgatccaatcagtattcttgc

SEQ ID NO: 158718 - DNA, 25 bp, Artificial
  probe
  misc_feature (1)..(25): SEQ ID NO: 928; WAN024DI4_at; Start 49; Stop 73
gaaaagaagttgcaagatattcaga

SEQ ID NO: 158719 - DNA, 25 bp, Artificial
  probe
  misc_feature (1)..(25): SEQ ID NO: 928; WAN024DI4_at; Start 256; Stop 280
gcttgcgaggaaagaaagatttact

SEQ ID NO: 158720 - DNA, 25 bp, Artificial
  probe
  misc_feature (1)..(25): SEQ ID NO: 928; WAN024DI4_at; Start 238; Stop 262
tatcatctctatgcgcaagcttgcg

SEQ ID NO: 158721 - DNA, 25 bp, Artificial
  probe
  misc_feature (1)..(25): SEQ ID NO: 928; WAN024DI4_at; Start 278; Stop 302
actctgtttttgatttagaagatcg

SEQ ID NO: 158722 - DNA, 25 bp, Artificial
  probe
  misc_feature (1)..(25): SEQ ID NO: 928; WAN024DI4_at; Start 189; Stop 213
tcgggatacgatttctgctgagtgg

SEQ ID NO: 158723 - DNA, 25 bp, Artificial
  probe
  misc_feature (1)..(25): SEQ ID NO: 928; WAN024DI4_at; Start 150; Stop 174
agatgggcatcacagggcttatcag

SEQ ID NO: 158724 - DNA, 25 bp, Artificial
  probe
  misc_feature (1)..(25): SEQ ID NO: 928; WAN024DI4_at; Start 197; Stop 221
cgatttctgctgagtgggatagaga

SEQ ID NO: 158725 - DNA, 25 bp, Artificial
  probe
  misc_feature (1)..(25): SEQ ID NO: 928; WAN024DI4_at; Start 243; Stop 267
tctctatgcgcaagcttgcgaggaa

SEQ ID NO: 158726 - DNA, 25 bp, Artificial
  probe
  misc_feature (1)..(25): SEQ ID NO: 928; WAN024DI4_at; Start 125; Stop 149
cctttggagattgtttgctgattac

SEQ ID NO: 158727 - DNA, 25 bp, Artificial
  probe
  misc_feature (1)..(25): SEQ ID NO: 928; WAN024DI4_at; Start 322; Stop 346
tatgaagcaaaatggtataactggt

SEQ ID NO: 158728 - DNA, 25 bp, Artificial
  probe
  misc_feature (1)..(25): SEQ ID NO: 928; WAN024DI4_at; Start 306; Stop 330
cctagctcaagatgggtatgaagca

SEQ ID NO: 158729 - DNA, 25 bp, Artificial
  probe
  misc_feature (1)..(25): SEQ ID NO: 1663; WAN024DI5_at; Start 518; Stop 542
gagtctatctgggagttcattaccc

SEQ ID NO: 158730 - DNA, 25 bp, Artificial
  probe
  misc_feature (1)..(25): SEQ ID NO: 1663; WAN024DI5_at; Start 221; Stop 245
cagcttttgtcttttatcgtaagcg

SEQ ID NO: 158731 - DNA, 25 bp, Artificial
  probe
  misc_feature (1)..(25): SEQ ID NO: 1663; WAN024DI5_at; Start 500; Stop 524
tcagtgtgctggtatcaagagtcta

SEQ ID NO: 158732 - DNA, 25 bp, Artificial
  probe
  misc_feature (1)..(25): SEQ ID NO: 1663; WAN024DI5_at; Start 567; Stop 591
tgtgggcttgggagtcctgtttatc

SEQ ID NO: 158733 - DNA, 25 bp, Artificial
  probe
  misc_feature (1)..(25): SEQ ID NO: 1663; WAN024DI5_at; Start 266; Stop 290
tcatgctgggaaatctggctttggc

SEQ ID NO: 158734 - DNA, 25 bp, Artificial
  probe
  misc_feature (1)..(25): SEQ ID NO: 1663; WAN024DI5_at; Start 96; Stop 120
ggtcaattttgaccaatcgattcag

SEQ ID NO: 158735 - DNA, 25 bp, Artificial
  probe
  misc_feature (1)..(25): SEQ ID NO: 1663; WAN024DI5_at; Start 274; Stop 298
ggaaatctggctttggcaggtcttt

SEQ ID NO: 158736 - DNA, 25 bp, Artificial
  probe
  misc_feature (1)..(25): SEQ ID NO: 1663; WAN024DI5_at; Start 208; Stop 232
tgggttgtcattacagcttttgtct

SEQ ID NO: 158737 - DNA, 25 bp, Artificial
  probe
  misc_feature (1)..(25): SEQ ID NO: 1663; WAN024DI5_at; Start 311; Stop 335
ttaaaaatatctaccagcgcccacg

SEQ ID NO: 158738 - DNA, 25 bp, Artificial
  probe
  misc_feature (1)..(25): SEQ ID NO: 1663; WAN024DI5_at; Start 486; Stop 510
tggcctctacctagtcagtgtgctg

SEQ ID NO: 158739 - DNA, 25 bp, Artificial
  probe
  misc_feature (1)..(25): SEQ ID NO: 1663; WAN024DI5_at; Start 11; Stop 35
aacaaacatttttaatgaagggcag

SEQ ID NO: 158740 - DNA, 25 bp, Artificial
  probe
  misc_feature (1)..(25): SEQ ID NO: 1663; WAN024DI5_at; Start 114; Stop 138
gattcagactgccattcgaggagac

SEQ ID NO: 158741 - DNA, 25 bp, Artificial
  probe
  misc_feature (1)..(25): SEQ ID NO: 1663; WAN024DI5_at; Start 283; Stop 307
gctttggcaggtcttttaatcgtga

SEQ ID NO: 158742 - DNA, 25 bp, Artificial
  probe
  misc_feature (1)..(25): SEQ ID NO: 1663; WAN024DI5_at; Start 371; Stop 395
tttccttcccaagtgggcattctct

SEQ ID NO: 158743 - DNA, 25 bp, Artificial
  probe
  misc_feature (1)..(25): SEQ ID NO: 1663; WAN024DI5_at; Start 131; Stop 155
gaggagacttaccagattatttgac

SEQ ID NO: 158744 - DNA, 25 bp, Artificial
  probe
  misc_feature (1)..(25): SEQ ID NO: 1663; WAN024DI5_at; Start 124; Stop 148
gccattcgaggagacttaccagatt

SEQ ID NO: 158745 - DNA, 25 bp, Artificial
  probe
  misc_feature (1)..(25): SEQ ID NO: 1663; WAN024DI5_at; Start 187; Stop 211
gatatcccagtgattatcacttggg

SEQ ID NO: 158746 - DNA, 25 bp, Artificial
  probe
  misc_feature (1)..(25): SEQ ID NO: 1663; WAN024DI5_at; Start 102; Stop 126
ttttgaccaatcgattcagactgcc

SEQ ID NO: 158747 - DNA, 25 bp, Artificial
  probe
  misc_feature (1)..(25): SEQ ID NO: 1663; WAN024DI5_at; Start 507; Stop 531
gctggtatcaagagtctatctggga

SEQ ID NO: 158748 - DNA, 25 bp, Artificial
  probe
  misc_feature (1)..(25): SEQ ID NO: 1663; WAN024DI5_at; Start 201; Stop 225
tatcacttgggttgtcattacagct

SEQ ID NO: 158749 - DNA, 25 bp, Artificial
  probe
  misc_feature (1)..(25): SEQ ID NO: 1663; WAN024DI5_at; Start 368; Stop 392
gattttccttcccaagtgggcattc

SEQ ID NO: 158750 - DNA, 25 bp, Artificial
  probe
  misc_feature (1)..(25): SEQ ID NO: 1663; WAN024DI5_at; Start 289; Stop 313
gcaggtcttttaatcgtgaccttta

SEQ ID NO: 158751 - DNA, 25 bp, Artificial
  probe
  misc_feature (1)..(25): SEQ ID NO: 1663; WAN024DI5_at; Start 575; Stop 599
tgggagtcctgtttatcgagtttcc

SEQ ID NO: 158752 - DNA, 25 bp, Artificial
  probe
  misc_feature (1)..(25): SEQ ID NO: 1663; WAN024DI5_at; Start 237; Stop 261
tcgtaagcgatggaagatagaaagt

SEQ ID NO: 158753 - DNA, 25 bp, Artificial
  probe
  misc_feature (1)..(25): SEQ ID NO: 1663; WAN024DI5_at; Start 528; Stop 552
gggagttcattacccatcagacgtc

SEQ ID NO: 158754 - DNA, 25 bp, Artificial
  probe
  misc_feature (1)..(25): SEQ ID NO: 1663; WAN024DI5_at; Start 136; Stop 160
gacttaccagattatttgactattc

SEQ ID NO: 158755 - DNA, 25 bp, Artificial
  probe
  misc_feature (1)..(25): SEQ ID NO: 1663; WAN024DI5_at; Start 533; Stop 557
ttcattacccatcagacgtccttgc

SEQ ID NO: 158756 - DNA, 25 bp, Artificial
  probe
  misc_feature (1)..(25): SEQ ID NO: 1663; WAN024DI5_at; Start 481; Stop 505
gtccttggcctctacctagtcagtg

SEQ ID NO: 158757 - DNA, 25 bp, Artificial
  probe
  misc_feature (1)..(25): SEQ ID NO: 1663; WAN024DI5_at; Start 17; Stop 41
catttttaatgaagggcagttttgc

SEQ ID NO: 158758 - DNA, 25 bp, Artificial
  probe
  misc_feature (1)..(25): SEQ ID NO: 1663; WAN024DI5_at; Start 252; Stop 276
gatagaaagtttcttcatgctggga

SEQ ID NO: 158759 - DNA, 25 bp, Artificial
  probe
  misc_feature (1)..(25): SEQ ID NO: 1663; WAN024DI5_at; Start 174; Stop 198
cacacgtctgattgatatcccagtg

SEQ ID NO: 158760 - DNA, 25 bp, Artificial
  probe
  misc_feature (1)..(25): SEQ ID NO: 1663; WAN024DI5_at; Start 512; Stop 536
tatcaagagtctatctgggagttca

SEQ ID NO: 158761 - DNA, 25 bp, Artificial
  probe
  misc_feature (1)..(25): SEQ ID NO: 1663; WAN024DI5_at; Start 495; Stop 519
cctagtcagtgtgctggtatcaaga

SEQ ID NO: 158762 - DNA, 25 bp, Artificial
  probe
  misc_feature (1)..(25): SEQ ID NO: 1663; WAN024DI5_at; Start 120; Stop 144
gactgccattcgaggagacttacca

SEQ ID NO: 158763 - DNA, 25 bp, Artificial
  probe
  misc_feature (1)..(25): SEQ ID NO: 5468; WAN024DI6_at; Start 62; Stop 86
tctcatttgtgctgatgtactttga

SEQ ID NO: 158764 - DNA, 25 bp, Artificial
  probe
  misc_feature (1)..(25): SEQ ID NO: 5468; WAN024DI6_at; Start 96; Stop 120
tttaccagcggcatctttcctcaag

SEQ ID NO: 158765 - DNA, 25 bp, Artificial
  probe
  misc_feature (1)..(25): SEQ ID NO: 5468; WAN024DI6_at; Start 383; Stop 407
tggttctcaactatgtttatgctgt

SEQ ID NO: 158766 - DNA, 25 bp, Artificial
  probe
  misc_feature (1)..(25): SEQ ID NO: 5468; WAN024DI6_at; Start 458; Stop 482
tttccaactacctaatgaccatggt

SEQ ID NO: 158767 - DNA, 25 bp, Artificial
  probe
  misc_feature (1)..(25): SEQ ID NO: 5468; WAN024DI6_at; Start 336; Stop 360
cctactaggctctctagctggaact

SEQ ID NO: 158768 - DNA, 25 bp, Artificial
  probe
  misc_feature (1)..(25): SEQ ID NO: 5468; WAN024DI6_at; Start 408; Stop 432
tcctttgtacgctaagtttgctaac

SEQ ID NO: 158769 - DNA, 25 bp, Artificial
  probe
  misc_feature (1)..(25): SEQ ID NO: 5468; WAN024DI6_at; Start 101; Stop 125
cagcggcatctttcctcaagatcga

SEQ ID NO: 158770 - DNA, 25 bp, Artificial
  probe
  misc_feature (1)..(25): SEQ ID NO: 5468; WAN024DI6_at; Start 275; Stop 299
tgggagtttttgtcatcgtatttgc

SEQ ID NO: 158771 - DNA, 25 bp, Artificial
  probe
  misc_feature (1)..(25): SEQ ID NO: 5468; WAN024DI6_at; Start 479; Stop 503
tggtattaccttttaacttgattga

SEQ ID NO: 158772 - DNA, 25 bp, Artificial
  probe
  misc_feature (1)..(25): SEQ ID NO: 5468; WAN024DI6_at; Start 237; Stop 261
gaatacttacattggtttgccgatg

SEQ ID NO: 158773 - DNA, 25 bp, Artificial
  probe
  misc_feature (1)..(25): SEQ ID NO: 5468; WAN024DI6_at; Start 140; Stop 164
cagtccttgtgggtctggtggtcat

SEQ ID NO: 158774 - DNA, 25 bp, Artificial
  probe
  misc_feature (1)..(25): SEQ ID NO: 5468; WAN024DI6_at; Start 257; Stop 281
cgatgaatatcgtagctttgggagt

SEQ ID NO: 158775 - DNA, 25 bp, Artificial
  probe
  misc_feature (1)..(25): SEQ ID NO: 5468; WAN024DI6_at; Start 151; Stop 175
ggtctggtggtcatggatttgcctg

SEQ ID NO: 158776 - DNA, 25 bp, Artificial
  probe
  misc_feature (1)..(25): SEQ ID NO: 5468; WAN024DI6_at; Start 215; Stop 239
tgcttcttaacagccaaggagtgaa

SEQ ID NO: 158777 - DNA, 25 bp, Artificial
  probe
  misc_feature (1)..(25): SEQ ID NO: 5468; WAN024DI6_at; Start 452; Stop 476
tgggactttccaactacctaatgac

SEQ ID NO: 158778 - DNA, 25 bp, Artificial
  probe
  misc_feature (1)..(25): SEQ ID NO: 5468; WAN024DI6_at; Start 368; Stop 392
taaccttggccatgttggttctcaa

SEQ ID NO: 158779 - DNA, 25 bp, Artificial
  probe
  misc_feature (1)..(25): SEQ ID NO: 5468; WAN024DI6_at; Start 329; Stop 353
ttcgtttcctactaggctctctagc

SEQ ID NO: 158780 - DNA, 25 bp, Artificial
  probe
  misc_feature (1)..(25): SEQ ID NO: 5468; WAN024DI6_at; Start 2; Stop 26
tggaggaacctgttatgacaaacac

SEQ ID NO: 158781 - DNA, 25 bp, Artificial
  probe
  misc_feature (1)..(25): SEQ ID NO: 5468; WAN024DI6_at; Start 267; Stop 291
cgtagctttgggagtttttgtcatc

SEQ ID NO: 158782 - DNA, 25 bp, Artificial
  probe
  misc_feature (1)..(25): SEQ ID NO: 5468; WAN024DI6_at; Start 466; Stop 490
tacctaatgaccatggtattacctt

SEQ ID NO: 158783 - DNA, 25 bp, Artificial
  probe
  misc_feature (1)..(25): SEQ ID NO: 5468; WAN024DI6_at; Start 423; Stop 447
gtttgctaactttgatattggaaaa

SEQ ID NO: 158784 - DNA, 25 bp, Artificial
  probe
  misc_feature (1)..(25): SEQ ID NO: 5468; WAN024DI6_at; Start 107; Stop 131
catctttcctcaagatcgaatttag

SEQ ID NO: 158785 - DNA, 25 bp, Artificial
  probe
  misc_feature (1)..(25): SEQ ID NO: 5468; WAN024DI6_at; Start 15; Stop 39
tatgacaaacacacgtcgactttcg

SEQ ID NO: 158786 - DNA, 25 bp, Artificial
  probe
  misc_feature (1)..(25): SEQ ID NO: 5468; WAN024DI6_at; Start 122; Stop 146
tcgaatttagtatcttgccagtcct

SEQ ID NO: 158787 - DNA, 25 bp, Artificial
  probe
  misc_feature (1)..(25): SEQ ID NO: 5468; WAN024DI6_at; Start 180; Stop 204
tctaggagtgctcttgcttcgctca

SEQ ID NO: 158788 - DNA, 25 bp, Artificial
  probe
  misc_feature (1)..(25): SEQ ID NO: 5468; WAN024DI6_at; Start 26; Stop 50
cacgtcgactttcgaccattgcaat

SEQ ID NO: 158789 - DNA, 25 bp, Artificial
  probe
  misc_feature (1)..(25): SEQ ID NO: 5468; WAN024DI6_at; Start 246; Stop 270
cattggtttgccgatgaatatcgta

SEQ ID NO: 158790 - DNA, 25 bp, Artificial
  probe
  misc_feature (1)..(25): SEQ ID NO: 5468; WAN024DI6_at; Start 288; Stop 312
catcgtatttgctttgatttggaaa

SEQ ID NO: 158791 - DNA, 25 bp, Artificial
  probe
  misc_feature (1)..(25): SEQ ID NO: 5468; WAN024DI6_at; Start 515; Stop 539
tttccgtttcattctggttgttgta

SEQ ID NO: 158792 - DNA, 25 bp, Artificial
  probe
  misc_feature (1)..(25): SEQ ID NO: 5468; WAN024DI6_at; Start 132; Stop 156
tatcttgccagtccttgtgggtctg

SEQ ID NO: 158793 - DNA, 25 bp, Artificial
  probe
  misc_feature (1)..(25): SEQ ID NO: 5468; WAN024DI6_at; Start 400; Stop 424
tatgctgttcctttgtacgctaagt

SEQ ID NO: 158794 - DNA, 25 bp, Artificial
  probe
  misc_feature (1)..(25): SEQ ID NO: 5468; WAN024DI6_at; Start 222; Stop 246
taacagccaaggagtgaatacttac

SEQ ID NO: 158795 - DNA, 25 bp, Artificial
  probe
  misc_feature (1)..(25): SEQ ID NO: 5468; WAN024DI6_at; Start 88; Stop 112
tttccgcttttaccagcggcatctt

SEQ ID NO: 158796 - DNA, 25 bp, Artificial
  probe
  misc_feature (1)..(25): SEQ ID NO: 5468; WAN024DI6_at; Start 56; Stop 80
cagccatctcatttgtgctgatgta

SEQ ID NO: 158797 - DNA, 25 bp, Artificial
  probe
  misc_feature (1)..(25): SEQ ID NO: 1280; WAN024DI7_at; Start 479; Stop 503
cagatggacagcacgcagagaaaga

SEQ ID NO: 158798 - DNA, 25 bp, Artificial
  probe
  misc_feature (1)..(25): SEQ ID NO: 1280; WAN024DI7_at; Start 489; Stop 513
gcacgcagagaaagaatggctccaa

SEQ ID NO: 158799 - DNA, 25 bp, Artificial
  probe
  misc_feature (1)..(25): SEQ ID NO: 1280; WAN024DI7_at; Start 666; Stop 690
tggaaactatgctgataaagaatgg

SEQ ID NO: 158800 - DNA, 25 bp, Artificial
  probe
  misc_feature (1)..(25): SEQ ID NO: 1280; WAN024DI7_at; Start 239; Stop 263
ctaactatgctgaaaatgaatggct

SEQ ID NO: 158801 - DNA, 25 bp, Artificial
  probe
  misc_feature (1)..(25): SEQ ID NO: 1280; WAN024DI7_at; Start 442; Stop 466
tatgattctcaatacgatgcttggt

SEQ ID NO: 158802 - DNA, 25 bp, Artificial
  probe
  misc_feature (1)..(25): SEQ ID NO: 1280; WAN024DI7_at; Start 411; Stop 435
aacaggtgccaaagtaatagaagac

SEQ ID NO: 158803 - DNA, 25 bp, Artificial
  probe
  misc_feature (1)..(25): SEQ ID NO: 1280; WAN024DI7_at; Start 610; Stop 634
cagcaaggttggctttttgacaaac

SEQ ID NO: 158804 - DNA, 25 bp, Artificial
  probe
  misc_feature (1)..(25): SEQ ID NO: 1280; WAN024DI7_at; Start 398; Stop 422
cctatgttggtgcaacaggtgccaa

SEQ ID NO: 158805 - DNA, 25 bp, Artificial
  probe
  misc_feature (1)..(25): SEQ ID NO: 1280; WAN024DI7_at; Start 135; Stop 159
tacttggcaaggaaaacagtatctg

SEQ ID NO: 158806 - DNA, 25 bp, Artificial
  probe
  misc_feature (1)..(25): SEQ ID NO: 1280; WAN024DI7_at; Start 268; Stop 292
caaggtgacgactatttttacctca

SEQ ID NO: 158807 - DNA, 25 bp, Artificial
  probe
  misc_feature (1)..(25): SEQ ID NO: 1280; WAN024DI7_at; Start 151; Stop 175
cagtatctgaaagaagatggcagtc

SEQ ID NO: 158808 - DNA, 25 bp, Artificial
  probe
  misc_feature (1)..(25): SEQ ID NO: 1280; WAN024DI7_at; Start 30; Stop 54
aataaataagaacagaggaagaagg

SEQ ID NO: 158809 - DNA, 25 bp, Artificial
  probe
  misc_feature (1)..(25): SEQ ID NO: 1280; WAN024DI7_at; Start 501; Stop 525
agaatggctccaaattaaagggaag

SEQ ID NO: 158810 - DNA, 25 bp, Artificial
  probe
  misc_feature (1)..(25): SEQ ID NO: 1280; WAN024DI7_at; Start 389; Stop 413
taggaacttcctatgttggtgcaac

SEQ ID NO: 158811 - DNA, 25 bp, Artificial
  probe
  misc_feature (1)..(25): SEQ ID NO: 1280; WAN024DI7_at; Start 101; Stop 125
tagctagtccagagggtgcaatggc

SEQ ID NO: 158812 - DNA, 25 bp, Artificial
  probe
  misc_feature (1)..(25): SEQ ID NO: 1280; WAN024DI7_at; Start 524; Stop 548
aggactattatttcaaatccggtgg

SEQ ID NO: 158813 - DNA, 25 bp, Artificial
  probe
  misc_feature (1)..(25): SEQ ID NO: 1280; WAN024DI7_at; Start 351; Stop 375
tcttgaccaagatggaaagatgaaa

SEQ ID NO: 158814 - DNA, 25 bp, Artificial
  probe
  misc_feature (1)..(25): SEQ ID NO: 1280; WAN024DI7_at; Start 336; Stop 360
gggagccttttattatcttgaccaa

SEQ ID NO: 158815 - DNA, 25 bp, Artificial
  probe
  misc_feature (1)..(25): SEQ ID NO: 1280; WAN024DI7_at; Start 288; Stop 312
cctcaaatctggtggctatatggcc

SEQ ID NO: 158816 - DNA, 25 bp, Artificial
  probe
  misc_feature (1)..(25): SEQ ID NO: 1280; WAN024DI7_at; Start 119; Stop 143
caatggctagtgatggtacttggca

SEQ ID NO: 158817 - DNA, 25 bp, Artificial
  probe
  misc_feature (1)..(25): SEQ ID NO: 1280; WAN024DI7_at; Start 227; Stop 251
taaaagcagatgctaactatgctga

SEQ ID NO: 158818 - DNA, 25 bp, Artificial
  probe
  misc_feature (1)..(25): SEQ ID NO: 1280; WAN024DI7_at; Start 377; Stop 401
gaaatgcttgggtaggaacttccta

SEQ ID NO: 158819 - DNA, 25 bp, Artificial
  probe
  misc_feature (1)..(25): SEQ ID NO: 1280; WAN024DI7_at; Start 594; Stop 618
tagtggtgccaaagtacagcaaggt

SEQ ID NO: 158820 - DNA, 25 bp, Artificial
  probe
  misc_feature (1)..(25): SEQ ID NO: 1280; WAN024DI7_at; Start 469; Stop 493
tatatcaaagcagatggacagcacg

SEQ ID NO: 158821 - DNA, 25 bp, Artificial
  probe
  misc_feature (1)..(25): SEQ ID NO: 1280; WAN024DI7_at; Start 92; Stop 116
tatttttcttagctagtccagaggg

SEQ ID NO: 158822 - DNA, 25 bp, Artificial
  probe
  misc_feature (1)..(25): SEQ ID NO: 1280; WAN024DI7_at; Start 558; Stop 582
gacaagtcagtggattaatcaagct

SEQ ID NO: 158823 - DNA, 25 bp, Artificial
  probe
  misc_feature (1)..(25): SEQ ID NO: 1280; WAN024DI7_at; Start 211; Stop 235
caatcttggttctatataaaagcag

SEQ ID NO: 158824 - DNA, 25 bp, Artificial
  probe
  misc_feature (1)..(25): SEQ ID NO: 1280; WAN024DI7_at; Start 580; Stop 604
gcttatgtgaatgctagtggtgcca

SEQ ID NO: 158825 - DNA, 25 bp, Artificial
  probe
  misc_feature (1)..(25): SEQ ID NO: 1280; WAN024DI7_at; Start 256; Stop 280
gaatggctaaagcaaggtgacgact

SEQ ID NO: 158826 - DNA, 25 bp, Artificial
  probe
  misc_feature (1)..(25): SEQ ID NO: 1280; WAN024DI7_at; Start 156; Stop 180
tctgaaagaagatggcagtcaagca

SEQ ID NO: 158827 - DNA, 25 bp, Artificial
  probe
  misc_feature (1)..(25): SEQ ID NO: 1280; WAN024DI7_at; Start 320; Stop 344
aatgggtagaagacaagggagcctt

SEQ ID NO: 158828 - DNA, 25 bp, Artificial
  probe
  misc_feature (1)..(25): SEQ ID NO: 1280; WAN024DI7_at; Start 454; Stop 478
tacgatgcttggttttatatcaaag

SEQ ID NO: 158829 - DNA, 25 bp, Artificial
  probe
  misc_feature (1)..(25): SEQ ID NO: 1280; WAN024DI7_at; Start 539; Stop 563
aatccggtggttatctactgacaag

SEQ ID NO: 158830 - DNA, 25 bp, Artificial
  probe
  misc_feature (1)..(25): SEQ ID NO: 1280; WAN024DI7_at; Start 302; Stop 326
gctatatggccaaatcagaatgggt

SEQ ID NO: 158831 - DNA, 25 bp, Artificial
  probe
  misc_feature (1)..(25): SEQ ID NO: 4277; WAN024DI8_at; Start 477; Stop 501
tcttcgccagcagaactttgcaggt

SEQ ID NO: 158832 - DNA, 25 bp, Artificial
  probe
  misc_feature (1)..(25): SEQ ID NO: 4277; WAN024DI8_at; Start 263; Stop 287
tctatctgatttcgaaattcgcgga

SEQ ID NO: 158833 - DNA, 25 bp, Artificial
  probe
  misc_feature (1)..(25): SEQ ID NO: 4277; WAN024DI8_at; Start 44; Stop 68
caaatcacattgtattatttgaacc

SEQ ID NO: 158834 - DNA, 25 bp, Artificial
  probe
  misc_feature (1)..(25): SEQ ID NO: 4277; WAN024DI8_at; Start 420; Stop 444
tgaacatgtccgcagtctcaatgtg

SEQ ID NO: 158835 - DNA, 25 bp, Artificial
  probe
  misc_feature (1)..(25): SEQ ID NO: 4277; WAN024DI8_at; Start 450; Stop 474
taccgtctgcatgattgtctatgag

SEQ ID NO: 158836 - DNA, 25 bp, Artificial
  probe
  misc_feature (1)..(25): SEQ ID NO: 4277; WAN024DI8_at; Start 485; Stop 509
agcagaactttgcaggtcttgagct

SEQ ID NO: 158837 - DNA, 25 bp, Artificial
  probe
  misc_feature (1)..(25): SEQ ID NO: 4277; WAN024DI8_at; Start 435; Stop 459
tctcaatgtgtctaataccgtctgc

SEQ ID NO: 158838 - DNA, 25 bp, Artificial
  probe
  misc_feature (1)..(25): SEQ ID NO: 4277; WAN024DI8_at; Start 417; Stop 441
tgatgaacatgtccgcagtctcaat

SEQ ID NO: 158839 - DNA, 25 bp, Artificial
  probe
  misc_feature (1)..(25): SEQ ID NO: 4277; WAN024DI8_at; Start 127; Stop 151
ctccacatcatcaagcctatgggct

SEQ ID NO: 158840 - DNA, 25 bp, Artificial
  probe
  misc_feature (1)..(25): SEQ ID NO: 4277; WAN024DI8_at; Start 413; Stop 437
tgaatgatgaacatgtccgcagtct

SEQ ID NO: 158841 - DNA, 25 bp, Artificial
  probe
  misc_feature (1)..(25): SEQ ID NO: 4277; WAN024DI8_at; Start 26; Stop 50
aaaggaagcaagtcatgacaaatca

SEQ ID NO: 158842 - DNA, 25 bp, Artificial
  probe
  misc_feature (1)..(25): SEQ ID NO: 4277; WAN024DI8_at; Start 33; Stop 57
gcaagtcatgacaaatcacattgta

SEQ ID NO: 158843 - DNA, 25 bp, Artificial
  probe
  misc_feature (1)..(25): SEQ ID NO: 4277; WAN024DI8_at; Start 90; Stop 114
caatatcgcgcgtacttgcgctgcg

SEQ ID NO: 158844 - DNA, 25 bp, Artificial
  probe
  misc_feature (1)..(25): SEQ ID NO: 4277; WAN024DI8_at; Start 514; Stop 538
catacctatgaagtggataaattga

SEQ ID NO: 158845 - DNA, 25 bp, Artificial
  probe
  misc_feature (1)..(25): SEQ ID NO: 4277; WAN024DI8_at; Start 467; Stop 491
tctatgaggctcttcgccagcagaa

SEQ ID NO: 158846 - DNA, 25 bp, Artificial
  probe
  misc_feature (1)..(25): SEQ ID NO: 4277; WAN024DI8_at; Start 134; Stop 158
tcatcaagcctatgggctttcctat

SEQ ID NO: 158847 - DNA, 25 bp, Artificial
  probe
  misc_feature (1)..(25): SEQ ID NO: 4277; WAN024DI8_at; Start 455; Stop 479
tctgcatgattgtctatgaggctct

SEQ ID NO: 158848 - DNA, 25 bp, Artificial
  probe
  misc_feature (1)..(25): SEQ ID NO: 4277; WAN024DI8_at; Start 428; Stop 452
tccgcagtctcaatgtgtctaatac

SEQ ID NO: 158849 - DNA, 25 bp, Artificial
  probe
  misc_feature (1)..(25): SEQ ID NO: 4277; WAN024DI8_at; Start 99; Stop 123
gcgtacttgcgctgcgaccaattct

SEQ ID NO: 158850 - DNA, 25 bp, Artificial
  probe
  misc_feature (1)..(25): SEQ ID NO: 4277; WAN024DI8_at; Start 459; Stop 483
catgattgtctatgaggctcttcgc

SEQ ID NO: 158851 - DNA, 25 bp, Artificial
  probe
  misc_feature (1)..(25): SEQ ID NO: 4277; WAN024DI8_at; Start 520; Stop 544
tatgaagtggataaattgaaataac

SEQ ID NO: 158852 - DNA, 25 bp, Artificial
  probe
  misc_feature (1)..(25): SEQ ID NO: 4277; WAN024DI8_at; Start 93; Stop 117
tatcgcgcgtacttgcgctgcgacc

SEQ ID NO: 158853 - DNA, 25 bp, Artificial
  probe
  misc_feature (1)..(25): SEQ ID NO: 4277; WAN024DI8_at; Start 462; Stop 486
gattgtctatgaggctcttcgccag

SEQ ID NO: 158854 - DNA, 25 bp, Artificial
  probe
  misc_feature (1)..(25): SEQ ID NO: 4277; WAN024DI8_at; Start 424; Stop 448
catgtccgcagtctcaatgtgtcta

SEQ ID NO: 158855 - DNA, 25 bp, Artificial
  probe
  misc_feature (1)..(25): SEQ ID NO: 4277; WAN024DI8_at; Start 29; Stop 53
ggaagcaagtcatgacaaatcacat

SEQ ID NO: 158856 - DNA, 25 bp, Artificial
  probe
  misc_feature (1)..(25): SEQ ID NO: 4277; WAN024DI8_at; Start 445; Stop 469
tctaataccgtctgcatgattgtct

SEQ ID NO: 158857 - DNA, 25 bp, Artificial
  probe
  misc_feature (1)..(25): SEQ ID NO: 4277; WAN024DI8_at; Start 469; Stop 493
tatgaggctcttcgccagcagaact

SEQ ID NO: 158858 - DNA, 25 bp, Artificial
  probe
  misc_feature (1)..(25): SEQ ID NO: 4277; WAN024DI8_at; Start 474; Stop 498
ggctcttcgccagcagaactttgca

SEQ ID NO: 158859 - DNA, 25 bp, Artificial
  probe
  misc_feature (1)..(25): SEQ ID NO: 4277; WAN024DI8_at; Start 439; Stop 463
aatgtgtctaataccgtctgcatga

SEQ ID NO: 158860 - DNA, 25 bp, Artificial
  probe
  misc_feature (1)..(25): SEQ ID NO: 4277; WAN024DI8_at; Start 482; Stop 506
gccagcagaactttgcaggtcttga

SEQ ID NO: 158861 - DNA, 25 bp, Artificial
  probe
  misc_feature (1)..(25): SEQ ID NO: 4277; WAN024DI8_at; Start 431; Stop 455
gcagtctcaatgtgtctaataccgt

SEQ ID NO: 158862 - DNA, 25 bp, Artificial
  probe
  misc_feature (1)..(25): SEQ ID NO: 4277; WAN024DI8_at; Start 204; Stop 228
gctagagatttatttttacgagagt

SEQ ID NO: 158863 - DNA, 25 bp, Artificial
  probe
  misc_feature (1)..(25): SEQ ID NO: 4277; WAN024DI8_at; Start 267; Stop 291
tctgatttcgaaattcgcggaaaaa

SEQ ID NO: 158864 - DNA, 25 bp, Artificial
  probe
  misc_feature (1)..(25): SEQ ID NO: 4277; WAN024DI8_at; Start 472; Stop 496
gaggctcttcgccagcagaactttg

SEQ ID NO: 158865 - DNA, 25 bp, Artificial
  probe
  misc_feature (1)..(25): SEQ ID NO: 2160; WAN024DI9_at; Start 93; Stop 117
tgttccaaatacaagcatccagctt

SEQ ID NO: 158866 - DNA, 25 bp, Artificial
  probe
  misc_feature (1)..(25): SEQ ID NO: 2160; WAN024DI9_at; Start 501; Stop 525
tgcctatgcaggaacccaaactcgt

SEQ ID NO: 158867 - DNA, 25 bp, Artificial
  probe
  misc_feature (1)..(25): SEQ ID NO: 2160; WAN024DI9_at; Start 372; Stop 396
gggtgtcttggcaccacttggagat

SEQ ID NO: 158868 - DNA, 25 bp, Artificial
  probe
  misc_feature (1)..(25): SEQ ID NO: 2160; WAN024DI9_at; Start 143; Stop 167
ctattatttttggaccgattatcgg

SEQ ID NO: 158869 - DNA, 25 bp, Artificial
  probe
  misc_feature (1)..(25): SEQ ID NO: 2160; WAN024DI9_at; Start 121; Stop 145
tatgcggtacaagcgctactttcta

SEQ ID NO: 158870 - DNA, 25 bp, Artificial
  probe
  misc_feature (1)..(25): SEQ ID NO: 2160; WAN024DI9_at; Start 32; Stop 56
ttgctgtcggaattggcgctgccct

SEQ ID NO: 158871 - DNA, 25 bp, Artificial
  probe
  misc_feature (1)..(25): SEQ ID NO: 2160; WAN024DI9_at; Start 108; Stop 132
catccagcttcagtatgcggtacaa

SEQ ID NO: 158872 - DNA, 25 bp, Artificial
  probe
  misc_feature (1)..(25): SEQ ID NO: 2160; WAN024DI9_at; Start 341; Stop 365
tcattcaactacttgcaaatgccct

SEQ ID NO: 158873 - DNA, 25 bp, Artificial
  probe
  misc_feature (1)..(25): SEQ ID NO: 2160; WAN024DI9_at; Start 467; Stop 491
tatctgtagctattgcaggaactct

SEQ ID NO: 158874 - DNA, 25 bp, Artificial
  probe
  misc_feature (1)..(25): SEQ ID NO: 2160; WAN024DI9_at; Start 71; Stop 95
ggatgatcaacattccaacccctgt

SEQ ID NO: 158875 - DNA, 25 bp, Artificial
  probe
  misc_feature (1)..(25): SEQ ID NO: 2160; WAN024DI9_at; Start 471; Stop 495
tgtagctattgcaggaactcttctc

SEQ ID NO: 158876 - DNA, 25 bp, Artificial
  probe
  misc_feature (1)..(25): SEQ ID NO: 2160; WAN024DI9_at; Start 452; Stop 476
gaattgccaatggtgtatctgtagc

SEQ ID NO: 158877 - DNA, 25 bp, Artificial
  probe
  misc_feature (1)..(25): SEQ ID NO: 2160; WAN024DI9_at; Start 229; Stop 253
tggacttggattatcgctagcggac

SEQ ID NO: 158878 - DNA, 25 bp, Artificial
  probe
  misc_feature (1)..(25): SEQ ID NO: 2160; WAN024DI9_at; Start 40; Stop 64
ggaattggcgctgccctctttgtcg

SEQ ID NO: 158879 - DNA, 25 bp, Artificial
  probe
  misc_feature (1)..(25): SEQ ID NO: 2160; WAN024DI9_at; Start 305; Stop 329
gtgtttttgactggaaagatattct

SEQ ID NO: 158880 - DNA, 25 bp, Artificial
  probe
  misc_feature (1)..(25): SEQ ID NO: 2160; WAN024DI9_at; Start 131; Stop 155
aagcgctactttctattatttttgg

SEQ ID NO: 158881 - DNA, 25 bp, Artificial
  probe
  misc_feature (1)..(25): SEQ ID NO: 2160; WAN024DI9_at; Start 484; Stop 508
ggaactcttctcttacttgcctatg

SEQ ID NO: 158882 - DNA, 25 bp, Artificial
  probe
  misc_feature (1)..(25): SEQ ID NO: 2160; WAN024DI9_at; Start 385; Stop 409
ccacttggagatgttgtgatttatc

SEQ ID NO: 158883 - DNA, 25 bp, Artificial
  probe
  misc_feature (1)..(25): SEQ ID NO: 2160; WAN024DI9_at; Start 183; Stop 207
gattggtcatgcaatcaaggactct

SEQ ID NO: 158884 - DNA, 25 bp, Artificial
  probe
  misc_feature (1)..(25): SEQ ID NO: 2160; WAN024DI9_at; Start 399; Stop 423
tgtgatttatcaagaagcggcagaa

SEQ ID NO: 158885 - DNA, 25 bp, Artificial
  probe
  misc_feature (1)..(25): SEQ ID NO: 2160; WAN024DI9_at; Start 436; Stop 460
caagggattgttgcgggaattgcca

SEQ ID NO: 158886 - DNA, 25 bp, Artificial
  probe
  misc_feature (1)..(25): SEQ ID NO: 2160; WAN024DI9_at; Start 523; Stop 547
cgtgcaggaagtttgaaaaaggact

SEQ ID NO: 158887 - DNA, 25 bp, Artificial
  probe
  misc_feature (1)..(25): SEQ ID NO: 2160; WAN024DI9_at; Start 222; Stop 246
tctatggtggacttggattatcgct

SEQ ID NO: 158888 - DNA, 25 bp, Artificial
  probe
  misc_feature (1)..(25): SEQ ID NO: 2160; WAN024DI9_at; Start 412; Stop 436
gaagcggcagaaaaagtatttgcac

SEQ ID NO: 158889 - DNA, 25 bp, Artificial
  probe
  misc_feature (1)..(25): SEQ ID NO: 2160; WAN024DI9_at; Start 86; Stop 110
caacccctgttccaaatacaagcat

SEQ ID NO: 158890 - DNA, 25 bp, Artificial
  probe
  misc_feature (1)..(25): SEQ ID NO: 2160; WAN024DI9_at; Start 52; Stop 76
gccctctttgtcgtcatcgggatga

SEQ ID NO: 158891 - DNA, 25 bp, Artificial
  probe
  misc_feature (1)..(25): SEQ ID NO: 2160; WAN024DI9_at; Start 63; Stop 87
cgtcatcgggatgatcaacattcca

SEQ ID NO: 158892 - DNA, 25 bp, Artificial
  probe
  misc_feature (1)..(25): SEQ ID NO: 2160; WAN024DI9_at; Start 421; Stop 445
gaaaaagtatttgcacaagggattg

SEQ ID NO: 158893 - DNA, 25 bp, Artificial
  probe
  misc_feature (1)..(25): SEQ ID NO: 2160; WAN024DI9_at; Start 494; Stop 518
tcttacttgcctatgcaggaaccca

SEQ ID NO: 158894 - DNA, 25 bp, Artificial
  probe
  misc_feature (1)..(25): SEQ ID NO: 2160; WAN024DI9_at; Start 236; Stop 260
ggattatcgctagcggactctttgg

SEQ ID NO: 158895 - DNA, 25 bp, Artificial
  probe
  misc_feature (1)..(25): SEQ ID NO: 2160; WAN024DI9_at; Start 349; Stop 373
ctacttgcaaatgcccttgtttggg

SEQ ID NO: 158896 - DNA, 25 bp, Artificial
  probe
  misc_feature (1)..(25): SEQ ID NO: 2160; WAN024DI9_at; Start 509; Stop 533
caggaacccaaactcgtgcaggaag

SEQ ID NO: 158897 - DNA, 25 bp, Artificial
  probe
  misc_feature (1)..(25): SEQ ID NO: 2160; WAN024DI9_at; Start 17; Stop 41
caattaaacaagttgttgctgtcgg

SEQ ID NO: 158898 - DNA, 25 bp, Artificial
  probe
  misc_feature (1)..(25): SEQ ID NO: 2160; WAN024DI9_at; Start 187; Stop 211
ggtcatgcaatcaaggactctcttg

SEQ ID NO: 158899 - DNA, 25 bp, Artificial
  probe
  misc_feature (1)..(25): SEQ ID NO: 2143; WAN024DIA_at; Start 353; Stop 377
tacatcattttgattcgcctcagaa

SEQ ID NO: 158900 - DNA, 25 bp, Artificial
  probe
  misc_feature (1)..(25): SEQ ID NO: 2143; WAN024DIA_at; Start 1246; Stop 1270
gatagaggagtcaatattcaaggct

SEQ ID NO: 158901 - DNA, 25 bp, Artificial
  probe
  misc_feature (1)..(25): SEQ ID NO: 2143; WAN024DIA_at; Start 1196; Stop 1220
agagaatccgttatattgagcaaca

SEQ ID NO: 158902 - DNA, 25 bp, Artificial
  probe
  misc_feature (1)..(25): SEQ ID NO: 2143; WAN024DIA_at; Start 764; Stop 788
tgggctactacagtgaggacacgct

SEQ ID NO: 158903 - DNA, 25 bp, Artificial
  probe
  misc_feature (1)..(25): SEQ ID NO: 2143; WAN024DIA_at; Start 751; Stop 775
gatggaacttttttgggctactaca

SEQ ID NO: 158904 - DNA, 25 bp, Artificial
  probe
  misc_feature (1)..(25): SEQ ID NO: 2143; WAN024DIA_at; Start 704; Stop 728
ttttggcagctaaacggtatgatgt

SEQ ID NO: 158905 - DNA, 25 bp, Artificial
  probe
  misc_feature (1)..(25): SEQ ID NO: 2143; WAN024DIA_at; Start 671; Stop 695
caggctatcctattgatgggcaaaa

SEQ ID NO: 158906 - DNA, 25 bp, Artificial
  probe
  misc_feature (1)..(25): SEQ ID NO: 2143; WAN024DIA_at; Start 1148; Stop 1172
ttaaagaagttaagccagagggcga

SEQ ID NO: 158907 - DNA, 25 bp, Artificial
  probe
  misc_feature (1)..(25): SEQ ID NO: 2143; WAN024DIA_at; Start 552; Stop 576
tcaattatctgaagcaattcaagcg

SEQ ID NO: 158908 - DNA, 25 bp, Artificial
  probe
  misc_feature (1)..(25): SEQ ID NO: 2143; WAN024DIA_at; Start 866; Stop 890
gagctgcacctcttaatacgatgtt

SEQ ID NO: 158909 - DNA, 25 bp, Artificial
  probe
  misc_feature (1)..(25): SEQ ID NO: 2143; WAN024DIA_at; Start 1291; Stop 1315
gatcaattttcttgggcgaatggct

SEQ ID NO: 158910 - DNA, 25 bp, Artificial
  probe
  misc_feature (1)..(25): SEQ ID NO: 2143; WAN024DIA_at; Start 1223; Stop 1247
tacacaaagttttagaggctcgaga

SEQ ID NO: 158911 - DNA, 25 bp, Artificial
  probe
  misc_feature (1)..(25): SEQ ID NO: 2143; WAN024DIA_at; Start 505; Stop 529
gctgcaggtcaatatataggaggtc

SEQ ID NO: 158912 - DNA, 25 bp, Artificial
  probe
  misc_feature (1)..(25): SEQ ID NO: 2143; WAN024DIA_at; Start 52; Stop 76
gctaccgctgcttatcaagtagagg

SEQ ID NO: 158913 - DNA, 25 bp, Artificial
  probe
  misc_feature (1)..(25): SEQ ID NO: 2143; WAN024DIA_at; Start 594; Stop 618
ggcgcatgctcttgcagtcctcgaa

SEQ ID NO: 158914 - DNA, 25 bp, Artificial
  probe
  misc_feature (1)..(25): SEQ ID NO: 2143; WAN024DIA_at; Start 137; Stop 161
gtccgttcttaccagatccagctag

SEQ ID NO: 158915 - DNA, 25 bp, Artificial
  probe
  misc_feature (1)..(25): SEQ ID NO: 2143; WAN024DIA_at; Start 778; Stop 802
gaggacacgctttttcacttgaatc

SEQ ID NO: 158916 - DNA, 25 bp, Artificial
  probe
  misc_feature (1)..(25): SEQ ID NO: 2143; WAN024DIA_at; Start 459; Stop 483
tacagaagtcaagcattggtttaca

SEQ ID NO: 158917 - DNA, 25 bp, Artificial
  probe
  misc_feature (1)..(25): SEQ ID NO: 2143; WAN024DIA_at; Start 1161; Stop 1185
gccagagggcgagaatgatattatt

SEQ ID NO: 158918 - DNA, 25 bp, Artificial
  probe
  misc_feature (1)..(25): SEQ ID NO: 2143; WAN024DIA_at; Start 580; Stop 604
cataatatgttgttggcgcatgctc

SEQ ID NO: 158919 - DNA, 25 bp, Artificial
  probe
  misc_feature (1)..(25): SEQ ID NO: 2143; WAN024DIA_at; Start 652; Stop 676
tgtattcatgctttaaagccaggct

SEQ ID NO: 158920 - DNA, 25 bp, Artificial
  probe
  misc_feature (1)..(25): SEQ ID NO: 2143; WAN024DIA_at; Start 66; Stop 90
tcaagtagagggtgcaactagggta

SEQ ID NO: 158921 - DNA, 25 bp, Artificial
  probe
  misc_feature (1)..(25): SEQ ID NO: 2143; WAN024DIA_at; Start 203; Stop 227
cagaacatggtttgcaggctttgcg

SEQ ID NO: 158922 - DNA, 25 bp, Artificial
  probe
  misc_feature (1)..(25): SEQ ID NO: 2143; WAN024DIA_at; Start 432; Stop 456
atatgctcgcttttgtttccaagaa

SEQ ID NO: 158923 - DNA, 25 bp, Artificial
  probe
  misc_feature (1)..(25): SEQ ID NO: 2143; WAN024DIA_at; Start 491; Stop 515
aactgatgtctcttgctgcaggtca

SEQ ID NO: 158924 - DNA, 25 bp, Artificial
  probe
  misc_feature (1)..(25): SEQ ID NO: 2143; WAN024DIA_at; Start 367; Stop 391
tcgcctcagaaaatgttagaaacag

SEQ ID NO: 158925 - DNA, 25 bp, Artificial
  probe
  misc_feature (1)..(25): SEQ ID NO: 2143; WAN024DIA_at; Start 922; Stop 946
cgtgaatacaaaggtgaaaatagac

SEQ ID NO: 158926 - DNA, 25 bp, Artificial
  probe
  misc_feature (1)..(25): SEQ ID NO: 2143; WAN024DIA_at; Start 1123; Stop 1147
tatttaactgaaaatggtacagccc

SEQ ID NO: 158927 - DNA, 25 bp, Artificial
  probe
  misc_feature (1)..(25): SEQ ID NO: 2143; WAN024DIA_at; Start 1303; Stop 1327
tgggcgaatggctacaataagcgat

SEQ ID NO: 158928 - DNA, 25 bp, Artificial
  probe
  misc_feature (1)..(25): SEQ ID NO: 2143; WAN024DIA_at; Start 851; Stop 875
tagaaattatgaagagagctgcacc

SEQ ID NO: 158929 - DNA, 25 bp, Artificial
  probe
  misc_feature (1)..(25): SEQ ID NO: 2143; WAN024DIA_at; Start 524; Stop 548
gaggtcagtttcctccaaatcatca

SEQ ID NO: 158930 - DNA, 25 bp, Artificial
  probe
  misc_feature (1)..(25): SEQ ID NO: 2143; WAN024DIA_at; Start 1096; Stop 1120
gaagaatatcctcaacatccggtca

SEQ ID NO: 158931 - DNA, 25 bp, Artificial
  probe
  misc_feature (1)..(25): SEQ ID NO: 2143; WAN024DIA_at; Start 958; Stop 982
tcaacaggaataaaaggacagtctt

SEQ ID NO: 158932 - DNA, 25 bp, Artificial
  probe
  misc_feature (1)..(25): SEQ ID NO: 2143; WAN024DIA_at; Start 1022; Stop 1046
ctggtattccgacaacagattggga

SEQ ID NO: 158933 - DNA, 25 bp, Artificial
  probe
  misc_feature (1)..(25): SEQ ID NO: 946; WAN024DIB_at; Start 67; Stop 91
tcagatttgatggatgctttggcgt

SEQ ID NO: 158934 - DNA, 25 bp, Artificial
  probe
  misc_feature (1)..(25): SEQ ID NO: 946; WAN024DIB_at; Start 148; Stop 172
tcaatagtgtctgcccatcgagaac

SEQ ID NO: 158935 - DNA, 25 bp, Artificial
  probe
  misc_feature (1)..(25): SEQ ID NO: 946; WAN024DIB_at; Start 133; Stop 157
gagtctgcaaacgactcaatagtgt

SEQ ID NO: 158936 - DNA, 25 bp, Artificial
  probe
  misc_feature (1)..(25): SEQ ID NO: 946; WAN024DIB_at; Start 169; Stop 193
gaacagactaatttattagcggagg

SEQ ID NO: 158937 - DNA, 25 bp, Artificial
  probe
  misc_feature (1)..(25): SEQ ID NO: 946; WAN024DIB_at; Start 100; Stop 124
gatggatattttgaacaggcaagag

SEQ ID NO: 158938 - DNA, 25 bp, Artificial
  probe
  misc_feature (1)..(25): SEQ ID NO: 946; WAN024DIB_at; Start 291; Stop 315
tattgatgaatatgaacgaattcga

SEQ ID NO: 158939 - DNA, 25 bp, Artificial
  probe
  misc_feature (1)..(25): SEQ ID NO: 946; WAN024DIB_at; Start 140; Stop 164
caaacgactcaatagtgtctgccca

SEQ ID NO: 158940 - DNA, 25 bp, Artificial
  probe
  misc_feature (1)..(25): SEQ ID NO: 946; WAN024DIB_at; Start 86; Stop 110
tggcgtttgcgagagatggatattt

SEQ ID NO: 158941 - DNA, 25 bp, Artificial
  probe
  misc_feature (1)..(25): SEQ ID NO: 946; WAN024DIB_at; Start 257; Stop 281
caacgatgctattgtatgatcaggt

SEQ ID NO: 158942 - DNA, 25 bp, Artificial
  probe
  misc_feature (1)..(25): SEQ ID NO: 946; WAN024DIB_at; Start 73; Stop 97
ttgatggatgctttggcgtttgcga

SEQ ID NO: 158943 - DNA, 25 bp, Artificial
  probe
  misc_feature (1)..(25): SEQ ID NO: 946; WAN024DIB_at; Start 95; Stop 119
cgagagatggatattttgaacaggc

SEQ ID NO: 158944 - DNA, 25 bp, Artificial
  probe
  misc_feature (1)..(25): SEQ ID NO: 946; WAN024DIB_at; Start 119; Stop 143
caagagaattggttgagtctgcaaa

SEQ ID NO: 158945 - DNA, 25 bp, Artificial
  probe
  misc_feature (1)..(25): SEQ ID NO: 946; WAN024DIB_at; Start 36; Stop 60
tacaattgtcgcttacgcaggagat

SEQ ID NO: 158946 - DNA, 25 bp, Artificial
  probe
  misc_feature (1)..(25): SEQ ID NO: 946; WAN024DIB_at; Start 317; Stop 341
agattgaagaacatattggtttgca

SEQ ID NO: 158947 - DNA, 25 bp, Artificial
  probe
  misc_feature (1)..(25): SEQ ID NO: 946; WAN024DIB_at; Start 62; Stop 86
caaggtcagatttgatggatgcttt

SEQ ID NO: 158948 - DNA, 25 bp, Artificial
  probe
  misc_feature (1)..(25): SEQ ID NO: 946; WAN024DIB_at; Start 10; Stop 34
aaagaagaaataaatatgcttggtt

SEQ ID NO: 158949 - DNA, 25 bp, Artificial
  probe
  misc_feature (1)..(25): SEQ ID NO: 946; WAN024DIB_at; Start 45; Stop 69
cgcttacgcaggagatgcaaggtca

SEQ ID NO: 158950 - DNA, 25 bp, Artificial
  probe
  misc_feature (1)..(25): SEQ ID NO: 946; WAN024DIB_at; Start 175; Stop 199
actaatttattagcggaggaggcat

SEQ ID NO: 158951 - DNA, 25 bp, Artificial
  probe
  misc_feature (1)..(25): SEQ ID NO: 946; WAN024DIB_at; Start 53; Stop 77
caggagatgcaaggtcagatttgat

SEQ ID NO: 158952 - DNA, 25 bp, Artificial
  probe
  misc_feature (1)..(25): SEQ ID NO: 946; WAN024DIB_at; Start 136; Stop 160
tctgcaaacgactcaatagtgtctg

SEQ ID NO: 158953 - DNA, 25 bp, Artificial
  probe
  misc_feature (1)..(25): SEQ ID NO: 946; WAN024DIB_at; Start 32; Stop 56
gttttacaattgtcgcttacgcagg

SEQ ID NO: 158954 - DNA, 25 bp, Artificial
  probe
  misc_feature (1)..(25): SEQ ID NO: 946; WAN024DIB_at; Start 124; Stop 148
gaattggttgagtctgcaaacgact

SEQ ID NO: 158955 - DNA, 25 bp, Artificial
  probe
  misc_feature (1)..(25): SEQ ID NO: 946; WAN024DIB_at; Start 304; Stop 328
gaacgaattcgaaagattgaagaac

SEQ ID NO: 158956 - DNA, 25 bp, Artificial
  probe
  misc_feature (1)..(25): SEQ ID NO: 946; WAN024DIB_at; Start 49; Stop 73
tacgcaggagatgcaaggtcagatt

SEQ ID NO: 158957 - DNA, 25 bp, Artificial
  probe
  misc_feature (1)..(25): SEQ ID NO: 946; WAN024DIB_at; Start 159; Stop 183
tgcccatcgagaacagactaattta

SEQ ID NO: 158958 - DNA, 25 bp, Artificial
  probe
  misc_feature (1)..(25): SEQ ID NO: 946; WAN024DIB_at; Start 312; Stop 336
tcgaaagattgaagaacatattggt

SEQ ID NO: 158959 - DNA, 25 bp, Artificial
  probe
  misc_feature (1)..(25): SEQ ID NO: 946; WAN024DIB_at; Start 109; Stop 133
tttgaacaggcaagagaattggttg

SEQ ID NO: 158960 - DNA, 25 bp, Artificial
  probe
  misc_feature (1)..(25): SEQ ID NO: 946; WAN024DIB_at; Start 42; Stop 66
tgtcgcttacgcaggagatgcaagg

SEQ ID NO: 158961 - DNA, 25 bp, Artificial
  probe
  misc_feature (1)..(25): SEQ ID NO: 946; WAN024DIB_at; Start 145; Stop 169
gactcaatagtgtctgcccatcgag

SEQ ID NO: 158962 - DNA, 25 bp, Artificial
  probe
  misc_feature (1)..(25): SEQ ID NO: 946; WAN024DIB_at; Start 113; Stop 137
aacaggcaagagaattggttgagtc

SEQ ID NO: 158963 - DNA, 25 bp, Artificial
  probe
  misc_feature (1)..(25): SEQ ID NO: 946; WAN024DIB_at; Start 23; Stop 47
atatgcttggttttacaattgtcgc

SEQ ID NO: 158964 - DNA, 25 bp, Artificial
  probe
  misc_feature (1)..(25): SEQ ID NO: 946; WAN024DIB_at; Start 152; Stop 176
tagtgtctgcccatcgagaacagac

SEQ ID NO: 158965 - DNA, 25 bp, Artificial
  probe
  misc_feature (1)..(25): SEQ ID NO: 946; WAN024DIB_at; Start 250; Stop 274
ttgatgacaacgatgctattgtatg

SEQ ID NO: 158966 - DNA, 25 bp, Artificial
  probe
  misc_feature (1)..(25): SEQ ID NO: 946; WAN024DIB_at; Start 39; Stop 63
aattgtcgcttacgcaggagatgca

SEQ ID NO: 158967 - DNA, 25 bp, Artificial
  probe
  misc_feature (1)..(25): SEQ ID NO: 1301; WAN024DIC_at; Start 24; Stop 48
tactaaagacactgctcaactttac

SEQ ID NO: 158968 - DNA, 25 bp, Artificial
  probe
  misc_feature (1)..(25): SEQ ID NO: 1301; WAN024DIC_at; Start 14; Stop 38
tccctaaatttactaaagacactgc

SEQ ID NO: 158969 - DNA, 25 bp, Artificial
  probe
  misc_feature (1)..(25): SEQ ID NO: 1301; WAN024DIC_at; Start 116; Stop 140
ttcgcgaatatattactgatagcat

SEQ ID NO: 158970 - DNA, 25 bp, Artificial
  probe
  misc_feature (1)..(25): SEQ ID NO: 1301; WAN024DIC_at; Start 51; Stop 75
ctgtaaatggttgttgtataataaa

SEQ ID NO: 158971 - DNA, 25 bp, Artificial
  probe
  misc_feature (1)..(25): SEQ ID NO: 1301; WAN024DIC_at; Start 69; Stop 93
taataaagttacaaagatgtacgac

SEQ ID NO: 158972 - DNA, 25 bp, Artificial
  probe
  misc_feature (1)..(25): SEQ ID NO: 1301; WAN024DIC_at; Start 36; Stop 60
tgctcaactttacacctgtaaatgg

SEQ ID NO: 158973 - DNA, 25 bp, Artificial
  probe
  misc_feature (1)..(25): SEQ ID NO: 1301; WAN024DIC_at; Start 74; Stop 98
aagttacaaagatgtacgaccacac

SEQ ID NO: 158974 - DNA, 25 bp, Artificial
  probe
  misc_feature (1)..(25): SEQ ID NO: 1301; WAN024DIC_at; Start 82; Stop 106
aagatgtacgaccacactgttgtaa

SEQ ID NO: 158975 - DNA, 25 bp, Artificial
  probe
  misc_feature (1)..(25): SEQ ID NO: 1301; WAN024DIC_at; Start 80; Stop 104
caaagatgtacgaccacactgttgt

SEQ ID NO: 158976 - DNA, 25 bp, Artificial
  probe
  misc_feature (1)..(25): SEQ ID NO: 1301; WAN024DIC_at; Start 33; Stop 57
cactgctcaactttacacctgtaaa

SEQ ID NO: 158977 - DNA, 25 bp, Artificial
  probe
  misc_feature (1)..(25): SEQ ID NO: 1301; WAN024DIC_at; Start 96; Stop 120
cactgttgtaaatcatagtgttcgc

SEQ ID NO: 158978 - DNA, 25 bp, Artificial
  probe
  misc_feature (1)..(25): SEQ ID NO: 1301; WAN024DIC_at; Start 20; Stop 44
aatttactaaagacactgctcaact

SEQ ID NO: 158979 - DNA, 25 bp, Artificial
  probe
  misc_feature (1)..(25): SEQ ID NO: 1301; WAN024DIC_at; Start 109; Stop 133
catagtgttcgcgaatatattactg

SEQ ID NO: 158980 - DNA, 25 bp, Artificial
  probe
  misc_feature (1)..(25): SEQ ID NO: 1301; WAN024DIC_at; Start 78; Stop 102
tacaaagatgtacgaccacactgtt

SEQ ID NO: 158981 - DNA, 25 bp, Artificial
  probe
  misc_feature (1)..(25): SEQ ID NO: 1301; WAN024DIC_at; Start 16; Stop 40
cctaaatttactaaagacactgctc

SEQ ID NO: 158982 - DNA, 25 bp, Artificial
  probe
  misc_feature (1)..(25): SEQ ID NO: 1301; WAN024DIC_at; Start 102; Stop 126
tgtaaatcatagtgttcgcgaatat

SEQ ID NO: 158983 - DNA, 25 bp, Artificial
  probe
  misc_feature (1)..(25): SEQ ID NO: 1301; WAN024DIC_at; Start 124; Stop 148
tatattactgatagcatttctacaa

SEQ ID NO: 158984 - DNA, 25 bp, Artificial
  probe
  misc_feature (1)..(25): SEQ ID NO: 1301; WAN024DIC_at; Start 114; Stop 138
tgttcgcgaatatattactgatagc

SEQ ID NO: 158985 - DNA, 25 bp, Artificial
  probe
  misc_feature (1)..(25): SEQ ID NO: 1301; WAN024DIC_at; Start 86; Stop 110
tgtacgaccacactgttgtaaatca

SEQ ID NO: 158986 - DNA, 25 bp, Artificial
  probe
  misc_feature (1)..(25): SEQ ID NO: 1301; WAN024DIC_at; Start 84; Stop 108
gatgtacgaccacactgttgtaaat

SEQ ID NO: 158987 - DNA, 25 bp, Artificial
  probe
  misc_feature (1)..(25): SEQ ID NO: 1301; WAN024DIC_at; Start 119; Stop 143
gcgaatatattactgatagcatttc

SEQ ID NO: 158988 - DNA, 25 bp, Artificial
  probe
  misc_feature (1)..(25): SEQ ID NO: 1301; WAN024DIC_at; Start 89; Stop 113
acgaccacactgttgtaaatcatag

SEQ ID NO: 158989 - DNA, 25 bp, Artificial
  probe
  misc_feature (1)..(25): SEQ ID NO: 1301; WAN024DIC_at; Start 99; Stop 123
tgttgtaaatcatagtgttcgcgaa

SEQ ID NO: 158990 - DNA, 25 bp, Artificial
  probe
  misc_feature (1)..(25): SEQ ID NO: 1301; WAN024DIC_at; Start 72; Stop 96
taaagttacaaagatgtacgaccac

SEQ ID NO: 158991 - DNA, 25 bp, Artificial
  probe
  misc_feature (1)..(25): SEQ ID NO: 1301; WAN024DIC_at; Start 18; Stop 42
taaatttactaaagacactgctcaa

SEQ ID NO: 158992 - DNA, 25 bp, Artificial
  probe
  misc_feature (1)..(25): SEQ ID NO: 1301; WAN024DIC_at; Start 91; Stop 115
gaccacactgttgtaaatcatagtg

SEQ ID NO: 158993 - DNA, 25 bp, Artificial
  probe
  misc_feature (1)..(25): SEQ ID NO: 1301; WAN024DIC_at; Start 31; Stop 55
gacactgctcaactttacacctgta

SEQ ID NO: 158994 - DNA, 25 bp, Artificial
  probe
  misc_feature (1)..(25): SEQ ID NO: 1301; WAN024DIC_at; Start 98; Stop 122
ctgttgtaaatcatagtgttcgcga

SEQ ID NO: 158995 - DNA, 25 bp, Artificial
  probe
  misc_feature (1)..(25): SEQ ID NO: 1301; WAN024DIC_at; Start 76; Stop 100
gttacaaagatgtacgaccacactg

SEQ ID NO: 158996 - DNA, 25 bp, Artificial
  probe
  misc_feature (1)..(25): SEQ ID NO: 1301; WAN024DIC_at; Start 40; Stop 64
caactttacacctgtaaatggttgt

SEQ ID NO: 158997 - DNA, 25 bp, Artificial
  probe
  misc_feature (1)..(25): SEQ ID NO: 1301; WAN024DIC_at; Start 129; Stop 153
tactgatagcatttctacaaataca

SEQ ID NO: 158998 - DNA, 25 bp, Artificial
  probe
  misc_feature (1)..(25): SEQ ID NO: 1301; WAN024DIC_at; Start 111; Stop 135
tagtgttcgcgaatatattactgat

SEQ ID NO: 158999 - DNA, 25 bp, Artificial
  probe
  misc_feature (1)..(25): SEQ ID NO: 1301; WAN024DIC_at; Start 29; Stop 53
aagacactgctcaactttacacctg

SEQ ID NO: 159000 - DNA, 25 bp, Artificial
  probe
  misc_feature (1)..(25): SEQ ID NO: 1301; WAN024DIC_at; Start 104; Stop 128
taaatcatagtgttcgcgaatatat

SEQ ID NO: 159001 - DNA, 25 bp, Artificial
  probe
  misc_feature (1)..(25): SEQ ID NO: 5414; WAN024DID_at; Start 115; Stop 139
aagcagttgttacgagtgtctgtat

SEQ ID NO: 159002 - DNA, 25 bp, Artificial
  probe
  misc_feature (1)..(25): SEQ ID NO: 5414; WAN024DID_at; Start 118; Stop 142
cagttgttacgagtgtctgtattgg

SEQ ID NO: 159003 - DNA, 25 bp, Artificial
  probe
  misc_feature (1)..(25): SEQ ID NO: 5414; WAN024DID_at; Start 77; Stop 101
tatcttatcctgttcctaaatatgt

SEQ ID NO: 159004 - DNA, 25 bp, Artificial
  probe
  misc_feature (1)..(25): SEQ ID NO: 5414; WAN024DID_at; Start 105; Stop 129
tagaaaaatgaagcagttgttacga

SEQ ID NO: 159005 - DNA, 25 bp, Artificial
  probe
  misc_feature (1)..(25): SEQ ID NO: 5414; WAN024DID_at; Start 112; Stop 136
atgaagcagttgttacgagtgtctg

SEQ ID NO: 159006 - DNA, 25 bp, Artificial
  probe
  misc_feature (1)..(25): SEQ ID NO: 5414; WAN024DID_at; Start 84; Stop 108
tcctgttcctaaatatgttggtaga

SEQ ID NO: 159007 - DNA, 25 bp, Artificial
  probe
  misc_feature (1)..(25): SEQ ID NO: 5414; WAN024DID_at; Start 100; Stop 124
gttggtagaaaaatgaagcagttgt

SEQ ID NO: 159008 - DNA, 25 bp, Artificial
  probe
  misc_feature (1)..(25): SEQ ID NO: 5414; WAN024DID_at; Start 103; Stop 127
ggtagaaaaatgaagcagttgttac

SEQ ID NO: 159009 - DNA, 25 bp, Artificial
  probe
  misc_feature (1)..(25): SEQ ID NO: 5414; WAN024DID_at; Start 3; Stop 27
gcttattatcaatcgtttttttagc

SEQ ID NO: 159010 - DNA, 25 bp, Artificial
  probe
  misc_feature (1)..(25): SEQ ID NO: 5414; WAN024DID_at; Start 94; Stop 118
aaatatgttggtagaaaaatgaagc

SEQ ID NO: 159011 - DNA, 25 bp, Artificial
  probe
  misc_feature (1)..(25): SEQ ID NO: 5414; WAN024DID_at; Start 21; Stop 45
ttttagcttatttgtcttagattgg

SEQ ID NO: 159012 - DNA, 25 bp, Artificial
  probe
  misc_feature (1)..(25): SEQ ID NO: 5414; WAN024DID_at; Start 90; Stop 114
tcctaaatatgttggtagaaaaatg

SEQ ID NO: 159013 - DNA, 25 bp, Artificial
  probe
  misc_feature (1)..(25): SEQ ID NO: 5414; WAN024DID_at; Start 95; Stop 119
aatatgttggtagaaaaatgaagca

SEQ ID NO: 159014 - DNA, 25 bp, Artificial
  probe
  misc_feature (1)..(25): SEQ ID NO: 5414; WAN024DID_at; Start 85; Stop 109
cctgttcctaaatatgttggtagaa

SEQ ID NO: 159015 - DNA, 25 bp, Artificial
  probe
  misc_feature (1)..(25): SEQ ID NO: 5414; WAN024DID_at; Start 99; Stop 123
tgttggtagaaaaatgaagcagttg

SEQ ID NO: 159016 - DNA, 25 bp, Artificial
  probe
  misc_feature (1)..(25): SEQ ID NO: 5414; WAN024DID_at; Start 114; Stop 138
gaagcagttgttacgagtgtctgta

SEQ ID NO: 159017 - DNA, 25 bp, Artificial
  probe
  misc_feature (1)..(25): SEQ ID NO: 5414; WAN024DID_at; Start 91; Stop 115
cctaaatatgttggtagaaaaatga

SEQ ID NO: 159018 - DNA, 25 bp, Artificial
  probe
  misc_feature (1)..(25): SEQ ID NO: 5414; WAN024DID_at; Start 97; Stop 121
tatgttggtagaaaaatgaagcagt

SEQ ID NO: 159019 - DNA, 25 bp, Artificial
  probe
  misc_feature (1)..(25): SEQ ID NO: 5414; WAN024DID_at; Start 32; Stop 56
ttgtcttagattggtatagaactga

SEQ ID NO: 159020 - DNA, 25 bp, Artificial
  probe
  misc_feature (1)..(25): SEQ ID NO: 5414; WAN024DID_at; Start 87; Stop 111
tgttcctaaatatgttggtagaaaa

SEQ ID NO: 159021 - DNA, 25 bp, Artificial
  probe
  misc_feature (1)..(25): SEQ ID NO: 5414; WAN024DID_at; Start 101; Stop 125
ttggtagaaaaatgaagcagttgtt

SEQ ID NO: 159022 - DNA, 25 bp, Artificial
  probe
  misc_feature (1)..(25): SEQ ID NO: 5414; WAN024DID_at; Start 82; Stop 106
tatcctgttcctaaatatgttggta

SEQ ID NO: 159023 - DNA, 25 bp, Artificial
  probe
  misc_feature (1)..(25): SEQ ID NO: 5414; WAN024DID_at; Start 110; Stop 134
aaatgaagcagttgttacgagtgtc

SEQ ID NO: 159024 - DNA, 25 bp, Artificial
  probe
  misc_feature (1)..(25): SEQ ID NO: 5414; WAN024DID_at; Start 29; Stop 53
tatttgtcttagattggtatagaac

SEQ ID NO: 159025 - DNA, 25 bp, Artificial
  probe
  misc_feature (1)..(25): SEQ ID NO: 5414; WAN024DID_at; Start 111; Stop 135
aatgaagcagttgttacgagtgtct

SEQ ID NO: 159026 - DNA, 25 bp, Artificial
  probe
  misc_feature (1)..(25): SEQ ID NO: 5414; WAN024DID_at; Start 109; Stop 133
aaaatgaagcagttgttacgagtgt

SEQ ID NO: 159027 - DNA, 25 bp, Artificial
  probe
  misc_feature (1)..(25): SEQ ID NO: 5414; WAN024DID_at; Start 108; Stop 132
aaaaatgaagcagttgttacgagtg

SEQ ID NO: 159028 - DNA, 25 bp, Artificial
  probe
  misc_feature (1)..(25): SEQ ID NO: 5414; WAN024DID_at; Start 80; Stop 104
cttatcctgttcctaaatatgttgg

SEQ ID NO: 159029 - DNA, 25 bp, Artificial
  probe
  misc_feature (1)..(25): SEQ ID NO: 5414; WAN024DID_at; Start 26; Stop 50
gcttatttgtcttagattggtatag

SEQ ID NO: 159030 - DNA, 25 bp, Artificial
  probe
  misc_feature (1)..(25): SEQ ID NO: 5414; WAN024DID_at; Start 107; Stop 131
gaaaaatgaagcagttgttacgagt

SEQ ID NO: 159031 - DNA, 25 bp, Artificial
  probe
  misc_feature (1)..(25): SEQ ID NO: 5414; WAN024DID_at; Start 83; Stop 107
atcctgttcctaaatatgttggtag

SEQ ID NO: 159032 - DNA, 25 bp, Artificial
  probe
  misc_feature (1)..(25): SEQ ID NO: 5414; WAN024DID_at; Start 79; Stop 103
tcttatcctgttcctaaatatgttg

SEQ ID NO: 159033 - DNA, 25 bp, Artificial
  probe
  misc_feature (1)..(25): SEQ ID NO: 5414; WAN024DID_at; Start 117; Stop 141
gcagttgttacgagtgtctgtattg

SEQ ID NO: 159034 - DNA, 25 bp, Artificial
  probe
  misc_feature (1)..(25): SEQ ID NO: 5414; WAN024DID_at; Start 113; Stop 137
tgaagcagttgttacgagtgtctgt

SEQ ID NO: 159035 - DNA, 25 bp, Artificial
  probe
  misc_feature (1)..(25): SEQ ID NO: 2363; WAN024DIE_at; Start 110; Stop 134
caaaccaagatgtagaaaagttgct

SEQ ID NO: 159036 - DNA, 25 bp, Artificial
  probe
  misc_feature (1)..(25): SEQ ID NO: 2363; WAN024DIE_at; Start 232; Stop 256
cctgctaagttaaccaatgttcaaa

SEQ ID NO: 159037 - DNA, 25 bp, Artificial
  probe
  misc_feature (1)..(25): SEQ ID NO: 2363; WAN024DIE_at; Start 2; Stop 26
tggattggtacgattatatgataca

SEQ ID NO: 159038 - DNA, 25 bp, Artificial
  probe
  misc_feature (1)..(25): SEQ ID NO: 2363; WAN024DIE_at; Start 54; Stop 78
aagccattggtttcgctatttgcga

SEQ ID NO: 159039 - DNA, 25 bp, Artificial
  probe
  misc_feature (1)..(25): SEQ ID NO: 2363; WAN024DIE_at; Start 101; Stop 125
cttatttaacaaaccaagatgtaga

SEQ ID NO: 159040 - DNA, 25 bp, Artificial
  probe
  misc_feature (1)..(25): SEQ ID NO: 2363; WAN024DIE_at; Start 264; Stop 288
ggagaaatacaaacatggataacta

SEQ ID NO: 159041 - DNA, 25 bp, Artificial
  probe
  misc_feature (1)..(25): SEQ ID NO: 2363; WAN024DIE_at; Start 180; Stop 204
tgcctttcaagagcatactccaact

SEQ ID NO: 159042 - DNA, 25 bp, Artificial
  probe
  misc_feature (1)..(25): SEQ ID NO: 2363; WAN024DIE_at; Start 245; Stop 269
ccaatgttcaaaaattgatggagaa

SEQ ID NO: 159043 - DNA, 25 bp, Artificial
  probe
  misc_feature (1)..(25): SEQ ID NO: 2363; WAN024DIE_at; Start 41; Stop 65
cacaattcaacgcaagccattggtt

SEQ ID NO: 159044 - DNA, 25 bp, Artificial
  probe
  misc_feature (1)..(25): SEQ ID NO: 2363; WAN024DIE_at; Start 121; Stop 145
gtagaaaagttgctagactccaaag

SEQ ID NO: 159045 - DNA, 25 bp, Artificial
  probe
  misc_feature (1)..(25): SEQ ID NO: 2363; WAN024DIE_at; Start 198; Stop 222
tccaactcataaatatgtgatttca

SEQ ID NO: 159046 - DNA, 25 bp, Artificial
  probe
  misc_feature (1)..(25): SEQ ID NO: 2363; WAN024DIE_at; Start 90; Stop 114
tgaagactattcttatttaacaaac

SEQ ID NO: 159047 - DNA, 25 bp, Artificial
  probe
  misc_feature (1)..(25): SEQ ID NO: 2363; WAN024DIE_at; Start 253; Stop 277
caaaaattgatggagaaatacaaac

SEQ ID NO: 159048 - DNA, 25 bp, Artificial
  probe
  misc_feature (1)..(25): SEQ ID NO: 2363; WAN024DIE_at; Start 160; Stop 184
caaaaaattagcttgaagtatgcct

SEQ ID NO: 159049 - DNA, 25 bp, Artificial
  probe
  misc_feature (1)..(25): SEQ ID NO: 2363; WAN024DIE_at; Start 44; Stop 68
aattcaacgcaagccattggtttcg

SEQ ID NO: 159050 - DNA, 25 bp, Artificial
  probe
  misc_feature (1)..(25): SEQ ID NO: 2363; WAN024DIE_at; Start 21; Stop 45
gatacaggcatccaaacaatcacaa

SEQ ID NO: 159051 - DNA, 25 bp, Artificial
  probe
  misc_feature (1)..(25): SEQ ID NO: 2363; WAN024DIE_at; Start 33; Stop 57
caaacaatcacaattcaacgcaagc

SEQ ID NO: 159052 - DNA, 25 bp, Artificial
  probe
  misc_feature (1)..(25): SEQ ID NO: 2363; WAN024DIE_at; Start 25; Stop 49
caggcatccaaacaatcacaattca

SEQ ID NO: 159053 - DNA, 25 bp, Artificial
  probe
  misc_feature (1)..(25): SEQ ID NO: 2363; WAN024DIE_at; Start 131; Stop 155
tgctagactccaaagaactaacccg

SEQ ID NO: 159054 - DNA, 25 bp, Artificial
  probe
  misc_feature (1)..(25): SEQ ID NO: 2363; WAN024DIE_at; Start 67; Stop 91
cgctatttgcgaaaagttatttttg

SEQ ID NO: 159055 - DNA, 25 bp, Artificial
  probe
  misc_feature (1)..(25): SEQ ID NO: 2363; WAN024DIE_at; Start 184; Stop 208
tttcaagagcatactccaactcata

SEQ ID NO: 159056 - DNA, 25 bp, Artificial
  probe
  misc_feature (1)..(25): SEQ ID NO: 2363; WAN024DIE_at; Start 118; Stop 142
gatgtagaaaagttgctagactcca

SEQ ID NO: 159057 - DNA, 25 bp, Artificial
  probe
  misc_feature (1)..(25): SEQ ID NO: 2363; WAN024DIE_at; Start 124; Stop 148
gaaaagttgctagactccaaagaac

SEQ ID NO: 159058 - DNA, 25 bp, Artificial
  probe
  misc_feature (1)..(25): SEQ ID NO: 2363; WAN024DIE_at; Start 13; Stop 37
gattatatgatacaggcatccaaac

SEQ ID NO: 159059 - DNA, 25 bp, Artificial
  probe
  misc_feature (1)..(25): SEQ ID NO: 2363; WAN024DIE_at; Start 165; Stop 189
aattagcttgaagtatgcctttcaa

SEQ ID NO: 159060 - DNA, 25 bp, Artificial
  probe
  misc_feature (1)..(25): SEQ ID NO: 2363; WAN024DIE_at; Start 8; Stop 32
ggtacgattatatgatacaggcatc

SEQ ID NO: 159061 - DNA, 25 bp, Artificial
  probe
  misc_feature (1)..(25): SEQ ID NO: 2363; WAN024DIE_at; Start 28; Stop 52
gcatccaaacaatcacaattcaacg

SEQ ID NO: 159062 - DNA, 25 bp, Artificial
  probe
  misc_feature (1)..(25): SEQ ID NO: 2363; WAN024DIE_at; Start 259; Stop 283
ttgatggagaaatacaaacatggat

SEQ ID NO: 159063 - DNA, 25 bp, Artificial
  probe
  misc_feature (1)..(25): SEQ ID NO: 2363; WAN024DIE_at; Start 172; Stop 196
ttgaagtatgcctttcaagagcata

SEQ ID NO: 159064 - DNA, 25 bp, Artificial
  probe
  misc_feature (1)..(25): SEQ ID NO: 2363; WAN024DIE_at; Start 226; Stop 250
aataaacctgctaagttaaccaatg

SEQ ID NO: 159065 - DNA, 25 bp, Artificial
  probe
  misc_feature (1)..(25): SEQ ID NO: 2363; WAN024DIE_at; Start 213; Stop 237
tgtgatttcattaaataaacctgct

SEQ ID NO: 159066 - DNA, 25 bp, Artificial
  probe
  misc_feature (1)..(25): SEQ ID NO: 2363; WAN024DIE_at; Start 114; Stop 138
ccaagatgtagaaaagttgctagac

SEQ ID NO: 159067 - DNA, 25 bp, Artificial
  probe
  misc_feature (1)..(25): SEQ ID NO: 2363; WAN024DIE_at; Start 192; Stop 216
gcatactccaactcataaatatgtg

SEQ ID NO: 159068 - DNA, 25 bp, Artificial
  probe
  misc_feature (1)..(25): SEQ ID NO: 2363; WAN024DIE_at; Start 47; Stop 71
tcaacgcaagccattggtttcgcta

SEQ ID NO: 159069 - DNA, 25 bp, Artificial
  probe
  misc_feature (1)..(25): SEQ ID NO: 2499; WAN024DIF_at; Start 45; Stop 69
tcccttaagtttatgcgaatccttg

SEQ ID NO: 159070 - DNA, 25 bp, Artificial
  probe
  misc_feature (1)..(25): SEQ ID NO: 2499; WAN024DIF_at; Start 273; Stop 297
tagttatgcttatggtatggattgg

SEQ ID NO: 159071 - DNA, 25 bp, Artificial
  probe
  misc_feature (1)..(25): SEQ ID NO: 2499; WAN024DIF_at; Start 79; Stop 103
gagaatctgaccgttttagtagtcc

SEQ ID NO: 159072 - DNA, 25 bp, Artificial
  probe
  misc_feature (1)..(25): SEQ ID NO: 2499; WAN024DIF_at; Start 67; Stop 91
ttgtactcatttgagaatctgaccg

SEQ ID NO: 159073 - DNA, 25 bp, Artificial
  probe
  misc_feature (1)..(25): SEQ ID NO: 2499; WAN024DIF_at; Start 312; Stop 336
taaagaaaatcaagataaacttcgc

SEQ ID NO: 159074 - DNA, 25 bp, Artificial
  probe
  misc_feature (1)..(25): SEQ ID NO: 2499; WAN024DIF_at; Start 6; Stop 30
tcaacaatcatgttgcaaagcaaat

SEQ ID NO: 159075 - DNA, 25 bp, Artificial
  probe
  misc_feature (1)..(25): SEQ ID NO: 2499; WAN024DIF_at; Start 51; Stop 75
aagtttatgcgaatccttgtactca

SEQ ID NO: 159076 - DNA, 25 bp, Artificial
  probe
  misc_feature (1)..(25): SEQ ID NO: 2499; WAN024DIF_at; Start 86; Stop 110
tgaccgttttagtagtccctattga

SEQ ID NO: 159077 - DNA, 25 bp, Artificial
  probe
  misc_feature (1)..(25): SEQ ID NO: 2499; WAN024DIF_at; Start 238; Stop 262
gatactattgacctctctgttctat

SEQ ID NO: 159078 - DNA, 25 bp, Artificial
  probe
  misc_feature (1)..(25): SEQ ID NO: 2499; WAN024DIF_at; Start 186; Stop 210
aaactttcattcaccattcgatacc

SEQ ID NO: 159079 - DNA, 25 bp, Artificial
  probe
  misc_feature (1)..(25): SEQ ID NO: 2499; WAN024DIF_at; Start 192; Stop 216
tcattcaccattcgatacctttaaa

SEQ ID NO: 159080 - DNA, 25 bp, Artificial
  probe
  misc_feature (1)..(25): SEQ ID NO: 2499; WAN024DIF_at; Start 29; Stop 53
atatgaacaaacaacctcccttaag

SEQ ID NO: 159081 - DNA, 25 bp, Artificial
  probe
  misc_feature (1)..(25): SEQ ID NO: 2499; WAN024DIF_at; Start 245; Stop 269
ttgacctctctgttctattagaagg

SEQ ID NO: 159082 - DNA, 25 bp, Artificial
  probe
  misc_feature (1)..(25): SEQ ID NO: 2499; WAN024DIF_at; Start 20; Stop 44
gcaaagcaaatatgaacaaacaacc

SEQ ID NO: 159083 - DNA, 25 bp, Artificial
  probe
  misc_feature (1)..(25): SEQ ID NO: 2499; WAN024DIF_at; Start 321; Stop 345
tcaagataaacttcgcgaattttat

SEQ ID NO: 159084 - DNA, 25 bp, Artificial
  probe
  misc_feature (1)..(25): SEQ ID NO: 2499; WAN024DIF_at; Start 280; Stop 304
gcttatggtatggattggttagaaa

SEQ ID NO: 159085 - DNA, 25 bp, Artificial
  probe
  misc_feature (1)..(25): SEQ ID NO: 2499; WAN024DIF_at; Start 73; Stop 97
tcatttgagaatctgaccgttttag

SEQ ID NO: 159086 - DNA, 25 bp, Artificial
  probe
  misc_feature (1)..(25): SEQ ID NO: 2499; WAN024DIF_at; Start 197; Stop 221
caccattcgatacctttaaatattt

SEQ ID NO: 159087 - DNA, 25 bp, Artificial
  probe
  misc_feature (1)..(25): SEQ ID NO: 2499; WAN024DIF_at; Start 258; Stop 282
tctattagaaggttttagttatgct

SEQ ID NO: 159088 - DNA, 25 bp, Artificial
  probe
  misc_feature (1)..(25): SEQ ID NO: 2499; WAN024DIF_at; Start 232; Stop 256
ggatttgatactattgacctctctg

SEQ ID NO: 159089 - DNA, 25 bp, Artificial
  probe
  misc_feature (1)..(25): SEQ ID NO: 2499; WAN024DIF_at; Start 181; Stop 205
tacaaaaactttcattcaccattcg

SEQ ID NO: 159090 - DNA, 25 bp, Artificial
  probe
  misc_feature (1)..(25): SEQ ID NO: 2499; WAN024DIF_at; Start 114; Stop 138
tgtgttaggaatgaagatgatgagt

SEQ ID NO: 159091 - DNA, 25 bp, Artificial
  probe
  misc_feature (1)..(25): SEQ ID NO: 2499; WAN024DIF_at; Start 2; Stop 26
tggctcaacaatcatgttgcaaagc

SEQ ID NO: 159092 - DNA, 25 bp, Artificial
  probe
  misc_feature (1)..(25): SEQ ID NO: 2499; WAN024DIF_at; Start 165; Stop 189
tggtgcaattattaaatacaaaaac

SEQ ID NO: 159093 - DNA, 25 bp, Artificial
  probe
  misc_feature (1)..(25): SEQ ID NO: 2499; WAN024DIF_at; Start 219; Stop 243
tttaaaagacatgggatttgatact

SEQ ID NO: 159094 - DNA, 25 bp, Artificial
  probe
  misc_feature (1)..(25): SEQ ID NO: 2499; WAN024DIF_at; Start 25; Stop 49
gcaaatatgaacaaacaacctccct

SEQ ID NO: 159095 - DNA, 25 bp, Artificial
  probe
  misc_feature (1)..(25): SEQ ID NO: 2499; WAN024DIF_at; Start 59; Stop 83
gcgaatccttgtactcatttgagaa

SEQ ID NO: 159096 - DNA, 25 bp, Artificial
  probe
  misc_feature (1)..(25): SEQ ID NO: 2499; WAN024DIF_at; Start 102; Stop 126
ccctattgagtatgtgttaggaatg

SEQ ID NO: 159097 - DNA, 25 bp, Artificial
  probe
  misc_feature (1)..(25): SEQ ID NO: 2499; WAN024DIF_at; Start 13; Stop 37
tcatgttgcaaagcaaatatgaaca

SEQ ID NO: 159098 - DNA, 25 bp, Artificial
  probe
  misc_feature (1)..(25): SEQ ID NO: 2499; WAN024DIF_at; Start 316; Stop 340
gaaaatcaagataaacttcgcgaat

SEQ ID NO: 159099 - DNA, 25 bp, Artificial
  probe
  misc_feature (1)..(25): SEQ ID NO: 2499; WAN024DIF_at; Start 95; Stop 119
tagtagtccctattgagtatgtgtt

SEQ ID NO: 159100 - DNA, 25 bp, Artificial
  probe
  misc_feature (1)..(25): SEQ ID NO: 2499; WAN024DIF_at; Start 40; Stop 64
caacctcccttaagtttatgcgaat

SEQ ID NO: 159101 - DNA, 25 bp, Artificial
  probe
  misc_feature (1)..(25): SEQ ID NO: 2499; WAN024DIF_at; Start 132; Stop 156
gatgagtatcagagagcaggatttg

SEQ ID NO: 159102 - DNA, 25 bp, Artificial
  probe
  misc_feature (1)..(25): SEQ ID NO: 2499; WAN024DIF_at; Start 126; Stop 150
gaagatgatgagtatcagagagcag

SEQ ID NO: 159103 - DNA, 25 bp, Artificial
  probe
  misc_feature (1)..(25): SEQ ID NO: 2487; WAN024DIG_at; Start 63; Stop 87
cacaggctaccgtatctctaaagaa

SEQ ID NO: 159104 - DNA, 25 bp, Artificial
  probe
  misc_feature (1)..(25): SEQ ID NO: 2487; WAN024DIG_at; Start 93; Stop 117
tgcgcgtgaaatgtctatcattgct

SEQ ID NO: 159105 - DNA, 25 bp, Artificial
  probe
  misc_feature (1)..(25): SEQ ID NO: 2487; WAN024DIG_at; Start 113; Stop 137
ttgctctggcgcagggtcgtgcaaa

SEQ ID NO: 159106 - DNA, 25 bp, Artificial
  probe
  misc_feature (1)..(25): SEQ ID NO: 2487; WAN024DIG_at; Start 26; Stop 50
tagaatcagttgttggctgggttcg

SEQ ID NO: 159107 - DNA, 25 bp, Artificial
  probe
  misc_feature (1)..(25): SEQ ID NO: 2487; WAN024DIG_at; Start 86; Stop 110
aaacgaatgcgcgtgaaatgtctat

SEQ ID NO: 159108 - DNA, 25 bp, Artificial
  probe
  misc_feature (1)..(25): SEQ ID NO: 2487; WAN024DIG_at; Start 114; Stop 138
tgctctggcgcagggtcgtgcaaaa

SEQ ID NO: 159109 - DNA, 25 bp, Artificial
  probe
  misc_feature (1)..(25): SEQ ID NO: 2487; WAN024DIG_at; Start 106; Stop 130
tctatcattgctctggcgcagggtc

SEQ ID NO: 159110 - DNA, 25 bp, Artificial
  probe
  misc_feature (1)..(25): SEQ ID NO: 2487; WAN024DIG_at; Start 70; Stop 94
taccgtatctctaaagaaacgaatg

SEQ ID NO: 159111 - DNA, 25 bp, Artificial
  probe
  misc_feature (1)..(25): SEQ ID NO: 2487; WAN024DIG_at; Start 39; Stop 63
tggctgggttcgtgataagaaaatc

SEQ ID NO: 159112 - DNA, 25 bp, Artificial
  probe
  misc_feature (1)..(25): SEQ ID NO: 2487; WAN024DIG_at; Start 119; Stop 143
tggcgcagggtcgtgcaaaagtaaa

SEQ ID NO: 159113 - DNA, 25 bp, Artificial
  probe
  misc_feature (1)..(25): SEQ ID NO: 2487; WAN024DIG_at; Start 49; Stop 73
cgtgataagaaaatcacaggctacc

SEQ ID NO: 159114 - DNA, 25 bp, Artificial
  probe
  misc_feature (1)..(25): SEQ ID NO: 2487; WAN024DIG_at; Start 89; Stop 113
cgaatgcgcgtgaaatgtctatcat

SEQ ID NO: 159115 - DNA, 25 bp, Artificial
  probe
  misc_feature (1)..(25): SEQ ID NO: 2487; WAN024DIG_at; Start 104; Stop 128
tgtctatcattgctctggcgcaggg

SEQ ID NO: 159116 - DNA, 25 bp, Artificial
  probe
  misc_feature (1)..(25): SEQ ID NO: 2487; WAN024DIG_at; Start 52; Stop 76
gataagaaaatcacaggctaccgta

SEQ ID NO: 159117 - DNA, 25 bp, Artificial
  probe
  misc_feature (1)..(25): SEQ ID NO: 2487; WAN024DIG_at; Start 102; Stop 126
aatgtctatcattgctctggcgcag

SEQ ID NO: 159118 - DNA, 25 bp, Artificial
  probe
  misc_feature (1)..(25): SEQ ID NO: 2487; WAN024DIG_at; Start 129; Stop 153
tcgtgcaaaagtaaaaaatatttca

SEQ ID NO: 159119 - DNA, 25 bp, Artificial
  probe
  misc_feature (1)..(25): SEQ ID NO: 2487; WAN024DIG_at; Start 121; Stop 145
gcgcagggtcgtgcaaaagtaaaaa

SEQ ID NO: 159120 - DNA, 25 bp, Artificial
  probe
  misc_feature (1)..(25): SEQ ID NO: 2487; WAN024DIG_at; Start 60; Stop 84
aatcacaggctaccgtatctctaaa

SEQ ID NO: 159121 - DNA, 25 bp, Artificial
  probe
  misc_feature (1)..(25): SEQ ID NO: 2487; WAN024DIG_at; Start 67; Stop 91
ggctaccgtatctctaaagaaacga

SEQ ID NO: 159122 - DNA, 25 bp, Artificial
  probe
  misc_feature (1)..(25): SEQ ID NO: 2487; WAN024DIG_at; Start 95; Stop 119
cgcgtgaaatgtctatcattgctct

SEQ ID NO: 159123 - DNA, 25 bp, Artificial
  probe
  misc_feature (1)..(25): SEQ ID NO: 2487; WAN024DIG_at; Start 88; Stop 112
acgaatgcgcgtgaaatgtctatca

SEQ ID NO: 159124 - DNA, 25 bp, Artificial
  probe
  misc_feature (1)..(25): SEQ ID NO: 2487; WAN024DIG_at; Start 108; Stop 132
tatcattgctctggcgcagggtcgt

SEQ ID NO: 159125 - DNA, 25 bp, Artificial
  probe
  misc_feature (1)..(25): SEQ ID NO: 2487; WAN024DIG_at; Start 11; Stop 35
caaactttgaaaaagtagaatcagt

SEQ ID NO: 159126 - DNA, 25 bp, Artificial
  probe
  misc_feature (1)..(25): SEQ ID NO: 2487; WAN024DIG_at; Start 45; Stop 69
ggttcgtgataagaaaatcacaggc

SEQ ID NO: 159127 - DNA, 25 bp, Artificial
  probe
  misc_feature (1)..(25): SEQ ID NO: 2487; WAN024DIG_at; Start 41; Stop 65
gctgggttcgtgataagaaaatcac

SEQ ID NO: 159128 - DNA, 25 bp, Artificial
  probe
  misc_feature (1)..(25): SEQ ID NO: 2487; WAN024DIG_at; Start 57; Stop 81
gaaaatcacaggctaccgtatctct

SEQ ID NO: 159129 - DNA, 25 bp, Artificial
  probe
  misc_feature (1)..(25): SEQ ID NO: 2487; WAN024DIG_at; Start 22; Stop 46
aaagtagaatcagttgttggctggg

SEQ ID NO: 159130 - DNA, 25 bp, Artificial
  probe
  misc_feature (1)..(25): SEQ ID NO: 2487; WAN024DIG_at; Start 65; Stop 89
caggctaccgtatctctaaagaaac

SEQ ID NO: 159131 - DNA, 25 bp, Artificial
  probe
  misc_feature (1)..(25): SEQ ID NO: 2487; WAN024DIG_at; Start 32; Stop 56
cagttgttggctgggttcgtgataa

SEQ ID NO: 159132 - DNA, 25 bp, Artificial
  probe
  misc_feature (1)..(25): SEQ ID NO: 2487; WAN024DIG_at; Start 54; Stop 78
taagaaaatcacaggctaccgtatc

SEQ ID NO: 159133 - DNA, 25 bp, Artificial
  probe
  misc_feature (1)..(25): SEQ ID NO: 2487; WAN024DIG_at; Start 117; Stop 141
tctggcgcagggtcgtgcaaaagta

SEQ ID NO: 159134 - DNA, 25 bp, Artificial
  probe
  misc_feature (1)..(25): SEQ ID NO: 2487; WAN024DIG_at; Start 19; Stop 43
gaaaaagtagaatcagttgttggct

SEQ ID NO: 159135 - DNA, 25 bp, Artificial
  probe
  misc_feature (1)..(25): SEQ ID NO: 2487; WAN024DIG_at; Start 100; Stop 124
gaaatgtctatcattgctctggcgc

SEQ ID NO: 159136 - DNA, 25 bp, Artificial
  probe
  misc_feature (1)..(25): SEQ ID NO: 2487; WAN024DIG_at; Start 82; Stop 106
aaagaaacgaatgcgcgtgaaatgt

SEQ ID NO: 159137 - DNA, 25 bp, Artificial
  probe
  misc_feature (1)..(25): SEQ ID NO: 7161; WAN024DIH_at; Start 25; Stop 49
ccaactgaaaaaatagtttttgcag

SEQ ID NO: 159138 - DNA, 25 bp, Artificial
  probe
  misc_feature (1)..(25): SEQ ID NO: 7161; WAN024DIH_at; Start 26; Stop 50
caactgaaaaaatagtttttgcagt

SEQ ID NO: 159139 - DNA, 25 bp, Artificial
  probe
  misc_feature (1)..(25): SEQ ID NO: 7161; WAN024DIH_at; Start 16; Stop 40
attgtaaatccaactgaaaaaatag

SEQ ID NO: 159140 - DNA, 25 bp, Artificial
  probe
  misc_feature (1)..(25): SEQ ID NO: 7161; WAN024DIH_at; Start 8; Stop 32
ttctcccaattgtaaatccaactga

SEQ ID NO: 159141 - DNA, 25 bp, Artificial
  probe
  misc_feature (1)..(25): SEQ ID NO: 7161; WAN024DIH_at; Start 3; Stop 27
gtcaattctcccaattgtaaatcca

SEQ ID NO: 159142 - DNA, 25 bp, Artificial
  probe
  misc_feature (1)..(25): SEQ ID NO: 7161; WAN024DIH_at; Start 24; Stop 48
tccaactgaaaaaatagtttttgca

SEQ ID NO: 159143 - DNA, 25 bp, Artificial
  probe
  misc_feature (1)..(25): SEQ ID NO: 7161; WAN024DIH_at; Start 30; Stop 54
tgaaaaaatagtttttgcagttgcc

SEQ ID NO: 159144 - DNA, 25 bp, Artificial
  probe
  misc_feature (1)..(25): SEQ ID NO: 7161; WAN024DIH_at; Start 14; Stop 38
caattgtaaatccaactgaaaaaat

SEQ ID NO: 159145 - DNA, 25 bp, Artificial
  probe
  misc_feature (1)..(25): SEQ ID NO: 7161; WAN024DIH_at; Start 7; Stop 31
attctcccaattgtaaatccaactg

SEQ ID NO: 159146 - DNA, 25 bp, Artificial
  probe
  misc_feature (1)..(25): SEQ ID NO: 7161; WAN024DIH_at; Start 34; Stop 58
aaaatagtttttgcagttgcctatc

SEQ ID NO: 159147 - DNA, 25 bp, Artificial
  probe
  misc_feature (1)..(25): SEQ ID NO: 7161; WAN024DIH_at; Start 9; Stop 33
tctcccaattgtaaatccaactgaa

SEQ ID NO: 159148 - DNA, 25 bp, Artificial
  probe
  misc_feature (1)..(25): SEQ ID NO: 7161; WAN024DIH_at; Start 29; Stop 53
ctgaaaaaatagtttttgcagttgc

SEQ ID NO: 159149 - DNA, 25 bp, Artificial
  probe
  misc_feature (1)..(25): SEQ ID NO: 7161; WAN024DIH_at; Start 5; Stop 29
caattctcccaattgtaaatccaac

SEQ ID NO: 159150 - DNA, 25 bp, Artificial
  probe
  misc_feature (1)..(25): SEQ ID NO: 7161; WAN024DIH_at; Start 2; Stop 26
tgtcaattctcccaattgtaaatcc

SEQ ID NO: 159151 - DNA, 25 bp, Artificial
  probe
  misc_feature (1)..(25): SEQ ID NO: 7161; WAN024DIH_at; Start 11; Stop 35
tcccaattgtaaatccaactgaaaa

SEQ ID NO: 159152 - DNA, 25 bp, Artificial
  probe
  misc_feature (1)..(25): SEQ ID NO: 7161; WAN024DIH_at; Start 1; Stop 25
ctgtcaattctcccaattgtaaatc

SEQ ID NO: 159153 - DNA, 25 bp, Artificial
  probe
  misc_feature (1)..(25): SEQ ID NO: 7161; WAN024DIH_at; Start 10; Stop 34
ctcccaattgtaaatccaactgaaa

SEQ ID NO: 159154 - DNA, 25 bp, Artificial
  probe
  misc_feature (1)..(25): SEQ ID NO: 7161; WAN024DIH_at; Start 6; Stop 30
aattctcccaattgtaaatccaact

SEQ ID NO: 159155 - DNA, 25 bp, Artificial
  probe
  misc_feature (1)..(25): SEQ ID NO: 7161; WAN024DIH_at; Start 4; Stop 28
tcaattctcccaattgtaaatccaa

SEQ ID NO: 159156 - DNA, 25 bp, Artificial
  probe
  misc_feature (1)..(25): SEQ ID NO: 7161; WAN024DIH_at; Start 28; Stop 52
actgaaaaaatagtttttgcagttg

SEQ ID NO: 159157 - DNA, 25 bp, Artificial
  probe
  misc_feature (1)..(25): SEQ ID NO: 7161; WAN024DIH_at; Start 33; Stop 57
aaaaatagtttttgcagttgcctat

SEQ ID NO: 159158 - DNA, 25 bp, Artificial
  probe
  misc_feature (1)..(25): SEQ ID NO: 5315; WAN024DII_at; Start 52; Stop 76
ggtaatattcatatgatttcaaccc

SEQ ID NO: 159159 - DNA, 25 bp, Artificial
  probe
  misc_feature (1)..(25): SEQ ID NO: 5315; WAN024DII_at; Start 27; Stop 51
atcctgtcttgatagaaaacaaatt

SEQ ID NO: 159160 - DNA, 25 bp, Artificial
  probe
  misc_feature (1)..(25): SEQ ID NO: 5315; WAN024DII_at; Start 44; Stop 68
aacaaattggtaatattcatatgat

SEQ ID NO: 159161 - DNA, 25 bp, Artificial
  probe
  misc_feature (1)..(25): SEQ ID NO: 5315; WAN024DII_at; Start 22; Stop 46
atcacatcctgtcttgatagaaaac

SEQ ID NO: 159162 - DNA, 25 bp, Artificial
  probe
  misc_feature (1)..(25): SEQ ID NO: 5315; WAN024DII_at; Start 29; Stop 53
cctgtcttgatagaaaacaaattgg

SEQ ID NO: 159163 - DNA, 25 bp, Artificial
  probe
  misc_feature (1)..(25): SEQ ID NO: 5315; WAN024DII_at; Start 30; Stop 54
ctgtcttgatagaaaacaaattggt

SEQ ID NO: 159164 - DNA, 25 bp, Artificial
  probe
  misc_feature (1)..(25): SEQ ID NO: 5315; WAN024DII_at; Start 34; Stop 58
cttgatagaaaacaaattggtaata

SEQ ID NO: 159165 - DNA, 25 bp, Artificial
  probe
  misc_feature (1)..(25): SEQ ID NO: 5315; WAN024DII_at; Start 56; Stop 80
atattcatatgatttcaacccctaa

SEQ ID NO: 159166 - DNA, 25 bp, Artificial
  probe
  misc_feature (1)..(25): SEQ ID NO: 5315; WAN024DII_at; Start 25; Stop 49
acatcctgtcttgatagaaaacaaa

SEQ ID NO: 159167 - DNA, 25 bp, Artificial
  probe
  misc_feature (1)..(25): SEQ ID NO: 5315; WAN024DII_at; Start 32; Stop 56
gtcttgatagaaaacaaattggtaa

SEQ ID NO: 159168 - DNA, 25 bp, Artificial
  probe
  misc_feature (1)..(25): SEQ ID NO: 5315; WAN024DII_at; Start 26; Stop 50
catcctgtcttgatagaaaacaaat

SEQ ID NO: 159169 - DNA, 25 bp, Artificial
  probe
  misc_feature (1)..(25): SEQ ID NO: 5315; WAN024DII_at; Start 23; Stop 47
tcacatcctgtcttgatagaaaaca

SEQ ID NO: 159170 - DNA, 25 bp, Artificial
  probe
  misc_feature (1)..(25): SEQ ID NO: 5315; WAN024DII_at; Start 24; Stop 48
cacatcctgtcttgatagaaaacaa

SEQ ID NO: 159171 - DNA, 25 bp, Artificial
  probe
  misc_feature (1)..(25): SEQ ID NO: 5315; WAN024DII_at; Start 41; Stop 65
gaaaacaaattggtaatattcatat

SEQ ID NO: 159172 - DNA, 25 bp, Artificial
  probe
  misc_feature (1)..(25): SEQ ID NO: 5315; WAN024DII_at; Start 36; Stop 60
tgatagaaaacaaattggtaatatt

SEQ ID NO: 159173 - DNA, 25 bp, Artificial
  probe
  misc_feature (1)..(25): SEQ ID NO: 5315; WAN024DII_at; Start 46; Stop 70
caaattggtaatattcatatgattt

SEQ ID NO: 159174 - DNA, 25 bp, Artificial
  probe
  misc_feature (1)..(25): SEQ ID NO: 5315; WAN024DII_at; Start 43; Stop 67
aaacaaattggtaatattcatatga

SEQ ID NO: 159175 - DNA, 25 bp, Artificial
  probe
  misc_feature (1)..(25): SEQ ID NO: 5315; WAN024DII_at; Start 54; Stop 78
taatattcatatgatttcaacccct

SEQ ID NO: 159176 - DNA, 25 bp, Artificial
  probe
  misc_feature (1)..(25): SEQ ID NO: 5315; WAN024DII_at; Start 53; Stop 77
gtaatattcatatgatttcaacccc

SEQ ID NO: 159177 - DNA, 25 bp, Artificial
  probe
  misc_feature (1)..(25): SEQ ID NO: 5315; WAN024DII_at; Start 55; Stop 79
aatattcatatgatttcaaccccta

SEQ ID NO: 159178 - DNA, 25 bp, Artificial
  probe
  misc_feature (1)..(25): SEQ ID NO: 5315; WAN024DII_at; Start 45; Stop 69
acaaattggtaatattcatatgatt

SEQ ID NO: 159179 - DNA, 25 bp, Artificial
  probe
  misc_feature (1)..(25): SEQ ID NO: 5315; WAN024DII_at; Start 31; Stop 55
tgtcttgatagaaaacaaattggta

SEQ ID NO: 159180 - DNA, 25 bp, Artificial
  probe
  misc_feature (1)..(25): SEQ ID NO: 5315; WAN024DII_at; Start 28; Stop 52
tcctgtcttgatagaaaacaaattg

SEQ ID NO: 159181 - DNA, 25 bp, Artificial
  probe
  misc_feature (1)..(25): SEQ ID NO: 5315; WAN024DII_at; Start 57; Stop 81
tattcatatgatttcaacccctaaa

SEQ ID NO: 159182 - DNA, 25 bp, Artificial
  probe
  misc_feature (1)..(25): SEQ ID NO: 5315; WAN024DII_at; Start 33; Stop 57
tcttgatagaaaacaaattggtaat

SEQ ID NO: 159183 - DNA, 25 bp, Artificial
  probe
  misc_feature (1)..(25): SEQ ID NO: 5315; WAN024DII_at; Start 48; Stop 72
aattggtaatattcatatgatttca

SEQ ID NO: 159184 - DNA, 25 bp, Artificial
  probe
  misc_feature (1)..(25): SEQ ID NO: 5315; WAN024DII_at; Start 42; Stop 66
aaaacaaattggtaatattcatatg

SEQ ID NO: 159185 - DNA, 25 bp, Artificial
  probe
  misc_feature (1)..(25): SEQ ID NO: 5315; WAN024DII_at; Start 39; Stop 63
tagaaaacaaattggtaatattcat

SEQ ID NO: 159186 - DNA, 25 bp, Artificial
  probe
  misc_feature (1)..(25): SEQ ID NO: 5315; WAN024DII_at; Start 47; Stop 71
aaattggtaatattcatatgatttc

SEQ ID NO: 159187 - DNA, 25 bp, Artificial
  probe
  misc_feature (1)..(25): SEQ ID NO: 5315; WAN024DII_at; Start 35; Stop 59
ttgatagaaaacaaattggtaatat

SEQ ID NO: 159188 - DNA, 25 bp, Artificial
  probe
  misc_feature (1)..(25): SEQ ID NO: 5315; WAN024DII_at; Start 37; Stop 61
gatagaaaacaaattggtaatattc

SEQ ID NO: 159189 - DNA, 25 bp, Artificial
  probe
  misc_feature (1)..(25): SEQ ID NO: 5315; WAN024DII_at; Start 50; Stop 74
ttggtaatattcatatgatttcaac

SEQ ID NO: 159190 - DNA, 25 bp, Artificial
  probe
  misc_feature (1)..(25): SEQ ID NO: 5315; WAN024DII_at; Start 21; Stop 45
catcacatcctgtcttgatagaaaa

SEQ ID NO: 159191 - DNA, 25 bp, Artificial
  probe
  misc_feature (1)..(25): SEQ ID NO: 5315; WAN024DII_at; Start 51; Stop 75
tggtaatattcatatgatttcaacc

SEQ ID NO: 159192 - DNA, 25 bp, Artificial
  probe
  misc_feature (1)..(25): SEQ ID NO: 1217; WAN024DIJ_at; Start 32; Stop 56
caggatgtgatgaaactgataggca

SEQ ID NO: 159193 - DNA, 25 bp, Artificial
  probe
  misc_feature (1)..(25): SEQ ID NO: 1217; WAN024DIJ_at; Start 148; Stop 172
caatttgtagacacgttggatttga

SEQ ID NO: 159194 - DNA, 25 bp, Artificial
  probe
  misc_feature (1)..(25): SEQ ID NO: 1217; WAN024DIJ_at; Start 277; Stop 301
tatgaacttcctaaagagttttcga

SEQ ID NO: 159195 - DNA, 25 bp, Artificial
  probe
  misc_feature (1)..(25): SEQ ID NO: 1217; WAN024DIJ_at; Start 88; Stop 112
caattgggagaattgacagatcaac

SEQ ID NO: 159196 - DNA, 25 bp, Artificial
  probe
  misc_feature (1)..(25): SEQ ID NO: 1217; WAN024DIJ_at; Start 256; Stop 280
gattggatttccacaaatcgttatg

SEQ ID NO: 159197 - DNA, 25 bp, Artificial
  probe
  misc_feature (1)..(25): SEQ ID NO: 1217; WAN024DIJ_at; Start 11; Stop 35
ccaatttgttttctatcaagacagg

SEQ ID NO: 159198 - DNA, 25 bp, Artificial
  probe
  misc_feature (1)..(25): SEQ ID NO: 1217; WAN024DIJ_at; Start 299; Stop 323
cgattcgtatggctcataaatacca

SEQ ID NO: 159199 - DNA, 25 bp, Artificial
  probe
  misc_feature (1)..(25): SEQ ID NO: 1217; WAN024DIJ_at; Start 308; Stop 332
tggctcataaataccatgaaagtgt

SEQ ID NO: 159200 - DNA, 25 bp, Artificial
  probe
  misc_feature (1)..(25): SEQ ID NO: 1217; WAN024DIJ_at; Start 286; Stop 310
cctaaagagttttcgattcgtatgg

SEQ ID NO: 159201 - DNA, 25 bp, Artificial
  probe
  misc_feature (1)..(25): SEQ ID NO: 1217; WAN024DIJ_at; Start 75; Stop 99
tcagttggatttacaattgggagaa

SEQ ID NO: 159202 - DNA, 25 bp, Artificial
  probe
  misc_feature (1)..(25): SEQ ID NO: 1217; WAN024DIJ_at; Start 214; Stop 238
catcgtaatgatagtgaagaaagtt

SEQ ID NO: 159203 - DNA, 25 bp, Artificial
  probe
  misc_feature (1)..(25): SEQ ID NO: 1217; WAN024DIJ_at; Start 159; Stop 183
cacgttggatttgaatgatgtagaa

SEQ ID NO: 159204 - DNA, 25 bp, Artificial
  probe
  misc_feature (1)..(25): SEQ ID NO: 1217; WAN024DIJ_at; Start 315; Stop 339
taaataccatgaaagtgttactgaa

SEQ ID NO: 159205 - DNA, 25 bp, Artificial
  probe
  misc_feature (1)..(25): SEQ ID NO: 1217; WAN024DIJ_at; Start 37; Stop 61
tgtgatgaaactgataggcaactgc

SEQ ID NO: 159206 - DNA, 25 bp, Artificial
  probe
  misc_feature (1)..(25): SEQ ID NO: 1217; WAN024DIJ_at; Start 267; Stop 291
cacaaatcgttatgaacttcctaaa

SEQ ID NO: 159207 - DNA, 25 bp, Artificial
  probe
  misc_feature (1)..(25): SEQ ID NO: 1217; WAN024DIJ_at; Start 170; Stop 194
tgaatgatgtagaatataaagaaat

SEQ ID NO: 159208 - DNA, 25 bp, Artificial
  probe
  misc_feature (1)..(25): SEQ ID NO: 1217; WAN024DIJ_at; Start 153; Stop 177
tgtagacacgttggatttgaatgat

SEQ ID NO: 159209 - DNA, 25 bp, Artificial
  probe
  misc_feature (1)..(25): SEQ ID NO: 1217; WAN024DIJ_at; Start 292; Stop 316
gagttttcgattcgtatggctcata

SEQ ID NO: 159210 - DNA, 25 bp, Artificial
  probe
  misc_feature (1)..(25): SEQ ID NO: 1217; WAN024DIJ_at; Start 228; Stop 252
tgaagaaagtttggtagaatggtta

SEQ ID NO: 159211 - DNA, 25 bp, Artificial
  probe
  misc_feature (1)..(25): SEQ ID NO: 1217; WAN024DIJ_at; Start 49; Stop 73
gataggcaactgcaaaaactatttt

SEQ ID NO: 159212 - DNA, 25 bp, Artificial
  probe
  misc_feature (1)..(25): SEQ ID NO: 1217; WAN024DIJ_at; Start 244; Stop 268
gaatggttatatgattggatttcca

SEQ ID NO: 159213 - DNA, 25 bp, Artificial
  probe
  misc_feature (1)..(25): SEQ ID NO: 1217; WAN024DIJ_at; Start 43; Stop 67
gaaactgataggcaactgcaaaaac

SEQ ID NO: 159214 - DNA, 25 bp, Artificial
  probe
  misc_feature (1)..(25): SEQ ID NO: 1217; WAN024DIJ_at; Start 104; Stop 128
cagatcaactaagaaaattagattc

SEQ ID NO: 159215 - DNA, 25 bp, Artificial
  probe
  misc_feature (1)..(25): SEQ ID NO: 1217; WAN024DIJ_at; Start 93; Stop 117
gggagaattgacagatcaactaaga

SEQ ID NO: 159216 - DNA, 25 bp, Artificial
  probe
  misc_feature (1)..(25): SEQ ID NO: 1217; WAN024DIJ_at; Start 59; Stop 83
tgcaaaaactattttttcagttgga

SEQ ID NO: 159217 - DNA, 25 bp, Artificial
  probe
  misc_feature (1)..(25): SEQ ID NO: 1217; WAN024DIJ_at; Start 40; Stop 64
gatgaaactgataggcaactgcaaa

SEQ ID NO: 159218 - DNA, 25 bp, Artificial
  probe
  misc_feature (1)..(25): SEQ ID NO: 1217; WAN024DIJ_at; Start 135; Stop 159
tgttcctcgtagtcaatttgtagac

SEQ ID NO: 159219 - DNA, 25 bp, Artificial
  probe
  misc_feature (1)..(25): SEQ ID NO: 1217; WAN024DIJ_at; Start 100; Stop 124
ttgacagatcaactaagaaaattag

SEQ ID NO: 159220 - DNA, 25 bp, Artificial
  probe
  misc_feature (1)..(25): SEQ ID NO: 1217; WAN024DIJ_at; Start 207; Stop 231
tatcttccatcgtaatgatagtgaa

SEQ ID NO: 159221 - DNA, 25 bp, Artificial
  probe
  misc_feature (1)..(25): SEQ ID NO: 1217; WAN024DIJ_at; Start 27; Stop 51
caagacaggatgtgatgaaactgat

SEQ ID NO: 159222 - DNA, 25 bp, Artificial
  probe
  misc_feature (1)..(25): SEQ ID NO: 1217; WAN024DIJ_at; Start 197; Stop 221
taaactattttatcttccatcgtaa

SEQ ID NO: 159223 - DNA, 25 bp, Artificial
  probe
  misc_feature (1)..(25): SEQ ID NO: 1217; WAN024DIJ_at; Start 138; Stop 162
tcctcgtagtcaatttgtagacacg

SEQ ID NO: 159224 - DNA, 25 bp, Artificial
  probe
  misc_feature (1)..(25): SEQ ID NO: 1217; WAN024DIJ_at; Start 142; Stop 166
cgtagtcaatttgtagacacgttgg

SEQ ID NO: 159225 - DNA, 25 bp, Artificial
  probe
  misc_feature (1)..(25): SEQ ID NO: 1217; WAN024DIJ_at; Start 17; Stop 41
tgttttctatcaagacaggatgtga

SEQ ID NO: 159226 - DNA, 25 bp, Artificial
  probe
  misc_feature (1)..(25): SEQ ID NO: 1473; WAN024DIK_at; Start 88; Stop 112
atttttggtgtggtcggtatggcta

SEQ ID NO: 159227 - DNA, 25 bp, Artificial
  probe
  misc_feature (1)..(25): SEQ ID NO: 1473; WAN024DIK_at; Start 138; Stop 162
ccaagccctgctaggtaaggaaaat

SEQ ID NO: 159228 - DNA, 25 bp, Artificial
  probe
  misc_feature (1)..(25): SEQ ID NO: 1473; WAN024DIK_at; Start 133; Stop 157
aatttccaagccctgctaggtaagg

SEQ ID NO: 159229 - DNA, 25 bp, Artificial
  probe
  misc_feature (1)..(25): SEQ ID NO: 1473; WAN024DIK_at; Start 297; Stop 321
aaaccagcttggaattactgctcag

SEQ ID NO: 159230 - DNA, 25 bp, Artificial
  probe
  misc_feature (1)..(25): SEQ ID NO: 1473; WAN024DIK_at; Start 312; Stop 336
tactgctcagactgtaaatgtctac

SEQ ID NO: 159231 - DNA, 25 bp, Artificial
  probe
  misc_feature (1)..(25): SEQ ID NO: 1473; WAN024DIK_at; Start 191; Stop 215
ccgaagatggcagtattgcagttga

SEQ ID NO: 159232 - DNA, 25 bp, Artificial
  probe
  misc_feature (1)..(25): SEQ ID NO: 1473; WAN024DIK_at; Start 46; Stop 70
gatgaagtgattgcaaccgtcgtag

SEQ ID NO: 159233 - DNA, 25 bp, Artificial
  probe
  misc_feature (1)..(25): SEQ ID NO: 1473; WAN024DIK_at; Start 345; Stop 369
tatcaaagttgtaggagaataacta

SEQ ID NO: 159234 - DNA, 25 bp, Artificial
  probe
  misc_feature (1)..(25): SEQ ID NO: 1473; WAN024DIK_at; Start 285; Stop 309
ctttagcttggaaaaccagcttgga

SEQ ID NO: 159235 - DNA, 25 bp, Artificial
  probe
  misc_feature (1)..(25): SEQ ID NO: 1473; WAN024DIK_at; Start 53; Stop 77
tgattgcaaccgtcgtaggtggagc

SEQ ID NO: 159236 - DNA, 25 bp, Artificial
  probe
  misc_feature (1)..(25): SEQ ID NO: 1473; WAN024DIK_at; Start 80; Stop 104
caactgagatttttggtgtggtcgg

SEQ ID NO: 159237 - DNA, 25 bp, Artificial
  probe
  misc_feature (1)..(25): SEQ ID NO: 1473; WAN024DIK_at; Start 182; Stop 206
taaaggcagccgaagatggcagtat

SEQ ID NO: 159238 - DNA, 25 bp, Artificial
  probe
  misc_feature (1)..(25): SEQ ID NO: 1473; WAN024DIK_at; Start 279; Stop 303
tgttgcctttagcttggaaaaccag

SEQ ID NO: 159239 - DNA, 25 bp, Artificial
  probe
  misc_feature (1)..(25): SEQ ID NO: 1473; WAN024DIK_at; Start 174; Stop 198
tgtcgtcgtaaaggcagccgaagat

SEQ ID NO: 159240 - DNA, 25 bp, Artificial
  probe
  misc_feature (1)..(25): SEQ ID NO: 1473; WAN024DIK_at; Start 274; Stop 298
gagcgtgttgcctttagcttggaaa

SEQ ID NO: 159241 - DNA, 25 bp, Artificial
  probe
  misc_feature (1)..(25): SEQ ID NO: 1473; WAN024DIK_at; Start 144; Stop 168
cctgctaggtaaggaaaattattct

SEQ ID NO: 159242 - DNA, 25 bp, Artificial
  probe
  misc_feature (1)..(25): SEQ ID NO: 1473; WAN024DIK_at; Start 128; Stop 152
aagataatttccaagccctgctagg

SEQ ID NO: 159243 - DNA, 25 bp, Artificial
  probe
  misc_feature (1)..(25): SEQ ID NO: 1473; WAN024DIK_at; Start 109; Stop 133
gctagtaaaaatgccctcaaagata

SEQ ID NO: 159244 - DNA, 25 bp, Artificial
  probe
  misc_feature (1)..(25): SEQ ID NO: 1473; WAN024DIK_at; Start 118; Stop 142
aatgccctcaaagataatttccaag

SEQ ID NO: 159245 - DNA, 25 bp, Artificial
  probe
  misc_feature (1)..(25): SEQ ID NO: 1473; WAN024DIK_at; Start 59; Stop 83
caaccgtcgtaggtggagcagcaac

SEQ ID NO: 159246 - DNA, 25 bp, Artificial
  probe
  misc_feature (1)..(25): SEQ ID NO: 1473; WAN024DIK_at; Start 253; Stop 277
gaagtgtcaaaaaacattcaagagc

SEQ ID NO: 159247 - DNA, 25 bp, Artificial
  probe
  misc_feature (1)..(25): SEQ ID NO: 1473; WAN024DIK_at; Start 101; Stop 125
tcggtatggctagtaaaaatgccct

SEQ ID NO: 159248 - DNA, 25 bp, Artificial
  probe
  misc_feature (1)..(25): SEQ ID NO: 1473; WAN024DIK_at; Start 261; Stop 285
aaaaaacattcaagagcgtgttgcc

SEQ ID NO: 159249 - DNA, 25 bp, Artificial
  probe
  misc_feature (1)..(25): SEQ ID NO: 1473; WAN024DIK_at; Start 230; Stop 254
taagctacggaacaaagattagtga

SEQ ID NO: 159250 - DNA, 25 bp, Artificial
  probe
  misc_feature (1)..(25): SEQ ID NO: 1473; WAN024DIK_at; Start 303; Stop 327
gcttggaattactgctcagactgta

SEQ ID NO: 159251 - DNA, 25 bp, Artificial
  probe
  misc_feature (1)..(25): SEQ ID NO: 1473; WAN024DIK_at; Start 319; Stop 343
cagactgtaaatgtctacattcaaa

SEQ ID NO: 159252 - DNA, 25 bp, Artificial
  probe
  misc_feature (1)..(25): SEQ ID NO: 1473; WAN024DIK_at; Start 68; Stop 92
taggtggagcagcaactgagatttt

SEQ ID NO: 159253 - DNA, 25 bp, Artificial
  probe
  misc_feature (1)..(25): SEQ ID NO: 1473; WAN024DIK_at; Start 224; Stop 248
ccgtgttaagctacggaacaaagat

SEQ ID NO: 159254 - DNA, 25 bp, Artificial
  probe
  misc_feature (1)..(25): SEQ ID NO: 1473; WAN024DIK_at; Start 40; Stop 64
ctaacagatgaagtgattgcaaccg

SEQ ID NO: 159255 - DNA, 25 bp, Artificial
  probe
  misc_feature (1)..(25): SEQ ID NO: 1473; WAN024DIK_at; Start 218; Stop 242
tatataccgtgttaagctacggaac

SEQ ID NO: 159256 - DNA, 25 bp, Artificial
  probe
  misc_feature (1)..(25): SEQ ID NO: 1473; WAN024DIK_at; Start 204; Stop 228
tattgcagttgatgtatataccgtg

SEQ ID NO: 159257 - DNA, 25 bp, Artificial
  probe
  misc_feature (1)..(25): SEQ ID NO: 1473; WAN024DIK_at; Start 336; Stop 360
cattcaaaatatcaaagttgtagga

SEQ ID NO: 159258 - DNA, 25 bp, Artificial
  probe
  misc_feature (1)..(25): SEQ ID NO: 1473; WAN024DIK_at; Start 267; Stop 291
cattcaagagcgtgttgcctttagc

SEQ ID NO: 159259 - DNA, 25 bp, Artificial
  probe
  misc_feature (1)..(25): SEQ ID NO: 1473; WAN024DIK_at; Start 237; Stop 261
cggaacaaagattagtgaagtgtca

SEQ ID NO: 159260 - DNA, 25 bp, Artificial
  probe
  misc_feature (1)..(25): SEQ ID NO: 2481; WAN024DIL_at; Start 44; Stop 68
gaaacaaccgttcacacgcgatgaa

SEQ ID NO: 159261 - DNA, 25 bp, Artificial
  probe
  misc_feature (1)..(25): SEQ ID NO: 2481; WAN024DIL_at; Start 21; Stop 45
tacaggtcgtaagactgtatcagga

SEQ ID NO: 159262 - DNA, 25 bp, Artificial
  probe
  misc_feature (1)..(25): SEQ ID NO: 2481; WAN024DIL_at; Start 139; Stop 163
gtttgggcttcagctcgtgctttga

SEQ ID NO: 159263 - DNA, 25 bp, Artificial
  probe
  misc_feature (1)..(25): SEQ ID NO: 2481; WAN024DIL_at; Start 103; Stop 127
aaagttactgttcttatcgatggta

SEQ ID NO: 159264 - DNA, 25 bp, Artificial
  probe
  misc_feature (1)..(25): SEQ ID NO: 2481; WAN024DIL_at; Start 159; Stop 183
tttgaaatcaggtaaagttgaacgc

SEQ ID NO: 159265 - DNA, 25 bp, Artificial
  probe
  misc_feature (1)..(25): SEQ ID NO: 2481; WAN024DIL_at; Start 108; Stop 132
tactgttcttatcgatggtaaacct

SEQ ID NO: 159266 - DNA, 25 bp, Artificial
  probe
  misc_feature (1)..(25): SEQ ID NO: 2481; WAN024DIL_at; Start 144; Stop 168
ggcttcagctcgtgctttgaaatca

SEQ ID NO: 159267 - DNA, 25 bp, Artificial
  probe
  misc_feature (1)..(25): SEQ ID NO: 2481; WAN024DIL_at; Start 13; Stop 37
tgttactttacaggtcgtaagactg

SEQ ID NO: 159268 - DNA, 25 bp, Artificial
  probe
  misc_feature (1)..(25): SEQ ID NO: 2481; WAN024DIL_at; Start 61; Stop 85
gcgatgaaccaaacaaaacgtgccg

SEQ ID NO: 159269 - DNA, 25 bp, Artificial
  probe
  misc_feature (1)..(25): SEQ ID NO: 2481; WAN024DIL_at; Start 48; Stop 72
caaccgttcacacgcgatgaaccaa

SEQ ID NO: 159270 - DNA, 25 bp, Artificial
  probe
  misc_feature (1)..(25): SEQ ID NO: 2481; WAN024DIL_at; Start 56; Stop 80
cacacgcgatgaaccaaacaaaacg

SEQ ID NO: 159271 - DNA, 25 bp, Artificial
  probe
  misc_feature (1)..(25): SEQ ID NO: 2481; WAN024DIL_at; Start 23; Stop 47
caggtcgtaagactgtatcaggaaa

SEQ ID NO: 159272 - DNA, 25 bp, Artificial
  probe
  misc_feature (1)..(25): SEQ ID NO: 2481; WAN024DIL_at; Start 27; Stop 51
tcgtaagactgtatcaggaaacaac

SEQ ID NO: 159273 - DNA, 25 bp, Artificial
  probe
  misc_feature (1)..(25): SEQ ID NO: 2481; WAN024DIL_at; Start 36; Stop 60
tgtatcaggaaacaaccgttcacac

SEQ ID NO: 159274 - DNA, 25 bp, Artificial
  probe
  misc_feature (1)..(25): SEQ ID NO: 2481; WAN024DIL_at; Start 30; Stop 54
taagactgtatcaggaaacaaccgt

SEQ ID NO: 159275 - DNA, 25 bp, Artificial
  probe
  misc_feature (1)..(25): SEQ ID NO: 2481; WAN024DIL_at; Start 141; Stop 165
ttgggcttcagctcgtgctttgaaa

SEQ ID NO: 159276 - DNA, 25 bp, Artificial
  probe
  misc_feature (1)..(25): SEQ ID NO: 2481; WAN024DIL_at; Start 41; Stop 65
caggaaacaaccgttcacacgcgat

SEQ ID NO: 159277 - DNA, 25 bp, Artificial
  probe
  misc_feature (1)..(25): SEQ ID NO: 2481; WAN024DIL_at; Start 52; Stop 76
cgttcacacgcgatgaaccaaacaa

SEQ ID NO: 159278 - DNA, 25 bp, Artificial
  probe
  misc_feature (1)..(25): SEQ ID NO: 2481; WAN024DIL_at; Start 111; Stop 135
tgttcttatcgatggtaaacctaaa

SEQ ID NO: 159279 - DNA, 25 bp, Artificial
  probe
  misc_feature (1)..(25): SEQ ID NO: 2481; WAN024DIL_at; Start 161; Stop 185
tgaaatcaggtaaagttgaacgcgt

SEQ ID NO: 159280 - DNA, 25 bp, Artificial
  probe
  misc_feature (1)..(25): SEQ ID NO: 2481; WAN024DIL_at; Start 136; Stop 160
aaagtttgggcttcagctcgtgctt

SEQ ID NO: 159281 - DNA, 25 bp, Artificial
  probe
  misc_feature (1)..(25): SEQ ID NO: 2481; WAN024DIL_at; Start 149; Stop 173
cagctcgtgctttgaaatcaggtaa

SEQ ID NO: 159282 - DNA, 25 bp, Artificial
  probe
  misc_feature (1)..(25): SEQ ID NO: 2481; WAN024DIL_at; Start 33; Stop 57
gactgtatcaggaaacaaccgttca

SEQ ID NO: 159283 - DNA, 25 bp, Artificial
  probe
  misc_feature (1)..(25): SEQ ID NO: 2481; WAN024DIL_at; Start 131; Stop 155
ctaaaaaagtttgggcttcagctcg

SEQ ID NO: 159284 - DNA, 25 bp, Artificial
  probe
  misc_feature (1)..(25): SEQ ID NO: 2481; WAN024DIL_at; Start 135; Stop 159
aaaagtttgggcttcagctcgtgct

SEQ ID NO: 159285 - DNA, 25 bp, Artificial
  probe
  misc_feature (1)..(25): SEQ ID NO: 2481; WAN024DIL_at; Start 63; Stop 87
gatgaaccaaacaaaacgtgccgta

SEQ ID NO: 159286 - DNA, 25 bp, Artificial
  probe
  misc_feature (1)..(25): SEQ ID NO: 2481; WAN024DIL_at; Start 100; Stop 124
caaaaagttactgttcttatcgatg

SEQ ID NO: 159287 - DNA, 25 bp, Artificial
  probe
  misc_feature (1)..(25): SEQ ID NO: 2481; WAN024DIL_at; Start 151; Stop 175
gctcgtgctttgaaatcaggtaaag

SEQ ID NO: 159288 - DNA, 25 bp, Artificial
  probe
  misc_feature (1)..(25): SEQ ID NO: 2481; WAN024DIL_at; Start 43; Stop 67
ggaaacaaccgttcacacgcgatga

SEQ ID NO: 159289 - DNA, 25 bp, Artificial
  probe
  misc_feature (1)..(25): SEQ ID NO: 2481; WAN024DIL_at; Start 60; Stop 84
cgcgatgaaccaaacaaaacgtgcc

SEQ ID NO: 159290 - DNA, 25 bp, Artificial
  probe
  misc_feature (1)..(25): SEQ ID NO: 2481; WAN024DIL_at; Start 38; Stop 62
tatcaggaaacaaccgttcacacgc

SEQ ID NO: 159291 - DNA, 25 bp, Artificial
  probe
  misc_feature (1)..(25): SEQ ID NO: 2481; WAN024DIL_at; Start 154; Stop 178
cgtgctttgaaatcaggtaaagttg

SEQ ID NO: 159292 - DNA, 25 bp, Artificial
  probe
  misc_feature (1)..(25): SEQ ID NO: 2481; WAN024DIL_at; Start 9; Stop 33
agtatgttactttacaggtcgtaag

SEQ ID NO: 159293 - DNA, 25 bp, Artificial
  probe
  misc_feature (1)..(25): SEQ ID NO: 2481; WAN024DIL_at; Start 146; Stop 170
cttcagctcgtgctttgaaatcagg

SEQ ID NO: 159294 - DNA, 25 bp, Artificial
  probe
  misc_feature (1)..(25): SEQ ID NO: 7720; WAN024DIM_at; Start 191; Stop 215
tagatgaagtcccattacggtttac

SEQ ID NO: 159295 - DNA, 25 bp, Artificial
  probe
  misc_feature (1)..(25): SEQ ID NO: 7720; WAN024DIM_at; Start 27; Stop 51
gcattatctgcacctaagacaatcg

SEQ ID NO: 159296 - DNA, 25 bp, Artificial
  probe
  misc_feature (1)..(25): SEQ ID NO: 7720; WAN024DIM_at; Start 222; Stop 246
tacattacgacacggagttttacaa

SEQ ID NO: 159297 - DNA, 25 bp, Artificial
  probe
  misc_feature (1)..(25): SEQ ID NO: 7720; WAN024DIM_at; Start 165; Stop 189
tcgtaaaaccataccagtggagatt

SEQ ID NO: 159298 - DNA, 25 bp, Artificial
  probe
  misc_feature (1)..(25): SEQ ID NO: 7720; WAN024DIM_at; Start 31; Stop 55
tatctgcacctaagacaatcgcttt

SEQ ID NO: 159299 - DNA, 25 bp, Artificial
  probe
  misc_feature (1)..(25): SEQ ID NO: 7720; WAN024DIM_at; Start 157; Stop 181
ctattcgttcgtaaaaccataccag

SEQ ID NO: 159300 - DNA, 25 bp, Artificial
  probe
  misc_feature (1)..(25): SEQ ID NO: 7720; WAN024DIM_at; Start 58; Stop 82
tctcttctttcactttttatctcat

SEQ ID NO: 159301 - DNA, 25 bp, Artificial
  probe
  misc_feature (1)..(25): SEQ ID NO: 7720; WAN024DIM_at; Start 16; Stop 40
tatccatataagcattatctgcacc

SEQ ID NO: 159302 - DNA, 25 bp, Artificial
  probe
  misc_feature (1)..(25): SEQ ID NO: 7720; WAN024DIM_at; Start 213; Stop 237
tacaatttttacattacgacacgga

SEQ ID NO: 159303 - DNA, 25 bp, Artificial
  probe
  misc_feature (1)..(25): SEQ ID NO: 7720; WAN024DIM_at; Start 22; Stop 46
tataagcattatctgcacctaagac

SEQ ID NO: 159304 - DNA, 25 bp, Artificial
  probe
  misc_feature (1)..(25): SEQ ID NO: 7720; WAN024DIM_at; Start 139; Stop 163
cgtaaccattattttcgcctattcg

SEQ ID NO: 159305 - DNA, 25 bp, Artificial
  probe
  misc_feature (1)..(25): SEQ ID NO: 7720; WAN024DIM_at; Start 215; Stop 239
caatttttacattacgacacggagt

SEQ ID NO: 159306 - DNA, 25 bp, Artificial
  probe
  misc_feature (1)..(25): SEQ ID NO: 7720; WAN024DIM_at; Start 2; Stop 26
tgttgtttcaactttatccatataa

SEQ ID NO: 159307 - DNA, 25 bp, Artificial
  probe
  misc_feature (1)..(25): SEQ ID NO: 7720; WAN024DIM_at; Start 87; Stop 111
ttttattcccatcatattattccca

SEQ ID NO: 159308 - DNA, 25 bp, Artificial
  probe
  misc_feature (1)..(25): SEQ ID NO: 7720; WAN024DIM_at; Start 33; Stop 57
tctgcacctaagacaatcgcttttt

SEQ ID NO: 159309 - DNA, 25 bp, Artificial
  probe
  misc_feature (1)..(25): SEQ ID NO: 7720; WAN024DIM_at; Start 36; Stop 60
gcacctaagacaatcgcttttttct

SEQ ID NO: 159310 - DNA, 25 bp, Artificial
  probe
  misc_feature (1)..(25): SEQ ID NO: 7720; WAN024DIM_at; Start 24; Stop 48
taagcattatctgcacctaagacaa

SEQ ID NO: 159311 - DNA, 25 bp, Artificial
  probe
  misc_feature (1)..(25): SEQ ID NO: 7720; WAN024DIM_at; Start 75; Stop 99
tatctcatttctttttattcccatc

SEQ ID NO: 159312 - DNA, 25 bp, Artificial
  probe
  misc_feature (1)..(25): SEQ ID NO: 7720; WAN024DIM_at; Start 227; Stop 251
tacgacacggagttttacaaatcga

SEQ ID NO: 159313 - DNA, 25 bp, Artificial
  probe
  misc_feature (1)..(25): SEQ ID NO: 7720; WAN024DIM_at; Start 145; Stop 169
cattattttcgcctattcgttcgta

SEQ ID NO: 159314 - DNA, 25 bp, Artificial
  probe
  misc_feature (1)..(25): SEQ ID NO: 7720; WAN024DIM_at; Start 193; Stop 217
gatgaagtcccattacggtttacaa

SEQ ID NO: 159315 - DNA, 25 bp, Artificial
  probe
  misc_feature (1)..(25): SEQ ID NO: 7720; WAN024DIM_at; Start 46; Stop 70
caatcgcttttttctcttctttcac

SEQ ID NO: 159316 - DNA, 25 bp, Artificial
  probe
  misc_feature (1)..(25): SEQ ID NO: 7720; WAN024DIM_at; Start 173; Stop 197
ccataccagtggagattttagatga

SEQ ID NO: 159317 - DNA, 25 bp, Artificial
  probe
  misc_feature (1)..(25): SEQ ID NO: 7720; WAN024DIM_at; Start 246; Stop 270
aatcgatttcatttgccaaacgtag

SEQ ID NO: 159318 - DNA, 25 bp, Artificial
  probe
  misc_feature (1)..(25): SEQ ID NO: 7720; WAN024DIM_at; Start 135; Stop 159
tctacgtaaccattattttcgccta

SEQ ID NO: 159319 - DNA, 25 bp, Artificial
  probe
  misc_feature (1)..(25): SEQ ID NO: 7720; WAN024DIM_at; Start 122; Stop 146
cccatcatatgtttctacgtaacca

SEQ ID NO: 159320 - DNA, 25 bp, Artificial
  probe
  misc_feature (1)..(25): SEQ ID NO: 7720; WAN024DIM_at; Start 232; Stop 256
cacggagttttacaaatcgatttca

SEQ ID NO: 159321 - DNA, 25 bp, Artificial
  probe
  misc_feature (1)..(25): SEQ ID NO: 7720; WAN024DIM_at; Start 153; Stop 177
tcgcctattcgttcgtaaaaccata

SEQ ID NO: 159322 - DNA, 25 bp, Artificial
  probe
  misc_feature (1)..(25): SEQ ID NO: 7720; WAN024DIM_at; Start 162; Stop 186
cgttcgtaaaaccataccagtggag

SEQ ID NO: 159323 - DNA, 25 bp, Artificial
  probe
  misc_feature (1)..(25): SEQ ID NO: 7720; WAN024DIM_at; Start 116; Stop 140
atgtttcccatcatatgtttctacg

SEQ ID NO: 159324 - DNA, 25 bp, Artificial
  probe
  misc_feature (1)..(25): SEQ ID NO: 7720; WAN024DIM_at; Start 179; Stop 203
cagtggagattttagatgaagtccc

SEQ ID NO: 159325 - DNA, 25 bp, Artificial
  probe
  misc_feature (1)..(25): SEQ ID NO: 7720; WAN024DIM_at; Start 186; Stop 210
gattttagatgaagtcccattacgg

SEQ ID NO: 159326 - DNA, 25 bp, Artificial
  probe
  misc_feature (1)..(25): SEQ ID NO: 7720; WAN024DIM_at; Start 178; Stop 202
ccagtggagattttagatgaagtcc

SEQ ID NO: 159327 - DNA, 25 bp, Artificial
  probe
  misc_feature (1)..(25): SEQ ID NO: 7720; WAN024DIM_at; Start 101; Stop 125
tattattcccatcatatgtttccca

SEQ ID NO: 159328 - DNA, 25 bp, Artificial
  probe
  misc_feature (1)..(25): SEQ ID NO: 7078; WAN024DIN_at; Start 26; Stop 50
agggactttcatatgatgattttta

SEQ ID NO: 159329 - DNA, 25 bp, Artificial
  probe
  misc_feature (1)..(25): SEQ ID NO: 7078; WAN024DIN_at; Start 29; Stop 53
gactttcatatgatgatttttatac

SEQ ID NO: 159330 - DNA, 25 bp, Artificial
  probe
  misc_feature (1)..(25): SEQ ID NO: 7078; WAN024DIN_at; Start 27; Stop 51
gggactttcatatgatgatttttat

SEQ ID NO: 159331 - DNA, 25 bp, Artificial
  probe
  misc_feature (1)..(25): SEQ ID NO: 7078; WAN024DIN_at; Start 30; Stop 54
actttcatatgatgatttttataca

SEQ ID NO: 159332 - DNA, 25 bp, Artificial
  probe
  misc_feature (1)..(25): SEQ ID NO: 7078; WAN024DIN_at; Start 28; Stop 52
ggactttcatatgatgatttttata

SEQ ID NO: 159333 - DNA, 25 bp, Artificial
  probe
  misc_feature (1)..(25): SEQ ID NO: 2551; WAN024DIO_at; Start 18; Stop 42
atctccactggtatggttttacgaa

SEQ ID NO: 159334 - DNA, 25 bp, Artificial
  probe
  misc_feature (1)..(25): SEQ ID NO: 2551; WAN024DIO_at; Start 4; Stop 28
ggacttcatctaaaatctccactgg

SEQ ID NO: 159335 - DNA, 25 bp, Artificial
  probe
  misc_feature (1)..(25): SEQ ID NO: 2551; WAN024DIO_at; Start 3; Stop 27
gggacttcatctaaaatctccactg

SEQ ID NO: 159336 - DNA, 25 bp, Artificial
  probe
  misc_feature (1)..(25): SEQ ID NO: 2551; WAN024DIO_at; Start 17; Stop 41
aatctccactggtatggttttacga

SEQ ID NO: 159337 - DNA, 25 bp, Artificial
  probe
  misc_feature (1)..(25): SEQ ID NO: 2551; WAN024DIO_at; Start 57; Stop 81
taatggttacgtagaaacatatgat

SEQ ID NO: 159338 - DNA, 25 bp, Artificial
  probe
  misc_feature (1)..(25): SEQ ID NO: 2551; WAN024DIO_at; Start 19; Stop 43
tctccactggtatggttttacgaac

SEQ ID NO: 159339 - DNA, 25 bp, Artificial
  probe
  misc_feature (1)..(25): SEQ ID NO: 2551; WAN024DIO_at; Start 59; Stop 83
atggttacgtagaaacatatgatgg

SEQ ID NO: 159340 - DNA, 25 bp, Artificial
  probe
  misc_feature (1)..(25): SEQ ID NO: 2551; WAN024DIO_at; Start 61; Stop 85
ggttacgtagaaacatatgatggga

SEQ ID NO: 159341 - DNA, 25 bp, Artificial
  probe
  misc_feature (1)..(25): SEQ ID NO: 2551; WAN024DIO_at; Start 2; Stop 26
tgggacttcatctaaaatctccact

SEQ ID NO: 159342 - DNA, 25 bp, Artificial
  probe
  misc_feature (1)..(25): SEQ ID NO: 2551; WAN024DIO_at; Start 6; Stop 30
acttcatctaaaatctccactggta

SEQ ID NO: 159343 - DNA, 25 bp, Artificial
  probe
  misc_feature (1)..(25): SEQ ID NO: 2551; WAN024DIO_at; Start 9; Stop 33
tcatctaaaatctccactggtatgg

SEQ ID NO: 159344 - DNA, 25 bp, Artificial
  probe
  misc_feature (1)..(25): SEQ ID NO: 2551; WAN024DIO_at; Start 1; Stop 25
atgggacttcatctaaaatctccac

SEQ ID NO: 159345 - DNA, 25 bp, Artificial
  probe
  misc_feature (1)..(25): SEQ ID NO: 2551; WAN024DIO_at; Start 10; Stop 34
catctaaaatctccactggtatggt

SEQ ID NO: 159346 - DNA, 25 bp, Artificial
  probe
  misc_feature (1)..(25): SEQ ID NO: 2551; WAN024DIO_at; Start 7; Stop 31
cttcatctaaaatctccactggtat

SEQ ID NO: 159347 - DNA, 25 bp, Artificial
  probe
  misc_feature (1)..(25): SEQ ID NO: 2551; WAN024DIO_at; Start 8; Stop 32
ttcatctaaaatctccactggtatg

SEQ ID NO: 159348 - DNA, 25 bp, Artificial
  probe
  misc_feature (1)..(25): SEQ ID NO: 2551; WAN024DIO_at; Start 20; Stop 44
ctccactggtatggttttacgaacg

SEQ ID NO: 159349 - DNA, 25 bp, Artificial
  probe
  misc_feature (1)..(25): SEQ ID NO: 2551; WAN024DIO_at; Start 14; Stop 38
taaaatctccactggtatggtttta

SEQ ID NO: 159350 - DNA, 25 bp, Artificial
  probe
  misc_feature (1)..(25): SEQ ID NO: 2551; WAN024DIO_at; Start 56; Stop 80
ataatggttacgtagaaacatatga

SEQ ID NO: 159351 - DNA, 25 bp, Artificial
  probe
  misc_feature (1)..(25): SEQ ID NO: 2551; WAN024DIO_at; Start 13; Stop 37
ctaaaatctccactggtatggtttt

SEQ ID NO: 159352 - DNA, 25 bp, Artificial
  probe
  misc_feature (1)..(25): SEQ ID NO: 2551; WAN024DIO_at; Start 62; Stop 86
gttacgtagaaacatatgatgggaa

SEQ ID NO: 159353 - DNA, 25 bp, Artificial
  probe
  misc_feature (1)..(25): SEQ ID NO: 2551; WAN024DIO_at; Start 60; Stop 84
tggttacgtagaaacatatgatggg

SEQ ID NO: 159354 - DNA, 25 bp, Artificial
  probe
  misc_feature (1)..(25): SEQ ID NO: 2551; WAN024DIO_at; Start 23; Stop 47
cactggtatggttttacgaacgaat

SEQ ID NO: 159355 - DNA, 25 bp, Artificial
  probe
  misc_feature (1)..(25): SEQ ID NO: 2551; WAN024DIO_at; Start 11; Stop 35
atctaaaatctccactggtatggtt

SEQ ID NO: 159356 - DNA, 25 bp, Artificial
  probe
  misc_feature (1)..(25): SEQ ID NO: 2551; WAN024DIO_at; Start 58; Stop 82
aatggttacgtagaaacatatgatg

SEQ ID NO: 159357 - DNA, 25 bp, Artificial
  probe
  misc_feature (1)..(25): SEQ ID NO: 2551; WAN024DIO_at; Start 16; Stop 40
aaatctccactggtatggttttacg

SEQ ID NO: 159358 - DNA, 25 bp, Artificial
  probe
  misc_feature (1)..(25): SEQ ID NO: 2551; WAN024DIO_at; Start 12; Stop 36
tctaaaatctccactggtatggttt

SEQ ID NO: 159359 - DNA, 25 bp, Artificial
  probe
  misc_feature (1)..(25): SEQ ID NO: 2551; WAN024DIO_at; Start 54; Stop 78
aaataatggttacgtagaaacatat

SEQ ID NO: 159360 - DNA, 25 bp, Artificial
  probe
  misc_feature (1)..(25): SEQ ID NO: 2551; WAN024DIO_at; Start 21; Stop 45
tccactggtatggttttacgaacga

SEQ ID NO: 159361 - DNA, 25 bp, Artificial
  probe
  misc_feature (1)..(25): SEQ ID NO: 2551; WAN024DIO_at; Start 5; Stop 29
gacttcatctaaaatctccactggt

SEQ ID NO: 159362 - DNA, 25 bp, Artificial
  probe
  misc_feature (1)..(25): SEQ ID NO: 2551; WAN024DIO_at; Start 55; Stop 79
aataatggttacgtagaaacatatg

SEQ ID NO: 159363 - DNA, 25 bp, Artificial
  probe
  misc_feature (1)..(25): SEQ ID NO: 4236; WAN024DIP_at; Start 298; Stop 322
cgtgtactgtatttggattcagata

SEQ ID NO: 159364 - DNA, 25 bp, Artificial
  probe
  misc_feature (1)..(25): SEQ ID NO: 4236; WAN024DIP_at; Start 332; Stop 356
gaaaatcgatagatgagctgtggga

SEQ ID NO: 159365 - DNA, 25 bp, Artificial
  probe
  misc_feature (1)..(25): SEQ ID NO: 4236; WAN024DIP_at; Start 29; Stop 53
taggtgcagataatgcttatatgga

SEQ ID NO: 159366 - DNA, 25 bp, Artificial
  probe
  misc_feature (1)..(25): SEQ ID NO: 4236; WAN024DIP_at; Start 344; Stop 368
atgagctgtgggatttggacttgac

SEQ ID NO: 159367 - DNA, 25 bp, Artificial
  probe
  misc_feature (1)..(25): SEQ ID NO: 4236; WAN024DIP_at; Start 383; Stop 407
ctgcagttagagatgatttttatac

SEQ ID NO: 159368 - DNA, 25 bp, Artificial
  probe
  misc_feature (1)..(25): SEQ ID NO: 4236; WAN024DIP_at; Start 312; Stop 336
ggattcagatattgttgtaagaaaa

SEQ ID NO: 159369 - DNA, 25 bp, Artificial
  probe
  misc_feature (1)..(25): SEQ ID NO: 4236; WAN024DIP_at; Start 352; Stop 376
tgggatttggacttgacggctatac

SEQ ID NO: 159370 - DNA, 25 bp, Artificial
  probe
  misc_feature (1)..(25): SEQ ID NO: 4236; WAN024DIP_at; Start 327; Stop 351
tgtaagaaaatcgatagatgagctg

SEQ ID NO: 159371 - DNA, 25 bp, Artificial
  probe
  misc_feature (1)..(25): SEQ ID NO: 4236; WAN024DIP_at; Start 364; Stop 388
ttgacggctatacccttagctgcag

SEQ ID NO: 159372 - DNA, 25 bp, Artificial
  probe
  misc_feature (1)..(25): SEQ ID NO: 4236; WAN024DIP_at; Start 349; Stop 373
ctgtgggatttggacttgacggcta

SEQ ID NO: 159373 - DNA, 25 bp, Artificial
  probe
  misc_feature (1)..(25): SEQ ID NO: 4236; WAN024DIP_at; Start 275; Stop 299
ttccaaagtatgtaagcgagtctcg

SEQ ID NO: 159374 - DNA, 25 bp, Artificial
  probe
  misc_feature (1)..(25): SEQ ID NO: 4236; WAN024DIP_at; Start 35; Stop 59
cagataatgcttatatggataaagt

SEQ ID NO: 159375 - DNA, 25 bp, Artificial
  probe
  misc_feature (1)..(25): SEQ ID NO: 4236; WAN024DIP_at; Start 239; Stop 263
agggactttcatatgcggctttttt

SEQ ID NO: 159376 - DNA, 25 bp, Artificial
  probe
  misc_feature (1)..(25): SEQ ID NO: 4236; WAN024DIP_at; Start 355; Stop 379
gatttggacttgacggctataccct

SEQ ID NO: 159377 - DNA, 25 bp, Artificial
  probe
  misc_feature (1)..(25): SEQ ID NO: 4236; WAN024DIP_at; Start 359; Stop 383
tggacttgacggctatacccttagc

SEQ ID NO: 159378 - DNA, 25 bp, Artificial
  probe
  misc_feature (1)..(25): SEQ ID NO: 4236; WAN024DIP_at; Start 102; Stop 126
taagttttatgtttttaatgatgac

SEQ ID NO: 159379 - DNA, 25 bp, Artificial
  probe
  misc_feature (1)..(25): SEQ ID NO: 4236; WAN024DIP_at; Start 268; Stop 292
tattttattccaaagtatgtaagcg

SEQ ID NO: 159380 - DNA, 25 bp, Artificial
  probe
  misc_feature (1)..(25): SEQ ID NO: 4236; WAN024DIP_at; Start 144; Stop 168
ccaattgatggaaaaaagactagag

SEQ ID NO: 159381 - DNA, 25 bp, Artificial
  probe
  misc_feature (1)..(25): SEQ ID NO: 4236; WAN024DIP_at; Start 150; Stop 174
gatggaaaaaagactagagactttg

SEQ ID NO: 159382 - DNA, 25 bp, Artificial
  probe
  misc_feature (1)..(25): SEQ ID NO: 4236; WAN024DIP_at; Start 82; Stop 106
tgtgttcatcattataatcttaagt

SEQ ID NO: 159383 - DNA, 25 bp, Artificial
  probe
  misc_feature (1)..(25): SEQ ID NO: 4236; WAN024DIP_at; Start 377; Stop 401
ccttagctgcagttagagatgattt

SEQ ID NO: 159384 - DNA, 25 bp, Artificial
  probe
  misc_feature (1)..(25): SEQ ID NO: 4236; WAN024DIP_at; Start 370; Stop 394
gctatacccttagctgcagttagag

SEQ ID NO: 159385 - DNA, 25 bp, Artificial
  probe
  misc_feature (1)..(25): SEQ ID NO: 4236; WAN024DIP_at; Start 166; Stop 190
gagactttgaatagtgagattgtga

SEQ ID NO: 159386 - DNA, 25 bp, Artificial
  probe
  misc_feature (1)..(25): SEQ ID NO: 4236; WAN024DIP_at; Start 68; Stop 92
caataaaatctctttgtgttcatca

SEQ ID NO: 159387 - DNA, 25 bp, Artificial
  probe
  misc_feature (1)..(25): SEQ ID NO: 4236; WAN024DIP_at; Start 123; Stop 147
tgaccttccgcgagaatggttccaa

SEQ ID NO: 159388 - DNA, 25 bp, Artificial
  probe
  misc_feature (1)..(25): SEQ ID NO: 4236; WAN024DIP_at; Start 278; Stop 302
caaagtatgtaagcgagtctcgtgt

SEQ ID NO: 159389 - DNA, 25 bp, Artificial
  probe
  misc_feature (1)..(25): SEQ ID NO: 4236; WAN024DIP_at; Start 374; Stop 398
tacccttagctgcagttagagatga

SEQ ID NO: 159390 - DNA, 25 bp, Artificial
  probe
  misc_feature (1)..(25): SEQ ID NO: 4236; WAN024DIP_at; Start 129; Stop 153
tccgcgagaatggttccaattgatg

SEQ ID NO: 159391 - DNA, 25 bp, Artificial
  probe
  misc_feature (1)..(25): SEQ ID NO: 4236; WAN024DIP_at; Start 290; Stop 314
gcgagtctcgtgtactgtatttgga

SEQ ID NO: 159392 - DNA, 25 bp, Artificial
  probe
  misc_feature (1)..(25): SEQ ID NO: 4236; WAN024DIP_at; Start 7; Stop 31
gaagagaaaaaagcgattgtcttag

SEQ ID NO: 159393 - DNA, 25 bp, Artificial
  probe
  misc_feature (1)..(25): SEQ ID NO: 4236; WAN024DIP_at; Start 158; Stop 182
aaagactagagactttgaatagtga

SEQ ID NO: 159394 - DNA, 25 bp, Artificial
  probe
  misc_feature (1)..(25): SEQ ID NO: 4236; WAN024DIP_at; Start 14; Stop 38
aaaaagcgattgtcttaggtgcaga

SEQ ID NO: 159395 - DNA, 25 bp, Artificial
  probe
  misc_feature (1)..(25): SEQ ID NO: 4236; WAN024DIP_at; Start 117; Stop 141
taatgatgaccttccgcgagaatgg

SEQ ID NO: 159396 - DNA, 25 bp, Artificial
  probe
  misc_feature (1)..(25): SEQ ID NO: 4236; WAN024DIP_at; Start 20; Stop 44
cgattgtcttaggtgcagataatgc

SEQ ID NO: 159397 - DNA, 25 bp, Artificial
  probe
  misc_feature (1)..(25): SEQ ID NO: 1724; WAN024DIQ_at; Start 373; Stop 397
gatggcaagcttgcagccagtggta

SEQ ID NO: 159398 - DNA, 25 bp, Artificial
  probe
  misc_feature (1)..(25): SEQ ID NO: 1724; WAN024DIQ_at; Start 239; Stop 263
aactggtcttttacgctggtatgga

SEQ ID NO: 159399 - DNA, 25 bp, Artificial
  probe
  misc_feature (1)..(25): SEQ ID NO: 1724; WAN024DIQ_at; Start 50; Stop 74
tgcttctagtggaccgtgtcttgga

SEQ ID NO: 159400 - DNA, 25 bp, Artificial
  probe
  misc_feature (1)..(25): SEQ ID NO: 1724; WAN024DIQ_at; Start 204; Stop 228
tgtgttggagttatcaaaacctgaa

SEQ ID NO: 159401 - DNA, 25 bp, Artificial
  probe
  misc_feature (1)..(25): SEQ ID NO: 1724; WAN024DIQ_at; Start 176; Stop 200
ttatggaagccttggcgcaaactgc

SEQ ID NO: 159402 - DNA, 25 bp, Artificial
  probe
  misc_feature (1)..(25): SEQ ID NO: 1724; WAN024DIQ_at; Start 324; Stop 348
tgtaaaacgtcgtggcaccatagct

SEQ ID NO: 159403 - DNA, 25 bp, Artificial
  probe
  misc_feature (1)..(25): SEQ ID NO: 1724; WAN024DIQ_at; Start 279; Stop 303
gaagcaagttgtaccaggcgaccaa

SEQ ID NO: 159404 - DNA, 25 bp, Artificial
  probe
  misc_feature (1)..(25): SEQ ID NO: 1724; WAN024DIQ_at; Start 90; Stop 114
cattgttgctatcaaaaatgtgacc

SEQ ID NO: 159405 - DNA, 25 bp, Artificial
  probe
  misc_feature (1)..(25): SEQ ID NO: 1724; WAN024DIQ_at; Start 80; Stop 104
gcgaggataccattgttgctatcaa

SEQ ID NO: 159406 - DNA, 25 bp, Artificial
  probe
  misc_feature (1)..(25): SEQ ID NO: 1724; WAN024DIQ_at; Start 333; Stop 357
tcgtggcaccatagctgtggttgaa

SEQ ID NO: 159407 - DNA, 25 bp, Artificial
  probe
  misc_feature (1)..(25): SEQ ID NO: 1724; WAN024DIQ_at; Start 269; Stop 293
ttaagttcaagaagcaagttgtacc

SEQ ID NO: 159408 - DNA, 25 bp, Artificial
  probe
  misc_feature (1)..(25): SEQ ID NO: 1724; WAN024DIQ_at; Start 136; Stop 160
ggccactttcctcaatacccagtta

SEQ ID NO: 159409 - DNA, 25 bp, Artificial
  probe
  misc_feature (1)..(25): SEQ ID NO: 1724; WAN024DIQ_at; Start 76; Stop 100
gtgagcgaggataccattgttgcta

SEQ ID NO: 159410 - DNA, 25 bp, Artificial
  probe
  misc_feature (1)..(25): SEQ ID NO: 1724; WAN024DIQ_at; Start 320; Stop 344
cttttgtaaaacgtcgtggcaccat

SEQ ID NO: 159411 - DNA, 25 bp, Artificial
  probe
  misc_feature (1)..(25): SEQ ID NO: 1724; WAN024DIQ_at; Start 290; Stop 314
taccaggcgaccaattggttatgac

SEQ ID NO: 159412 - DNA, 25 bp, Artificial
  probe
  misc_feature (1)..(25): SEQ ID NO: 1724; WAN024DIQ_at; Start 128; Stop 152
tctttaacggccactttcctcaata

SEQ ID NO: 159413 - DNA, 25 bp, Artificial
  probe
  misc_feature (1)..(25): SEQ ID NO: 1724; WAN024DIQ_at; Start 359; Stop 383
caaaggctgaagtggatggcaagct

SEQ ID NO: 159414 - DNA, 25 bp, Artificial
  probe
  misc_feature (1)..(25): SEQ ID NO: 1724; WAN024DIQ_at; Start 43; Stop 67
tatcctatgcttctagtggaccgtg

SEQ ID NO: 159415 - DNA, 25 bp, Artificial
  probe
  misc_feature (1)..(25): SEQ ID NO: 1724; WAN024DIQ_at; Start 367; Stop 391
gaagtggatggcaagcttgcagcca

SEQ ID NO: 159416 - DNA, 25 bp, Artificial
  probe
  misc_feature (1)..(25): SEQ ID NO: 1724; WAN024DIQ_at; Start 300; Stop 324
ccaattggttatgacagcgactttt

SEQ ID NO: 159417 - DNA, 25 bp, Artificial
  probe
  misc_feature (1)..(25): SEQ ID NO: 1724; WAN024DIQ_at; Start 344; Stop 368
tagctgtggttgaagcaaaggctga

SEQ ID NO: 159418 - DNA, 25 bp, Artificial
  probe
  misc_feature (1)..(25): SEQ ID NO: 1724; WAN024DIQ_at; Start 339; Stop 363
caccatagctgtggttgaagcaaag

SEQ ID NO: 159419 - DNA, 25 bp, Artificial
  probe
  misc_feature (1)..(25): SEQ ID NO: 1724; WAN024DIQ_at; Start 283; Stop 307
caagttgtaccaggcgaccaattgg

SEQ ID NO: 159420 - DNA, 25 bp, Artificial
  probe
  misc_feature (1)..(25): SEQ ID NO: 1724; WAN024DIQ_at; Start 37; Stop 61
caccgttatcctatgcttctagtgg

SEQ ID NO: 159421 - DNA, 25 bp, Artificial
  probe
  misc_feature (1)..(25): SEQ ID NO: 1724; WAN024DIQ_at; Start 237; Stop 261
aaaactggtcttttacgctggtatg

SEQ ID NO: 159422 - DNA, 25 bp, Artificial
  probe
  misc_feature (1)..(25): SEQ ID NO: 1724; WAN024DIQ_at; Start 274; Stop 298
ttcaagaagcaagttgtaccaggcg

SEQ ID NO: 159423 - DNA, 25 bp, Artificial
  probe
  misc_feature (1)..(25): SEQ ID NO: 1724; WAN024DIQ_at; Start 402; Stop 426
tacttttgcaattgggaactaacta

SEQ ID NO: 159424 - DNA, 25 bp, Artificial
  probe
  misc_feature (1)..(25): SEQ ID NO: 1724; WAN024DIQ_at; Start 309; Stop 333
tatgacagcgacttttgtaaaacgt

SEQ ID NO: 159425 - DNA, 25 bp, Artificial
  probe
  misc_feature (1)..(25): SEQ ID NO: 1724; WAN024DIQ_at; Start 46; Stop 70
cctatgcttctagtggaccgtgtct

SEQ ID NO: 159426 - DNA, 25 bp, Artificial
  probe
  misc_feature (1)..(25): SEQ ID NO: 1724; WAN024DIQ_at; Start 147; Stop 171
tcaatacccagttatgccaggtgtt

SEQ ID NO: 159427 - DNA, 25 bp, Artificial
  probe
  misc_feature (1)..(25): SEQ ID NO: 1724; WAN024DIQ_at; Start 5; Stop 29
tcgatattcaaggaatcaaagaagc

SEQ ID NO: 159428 - DNA, 25 bp, Artificial
  probe
  misc_feature (1)..(25): SEQ ID NO: 1724; WAN024DIQ_at; Start 209; Stop 233
tggagttatcaaaacctgaaaataa

SEQ ID NO: 159429 - DNA, 25 bp, Artificial
  probe
  misc_feature (1)..(25): SEQ ID NO: 1724; WAN024DIQ_at; Start 297; Stop 321
cgaccaattggttatgacagcgact

SEQ ID NO: 159430 - DNA, 25 bp, Artificial
  probe
  misc_feature (1)..(25): SEQ ID NO: 1724; WAN024DIQ_at; Start 328; Stop 352
aaacgtcgtggcaccatagctgtgg

SEQ ID NO: 159431 - DNA, 25 bp, Artificial
  probe
  misc_feature (1)..(25): SEQ ID NO: 1276; WAN024DIR_at; Start 258; Stop 282
tcttgtagagagtccacttgttgga

SEQ ID NO: 159432 - DNA, 25 bp, Artificial
  probe
  misc_feature (1)..(25): SEQ ID NO: 1276; WAN024DIR_at; Start 431; Stop 455
tcgtctctaacgaagaaatggttga

SEQ ID NO: 159433 - DNA, 25 bp, Artificial
  probe
  misc_feature (1)..(25): SEQ ID NO: 1276; WAN024DIR_at; Start 153; Stop 177
cgttctagcaacaccgagtccagta

SEQ ID NO: 159434 - DNA, 25 bp, Artificial
  probe
  misc_feature (1)..(25): SEQ ID NO: 1276; WAN024DIR_at; Start 21; Stop 45
agacttgatgactcaatttgaccag

SEQ ID NO: 159435 - DNA, 25 bp, Artificial
  probe
  misc_feature (1)..(25): SEQ ID NO: 1276; WAN024DIR_at; Start 86; Stop 110
agttgcagtttagcaagaatgaagc

SEQ ID NO: 159436 - DNA, 25 bp, Artificial
  probe
  misc_feature (1)..(25): SEQ ID NO: 1276; WAN024DIR_at; Start 160; Stop 184
gcaacaccgagtccagtagctccta

SEQ ID NO: 159437 - DNA, 25 bp, Artificial
  probe
  misc_feature (1)..(25): SEQ ID NO: 1276; WAN024DIR_at; Start 8; Stop 32
taaacgatattaaagacttgatgac

SEQ ID NO: 159438 - DNA, 25 bp, Artificial
  probe
  misc_feature (1)..(25): SEQ ID NO: 1276; WAN024DIR_at; Start 189; Stop 213
tgctccagcagagactgtagcagaa

SEQ ID NO: 159439 - DNA, 25 bp, Artificial
  probe
  misc_feature (1)..(25): SEQ ID NO: 1276; WAN024DIR_at; Start 124; Stop 148
gaagttgcaactcaagtcgctccag

SEQ ID NO: 159440 - DNA, 25 bp, Artificial
  probe
  misc_feature (1)..(25): SEQ ID NO: 1276; WAN024DIR_at; Start 42; Stop 66
ccagtcaagtttgagagaattttct

SEQ ID NO: 159441 - DNA, 25 bp, Artificial
  probe
  misc_feature (1)..(25): SEQ ID NO: 1276; WAN024DIR_at; Start 281; Stop 305
gagtggtttacttggctgctggacc

SEQ ID NO: 159442 - DNA, 25 bp, Artificial
  probe
  misc_feature (1)..(25): SEQ ID NO: 1276; WAN024DIR_at; Start 409; Stop 433
gatggtgtggtaacggaaattctcg

SEQ ID NO: 159443 - DNA, 25 bp, Artificial
  probe
  misc_feature (1)..(25): SEQ ID NO: 1276; WAN024DIR_at; Start 147; Stop 171
agcacccgttctagcaacaccgagt

SEQ ID NO: 159444 - DNA, 25 bp, Artificial
  probe
  misc_feature (1)..(25): SEQ ID NO: 1276; WAN024DIR_at; Start 295; Stop 319
gctgctggaccagataaacctgcct

SEQ ID NO: 159445 - DNA, 25 bp, Artificial
  probe
  misc_feature (1)..(25): SEQ ID NO: 1276; WAN024DIR_at; Start 223; Stop 247
gctccagctgaagcaagtgtggcta

SEQ ID NO: 159446 - DNA, 25 bp, Artificial
  probe
  misc_feature (1)..(25): SEQ ID NO: 1276; WAN024DIR_at; Start 63; Stop 87
ttcttataaaaatgggacggatgag

SEQ ID NO: 159447 - DNA, 25 bp, Artificial
  probe
  misc_feature (1)..(25): SEQ ID NO: 1276; WAN024DIR_at; Start 351; Stop 375
tcaaacattggtaattatcgaagcc

SEQ ID NO: 159448 - DNA, 25 bp, Artificial
  probe
  misc_feature (1)..(25): SEQ ID NO: 1276; WAN024DIR_at; Start 78; Stop 102
gacggatgagttgcagtttagcaag

SEQ ID NO: 159449 - DNA, 25 bp, Artificial
  probe
  misc_feature (1)..(25): SEQ ID NO: 1276; WAN024DIR_at; Start 34; Stop 58
caatttgaccagtcaagtttgagag

SEQ ID NO: 159450 - DNA, 25 bp, Artificial
  probe
  misc_feature (1)..(25): SEQ ID NO: 1276; WAN024DIR_at; Start 419; Stop 443
taacggaaattctcgtctctaacga

SEQ ID NO: 159451 - DNA, 25 bp, Artificial
  probe
  misc_feature (1)..(25): SEQ ID NO: 1276; WAN024DIR_at; Start 459; Stop 483
tggtaaaggattggtacgtatcaaa

SEQ ID NO: 159452 - DNA, 25 bp, Artificial
  probe
  misc_feature (1)..(25): SEQ ID NO: 1276; WAN024DIR_at; Start 175; Stop 199
gtagctcctacatctgctccagcag

SEQ ID NO: 159453 - DNA, 25 bp, Artificial
  probe
  misc_feature (1)..(25): SEQ ID NO: 1276; WAN024DIR_at; Start 209; Stop 233
cagaagaagttccagctccagctga

SEQ ID NO: 159454 - DNA, 25 bp, Artificial
  probe
  misc_feature (1)..(25): SEQ ID NO: 1276; WAN024DIR_at; Start 360; Stop 384
ggtaattatcgaagccatgaaagtc

SEQ ID NO: 159455 - DNA, 25 bp, Artificial
  probe
  misc_feature (1)..(25): SEQ ID NO: 1276; WAN024DIR_at; Start 307; Stop 331
gataaacctgccttcgttacagttg

SEQ ID NO: 159456 - DNA, 25 bp, Artificial
  probe
  misc_feature (1)..(25): SEQ ID NO: 1276; WAN024DIR_at; Start 374; Stop 398
ccatgaaagtcatgaatgaaatccc

SEQ ID NO: 159457 - DNA, 25 bp, Artificial
  probe
  misc_feature (1)..(25): SEQ ID NO: 1276; WAN024DIR_at; Start 320; Stop 344
tcgttacagttggtgatagtgtcaa

SEQ ID NO: 159458 - DNA, 25 bp, Artificial
  probe
  misc_feature (1)..(25): SEQ ID NO: 1276; WAN024DIR_at; Start 201; Stop 225
gactgtagcagaagaagttccagct

SEQ ID NO: 159459 - DNA, 25 bp, Artificial
  probe
  misc_feature (1)..(25): SEQ ID NO: 1276; WAN024DIR_at; Start 113; Stop 137
gacctgtgcctgaagttgcaactca

SEQ ID NO: 159460 - DNA, 25 bp, Artificial
  probe
  misc_feature (1)..(25): SEQ ID NO: 1276; WAN024DIR_at; Start 272; Stop 296
cacttgttggagtggtttacttggc

SEQ ID NO: 159461 - DNA, 25 bp, Artificial
  probe
  misc_feature (1)..(25): SEQ ID NO: 1276; WAN024DIR_at; Start 250; Stop 274
gagggaaatcttgtagagagtccac

SEQ ID NO: 159462 - DNA, 25 bp, Artificial
  probe
  misc_feature (1)..(25): SEQ ID NO: 1276; WAN024DIR_at; Start 330; Stop 354
tggtgatagtgtcaaaaaaggtcaa

SEQ ID NO: 159463 - DNA, 25 bp, Artificial
  probe
  misc_feature (1)..(25): SEQ ID NO: 1276; WAN024DIR_at; Start 386; Stop 410
tgaatgaaatcccagctcctaagga

SEQ ID NO: 159464 - DNA, 25 bp, Artificial
  probe
  misc_feature (1)..(25): SEQ ID NO: 1276; WAN024DIR_at; Start 398; Stop 422
cagctcctaaggatggtgtggtaac

SEQ ID NO: 159465 - DNA, 25 bp, Artificial
  probe
  misc_feature (1)..(25): SEQ ID NO: 2435; WAN024DIS_at; Start 150; Stop 174
tatccaaatcgaagcagaaaatgac

SEQ ID NO: 159466 - DNA, 25 bp, Artificial
  probe
  misc_feature (1)..(25): SEQ ID NO: 2435; WAN024DIS_at; Start 16; Stop 40
aaagtacaagaaattatcgttgaag

SEQ ID NO: 159467 - DNA, 25 bp, Artificial
  probe
  misc_feature (1)..(25): SEQ ID NO: 2435; WAN024DIS_at; Start 164; Stop 188
cagaaaatgacttgaaaacagttgg

SEQ ID NO: 159468 - DNA, 25 bp, Artificial
  probe
  misc_feature (1)..(25): SEQ ID NO: 2435; WAN024DIS_at; Start 153; Stop 177
ccaaatcgaagcagaaaatgacttg

SEQ ID NO: 159469 - DNA, 25 bp, Artificial
  probe
  misc_feature (1)..(25): SEQ ID NO: 2435; WAN024DIS_at; Start 195; Stop 219
ggttgcttacgttgaagagcaagca

SEQ ID NO: 159470 - DNA, 25 bp, Artificial
  probe
  misc_feature (1)..(25): SEQ ID NO: 2435; WAN024DIS_at; Start 2; Stop 26
tggcagtatttgaaaaagtacaaga

SEQ ID NO: 159471 - DNA, 25 bp, Artificial
  probe
  misc_feature (1)..(25): SEQ ID NO: 2435; WAN024DIS_at; Start 97; Stop 121
gcagattcattggacttgttccaag

SEQ ID NO: 159472 - DNA, 25 bp, Artificial
  probe
  misc_feature (1)..(25): SEQ ID NO: 2435; WAN024DIS_at; Start 94; Stop 118
gacgcagattcattggacttgttcc

SEQ ID NO: 159473 - DNA, 25 bp, Artificial
  probe
  misc_feature (1)..(25): SEQ ID NO: 2435; WAN024DIS_at; Start 182; Stop 206
cagttggtgacttggttgcttacgt

SEQ ID NO: 159474 - DNA, 25 bp, Artificial
  probe
  misc_feature (1)..(25): SEQ ID NO: 2435; WAN024DIS_at; Start 56; Stop 80
catcagaagtaacacttgaatcaac

SEQ ID NO: 159475 - DNA, 25 bp, Artificial
  probe
  misc_feature (1)..(25): SEQ ID NO: 2435; WAN024DIS_at; Start 52; Stop 76
gacgcatcagaagtaacacttgaat

SEQ ID NO: 159476 - DNA, 25 bp, Artificial
  probe
  misc_feature (1)..(25): SEQ ID NO: 2435; WAN024DIS_at; Start 177; Stop 201
gaaaacagttggtgacttggttgct

SEQ ID NO: 159477 - DNA, 25 bp, Artificial
  probe
  misc_feature (1)..(25): SEQ ID NO: 2435; WAN024DIS_at; Start 80; Stop 104
cttttgatgatttggacgcagattc

SEQ ID NO: 159478 - DNA, 25 bp, Artificial
  probe
  misc_feature (1)..(25): SEQ ID NO: 2435; WAN024DIS_at; Start 158; Stop 182
tcgaagcagaaaatgacttgaaaac

SEQ ID NO: 159479 - DNA, 25 bp, Artificial
  probe
  misc_feature (1)..(25): SEQ ID NO: 2435; WAN024DIS_at; Start 47; Stop 71
gaaaagacgcatcagaagtaacact

SEQ ID NO: 159480 - DNA, 25 bp, Artificial
  probe
  misc_feature (1)..(25): SEQ ID NO: 2435; WAN024DIS_at; Start 40; Stop 64
gaacttggaaaagacgcatcagaag

SEQ ID NO: 159481 - DNA, 25 bp, Artificial
  probe
  misc_feature (1)..(25): SEQ ID NO: 2435; WAN024DIS_at; Start 142; Stop 166
gcttttgatatccaaatcgaagcag

SEQ ID NO: 159482 - DNA, 25 bp, Artificial
  probe
  misc_feature (1)..(25): SEQ ID NO: 2435; WAN024DIS_at; Start 61; Stop 85
gaagtaacacttgaatcaacttttg

SEQ ID NO: 159483 - DNA, 25 bp, Artificial
  probe
  misc_feature (1)..(25): SEQ ID NO: 2435; WAN024DIS_at; Start 204; Stop 228
cgttgaagagcaagcaaaataacta

SEQ ID NO: 159484 - DNA, 25 bp, Artificial
  probe
  misc_feature (1)..(25): SEQ ID NO: 2435; WAN024DIS_at; Start 125; Stop 149
tctcagaaatcgaagatgcttttga

SEQ ID NO: 159485 - DNA, 25 bp, Artificial
  probe
  misc_feature (1)..(25): SEQ ID NO: 2435; WAN024DIS_at; Start 186; Stop 210
tggtgacttggttgcttacgttgaa

SEQ ID NO: 159486 - DNA, 25 bp, Artificial
  probe
  misc_feature (1)..(25): SEQ ID NO: 2435; WAN024DIS_at; Start 200; Stop 224
cttacgttgaagagcaagcaaaata

SEQ ID NO: 159487 - DNA, 25 bp, Artificial
  probe
  misc_feature (1)..(25): SEQ ID NO: 2435; WAN024DIS_at; Start 77; Stop 101
caacttttgatgatttggacgcaga

SEQ ID NO: 159488 - DNA, 25 bp, Artificial
  probe
  misc_feature (1)..(25): SEQ ID NO: 2435; WAN024DIS_at; Start 44; Stop 68
ttggaaaagacgcatcagaagtaac

SEQ ID NO: 159489 - DNA, 25 bp, Artificial
  probe
  misc_feature (1)..(25): SEQ ID NO: 2435; WAN024DIS_at; Start 113; Stop 137
tgttccaagtaatctcagaaatcga

SEQ ID NO: 159490 - DNA, 25 bp, Artificial
  probe
  misc_feature (1)..(25): SEQ ID NO: 2435; WAN024DIS_at; Start 118; Stop 142
caagtaatctcagaaatcgaagatg

SEQ ID NO: 159491 - DNA, 25 bp, Artificial
  probe
  misc_feature (1)..(25): SEQ ID NO: 2435; WAN024DIS_at; Start 25; Stop 49
gaaattatcgttgaagaacttggaa

SEQ ID NO: 159492 - DNA, 25 bp, Artificial
  probe
  misc_feature (1)..(25): SEQ ID NO: 2435; WAN024DIS_at; Start 130; Stop 154
gaaatcgaagatgcttttgatatcc

SEQ ID NO: 159493 - DNA, 25 bp, Artificial
  probe
  misc_feature (1)..(25): SEQ ID NO: 2435; WAN024DIS_at; Start 87; Stop 111
tgatttggacgcagattcattggac

SEQ ID NO: 159494 - DNA, 25 bp, Artificial
  probe
  misc_feature (1)..(25): SEQ ID NO: 2435; WAN024DIS_at; Start 136; Stop 160
gaagatgcttttgatatccaaatcg

SEQ ID NO: 159495 - DNA, 25 bp, Artificial
  probe
  misc_feature (1)..(25): SEQ ID NO: 2435; WAN024DIS_at; Start 172; Stop 196
gacttgaaaacagttggtgacttgg

SEQ ID NO: 159496 - DNA, 25 bp, Artificial
  probe
  misc_feature (1)..(25): SEQ ID NO: 2435; WAN024DIS_at; Start 190; Stop 214
gacttggttgcttacgttgaagagc

SEQ ID NO: 159497 - DNA, 25 bp, Artificial
  probe
  misc_feature (1)..(25): SEQ ID NO: 2435; WAN024DIS_at; Start 90; Stop 114
tttggacgcagattcattggacttg

SEQ ID NO: 159498 - DNA, 25 bp, Artificial
  probe
  misc_feature (1)..(25): SEQ ID NO: 2435; WAN024DIS_at; Start 109; Stop 133
gacttgttccaagtaatctcagaaa

SEQ ID NO: 159499 - DNA, 25 bp, Artificial
  probe
  misc_feature (1)..(25): SEQ ID NO: 2519; WAN024DIT_at; Start 706; Stop 730
tctcctatagaggtgacagacttgg

SEQ ID NO: 159500 - DNA, 25 bp, Artificial
  probe
  misc_feature (1)..(25): SEQ ID NO: 2519; WAN024DIT_at; Start 109; Stop 133
cgaacgggaatacgacaaaggcata

SEQ ID NO: 159501 - DNA, 25 bp, Artificial
  probe
  misc_feature (1)..(25): SEQ ID NO: 2519; WAN024DIT_at; Start 799; Stop 823
cgagccaaacttccagccaatatga

SEQ ID NO: 159502 - DNA, 25 bp, Artificial
  probe
  misc_feature (1)..(25): SEQ ID NO: 2519; WAN024DIT_at; Start 51; Stop 75
ggttacaaatcacgacttggctcag

SEQ ID NO: 159503 - DNA, 25 bp, Artificial
  probe
  misc_feature (1)..(25): SEQ ID NO: 2519; WAN024DIT_at; Start 891; Stop 915
catccctttagatggtagccagact

SEQ ID NO: 159504 - DNA, 25 bp, Artificial
  probe
  misc_feature (1)..(25): SEQ ID NO: 2519; WAN024DIT_at; Start 152; Stop 176
ccagtgatttggctacagaggttgc

SEQ ID NO: 159505 - DNA, 25 bp, Artificial
  probe
  misc_feature (1)..(25): SEQ ID NO: 2519; WAN024DIT_at; Start 670; Stop 694
gatgtagccaagtctatcaagcaga

SEQ ID NO: 159506 - DNA, 25 bp, Artificial
  probe
  misc_feature (1)..(25): SEQ ID NO: 2519; WAN024DIT_at; Start 182; Stop 206
aactgatggcaaaagctggaataac

SEQ ID NO: 159507 - DNA, 25 bp, Artificial
  probe
  misc_feature (1)..(25): SEQ ID NO: 2519; WAN024DIT_at; Start 871; Stop 895
gagtgtgtagaacaaggtctcatcc

SEQ ID NO: 159508 - DNA, 25 bp, Artificial
  probe
  misc_feature (1)..(25): SEQ ID NO: 2519; WAN024DIT_at; Start 511; Stop 535
caagagcatttcttagctgagagtc

SEQ ID NO: 159509 - DNA, 25 bp, Artificial
  probe
  misc_feature (1)..(25): SEQ ID NO: 2519; WAN024DIT_at; Start 412; Stop 436
ggtagtgaaaccctctctaaggcag

SEQ ID NO: 159510 - DNA, 25 bp, Artificial
  probe
  misc_feature (1)..(25): SEQ ID NO: 2519; WAN024DIT_at; Start 427; Stop 451
tctaaggcagtcgattggtcggatc

SEQ ID NO: 159511 - DNA, 25 bp, Artificial
  probe
  misc_feature (1)..(25): SEQ ID NO: 2519; WAN024DIT_at; Start 824; Stop 848
tggaatatggcaataccagtgcagc

SEQ ID NO: 159512 - DNA, 25 bp, Artificial
  probe
  misc_feature (1)..(25): SEQ ID NO: 2519; WAN024DIT_at; Start 906; Stop 930
tagccagactgttcttctatcaggc

SEQ ID NO: 159513 - DNA, 25 bp, Artificial
  probe
  misc_feature (1)..(25): SEQ ID NO: 2519; WAN024DIT_at; Start 382; Stop 406
tctggtcgctttcaaaaaggcttgg

SEQ ID NO: 159514 - DNA, 25 bp, Artificial
  probe
  misc_feature (1)..(25): SEQ ID NO: 2519; WAN024DIT_at; Start 167; Stop 191
cagaggttgctaagaaactgatggc

SEQ ID NO: 159515 - DNA, 25 bp, Artificial
  probe
  misc_feature (1)..(25): SEQ ID NO: 2519; WAN024DIT_at; Start 366; Stop 390
tgaaaagtttatcgcttctggtcgc

SEQ ID NO: 159516 - DNA, 25 bp, Artificial
  probe
  misc_feature (1)..(25): SEQ ID NO: 2519; WAN024DIT_at; Start 554; Stop 578
gcagcgagtgtttaacttatgggca

SEQ ID NO: 159517 - DNA, 25 bp, Artificial
  probe
  misc_feature (1)..(25): SEQ ID NO: 2519; WAN024DIT_at; Start 17; Stop 41
taagtcaggttgctcattatgtgcc

SEQ ID NO: 159518 - DNA, 25 bp, Artificial
  probe
  misc_feature (1)..(25): SEQ ID NO: 2519; WAN024DIT_at; Start 494; Stop 518
tgttagaagctagcgagcaagagca

SEQ ID NO: 159519 - DNA, 25 bp, Artificial
  probe
  misc_feature (1)..(25): SEQ ID NO: 2519; WAN024DIT_at; Start 94; Stop 118
gagtggatttcaagtcgaacgggaa

SEQ ID NO: 159520 - DNA, 25 bp, Artificial
  probe
  misc_feature (1)..(25): SEQ ID NO: 2519; WAN024DIT_at; Start 240; Stop 264
cattactccagattcgatgatgccc

SEQ ID NO: 159521 - DNA, 25 bp, Artificial
  probe
  misc_feature (1)..(25): SEQ ID NO: 2519; WAN024DIT_at; Start 627; Stop 651
tttgaagatggatggacgcacagtc

SEQ ID NO: 159522 - DNA, 25 bp, Artificial
  probe
  misc_feature (1)..(25): SEQ ID NO: 2519; WAN024DIT_at; Start 64; Stop 88
gacttggctcagattatggatacca

SEQ ID NO: 159523 - DNA, 25 bp, Artificial
  probe
  misc_feature (1)..(25): SEQ ID NO: 2519; WAN024DIT_at; Start 323; Stop 347
taaccgcggcttgcagtggatttgt

SEQ ID NO: 159524 - DNA, 25 bp, Artificial
  probe
  misc_feature (1)..(25): SEQ ID NO: 2519; WAN024DIT_at; Start 255; Stop 279
gatgatgccctctacagctgctcgt

SEQ ID NO: 159525 - DNA, 25 bp, Artificial
  probe
  misc_feature (1)..(25): SEQ ID NO: 2519; WAN024DIT_at; Start 840; Stop 864
cagtgcagccagtatcccgatttta

SEQ ID NO: 159526 - DNA, 25 bp, Artificial
  probe
  misc_feature (1)..(25): SEQ ID NO: 2519; WAN024DIT_at; Start 34; Stop 58
tatgtgccagagcaagtggttacaa

SEQ ID NO: 159527 - DNA, 25 bp, Artificial
  probe
  misc_feature (1)..(25): SEQ ID NO: 2519; WAN024DIT_at; Start 780; Stop 804
tagaaaaattggtgttgaccgagcc

SEQ ID NO: 159528 - DNA, 25 bp, Artificial
  probe
  misc_feature (1)..(25): SEQ ID NO: 2519; WAN024DIT_at; Start 442; Stop 466
tggtcggatcgatcaacagctgtgt

SEQ ID NO: 159529 - DNA, 25 bp, Artificial
  probe
  misc_feature (1)..(25): SEQ ID NO: 2519; WAN024DIT_at; Start 737; Stop 761
tgctacttcatcaagccaatgaccg

SEQ ID NO: 159530 - DNA, 25 bp, Artificial
  probe
  misc_feature (1)..(25): SEQ ID NO: 2519; WAN024DIT_at; Start 923; Stop 947
tatcaggcttcggtggaggcttgac

SEQ ID NO: 159531 - DNA, 25 bp, Artificial
  probe
  misc_feature (1)..(25): SEQ ID NO: 2519; WAN024DIT_at; Start 655; Stop 679
gattttgccattcgagatgtagcca

SEQ ID NO: 159532 - DNA, 25 bp, Artificial
  probe
  misc_feature (1)..(25): SEQ ID NO: 2519; WAN024DIT_at; Start 312; Stop 336
tgcttttgacttaaccgcggcttgc

SEQ ID NO: 159533 - DNA, 25 bp, Artificial
  probe
  misc_feature (1)..(25): SEQ ID NO: 2262; WAN024DIU_at; Start 328; Stop 352
cacaaggccatggtagaaaaaatta

SEQ ID NO: 159534 - DNA, 25 bp, Artificial
  probe
  misc_feature (1)..(25): SEQ ID NO: 2262; WAN024DIU_at; Start 251; Stop 275
cagaacaggatcgtcgtgtggtgca

SEQ ID NO: 159535 - DNA, 25 bp, Artificial
  probe
  misc_feature (1)..(25): SEQ ID NO: 2262; WAN024DIU_at; Start 160; Stop 184
caagtgtcaaaagagttgatggtaa

SEQ ID NO: 159536 - DNA, 25 bp, Artificial
  probe
  misc_feature (1)..(25): SEQ ID NO: 2262; WAN024DIU_at; Start 371; Stop 395
aagaaattgctgtcatgggtaaagg

SEQ ID NO: 159537 - DNA, 25 bp, Artificial
  probe
  misc_feature (1)..(25): SEQ ID NO: 2262; WAN024DIU_at; Start 309; Stop 333
tagactgcataaacgcttccacaag

SEQ ID NO: 159538 - DNA, 25 bp, Artificial
  probe
  misc_feature (1)..(25): SEQ ID NO: 2262; WAN024DIU_at; Start 2; Stop 26
tggactaccaacgaatcaatgaata

SEQ ID NO: 159539 - DNA, 25 bp, Artificial
  probe
  misc_feature (1)..(25): SEQ ID NO: 2262; WAN024DIU_at; Start 270; Stop 294
ggtgcatctgcatttgacaaagaag

SEQ ID NO: 159540 - DNA, 25 bp, Artificial
  probe
  misc_feature (1)..(25): SEQ ID NO: 2262; WAN024DIU_at; Start 42; Stop 66
taacaatgtccttgtaattgaggaa

SEQ ID NO: 159541 - DNA, 25 bp, Artificial
  probe
  misc_feature (1)..(25): SEQ ID NO: 2262; WAN024DIU_at; Start 318; Stop 342
taaacgcttccacaaggccatggta

SEQ ID NO: 159542 - DNA, 25 bp, Artificial
  probe
  misc_feature (1)..(25): SEQ ID NO: 2262; WAN024DIU_at; Start 245; Stop 269
ttcggtcagaacaggatcgtcgtgt

SEQ ID NO: 159543 - DNA, 25 bp, Artificial
  probe
  misc_feature (1)..(25): SEQ ID NO: 2262; WAN024DIU_at; Start 343; Stop 367
gaaaaaattattgatggcatgagcg

SEQ ID NO: 159544 - DNA, 25 bp, Artificial
  probe
  misc_feature (1)..(25): SEQ ID NO: 2262; WAN024DIU_at; Start 32; Stop 56
catctatatttaacaatgtccttgt

SEQ ID NO: 159545 - DNA, 25 bp, Artificial
  probe
  misc_feature (1)..(25): SEQ ID NO: 2262; WAN024DIU_at; Start 232; Stop 256
tacattgagcgagttcggtcagaac

SEQ ID NO: 159546 - DNA, 25 bp, Artificial
  probe
  misc_feature (1)..(25): SEQ ID NO: 2262; WAN024DIU_at; Start 51; Stop 75
ccttgtaattgaggaagtgaacttg

SEQ ID NO: 159547 - DNA, 25 bp, Artificial
  probe
  misc_feature (1)..(25): SEQ ID NO: 2262; WAN024DIU_at; Start 257; Stop 281
aggatcgtcgtgtggtgcatctgca

SEQ ID NO: 159548 - DNA, 25 bp, Artificial
  probe
  misc_feature (1)..(25): SEQ ID NO: 2262; WAN024DIU_at; Start 93; Stop 117
ggatatctccatcaaagaaatgcat

SEQ ID NO: 159549 - DNA, 25 bp, Artificial
  probe
  misc_feature (1)..(25): SEQ ID NO: 2262; WAN024DIU_at; Start 289; Stop 313
aagaagggtcgcttgattcatagac

SEQ ID NO: 159550 - DNA, 25 bp, Artificial
  probe
  misc_feature (1)..(25): SEQ ID NO: 2262; WAN024DIU_at; Start 190; Stop 214
ggaactgttacgacaagtttgaaca

SEQ ID NO: 159551 - DNA, 25 bp, Artificial
  probe
  misc_feature (1)..(25): SEQ ID NO: 2262; WAN024DIU_at; Start 351; Stop 375
tattgatggcatgagcgaggaagaa

SEQ ID NO: 159552 - DNA, 25 bp, Artificial
  probe
  misc_feature (1)..(25): SEQ ID NO: 2262; WAN024DIU_at; Start 200; Stop 224
cgacaagtttgaacaatttagagcg

SEQ ID NO: 159553 - DNA, 25 bp, Artificial
  probe
  misc_feature (1)..(25): SEQ ID NO: 2262; WAN024DIU_at; Start 79; Stop 103
ggtagtcgttttaaggatatctcca

SEQ ID NO: 159554 - DNA, 25 bp, Artificial
  probe
  misc_feature (1)..(25): SEQ ID NO: 2262; WAN024DIU_at; Start 360; Stop 384
catgagcgaggaagaaattgctgtc

SEQ ID NO: 159555 - DNA, 25 bp, Artificial
  probe
  misc_feature (1)..(25): SEQ ID NO: 2262; WAN024DIU_at; Start 105; Stop 129
caaagaaatgcatacgattgatgtc

SEQ ID NO: 159556 - DNA, 25 bp, Artificial
  probe
  misc_feature (1)..(25): SEQ ID NO: 2262; WAN024DIU_at; Start 120; Stop 144
gattgatgtcatcggtaaggctcca

SEQ ID NO: 159557 - DNA, 25 bp, Artificial
  probe
  misc_feature (1)..(25): SEQ ID NO: 2262; WAN024DIU_at; Start 150; Stop 174
gactccaagtcaagtgtcaaaagag

SEQ ID NO: 159558 - DNA, 25 bp, Artificial
  probe
  misc_feature (1)..(25): SEQ ID NO: 2262; WAN024DIU_at; Start 280; Stop 304
catttgacaaagaagggtcgcttga

SEQ ID NO: 159559 - DNA, 25 bp, Artificial
  probe
  misc_feature (1)..(25): SEQ ID NO: 2262; WAN024DIU_at; Start 177; Stop 201
gatggtaactcttggaactgttacg

SEQ ID NO: 159560 - DNA, 25 bp, Artificial
  probe
  misc_feature (1)..(25): SEQ ID NO: 2262; WAN024DIU_at; Start 225; Stop 249
taagggctacattgagcgagttcgg

SEQ ID NO: 159561 - DNA, 25 bp, Artificial
  probe
  misc_feature (1)..(25): SEQ ID NO: 2262; WAN024DIU_at; Start 64; Stop 88
gaagtgaacttgagaggtagtcgtt

SEQ ID NO: 159562 - DNA, 25 bp, Artificial
  probe
  misc_feature (1)..(25): SEQ ID NO: 2262; WAN024DIU_at; Start 122; Stop 146
ttgatgtcatcggtaaggctccaga

SEQ ID NO: 159563 - DNA, 25 bp, Artificial
  probe
  misc_feature (1)..(25): SEQ ID NO: 2262; WAN024DIU_at; Start 13; Stop 37
cgaatcaatgaatatttaacatcta

SEQ ID NO: 159564 - DNA, 25 bp, Artificial
  probe
  misc_feature (1)..(25): SEQ ID NO: 2262; WAN024DIU_at; Start 210; Stop 234
gaacaatttagagcgtaagggctac

SEQ ID NO: 159565 - DNA, 25 bp, Artificial
  probe
  misc_feature (1)..(25): SEQ ID NO: 2262; WAN024DIU_at; Start 398; Stop 422
tgactaatctttaccaatttttgga

SEQ ID NO: 159566 - DNA, 25 bp, Artificial
  probe
  misc_feature (1)..(25): SEQ ID NO: 2262; WAN024DIU_at; Start 299; Stop 323
gcttgattcatagactgcataaacg

SEQ ID NO: 159567 - DNA, 25 bp, Artificial
  probe
  misc_feature (1)..(25): SEQ ID NO: 2522; WAN024DIV_at; Start 165; Stop 189
tcagattggagccaatgtcactgga

SEQ ID NO: 159568 - DNA, 25 bp, Artificial
  probe
  misc_feature (1)..(25): SEQ ID NO: 2522; WAN024DIV_at; Start 55; Stop 79
ctctctatcgctgggaaagttggga

SEQ ID NO: 159569 - DNA, 25 bp, Artificial
  probe
  misc_feature (1)..(25): SEQ ID NO: 2522; WAN024DIV_at; Start 153; Stop 177
gagccatatcaatcagattggagcc

SEQ ID NO: 159570 - DNA, 25 bp, Artificial
  probe
  misc_feature (1)..(25): SEQ ID NO: 2522; WAN024DIV_at; Start 318; Stop 342
gaccctgattcagacaattagccaa

SEQ ID NO: 159571 - DNA, 25 bp, Artificial
  probe
  misc_feature (1)..(25): SEQ ID NO: 2522; WAN024DIV_at; Start 248; Stop 272
caaaagactcaggtgccattctcaa

SEQ ID NO: 159572 - DNA, 25 bp, Artificial
  probe
  misc_feature (1)..(25): SEQ ID NO: 2522; WAN024DIV_at; Start 106; Stop 130
gaattttacccagatgtcaatgtcg

SEQ ID NO: 159573 - DNA, 25 bp, Artificial
  probe
  misc_feature (1)..(25): SEQ ID NO: 2522; WAN024DIV_at; Start 148; Stop 172
ccttggagccatatcaatcagattg

SEQ ID NO: 159574 - DNA, 25 bp, Artificial
  probe
  misc_feature (1)..(25): SEQ ID NO: 2522; WAN024DIV_at; Start 120; Stop 144
tgtcaatgtcgaacaatttatccag

SEQ ID NO: 159575 - DNA, 25 bp, Artificial
  probe
  misc_feature (1)..(25): SEQ ID NO: 2522; WAN024DIV_at; Start 310; Stop 334
aaacttccgaccctgattcagacaa

SEQ ID NO: 159576 - DNA, 25 bp, Artificial
  probe
  misc_feature (1)..(25): SEQ ID NO: 2522; WAN024DIV_at; Start 241; Stop 265
tttgcttcaaaagactcaggtgcca

SEQ ID NO: 159577 - DNA, 25 bp, Artificial
  probe
  misc_feature (1)..(25): SEQ ID NO: 2522; WAN024DIV_at; Start 76; Stop 100
gggaaattccttgtcggagatcagg

SEQ ID NO: 159578 - DNA, 25 bp, Artificial
  probe
  misc_feature (1)..(25): SEQ ID NO: 2522; WAN024DIV_at; Start 253; Stop 277
gactcaggtgccattctcaaaattg

SEQ ID NO: 159579 - DNA, 25 bp, Artificial
  probe
  misc_feature (1)..(25): SEQ ID NO: 2522; WAN024DIV_at; Start 7; Stop 31
caatcacttaacaaaacagtactcc

SEQ ID NO: 159580 - DNA, 25 bp, Artificial
  probe
  misc_feature (1)..(25): SEQ ID NO: 2522; WAN024DIV_at; Start 112; Stop 136
tacccagatgtcaatgtcgaacaat

SEQ ID NO: 159581 - DNA, 25 bp, Artificial
  probe
  misc_feature (1)..(25): SEQ ID NO: 2522; WAN024DIV_at; Start 209; Stop 233
tcgaagtctttacagacaaaggaaa

SEQ ID NO: 159582 - DNA, 25 bp, Artificial
  probe
  misc_feature (1)..(25): SEQ ID NO: 2522; WAN024DIV_at; Start 258; Stop 282
aggtgccattctcaaaattgcacgc

SEQ ID NO: 159583 - DNA, 25 bp, Artificial
  probe
  misc_feature (1)..(25): SEQ ID NO: 2522; WAN024DIV_at; Start 307; Stop 331
gtcaaacttccgaccctgattcaga

SEQ ID NO: 159584 - DNA, 25 bp, Artificial
  probe
  misc_feature (1)..(25): SEQ ID NO: 2522; WAN024DIV_at; Start 34; Stop 58
agtacgacaggcacttcctacctct

SEQ ID NO: 159585 - DNA, 25 bp, Artificial
  probe
  misc_feature (1)..(25): SEQ ID NO: 2522; WAN024DIV_at; Start 200; Stop 224
gccgccacttcgaagtctttacaga

SEQ ID NO: 159586 - DNA, 25 bp, Artificial
  probe
  misc_feature (1)..(25): SEQ ID NO: 2522; WAN024DIV_at; Start 324; Stop 348
gattcagacaattagccaaaaattt

SEQ ID NO: 159587 - DNA, 25 bp, Artificial
  probe
  misc_feature (1)..(25): SEQ ID NO: 2522; WAN024DIV_at; Start 49; Stop 73
tcctacctctctatcgctgggaaag

SEQ ID NO: 159588 - DNA, 25 bp, Artificial
  probe
  misc_feature (1)..(25): SEQ ID NO: 2522; WAN024DIV_at; Start 29; Stop 53
tcctcagtacgacaggcacttccta

SEQ ID NO: 159589 - DNA, 25 bp, Artificial
  probe
  misc_feature (1)..(25): SEQ ID NO: 2522; WAN024DIV_at; Start 134; Stop 158
aatttatccagattccttggagcca

SEQ ID NO: 159590 - DNA, 25 bp, Artificial
  probe
  misc_feature (1)..(25): SEQ ID NO: 2522; WAN024DIV_at; Start 297; Stop 321
tgacaaggtcgtcaaacttccgacc

SEQ ID NO: 159591 - DNA, 25 bp, Artificial
  probe
  misc_feature (1)..(25): SEQ ID NO: 2522; WAN024DIV_at; Start 129; Stop 153
cgaacaatttatccagattccttgg

SEQ ID NO: 159592 - DNA, 25 bp, Artificial
  probe
  misc_feature (1)..(25): SEQ ID NO: 2522; WAN024DIV_at; Start 292; Stop 316
ggcaatgacaaggtcgtcaaacttc

SEQ ID NO: 159593 - DNA, 25 bp, Artificial
  probe
  misc_feature (1)..(25): SEQ ID NO: 2522; WAN024DIV_at; Start 26; Stop 50
tactcctcagtacgacaggcacttc

SEQ ID NO: 159594 - DNA, 25 bp, Artificial
  probe
  misc_feature (1)..(25): SEQ ID NO: 2522; WAN024DIV_at; Start 60; Stop 84
tatcgctgggaaagttgggaaattc

SEQ ID NO: 159595 - DNA, 25 bp, Artificial
  probe
  misc_feature (1)..(25): SEQ ID NO: 2522; WAN024DIV_at; Start 73; Stop 97
gttgggaaattccttgtcggagatc

SEQ ID NO: 159596 - DNA, 25 bp, Artificial
  probe
  misc_feature (1)..(25): SEQ ID NO: 2522; WAN024DIV_at; Start 140; Stop 164
tccagattccttggagccatatcaa

SEQ ID NO: 159597 - DNA, 25 bp, Artificial
  probe
  misc_feature (1)..(25): SEQ ID NO: 2522; WAN024DIV_at; Start 244; Stop 268
gcttcaaaagactcaggtgccattc

SEQ ID NO: 159598 - DNA, 25 bp, Artificial
  probe
  misc_feature (1)..(25): SEQ ID NO: 2522; WAN024DIV_at; Start 159; Stop 183
tatcaatcagattggagccaatgtc

SEQ ID NO: 159599 - DNA, 25 bp, Artificial
  probe
  misc_feature (1)..(25): SEQ ID NO: 2522; WAN024DIV_at; Start 20; Stop 44
aaacagtactcctcagtacgacagg

SEQ ID NO: 159600 - DNA, 25 bp, Artificial
  probe
  misc_feature (1)..(25): SEQ ID NO: 2522; WAN024DIV_at; Start 193; Stop 217
aaaatcagccgccacttcgaagtct

SEQ ID NO: 159601 - DNA, 25 bp, Artificial
  probe
  misc_feature (1)..(25): SEQ ID NO: 1324; WAN024DIW_at; Start 350; Stop 374
ccctagctaagtttaccttggcagt

SEQ ID NO: 159602 - DNA, 25 bp, Artificial
  probe
  misc_feature (1)..(25): SEQ ID NO: 1324; WAN024DIW_at; Start 493; Stop 517
tatgccaacaacttagctaatacac

SEQ ID NO: 159603 - DNA, 25 bp, Artificial
  probe
  misc_feature (1)..(25): SEQ ID NO: 1324; WAN024DIW_at; Start 466; Stop 490
ggtgtcagcctagcaatcctctgta

SEQ ID NO: 159604 - DNA, 25 bp, Artificial
  probe
  misc_feature (1)..(25): SEQ ID NO: 1324; WAN024DIW_at; Start 117; Stop 141
caatgccccgactgttttagaagcc

SEQ ID NO: 159605 - DNA, 25 bp, Artificial
  probe
  misc_feature (1)..(25): SEQ ID NO: 1324; WAN024DIW_at; Start 522; Stop 546
taatccagaattgcaaccttatgcc

SEQ ID NO: 159606 - DNA, 25 bp, Artificial
  probe
  misc_feature (1)..(25): SEQ ID NO: 1324; WAN024DIW_at; Start 132; Stop 156
tttagaagcctaccaaattgtctca

SEQ ID NO: 159607 - DNA, 25 bp, Artificial
  probe
  misc_feature (1)..(25): SEQ ID NO: 1324; WAN024DIW_at; Start 2; Stop 26
tgacaacatttactatccatacagt

SEQ ID NO: 159608 - DNA, 25 bp, Artificial
  probe
  misc_feature (1)..(25): SEQ ID NO: 1324; WAN024DIW_at; Start 478; Stop 502
gcaatcctctgtaactatgccaaca

SEQ ID NO: 159609 - DNA, 25 bp, Artificial
  probe
  misc_feature (1)..(25): SEQ ID NO: 1324; WAN024DIW_at; Start 259; Stop 283
gccttttccatcaaacaaatccaga

SEQ ID NO: 159610 - DNA, 25 bp, Artificial
  probe
  misc_feature (1)..(25): SEQ ID NO: 1324; WAN024DIW_at; Start 407; Stop 431
ccttgtctgagtttttagaagctgg

SEQ ID NO: 159611 - DNA, 25 bp, Artificial
  probe
  misc_feature (1)..(25): SEQ ID NO: 1324; WAN024DIW_at; Start 390; Stop 414
tcgtgtaggagatgaagccttgtct

SEQ ID NO: 159612 - DNA, 25 bp, Artificial
  probe
  misc_feature (1)..(25): SEQ ID NO: 1324; WAN024DIW_at; Start 65; Stop 89
cagtagaaaaagacaacaatggcta

SEQ ID NO: 159613 - DNA, 25 bp, Artificial
  probe
  misc_feature (1)..(25): SEQ ID NO: 1324; WAN024DIW_at; Start 146; Stop 170
aaattgtctcatctatccaccgtcg

SEQ ID NO: 159614 - DNA, 25 bp, Artificial
  probe
  misc_feature (1)..(25): SEQ ID NO: 1324; WAN024DIW_at; Start 210; Stop 234
cacggcagccgtgaccaatggttgt

SEQ ID NO: 159615 - DNA, 25 bp, Artificial
  probe
  misc_feature (1)..(25): SEQ ID NO: 1324; WAN024DIW_at; Start 243; Stop 267
tgtcgcaggtcacacagccttttcc

SEQ ID NO: 159616 - DNA, 25 bp, Artificial
  probe
  misc_feature (1)..(25): SEQ ID NO: 1324; WAN024DIW_at; Start 439; Stop 463
caacaaaatgccttggatgtggttt

SEQ ID NO: 159617 - DNA, 25 bp, Artificial
  probe
  misc_feature (1)..(25): SEQ ID NO: 1324; WAN024DIW_at; Start 274; Stop 298
caaatccagatgaatgatgacttga

SEQ ID NO: 159618 - DNA, 25 bp, Artificial
  probe
  misc_feature (1)..(25): SEQ ID NO: 1324; WAN024DIW_at; Start 424; Stop 448
gaagctggctacactcaacaaaatg

SEQ ID NO: 159619 - DNA, 25 bp, Artificial
  probe
  misc_feature (1)..(25): SEQ ID NO: 1324; WAN024DIW_at; Start 172; Stop 196
aacagcctgacacccgttgagcgtg

SEQ ID NO: 159620 - DNA, 25 bp, Artificial
  probe
  misc_feature (1)..(25): SEQ ID NO: 1324; WAN024DIW_at; Start 301; Stop 325
caagctcttcgcaatcgtactccaa

SEQ ID NO: 159621 - DNA, 25 bp, Artificial
  probe
  misc_feature (1)..(25): SEQ ID NO: 1324; WAN024DIW_at; Start 336; Stop 360
tcctaaattggataccctagctaag

SEQ ID NO: 159622 - DNA, 25 bp, Artificial
  probe
  misc_feature (1)..(25): SEQ ID NO: 1324; WAN024DIW_at; Start 508; Stop 532
gctaatacaccaattaatccagaat

SEQ ID NO: 159623 - DNA, 25 bp, Artificial
  probe
  misc_feature (1)..(25): SEQ ID NO: 1324; WAN024DIW_at; Start 17; Stop 41
tccatacagtagagtcagcaccagc

SEQ ID NO: 159624 - DNA, 25 bp, Artificial
  probe
  misc_feature (1)..(25): SEQ ID NO: 1324; WAN024DIW_at; Start 99; Stop 123
cctaatcggtctcttggccaatgcc

SEQ ID NO: 159625 - DNA, 25 bp, Artificial
  probe
  misc_feature (1)..(25): SEQ ID NO: 1324; WAN024DIW_at; Start 184; Stop 208
cccgttgagcgtgaagtggtgcaaa

SEQ ID NO: 159626 - DNA, 25 bp, Artificial
  probe
  misc_feature (1)..(25): SEQ ID NO: 1324; WAN024DIW_at; Start 289; Stop 313
gatgacttgattcaagctcttcgca

SEQ ID NO: 159627 - DNA, 25 bp, Artificial
  probe
  misc_feature (1)..(25): SEQ ID NO: 1324; WAN024DIW_at; Start 35; Stop 59
caccagcagaagtgaaagaaattct

SEQ ID NO: 159628 - DNA, 25 bp, Artificial
  probe
  misc_feature (1)..(25): SEQ ID NO: 1324; WAN024DIW_at; Start 454; Stop 478
gatgtggtttttggtgtcagcctag

SEQ ID NO: 159629 - DNA, 25 bp, Artificial
  probe
  misc_feature (1)..(25): SEQ ID NO: 1324; WAN024DIW_at; Start 375; Stop 399
tatcaataccaagggtcgtgtagga

SEQ ID NO: 159630 - DNA, 25 bp, Artificial
  probe
  misc_feature (1)..(25): SEQ ID NO: 1324; WAN024DIW_at; Start 368; Stop 392
tggcagttatcaataccaagggtcg

SEQ ID NO: 159631 - DNA, 25 bp, Artificial
  probe
  misc_feature (1)..(25): SEQ ID NO: 1324; WAN024DIW_at; Start 225; Stop 249
caatggttgtgccttctgtgtcgca

SEQ ID NO: 159632 - DNA, 25 bp, Artificial
  probe
  misc_feature (1)..(25): SEQ ID NO: 1324; WAN024DIW_at; Start 195; Stop 219
tgaagtggtgcaaatcacggcagcc

SEQ ID NO: 159633 - DNA, 25 bp, Artificial
  probe
  misc_feature (1)..(25): SEQ ID NO: 1324; WAN024DIW_at; Start 316; Stop 340
cgtactccaattgaaacagatccta

SEQ ID NO: 159634 - DNA, 25 bp, Artificial
  probe
  misc_feature (1)..(25): SEQ ID NO: 1324; WAN024DIW_at; Start 84; Stop 108
tggctatattcccaacctaatcggt

SEQ ID NO: 159635 - DNA, 25 bp, Artificial
  probe
  misc_feature (1)..(25): SEQ ID NO: 3916; WAN024DIX_at; Start 132; Stop 156
taaagaacaaatgcctagcgcagat

SEQ ID NO: 159636 - DNA, 25 bp, Artificial
  probe
  misc_feature (1)..(25): SEQ ID NO: 3916; WAN024DIX_at; Start 3; Stop 27
gaattttatggcaaatctaaatcga

SEQ ID NO: 159637 - DNA, 25 bp, Artificial
  probe
  misc_feature (1)..(25): SEQ ID NO: 3916; WAN024DIX_at; Start 21; Stop 45
aaatcgattcaaatttacattcggg

SEQ ID NO: 159638 - DNA, 25 bp, Artificial
  probe
  misc_feature (1)..(25): SEQ ID NO: 3916; WAN024DIX_at; Start 81; Stop 105
cctttttatggaggaaatcgctaag

SEQ ID NO: 159639 - DNA, 25 bp, Artificial
  probe
  misc_feature (1)..(25): SEQ ID NO: 3916; WAN024DIX_at; Start 136; Stop 160
gaacaaatgcctagcgcagatgatg

SEQ ID NO: 159640 - DNA, 25 bp, Artificial
  probe
  misc_feature (1)..(25): SEQ ID NO: 3916; WAN024DIX_at; Start 193; Stop 217
ttatcaactcagctcagccgtgaga

SEQ ID NO: 159641 - DNA, 25 bp, Artificial
  probe
  misc_feature (1)..(25): SEQ ID NO: 3916; WAN024DIX_at; Start 145; Stop 169
cctagcgcagatgatgaaacaatcg

SEQ ID NO: 159642 - DNA, 25 bp, Artificial
  probe
  misc_feature (1)..(25): SEQ ID NO: 3916; WAN024DIX_at; Start 221; Stop 245
aatttgacgataaggagcaagagct

SEQ ID NO: 159643 - DNA, 25 bp, Artificial
  probe
  misc_feature (1)..(25): SEQ ID NO: 3916; WAN024DIX_at; Start 279; Stop 303
gcaagaacagagcaagattgaggat

SEQ ID NO: 159644 - DNA, 25 bp, Artificial
  probe
  misc_feature (1)..(25): SEQ ID NO: 3916; WAN024DIX_at; Start 24; Stop 48
tcgattcaaatttacattcgggaaa

SEQ ID NO: 159645 - DNA, 25 bp, Artificial
  probe
  misc_feature (1)..(25): SEQ ID NO: 3916; WAN024DIX_at; Start 9; Stop 33
tatggcaaatctaaatcgattcaaa

SEQ ID NO: 159646 - DNA, 25 bp, Artificial
  probe
  misc_feature (1)..(25): SEQ ID NO: 3916; WAN024DIX_at; Start 86; Stop 110
ttatggaggaaatcgctaaggttgc

SEQ ID NO: 159647 - DNA, 25 bp, Artificial
  probe
  misc_feature (1)..(25): SEQ ID NO: 3916; WAN024DIX_at; Start 283; Stop 307
gaacagagcaagattgaggattcct

SEQ ID NO: 159648 - DNA, 25 bp, Artificial
  probe
  misc_feature (1)..(25): SEQ ID NO: 3916; WAN024DIX_at; Start 197; Stop 221
caactcagctcagccgtgagattga

SEQ ID NO: 159649 - DNA, 25 bp, Artificial
  probe
  misc_feature (1)..(25): SEQ ID NO: 3916; WAN024DIX_at; Start 168; Stop 192
cgctcttttgttggcagtcaactgt

SEQ ID NO: 159650 - DNA, 25 bp, Artificial
  probe
  misc_feature (1)..(25): SEQ ID NO: 3916; WAN024DIX_at; Start 164; Stop 188
caatcgctcttttgttggcagtcaa

SEQ ID NO: 159651 - DNA, 25 bp, Artificial
  probe
  misc_feature (1)..(25): SEQ ID NO: 3916; WAN024DIX_at; Start 267; Stop 291
tgtgacttgtaagcaagaacagagc

SEQ ID NO: 159652 - DNA, 25 bp, Artificial
  probe
  misc_feature (1)..(25): SEQ ID NO: 3916; WAN024DIX_at; Start 113; Stop 137
cagaaaaataccaagcaattaaaga

SEQ ID NO: 159653 - DNA, 25 bp, Artificial
  probe
  misc_feature (1)..(25): SEQ ID NO: 3916; WAN024DIX_at; Start 150; Stop 174
cgcagatgatgaaacaatcgctctt

SEQ ID NO: 159654 - DNA, 25 bp, Artificial
  probe
  misc_feature (1)..(25): SEQ ID NO: 3916; WAN024DIX_at; Start 214; Stop 238
gagattgaatttgacgataaggagc

SEQ ID NO: 159655 - DNA, 25 bp, Artificial
  probe
  misc_feature (1)..(25): SEQ ID NO: 3916; WAN024DIX_at; Start 204; Stop 228
gctcagccgtgagattgaatttgac

SEQ ID NO: 159656 - DNA, 25 bp, Artificial
  probe
  misc_feature (1)..(25): SEQ ID NO: 3916; WAN024DIX_at; Start 259; Stop 283
cacaagcttgtgacttgtaagcaag

SEQ ID NO: 159657 - DNA, 25 bp, Artificial
  probe
  misc_feature (1)..(25): SEQ ID NO: 3916; WAN024DIX_at; Start 93; Stop 117
ggaaatcgctaaggttgcgacagaa

SEQ ID NO: 159658 - DNA, 25 bp, Artificial
  probe
  misc_feature (1)..(25): SEQ ID NO: 3916; WAN024DIX_at; Start 274; Stop 298
tgtaagcaagaacagagcaagattg

SEQ ID NO: 159659 - DNA, 25 bp, Artificial
  probe
  misc_feature (1)..(25): SEQ ID NO: 3916; WAN024DIX_at; Start 180; Stop 204
ggcagtcaactgtttatcaactcag

SEQ ID NO: 159660 - DNA, 25 bp, Artificial
  probe
  misc_feature (1)..(25): SEQ ID NO: 3916; WAN024DIX_at; Start 285; Stop 309
acagagcaagattgaggattcctta

SEQ ID NO: 159661 - DNA, 25 bp, Artificial
  probe
  misc_feature (1)..(25): SEQ ID NO: 3916; WAN024DIX_at; Start 105; Stop 129
ggttgcgacagaaaaataccaagca

SEQ ID NO: 159662 - DNA, 25 bp, Artificial
  probe
  misc_feature (1)..(25): SEQ ID NO: 3916; WAN024DIX_at; Start 50; Stop 74
aatcgttaaccttgacaagcgaaca

SEQ ID NO: 159663 - DNA, 25 bp, Artificial
  probe
  misc_feature (1)..(25): SEQ ID NO: 3916; WAN024DIX_at; Start 190; Stop 214
tgtttatcaactcagctcagccgtg

SEQ ID NO: 159664 - DNA, 25 bp, Artificial
  probe
  misc_feature (1)..(25): SEQ ID NO: 3916; WAN024DIX_at; Start 141; Stop 165
aatgcctagcgcagatgatgaaaca

SEQ ID NO: 159665 - DNA, 25 bp, Artificial
  probe
  misc_feature (1)..(25): SEQ ID NO: 3916; WAN024DIX_at; Start 247; Stop 271
gaagaactccgtcacaagcttgtga

SEQ ID NO: 159666 - DNA, 25 bp, Artificial
  probe
  misc_feature (1)..(25): SEQ ID NO: 3916; WAN024DIX_at; Start 53; Stop 77
cgttaaccttgacaagcgaacatga

SEQ ID NO: 159667 - DNA, 25 bp, Artificial
  probe
  misc_feature (1)..(25): SEQ ID NO: 3916; WAN024DIX_at; Start 128; Stop 152
caattaaagaacaaatgcctagcgc

SEQ ID NO: 159668 - DNA, 25 bp, Artificial
  probe
  misc_feature (1)..(25): SEQ ID NO: 3916; WAN024DIX_at; Start 100; Stop 124
gctaaggttgcgacagaaaaatacc

SEQ ID NO: 159669 - DNA, 25 bp, Artificial
  probe
  misc_feature (1)..(25): SEQ ID NO: 5754; WAN024DIY_at; Start 89; Stop 113
caaaaatcttgataggatgtccttt

SEQ ID NO: 159670 - DNA, 25 bp, Artificial
  probe
  misc_feature (1)..(25): SEQ ID NO: 5754; WAN024DIY_at; Start 103; Stop 127
ggatgtcctttattatggaaagcct

SEQ ID NO: 159671 - DNA, 25 bp, Artificial
  probe
  misc_feature (1)..(25): SEQ ID NO: 5754; WAN024DIY_at; Start 109; Stop 133
cctttattatggaaagccttattgg

SEQ ID NO: 159672 - DNA, 25 bp, Artificial
  probe
  misc_feature (1)..(25): SEQ ID NO: 5754; WAN024DIY_at; Start 41; Stop 65
ctggacaaaaagtcttcaaaatcgg

SEQ ID NO: 159673 - DNA, 25 bp, Artificial
  probe
  misc_feature (1)..(25): SEQ ID NO: 5754; WAN024DIY_at; Start 40; Stop 64
gctggacaaaaagtcttcaaaatcg

SEQ ID NO: 159674 - DNA, 25 bp, Artificial
  probe
  misc_feature (1)..(25): SEQ ID NO: 5754; WAN024DIY_at; Start 129; Stop 153
attggattttctcctcagattgagt

SEQ ID NO: 159675 - DNA, 25 bp, Artificial
  probe
  misc_feature (1)..(25): SEQ ID NO: 5754; WAN024DIY_at; Start 124; Stop 148
gccttattggattttctcctcagat

SEQ ID NO: 159676 - DNA, 25 bp, Artificial
  probe
  misc_feature (1)..(25): SEQ ID NO: 5754; WAN024DIY_at; Start 104; Stop 128
gatgtcctttattatggaaagcctt

SEQ ID NO: 159677 - DNA, 25 bp, Artificial
  probe
  misc_feature (1)..(25): SEQ ID NO: 5754; WAN024DIY_at; Start 110; Stop 134
ctttattatggaaagccttattgga

SEQ ID NO: 159678 - DNA, 25 bp, Artificial
  probe
  misc_feature (1)..(25): SEQ ID NO: 5754; WAN024DIY_at; Start 73; Stop 97
cagcctatcgggtgttcaaaaatct

SEQ ID NO: 159679 - DNA, 25 bp, Artificial
  probe
  misc_feature (1)..(25): SEQ ID NO: 5754; WAN024DIY_at; Start 121; Stop 145
aaagccttattggattttctcctca

SEQ ID NO: 159680 - DNA, 25 bp, Artificial
  probe
  misc_feature (1)..(25): SEQ ID NO: 5754; WAN024DIY_at; Start 34; Stop 58
aaagaagctggacaaaaagtcttca

SEQ ID NO: 159681 - DNA, 25 bp, Artificial
  probe
  misc_feature (1)..(25): SEQ ID NO: 5754; WAN024DIY_at; Start 123; Stop 147
agccttattggattttctcctcaga

SEQ ID NO: 159682 - DNA, 25 bp, Artificial
  probe
  misc_feature (1)..(25): SEQ ID NO: 5754; WAN024DIY_at; Start 35; Stop 59
aagaagctggacaaaaagtcttcaa

SEQ ID NO: 159683 - DNA, 25 bp, Artificial
  probe
  misc_feature (1)..(25): SEQ ID NO: 5754; WAN024DIY_at; Start 91; Stop 115
aaaatcttgataggatgtcctttat

SEQ ID NO: 159684 - DNA, 25 bp, Artificial
  probe
  misc_feature (1)..(25): SEQ ID NO: 5754; WAN024DIY_at; Start 75; Stop 99
gcctatcgggtgttcaaaaatcttg

SEQ ID NO: 159685 - DNA, 25 bp, Artificial
  probe
  misc_feature (1)..(25): SEQ ID NO: 5754; WAN024DIY_at; Start 122; Stop 146
aagccttattggattttctcctcag

SEQ ID NO: 159686 - DNA, 25 bp, Artificial
  probe
  misc_feature (1)..(25): SEQ ID NO: 5754; WAN024DIY_at; Start 108; Stop 132
tcctttattatggaaagccttattg

SEQ ID NO: 159687 - DNA, 25 bp, Artificial
  probe
  misc_feature (1)..(25): SEQ ID NO: 5754; WAN024DIY_at; Start 21; Stop 45
tatttataaggtaaaagaagctgga

SEQ ID NO: 159688 - DNA, 25 bp, Artificial
  probe
  misc_feature (1)..(25): SEQ ID NO: 5754; WAN024DIY_at; Start 131; Stop 155
tggattttctcctcagattgagttt

SEQ ID NO: 159689 - DNA, 25 bp, Artificial
  probe
  misc_feature (1)..(25): SEQ ID NO: 5754; WAN024DIY_at; Start 106; Stop 130
tgtcctttattatggaaagccttat

SEQ ID NO: 159690 - DNA, 25 bp, Artificial
  probe
  misc_feature (1)..(25): SEQ ID NO: 5754; WAN024DIY_at; Start 118; Stop 142
tggaaagccttattggattttctcc

SEQ ID NO: 159691 - DNA, 25 bp, Artificial
  probe
  misc_feature (1)..(25): SEQ ID NO: 5754; WAN024DIY_at; Start 130; Stop 154
ttggattttctcctcagattgagtt

SEQ ID NO: 159692 - DNA, 25 bp, Artificial
  probe
  misc_feature (1)..(25): SEQ ID NO: 5754; WAN024DIY_at; Start 120; Stop 144
gaaagccttattggattttctcctc

SEQ ID NO: 159693 - DNA, 25 bp, Artificial
  probe
  misc_feature (1)..(25): SEQ ID NO: 5754; WAN024DIY_at; Start 37; Stop 61
gaagctggacaaaaagtcttcaaaa

SEQ ID NO: 159694 - DNA, 25 bp, Artificial
  probe
  misc_feature (1)..(25): SEQ ID NO: 5754; WAN024DIY_at; Start 128; Stop 152
tattggattttctcctcagattgag

SEQ ID NO: 159695 - DNA, 25 bp, Artificial
  probe
  misc_feature (1)..(25): SEQ ID NO: 5754; WAN024DIY_at; Start 72; Stop 96
gcagcctatcgggtgttcaaaaatc

SEQ ID NO: 159696 - DNA, 25 bp, Artificial
  probe
  misc_feature (1)..(25): SEQ ID NO: 5754; WAN024DIY_at; Start 115; Stop 139
ttatggaaagccttattggattttc

SEQ ID NO: 159697 - DNA, 25 bp, Artificial
  probe
  misc_feature (1)..(25): SEQ ID NO: 5754; WAN024DIY_at; Start 88; Stop 112
tcaaaaatcttgataggatgtcctt

SEQ ID NO: 159698 - DNA, 25 bp, Artificial
  probe
  misc_feature (1)..(25): SEQ ID NO: 5754; WAN024DIY_at; Start 74; Stop 98
agcctatcgggtgttcaaaaatctt

SEQ ID NO: 159699 - DNA, 25 bp, Artificial
  probe
  misc_feature (1)..(25): SEQ ID NO: 5754; WAN024DIY_at; Start 112; Stop 136
ttattatggaaagccttattggatt

SEQ ID NO: 159700 - DNA, 25 bp, Artificial
  probe
  misc_feature (1)..(25): SEQ ID NO: 5754; WAN024DIY_at; Start 102; Stop 126
aggatgtcctttattatggaaagcc

SEQ ID NO: 159701 - DNA, 25 bp, Artificial
  probe
  misc_feature (1)..(25): SEQ ID NO: 5754; WAN024DIY_at; Start 101; Stop 125
taggatgtcctttattatggaaagc

SEQ ID NO: 159702 - DNA, 25 bp, Artificial
  probe
  misc_feature (1)..(25): SEQ ID NO: 5754; WAN024DIY_at; Start 99; Stop 123
gataggatgtcctttattatggaaa

SEQ ID NO: 159703 - DNA, 25 bp, Artificial
  probe
  misc_feature (1)..(25): SEQ ID NO: 825; WAN024DIZ_at; Start 927; Stop 951
ccggccgatacgtgaattgaaagaa

SEQ ID NO: 159704 - DNA, 25 bp, Artificial
  probe
  misc_feature (1)..(25): SEQ ID NO: 825; WAN024DIZ_at; Start 528; Stop 552
ggtcgagccctttaatgaatgggtc

SEQ ID NO: 159705 - DNA, 25 bp, Artificial
  probe
  misc_feature (1)..(25): SEQ ID NO: 825; WAN024DIZ_at; Start 885; Stop 909
tcgtactccaatccgaaaattaggc

SEQ ID NO: 159706 - DNA, 25 bp, Artificial
  probe
  misc_feature (1)..(25): SEQ ID NO: 825; WAN024DIZ_at; Start 1077; Stop 1101
tatacaagttacaggtttagacgac

SEQ ID NO: 159707 - DNA, 25 bp, Artificial
  probe
  misc_feature (1)..(25): SEQ ID NO: 825; WAN024DIZ_at; Start 217; Stop 241
cctgagcaagtcattgaagcgattc

SEQ ID NO: 159708 - DNA, 25 bp, Artificial
  probe
  misc_feature (1)..(25): SEQ ID NO: 825; WAN024DIZ_at; Start 471; Stop 495
tgctgcagtagacaggattgttcca

SEQ ID NO: 159709 - DNA, 25 bp, Artificial
  probe
  misc_feature (1)..(25): SEQ ID NO: 825; WAN024DIZ_at; Start 1093; Stop 1117
ttagacgaccaagaattgattgagc

SEQ ID NO: 159710 - DNA, 25 bp, Artificial
  probe
  misc_feature (1)..(25): SEQ ID NO: 825; WAN024DIZ_at; Start 5; Stop 29
aacattctgttcattttggtgccgg

SEQ ID NO: 159711 - DNA, 25 bp, Artificial
  probe
  misc_feature (1)..(25): SEQ ID NO: 825; WAN024DIZ_at; Start 665; Stop 689
caacttcagcttacattggtgcgca

SEQ ID NO: 159712 - DNA, 25 bp, Artificial
  probe
  misc_feature (1)..(25): SEQ ID NO: 825; WAN024DIZ_at; Start 382; Stop 406
ggcgggtctcaatttctttatcaag

SEQ ID NO: 159713 - DNA, 25 bp, Artificial
  probe
  misc_feature (1)..(25): SEQ ID NO: 825; WAN024DIZ_at; Start 650; Stop 674
tcaattctggacatgcaacttcagc

SEQ ID NO: 159714 - DNA, 25 bp, Artificial
  probe
  misc_feature (1)..(25): SEQ ID NO: 825; WAN024DIZ_at; Start 613; Stop 637
gatttagaaccctttattgagcgaa

SEQ ID NO: 159715 - DNA, 25 bp, Artificial
  probe
  misc_feature (1)..(25): SEQ ID NO: 825; WAN024DIZ_at; Start 499; Stop 523
caaagtcacgaagattccctttttg

SEQ ID NO: 159716 - DNA, 25 bp, Artificial
  probe
  misc_feature (1)..(25): SEQ ID NO: 825; WAN024DIZ_at; Start 19; Stop 43
tttggtgccggtaatatcggtcgtg

SEQ ID NO: 159717 - DNA, 25 bp, Artificial
  probe
  misc_feature (1)..(25): SEQ ID NO: 825; WAN024DIZ_at; Start 365; Stop 389
cctgtgaaaatatgattggcgggtc

SEQ ID NO: 159718 - DNA, 25 bp, Artificial
  probe
  misc_feature (1)..(25): SEQ ID NO: 825; WAN024DIZ_at; Start 437; Stop 461
tgacatttgctgataactacatagg

SEQ ID NO: 159719 - DNA, 25 bp, Artificial
  probe
  misc_feature (1)..(25): SEQ ID NO: 825; WAN024DIZ_at; Start 698; Stop 722
ccaagacaattttggaagctcttca

SEQ ID NO: 159720 - DNA, 25 bp, Artificial
  probe
  misc_feature (1)..(25): SEQ ID NO: 825; WAN024DIZ_at; Start 600; Stop 624
gcattatgaagaagatttagaaccc

SEQ ID NO: 159721 - DNA, 25 bp, Artificial
  probe
  misc_feature (1)..(25): SEQ ID NO: 825; WAN024DIZ_at; Start 544; Stop 568
gaatgggtcgtggaaaccaagcgtc

SEQ ID NO: 159722 - DNA, 25 bp, Artificial
  probe
  misc_feature (1)..(25): SEQ ID NO: 825; WAN024DIZ_at; Start 305; Stop 329
tagccaaaggaatcgaagctcgccg

SEQ ID NO: 159723 - DNA, 25 bp, Artificial
  probe
  misc_feature (1)..(25): SEQ ID NO: 825; WAN024DIZ_at; Start 204; Stop 228
tagcaaagaacatcctgagcaagtc

SEQ ID NO: 159724 - DNA, 25 bp, Artificial
  probe
  misc_feature (1)..(25): SEQ ID NO: 825; WAN024DIZ_at; Start 249; Stop 273
ggatattattactactgcaatcgga

SEQ ID NO: 159725 - DNA, 25 bp, Artificial
  probe
  misc_feature (1)..(25): SEQ ID NO: 825; WAN024DIZ_at; Start 769; Stop 793
cggagtctcttgattgccaaatgga

SEQ ID NO: 159726 - DNA, 25 bp, Artificial
  probe
  misc_feature (1)..(25): SEQ ID NO: 825; WAN024DIZ_at; Start 1000; Stop 1024
gactatcgcgatgtaaatgatgaag

SEQ ID NO: 159727 - DNA, 25 bp, Artificial
  probe
  misc_feature (1)..(25): SEQ ID NO: 825; WAN024DIZ_at; Start 264; Stop 288
tgcaatcggacctaatatactccct

SEQ ID NO: 159728 - DNA, 25 bp, Artificial
  probe
  misc_feature (1)..(25): SEQ ID NO: 825; WAN024DIZ_at; Start 149; Stop 173
aaattgcacagaaaggacagtctcg

SEQ ID NO: 159729 - DNA, 25 bp, Artificial
  probe
  misc_feature (1)..(25): SEQ ID NO: 825; WAN024DIZ_at; Start 682; Stop 706
ggtgcgcattatggtgccaagacaa

SEQ ID NO: 159730 - DNA, 25 bp, Artificial
  probe
  misc_feature (1)..(25): SEQ ID NO: 825; WAN024DIZ_at; Start 422; Stop 446
taagtccggaaggtttgacatttgc

SEQ ID NO: 159731 - DNA, 25 bp, Artificial
  probe
  misc_feature (1)..(25): SEQ ID NO: 825; WAN024DIZ_at; Start 871; Stop 895
gttagtcgcgtagctcgtactccaa

SEQ ID NO: 159732 - DNA, 25 bp, Artificial
  probe
  misc_feature (1)..(25): SEQ ID NO: 825; WAN024DIZ_at; Start 751; Stop 775
tctgtattagctgaaattcggagtc

SEQ ID NO: 159733 - DNA, 25 bp, Artificial
  probe
  misc_feature (1)..(25): SEQ ID NO: 825; WAN024DIZ_at; Start 164; Stop 188
gacagtctcgtatagaagtaactaa

SEQ ID NO: 159734 - DNA, 25 bp, Artificial
  probe
  misc_feature (1)..(25): SEQ ID NO: 825; WAN024DIZ_at; Start 910; Stop 934
tataatgaacgattcatccggccga

SEQ ID NO: 159735 - DNA, 25 bp, Artificial
  probe
  misc_feature (1)..(25): SEQ ID NO: 825; WAN024DIZ_at; Start 454; Stop 478
tacataggttttccaaatgctgcag

SEQ ID NO: 159736 - DNA, 25 bp, Artificial
  probe
  misc_feature (1)..(25): SEQ ID NO: 825; WAN024DIZ_at; Start 33; Stop 57
tatcggtcgtggttttataggtgaa

SEQ ID NO: 159737 - DNA, 25 bp, Artificial
  probe
  misc_feature (1)..(25): SEQ ID NO: 870; WAN024DJ2_at; Start 158; Stop 182
tgggtaactttatcgccataccgca

SEQ ID NO: 159738 - DNA, 25 bp, Artificial
  probe
  misc_feature (1)..(25): SEQ ID NO: 870; WAN024DJ2_at; Start 37; Stop 61
caattttctaacaaggaggaagcta

SEQ ID NO: 159739 - DNA, 25 bp, Artificial
  probe
  misc_feature (1)..(25): SEQ ID NO: 870; WAN024DJ2_at; Start 372; Stop 396
tgttcttaaactagcagatgctcag

SEQ ID NO: 159740 - DNA, 25 bp, Artificial
  probe
  misc_feature (1)..(25): SEQ ID NO: 870; WAN024DJ2_at; Start 112; Stop 136
tatattgaagccatgattgagcgag

SEQ ID NO: 159741 - DNA, 25 bp, Artificial
  probe
  misc_feature (1)..(25): SEQ ID NO: 870; WAN024DJ2_at; Start 266; Stop 290
tatctaaccctcaagtggcaacggt

SEQ ID NO: 159742 - DNA, 25 bp, Artificial
  probe
  misc_feature (1)..(25): SEQ ID NO: 870; WAN024DJ2_at; Start 319; Stop 343
gaacacttagaaattattcagaaaa

SEQ ID NO: 159743 - DNA, 25 bp, Artificial
  probe
  misc_feature (1)..(25): SEQ ID NO: 870; WAN024DJ2_at; Start 2; Stop 26
tgaaacttgaaaaacatttgattaa

SEQ ID NO: 159744 - DNA, 25 bp, Artificial
  probe
  misc_feature (1)..(25): SEQ ID NO: 870; WAN024DJ2_at; Start 118; Stop 142
gaagccatgattgagcgagataaag

SEQ ID NO: 159745 - DNA, 25 bp, Artificial
  probe
  misc_feature (1)..(25): SEQ ID NO: 870; WAN024DJ2_at; Start 274; Stop 298
cctcaagtggcaacggttctttttg

SEQ ID NO: 159746 - DNA, 25 bp, Artificial
  probe
  misc_feature (1)..(25): SEQ ID NO: 870; WAN024DJ2_at; Start 300; Stop 324
tattgctggtattggtaatgaacac

SEQ ID NO: 159747 - DNA, 25 bp, Artificial
  probe
  misc_feature (1)..(25): SEQ ID NO: 870; WAN024DJ2_at; Start 55; Stop 79
gaagctatttgttattgtgggcaag

SEQ ID NO: 159748 - DNA, 25 bp, Artificial
  probe
  misc_feature (1)..(25): SEQ ID NO: 870; WAN024DJ2_at; Start 383; Stop 407
tagcagatgctcagtcaaaagagga

SEQ ID NO: 159749 - DNA, 25 bp, Artificial
  probe
  misc_feature (1)..(25): SEQ ID NO: 870; WAN024DJ2_at; Start 179; Stop 203
cgcatggaacagatgcagcaaaaaa

SEQ ID NO: 159750 - DNA, 25 bp, Artificial
  probe
  misc_feature (1)..(25): SEQ ID NO: 870; WAN024DJ2_at; Start 253; Stop 277
gattttgggaatgtatctaaccctc

SEQ ID NO: 159751 - DNA, 25 bp, Artificial
  probe
  misc_feature (1)..(25): SEQ ID NO: 870; WAN024DJ2_at; Start 306; Stop 330
tggtattggtaatgaacacttagaa

SEQ ID NO: 159752 - DNA, 25 bp, Artificial
  probe
  misc_feature (1)..(25): SEQ ID NO: 870; WAN024DJ2_at; Start 261; Stop 285
gaatgtatctaaccctcaagtggca

SEQ ID NO: 159753 - DNA, 25 bp, Artificial
  probe
  misc_feature (1)..(25): SEQ ID NO: 870; WAN024DJ2_at; Start 87; Stop 111
tgagggtggatatgttaatgaagac

SEQ ID NO: 159754 - DNA, 25 bp, Artificial
  probe
  misc_feature (1)..(25): SEQ ID NO: 870; WAN024DJ2_at; Start 163; Stop 187
aactttatcgccataccgcatggaa

SEQ ID NO: 159755 - DNA, 25 bp, Artificial
  probe
  misc_feature (1)..(25): SEQ ID NO: 870; WAN024DJ2_at; Start 20; Stop 44
tgattaagcttaataaacaattttc

SEQ ID NO: 159756 - DNA, 25 bp, Artificial
  probe
  misc_feature (1)..(25): SEQ ID NO: 870; WAN024DJ2_at; Start 172; Stop 196
gccataccgcatggaacagatgcag

SEQ ID NO: 159757 - DNA, 25 bp, Artificial
  probe
  misc_feature (1)..(25): SEQ ID NO: 870; WAN024DJ2_at; Start 406; Stop 430
gaagtattgcgcttatttgatgctg

SEQ ID NO: 159758 - DNA, 25 bp, Artificial
  probe
  misc_feature (1)..(25): SEQ ID NO: 870; WAN024DJ2_at; Start 74; Stop 98
ggcaagttctttatgagggtggata

SEQ ID NO: 159759 - DNA, 25 bp, Artificial
  probe
  misc_feature (1)..(25): SEQ ID NO: 870; WAN024DJ2_at; Start 97; Stop 121
tatgttaatgaagactatattgaag

SEQ ID NO: 159760 - DNA, 25 bp, Artificial
  probe
  misc_feature (1)..(25): SEQ ID NO: 870; WAN024DJ2_at; Start 41; Stop 65
tttctaacaaggaggaagctatttg

SEQ ID NO: 159761 - DNA, 25 bp, Artificial
  probe
  misc_feature (1)..(25): SEQ ID NO: 870; WAN024DJ2_at; Start 339; Stop 363
gaaaatttctatcttctgtgcagat

SEQ ID NO: 159762 - DNA, 25 bp, Artificial
  probe
  misc_feature (1)..(25): SEQ ID NO: 870; WAN024DJ2_at; Start 393; Stop 417
tcagtcaaaagaggaagtattgcgc

SEQ ID NO: 159763 - DNA, 25 bp, Artificial
  probe
  misc_feature (1)..(25): SEQ ID NO: 870; WAN024DJ2_at; Start 413; Stop 437
tgcgcttatttgatgctgttgaata

SEQ ID NO: 159764 - DNA, 25 bp, Artificial
  probe
  misc_feature (1)..(25): SEQ ID NO: 870; WAN024DJ2_at; Start 367; Stop 391
gataatgttcttaaactagcagatg

SEQ ID NO: 159765 - DNA, 25 bp, Artificial
  probe
  misc_feature (1)..(25): SEQ ID NO: 870; WAN024DJ2_at; Start 218; Stop 242
ctggtattacagtcgttcaagtccc

SEQ ID NO: 159766 - DNA, 25 bp, Artificial
  probe
  misc_feature (1)..(25): SEQ ID NO: 870; WAN024DJ2_at; Start 150; Stop 174
tgtttacatgggtaactttatcgcc

SEQ ID NO: 159767 - DNA, 25 bp, Artificial
  probe
  misc_feature (1)..(25): SEQ ID NO: 870; WAN024DJ2_at; Start 67; Stop 91
tattgtgggcaagttctttatgagg

SEQ ID NO: 159768 - DNA, 25 bp, Artificial
  probe
  misc_feature (1)..(25): SEQ ID NO: 870; WAN024DJ2_at; Start 214; Stop 238
aagtctggtattacagtcgttcaag

SEQ ID NO: 159769 - DNA, 25 bp, Artificial
  probe
  misc_feature (1)..(25): SEQ ID NO: 870; WAN024DJ2_at; Start 284; Stop 308
caacggttctttttggtattgctgg

SEQ ID NO: 159770 - DNA, 25 bp, Artificial
  probe
  misc_feature (1)..(25): SEQ ID NO: 870; WAN024DJ2_at; Start 176; Stop 200
taccgcatggaacagatgcagcaaa

SEQ ID NO: 159771 - DNA, 25 bp, Artificial
  probe
  misc_feature (1)..(25): SEQ ID NO: 2074; WAN024DJ3_at; Start 1418; Stop 1442
caattgtcgcgcgtgatgctatcgc

SEQ ID NO: 159772 - DNA, 25 bp, Artificial
  probe
  misc_feature (1)..(25): SEQ ID NO: 2074; WAN024DJ3_at; Start 266; Stop 290
ttacctatcgccttctgactgagag

SEQ ID NO: 159773 - DNA, 25 bp, Artificial
  probe
  misc_feature (1)..(25): SEQ ID NO: 2074; WAN024DJ3_at; Start 122; Stop 146
cagatttgacagatagcatggagca

SEQ ID NO: 159774 - DNA, 25 bp, Artificial
  probe
  misc_feature (1)..(25): SEQ ID NO: 2074; WAN024DJ3_at; Start 1300; Stop 1324
tatattttatctaccaagccgctga

SEQ ID NO: 159775 - DNA, 25 bp, Artificial
  probe
  misc_feature (1)..(25): SEQ ID NO: 2074; WAN024DJ3_at; Start 302; Stop 326
ccaatgaagcattgcaagagtgcac

SEQ ID NO: 159776 - DNA, 25 bp, Artificial
  probe
  misc_feature (1)..(25): SEQ ID NO: 2074; WAN024DJ3_at; Start 636; Stop 660
tcttataggtcaggagcaaaacatt

SEQ ID NO: 159777 - DNA, 25 bp, Artificial
  probe
  misc_feature (1)..(25): SEQ ID NO: 2074; WAN024DJ3_at; Start 681; Stop 705
taagcaggctttggaaatttctcaa

SEQ ID NO: 159778 - DNA, 25 bp, Artificial
  probe
  misc_feature (1)..(25): SEQ ID NO: 2074; WAN024DJ3_at; Start 224; Stop 248
aagtgttagttgagtatagtcccca

SEQ ID NO: 159779 - DNA, 25 bp, Artificial
  probe
  misc_feature (1)..(25): SEQ ID NO: 2074; WAN024DJ3_at; Start 316; Stop 340
caagagtgcacgaaagtcagtaatg

SEQ ID NO: 159780 - DNA, 25 bp, Artificial
  probe
  misc_feature (1)..(25): SEQ ID NO: 2074; WAN024DJ3_at; Start 1790; Stop 1814
tgtctaaagaagctagcgaggaagc

SEQ ID NO: 159781 - DNA, 25 bp, Artificial
  probe
  misc_feature (1)..(25): SEQ ID NO: 2074; WAN024DJ3_at; Start 975; Stop 999
tcagggtgaaaatttgccagaatct

SEQ ID NO: 159782 - DNA, 25 bp, Artificial
  probe
  misc_feature (1)..(25): SEQ ID NO: 2074; WAN024DJ3_at; Start 1639; Stop 1663
gctattcctaatactggtctggtgc

SEQ ID NO: 159783 - DNA, 25 bp, Artificial
  probe
  misc_feature (1)..(25): SEQ ID NO: 2074; WAN024DJ3_at; Start 871; Stop 895
gatacggtttccatgtataccaaga

SEQ ID NO: 159784 - DNA, 25 bp, Artificial
  probe
  misc_feature (1)..(25): SEQ ID NO: 2074; WAN024DJ3_at; Start 548; Stop 572
ggctggccagtcagattgttaataa

SEQ ID NO: 159785 - DNA, 25 bp, Artificial
  probe
  misc_feature (1)..(25): SEQ ID NO: 2074; WAN024DJ3_at; Start 1172; Stop 1196
taacggatgaacgtcgggtcactag

SEQ ID NO: 159786 - DNA, 25 bp, Artificial
  probe
  misc_feature (1)..(25): SEQ ID NO: 2074; WAN024DJ3_at; Start 1863; Stop 1887
ttatacagagatttacaagacggga

SEQ ID NO: 159787 - DNA, 25 bp, Artificial
  probe
  misc_feature (1)..(25): SEQ ID NO: 2074; WAN024DJ3_at; Start 1531; Stop 1555
caatcatttgagcacacggtagaac

SEQ ID NO: 159788 - DNA, 25 bp, Artificial
  probe
  misc_feature (1)..(25): SEQ ID NO: 2074; WAN024DJ3_at; Start 1764; Stop 1788
ggtcaaaaggtgtctgctaatgcta

SEQ ID NO: 159789 - DNA, 25 bp, Artificial
  probe
  misc_feature (1)..(25): SEQ ID NO: 2074; WAN024DJ3_at; Start 589; Stop 613
ccagatatggatgctaggatgaaga

SEQ ID NO: 159790 - DNA, 25 bp, Artificial
  probe
  misc_feature (1)..(25): SEQ ID NO: 2074; WAN024DJ3_at; Start 1387; Stop 1411
gaacgacttcagtatgtacaggcac

SEQ ID NO: 159791 - DNA, 25 bp, Artificial
  probe
  misc_feature (1)..(25): SEQ ID NO: 2074; WAN024DJ3_at; Start 1403; Stop 1427
tacaggcacatcgtacaattgtcgc

SEQ ID NO: 159792 - DNA, 25 bp, Artificial
  probe
  misc_feature (1)..(25): SEQ ID NO: 2074; WAN024DJ3_at; Start 1127; Stop 1151
gcttaggccgtagtccagagattta

SEQ ID NO: 159793 - DNA, 25 bp, Artificial
  probe
  misc_feature (1)..(25): SEQ ID NO: 2074; WAN024DJ3_at; Start 807; Stop 831
ggacaatccgctctttacggagaaa

SEQ ID NO: 159794 - DNA, 25 bp, Artificial
  probe
  misc_feature (1)..(25): SEQ ID NO: 2074; WAN024DJ3_at; Start 1112; Stop 1136
tacattttatctctagcttaggccg

SEQ ID NO: 159795 - DNA, 25 bp, Artificial
  probe
  misc_feature (1)..(25): SEQ ID NO: 2074; WAN024DJ3_at; Start 942; Stop 966
tattcggctcagtttaggcgtccct

SEQ ID NO: 159796 - DNA, 25 bp, Artificial
  probe
  misc_feature (1)..(25): SEQ ID NO: 2074; WAN024DJ3_at; Start 240; Stop 264
tagtccccaagaaagacaagagttg

SEQ ID NO: 159797 - DNA, 25 bp, Artificial
  probe
  misc_feature (1)..(25): SEQ ID NO: 2074; WAN024DJ3_at; Start 794; Stop 818
tcattaaacgtcaggacaatccgct

SEQ ID NO: 159798 - DNA, 25 bp, Artificial
  probe
  misc_feature (1)..(25): SEQ ID NO: 2074; WAN024DJ3_at; Start 485; Stop 509
cagtagcagatttttcaaccggtaa

SEQ ID NO: 159799 - DNA, 25 bp, Artificial
  probe
  misc_feature (1)..(25): SEQ ID NO: 2074; WAN024DJ3_at; Start 46; Stop 70
catgtagggaagctttcaatgcaag

SEQ ID NO: 159800 - DNA, 25 bp, Artificial
  probe
  misc_feature (1)..(25): SEQ ID NO: 2074; WAN024DJ3_at; Start 29; Stop 53
tattgaaggctttcctacatgtagg

SEQ ID NO: 159801 - DNA, 25 bp, Artificial
  probe
  misc_feature (1)..(25): SEQ ID NO: 2074; WAN024DJ3_at; Start 1439; Stop 1463
tcgctccagagaaaagttatgactt

SEQ ID NO: 159802 - DNA, 25 bp, Artificial
  probe
  misc_feature (1)..(25): SEQ ID NO: 2074; WAN024DJ3_at; Start 202; Stop 226
gatgatttgccgacagaacttgaag

SEQ ID NO: 159803 - DNA, 25 bp, Artificial
  probe
  misc_feature (1)..(25): SEQ ID NO: 2074; WAN024DJ3_at; Start 1369; Stop 1393
gaattgcttgaattacaggaacgac

SEQ ID NO: 159804 - DNA, 25 bp, Artificial
  probe
  misc_feature (1)..(25): SEQ ID NO: 2074; WAN024DJ3_at; Start 574; Stop 598
caactgtcaggttttccagatatgg

SEQ ID NO: 159805 - DNA, 25 bp, Artificial
  probe
  misc_feature (1)..(25): SEQ ID NO: 2200; WAN024DJ4_at; Start 434; Stop 458
tgcttttggctttctacgcaatcgg

SEQ ID NO: 159806 - DNA, 25 bp, Artificial
  probe
  misc_feature (1)..(25): SEQ ID NO: 2200; WAN024DJ4_at; Start 1036; Stop 1060
gattcgctcgaagctgctcaggcgg

SEQ ID NO: 159807 - DNA, 25 bp, Artificial
  probe
  misc_feature (1)..(25): SEQ ID NO: 2200; WAN024DJ4_at; Start 1743; Stop 1767
caaaatggctgctagaatgtacaaa

SEQ ID NO: 159808 - DNA, 25 bp, Artificial
  probe
  misc_feature (1)..(25): SEQ ID NO: 2200; WAN024DJ4_at; Start 1660; Stop 1684
tctttacaggcagaagtgcagcaag

SEQ ID NO: 159809 - DNA, 25 bp, Artificial
  probe
  misc_feature (1)..(25): SEQ ID NO: 2200; WAN024DJ4_at; Start 1677; Stop 1701
gcagcaagcagcaccgaattctcaa

SEQ ID NO: 159810 - DNA, 25 bp, Artificial
  probe
  misc_feature (1)..(25): SEQ ID NO: 2200; WAN024DJ4_at; Start 1118; Stop 1142
cagttgtttcgacagactcagtgga

SEQ ID NO: 159811 - DNA, 25 bp, Artificial
  probe
  misc_feature (1)..(25): SEQ ID NO: 2200; WAN024DJ4_at; Start 104; Stop 128
tgactgccctctttatcgctgatgg

SEQ ID NO: 159812 - DNA, 25 bp, Artificial
  probe
  misc_feature (1)..(25): SEQ ID NO: 2200; WAN024DJ4_at; Start 1142; Stop 1166
aaaaaatcattttcgcctgcgatgc

SEQ ID NO: 159813 - DNA, 25 bp, Artificial
  probe
  misc_feature (1)..(25): SEQ ID NO: 2200; WAN024DJ4_at; Start 1157; Stop 1181
cctgcgatgctggtatgggaagctc

SEQ ID NO: 159814 - DNA, 25 bp, Artificial
  probe
  misc_feature (1)..(25): SEQ ID NO: 2200; WAN024DJ4_at; Start 450; Stop 474
cgcaatcggtccagtcgtatcgact

SEQ ID NO: 159815 - DNA, 25 bp, Artificial
  probe
  misc_feature (1)..(25): SEQ ID NO: 2200; WAN024DJ4_at; Start 889; Stop 913
gcttcaccaggttctattattgcga

SEQ ID NO: 159816 - DNA, 25 bp, Artificial
  probe
  misc_feature (1)..(25): SEQ ID NO: 2200; WAN024DJ4_at; Start 715; Stop 739
ggttctgctaaatcttcttcttggg

SEQ ID NO: 159817 - DNA, 25 bp, Artificial
  probe
  misc_feature (1)..(25): SEQ ID NO: 2200; WAN024DJ4_at; Start 1450; Stop 1474
tcagcaccagtagatagtcaggaaa

SEQ ID NO: 159818 - DNA, 25 bp, Artificial
  probe
  misc_feature (1)..(25): SEQ ID NO: 2200; WAN024DJ4_at; Start 27; Stop 51
cagggttcaaaaactagggacatcg

SEQ ID NO: 159819 - DNA, 25 bp, Artificial
  probe
  misc_feature (1)..(25): SEQ ID NO: 2200; WAN024DJ4_at; Start 589; Stop 613
catggcatttttactcctctgggag

SEQ ID NO: 159820 - DNA, 25 bp, Artificial
  probe
  misc_feature (1)..(25): SEQ ID NO: 2200; WAN024DJ4_at; Start 511; Stop 535
gtcaatgctcgcctccttcctatgg

SEQ ID NO: 159821 - DNA, 25 bp, Artificial
  probe
  misc_feature (1)..(25): SEQ ID NO: 2200; WAN024DJ4_at; Start 820; Stop 844
gctgctatggcaggaggtatctctg

SEQ ID NO: 159822 - DNA, 25 bp, Artificial
  probe
  misc_feature (1)..(25): SEQ ID NO: 2200; WAN024DJ4_at; Start 1017; Stop 1041
tgcagacaagtcaactgaggattcg

SEQ ID NO: 159823 - DNA, 25 bp, Artificial
  probe
  misc_feature (1)..(25): SEQ ID NO: 2200; WAN024DJ4_at; Start 1324; Stop 1348
gacaagagtccaagtgctattcatg

SEQ ID NO: 159824 - DNA, 25 bp, Artificial
  probe
  misc_feature (1)..(25): SEQ ID NO: 2200; WAN024DJ4_at; Start 318; Stop 342
cccactgggaggatggactatcaag

SEQ ID NO: 159825 - DNA, 25 bp, Artificial
  probe
  misc_feature (1)..(25): SEQ ID NO: 2200; WAN024DJ4_at; Start 1297; Stop 1321
caggaagaactgacaccaagagcta

SEQ ID NO: 159826 - DNA, 25 bp, Artificial
  probe
  misc_feature (1)..(25): SEQ ID NO: 2200; WAN024DJ4_at; Start 1536; Stop 1560
tatgggctgtgaaacgattcgggct

SEQ ID NO: 159827 - DNA, 25 bp, Artificial
  probe
  misc_feature (1)..(25): SEQ ID NO: 2200; WAN024DJ4_at; Start 1435; Stop 1459
ggagatataccaacttcagcaccag

SEQ ID NO: 159828 - DNA, 25 bp, Artificial
  probe
  misc_feature (1)..(25): SEQ ID NO: 2200; WAN024DJ4_at; Start 625; Stop 649
gctcaagctggtaagtcaattctct

SEQ ID NO: 159829 - DNA, 25 bp, Artificial
  probe
  misc_feature (1)..(25): SEQ ID NO: 2200; WAN024DJ4_at; Start 998; Stop 1022
tagcagcccttattcttcatgcaga

SEQ ID NO: 159830 - DNA, 25 bp, Artificial
  probe
  misc_feature (1)..(25): SEQ ID NO: 2200; WAN024DJ4_at; Start 700; Stop 724
gctgtattcggtaaaggttctgcta

SEQ ID NO: 159831 - DNA, 25 bp, Artificial
  probe
  misc_feature (1)..(25): SEQ ID NO: 2200; WAN024DJ4_at; Start 535; Stop 559
gctaatattatcatcgaaccggcta

SEQ ID NO: 159832 - DNA, 25 bp, Artificial
  probe
  misc_feature (1)..(25): SEQ ID NO: 2200; WAN024DJ4_at; Start 653; Stop 677
tattggaagctaatcctggaccagg

SEQ ID NO: 159833 - DNA, 25 bp, Artificial
  probe
  misc_feature (1)..(25): SEQ ID NO: 2200; WAN024DJ4_at; Start 604; Stop 628
cctctgggagtagaacaggtagctc

SEQ ID NO: 159834 - DNA, 25 bp, Artificial
  probe
  misc_feature (1)..(25): SEQ ID NO: 2200; WAN024DJ4_at; Start 1070; Stop 1094
cagctaaggctcagtctaaaggtca

SEQ ID NO: 159835 - DNA, 25 bp, Artificial
  probe
  misc_feature (1)..(25): SEQ ID NO: 2200; WAN024DJ4_at; Start 394; Stop 418
gttaataacttctcagctggtctcg

SEQ ID NO: 159836 - DNA, 25 bp, Artificial
  probe
  misc_feature (1)..(25): SEQ ID NO: 2200; WAN024DJ4_at; Start 214; Stop 238
tatatgatccatggccaacgtggtg

SEQ ID NO: 159837 - DNA, 25 bp, Artificial
  probe
  misc_feature (1)..(25): SEQ ID NO: 2200; WAN024DJ4_at; Start 1520; Stop 1544
cacagggaactgcaactatgggctg

SEQ ID NO: 159838 - DNA, 25 bp, Artificial
  probe
  misc_feature (1)..(25): SEQ ID NO: 2200; WAN024DJ4_at; Start 296; Stop 320
ttatcggagctatggtaatgggccc

SEQ ID NO: 159839 - DNA, 25 bp, Artificial
  probe
  misc_feature (1)..(25): SEQ ID NO: 1063; WAN024DJ5_at; Start 124; Stop 148
agtgagacactagaaaaaggtccag

SEQ ID NO: 159840 - DNA, 25 bp, Artificial
  probe
  misc_feature (1)..(25): SEQ ID NO: 1063; WAN024DJ5_at; Start 56; Stop 80
tggctagccagttatcgacagtatc

SEQ ID NO: 159841 - DNA, 25 bp, Artificial
  probe
  misc_feature (1)..(25): SEQ ID NO: 1063; WAN024DJ5_at; Start 109; Stop 133
gaagaatatgaggtaagtgagacac

SEQ ID NO: 159842 - DNA, 25 bp, Artificial
  probe
  misc_feature (1)..(25): SEQ ID NO: 1063; WAN024DJ5_at; Start 60; Stop 84
tagccagttatcgacagtatctgct

SEQ ID NO: 159843 - DNA, 25 bp, Artificial
  probe
  misc_feature (1)..(25): SEQ ID NO: 1063; WAN024DJ5_at; Start 43; Stop 67
gcgagtactttattggctagccagt

SEQ ID NO: 159844 - DNA, 25 bp, Artificial
  probe
  misc_feature (1)..(25): SEQ ID NO: 1063; WAN024DJ5_at; Start 58; Stop 82
gctagccagttatcgacagtatctg

SEQ ID NO: 159845 - DNA, 25 bp, Artificial
  probe
  misc_feature (1)..(25): SEQ ID NO: 1063; WAN024DJ5_at; Start 151; Stop 175
tctaatgattcttcattatctgaga

SEQ ID NO: 159846 - DNA, 25 bp, Artificial
  probe
  misc_feature (1)..(25): SEQ ID NO: 1063; WAN024DJ5_at; Start 62; Stop 86
gccagttatcgacagtatctgcttt

SEQ ID NO: 159847 - DNA, 25 bp, Artificial
  probe
  misc_feature (1)..(25): SEQ ID NO: 1063; WAN024DJ5_at; Start 65; Stop 89
agttatcgacagtatctgctttgag

SEQ ID NO: 159848 - DNA, 25 bp, Artificial
  probe
  misc_feature (1)..(25): SEQ ID NO: 1063; WAN024DJ5_at; Start 54; Stop 78
attggctagccagttatcgacagta

SEQ ID NO: 159849 - DNA, 25 bp, Artificial
  probe
  misc_feature (1)..(25): SEQ ID NO: 1063; WAN024DJ5_at; Start 40; Stop 64
attgcgagtactttattggctagcc

SEQ ID NO: 159850 - DNA, 25 bp, Artificial
  probe
  misc_feature (1)..(25): SEQ ID NO: 1063; WAN024DJ5_at; Start 74; Stop 98
cagtatctgctttgagtgttatttc

SEQ ID NO: 159851 - DNA, 25 bp, Artificial
  probe
  misc_feature (1)..(25): SEQ ID NO: 1063; WAN024DJ5_at; Start 112; Stop 136
gaatatgaggtaagtgagacactag

SEQ ID NO: 159852 - DNA, 25 bp, Artificial
  probe
  misc_feature (1)..(25): SEQ ID NO: 1063; WAN024DJ5_at; Start 157; Stop 181
gattcttcattatctgagatttcac

SEQ ID NO: 159853 - DNA, 25 bp, Artificial
  probe
  misc_feature (1)..(25): SEQ ID NO: 1063; WAN024DJ5_at; Start 45; Stop 69
gagtactttattggctagccagtta

SEQ ID NO: 159854 - DNA, 25 bp, Artificial
  probe
  misc_feature (1)..(25): SEQ ID NO: 1063; WAN024DJ5_at; Start 44; Stop 68
cgagtactttattggctagccagtt

SEQ ID NO: 159855 - DNA, 25 bp, Artificial
  probe
  misc_feature (1)..(25): SEQ ID NO: 1063; WAN024DJ5_at; Start 115; Stop 139
tatgaggtaagtgagacactagaaa

SEQ ID NO: 159856 - DNA, 25 bp, Artificial
  probe
  misc_feature (1)..(25): SEQ ID NO: 1063; WAN024DJ5_at; Start 55; Stop 79
ttggctagccagttatcgacagtat

SEQ ID NO: 159857 - DNA, 25 bp, Artificial
  probe
  misc_feature (1)..(25): SEQ ID NO: 1063; WAN024DJ5_at; Start 161; Stop 185
cttcattatctgagatttcaccaac

SEQ ID NO: 159858 - DNA, 25 bp, Artificial
  probe
  misc_feature (1)..(25): SEQ ID NO: 1063; WAN024DJ5_at; Start 122; Stop 146
taagtgagacactagaaaaaggtcc

SEQ ID NO: 159859 - DNA, 25 bp, Artificial
  probe
  misc_feature (1)..(25): SEQ ID NO: 1063; WAN024DJ5_at; Start 50; Stop 74
ctttattggctagccagttatcgac

SEQ ID NO: 159860 - DNA, 25 bp, Artificial
  probe
  misc_feature (1)..(25): SEQ ID NO: 1063; WAN024DJ5_at; Start 53; Stop 77
tattggctagccagttatcgacagt

SEQ ID NO: 159861 - DNA, 25 bp, Artificial
  probe
  misc_feature (1)..(25): SEQ ID NO: 1063; WAN024DJ5_at; Start 79; Stop 103
tctgctttgagtgttatttctagta

SEQ ID NO: 159862 - DNA, 25 bp, Artificial
  probe
  misc_feature (1)..(25): SEQ ID NO: 1063; WAN024DJ5_at; Start 77; Stop 101
tatctgctttgagtgttatttctag

SEQ ID NO: 159863 - DNA, 25 bp, Artificial
  probe
  misc_feature (1)..(25): SEQ ID NO: 1063; WAN024DJ5_at; Start 35; Stop 59
caattattgcgagtactttattggc

SEQ ID NO: 159864 - DNA, 25 bp, Artificial
  probe
  misc_feature (1)..(25): SEQ ID NO: 1063; WAN024DJ5_at; Start 64; Stop 88
cagttatcgacagtatctgctttga

SEQ ID NO: 159865 - DNA, 25 bp, Artificial
  probe
  misc_feature (1)..(25): SEQ ID NO: 1063; WAN024DJ5_at; Start 71; Stop 95
cgacagtatctgctttgagtgttat

SEQ ID NO: 159866 - DNA, 25 bp, Artificial
  probe
  misc_feature (1)..(25): SEQ ID NO: 1063; WAN024DJ5_at; Start 39; Stop 63
tattgcgagtactttattggctagc

SEQ ID NO: 159867 - DNA, 25 bp, Artificial
  probe
  misc_feature (1)..(25): SEQ ID NO: 1063; WAN024DJ5_at; Start 26; Stop 50
tgggtatttcaattattgcgagtac

SEQ ID NO: 159868 - DNA, 25 bp, Artificial
  probe
  misc_feature (1)..(25): SEQ ID NO: 1063; WAN024DJ5_at; Start 41; Stop 65
ttgcgagtactttattggctagcca

SEQ ID NO: 159869 - DNA, 25 bp, Artificial
  probe
  misc_feature (1)..(25): SEQ ID NO: 1063; WAN024DJ5_at; Start 57; Stop 81
ggctagccagttatcgacagtatct

SEQ ID NO: 159870 - DNA, 25 bp, Artificial
  probe
  misc_feature (1)..(25): SEQ ID NO: 1063; WAN024DJ5_at; Start 48; Stop 72
tactttattggctagccagttatcg

SEQ ID NO: 159871 - DNA, 25 bp, Artificial
  probe
  misc_feature (1)..(25): SEQ ID NO: 1063; WAN024DJ5_at; Start 68; Stop 92
tatcgacagtatctgctttgagtgt

SEQ ID NO: 159872 - DNA, 25 bp, Artificial
  probe
  misc_feature (1)..(25): SEQ ID NO: 1063; WAN024DJ5_at; Start 42; Stop 66
tgcgagtactttattggctagccag

SEQ ID NO: 159873 - DNA, 25 bp, Artificial
  probe
  misc_feature (1)..(25): SEQ ID NO: 1502; WAN024DJ6_at; Start 226; Stop 250
tttgttgcggttatctatagcctct

SEQ ID NO: 159874 - DNA, 25 bp, Artificial
  probe
  misc_feature (1)..(25): SEQ ID NO: 1502; WAN024DJ6_at; Start 582; Stop 606
gcgagccctccgcaatgaacactat

SEQ ID NO: 159875 - DNA, 25 bp, Artificial
  probe
  misc_feature (1)..(25): SEQ ID NO: 1502; WAN024DJ6_at; Start 62; Stop 86
tgatggtatcagagcatttttcgcg

SEQ ID NO: 159876 - DNA, 25 bp, Artificial
  probe
  misc_feature (1)..(25): SEQ ID NO: 1502; WAN024DJ6_at; Start 29; Stop 53
tcgaagcctgtcttctgacaggagc

SEQ ID NO: 159877 - DNA, 25 bp, Artificial
  probe
  misc_feature (1)..(25): SEQ ID NO: 1502; WAN024DJ6_at; Start 407; Stop 431
gcttcatgggcaaggacactattca

SEQ ID NO: 159878 - DNA, 25 bp, Artificial
  probe
  misc_feature (1)..(25): SEQ ID NO: 1502; WAN024DJ6_at; Start 334; Stop 358
aatcgttggtttggaaatcttcatc

SEQ ID NO: 159879 - DNA, 25 bp, Artificial
  probe
  misc_feature (1)..(25): SEQ ID NO: 1502; WAN024DJ6_at; Start 255; Stop 279
tctttacccgatgatgaaccaggaa

SEQ ID NO: 159880 - DNA, 25 bp, Artificial
  probe
  misc_feature (1)..(25): SEQ ID NO: 1502; WAN024DJ6_at; Start 662; Stop 686
ccactatgattggtgatgtggaggt

SEQ ID NO: 159881 - DNA, 25 bp, Artificial
  probe
  misc_feature (1)..(25): SEQ ID NO: 1502; WAN024DJ6_at; Start 417; Stop 441
caaggacactattcatctggagagg

SEQ ID NO: 159882 - DNA, 25 bp, Artificial
  probe
  misc_feature (1)..(25): SEQ ID NO: 1502; WAN024DJ6_at; Start 393; Stop 417
tatcaatctctttcgcttcatgggc

SEQ ID NO: 159883 - DNA, 25 bp, Artificial
  probe
  misc_feature (1)..(25): SEQ ID NO: 1502; WAN024DJ6_at; Start 360; Stop 384
tttttcaagctaccagacttgccaa

SEQ ID NO: 159884 - DNA, 25 bp, Artificial
  probe
  misc_feature (1)..(25): SEQ ID NO: 1502; WAN024DJ6_at; Start 488; Stop 512
taggaacgaccaaaatcatcgtacc

SEQ ID NO: 159885 - DNA, 25 bp, Artificial
  probe
  misc_feature (1)..(25): SEQ ID NO: 1502; WAN024DJ6_at; Start 241; Stop 265
tatagcctctttcttctttacccga

SEQ ID NO: 159886 - DNA, 25 bp, Artificial
  probe
  misc_feature (1)..(25): SEQ ID NO: 1502; WAN024DJ6_at; Start 82; Stop 106
tcgcgttttctgctgatactattcc

SEQ ID NO: 159887 - DNA, 25 bp, Artificial
  probe
  misc_feature (1)..(25): SEQ ID NO: 1502; WAN024DJ6_at; Start 531; Stop 555
tctcagcgttaactgtctctatggg

SEQ ID NO: 159888 - DNA, 25 bp, Artificial
  probe
  misc_feature (1)..(25): SEQ ID NO: 1502; WAN024DJ6_at; Start 446; Stop 470
tcttaaccaatcatgacaatgtcat

SEQ ID NO: 159889 - DNA, 25 bp, Artificial
  probe
  misc_feature (1)..(25): SEQ ID NO: 1502; WAN024DJ6_at; Start 47; Stop 71
caggagctctgattttgatggtatc

SEQ ID NO: 159890 - DNA, 25 bp, Artificial
  probe
  misc_feature (1)..(25): SEQ ID NO: 1502; WAN024DJ6_at; Start 302; Stop 326
ttgaagaggtcgtgacggttaagaa

SEQ ID NO: 159891 - DNA, 25 bp, Artificial
  probe
  misc_feature (1)..(25): SEQ ID NO: 1502; WAN024DJ6_at; Start 613; Stop 637
gaaacaaaagactatctcaagagta

SEQ ID NO: 159892 - DNA, 25 bp, Artificial
  probe
  misc_feature (1)..(25): SEQ ID NO: 1502; WAN024DJ6_at; Start 627; Stop 651
tctcaagagtaacaagagtgtcaag

SEQ ID NO: 159893 - DNA, 25 bp, Artificial
  probe
  misc_feature (1)..(25): SEQ ID NO: 1502; WAN024DJ6_at; Start 146; Stop 170
gaaataatcttcttttagtagcggc

SEQ ID NO: 159894 - DNA, 25 bp, Artificial
  probe
  misc_feature (1)..(25): SEQ ID NO: 1502; WAN024DJ6_at; Start 130; Stop 154
tacactggtaaagagggaaataatc

SEQ ID NO: 159895 - DNA, 25 bp, Artificial
  probe
  misc_feature (1)..(25): SEQ ID NO: 1502; WAN024DJ6_at; Start 286; Stop 310
cagaccaatttggtttttgaagagg

SEQ ID NO: 159896 - DNA, 25 bp, Artificial
  probe
  misc_feature (1)..(25): SEQ ID NO: 1502; WAN024DJ6_at; Start 14; Stop 38
aaatctttttatttatcgaagcctg

SEQ ID NO: 159897 - DNA, 25 bp, Artificial
  probe
  misc_feature (1)..(25): SEQ ID NO: 1502; WAN024DJ6_at; Start 649; Stop 673
aagattttcttgaccactatgattg

SEQ ID NO: 159898 - DNA, 25 bp, Artificial
  probe
  misc_feature (1)..(25): SEQ ID NO: 1502; WAN024DJ6_at; Start 114; Stop 138
gcttttgattcgctactacactggt

SEQ ID NO: 159899 - DNA, 25 bp, Artificial
  probe
  misc_feature (1)..(25): SEQ ID NO: 1502; WAN024DJ6_at; Start 161; Stop 185
tagtagcggcaaccattctcttctt

SEQ ID NO: 159900 - DNA, 25 bp, Artificial
  probe
  misc_feature (1)..(25): SEQ ID NO: 1502; WAN024DJ6_at; Start 189; Stop 213
catcgttatgctcaatccttttgtg

SEQ ID NO: 159901 - DNA, 25 bp, Artificial
  probe
  misc_feature (1)..(25): SEQ ID NO: 1502; WAN024DJ6_at; Start 210; Stop 234
tgtgattctagctatttttgttgcg

SEQ ID NO: 159902 - DNA, 25 bp, Artificial
  probe
  misc_feature (1)..(25): SEQ ID NO: 1502; WAN024DJ6_at; Start 517; Stop 541
gatgtggaagtcagtctcagcgtta

SEQ ID NO: 159903 - DNA, 25 bp, Artificial
  probe
  misc_feature (1)..(25): SEQ ID NO: 1502; WAN024DJ6_at; Start 269; Stop 293
tgaaccaggaaaaagagcagaccaa

SEQ ID NO: 159904 - DNA, 25 bp, Artificial
  probe
  misc_feature (1)..(25): SEQ ID NO: 1502; WAN024DJ6_at; Start 504; Stop 528
catcgtacctgtagatgtggaagtc

SEQ ID NO: 159905 - DNA, 25 bp, Artificial
  probe
  misc_feature (1)..(25): SEQ ID NO: 1502; WAN024DJ6_at; Start 598; Stop 622
gaacactatcatcaagaaacaaaag

SEQ ID NO: 159906 - DNA, 25 bp, Artificial
  probe
  misc_feature (1)..(25): SEQ ID NO: 1502; WAN024DJ6_at; Start 430; Stop 454
catctggagagggtcatcttaacca

SEQ ID NO: 159907 - DNA, 25 bp, Artificial
  probe
  misc_feature (1)..(25): SEQ ID NO: 2329; WAN024DJ7_at; Start 172; Stop 196
gacgaattttacatcaatggtcagc

SEQ ID NO: 159908 - DNA, 25 bp, Artificial
  probe
  misc_feature (1)..(25): SEQ ID NO: 2329; WAN024DJ7_at; Start 490; Stop 514
gagacagacttgaaactagctatga

SEQ ID NO: 159909 - DNA, 25 bp, Artificial
  probe
  misc_feature (1)..(25): SEQ ID NO: 2329; WAN024DJ7_at; Start 539; Stop 563
aaaaaccaatctctagccgtgacgg

SEQ ID NO: 159910 - DNA, 25 bp, Artificial
  probe
  misc_feature (1)..(25): SEQ ID NO: 2329; WAN024DJ7_at; Start 75; Stop 99
aaaagagatggtgcctgctactagc

SEQ ID NO: 159911 - DNA, 25 bp, Artificial
  probe
  misc_feature (1)..(25): SEQ ID NO: 2329; WAN024DJ7_at; Start 822; Stop 846
catggatgctggtcccaatgttaag

SEQ ID NO: 159912 - DNA, 25 bp, Artificial
  probe
  misc_feature (1)..(25): SEQ ID NO: 2329; WAN024DJ7_at; Start 273; Stop 297
tatcgatactcaaaacaatatgcct

SEQ ID NO: 159913 - DNA, 25 bp, Artificial
  probe
  misc_feature (1)..(25): SEQ ID NO: 2329; WAN024DJ7_at; Start 424; Stop 448
tcttctcggagtttttatggaccac

SEQ ID NO: 159914 - DNA, 25 bp, Artificial
  probe
  misc_feature (1)..(25): SEQ ID NO: 2329; WAN024DJ7_at; Start 803; Stop 827
gagaggcctgctactttaccatgga

SEQ ID NO: 159915 - DNA, 25 bp, Artificial
  probe
  misc_feature (1)..(25): SEQ ID NO: 2329; WAN024DJ7_at; Start 123; Stop 147
tatgtatacagagacgaccttgtcg

SEQ ID NO: 159916 - DNA, 25 bp, Artificial
  probe
  misc_feature (1)..(25): SEQ ID NO: 2329; WAN024DJ7_at; Start 142; Stop 166
ttgtcgcctttaccagccaatgtaa

SEQ ID NO: 159917 - DNA, 25 bp, Artificial
  probe
  misc_feature (1)..(25): SEQ ID NO: 2329; WAN024DJ7_at; Start 599; Stop 623
acgactgggttcgtcagtctgagaa

SEQ ID NO: 159918 - DNA, 25 bp, Artificial
  probe
  misc_feature (1)..(25): SEQ ID NO: 2329; WAN024DJ7_at; Start 249; Stop 273
tccagctggtgagggctttgtccgt

SEQ ID NO: 159919 - DNA, 25 bp, Artificial
  probe
  misc_feature (1)..(25): SEQ ID NO: 2329; WAN024DJ7_at; Start 186; Stop 210
caatggtcagctacaaaatgaggtc

SEQ ID NO: 159920 - DNA, 25 bp, Artificial
  probe
  misc_feature (1)..(25): SEQ ID NO: 2329; WAN024DJ7_at; Start 157; Stop 181
gccaatgtaacagctgacgaatttt

SEQ ID NO: 159921 - DNA, 25 bp, Artificial
  probe
  misc_feature (1)..(25): SEQ ID NO: 2329; WAN024DJ7_at; Start 317; Stop 341
caagttctagtggtttgtccgccct

SEQ ID NO: 159922 - DNA, 25 bp, Artificial
  probe
  misc_feature (1)..(25): SEQ ID NO: 2329; WAN024DJ7_at; Start 616; Stop 640
tctgagaaggactatcaggatatgc

SEQ ID NO: 159923 - DNA, 25 bp, Artificial
  probe
  misc_feature (1)..(25): SEQ ID NO: 2329; WAN024DJ7_at; Start 20; Stop 44
cagtacgttcctacgcaaatattgc

SEQ ID NO: 159924 - DNA, 25 bp, Artificial
  probe
  misc_feature (1)..(25): SEQ ID NO: 2329; WAN024DJ7_at; Start 455; Stop 479
cctgggataaggatagtggagaaat

SEQ ID NO: 159925 - DNA, 25 bp, Artificial
  probe
  misc_feature (1)..(25): SEQ ID NO: 2329; WAN024DJ7_at; Start 439; Stop 463
tatggaccactaggagcctgggata

SEQ ID NO: 159926 - DNA, 25 bp, Artificial
  probe
  misc_feature (1)..(25): SEQ ID NO: 2329; WAN024DJ7_at; Start 510; Stop 534
tatgattatgttggtgctagaggac

SEQ ID NO: 159927 - DNA, 25 bp, Artificial
  probe
  misc_feature (1)..(25): SEQ ID NO: 2329; WAN024DJ7_at; Start 234; Stop 258
tattgaccgttatcgtccagctggt

SEQ ID NO: 159928 - DNA, 25 bp, Artificial
  probe
  misc_feature (1)..(25): SEQ ID NO: 2329; WAN024DJ7_at; Start 366; Stop 390
caagcttggattggatagaagtcag

SEQ ID NO: 159929 - DNA, 25 bp, Artificial
  probe
  misc_feature (1)..(25): SEQ ID NO: 2329; WAN024DJ7_at; Start 218; Stop 242
ccaagatgagtaagattattgaccg

SEQ ID NO: 159930 - DNA, 25 bp, Artificial
  probe
  misc_feature (1)..(25): SEQ ID NO: 2329; WAN024DJ7_at; Start 199; Stop 223
caaaatgaggtcgagcatgccaaga

SEQ ID NO: 159931 - DNA, 25 bp, Artificial
  probe
  misc_feature (1)..(25): SEQ ID NO: 2329; WAN024DJ7_at; Start 837; Stop 861
caatgttaaggtcttctgtcaggag

SEQ ID NO: 159932 - DNA, 25 bp, Artificial
  probe
  misc_feature (1)..(25): SEQ ID NO: 2329; WAN024DJ7_at; Start 787; Stop 811
cagcttcgtgagaaaggagaggcct

SEQ ID NO: 159933 - DNA, 25 bp, Artificial
  probe
  misc_feature (1)..(25): SEQ ID NO: 2329; WAN024DJ7_at; Start 473; Stop 497
gagaaatttaccctgtagagacaga

SEQ ID NO: 159934 - DNA, 25 bp, Artificial
  probe
  misc_feature (1)..(25): SEQ ID NO: 2329; WAN024DJ7_at; Start 566; Stop 590
tgaaactttgtgtggaaacctcgac

SEQ ID NO: 159935 - DNA, 25 bp, Artificial
  probe
  misc_feature (1)..(25): SEQ ID NO: 2329; WAN024DJ7_at; Start 851; Stop 875
tctgtcaggagaaagacttggagca

SEQ ID NO: 159936 - DNA, 25 bp, Artificial
  probe
  misc_feature (1)..(25): SEQ ID NO: 2329; WAN024DJ7_at; Start 703; Stop 727
gctatgcatgctacgacaaagactg

SEQ ID NO: 159937 - DNA, 25 bp, Artificial
  probe
  misc_feature (1)..(25): SEQ ID NO: 2329; WAN024DJ7_at; Start 525; Stop 549
gctagaggacaagaaaaaaccaatc

SEQ ID NO: 159938 - DNA, 25 bp, Artificial
  probe
  misc_feature (1)..(25): SEQ ID NO: 2329; WAN024DJ7_at; Start 667; Stop 691
gccaagattggagaattaacggaga

SEQ ID NO: 159939 - DNA, 25 bp, Artificial
  probe
  misc_feature (1)..(25): SEQ ID NO: 2329; WAN024DJ7_at; Start 745; Stop 769
tatctgacggatgcctcttatgagg

SEQ ID NO: 159940 - DNA, 25 bp, Artificial
  probe
  misc_feature (1)..(25): SEQ ID NO: 2329; WAN024DJ7_at; Start 552; Stop 576
tagccgtgacgggatgaaactttgt

SEQ ID NO: 159941 - DNA, 25 bp, Artificial
  probe
  misc_feature (1)..(25): SEQ ID NO: 5295; WAN024DJ8_at; Start 822; Stop 846
ggaaattgctaaggccaatgctcag

SEQ ID NO: 159942 - DNA, 25 bp, Artificial
  probe
  misc_feature (1)..(25): SEQ ID NO: 5295; WAN024DJ8_at; Start 1100; Stop 1124
tatacaacggaaccttgaaagtgga

SEQ ID NO: 159943 - DNA, 25 bp, Artificial
  probe
  misc_feature (1)..(25): SEQ ID NO: 5295; WAN024DJ8_at; Start 1038; Stop 1062
cctgactagtgatgaagcttttgaa

SEQ ID NO: 159944 - DNA, 25 bp, Artificial
  probe
  misc_feature (1)..(25): SEQ ID NO: 5295; WAN024DJ8_at; Start 870; Stop 894
tacttttaagcagatgcgcgtgcag

SEQ ID NO: 159945 - DNA, 25 bp, Artificial
  probe
  misc_feature (1)..(25): SEQ ID NO: 5295; WAN024DJ8_at; Start 1004; Stop 1028
tatttgcaccgctgaaaacttggag

SEQ ID NO: 159946 - DNA, 25 bp, Artificial
  probe
  misc_feature (1)..(25): SEQ ID NO: 5295; WAN024DJ8_at; Start 386; Stop 410
agaaacactatgctcgcccagaagg

SEQ ID NO: 159947 - DNA, 25 bp, Artificial
  probe
  misc_feature (1)..(25): SEQ ID NO: 5295; WAN024DJ8_at; Start 170; Stop 194
ggcttcgggcagcagatcgtatcaa

SEQ ID NO: 159948 - DNA, 25 bp, Artificial
  probe
  misc_feature (1)..(25): SEQ ID NO: 5295; WAN024DJ8_at; Start 933; Stop 957
caatccgccttatggtgaacgtttg

SEQ ID NO: 159949 - DNA, 25 bp, Artificial
  probe
  misc_feature (1)..(25): SEQ ID NO: 5295; WAN024DJ8_at; Start 808; Stop 832
gatgctcgcatggtggaaattgcta

SEQ ID NO: 159950 - DNA, 25 bp, Artificial
  probe
  misc_feature (1)..(25): SEQ ID NO: 5295; WAN024DJ8_at; Start 706; Stop 730
gaatggaactggatcagcgatcgct

SEQ ID NO: 159951 - DNA, 25 bp, Artificial
  probe
  misc_feature (1)..(25): SEQ ID NO: 5295; WAN024DJ8_at; Start 1071; Stop 1095
tggtagccaagcagataagaagcgt

SEQ ID NO: 159952 - DNA, 25 bp, Artificial
  probe
  misc_feature (1)..(25): SEQ ID NO: 5295; WAN024DJ8_at; Start 735; Stop 759
tcaagaagtgcgcacagaagcggct

SEQ ID NO: 159953 - DNA, 25 bp, Artificial
  probe
  misc_feature (1)..(25): SEQ ID NO: 5295; WAN024DJ8_at; Start 1086; Stop 1110
taagaagcgtaagttatacaacgga

SEQ ID NO: 159954 - DNA, 25 bp, Artificial
  probe
  misc_feature (1)..(25): SEQ ID NO: 5295; WAN024DJ8_at; Start 948; Stop 972
tgaacgtttgtcagatgatgcaggg

SEQ ID NO: 159955 - DNA, 25 bp, Artificial
  probe
  misc_feature (1)..(25): SEQ ID NO: 5295; WAN024DJ8_at; Start 121; Stop 145
cgtgttcgttttcaaggagacgtga

SEQ ID NO: 159956 - DNA, 25 bp, Artificial
  probe
  misc_feature (1)..(25): SEQ ID NO: 5295; WAN024DJ8_at; Start 450; Stop 474
ggtctctattctcaaagatgtggca

SEQ ID NO: 159957 - DNA, 25 bp, Artificial
  probe
  misc_feature (1)..(25): SEQ ID NO: 5295; WAN024DJ8_at; Start 598; Stop 622
gacaagcctttgattgatccgacct

SEQ ID NO: 159958 - DNA, 25 bp, Artificial
  probe
  misc_feature (1)..(25): SEQ ID NO: 5295; WAN024DJ8_at; Start 1055; Stop 1079
cttttgaaagcaagtatggtagcca

SEQ ID NO: 159959 - DNA, 25 bp, Artificial
  probe
  misc_feature (1)..(25): SEQ ID NO: 5295; WAN024DJ8_at; Start 561; Stop 585
ggcagcagccattttacaactttct

SEQ ID NO: 159960 - DNA, 25 bp, Artificial
  probe
  misc_feature (1)..(25): SEQ ID NO: 5295; WAN024DJ8_at; Start 92; Stop 116
tgggctacgattgtcaggttgaaaa

SEQ ID NO: 159961 - DNA, 25 bp, Artificial
  probe
  misc_feature (1)..(25): SEQ ID NO: 5295; WAN024DJ8_at; Start 1143; Stop 1167
tcagcgtgtcaaacggcaagaggta

SEQ ID NO: 159962 - DNA, 25 bp, Artificial
  probe
  misc_feature (1)..(25): SEQ ID NO: 5295; WAN024DJ8_at; Start 974; Stop 998
tgaccaagctctatgctgagatggg

SEQ ID NO: 159963 - DNA, 25 bp, Artificial
  probe
  misc_feature (1)..(25): SEQ ID NO: 5295; WAN024DJ8_at; Start 206; Stop 230
gaacgttcccagctaagacttttga

SEQ ID NO: 159964 - DNA, 25 bp, Artificial
  probe
  misc_feature (1)..(25): SEQ ID NO: 5295; WAN024DJ8_at; Start 286; Stop 310
gctcggttcccgatttcaaaagcta

SEQ ID NO: 159965 - DNA, 25 bp, Artificial
  probe
  misc_feature (1)..(25): SEQ ID NO: 5295; WAN024DJ8_at; Start 850; Stop 874
gctggtgttgcaggagacattactt

SEQ ID NO: 159966 - DNA, 25 bp, Artificial
  probe
  misc_feature (1)..(25): SEQ ID NO: 5295; WAN024DJ8_at; Start 919; Stop 943
ggagtaatcatttccaatccgcctt

SEQ ID NO: 159967 - DNA, 25 bp, Artificial
  probe
  misc_feature (1)..(25): SEQ ID NO: 5295; WAN024DJ8_at; Start 546; Stop 570
tatcaaggaaaatatggcagcagcc

SEQ ID NO: 159968 - DNA, 25 bp, Artificial
  probe
  misc_feature (1)..(25): SEQ ID NO: 5295; WAN024DJ8_at; Start 479; Stop 503
tcatgattgatacgaccgggtctag

SEQ ID NO: 159969 - DNA, 25 bp, Artificial
  probe
  misc_feature (1)..(25): SEQ ID NO: 5295; WAN024DJ8_at; Start 317; Stop 341
ttaagtccaaacttcacaatgagcc

SEQ ID NO: 159970 - DNA, 25 bp, Artificial
  probe
  misc_feature (1)..(25): SEQ ID NO: 5295; WAN024DJ8_at; Start 267; Stop 291
aaattatttaccacttggagctcgg

SEQ ID NO: 159971 - DNA, 25 bp, Artificial
  probe
  misc_feature (1)..(25): SEQ ID NO: 5295; WAN024DJ8_at; Start 667; Stop 691
aagatggcgccaggtcttcgtcgct

SEQ ID NO: 159972 - DNA, 25 bp, Artificial
  probe
  misc_feature (1)..(25): SEQ ID NO: 5295; WAN024DJ8_at; Start 887; Stop 911
gcgtgcaggatttacgttccgataa

SEQ ID NO: 159973 - DNA, 25 bp, Artificial
  probe
  misc_feature (1)..(25): SEQ ID NO: 5295; WAN024DJ8_at; Start 653; Stop 677
ttatgattgctagaaagatggcgcc

SEQ ID NO: 159974 - DNA, 25 bp, Artificial
  probe
  misc_feature (1)..(25): SEQ ID NO: 5295; WAN024DJ8_at; Start 363; Stop 387
gaaagctgttgtcaagaaattgcag

SEQ ID NO: 159975 - DNA, 25 bp, Artificial
  probe
  misc_feature (1)..(25): SEQ ID NO: 2490; WAN024DJ9_at; Start 380; Stop 404
cgactagttcctatcttttttatga

SEQ ID NO: 159976 - DNA, 25 bp, Artificial
  probe
  misc_feature (1)..(25): SEQ ID NO: 2490; WAN024DJ9_at; Start 101; Stop 125
atttagaggctatggcagcagatgg

SEQ ID NO: 159977 - DNA, 25 bp, Artificial
  probe
  misc_feature (1)..(25): SEQ ID NO: 2490; WAN024DJ9_at; Start 2; Stop 26
tggctacagctttggttttaggcta

SEQ ID NO: 159978 - DNA, 25 bp, Artificial
  probe
  misc_feature (1)..(25): SEQ ID NO: 2490; WAN024DJ9_at; Start 453; Stop 477
tcaagaggactattttataaagaga

SEQ ID NO: 159979 - DNA, 25 bp, Artificial
  probe
  misc_feature (1)..(25): SEQ ID NO: 2490; WAN024DJ9_at; Start 276; Stop 300
gaaactgagtcgctttaagcaggta

SEQ ID NO: 159980 - DNA, 25 bp, Artificial
  probe
  misc_feature (1)..(25): SEQ ID NO: 2490; WAN024DJ9_at; Start 293; Stop 317
agcaggtagactttgtcaaatatgc

SEQ ID NO: 159981 - DNA, 25 bp, Artificial
  probe
  misc_feature (1)..(25): SEQ ID NO: 2490; WAN024DJ9_at; Start 210; Stop 234
tttccagttggccaccatttttgct

SEQ ID NO: 159982 - DNA, 25 bp, Artificial
  probe
  misc_feature (1)..(25): SEQ ID NO: 2490; WAN024DJ9_at; Start 286; Stop 310
cgctttaagcaggtagactttgtca

SEQ ID NO: 159983 - DNA, 25 bp, Artificial
  probe
  misc_feature (1)..(25): SEQ ID NO: 2490; WAN024DJ9_at; Start 218; Stop 242
tggccaccatttttgcttttgaaac

SEQ ID NO: 159984 - DNA, 25 bp, Artificial
  probe
  misc_feature (1)..(25): SEQ ID NO: 2490; WAN024DJ9_at; Start 96; Stop 120
taaagatttagaggctatggcagca

SEQ ID NO: 159985 - DNA, 25 bp, Artificial
  probe
  misc_feature (1)..(25): SEQ ID NO: 2490; WAN024DJ9_at; Start 265; Stop 289
ggcaatcagatgaaactgagtcgct

SEQ ID NO: 159986 - DNA, 25 bp, Artificial
  probe
  misc_feature (1)..(25): SEQ ID NO: 2490; WAN024DJ9_at; Start 365; Stop 389
ttttgctggaaaacacgactagttc

SEQ ID NO: 159987 - DNA, 25 bp, Artificial
  probe
  misc_feature (1)..(25): SEQ ID NO: 2490; WAN024DJ9_at; Start 248; Stop 272
gggaaaattggaatgaaggcaatca

SEQ ID NO: 159988 - DNA, 25 bp, Artificial
  probe
  misc_feature (1)..(25): SEQ ID NO: 2490; WAN024DJ9_at; Start 438; Stop 462
ccaaaagatgaaaaatcaagaggac

SEQ ID NO: 159989 - DNA, 25 bp, Artificial
  probe
  misc_feature (1)..(25): SEQ ID NO: 2490; WAN024DJ9_at; Start 258; Stop 282
gaatgaaggcaatcagatgaaactg

SEQ ID NO: 159990 - DNA, 25 bp, Artificial
  probe
  misc_feature (1)..(25): SEQ ID NO: 2490; WAN024DJ9_at; Start 371; Stop 395
tggaaaacacgactagttcctatct

SEQ ID NO: 159991 - DNA, 25 bp, Artificial
  probe
  misc_feature (1)..(25): SEQ ID NO: 2490; WAN024DJ9_at; Start 125; Stop 149
gggtgtcttggcttgtgtttacagg

SEQ ID NO: 159992 - DNA, 25 bp, Artificial
  probe
  misc_feature (1)..(25): SEQ ID NO: 2490; WAN024DJ9_at; Start 331; Stop 355
gaacacaaggggcagttaagagatt

SEQ ID NO: 159993 - DNA, 25 bp, Artificial
  probe
  misc_feature (1)..(25): SEQ ID NO: 2490; WAN024DJ9_at; Start 271; Stop 295
cagatgaaactgagtcgctttaagc

SEQ ID NO: 159994 - DNA, 25 bp, Artificial
  probe
  misc_feature (1)..(25): SEQ ID NO: 2490; WAN024DJ9_at; Start 46; Stop 70
ttattttctgataaggatcctcgtc

SEQ ID NO: 159995 - DNA, 25 bp, Artificial
  probe
  misc_feature (1)..(25): SEQ ID NO: 2490; WAN024DJ9_at; Start 60; Stop 84
ggatcctcgtcttaaattgattaaa

SEQ ID NO: 159996 - DNA, 25 bp, Artificial
  probe
  misc_feature (1)..(25): SEQ ID NO: 2490; WAN024DJ9_at; Start 459; Stop 483
ggactattttataaagagattaaca

SEQ ID NO: 159997 - DNA, 25 bp, Artificial
  probe
  misc_feature (1)..(25): SEQ ID NO: 2490; WAN024DJ9_at; Start 491; Stop 515
aattaaatgaacttgctgaaaattt

SEQ ID NO: 159998 - DNA, 25 bp, Artificial
  probe
  misc_feature (1)..(25): SEQ ID NO: 2490; WAN024DJ9_at; Start 176; Stop 200
tagaggttgctcaggagatgaaaac

SEQ ID NO: 159999 - DNA, 25 bp, Artificial
  probe
  misc_feature (1)..(25): SEQ ID NO: 2490; WAN024DJ9_at; Start 202; Stop 226
gaatacggtttccagttggccacca

SEQ ID NO: 160000 - DNA, 25 bp, Artificial
  probe
  misc_feature (1)..(25): SEQ ID NO: 2490; WAN024DJ9_at; Start 20; Stop 44
taggctattctgcttttgatttggg

SEQ ID NO: 160001 - DNA, 25 bp, Artificial
  probe
  misc_feature (1)..(25): SEQ ID NO: 2490; WAN024DJ9_at; Start 405; Stop 429
tgaagaaaatgaaacaaaactagct

SEQ ID NO: 160002 - DNA, 25 bp, Artificial
  probe
  misc_feature (1)..(25): SEQ ID NO: 2490; WAN024DJ9_at; Start 423; Stop 447
actagcttatttttaccaaaagatg

SEQ ID NO: 160003 - DNA, 25 bp, Artificial
  probe
  misc_feature (1)..(25): SEQ ID NO: 2490; WAN024DJ9_at; Start 55; Stop 79
gataaggatcctcgtcttaaattga

SEQ ID NO: 160004 - DNA, 25 bp, Artificial
  probe
  misc_feature (1)..(25): SEQ ID NO: 2490; WAN024DJ9_at; Start 225; Stop 249
catttttgcttttgaaacccatggg

SEQ ID NO: 160005 - DNA, 25 bp, Artificial
  probe
  misc_feature (1)..(25): SEQ ID NO: 2490; WAN024DJ9_at; Start 388; Stop 412
tcctatcttttttatgatgaagaaa

SEQ ID NO: 160006 - DNA, 25 bp, Artificial
  probe
  misc_feature (1)..(25): SEQ ID NO: 2490; WAN024DJ9_at; Start 163; Stop 187
gaatattgggttttagaggttgctc

SEQ ID NO: 160007 - DNA, 25 bp, Artificial
  probe
  misc_feature (1)..(25): SEQ ID NO: 2490; WAN024DJ9_at; Start 8; Stop 32
cagctttggttttaggctattctgc

SEQ ID NO: 160008 - DNA, 25 bp, Artificial
  probe
  misc_feature (1)..(25): SEQ ID NO: 2490; WAN024DJ9_at; Start 84; Stop 108
aaaagcgatacgtaaagatttagag

SEQ ID NO: 160009 - DNA, 25 bp, Artificial
  probe
  misc_feature (1)..(25): SEQ ID NO: 6363; WAN024DJA_at; Start 384; Stop 408
cttttcccaagctctattactgtat

SEQ ID NO: 160010 - DNA, 25 bp, Artificial
  probe
  misc_feature (1)..(25): SEQ ID NO: 6363; WAN024DJA_at; Start 389; Stop 413
cccaagctctattactgtattcctc

SEQ ID NO: 160011 - DNA, 25 bp, Artificial
  probe
  misc_feature (1)..(25): SEQ ID NO: 6363; WAN024DJA_at; Start 337; Stop 361
atcgtaatcaaaagtcttcctccaa

SEQ ID NO: 160012 - DNA, 25 bp, Artificial
  probe
  misc_feature (1)..(25): SEQ ID NO: 6363; WAN024DJA_at; Start 385; Stop 409
ttttcccaagctctattactgtatt

SEQ ID NO: 160013 - DNA, 25 bp, Artificial
  probe
  misc_feature (1)..(25): SEQ ID NO: 6363; WAN024DJA_at; Start 392; Stop 416
aagctctattactgtattcctcata

SEQ ID NO: 160014 - DNA, 25 bp, Artificial
  probe
  misc_feature (1)..(25): SEQ ID NO: 6363; WAN024DJA_at; Start 338; Stop 362
tcgtaatcaaaagtcttcctccaaa

SEQ ID NO: 160015 - DNA, 25 bp, Artificial
  probe
  misc_feature (1)..(25): SEQ ID NO: 6363; WAN024DJA_at; Start 381; Stop 405
aaccttttcccaagctctattactg

SEQ ID NO: 160016 - DNA, 25 bp, Artificial
  probe
  misc_feature (1)..(25): SEQ ID NO: 6363; WAN024DJA_at; Start 382; Stop 406
accttttcccaagctctattactgt

SEQ ID NO: 160017 - DNA, 25 bp, Artificial
  probe
  misc_feature (1)..(25): SEQ ID NO: 6363; WAN024DJA_at; Start 387; Stop 411
ttcccaagctctattactgtattcc

SEQ ID NO: 160018 - DNA, 25 bp, Artificial
  probe
  misc_feature (1)..(25): SEQ ID NO: 6363; WAN024DJA_at; Start 386; Stop 410
tttcccaagctctattactgtattc

SEQ ID NO: 160019 - DNA, 25 bp, Artificial
  probe
  misc_feature (1)..(25): SEQ ID NO: 6363; WAN024DJA_at; Start 391; Stop 415
caagctctattactgtattcctcat

SEQ ID NO: 160020 - DNA, 25 bp, Artificial
  probe
  misc_feature (1)..(25): SEQ ID NO: 6363; WAN024DJA_at; Start 388; Stop 412
tcccaagctctattactgtattcct

SEQ ID NO: 160021 - DNA, 25 bp, Artificial
  probe
  misc_feature (1)..(25): SEQ ID NO: 6363; WAN024DJA_at; Start 390; Stop 414
ccaagctctattactgtattcctca

SEQ ID NO: 160022 - DNA, 25 bp, Artificial
  probe
  misc_feature (1)..(25): SEQ ID NO: 6363; WAN024DJA_at; Start 383; Stop 407
ccttttcccaagctctattactgta

SEQ ID NO: 160023 - DNA, 25 bp, Artificial
  probe
  misc_feature (1)..(25): SEQ ID NO: 6363; WAN024DJA_at; Start 393; Stop 417
agctctattactgtattcctcataa

SEQ ID NO: 160024 - DNA, 25 bp, Artificial
  probe
  misc_feature (1)..(25): SEQ ID NO: 7353; WAN024DJB_at; Start 24; Stop 48
taaacttgttattgatgaggagata

SEQ ID NO: 160025 - DNA, 25 bp, Artificial
  probe
  misc_feature (1)..(25): SEQ ID NO: 7353; WAN024DJB_at; Start 171; Stop 195
tattaacatatttacaaccaaagta

SEQ ID NO: 160026 - DNA, 25 bp, Artificial
  probe
  misc_feature (1)..(25): SEQ ID NO: 7353; WAN024DJB_at; Start 316; Stop 340
tattccatacaagtcttgatagcag

SEQ ID NO: 160027 - DNA, 25 bp, Artificial
  probe
  misc_feature (1)..(25): SEQ ID NO: 7353; WAN024DJB_at; Start 229; Stop 253
tacagtaatagagcttgggaaaagg

SEQ ID NO: 160028 - DNA, 25 bp, Artificial
  probe
  misc_feature (1)..(25): SEQ ID NO: 7353; WAN024DJB_at; Start 100; Stop 124
gaaagttacagtaatcaatctgaaa

SEQ ID NO: 160029 - DNA, 25 bp, Artificial
  probe
  misc_feature (1)..(25): SEQ ID NO: 7353; WAN024DJB_at; Start 291; Stop 315
gattacgattgtacaagtatcatta

SEQ ID NO: 160030 - DNA, 25 bp, Artificial
  probe
  misc_feature (1)..(25): SEQ ID NO: 7353; WAN024DJB_at; Start 33; Stop 57
tattgatgaggagataagatacgag

SEQ ID NO: 160031 - DNA, 25 bp, Artificial
  probe
  misc_feature (1)..(25): SEQ ID NO: 7353; WAN024DJB_at; Start 340; Stop 364
gcttcaactgaagatgtatcaaact

SEQ ID NO: 160032 - DNA, 25 bp, Artificial
  probe
  misc_feature (1)..(25): SEQ ID NO: 7353; WAN024DJB_at; Start 145; Stop 169
tatagagacgtcgttaataggctaa

SEQ ID NO: 160033 - DNA, 25 bp, Artificial
  probe
  misc_feature (1)..(25): SEQ ID NO: 7353; WAN024DJB_at; Start 39; Stop 63
tgaggagataagatacgaggataaa

SEQ ID NO: 160034 - DNA, 25 bp, Artificial
  probe
  misc_feature (1)..(25): SEQ ID NO: 7353; WAN024DJB_at; Start 332; Stop 356
tgatagcagcttcaactgaagatgt

SEQ ID NO: 160035 - DNA, 25 bp, Artificial
  probe
  misc_feature (1)..(25): SEQ ID NO: 7353; WAN024DJB_at; Start 185; Stop 209
caaccaaagtaaaaatatttgatga

SEQ ID NO: 160036 - DNA, 25 bp, Artificial
  probe
  misc_feature (1)..(25): SEQ ID NO: 7353; WAN024DJB_at; Start 136; Stop 160
gaaaatgattatagagacgtcgtta

SEQ ID NO: 160037 - DNA, 25 bp, Artificial
  probe
  misc_feature (1)..(25): SEQ ID NO: 7353; WAN024DJB_at; Start 108; Stop 132
cagtaatcaatctgaaaactttgac

SEQ ID NO: 160038 - DNA, 25 bp, Artificial
  probe
  misc_feature (1)..(25): SEQ ID NO: 7353; WAN024DJB_at; Start 4; Stop 28
cgaggatttctaattgataataaac

SEQ ID NO: 160039 - DNA, 25 bp, Artificial
  probe
  misc_feature (1)..(25): SEQ ID NO: 7353; WAN024DJB_at; Start 321; Stop 345
catacaagtcttgatagcagcttca

SEQ ID NO: 160040 - DNA, 25 bp, Artificial
  probe
  misc_feature (1)..(25): SEQ ID NO: 7353; WAN024DJB_at; Start 277; Stop 301
ggaggaagacttttgattacgattg

SEQ ID NO: 160041 - DNA, 25 bp, Artificial
  probe
  misc_feature (1)..(25): SEQ ID NO: 7353; WAN024DJB_at; Start 304; Stop 328
caagtatcattatattccatacaag

SEQ ID NO: 160042 - DNA, 25 bp, Artificial
  probe
  misc_feature (1)..(25): SEQ ID NO: 7353; WAN024DJB_at; Start 164; Stop 188
ggctaattattaacatatttacaac

SEQ ID NO: 160043 - DNA, 25 bp, Artificial
  probe
  misc_feature (1)..(25): SEQ ID NO: 7353; WAN024DJB_at; Start 342; Stop 366
ttcaactgaagatgtatcaaactga

SEQ ID NO: 160044 - DNA, 25 bp, Artificial
  probe
  misc_feature (1)..(25): SEQ ID NO: 7353; WAN024DJB_at; Start 76; Stop 100
gaaagtaagatagagtctgctcttg

SEQ ID NO: 160045 - DNA, 25 bp, Artificial
  probe
  misc_feature (1)..(25): SEQ ID NO: 7353; WAN024DJB_at; Start 231; Stop 255
cagtaatagagcttgggaaaaggtt

SEQ ID NO: 160046 - DNA, 25 bp, Artificial
  probe
  misc_feature (1)..(25): SEQ ID NO: 7353; WAN024DJB_at; Start 50; Stop 74
gatacgaggataaattatttttgag

SEQ ID NO: 160047 - DNA, 25 bp, Artificial
  probe
  misc_feature (1)..(25): SEQ ID NO: 7353; WAN024DJB_at; Start 281; Stop 305
gaagacttttgattacgattgtaca

SEQ ID NO: 160048 - DNA, 25 bp, Artificial
  probe
  misc_feature (1)..(25): SEQ ID NO: 7353; WAN024DJB_at; Start 149; Stop 173
gagacgtcgttaataggctaattat

SEQ ID NO: 160049 - DNA, 25 bp, Artificial
  probe
  misc_feature (1)..(25): SEQ ID NO: 7353; WAN024DJB_at; Start 86; Stop 110
tagagtctgctcttgaaagttacag

SEQ ID NO: 160050 - DNA, 25 bp, Artificial
  probe
  misc_feature (1)..(25): SEQ ID NO: 7353; WAN024DJB_at; Start 91; Stop 115
tctgctcttgaaagttacagtaatc

SEQ ID NO: 160051 - DNA, 25 bp, Artificial
  probe
  misc_feature (1)..(25): SEQ ID NO: 7353; WAN024DJB_at; Start 222; Stop 246
tgaggaatacagtaatagagcttgg

SEQ ID NO: 160052 - DNA, 25 bp, Artificial
  probe
  misc_feature (1)..(25): SEQ ID NO: 7353; WAN024DJB_at; Start 71; Stop 95
tgagtgaaagtaagatagagtctgc

SEQ ID NO: 160053 - DNA, 25 bp, Artificial
  probe
  misc_feature (1)..(25): SEQ ID NO: 7353; WAN024DJB_at; Start 118; Stop 142
tctgaaaactttgacttagaaaatg

SEQ ID NO: 160054 - DNA, 25 bp, Artificial
  probe
  misc_feature (1)..(25): SEQ ID NO: 7353; WAN024DJB_at; Start 329; Stop 353
tcttgatagcagcttcaactgaaga

SEQ ID NO: 160055 - DNA, 25 bp, Artificial
  probe
  misc_feature (1)..(25): SEQ ID NO: 7353; WAN024DJB_at; Start 210; Stop 234
taatggaaattatgaggaatacagt

SEQ ID NO: 160056 - DNA, 25 bp, Artificial
  probe
  misc_feature (1)..(25): SEQ ID NO: 7353; WAN024DJB_at; Start 133; Stop 157
ttagaaaatgattatagagacgtcg

SEQ ID NO: 160057 - DNA, 25 bp, Artificial
  probe
  misc_feature (1)..(25): SEQ ID NO: 7353; WAN024DJB_at; Start 323; Stop 347
tacaagtcttgatagcagcttcaac

SEQ ID NO: 160058 - DNA, 25 bp, Artificial
  probe
  misc_feature (1)..(25): SEQ ID NO: 6337; WAN024DJC_at; Start 914; Stop 938
taggcaatgatttctataaaccaga

SEQ ID NO: 160059 - DNA, 25 bp, Artificial
  probe
  misc_feature (1)..(25): SEQ ID NO: 6337; WAN024DJC_at; Start 721; Stop 745
gatccgagaataggttctcactaca

SEQ ID NO: 160060 - DNA, 25 bp, Artificial
  probe
  misc_feature (1)..(25): SEQ ID NO: 6337; WAN024DJC_at; Start 895; Stop 919
gatcttgctggatcttatgtaggca

SEQ ID NO: 160061 - DNA, 25 bp, Artificial
  probe
  misc_feature (1)..(25): SEQ ID NO: 6337; WAN024DJC_at; Start 496; Stop 520
gataaagatttggtaaagtctgctg

SEQ ID NO: 160062 - DNA, 25 bp, Artificial
  probe
  misc_feature (1)..(25): SEQ ID NO: 6337; WAN024DJC_at; Start 665; Stop 689
cttattctgagatgaaaggactaga

SEQ ID NO: 160063 - DNA, 25 bp, Artificial
  probe
  misc_feature (1)..(25): SEQ ID NO: 6337; WAN024DJC_at; Start 272; Stop 296
ttttcgatacatcttcagtcgaggc

SEQ ID NO: 160064 - DNA, 25 bp, Artificial
  probe
  misc_feature (1)..(25): SEQ ID NO: 6337; WAN024DJC_at; Start 805; Stop 829
gcaaattattctgacgttccacaag

SEQ ID NO: 160065 - DNA, 25 bp, Artificial
  probe
  misc_feature (1)..(25): SEQ ID NO: 6337; WAN024DJC_at; Start 286; Stop 310
tcagtcgaggctgtcattgaagcag

SEQ ID NO: 160066 - DNA, 25 bp, Artificial
  probe
  misc_feature (1)..(25): SEQ ID NO: 6337; WAN024DJC_at; Start 380; Stop 404
tacggaggaaatttcttacagacaa

SEQ ID NO: 160067 - DNA, 25 bp, Artificial
  probe
  misc_feature (1)..(25): SEQ ID NO: 6337; WAN024DJC_at; Start 200; Stop 224
cagaggaagcatatgagaatgcgga

SEQ ID NO: 160068 - DNA, 25 bp, Artificial
  probe
  misc_feature (1)..(25): SEQ ID NO: 6337; WAN024DJC_at; Start 53; Stop 77
tactggctcaacatcatcaagttgt

SEQ ID NO: 160069 - DNA, 25 bp, Artificial
  probe
  misc_feature (1)..(25): SEQ ID NO: 6337; WAN024DJC_at; Start 821; Stop 845
ttccacaagaaatgataacagctat

SEQ ID NO: 160070 - DNA, 25 bp, Artificial
  probe
  misc_feature (1)..(25): SEQ ID NO: 6337; WAN024DJC_at; Start 75; Stop 99
tgttgccgtagatatcattcctgag

SEQ ID NO: 160071 - DNA, 25 bp, Artificial
  probe
  misc_feature (1)..(25): SEQ ID NO: 6337; WAN024DJC_at; Start 1059; Stop 1083
tattatttacgaaccaactcttgaa

SEQ ID NO: 160072 - DNA, 25 bp, Artificial
  probe
  misc_feature (1)..(25): SEQ ID NO: 6337; WAN024DJC_at; Start 185; Stop 209
tagctacattgaatgcagaggaagc

SEQ ID NO: 160073 - DNA, 25 bp, Artificial
  probe
  misc_feature (1)..(25): SEQ ID NO: 6337; WAN024DJC_at; Start 142; Stop 166
gattatatagaaaaatatctcgcgg

SEQ ID NO: 160074 - DNA, 25 bp, Artificial
  probe
  misc_feature (1)..(25): SEQ ID NO: 6337; WAN024DJC_at; Start 428; Stop 452
tacgggagtcaaaagcgttatatga

SEQ ID NO: 160075 - DNA, 25 bp, Artificial
  probe
  misc_feature (1)..(25): SEQ ID NO: 6337; WAN024DJC_at; Start 365; Stop 389
gatatacaaagtcagtacggaggaa

SEQ ID NO: 160076 - DNA, 25 bp, Artificial
  probe
  misc_feature (1)..(25): SEQ ID NO: 6337; WAN024DJC_at; Start 1026; Stop 1050
tatgaagcgtttgaaagcaaaaggt

SEQ ID NO: 160077 - DNA, 25 bp, Artificial
  probe
  misc_feature (1)..(25): SEQ ID NO: 6337; WAN024DJC_at; Start 240; Stop 264
ggctccaactaattatgatccgaaa

SEQ ID NO: 160078 - DNA, 25 bp, Artificial
  probe
  misc_feature (1)..(25): SEQ ID NO: 6337; WAN024DJC_at; Start 351; Stop 375
tactgttcctgttggatatacaaag

SEQ ID NO: 160079 - DNA, 25 bp, Artificial
  probe
  misc_feature (1)..(25): SEQ ID NO: 6337; WAN024DJC_at; Start 463; Stop 487
ccgagtcgaattattataggtacag

SEQ ID NO: 160080 - DNA, 25 bp, Artificial
  probe
  misc_feature (1)..(25): SEQ ID NO: 6337; WAN024DJC_at; Start 120; Stop 144
aaagaagtcccctatccaagacgat

SEQ ID NO: 160081 - DNA, 25 bp, Artificial
  probe
  misc_feature (1)..(25): SEQ ID NO: 6337; WAN024DJC_at; Start 706; Stop 730
gatggagtttgtttagatccgagaa

SEQ ID NO: 160082 - DNA, 25 bp, Artificial
  probe
  misc_feature (1)..(25): SEQ ID NO: 6337; WAN024DJC_at; Start 530; Stop 554
taaaaatgcttcaggaaggtgcagt

SEQ ID NO: 160083 - DNA, 25 bp, Artificial
  probe
  misc_feature (1)..(25): SEQ ID NO: 6337; WAN024DJC_at; Start 446; Stop 470
tatatgataacctatatccgagtcg

SEQ ID NO: 160084 - DNA, 25 bp, Artificial
  probe
  misc_feature (1)..(25): SEQ ID NO: 6337; WAN024DJC_at; Start 223; Stop 247
gattttatagttattgcggctccaa

SEQ ID NO: 160085 - DNA, 25 bp, Artificial
  probe
  misc_feature (1)..(25): SEQ ID NO: 6337; WAN024DJC_at; Start 90; Stop 114
cattcctgagaaagttgagttaatc

SEQ ID NO: 160086 - DNA, 25 bp, Artificial
  probe
  misc_feature (1)..(25): SEQ ID NO: 6337; WAN024DJC_at; Start 1072; Stop 1096
ccaactcttgaaagtggtactactt

SEQ ID NO: 160087 - DNA, 25 bp, Artificial
  probe
  misc_feature (1)..(25): SEQ ID NO: 6337; WAN024DJC_at; Start 616; Stop 640
gctaatacctatcttgccctccggg

SEQ ID NO: 160088 - DNA, 25 bp, Artificial
  probe
  misc_feature (1)..(25): SEQ ID NO: 6337; WAN024DJC_at; Start 839; Stop 863
cagctatagtacaaagtaatcggac

SEQ ID NO: 160089 - DNA, 25 bp, Artificial
  probe
  misc_feature (1)..(25): SEQ ID NO: 6337; WAN024DJC_at; Start 157; Stop 181
tatctcgcggaaaaagaattgaatt

SEQ ID NO: 160090 - DNA, 25 bp, Artificial
  probe
  misc_feature (1)..(25): SEQ ID NO: 6337; WAN024DJC_at; Start 769; Stop 793
ggttactgtcttcctaaagatacca

SEQ ID NO: 160091 - DNA, 25 bp, Artificial
  probe
  misc_feature (1)..(25): SEQ ID NO: 6337; WAN024DJC_at; Start 38; Stop 62
tatttattgcaatcttactggctca

SEQ ID NO: 160092 - DNA, 25 bp, Artificial
  probe
  misc_feature (1)..(25): SEQ ID NO: 7215; WAN024DJD_at; Start 1049; Stop 1073
taatttatgaaccaaccctcagtga

SEQ ID NO: 160093 - DNA, 25 bp, Artificial
  probe
  misc_feature (1)..(25): SEQ ID NO: 7215; WAN024DJD_at; Start 168; Stop 192
taagtctcttaatttggtagcgacg

SEQ ID NO: 160094 - DNA, 25 bp, Artificial
  probe
  misc_feature (1)..(25): SEQ ID NO: 7215; WAN024DJD_at; Start 3; Stop 27
gaaacttgcagttgttggaaccgga

SEQ ID NO: 160095 - DNA, 25 bp, Artificial
  probe
  misc_feature (1)..(25): SEQ ID NO: 7215; WAN024DJD_at; Start 896; Stop 920
aatttgcagaagtgtcaagtaatgg

SEQ ID NO: 160096 - DNA, 25 bp, Artificial
  probe
  misc_feature (1)..(25): SEQ ID NO: 7215; WAN024DJD_at; Start 608; Stop 632
aactctttgcaaatacatacttggc

SEQ ID NO: 160097 - DNA, 25 bp, Artificial
  probe
  misc_feature (1)..(25): SEQ ID NO: 7215; WAN024DJD_at; Start 56; Stop 80
tatctcagcatcatgaggtggtggc

SEQ ID NO: 160098 - DNA, 25 bp, Artificial
  probe
  misc_feature (1)..(25): SEQ ID NO: 7215; WAN024DJD_at; Start 1064; Stop 1088
ccctcagtgacaatgagacattttg

SEQ ID NO: 160099 - DNA, 25 bp, Artificial
  probe
  misc_feature (1)..(25): SEQ ID NO: 7215; WAN024DJD_at; Start 500; Stop 524
catatttgagggagagggccgaaac

SEQ ID NO: 160100 - DNA, 25 bp, Artificial
  probe
  misc_feature (1)..(25): SEQ ID NO: 7215; WAN024DJD_at; Start 574; Stop 598
ctttatatgggatttacagaagctg

SEQ ID NO: 160101 - DNA, 25 bp, Artificial
  probe
  misc_feature (1)..(25): SEQ ID NO: 7215; WAN024DJD_at; Start 183; Stop 207
ggtagcgacgttagatgcatctaag

SEQ ID NO: 160102 - DNA, 25 bp, Artificial
  probe
  misc_feature (1)..(25): SEQ ID NO: 7215; WAN024DJD_at; Start 105; Stop 129
taatctaattaatgaagggaagtcc

SEQ ID NO: 160103 - DNA, 25 bp, Artificial
  probe
  misc_feature (1)..(25): SEQ ID NO: 7215; WAN024DJD_at; Start 517; Stop 541
gccgaaacttttgcaaaactgcttc

SEQ ID NO: 160104 - DNA, 25 bp, Artificial
  probe
  misc_feature (1)..(25): SEQ ID NO: 7215; WAN024DJD_at; Start 200; Stop 224
catctaaggcatatactgatgctga

SEQ ID NO: 160105 - DNA, 25 bp, Artificial
  probe
  misc_feature (1)..(25): SEQ ID NO: 7215; WAN024DJD_at; Start 419; Stop 443
cagaatttctgcgtgaatcaaaggc

SEQ ID NO: 160106 - DNA, 25 bp, Artificial
  probe
  misc_feature (1)..(25): SEQ ID NO: 7215; WAN024DJD_at; Start 358; Stop 382
cctgtaggatatactcaatgggttc

SEQ ID NO: 160107 - DNA, 25 bp, Artificial
  probe
  misc_feature (1)..(25): SEQ ID NO: 7215; WAN024DJD_at; Start 836; Stop 860
taacagctattgttgagagtaatcg

SEQ ID NO: 160108 - DNA, 25 bp, Artificial
  probe
  misc_feature (1)..(25): SEQ ID NO: 7215; WAN024DJD_at; Start 223; Stop 247
gattttgtaattattgcagcgccaa

SEQ ID NO: 160109 - DNA, 25 bp, Artificial
  probe
  misc_feature (1)..(25): SEQ ID NO: 7215; WAN024DJD_at; Start 122; Stop 146
ggaagtcccctattaaagatgatta

SEQ ID NO: 160110 - DNA, 25 bp, Artificial
  probe
  misc_feature (1)..(25): SEQ ID NO: 7215; WAN024DJD_at; Start 551; Stop 575
ctattaaagaggctatagaaactct

SEQ ID NO: 160111 - DNA, 25 bp, Artificial
  probe
  misc_feature (1)..(25): SEQ ID NO: 7215; WAN024DJD_at; Start 72; Stop 96
ggtggtggctgtcgatattattcca

SEQ ID NO: 160112 - DNA, 25 bp, Artificial
  probe
  misc_feature (1)..(25): SEQ ID NO: 7215; WAN024DJD_at; Start 304; Stop 328
gaaacagtgttagagataaatccta

SEQ ID NO: 160113 - DNA, 25 bp, Artificial
  probe
  misc_feature (1)..(25): SEQ ID NO: 7215; WAN024DJD_at; Start 959; Stop 983
ggttaactatgaagagtaattccga

SEQ ID NO: 160114 - DNA, 25 bp, Artificial
  probe
  misc_feature (1)..(25): SEQ ID NO: 7215; WAN024DJD_at; Start 1025; Stop 1049
taaaggcagaaggtgtaaatgtcat

SEQ ID NO: 160115 - DNA, 25 bp, Artificial
  probe
  misc_feature (1)..(25): SEQ ID NO: 7215; WAN024DJD_at; Start 316; Stop 340
gagataaatcctaacgctgttatgg

SEQ ID NO: 160116 - DNA, 25 bp, Artificial
  probe
  misc_feature (1)..(25): SEQ ID NO: 7215; WAN024DJD_at; Start 1016; Stop 1040
tgaaacgattaaaggcagaaggtgt

SEQ ID NO: 160117 - DNA, 25 bp, Artificial
  probe
  misc_feature (1)..(25): SEQ ID NO: 7215; WAN024DJD_at; Start 279; Stop 303
tacatctgctgtagagaaagttatt

SEQ ID NO: 160118 - DNA, 25 bp, Artificial
  probe
  misc_feature (1)..(25): SEQ ID NO: 7215; WAN024DJD_at; Start 529; Stop 553
gcaaaactgcttcaagaaggagcta

SEQ ID NO: 160119 - DNA, 25 bp, Artificial
  probe
  misc_feature (1)..(25): SEQ ID NO: 7215; WAN024DJD_at; Start 595; Stop 619
gctgaagcagttaaactctttgcaa

SEQ ID NO: 160120 - DNA, 25 bp, Artificial
  probe
  misc_feature (1)..(25): SEQ ID NO: 7215; WAN024DJD_at; Start 787; Stop 811
gatagcaaacaattactggcaaact

SEQ ID NO: 160121 - DNA, 25 bp, Artificial
  probe
  misc_feature (1)..(25): SEQ ID NO: 7215; WAN024DJD_at; Start 19; Stop 43
ggaaccggatacgttggattgtcta

SEQ ID NO: 160122 - DNA, 25 bp, Artificial
  probe
  misc_feature (1)..(25): SEQ ID NO: 7215; WAN024DJD_at; Start 693; Stop 717
caaagctattattgagggtattggc

SEQ ID NO: 160123 - DNA, 25 bp, Artificial
  probe
  misc_feature (1)..(25): SEQ ID NO: 7215; WAN024DJD_at; Start 41; Stop 65
ctatctcagttctattatctcagca

SEQ ID NO: 160124 - DNA, 25 bp, Artificial
  probe
  misc_feature (1)..(25): SEQ ID NO: 7215; WAN024DJD_at; Start 623; Stop 647
catacttggccttacgagtttcgta

SEQ ID NO: 160125 - DNA, 25 bp, Artificial
  probe
  misc_feature (1)..(25): SEQ ID NO: 7215; WAN024DJD_at; Start 342; Stop 366
tattaaaagtacagttcctgtagga

SEQ ID NO: 160126 - DNA, 25 bp, Artificial
  probe
  misc_feature (1)..(25): SEQ ID NO: 6336; WAN024DJE_at; Start 463; Stop 487
cctagtcgaatcatcgttggagcag

SEQ ID NO: 160127 - DNA, 25 bp, Artificial
  probe
  misc_feature (1)..(25): SEQ ID NO: 6336; WAN024DJE_at; Start 716; Stop 740
ggttagatccacgaattggtagcca

SEQ ID NO: 160128 - DNA, 25 bp, Artificial
  probe
  misc_feature (1)..(25): SEQ ID NO: 6336; WAN024DJE_at; Start 666; Stop 690
ctatgcggagataaagggattggac

SEQ ID NO: 160129 - DNA, 25 bp, Artificial
  probe
  misc_feature (1)..(25): SEQ ID NO: 6336; WAN024DJE_at; Start 485; Stop 509
cagatttgagagatacggagcaggt

SEQ ID NO: 160130 - DNA, 25 bp, Artificial
  probe
  misc_feature (1)..(25): SEQ ID NO: 6336; WAN024DJE_at; Start 732; Stop 756
tggtagccattataacaatccgtca

SEQ ID NO: 160131 - DNA, 25 bp, Artificial
  probe
  misc_feature (1)..(25): SEQ ID NO: 6336; WAN024DJE_at; Start 1105; Stop 1129
gaagtttttaagtctagcagtcaag

SEQ ID NO: 160132 - DNA, 25 bp, Artificial
  probe
  misc_feature (1)..(25): SEQ ID NO: 6336; WAN024DJE_at; Start 529; Stop 553
gcaactcttttgcaggaaggttcac

SEQ ID NO: 160133 - DNA, 25 bp, Artificial
  probe
  misc_feature (1)..(25): SEQ ID NO: 6336; WAN024DJE_at; Start 618; Stop 642
caacacctatttggctttgcgggtt

SEQ ID NO: 160134 - DNA, 25 bp, Artificial
  probe
  misc_feature (1)..(25): SEQ ID NO: 6336; WAN024DJE_at; Start 914; Stop 938
cagacggtaatcaaacaatcatagt

SEQ ID NO: 160135 - DNA, 25 bp, Artificial
  probe
  misc_feature (1)..(25): SEQ ID NO: 6336; WAN024DJE_at; Start 1185; Stop 1209
tacaagagatatttttcagcgagat

SEQ ID NO: 160136 - DNA, 25 bp, Artificial
  probe
  misc_feature (1)..(25): SEQ ID NO: 6336; WAN024DJE_at; Start 688; Stop 712
gacactaaatccatcattgacggag

SEQ ID NO: 160137 - DNA, 25 bp, Artificial
  probe
  misc_feature (1)..(25): SEQ ID NO: 6336; WAN024DJE_at; Start 800; Stop 824
tgctggcgaattatcatgatgtacc

SEQ ID NO: 160138 - DNA, 25 bp, Artificial
  probe
  misc_feature (1)..(25): SEQ ID NO: 6336; WAN024DJE_at; Start 79; Stop 103
gcggtagatgttattcctgaaaaag

SEQ ID NO: 160139 - DNA, 25 bp, Artificial
  probe
  misc_feature (1)..(25): SEQ ID NO: 6336; WAN024DJE_at; Start 843; Stop 867
tattgtagaaagtaaccgtactcgc

SEQ ID NO: 160140 - DNA, 25 bp, Artificial
  probe
  misc_feature (1)..(25): SEQ ID NO: 6336; WAN024DJE_at; Start 17; Stop 41
cagggacaggttatgtgggtttatc

SEQ ID NO: 160141 - DNA, 25 bp, Artificial
  probe
  misc_feature (1)..(25): SEQ ID NO: 6336; WAN024DJE_at; Start 115; Stop 139
aatcgtcgccaatctcccattaagg

SEQ ID NO: 160142 - DNA, 25 bp, Artificial
  probe
  misc_feature (1)..(25): SEQ ID NO: 6336; WAN024DJE_at; Start 598; Stop 622
gaagcagtcaaactatttgccaaca

SEQ ID NO: 160143 - DNA, 25 bp, Artificial
  probe
  misc_feature (1)..(25): SEQ ID NO: 6336; WAN024DJE_at; Start 747; Stop 771
caatccgtcatttggttatggaggt

SEQ ID NO: 160144 - DNA, 25 bp, Artificial
  probe
  misc_feature (1)..(25): SEQ ID NO: 6336; WAN024DJE_at; Start 100; Stop 124
aaagtagagcttatcaatcgtcgcc

SEQ ID NO: 160145 - DNA, 25 bp, Artificial
  probe
  misc_feature (1)..(25): SEQ ID NO: 6336; WAN024DJE_at; Start 579; Stop 603
tatgggtgtaacagaggcagaagca

SEQ ID NO: 160146 - DNA, 25 bp, Artificial
  probe
  misc_feature (1)..(25): SEQ ID NO: 6336; WAN024DJE_at; Start 1138; Stop 1162
gccaatcggatggaaaaatctttat

SEQ ID NO: 160147 - DNA, 25 bp, Artificial
  probe
  misc_feature (1)..(25): SEQ ID NO: 6336; WAN024DJE_at; Start 980; Stop 1004
tccgtcaatcatcaatccaaggtgt

SEQ ID NO: 160148 - DNA, 25 bp, Artificial
  probe
  misc_feature (1)..(25): SEQ ID NO: 6336; WAN024DJE_at; Start 223; Stop 247
gactttgtcataattgctgtcccaa

SEQ ID NO: 160149 - DNA, 25 bp, Artificial
  probe
  misc_feature (1)..(25): SEQ ID NO: 6336; WAN024DJE_at; Start 550; Stop 574
tcacttaaacctgatgttgagacct

SEQ ID NO: 160150 - DNA, 25 bp, Artificial
  probe
  misc_feature (1)..(25): SEQ ID NO: 6336; WAN024DJE_at; Start 509; Stop 533
tagttcaggctgagcggtttgcaac

SEQ ID NO: 160151 - DNA, 25 bp, Artificial
  probe
  misc_feature (1)..(25): SEQ ID NO: 6336; WAN024DJE_at; Start 651; Stop 675
taacgaattggatacctatgcggag

SEQ ID NO: 160152 - DNA, 25 bp, Artificial
  probe
  misc_feature (1)..(25): SEQ ID NO: 6336; WAN024DJE_at; Start 371; Stop 395
cagaaagtctccgaacacgttttgg

SEQ ID NO: 160153 - DNA, 25 bp, Artificial
  probe
  misc_feature (1)..(25): SEQ ID NO: 6336; WAN024DJE_at; Start 1048; Stop 1072
gaaccaactttggaggatcatagct

SEQ ID NO: 160154 - DNA, 25 bp, Artificial
  probe
  misc_feature (1)..(25): SEQ ID NO: 6336; WAN024DJE_at; Start 702; Stop 726
cattgacggagtagggttagatcca

SEQ ID NO: 160155 - DNA, 25 bp, Artificial
  probe
  misc_feature (1)..(25): SEQ ID NO: 6336; WAN024DJE_at; Start 929; Stop 953
caatcatagtaggtgtttaccgctt

SEQ ID NO: 160156 - DNA, 25 bp, Artificial
  probe
  misc_feature (1)..(25): SEQ ID NO: 6336; WAN024DJE_at; Start 896; Stop 920
aaaatgcgttggagctttcagacgg

SEQ ID NO: 160157 - DNA, 25 bp, Artificial
  probe
  misc_feature (1)..(25): SEQ ID NO: 6336; WAN024DJE_at; Start 357; Stop 381
tcctgtgggatatacagaaagtctc

SEQ ID NO: 160158 - DNA, 25 bp, Artificial
  probe
  misc_feature (1)..(25): SEQ ID NO: 6336; WAN024DJE_at; Start 948; Stop 972
ccgcttaactatgaagagtggttcg

SEQ ID NO: 160159 - DNA, 25 bp, Artificial
  probe
  misc_feature (1)..(25): SEQ ID NO: 6336; WAN024DJE_at; Start 201; Stop 225
taatgaagcttatcgagatgctgac

SEQ ID NO: 160160 - DNA, 25 bp, Artificial
  probe
  misc_feature (1)..(25): SEQ ID NO: 777; WAN024DJF_at; Start 56; Stop 80
tagcgcaacatcatgaagtaacagc

SEQ ID NO: 160161 - DNA, 25 bp, Artificial
  probe
  misc_feature (1)..(25): SEQ ID NO: 777; WAN024DJF_at; Start 539; Stop 563
tacaagaaggtgctctcaaagagaa

SEQ ID NO: 160162 - DNA, 25 bp, Artificial
  probe
  misc_feature (1)..(25): SEQ ID NO: 777; WAN024DJF_at; Start 659; Stop 683
tggatacttatgctgaactgaaagg

SEQ ID NO: 160163 - DNA, 25 bp, Artificial
  probe
  misc_feature (1)..(25): SEQ ID NO: 777; WAN024DJF_at; Start 779; Stop 803
taccaaaggatagtaagcaactgtt

SEQ ID NO: 160164 - DNA, 25 bp, Artificial
  probe
  misc_feature (1)..(25): SEQ ID NO: 777; WAN024DJF_at; Start 575; Stop 599
taatcatgggattttctgaagcaga

SEQ ID NO: 160165 - DNA, 25 bp, Artificial
  probe
  misc_feature (1)..(25): SEQ ID NO: 777; WAN024DJF_at; Start 463; Stop 487
cctaatcgaattatcgtaggtacag

SEQ ID NO: 160166 - DNA, 25 bp, Artificial
  probe
  misc_feature (1)..(25): SEQ ID NO: 777; WAN024DJF_at; Start 9; Stop 33
tactgtagtaggaatgggatatgtc

SEQ ID NO: 160167 - DNA, 25 bp, Artificial
  probe
  misc_feature (1)..(25): SEQ ID NO: 777; WAN024DJF_at; Start 283; Stop 307
tctgccgtagaacaagtaatcgaaa

SEQ ID NO: 160168 - DNA, 25 bp, Artificial
  probe
  misc_feature (1)..(25): SEQ ID NO: 777; WAN024DJF_at; Start 589; Stop 613
tctgaagcagaagctgtgaaattat

SEQ ID NO: 160169 - DNA, 25 bp, Artificial
  probe
  misc_feature (1)..(25): SEQ ID NO: 777; WAN024DJF_at; Start 236; Stop 260
tagctgctcctacagattatgatac

SEQ ID NO: 160170 - DNA, 25 bp, Artificial
  probe
  misc_feature (1)..(25): SEQ ID NO: 777; WAN024DJF_at; Start 714; Stop 738
aggattggatcctagaattggtcag

SEQ ID NO: 160171 - DNA, 25 bp, Artificial
  probe
  misc_feature (1)..(25): SEQ ID NO: 777; WAN024DJF_at; Start 26; Stop 50
gatatgtcggattgtccttggcggt

SEQ ID NO: 160172 - DNA, 25 bp, Artificial
  probe
  misc_feature (1)..(25): SEQ ID NO: 777; WAN024DJF_at; Start 496; Stop 520
gatggagcattagtttctaaagcac

SEQ ID NO: 160173 - DNA, 25 bp, Artificial
  probe
  misc_feature (1)..(25): SEQ ID NO: 777; WAN024DJF_at; Start 1060; Stop 1084
tatgaaccttcacttccagatggac

SEQ ID NO: 160174 - DNA, 25 bp, Artificial
  probe
  misc_feature (1)..(25): SEQ ID NO: 777; WAN024DJF_at; Start 198; Stop 222
cgaagtagaggcgtataaagatgcg

SEQ ID NO: 160175 - DNA, 25 bp, Artificial
  probe
  misc_feature (1)..(25): SEQ ID NO: 777; WAN024DJF_at; Start 479; Stop 503
taggtacagatttgaatgatggagc

SEQ ID NO: 160176 - DNA, 25 bp, Artificial
  probe
  misc_feature (1)..(25): SEQ ID NO: 777; WAN024DJF_at; Start 899; Stop 923
tagtcggagctaatcatattgatga

SEQ ID NO: 160177 - DNA, 25 bp, Artificial
  probe
  misc_feature (1)..(25): SEQ ID NO: 777; WAN024DJF_at; Start 358; Stop 382
cctgttggctatacggagtcgattc

SEQ ID NO: 160178 - DNA, 25 bp, Artificial
  probe
  misc_feature (1)..(25): SEQ ID NO: 777; WAN024DJF_at; Start 41; Stop 65
ccttggcggtattattagcgcaaca

SEQ ID NO: 160179 - DNA, 25 bp, Artificial
  probe
  misc_feature (1)..(25): SEQ ID NO: 777; WAN024DJF_at; Start 884; Stop 908
aacgtattcttgaaatagtcggagc

SEQ ID NO: 160180 - DNA, 25 bp, Artificial
  probe
  misc_feature (1)..(25): SEQ ID NO: 777; WAN024DJF_at; Start 181; Stop 205
ttaagcgcaacaacaaacgaagtag

SEQ ID NO: 160181 - DNA, 25 bp, Artificial
  probe
  misc_feature (1)..(25): SEQ ID NO: 777; WAN024DJF_at; Start 1026; Stop 1050
gagactaaaagcgaatggagtgaca

SEQ ID NO: 160182 - DNA, 25 bp, Artificial
  probe
  misc_feature (1)..(25): SEQ ID NO: 777; WAN024DJF_at; Start 1132; Stop 1156
gaaaaaagccaccttattgtagcca

SEQ ID NO: 160183 - DNA, 25 bp, Artificial
  probe
  misc_feature (1)..(25): SEQ ID NO: 777; WAN024DJF_at; Start 933; Stop 957
tttgaagcaggaaatcgttgtaggt

SEQ ID NO: 160184 - DNA, 25 bp, Artificial
  probe
  misc_feature (1)..(25): SEQ ID NO: 777; WAN024DJF_at; Start 616; Stop 640
tccaatgcttatctggctttaagag

SEQ ID NO: 160185 - DNA, 25 bp, Artificial
  probe
  misc_feature (1)..(25): SEQ ID NO: 777; WAN024DJF_at; Start 220; Stop 244
gcggaaatgattattatagctgctc

SEQ ID NO: 160186 - DNA, 25 bp, Artificial
  probe
  misc_feature (1)..(25): SEQ ID NO: 777; WAN024DJF_at; Start 342; Stop 366
cattaaatcaactgttcctgttggc

SEQ ID NO: 160187 - DNA, 25 bp, Artificial
  probe
  misc_feature (1)..(25): SEQ ID NO: 777; WAN024DJF_at; Start 373; Stop 397
gagtcgattcgagaaaaatatggta

SEQ ID NO: 160188 - DNA, 25 bp, Artificial
  probe
  misc_feature (1)..(25): SEQ ID NO: 777; WAN024DJF_at; Start 120; Stop 144
gaaaaaatctccaattcaagatgag

SEQ ID NO: 160189 - DNA, 25 bp, Artificial
  probe
  misc_feature (1)..(25): SEQ ID NO: 777; WAN024DJF_at; Start 426; Stop 450
tcttcgtgaagcaaatggattgtat

SEQ ID NO: 160190 - DNA, 25 bp, Artificial
  probe
  misc_feature (1)..(25): SEQ ID NO: 777; WAN024DJF_at; Start 752; Stop 776
catcctttggttatggtggttactg

SEQ ID NO: 160191 - DNA, 25 bp, Artificial
  probe
  misc_feature (1)..(25): SEQ ID NO: 777; WAN024DJF_at; Start 407; Stop 431
tactgtttagcccagaatttcttcg

SEQ ID NO: 160192 - DNA, 25 bp, Artificial
  probe
  misc_feature (1)..(25): SEQ ID NO: 777; WAN024DJF_at; Start 268; Stop 292
aatttctttgatacatctgccgtag

SEQ ID NO: 160193 - DNA, 25 bp, Artificial
  probe
  misc_feature (1)..(25): SEQ ID NO: 777; WAN024DJF_at; Start 675; Stop 699
actgaaaggattgaatacgaaagcc

SEQ ID NO: 160194 - DNA, 25 bp, Artificial
  probe
  misc_feature (1)..(25): SEQ ID NO: 787; WAN024DJG_at; Start 1049; Stop 1073
taatttatgagccaactcttagtga

SEQ ID NO: 160195 - DNA, 25 bp, Artificial
  probe
  misc_feature (1)..(25): SEQ ID NO: 787; WAN024DJG_at; Start 308; Stop 332
cggtgttagagactaatcctaacgc

SEQ ID NO: 160196 - DNA, 25 bp, Artificial
  probe
  misc_feature (1)..(25): SEQ ID NO: 787; WAN024DJG_at; Start 597; Stop 621
agaagcagtcaaactttttgcaaat

SEQ ID NO: 160197 - DNA, 25 bp, Artificial
  probe
  misc_feature (1)..(25): SEQ ID NO: 787; WAN024DJG_at; Start 304; Stop 328
gaaacggtgttagagactaatccta

SEQ ID NO: 160198 - DNA, 25 bp, Artificial
  probe
  misc_feature (1)..(25): SEQ ID NO: 787; WAN024DJG_at; Start 317; Stop 341
agactaatcctaacgctgtaatggt

SEQ ID NO: 160199 - DNA, 25 bp, Artificial
  probe
  misc_feature (1)..(25): SEQ ID NO: 787; WAN024DJG_at; Start 579; Stop 603
catgggatttacagaggcagaagca

SEQ ID NO: 160200 - DNA, 25 bp, Artificial
  probe
  misc_feature (1)..(25): SEQ ID NO: 787; WAN024DJG_at; Start 173; Stop 197
ccctcaacttagtggcaacattgga

SEQ ID NO: 160201 - DNA, 25 bp, Artificial
  probe
  misc_feature (1)..(25): SEQ ID NO: 787; WAN024DJG_at; Start 574; Stop 598
ctttacatgggatttacagaggcag

SEQ ID NO: 160202 - DNA, 25 bp, Artificial
  probe
  misc_feature (1)..(25): SEQ ID NO: 787; WAN024DJG_at; Start 354; Stop 378
tgttcctgtaggctatactcaatcg

SEQ ID NO: 160203 - DNA, 25 bp, Artificial
  probe
  misc_feature (1)..(25): SEQ ID NO: 787; WAN024DJG_at; Start 426; Stop 450
tttacgtgagtcaaaggctttatat

SEQ ID NO: 160204 - DNA, 25 bp, Artificial
  probe
  misc_feature (1)..(25): SEQ ID NO: 787; WAN024DJG_at; Start 206; Stop 230
tagcgtaccaaaatgcagattttgt

SEQ ID NO: 160205 - DNA, 25 bp, Artificial
  probe
  misc_feature (1)..(25): SEQ ID NO: 787; WAN024DJG_at; Start 315; Stop 339
agagactaatcctaacgctgtaatg

SEQ ID NO: 160206 - DNA, 25 bp, Artificial
  probe
  misc_feature (1)..(25): SEQ ID NO: 787; WAN024DJG_at; Start 298; Stop 322
gttattgaaacggtgttagagacta

SEQ ID NO: 160207 - DNA, 25 bp, Artificial
  probe
  misc_feature (1)..(25): SEQ ID NO: 787; WAN024DJG_at; Start 171; Stop 195
gcccctcaacttagtggcaacattg

SEQ ID NO: 160208 - DNA, 25 bp, Artificial
  probe
  misc_feature (1)..(25): SEQ ID NO: 787; WAN024DJG_at; Start 89; Stop 113
ttatttctgaaaaggtcaatctgat

SEQ ID NO: 160209 - DNA, 25 bp, Artificial
  probe
  misc_feature (1)..(25): SEQ ID NO: 787; WAN024DJG_at; Start 417; Stop 441
tccagaatttttacgtgagtcaaag

SEQ ID NO: 160210 - DNA, 25 bp, Artificial
  probe
  misc_feature (1)..(25): SEQ ID NO: 787; WAN024DJG_at; Start 71; Stop 95
aggtggtagctgttgatattatttc

SEQ ID NO: 160211 - DNA, 25 bp, Artificial
  probe
  misc_feature (1)..(25): SEQ ID NO: 787; WAN024DJG_at; Start 177; Stop 201
caacttagtggcaacattggataca

SEQ ID NO: 160212 - DNA, 25 bp, Artificial
  probe
  misc_feature (1)..(25): SEQ ID NO: 787; WAN024DJG_at; Start 180; Stop 204
cttagtggcaacattggatacaaat

SEQ ID NO: 160213 - DNA, 25 bp, Artificial
  probe
  misc_feature (1)..(25): SEQ ID NO: 787; WAN024DJG_at; Start 778; Stop 802
cttccaaaagatagtaaacaactat

SEQ ID NO: 160214 - DNA, 25 bp, Artificial
  probe
  misc_feature (1)..(25): SEQ ID NO: 787; WAN024DJG_at; Start 792; Stop 816
taaacaactattggcaaactataaa

SEQ ID NO: 160215 - DNA, 25 bp, Artificial
  probe
  misc_feature (1)..(25): SEQ ID NO: 787; WAN024DJG_at; Start 492; Stop 516
ggacgatgcatatttaaaggagaga

SEQ ID NO: 160216 - DNA, 25 bp, Artificial
  probe
  misc_feature (1)..(25): SEQ ID NO: 787; WAN024DJG_at; Start 108; Stop 132
tctgattaataatggaaaatctcca

SEQ ID NO: 160217 - DNA, 25 bp, Artificial
  probe
  misc_feature (1)..(25): SEQ ID NO: 787; WAN024DJG_at; Start 570; Stop 594
aattctttacatgggatttacagag

SEQ ID NO: 160218 - DNA, 25 bp, Artificial
  probe
  misc_feature (1)..(25): SEQ ID NO: 787; WAN024DJG_at; Start 419; Stop 443
cagaatttttacgtgagtcaaaggc

SEQ ID NO: 160219 - DNA, 25 bp, Artificial
  probe
  misc_feature (1)..(25): SEQ ID NO: 787; WAN024DJG_at; Start 74; Stop 98
tggtagctgttgatattatttctga

SEQ ID NO: 160220 - DNA, 25 bp, Artificial
  probe
  misc_feature (1)..(25): SEQ ID NO: 787; WAN024DJG_at; Start 494; Stop 518
acgatgcatatttaaaggagagagc

SEQ ID NO: 160221 - DNA, 25 bp, Artificial
  probe
  misc_feature (1)..(25): SEQ ID NO: 787; WAN024DJG_at; Start 167; Stop 191
caaagcccctcaacttagtggcaac

SEQ ID NO: 160222 - DNA, 25 bp, Artificial
  probe
  misc_feature (1)..(25): SEQ ID NO: 787; WAN024DJG_at; Start 1050; Stop 1074
aatttatgagccaactcttagtgat

SEQ ID NO: 160223 - DNA, 25 bp, Artificial
  probe
  misc_feature (1)..(25): SEQ ID NO: 787; WAN024DJG_at; Start 787; Stop 811
gatagtaaacaactattggcaaact

SEQ ID NO: 160224 - DNA, 25 bp, Artificial
  probe
  misc_feature (1)..(25): SEQ ID NO: 787; WAN024DJG_at; Start 302; Stop 326
ttgaaacggtgttagagactaatcc

SEQ ID NO: 160225 - DNA, 25 bp, Artificial
  probe
  misc_feature (1)..(25): SEQ ID NO: 787; WAN024DJG_at; Start 609; Stop 633
actttttgcaaatacatatttagcc

SEQ ID NO: 160226 - DNA, 25 bp, Artificial
  probe
  misc_feature (1)..(25): SEQ ID NO: 787; WAN024DJG_at; Start 577; Stop 601
tacatgggatttacagaggcagaag

SEQ ID NO: 160227 - DNA, 25 bp, Artificial
  probe
  misc_feature (1)..(25): SEQ ID NO: 787; WAN024DJG_at; Start 94; Stop 118
tctgaaaaggtcaatctgattaata

SEQ ID NO: 160228 - DNA, 25 bp, Artificial
  probe
  misc_feature (1)..(25): SEQ ID NO: 786; WAN024DJH_at; Start 546; Stop 570
tggagctattaaggaagaggttccg

SEQ ID NO: 160229 - DNA, 25 bp, Artificial
  probe
  misc_feature (1)..(25): SEQ ID NO: 786; WAN024DJH_at; Start 560; Stop 584
aagaggttccgatactggttgttgc

SEQ ID NO: 160230 - DNA, 25 bp, Artificial
  probe
  misc_feature (1)..(25): SEQ ID NO: 786; WAN024DJH_at; Start 428; Stop 452
tacgtgaatccaaagctttatatga

SEQ ID NO: 160231 - DNA, 25 bp, Artificial
  probe
  misc_feature (1)..(25): SEQ ID NO: 786; WAN024DJH_at; Start 344; Stop 368
tcaaaagtactattcctgaagggta

SEQ ID NO: 160232 - DNA, 25 bp, Artificial
  probe
  misc_feature (1)..(25): SEQ ID NO: 786; WAN024DJH_at; Start 977; Stop 1001
gagttatggaacgtttggacaatta

SEQ ID NO: 160233 - DNA, 25 bp, Artificial
  probe
  misc_feature (1)..(25): SEQ ID NO: 786; WAN024DJH_at; Start 803; Stop 827
aagcaagttttagggatgttcctga

SEQ ID NO: 160234 - DNA, 25 bp, Artificial
  probe
  misc_feature (1)..(25): SEQ ID NO: 786; WAN024DJH_at; Start 514; Stop 538
agagcatggcagtttgcagatctac

SEQ ID NO: 160235 - DNA, 25 bp, Artificial
  probe
  misc_feature (1)..(25): SEQ ID NO: 786; WAN024DJH_at; Start 1017; Stop 1041
tatttacgaacctactattgagtgt

SEQ ID NO: 160236 - DNA, 25 bp, Artificial
  probe
  misc_feature (1)..(25): SEQ ID NO: 786; WAN024DJH_at; Start 652; Stop 676
aatgagatagatacatatagcgagg

SEQ ID NO: 160237 - DNA, 25 bp, Artificial
  probe
  misc_feature (1)..(25): SEQ ID NO: 786; WAN024DJH_at; Start 583; Stop 607
gcttttaatgaagcagaggttgcaa

SEQ ID NO: 160238 - DNA, 25 bp, Artificial
  probe
  misc_feature (1)..(25): SEQ ID NO: 786; WAN024DJH_at; Start 1155; Stop 1179
ctatacacgcgatttatttggcaga

SEQ ID NO: 160239 - DNA, 25 bp, Artificial
  probe
  misc_feature (1)..(25): SEQ ID NO: 786; WAN024DJH_at; Start 616; Stop 640
agtaacacttacttggcaactcgcg

SEQ ID NO: 160240 - DNA, 25 bp, Artificial
  probe
  misc_feature (1)..(25): SEQ ID NO: 786; WAN024DJH_at; Start 499; Stop 523
tctgagttaacaaaaagagcatggc

SEQ ID NO: 160241 - DNA, 25 bp, Artificial
  probe
  misc_feature (1)..(25): SEQ ID NO: 786; WAN024DJH_at; Start 946; Stop 970
tctgataattttcgttctagtgctg

SEQ ID NO: 160242 - DNA, 25 bp, Artificial
  probe
  misc_feature (1)..(25): SEQ ID NO: 786; WAN024DJH_at; Start 399; Stop 423
agatcgtattattttttctccagag

SEQ ID NO: 160243 - DNA, 25 bp, Artificial
  probe
  misc_feature (1)..(25): SEQ ID NO: 786; WAN024DJH_at; Start 839; Stop 863
cagctgtggtgcaatctaataaaac

SEQ ID NO: 160244 - DNA, 25 bp, Artificial
  probe
  misc_feature (1)..(25): SEQ ID NO: 786; WAN024DJH_at; Start 528; Stop 552
tgcagatctacttaaaggtggagct

SEQ ID NO: 160245 - DNA, 25 bp, Artificial
  probe
  misc_feature (1)..(25): SEQ ID NO: 786; WAN024DJH_at; Start 878; Stop 902
tagctggagctattctagctaaaca

SEQ ID NO: 160246 - DNA, 25 bp, Artificial
  probe
  misc_feature (1)..(25): SEQ ID NO: 786; WAN024DJH_at; Start 787; Stop 811
gacacaaagcaattgaaagcaagtt

SEQ ID NO: 160247 - DNA, 25 bp, Artificial
  probe
  misc_feature (1)..(25): SEQ ID NO: 786; WAN024DJH_at; Start 357; Stop 381
tcctgaagggtatactaaagaagtg

SEQ ID NO: 160248 - DNA, 25 bp, Artificial
  probe
  misc_feature (1)..(25): SEQ ID NO: 786; WAN024DJH_at; Start 893; Stop 917
tagctaaacaacctagtgttgtagg

SEQ ID NO: 160249 - DNA, 25 bp, Artificial
  probe
  misc_feature (1)..(25): SEQ ID NO: 786; WAN024DJH_at; Start 479; Stop 503
taggaactgatttggatgattctga

SEQ ID NO: 160250 - DNA, 25 bp, Artificial
  probe
  misc_feature (1)..(25): SEQ ID NO: 786; WAN024DJH_at; Start 752; Stop 776
ctagctttggttacggagggtattg

SEQ ID NO: 160251 - DNA, 25 bp, Artificial
  probe
  misc_feature (1)..(25): SEQ ID NO: 786; WAN024DJH_at; Start 1142; Stop 1166
tacaagaaaaactctatacacgcga

SEQ ID NO: 160252 - DNA, 25 bp, Artificial
  probe
  misc_feature (1)..(25): SEQ ID NO: 786; WAN024DJH_at; Start 1089; Stop 1113
gaatatttctgacattgttgtagcg

SEQ ID NO: 160253 - DNA, 25 bp, Artificial
  probe
  misc_feature (1)..(25): SEQ ID NO: 786; WAN024DJH_at; Start 1039; Stop 1063
tgtgatacttttatgggatacagag

SEQ ID NO: 160254 - DNA, 25 bp, Artificial
  probe
  misc_feature (1)..(25): SEQ ID NO: 786; WAN024DJH_at; Start 1122; Stop 1146
gaacgatgatttaagggatatacaa

SEQ ID NO: 160255 - DNA, 25 bp, Artificial
  probe
  misc_feature (1)..(25): SEQ ID NO: 786; WAN024DJH_at; Start 1101; Stop 1125
cattgttgtagcgaatcgtatgaac

SEQ ID NO: 160256 - DNA, 25 bp, Artificial
  probe
  misc_feature (1)..(25): SEQ ID NO: 786; WAN024DJH_at; Start 463; Stop 487
ccatctagaattgttgtaggaactg

SEQ ID NO: 160257 - DNA, 25 bp, Artificial
  probe
  misc_feature (1)..(25): SEQ ID NO: 786; WAN024DJH_at; Start 958; Stop 982
cgttctagtgctgttaagggagtta

SEQ ID NO: 160258 - DNA, 25 bp, Artificial
  probe
  misc_feature (1)..(25): SEQ ID NO: 786; WAN024DJH_at; Start 823; Stop 847
cctgaaaatctgattacagctgtgg

SEQ ID NO: 160259 - DNA, 25 bp, Artificial
  probe
  misc_feature (1)..(25): SEQ ID NO: 786; WAN024DJH_at; Start 864; Stop 888
aagaaaagattatatagctggagct

SEQ ID NO: 160260 - DNA, 25 bp, Artificial
  probe
  misc_feature (1)..(25): SEQ ID NO: 786; WAN024DJH_at; Start 767; Stop 791
gagggtattgcttaccaaaagacac

SEQ ID NO: 160261 - DNA, 25 bp, Artificial
  probe
  misc_feature (1)..(25): SEQ ID NO: 786; WAN024DJH_at; Start 415; Stop 439
tctccagagtttctacgtgaatcca

SEQ ID NO: 160262 - DNA, 25 bp, Artificial
  probe
  misc_feature (1)..(25): SEQ ID NO: 739; WAN024DJI_at; Start 176; Stop 200
taaatttggaagcaactatggatgc

SEQ ID NO: 160263 - DNA, 25 bp, Artificial
  probe
  misc_feature (1)..(25): SEQ ID NO: 739; WAN024DJI_at; Start 9; Stop 33
agcggtagcaggaacaggttatgta

SEQ ID NO: 160264 - DNA, 25 bp, Artificial
  probe
  misc_feature (1)..(25): SEQ ID NO: 739; WAN024DJI_at; Start 1165; Stop 1189
cgttttgaaccttcactagaggatg

SEQ ID NO: 160265 - DNA, 25 bp, Artificial
  probe
  misc_feature (1)..(25): SEQ ID NO: 739; WAN024DJI_at; Start 587; Stop 611
taacggaagctgaggcagttaaatt

SEQ ID NO: 160266 - DNA, 25 bp, Artificial
  probe
  misc_feature (1)..(25): SEQ ID NO: 739; WAN024DJI_at; Start 572; Stop 596
cacttttcatgggagtaacggaagc

SEQ ID NO: 160267 - DNA, 25 bp, Artificial
  probe
  misc_feature (1)..(25): SEQ ID NO: 739; WAN024DJI_at; Start 477; Stop 501
tgttggaactgacttagaagatact

SEQ ID NO: 160268 - DNA, 25 bp, Artificial
  probe
  misc_feature (1)..(25): SEQ ID NO: 739; WAN024DJI_at; Start 805; Stop 829
gcaaattactttgatgtaccacaaa

SEQ ID NO: 160269 - DNA, 25 bp, Artificial
  probe
  misc_feature (1)..(25): SEQ ID NO: 739; WAN024DJI_at; Start 559; Stop 583
gaagacatagatacacttttcatgg

SEQ ID NO: 160270 - DNA, 25 bp, Artificial
  probe
  misc_feature (1)..(25): SEQ ID NO: 739; WAN024DJI_at; Start 464; Stop 488
caagtcgcatcattgttggaactga

SEQ ID NO: 160271 - DNA, 25 bp, Artificial
  probe
  misc_feature (1)..(25): SEQ ID NO: 739; WAN024DJI_at; Start 1065; Stop 1089
ctatgagccaactttgaaggacggg

SEQ ID NO: 160272 - DNA, 25 bp, Artificial
  probe
  misc_feature (1)..(25): SEQ ID NO: 739; WAN024DJI_at; Start 663; Stop 687
tacttatgcagaggtgaaaggtttg

SEQ ID NO: 160273 - DNA, 25 bp, Artificial
  probe
  misc_feature (1)..(25): SEQ ID NO: 739; WAN024DJI_at; Start 677; Stop 701
tgaaaggtttggatgcaaaagccat

SEQ ID NO: 160274 - DNA, 25 bp, Artificial
  probe
  misc_feature (1)..(25): SEQ ID NO: 739; WAN024DJI_at; Start 276; Stop 300
tgatacatcagcagtagaggcggtc

SEQ ID NO: 160275 - DNA, 25 bp, Artificial
  probe
  misc_feature (1)..(25): SEQ ID NO: 739; WAN024DJI_at; Start 290; Stop 314
tagaggcggtcattcaacaagtaaa

SEQ ID NO: 160276 - DNA, 25 bp, Artificial
  probe
  misc_feature (1)..(25): SEQ ID NO: 739; WAN024DJI_at; Start 53; Stop 77
tgttggcacaacatcacgaaataaa

SEQ ID NO: 160277 - DNA, 25 bp, Artificial
  probe
  misc_feature (1)..(25): SEQ ID NO: 739; WAN024DJI_at; Start 199; Stop 223
gctaagtatgcttatgaagatgcag

SEQ ID NO: 160278 - DNA, 25 bp, Artificial
  probe
  misc_feature (1)..(25): SEQ ID NO: 739; WAN024DJI_at; Start 626; Stop 650
accttgcgttgcgtgtttcttactt

SEQ ID NO: 160279 - DNA, 25 bp, Artificial
  probe
  misc_feature (1)..(25): SEQ ID NO: 739; WAN024DJI_at; Start 715; Stop 739
ggcctagatccacgtataggaaatc

SEQ ID NO: 160280 - DNA, 25 bp, Artificial
  probe
  misc_feature (1)..(25): SEQ ID NO: 739; WAN024DJI_at; Start 1028; Stop 1052
tgaaacgattgaaagctaagggagt

SEQ ID NO: 160281 - DNA, 25 bp, Artificial
  probe
  misc_feature (1)..(25): SEQ ID NO: 739; WAN024DJI_at; Start 221; Stop 245
cagaatttgttgttgttgcagcacc

SEQ ID NO: 160282 - DNA, 25 bp, Artificial
  probe
  misc_feature (1)..(25): SEQ ID NO: 739; WAN024DJI_at; Start 910; Stop 934
tctgagactgatagtttagatgcgt

SEQ ID NO: 160283 - DNA, 25 bp, Artificial
  probe
  misc_feature (1)..(25): SEQ ID NO: 739; WAN024DJI_at; Start 747; Stop 771
caatccatcctttggctacggtggg

SEQ ID NO: 160284 - DNA, 25 bp, Artificial
  probe
  misc_feature (1)..(25): SEQ ID NO: 739; WAN024DJI_at; Start 1048; Stop 1072
ggagttacggttatcatctatgagc

SEQ ID NO: 160285 - DNA, 25 bp, Artificial
  probe
  misc_feature (1)..(25): SEQ ID NO: 739; WAN024DJI_at; Start 842; Stop 866
caactgttgaaagcaatcgaacgcg

SEQ ID NO: 160286 - DNA, 25 bp, Artificial
  probe
  misc_feature (1)..(25): SEQ ID NO: 739; WAN024DJI_at; Start 342; Stop 366
tattaaatctacaatccctgttgga

SEQ ID NO: 160287 - DNA, 25 bp, Artificial
  probe
  misc_feature (1)..(25): SEQ ID NO: 739; WAN024DJI_at; Start 451; Stop 475
gataacctgtatccaagtcgcatca

SEQ ID NO: 160288 - DNA, 25 bp, Artificial
  probe
  misc_feature (1)..(25): SEQ ID NO: 739; WAN024DJI_at; Start 880; Stop 904
gctcaacggattttagaaaaagctg

SEQ ID NO: 160289 - DNA, 25 bp, Artificial
  probe
  misc_feature (1)..(25): SEQ ID NO: 739; WAN024DJI_at; Start 428; Stop 452
tacgcgaatctaaagcattatacga

SEQ ID NO: 160290 - DNA, 25 bp, Artificial
  probe
  misc_feature (1)..(25): SEQ ID NO: 739; WAN024DJI_at; Start 895; Stop 919
gaaaaagctggagtatctgagactg

SEQ ID NO: 160291 - DNA, 25 bp, Artificial
  probe
  misc_feature (1)..(25): SEQ ID NO: 739; WAN024DJI_at; Start 993; Stop 1017
ggataacttccgtcactcctctatt

SEQ ID NO: 160292 - DNA, 25 bp, Artificial
  probe
  misc_feature (1)..(25): SEQ ID NO: 739; WAN024DJI_at; Start 523; Stop 547
atatttgcttccctactaaaagagg

SEQ ID NO: 160293 - DNA, 25 bp, Artificial
  probe
  misc_feature (1)..(25): SEQ ID NO: 739; WAN024DJI_at; Start 865; Stop 889
cgtaaggattttatcgctcaacgga

SEQ ID NO: 160294 - DNA, 25 bp, Artificial
  probe
  misc_feature (1)..(25): SEQ ID NO: 739; WAN024DJI_at; Start 698; Stop 722
ccattattgatggtattggcctaga

SEQ ID NO: 160295 - DNA, 25 bp, Artificial
  probe
  misc_feature (1)..(25): SEQ ID NO: 739; WAN024DJI_at; Start 358; Stop 382
cctgttggattcacagagtccgttc

SEQ ID NO: 160296 - DNA, 25 bp, Artificial
  probe
  misc_feature (1)..(25): SEQ ID NO: 4380; WAN024DJJ_at; Start 176; Stop 200
taaatttagtggctacattggatgc

SEQ ID NO: 160297 - DNA, 25 bp, Artificial
  probe
  misc_feature (1)..(25): SEQ ID NO: 4380; WAN024DJJ_at; Start 533; Stop 557
gattgctccaagaaggcgctttaaa

SEQ ID NO: 160298 - DNA, 25 bp, Artificial
  probe
  misc_feature (1)..(25): SEQ ID NO: 4380; WAN024DJJ_at; Start 446; Stop 470
tttacgataacttatatcccagccg

SEQ ID NO: 160299 - DNA, 25 bp, Artificial
  probe
  misc_feature (1)..(25): SEQ ID NO: 4380; WAN024DJJ_at; Start 1121; Stop 1145
tcaatgatttagaggaattcaaacg

SEQ ID NO: 160300 - DNA, 25 bp, Artificial
  probe
  misc_feature (1)..(25): SEQ ID NO: 4380; WAN024DJJ_at; Start 1212; Stop 1236
tacacgtgatatttttgaaagagat

SEQ ID NO: 160301 - DNA, 25 bp, Artificial
  probe
  misc_feature (1)..(25): SEQ ID NO: 4380; WAN024DJJ_at; Start 1195; Stop 1219
gtcaaggaaaaagtctatacacgtg

SEQ ID NO: 160302 - DNA, 25 bp, Artificial
  probe
  misc_feature (1)..(25): SEQ ID NO: 4380; WAN024DJJ_at; Start 1161; Stop 1185
tgttgctaatcgctatgataactca

SEQ ID NO: 160303 - DNA, 25 bp, Artificial
  probe
  misc_feature (1)..(25): SEQ ID NO: 4380; WAN024DJJ_at; Start 186; Stop 210
ggctacattggatgcaaaagaagca

SEQ ID NO: 160304 - DNA, 25 bp, Artificial
  probe
  misc_feature (1)..(25): SEQ ID NO: 4380; WAN024DJJ_at; Start 371; Stop 395
cagagtcagctcgaaagaaatttca

SEQ ID NO: 160305 - DNA, 25 bp, Artificial
  probe
  misc_feature (1)..(25): SEQ ID NO: 4380; WAN024DJJ_at; Start 1149; Stop 1173
gagtaatgccattgttgctaatcgc

SEQ ID NO: 160306 - DNA, 25 bp, Artificial
  probe
  misc_feature (1)..(25): SEQ ID NO: 4380; WAN024DJJ_at; Start 698; Stop 722
ctattattgatggagttggtttgga

SEQ ID NO: 160307 - DNA, 25 bp, Artificial
  probe
  misc_feature (1)..(25): SEQ ID NO: 4380; WAN024DJJ_at; Start 464; Stop 488
ccagccgtattattttagggacaga

SEQ ID NO: 160308 - DNA, 25 bp, Artificial
  probe
  misc_feature (1)..(25): SEQ ID NO: 4380; WAN024DJJ_at; Start 248; Stop 272
ctaactatgatccaaagaagaactt

SEQ ID NO: 160309 - DNA, 25 bp, Artificial
  probe
  misc_feature (1)..(25): SEQ ID NO: 4380; WAN024DJJ_at; Start 971; Stop 995
tctatagattgaccatgaagagtaa

SEQ ID NO: 160310 - DNA, 25 bp, Artificial
  probe
  misc_feature (1)..(25): SEQ ID NO: 4380; WAN024DJJ_at; Start 220; Stop 244
gcggattttgttgtgattgcagctc

SEQ ID NO: 160311 - DNA, 25 bp, Artificial
  probe
  misc_feature (1)..(25): SEQ ID NO: 4380; WAN024DJJ_at; Start 854; Stop 878
gcaattcgacacgtaaagactttat

SEQ ID NO: 160312 - DNA, 25 bp, Artificial
  probe
  misc_feature (1)..(25): SEQ ID NO: 4380; WAN024DJJ_at; Start 586; Stop 610
tttactgaagctgaggcggtcaagc

SEQ ID NO: 160313 - DNA, 25 bp, Artificial
  probe
  misc_feature (1)..(25): SEQ ID NO: 4380; WAN024DJJ_at; Start 883; Stop 907
gatcaggttcttaagatggtagatt

SEQ ID NO: 160314 - DNA, 25 bp, Artificial
  probe
  misc_feature (1)..(25): SEQ ID NO: 4380; WAN024DJJ_at; Start 845; Stop 869
tagtacggagcaattcgacacgtaa

SEQ ID NO: 160315 - DNA, 25 bp, Artificial
  probe
  misc_feature (1)..(25): SEQ ID NO: 4380; WAN024DJJ_at; Start 83; Stop 107
tggacattattcctgagaaggtcga

SEQ ID NO: 160316 - DNA, 25 bp, Artificial
  probe
  misc_feature (1)..(25): SEQ ID NO: 4380; WAN024DJJ_at; Start 118; Stop 142
caaagaaagtcacctattcaagatg

SEQ ID NO: 160317 - DNA, 25 bp, Artificial
  probe
  misc_feature (1)..(25): SEQ ID NO: 4380; WAN024DJJ_at; Start 981; Stop 1005
gaccatgaagagtaatagcgataat

SEQ ID NO: 160318 - DNA, 25 bp, Artificial
  probe
  misc_feature (1)..(25): SEQ ID NO: 4380; WAN024DJJ_at; Start 651; Stop 675
taatgagctggatacttattctgag

SEQ ID NO: 160319 - DNA, 25 bp, Artificial
  probe
  misc_feature (1)..(25): SEQ ID NO: 4380; WAN024DJJ_at; Start 286; Stop 310
gctgtagagtctgtcattgaaacgg

SEQ ID NO: 160320 - DNA, 25 bp, Artificial
  probe
  misc_feature (1)..(25): SEQ ID NO: 4380; WAN024DJJ_at; Start 1039; Stop 1063
cgtataaaagctaagggagtaagag

SEQ ID NO: 160321 - DNA, 25 bp, Artificial
  probe
  misc_feature (1)..(25): SEQ ID NO: 4380; WAN024DJJ_at; Start 274; Stop 298
tttgacacttctgctgtagagtctg

SEQ ID NO: 160322 - DNA, 25 bp, Artificial
  probe
  misc_feature (1)..(25): SEQ ID NO: 4380; WAN024DJJ_at; Start 1177; Stop 1201
gataactcattagaagatgtcaagg

SEQ ID NO: 160323 - DNA, 25 bp, Artificial
  probe
  misc_feature (1)..(25): SEQ ID NO: 4380; WAN024DJJ_at; Start 485; Stop 509
cagataaaaataatgaacgcttggt

SEQ ID NO: 160324 - DNA, 25 bp, Artificial
  probe
  misc_feature (1)..(25): SEQ ID NO: 4380; WAN024DJJ_at; Start 793; Stop 817
aagcaacttcttgccaactatgaag

SEQ ID NO: 160325 - DNA, 25 bp, Artificial
  probe
  misc_feature (1)..(25): SEQ ID NO: 4380; WAN024DJJ_at; Start 577; Stop 601
tacatgggctttactgaagctgagg

SEQ ID NO: 160326 - DNA, 25 bp, Artificial
  probe
  misc_feature (1)..(25): SEQ ID NO: 4380; WAN024DJJ_at; Start 233; Stop 257
tgattgcagctccaactaactatga

SEQ ID NO: 160327 - DNA, 25 bp, Artificial
  probe
  misc_feature (1)..(25): SEQ ID NO: 4380; WAN024DJJ_at; Start 1135; Stop 1159
gaattcaaacgactgagtaatgcca

SEQ ID NO: 160328 - DNA, 25 bp, Artificial
  probe
  misc_feature (1)..(25): SEQ ID NO: 4380; WAN024DJJ_at; Start 356; Stop 380
ttccagttggttatacagagtcagc

SEQ ID NO: 160329 - DNA, 25 bp, Artificial
  probe
  misc_feature (1)..(25): SEQ ID NO: 4380; WAN024DJJ_at; Start 600; Stop 624
ggcggtcaagctttttgcaaatact

SEQ ID NO: 160330 - DNA, 25 bp, Artificial
  probe
  misc_feature (1)..(25): SEQ ID NO: 1298; WAN024DJK_at; Start 658; Stop 682
caggttgatttagttagagcgatag

SEQ ID NO: 160331 - DNA, 25 bp, Artificial
  probe
  misc_feature (1)..(25): SEQ ID NO: 1298; WAN024DJK_at; Start 348; Stop 372
ttcttttttaggagctcaggcagca

SEQ ID NO: 160332 - DNA, 25 bp, Artificial
  probe
  misc_feature (1)..(25): SEQ ID NO: 1298; WAN024DJK_at; Start 626; Stop 650
tatcttcaggtagaattacgcctgg

SEQ ID NO: 160333 - DNA, 25 bp, Artificial
  probe
  misc_feature (1)..(25): SEQ ID NO: 1298; WAN024DJK_at; Start 49; Stop 73
ggagctacccggtcattgttacgat

SEQ ID NO: 160334 - DNA, 25 bp, Artificial
  probe
  misc_feature (1)..(25): SEQ ID NO: 1298; WAN024DJK_at; Start 1067; Stop 1091
ctttgagaggacaagagaaggctac

SEQ ID NO: 160335 - DNA, 25 bp, Artificial
  probe
  misc_feature (1)..(25): SEQ ID NO: 1298; WAN024DJK_at; Start 861; Stop 885
tgtgtgttccaaaaaagaagctttc

SEQ ID NO: 160336 - DNA, 25 bp, Artificial
  probe
  misc_feature (1)..(25): SEQ ID NO: 1298; WAN024DJK_at; Start 74; Stop 98
tagtttcgatagttgaggattcaga

SEQ ID NO: 160337 - DNA, 25 bp, Artificial
  probe
  misc_feature (1)..(25): SEQ ID NO: 1298; WAN024DJK_at; Start 849; Stop 873
tgatatcgtatgtgtgtgttccaaa

SEQ ID NO: 160338 - DNA, 25 bp, Artificial
  probe
  misc_feature (1)..(25): SEQ ID NO: 1298; WAN024DJK_at; Start 991; Stop 1015
gaaccaggagattatatgcagctta

SEQ ID NO: 160339 - DNA, 25 bp, Artificial
  probe
  misc_feature (1)..(25): SEQ ID NO: 1298; WAN024DJK_at; Start 927; Stop 951
tattgggacaaattcaggtggtaca

SEQ ID NO: 160340 - DNA, 25 bp, Artificial
  probe
  misc_feature (1)..(25): SEQ ID NO: 1298; WAN024DJK_at; Start 1083; Stop 1107
gaaggctacattacgtttttcagat

SEQ ID NO: 160341 - DNA, 25 bp, Artificial
  probe
  misc_feature (1)..(25): SEQ ID NO: 1298; WAN024DJK_at; Start 402; Stop 426
tataagggagtttatggaagaggac

SEQ ID NO: 160342 - DNA, 25 bp, Artificial
  probe
  misc_feature (1)..(25): SEQ ID NO: 1298; WAN024DJK_at; Start 361; Stop 385
gctcaggcagcaatcaaacagagaa

SEQ ID NO: 160343 - DNA, 25 bp, Artificial
  probe
  misc_feature (1)..(25): SEQ ID NO: 1298; WAN024DJK_at; Start 674; Stop 698
gagcgatagctaatcttcctgagag

SEQ ID NO: 160344 - DNA, 25 bp, Artificial
  probe
  misc_feature (1)..(25): SEQ ID NO: 1298; WAN024DJK_at; Start 913; Stop 937
tctggagcgttagttattgggacaa

SEQ ID NO: 160345 - DNA, 25 bp, Artificial
  probe
  misc_feature (1)..(25): SEQ ID NO: 1298; WAN024DJK_at; Start 275; Stop 299
gaatatcgtttcacaaaatcaacag

SEQ ID NO: 160346 - DNA, 25 bp, Artificial
  probe
  misc_feature (1)..(25): SEQ ID NO: 1298; WAN024DJK_at; Start 726; Stop 750
tataggaatagttgaaagcgaagaa

SEQ ID NO: 160347 - DNA, 25 bp, Artificial
  probe
  misc_feature (1)..(25): SEQ ID NO: 1298; WAN024DJK_at; Start 941; Stop 965
caggtggtacaaaagagataatttc

SEQ ID NO: 160348 - DNA, 25 bp, Artificial
  probe
  misc_feature (1)..(25): SEQ ID NO: 1298; WAN024DJK_at; Start 642; Stop 666
tacgcctggaaaagggcaggttgat

SEQ ID NO: 160349 - DNA, 25 bp, Artificial
  probe
  misc_feature (1)..(25): SEQ ID NO: 1298; WAN024DJK_at; Start 1107; Stop 1131
taaaaataatgccatgcagatcatg

SEQ ID NO: 160350 - DNA, 25 bp, Artificial
  probe
  misc_feature (1)..(25): SEQ ID NO: 1298; WAN024DJK_at; Start 977; Stop 1001
caggatatctgtatgaaccaggaga

SEQ ID NO: 160351 - DNA, 25 bp, Artificial
  probe
  misc_feature (1)..(25): SEQ ID NO: 1298; WAN024DJK_at; Start 877; Stop 901
gaagctttcggtcgtattacagttg

SEQ ID NO: 160352 - DNA, 25 bp, Artificial
  probe
  misc_feature (1)..(25): SEQ ID NO: 1298; WAN024DJK_at; Start 894; Stop 918
tacagttgagggaatgttgtctgga

SEQ ID NO: 160353 - DNA, 25 bp, Artificial
  probe
  misc_feature (1)..(25): SEQ ID NO: 1298; WAN024DJK_at; Start 1122; Stop 1146
gcagatcatgcaactatataaggaa

SEQ ID NO: 160354 - DNA, 25 bp, Artificial
  probe
  misc_feature (1)..(25): SEQ ID NO: 1298; WAN024DJK_at; Start 1052; Stop 1076
ccatcttggaaattgctttgagagg

SEQ ID NO: 160355 - DNA, 25 bp, Artificial
  probe
  misc_feature (1)..(25): SEQ ID NO: 1298; WAN024DJK_at; Start 1037; Stop 1061
taaacaataggagttccatcttgga

SEQ ID NO: 160356 - DNA, 25 bp, Artificial
  probe
  misc_feature (1)..(25): SEQ ID NO: 1298; WAN024DJK_at; Start 788; Stop 812
aacttgacggtattgagtttcatgg

SEQ ID NO: 160357 - DNA, 25 bp, Artificial
  probe
  misc_feature (1)..(25): SEQ ID NO: 1298; WAN024DJK_at; Start 808; Stop 832
catggttttcaatctgatccaactg

SEQ ID NO: 160358 - DNA, 25 bp, Artificial
  probe
  misc_feature (1)..(25): SEQ ID NO: 1298; WAN024DJK_at; Start 137; Stop 161
tggaagatgagcttgtaaacaaagg

SEQ ID NO: 160359 - DNA, 25 bp, Artificial
  probe
  misc_feature (1)..(25): SEQ ID NO: 1298; WAN024DJK_at; Start 34; Stop 58
tctgatatatcatcgggagctaccc

SEQ ID NO: 160360 - DNA, 25 bp, Artificial
  probe
  misc_feature (1)..(25): SEQ ID NO: 1298; WAN024DJK_at; Start 687; Stop 711
tcttcctgagagatataaacagatg

SEQ ID NO: 160361 - DNA, 25 bp, Artificial
  probe
  misc_feature (1)..(25): SEQ ID NO: 1298; WAN024DJK_at; Start 963; Stop 987
ttctacaggagaaacaggatatctg

SEQ ID NO: 160362 - DNA, 25 bp, Artificial
  probe
  misc_feature (1)..(25): SEQ ID NO: 1298; WAN024DJK_at; Start 589; Stop 613
gataaagtcgcatttcagaaccaaa

SEQ ID NO: 160363 - DNA, 25 bp, Artificial
  probe
  misc_feature (1)..(25): SEQ ID NO: 1298; WAN024DJK_at; Start 119; Stop 143
taccagaacatggaaatgtggaaga

SEQ ID NO: 160364 - DNA, 25 bp, Artificial
  probe
  misc_feature (1)..(25): SEQ ID NO: 5087; WAN024DJL_at; Start 474; Stop 498
gaatagtgtgtattatcccagttca

SEQ ID NO: 160365 - DNA, 25 bp, Artificial
  probe
  misc_feature (1)..(25): SEQ ID NO: 5087; WAN024DJL_at; Start 103; Stop 127
ggaaatggtgttactcctgttattg

SEQ ID NO: 160366 - DNA, 25 bp, Artificial
  probe
  misc_feature (1)..(25): SEQ ID NO: 5087; WAN024DJL_at; Start 358; Stop 382
aaatctttcattggttttactgcta

SEQ ID NO: 160367 - DNA, 25 bp, Artificial
  probe
  misc_feature (1)..(25): SEQ ID NO: 5087; WAN024DJL_at; Start 739; Stop 763
ttaattatagtagtctctctctgcc

SEQ ID NO: 160368 - DNA, 25 bp, Artificial
  probe
  misc_feature (1)..(25): SEQ ID NO: 5087; WAN024DJL_at; Start 988; Stop 1012
gctgattcaacagtgacaagtttcc

SEQ ID NO: 160369 - DNA, 25 bp, Artificial
  probe
  misc_feature (1)..(25): SEQ ID NO: 5087; WAN024DJL_at; Start 494; Stop 518
gttcaatatttctccactacaccta

SEQ ID NO: 160370 - DNA, 25 bp, Artificial
  probe
  misc_feature (1)..(25): SEQ ID NO: 5087; WAN024DJL_at; Start 976; Stop 1000
ggctatactacagctgattcaacag

SEQ ID NO: 160371 - DNA, 25 bp, Artificial
  probe
  misc_feature (1)..(25): SEQ ID NO: 5087; WAN024DJL_at; Start 558; Stop 582
tgttatcccatataagaaccgagtg

SEQ ID NO: 160372 - DNA, 25 bp, Artificial
  probe
  misc_feature (1)..(25): SEQ ID NO: 5087; WAN024DJL_at; Start 86; Stop 110
tgctctctctatatacaggaaatgg

SEQ ID NO: 160373 - DNA, 25 bp, Artificial
  probe
  misc_feature (1)..(25): SEQ ID NO: 5087; WAN024DJL_at; Start 627; Stop 651
gccccaatctcgtatagtttggata

SEQ ID NO: 160374 - DNA, 25 bp, Artificial
  probe
  misc_feature (1)..(25): SEQ ID NO: 5087; WAN024DJL_at; Start 754; Stop 778
tctctctgcctatattttgatgtgt

SEQ ID NO: 160375 - DNA, 25 bp, Artificial
  probe
  misc_feature (1)..(25): SEQ ID NO: 5087; WAN024DJL_at; Start 926; Stop 950
caggatttggtggtgtcaatagtta

SEQ ID NO: 160376 - DNA, 25 bp, Artificial
  probe
  misc_feature (1)..(25): SEQ ID NO: 5087; WAN024DJL_at; Start 1217; Stop 1241
taggaatgagattgactaagcaaga

SEQ ID NO: 160377 - DNA, 25 bp, Artificial
  probe
  misc_feature (1)..(25): SEQ ID NO: 5087; WAN024DJL_at; Start 1187; Stop 1211
tattttacgtggttattatctgtgc

SEQ ID NO: 160378 - DNA, 25 bp, Artificial
  probe
  misc_feature (1)..(25): SEQ ID NO: 5087; WAN024DJL_at; Start 833; Stop 857
gactggctgatggttctctaggtca

SEQ ID NO: 160379 - DNA, 25 bp, Artificial
  probe
  misc_feature (1)..(25): SEQ ID NO: 5087; WAN024DJL_at; Start 146; Stop 170
cggcattgtattctttatatcgaaa

SEQ ID NO: 160380 - DNA, 25 bp, Artificial
  probe
  misc_feature (1)..(25): SEQ ID NO: 5087; WAN024DJL_at; Start 444; Stop 468
tgcagttaaatggatacaaacgatg

SEQ ID NO: 160381 - DNA, 25 bp, Artificial
  probe
  misc_feature (1)..(25): SEQ ID NO: 5087; WAN024DJL_at; Start 251; Stop 275
cacaagatttattggtgatgacttc

SEQ ID NO: 160382 - DNA, 25 bp, Artificial
  probe
  misc_feature (1)..(25): SEQ ID NO: 5087; WAN024DJL_at; Start 818; Stop 842
cactttatcgttatggactggctga

SEQ ID NO: 160383 - DNA, 25 bp, Artificial
  probe
  misc_feature (1)..(25): SEQ ID NO: 5087; WAN024DJL_at; Start 1002; Stop 1026
gacaagtttccttattgatactggg

SEQ ID NO: 160384 - DNA, 25 bp, Artificial
  probe
  misc_feature (1)..(25): SEQ ID NO: 5087; WAN024DJL_at; Start 1203; Stop 1227
tatctgtgcatttataggaatgaga

SEQ ID NO: 160385 - DNA, 25 bp, Artificial
  probe
  misc_feature (1)..(25): SEQ ID NO: 5087; WAN024DJL_at; Start 895; Stop 919
gactctgatactataaaggctatta

SEQ ID NO: 160386 - DNA, 25 bp, Artificial
  probe
  misc_feature (1)..(25): SEQ ID NO: 5087; WAN024DJL_at; Start 326; Stop 350
taaatggcgttataagaatactatc

SEQ ID NO: 160387 - DNA, 25 bp, Artificial
  probe
  misc_feature (1)..(25): SEQ ID NO: 5087; WAN024DJL_at; Start 881; Stop 905
gggaaaattatttagactctgatac

SEQ ID NO: 160388 - DNA, 25 bp, Artificial
  probe
  misc_feature (1)..(25): SEQ ID NO: 5087; WAN024DJL_at; Start 908; Stop 932
taaaggctattattgggtcaggatt

SEQ ID NO: 160389 - DNA, 25 bp, Artificial
  probe
  misc_feature (1)..(25): SEQ ID NO: 5087; WAN024DJL_at; Start 698; Stop 722
ggatattaacctatagaaagttgag

SEQ ID NO: 160390 - DNA, 25 bp, Artificial
  probe
  misc_feature (1)..(25): SEQ ID NO: 5087; WAN024DJL_at; Start 861; Stop 885
tattggaactcttagaaattgggaa

SEQ ID NO: 160391 - DNA, 25 bp, Artificial
  probe
  misc_feature (1)..(25): SEQ ID NO: 5087; WAN024DJL_at; Start 70; Stop 94
gtatggatagttataatgctctctc

SEQ ID NO: 160392 - DNA, 25 bp, Artificial
  probe
  misc_feature (1)..(25): SEQ ID NO: 5087; WAN024DJL_at; Start 673; Stop 697
ctttcgtttatactaaatagacagg

SEQ ID NO: 160393 - DNA, 25 bp, Artificial
  probe
  misc_feature (1)..(25): SEQ ID NO: 5087; WAN024DJL_at; Start 233; Stop 257
tattaacagttatattcacacaaga

SEQ ID NO: 160394 - DNA, 25 bp, Artificial
  probe
  misc_feature (1)..(25): SEQ ID NO: 5087; WAN024DJL_at; Start 1106; Stop 1130
aattagcgttatatactattgtagc

SEQ ID NO: 160395 - DNA, 25 bp, Artificial
  probe
  misc_feature (1)..(25): SEQ ID NO: 5087; WAN024DJL_at; Start 402; Stop 426
tatgcaacatttcaatcttatggtg

SEQ ID NO: 160396 - DNA, 25 bp, Artificial
  probe
  misc_feature (1)..(25): SEQ ID NO: 5087; WAN024DJL_at; Start 847; Stop 871
tctctaggtcaacgtattggaactc

SEQ ID NO: 160397 - DNA, 25 bp, Artificial
  probe
  misc_feature (1)..(25): SEQ ID NO: 5087; WAN024DJL_at; Start 218; Stop 242
tagcctactatttgttattaacagt

SEQ ID NO: 160398 - DNA, 25 bp, Artificial
  probe
  misc_feature (1)..(25): SEQ ID NO: 776; WAN024DJM_at; Start 269; Stop 293
taattgcgacagcttggcaaacagc

SEQ ID NO: 160399 - DNA, 25 bp, Artificial
  probe
  misc_feature (1)..(25): SEQ ID NO: 776; WAN024DJM_at; Start 213; Stop 237
tgatttaaaacggataccagtggta

SEQ ID NO: 160400 - DNA, 25 bp, Artificial
  probe
  misc_feature (1)..(25): SEQ ID NO: 776; WAN024DJM_at; Start 806; Stop 830
aatgtgcagttgttggtagaagtcg

SEQ ID NO: 160401 - DNA, 25 bp, Artificial
  probe
  misc_feature (1)..(25): SEQ ID NO: 776; WAN024DJM_at; Start 311; Stop 335
tctcatcaagcaaaggtcacaaatt

SEQ ID NO: 160402 - DNA, 25 bp, Artificial
  probe
  misc_feature (1)..(25): SEQ ID NO: 776; WAN024DJM_at; Start 843; Stop 867
ggaactctcaaatggtcagaatact

SEQ ID NO: 160403 - DNA, 25 bp, Artificial
  probe
  misc_feature (1)..(25): SEQ ID NO: 776; WAN024DJM_at; Start 790; Stop 814
gaagccatggcaaataaatgtgcag

SEQ ID NO: 160404 - DNA, 25 bp, Artificial
  probe
  misc_feature (1)..(25): SEQ ID NO: 776; WAN024DJM_at; Start 385; Stop 409
gaggcatcgtatcgcttgccactta

SEQ ID NO: 160405 - DNA, 25 bp, Artificial
  probe
  misc_feature (1)..(25): SEQ ID NO: 776; WAN024DJM_at; Start 301; Stop 325
gtcgcaaatttctcatcaagcaaag

SEQ ID NO: 160406 - DNA, 25 bp, Artificial
  probe
  misc_feature (1)..(25): SEQ ID NO: 776; WAN024DJM_at; Start 481; Stop 505
tataatggtctttctgacaacgagt

SEQ ID NO: 160407 - DNA, 25 bp, Artificial
  probe
  misc_feature (1)..(25): SEQ ID NO: 776; WAN024DJM_at; Start 932; Stop 956
tgttggcacaagttcaaaatgaagg

SEQ ID NO: 160408 - DNA, 25 bp, Artificial
  probe
  misc_feature (1)..(25): SEQ ID NO: 776; WAN024DJM_at; Start 76; Stop 100
cttattgatcaaggacatgatgtgg

SEQ ID NO: 160409 - DNA, 25 bp, Artificial
  probe
  misc_feature (1)..(25): SEQ ID NO: 776; WAN024DJM_at; Start 664; Stop 688
gaaaagttacctgatacctataatg

SEQ ID NO: 160410 - DNA, 25 bp, Artificial
  probe
  misc_feature (1)..(25): SEQ ID NO: 776; WAN024DJM_at; Start 903; Stop 927
ggtagtacatttacaagaggatcga

SEQ ID NO: 160411 - DNA, 25 bp, Artificial
  probe
  misc_feature (1)..(25): SEQ ID NO: 776; WAN024DJM_at; Start 633; Stop 657
gaagattaatatatttggacgccgt

SEQ ID NO: 160412 - DNA, 25 bp, Artificial
  probe
  misc_feature (1)..(25): SEQ ID NO: 776; WAN024DJM_at; Start 971; Stop 995
taccactaaattggagtaactcttg

SEQ ID NO: 160413 - DNA, 25 bp, Artificial
  probe
  misc_feature (1)..(25): SEQ ID NO: 776; WAN024DJM_at; Start 604; Stop 628
gcaaaattaaagaagcgatatcctg

SEQ ID NO: 160414 - DNA, 25 bp, Artificial
  probe
  misc_feature (1)..(25): SEQ ID NO: 776; WAN024DJM_at; Start 559; Stop 583
catgaaagtgagcataagaaaagtc

SEQ ID NO: 160415 - DNA, 25 bp, Artificial
  probe
  misc_feature (1)..(25): SEQ ID NO: 776; WAN024DJM_at; Start 17; Stop 41
tccttccatttaagagaatgacagg

SEQ ID NO: 160416 - DNA, 25 bp, Artificial
  probe
  misc_feature (1)..(25): SEQ ID NO: 776; WAN024DJM_at; Start 91; Stop 115
catgatgtggtttgttatgttccta

SEQ ID NO: 160417 - DNA, 25 bp, Artificial
  probe
  misc_feature (1)..(25): SEQ ID NO: 776; WAN024DJM_at; Start 239; Stop 263
cagaaaaatatatacgtgatgcaga

SEQ ID NO: 160418 - DNA, 25 bp, Artificial
  probe
  misc_feature (1)..(25): SEQ ID NO: 776; WAN024DJM_at; Start 917; Stop 941
aagaggatcgattattgttggcaca

SEQ ID NO: 160419 - DNA, 25 bp, Artificial
  probe
  misc_feature (1)..(25): SEQ ID NO: 776; WAN024DJM_at; Start 776; Stop 800
gactacctattgtagaagccatggc

SEQ ID NO: 160420 - DNA, 25 bp, Artificial
  probe
  misc_feature (1)..(25): SEQ ID NO: 776; WAN024DJM_at; Start 645; Stop 669
atttggacgccgtattccagaaaag

SEQ ID NO: 160421 - DNA, 25 bp, Artificial
  probe
  misc_feature (1)..(25): SEQ ID NO: 776; WAN024DJM_at; Start 408; Stop 432
tacattaattactgttacgaggagt

SEQ ID NO: 160422 - DNA, 25 bp, Artificial
  probe
  misc_feature (1)..(25): SEQ ID NO: 776; WAN024DJM_at; Start 531; Stop 555
taaggacctcactttgatgatgatg

SEQ ID NO: 160423 - DNA, 25 bp, Artificial
  probe
  misc_feature (1)..(25): SEQ ID NO: 776; WAN024DJM_at; Start 517; Stop 541
gaaaaaattagtcataaggacctca

SEQ ID NO: 160424 - DNA, 25 bp, Artificial
  probe
  misc_feature (1)..(25): SEQ ID NO: 776; WAN024DJM_at; Start 496; Stop 520
gacaacgagtatcttcatacagaaa

SEQ ID NO: 160425 - DNA, 25 bp, Artificial
  probe
  misc_feature (1)..(25): SEQ ID NO: 776; WAN024DJM_at; Start 720; Stop 744
aaagatgtatcaggaatcggatgtc

SEQ ID NO: 160426 - DNA, 25 bp, Artificial
  probe
  misc_feature (1)..(25): SEQ ID NO: 776; WAN024DJM_at; Start 120; Stop 144
tagttatagaggtagaaaccagaca

SEQ ID NO: 160427 - DNA, 25 bp, Artificial
  probe
  misc_feature (1)..(25): SEQ ID NO: 776; WAN024DJM_at; Start 829; Stop 853
cgaggagctttgttggaactctcaa

SEQ ID NO: 160428 - DNA, 25 bp, Artificial
  probe
  misc_feature (1)..(25): SEQ ID NO: 776; WAN024DJM_at; Start 33; Stop 57
aatgacaggtggaataagagttatc

SEQ ID NO: 160429 - DNA, 25 bp, Artificial
  probe
  misc_feature (1)..(25): SEQ ID NO: 776; WAN024DJM_at; Start 258; Stop 282
tgcagatgtagtaattgcgacagct

SEQ ID NO: 160430 - DNA, 25 bp, Artificial
  probe
  misc_feature (1)..(25): SEQ ID NO: 776; WAN024DJM_at; Start 352; Stop 376
tatgaaatcttcaatggaggaaagg

SEQ ID NO: 160431 - DNA, 25 bp, Artificial
  probe
  misc_feature (1)..(25): SEQ ID NO: 776; WAN024DJM_at; Start 284; Stop 308
ggcaaacagcctatgatgtcgcaaa

SEQ ID NO: 160432 - DNA, 25 bp, Artificial
  probe
  misc_feature (1)..(25): SEQ ID NO: 3324; WAN024DJN_at; Start 349; Stop 373
gaaactactacttgggaagatgtcc

SEQ ID NO: 160433 - DNA, 25 bp, Artificial
  probe
  misc_feature (1)..(25): SEQ ID NO: 3324; WAN024DJN_at; Start 304; Stop 328
gctaaaatcgcagctgttatcaagg

SEQ ID NO: 160434 - DNA, 25 bp, Artificial
  probe
  misc_feature (1)..(25): SEQ ID NO: 3324; WAN024DJN_at; Start 236; Stop 260
tgattgactgttcaccatttggttg

SEQ ID NO: 160435 - DNA, 25 bp, Artificial
  probe
  misc_feature (1)..(25): SEQ ID NO: 3324; WAN024DJN_at; Start 228; Stop 252
tgacggcatgattgactgttcacca

SEQ ID NO: 160436 - DNA, 25 bp, Artificial
  probe
  misc_feature (1)..(25): SEQ ID NO: 3324; WAN024DJN_at; Start 60; Stop 84
cattgtcaaagcaccctatgttcgc

SEQ ID NO: 160437 - DNA, 25 bp, Artificial
  probe
  misc_feature (1)..(25): SEQ ID NO: 3324; WAN024DJN_at; Start 469; Stop 493
gatgatgcctttgaacgtcatgtga

SEQ ID NO: 160438 - DNA, 25 bp, Artificial
  probe
  misc_feature (1)..(25): SEQ ID NO: 3324; WAN024DJN_at; Start 69; Stop 93
agcaccctatgttcgcttgattggg

SEQ ID NO: 160439 - DNA, 25 bp, Artificial
  probe
  misc_feature (1)..(25): SEQ ID NO: 3324; WAN024DJN_at; Start 444; Stop 468
actcatcttggaacaagggatttca

SEQ ID NO: 160440 - DNA, 25 bp, Artificial
  probe
  misc_feature (1)..(25): SEQ ID NO: 3324; WAN024DJN_at; Start 171; Stop 195
tactgccggccttcacactatcgag

SEQ ID NO: 160441 - DNA, 25 bp, Artificial
  probe
  misc_feature (1)..(25): SEQ ID NO: 3324; WAN024DJN_at; Start 394; Stop 418
tgcggaaactacaaggaccacagcc

SEQ ID NO: 160442 - DNA, 25 bp, Artificial
  probe
  misc_feature (1)..(25): SEQ ID NO: 3324; WAN024DJN_at; Start 289; Stop 313
ggacgtcacaccagtgctaaaatcg

SEQ ID NO: 160443 - DNA, 25 bp, Artificial
  probe
  misc_feature (1)..(25): SEQ ID NO: 3324; WAN024DJN_at; Start 3; Stop 27
gaaaggatttaccatgtcaaaagaa

SEQ ID NO: 160444 - DNA, 25 bp, Artificial
  probe
  misc_feature (1)..(25): SEQ ID NO: 3324; WAN024DJN_at; Start 476; Stop 500
cctttgaacgtcatgtgatttaact

SEQ ID NO: 160445 - DNA, 25 bp, Artificial
  probe
  misc_feature (1)..(25): SEQ ID NO: 3324; WAN024DJN_at; Start 418; Stop 442
ctcttctctgctaaagaatgggcaa

SEQ ID NO: 160446 - DNA, 25 bp, Artificial
  probe
  misc_feature (1)..(25): SEQ ID NO: 3324; WAN024DJN_at; Start 101; Stop 125
caggaccaaaaggagacatcatctc

SEQ ID NO: 160447 - DNA, 25 bp, Artificial
  probe
  misc_feature (1)..(25): SEQ ID NO: 3324; WAN024DJN_at; Start 41; Stop 65
gttttgaacttgaccacaccattgt

SEQ ID NO: 160448 - DNA, 25 bp, Artificial
  probe
  misc_feature (1)..(25): SEQ ID NO: 3324; WAN024DJN_at; Start 454; Stop 478
gaacaagggatttcagatgatgcct

SEQ ID NO: 160449 - DNA, 25 bp, Artificial
  probe
  misc_feature (1)..(25): SEQ ID NO: 3324; WAN024DJN_at; Start 374; Stop 398
cagggacaaccatcgaatcttgcgg

SEQ ID NO: 160450 - DNA, 25 bp, Artificial
  probe
  misc_feature (1)..(25): SEQ ID NO: 3324; WAN024DJN_at; Start 359; Stop 383
cttgggaagatgtcccagggacaac

SEQ ID NO: 160451 - DNA, 25 bp, Artificial
  probe
  misc_feature (1)..(25): SEQ ID NO: 3324; WAN024DJN_at; Start 409; Stop 433
gaccacagcctcttctctgctaaag

SEQ ID NO: 160452 - DNA, 25 bp, Artificial
  probe
  misc_feature (1)..(25): SEQ ID NO: 3324; WAN024DJN_at; Start 327; Stop 351
ggattcgctcaaggaaatcgctgaa

SEQ ID NO: 160453 - DNA, 25 bp, Artificial
  probe
  misc_feature (1)..(25): SEQ ID NO: 3324; WAN024DJN_at; Start 381; Stop 405
aaccatcgaatcttgcggaaactac

SEQ ID NO: 160454 - DNA, 25 bp, Artificial
  probe
  misc_feature (1)..(25): SEQ ID NO: 3324; WAN024DJN_at; Start 125; Stop 149
ccaattatgatattcgcttggtgca

SEQ ID NO: 160455 - DNA, 25 bp, Artificial
  probe
  misc_feature (1)..(25): SEQ ID NO: 3324; WAN024DJN_at; Start 219; Stop 243
tacccgcattgacggcatgattgac

SEQ ID NO: 160456 - DNA, 25 bp, Artificial
  probe
  misc_feature (1)..(25): SEQ ID NO: 3324; WAN024DJN_at; Start 112; Stop 136
ggagacatcatctccaattatgata

SEQ ID NO: 160457 - DNA, 25 bp, Artificial
  probe
  misc_feature (1)..(25): SEQ ID NO: 3324; WAN024DJN_at; Start 340; Stop 364
gaaatcgctgaaactactacttggg

SEQ ID NO: 160458 - DNA, 25 bp, Artificial
  probe
  misc_feature (1)..(25): SEQ ID NO: 3324; WAN024DJN_at; Start 94; Stop 118
gaagaaacaggaccaaaaggagaca

SEQ ID NO: 160459 - DNA, 25 bp, Artificial
  probe
  misc_feature (1)..(25): SEQ ID NO: 3324; WAN024DJN_at; Start 14; Stop 38
ccatgtcaaaagaagttattgtcga

SEQ ID NO: 160460 - DNA, 25 bp, Artificial
  probe
  misc_feature (1)..(25): SEQ ID NO: 3324; WAN024DJN_at; Start 155; Stop 179
acgaagactctatccctactgccgg

SEQ ID NO: 160461 - DNA, 25 bp, Artificial
  probe
  misc_feature (1)..(25): SEQ ID NO: 3324; WAN024DJN_at; Start 262; Stop 286
cgcacaggcttccacatgattatgt

SEQ ID NO: 160462 - DNA, 25 bp, Artificial
  probe
  misc_feature (1)..(25): SEQ ID NO: 3324; WAN024DJN_at; Start 189; Stop 213
tatcgagcacctcttagccaaactc

SEQ ID NO: 160463 - DNA, 25 bp, Artificial
  probe
  misc_feature (1)..(25): SEQ ID NO: 3324; WAN024DJN_at; Start 33; Stop 57
tgtcgaaagttttgaacttgaccac

SEQ ID NO: 160464 - DNA, 25 bp, Artificial
  probe
  misc_feature (1)..(25): SEQ ID NO: 3324; WAN024DJN_at; Start 316; Stop 340
gctgttatcaaggattcgctcaagg

SEQ ID NO: 160465 - DNA, 25 bp, Artificial
  probe
  misc_feature (1)..(25): SEQ ID NO: 3324; WAN024DJN_at; Start 208; Stop 232
aaactcatccgtacccgcattgacg

SEQ ID NO: 160466 - DNA, 25 bp, Artificial
  probe
  misc_feature (1)..(25): SEQ ID NO: 2423; WAN024DJO_at; Start 206; Stop 230
tggacgatgccaagcaagaggtcaa

SEQ ID NO: 160467 - DNA, 25 bp, Artificial
  probe
  misc_feature (1)..(25): SEQ ID NO: 2423; WAN024DJO_at; Start 227; Stop 251
tcaatgaactattacgtgcagaacg

SEQ ID NO: 160468 - DNA, 25 bp, Artificial
  probe
  misc_feature (1)..(25): SEQ ID NO: 2423; WAN024DJO_at; Start 199; Stop 223
accgaattggacgatgccaagcaag

SEQ ID NO: 160469 - DNA, 25 bp, Artificial
  probe
  misc_feature (1)..(25): SEQ ID NO: 2423; WAN024DJO_at; Start 91; Stop 115
gctgtaaccactcttattgtagcca

SEQ ID NO: 160470 - DNA, 25 bp, Artificial
  probe
  misc_feature (1)..(25): SEQ ID NO: 2423; WAN024DJO_at; Start 129; Stop 153
tatgcagaccaagctcttgcaagtg

SEQ ID NO: 160471 - DNA, 25 bp, Artificial
  probe
  misc_feature (1)..(25): SEQ ID NO: 2423; WAN024DJO_at; Start 14; Stop 38
tggaaaaaacaggtcaaatactaca

SEQ ID NO: 160472 - DNA, 25 bp, Artificial
  probe
  misc_feature (1)..(25): SEQ ID NO: 2423; WAN024DJO_at; Start 25; Stop 49
ggtcaaatactacagatgcaactta

SEQ ID NO: 160473 - DNA, 25 bp, Artificial
  probe
  misc_feature (1)..(25): SEQ ID NO: 2423; WAN024DJO_at; Start 241; Stop 265
cgtgcagaacgtttgaaagaaattg

SEQ ID NO: 160474 - DNA, 25 bp, Artificial
  probe
  misc_feature (1)..(25): SEQ ID NO: 2423; WAN024DJO_at; Start 265; Stop 289
gccaattcacacgatttgcaattaa

SEQ ID NO: 160475 - DNA, 25 bp, Artificial
  probe
  misc_feature (1)..(25): SEQ ID NO: 2423; WAN024DJO_at; Start 135; Stop 159
gaccaagctcttgcaagtgcagaat

SEQ ID NO: 160476 - DNA, 25 bp, Artificial
  probe
  misc_feature (1)..(25): SEQ ID NO: 2423; WAN024DJO_at; Start 274; Stop 298
cacgatttgcaattaaacaatgaaa

SEQ ID NO: 160477 - DNA, 25 bp, Artificial
  probe
  misc_feature (1)..(25): SEQ ID NO: 2423; WAN024DJO_at; Start 232; Stop 256
gaactattacgtgcagaacgtttga

SEQ ID NO: 160478 - DNA, 25 bp, Artificial
  probe
  misc_feature (1)..(25): SEQ ID NO: 2423; WAN024DJO_at; Start 211; Stop 235
gatgccaagcaagaggtcaatgaac

SEQ ID NO: 160479 - DNA, 25 bp, Artificial
  probe
  misc_feature (1)..(25): SEQ ID NO: 2423; WAN024DJO_at; Start 30; Stop 54
aatactacagatgcaacttaaacgg

SEQ ID NO: 160480 - DNA, 25 bp, Artificial
  probe
  misc_feature (1)..(25): SEQ ID NO: 2423; WAN024DJO_at; Start 79; Stop 103
tacttttccattgctgtaaccactc

SEQ ID NO: 160481 - DNA, 25 bp, Artificial
  probe
  misc_feature (1)..(25): SEQ ID NO: 2423; WAN024DJO_at; Start 70; Stop 94
aaagctttttacttttccattgctg

SEQ ID NO: 160482 - DNA, 25 bp, Artificial
  probe
  misc_feature (1)..(25): SEQ ID NO: 2423; WAN024DJO_at; Start 164; Stop 188
tgacaaaaatcaatgcgcagataga

SEQ ID NO: 160483 - DNA, 25 bp, Artificial
  probe
  misc_feature (1)..(25): SEQ ID NO: 2423; WAN024DJO_at; Start 99; Stop 123
cactcttattgtagccattagtatt

SEQ ID NO: 160484 - DNA, 25 bp, Artificial
  probe
  misc_feature (1)..(25): SEQ ID NO: 2423; WAN024DJO_at; Start 143; Stop 167
tcttgcaagtgcagaatgatttgac

SEQ ID NO: 160485 - DNA, 25 bp, Artificial
  probe
  misc_feature (1)..(25): SEQ ID NO: 2423; WAN024DJO_at; Start 95; Stop 119
taaccactcttattgtagccattag

SEQ ID NO: 160486 - DNA, 25 bp, Artificial
  probe
  misc_feature (1)..(25): SEQ ID NO: 2423; WAN024DJO_at; Start 259; Stop 283
gaaattgccaattcacacgatttgc

SEQ ID NO: 160487 - DNA, 25 bp, Artificial
  probe
  misc_feature (1)..(25): SEQ ID NO: 2423; WAN024DJO_at; Start 123; Stop 147
tatttttatgcagaccaagctcttg

SEQ ID NO: 160488 - DNA, 25 bp, Artificial
  probe
  misc_feature (1)..(25): SEQ ID NO: 2423; WAN024DJO_at; Start 214; Stop 238
gccaagcaagaggtcaatgaactat

SEQ ID NO: 160489 - DNA, 25 bp, Artificial
  probe
  misc_feature (1)..(25): SEQ ID NO: 2423; WAN024DJO_at; Start 160; Stop 184
gatttgacaaaaatcaatgcgcaga

SEQ ID NO: 160490 - DNA, 25 bp, Artificial
  probe
  misc_feature (1)..(25): SEQ ID NO: 2423; WAN024DJO_at; Start 117; Stop 141
tagtattatttttatgcagaccaag

SEQ ID NO: 160491 - DNA, 25 bp, Artificial
  probe
  misc_feature (1)..(25): SEQ ID NO: 2423; WAN024DJO_at; Start 147; Stop 171
gcaagtgcagaatgatttgacaaaa

SEQ ID NO: 160492 - DNA, 25 bp, Artificial
  probe
  misc_feature (1)..(25): SEQ ID NO: 2423; WAN024DJO_at; Start 202; Stop 226
gaattggacgatgccaagcaagagg

SEQ ID NO: 160493 - DNA, 25 bp, Artificial
  probe
  misc_feature (1)..(25): SEQ ID NO: 2423; WAN024DJO_at; Start 85; Stop 109
tccattgctgtaaccactcttattg

SEQ ID NO: 160494 - DNA, 25 bp, Artificial
  probe
  misc_feature (1)..(25): SEQ ID NO: 2423; WAN024DJO_at; Start 37; Stop 61
cagatgcaacttaaacggttttcgc

SEQ ID NO: 160495 - DNA, 25 bp, Artificial
  probe
  misc_feature (1)..(25): SEQ ID NO: 2423; WAN024DJO_at; Start 40; Stop 64
atgcaacttaaacggttttcgcgtg

SEQ ID NO: 160496 - DNA, 25 bp, Artificial
  probe
  misc_feature (1)..(25): SEQ ID NO: 2423; WAN024DJO_at; Start 138; Stop 162
caagctcttgcaagtgcagaatgat

SEQ ID NO: 160497 - DNA, 25 bp, Artificial
  probe
  misc_feature (1)..(25): SEQ ID NO: 2423; WAN024DJO_at; Start 223; Stop 247
gaggtcaatgaactattacgtgcag

SEQ ID NO: 160498 - DNA, 25 bp, Artificial
  probe
  misc_feature (1)..(25): SEQ ID NO: 2423; WAN024DJO_at; Start 245; Stop 269
cagaacgtttgaaagaaattgccaa

SEQ ID NO: 160499 - DNA, 25 bp, Artificial
  probe
  misc_feature (1)..(25): SEQ ID NO: 2423; WAN024DJO_at; Start 20; Stop 44
aaacaggtcaaatactacagatgca

SEQ ID NO: 160500 - DNA, 25 bp, Artificial
  probe
  misc_feature (1)..(25): SEQ ID NO: 640; WAN024DJP_at; Start 43; Stop 67
gcaggttcgatttatggaacagtga

SEQ ID NO: 160501 - DNA, 25 bp, Artificial
  probe
  misc_feature (1)..(25): SEQ ID NO: 640; WAN024DJP_at; Start 80; Stop 104
ttccactcattgataccctaacaag

SEQ ID NO: 160502 - DNA, 25 bp, Artificial
  probe
  misc_feature (1)..(25): SEQ ID NO: 640; WAN024DJP_at; Start 36; Stop 60
tctgaaagcaggttcgatttatgga

SEQ ID NO: 160503 - DNA, 25 bp, Artificial
  probe
  misc_feature (1)..(25): SEQ ID NO: 640; WAN024DJP_at; Start 46; Stop 70
ggttcgatttatggaacagtgatat

SEQ ID NO: 160504 - DNA, 25 bp, Artificial
  probe
  misc_feature (1)..(25): SEQ ID NO: 640; WAN024DJP_at; Start 122; Stop 146
tcagttctcttctaaatacaaaaca

SEQ ID NO: 160505 - DNA, 25 bp, Artificial
  probe
  misc_feature (1)..(25): SEQ ID NO: 640; WAN024DJP_at; Start 166; Stop 190
ggagctttctttttcggagtgatga

SEQ ID NO: 160506 - DNA, 25 bp, Artificial
  probe
  misc_feature (1)..(25): SEQ ID NO: 640; WAN024DJP_at; Start 125; Stop 149
gttctcttctaaatacaaaacatat

SEQ ID NO: 160507 - DNA, 25 bp, Artificial
  probe
  misc_feature (1)..(25): SEQ ID NO: 640; WAN024DJP_at; Start 59; Stop 83
gaacagtgatattttttataattcc

SEQ ID NO: 160508 - DNA, 25 bp, Artificial
  probe
  misc_feature (1)..(25): SEQ ID NO: 640; WAN024DJP_at; Start 120; Stop 144
tatcagttctcttctaaatacaaaa

SEQ ID NO: 160509 - DNA, 25 bp, Artificial
  probe
  misc_feature (1)..(25): SEQ ID NO: 640; WAN024DJP_at; Start 168; Stop 192
agctttctttttcggagtgatgata

SEQ ID NO: 160510 - DNA, 25 bp, Artificial
  probe
  misc_feature (1)..(25): SEQ ID NO: 640; WAN024DJP_at; Start 165; Stop 189
gggagctttctttttcggagtgatg

SEQ ID NO: 160511 - DNA, 25 bp, Artificial
  probe
  misc_feature (1)..(25): SEQ ID NO: 640; WAN024DJP_at; Start 86; Stop 110
tcattgataccctaacaagtgaaaa

SEQ ID NO: 160512 - DNA, 25 bp, Artificial
  probe
  misc_feature (1)..(25): SEQ ID NO: 640; WAN024DJP_at; Start 173; Stop 197
tctttttcggagtgatgatacatat

SEQ ID NO: 160513 - DNA, 25 bp, Artificial
  probe
  misc_feature (1)..(25): SEQ ID NO: 640; WAN024DJP_at; Start 21; Stop 45
gttacgttatcctggtctgaaagca

SEQ ID NO: 160514 - DNA, 25 bp, Artificial
  probe
  misc_feature (1)..(25): SEQ ID NO: 640; WAN024DJP_at; Start 15; Stop 39
gaaacagttacgttatcctggtctg

SEQ ID NO: 160515 - DNA, 25 bp, Artificial
  probe
  misc_feature (1)..(25): SEQ ID NO: 640; WAN024DJP_at; Start 23; Stop 47
tacgttatcctggtctgaaagcagg

SEQ ID NO: 160516 - DNA, 25 bp, Artificial
  probe
  misc_feature (1)..(25): SEQ ID NO: 640; WAN024DJP_at; Start 91; Stop 115
gataccctaacaagtgaaaatccaa

SEQ ID NO: 160517 - DNA, 25 bp, Artificial
  probe
  misc_feature (1)..(25): SEQ ID NO: 640; WAN024DJP_at; Start 170; Stop 194
ctttctttttcggagtgatgataca

SEQ ID NO: 160518 - DNA, 25 bp, Artificial
  probe
  misc_feature (1)..(25): SEQ ID NO: 640; WAN024DJP_at; Start 77; Stop 101
taattccactcattgataccctaac

SEQ ID NO: 160519 - DNA, 25 bp, Artificial
  probe
  misc_feature (1)..(25): SEQ ID NO: 640; WAN024DJP_at; Start 177; Stop 201
tttcggagtgatgatacatattgtc

SEQ ID NO: 160520 - DNA, 25 bp, Artificial
  probe
  misc_feature (1)..(25): SEQ ID NO: 640; WAN024DJP_at; Start 19; Stop 43
cagttacgttatcctggtctgaaag

SEQ ID NO: 160521 - DNA, 25 bp, Artificial
  probe
  misc_feature (1)..(25): SEQ ID NO: 640; WAN024DJP_at; Start 112; Stop 136
ccaaattttatcagttctcttctaa

SEQ ID NO: 160522 - DNA, 25 bp, Artificial
  probe
  misc_feature (1)..(25): SEQ ID NO: 640; WAN024DJP_at; Start 89; Stop 113
ttgataccctaacaagtgaaaatcc

SEQ ID NO: 160523 - DNA, 25 bp, Artificial
  probe
  misc_feature (1)..(25): SEQ ID NO: 640; WAN024DJP_at; Start 39; Stop 63
gaaagcaggttcgatttatggaaca

SEQ ID NO: 160524 - DNA, 25 bp, Artificial
  probe
  misc_feature (1)..(25): SEQ ID NO: 640; WAN024DJP_at; Start 73; Stop 97
tttataattccactcattgataccc

SEQ ID NO: 160525 - DNA, 25 bp, Artificial
  probe
  misc_feature (1)..(25): SEQ ID NO: 640; WAN024DJP_at; Start 163; Stop 187
ctgggagctttctttttcggagtga

SEQ ID NO: 160526 - DNA, 25 bp, Artificial
  probe
  misc_feature (1)..(25): SEQ ID NO: 640; WAN024DJP_at; Start 24; Stop 48
acgttatcctggtctgaaagcaggt

SEQ ID NO: 160527 - DNA, 25 bp, Artificial
  probe
  misc_feature (1)..(25): SEQ ID NO: 640; WAN024DJP_at; Start 50; Stop 74
cgatttatggaacagtgatattttt

SEQ ID NO: 160528 - DNA, 25 bp, Artificial
  probe
  misc_feature (1)..(25): SEQ ID NO: 640; WAN024DJP_at; Start 83; Stop 107
cactcattgataccctaacaagtga

SEQ ID NO: 160529 - DNA, 25 bp, Artificial
  probe
  misc_feature (1)..(25): SEQ ID NO: 640; WAN024DJP_at; Start 17; Stop 41
aacagttacgttatcctggtctgaa

SEQ ID NO: 160530 - DNA, 25 bp, Artificial
  probe
  misc_feature (1)..(25): SEQ ID NO: 640; WAN024DJP_at; Start 40; Stop 64
aaagcaggttcgatttatggaacag

SEQ ID NO: 160531 - DNA, 25 bp, Artificial
  probe
  misc_feature (1)..(25): SEQ ID NO: 640; WAN024DJP_at; Start 38; Stop 62
tgaaagcaggttcgatttatggaac

SEQ ID NO: 160532 - DNA, 25 bp, Artificial
  probe
  misc_feature (1)..(25): SEQ ID NO: 640; WAN024DJP_at; Start 35; Stop 59
gtctgaaagcaggttcgatttatgg

SEQ ID NO: 160533 - DNA, 25 bp, Artificial
  probe
  misc_feature (1)..(25): SEQ ID NO: 640; WAN024DJP_at; Start 101; Stop 125
caagtgaaaatccaaattttatcag

SEQ ID NO: 160534 - DNA, 25 bp, Artificial
  probe
  misc_feature (1)..(25): SEQ ID NO: 2897; WAN024DJQ_at; Start 613; Stop 637
gagttgattccctttgtcttgttgg

SEQ ID NO: 160535 - DNA, 25 bp, Artificial
  probe
  misc_feature (1)..(25): SEQ ID NO: 2897; WAN024DJQ_at; Start 104; Stop 128
catttggtgtcggaattattctagg

SEQ ID NO: 160536 - DNA, 25 bp, Artificial
  probe
  misc_feature (1)..(25): SEQ ID NO: 2897; WAN024DJQ_at; Start 716; Stop 740
tttataacaagccaaaaacagcgga

SEQ ID NO: 160537 - DNA, 25 bp, Artificial
  probe
  misc_feature (1)..(25): SEQ ID NO: 2897; WAN024DJQ_at; Start 120; Stop 144
tattctaggtgatctgcctactgct

SEQ ID NO: 160538 - DNA, 25 bp, Artificial
  probe
  misc_feature (1)..(25): SEQ ID NO: 2897; WAN024DJQ_at; Start 741; Stop 765
tcatgtggtagaggaggaagcacac

SEQ ID NO: 160539 - DNA, 25 bp, Artificial
  probe
  misc_feature (1)..(25): SEQ ID NO: 2897; WAN024DJQ_at; Start 221; Stop 245
caatcggacctggtatctttggtac

SEQ ID NO: 160540 - DNA, 25 bp, Artificial
  probe
  misc_feature (1)..(25): SEQ ID NO: 2897; WAN024DJQ_at; Start 299; Stop 323
tctctactccgattgctgtggcgat

SEQ ID NO: 160541 - DNA, 25 bp, Artificial
  probe
  misc_feature (1)..(25): SEQ ID NO: 2897; WAN024DJQ_at; Start 245; Stop 269
ccttgatggctatcactagtgctgg

SEQ ID NO: 160542 - DNA, 25 bp, Artificial
  probe
  misc_feature (1)..(25): SEQ ID NO: 2897; WAN024DJQ_at; Start 561; Stop 585
aatgctcccagctatcggttttgcg

SEQ ID NO: 160543 - DNA, 25 bp, Artificial
  probe
  misc_feature (1)..(25): SEQ ID NO: 2897; WAN024DJQ_at; Start 270; Stop 294
taaagtcagtccagaagcggctctt

SEQ ID NO: 160544 - DNA, 25 bp, Artificial
  probe
  misc_feature (1)..(25): SEQ ID NO: 2897; WAN024DJQ_at; Start 509; Stop 533
tcgtagactacattccaccggtatt

SEQ ID NO: 160545 - DNA, 25 bp, Artificial
  probe
  misc_feature (1)..(25): SEQ ID NO: 2897; WAN024DJQ_at; Start 629; Stop 653
tcttgttgggatatgtttgtgcagc

SEQ ID NO: 160546 - DNA, 25 bp, Artificial
  probe
  misc_feature (1)..(25): SEQ ID NO: 2897; WAN024DJQ_at; Start 204; Stop 228
tactgttccaccaaacccaatcgga

SEQ ID NO: 160547 - DNA, 25 bp, Artificial
  probe
  misc_feature (1)..(25): SEQ ID NO: 2897; WAN024DJQ_at; Start 258; Stop 282
cactagtgctggtaaagtcagtcca

SEQ ID NO: 160548 - DNA, 25 bp, Artificial
  probe
  misc_feature (1)..(25): SEQ ID NO: 2897; WAN024DJQ_at; Start 492; Stop 516
ggataccttgttgaaactcgtagac

SEQ ID NO: 160549 - DNA, 25 bp, Artificial
  probe
  misc_feature (1)..(25): SEQ ID NO: 2897; WAN024DJQ_at; Start 349; Stop 373
actgtacgtgctggtgcgcctgaaa

SEQ ID NO: 160550 - DNA, 25 bp, Artificial
  probe
  misc_feature (1)..(25): SEQ ID NO: 2897; WAN024DJQ_at; Start 43; Stop 67
acagctttctgttttagtggaatgc

SEQ ID NO: 160551 - DNA, 25 bp, Artificial
  probe
  misc_feature (1)..(25): SEQ ID NO: 2897; WAN024DJQ_at; Start 381; Stop 405
gaagcacttgaaaaaccataatttg

SEQ ID NO: 160552 - DNA, 25 bp, Artificial
  probe
  misc_feature (1)..(25): SEQ ID NO: 2897; WAN024DJQ_at; Start 173; Stop 197
cttatatgggattcggtgttggtgc

SEQ ID NO: 160553 - DNA, 25 bp, Artificial
  probe
  misc_feature (1)..(25): SEQ ID NO: 2897; WAN024DJQ_at; Start 154; Stop 178
ggagctattggtgaattggcttata

SEQ ID NO: 160554 - DNA, 25 bp, Artificial
  probe
  misc_feature (1)..(25): SEQ ID NO: 2897; WAN024DJQ_at; Start 282; Stop 306
agaagcggctcttgccctctctact

SEQ ID NO: 160555 - DNA, 25 bp, Artificial
  probe
  misc_feature (1)..(25): SEQ ID NO: 2897; WAN024DJQ_at; Start 313; Stop 337
gctgtggcgattcaattcttacaaa

SEQ ID NO: 160556 - DNA, 25 bp, Artificial
  probe
  misc_feature (1)..(25): SEQ ID NO: 2897; WAN024DJQ_at; Start 584; Stop 608
cgatgatcttgtcagtgatggctaa

SEQ ID NO: 160557 - DNA, 25 bp, Artificial
  probe
  misc_feature (1)..(25): SEQ ID NO: 2897; WAN024DJQ_at; Start 334; Stop 358
caaactttcgcctacactgtacgtg

SEQ ID NO: 160558 - DNA, 25 bp, Artificial
  probe
  misc_feature (1)..(25): SEQ ID NO: 2897; WAN024DJQ_at; Start 473; Stop 497
gcttgggtgccctttcaatggatac

SEQ ID NO: 160559 - DNA, 25 bp, Artificial
  probe
  misc_feature (1)..(25): SEQ ID NO: 2897; WAN024DJQ_at; Start 535; Stop 559
cttacaggtttgacagttgctggta

SEQ ID NO: 160560 - DNA, 25 bp, Artificial
  probe
  misc_feature (1)..(25): SEQ ID NO: 2897; WAN024DJQ_at; Start 600; Stop 624
gatggctaagaaagagttgattccc

SEQ ID NO: 160561 - DNA, 25 bp, Artificial
  probe
  misc_feature (1)..(25): SEQ ID NO: 2897; WAN024DJQ_at; Start 659; Stop 683
taaacatcccaacaattggtattgc

SEQ ID NO: 160562 - DNA, 25 bp, Artificial
  probe
  misc_feature (1)..(25): SEQ ID NO: 2897; WAN024DJQ_at; Start 458; Stop 482
gatttaccttgggttgcttgggtgc

SEQ ID NO: 160563 - DNA, 25 bp, Artificial
  probe
  misc_feature (1)..(25): SEQ ID NO: 2897; WAN024DJQ_at; Start 644; Stop 668
tttgtgcagcttatctaaacatccc

SEQ ID NO: 160564 - DNA, 25 bp, Artificial
  probe
  misc_feature (1)..(25): SEQ ID NO: 2897; WAN024DJQ_at; Start 675; Stop 699
tggtattgcaattgtaggtactatc

SEQ ID NO: 160565 - DNA, 25 bp, Artificial
  probe
  misc_feature (1)..(25): SEQ ID NO: 2897; WAN024DJQ_at; Start 546; Stop 570
gacagttgctggtaaaatgctccca

SEQ ID NO: 160566 - DNA, 25 bp, Artificial
  probe
  misc_feature (1)..(25): SEQ ID NO: 2897; WAN024DJQ_at; Start 756; Stop 780
ggaagcacacgatgactggatctaa

SEQ ID NO: 160567 - DNA, 25 bp, Artificial
  probe
  misc_feature (1)..(25): SEQ ID NO: 2897; WAN024DJQ_at; Start 727; Stop 751
ccaaaaacagcggatcatgtggtag

SEQ ID NO: 160568 - DNA, 25 bp, Artificial
  probe
  misc_feature (1)..(25): SEQ ID NO: 1333; WAN024DJR_at; Start 408; Stop 432
aactcatcaagtaacatttaatacg

SEQ ID NO: 160569 - DNA, 25 bp, Artificial
  probe
  misc_feature (1)..(25): SEQ ID NO: 1333; WAN024DJR_at; Start 442; Stop 466
ccaacaggaaatgatggagctgttc

SEQ ID NO: 160570 - DNA, 25 bp, Artificial
  probe
  misc_feature (1)..(25): SEQ ID NO: 1333; WAN024DJR_at; Start 49; Stop 73
catggacaaggacaactttgggtaa

SEQ ID NO: 160571 - DNA, 25 bp, Artificial
  probe
  misc_feature (1)..(25): SEQ ID NO: 1333; WAN024DJR_at; Start 193; Stop 217
caaaaggtgattgatatcattcaca

SEQ ID NO: 160572 - DNA, 25 bp, Artificial
  probe
  misc_feature (1)..(25): SEQ ID NO: 1333; WAN024DJR_at; Start 37; Stop 61
gaacggttgattcatggacaaggac

SEQ ID NO: 160573 - DNA, 25 bp, Artificial
  probe
  misc_feature (1)..(25): SEQ ID NO: 1333; WAN024DJR_at; Start 108; Stop 132
tgacgaagtaagcacggacaagatg

SEQ ID NO: 160574 - DNA, 25 bp, Artificial
  probe
  misc_feature (1)..(25): SEQ ID NO: 1333; WAN024DJR_at; Start 18; Stop 42
tattatgacccgtatcgatgaacgg

SEQ ID NO: 160575 - DNA, 25 bp, Artificial
  probe
  misc_feature (1)..(25): SEQ ID NO: 1333; WAN024DJR_at; Start 151; Stop 175
acagttgtgccagactcagttgcca

SEQ ID NO: 160576 - DNA, 25 bp, Artificial
  probe
  misc_feature (1)..(25): SEQ ID NO: 1333; WAN024DJR_at; Start 136; Stop 160
caaactctgatgaaaacagttgtgc

SEQ ID NO: 160577 - DNA, 25 bp, Artificial
  probe
  misc_feature (1)..(25): SEQ ID NO: 1333; WAN024DJR_at; Start 222; Stop 246
taatcctgctcaaacgatctttatc

SEQ ID NO: 160578 - DNA, 25 bp, Artificial
  probe
  misc_feature (1)..(25): SEQ ID NO: 1333; WAN024DJR_at; Start 186; Stop 210
ccctttgcaaaaggtgattgatatc

SEQ ID NO: 160579 - DNA, 25 bp, Artificial
  probe
  misc_feature (1)..(25): SEQ ID NO: 1333; WAN024DJR_at; Start 85; Stop 109
tgtaatacggtcattgttgccaatg

SEQ ID NO: 160580 - DNA, 25 bp, Artificial
  probe
  misc_feature (1)..(25): SEQ ID NO: 1333; WAN024DJR_at; Start 471; Stop 495
caacattatggactatatttaacta

SEQ ID NO: 160581 - DNA, 25 bp, Artificial
  probe
  misc_feature (1)..(25): SEQ ID NO: 1333; WAN024DJR_at; Start 5; Stop 29
caatgccaaatattattatgacccg

SEQ ID NO: 160582 - DNA, 25 bp, Artificial
  probe
  misc_feature (1)..(25): SEQ ID NO: 1333; WAN024DJR_at; Start 26; Stop 50
cccgtatcgatgaacggttgattca

SEQ ID NO: 160583 - DNA, 25 bp, Artificial
  probe
  misc_feature (1)..(25): SEQ ID NO: 1333; WAN024DJR_at; Start 163; Stop 187
gactcagttgccatgcgtttcttcc

SEQ ID NO: 160584 - DNA, 25 bp, Artificial
  probe
  misc_feature (1)..(25): SEQ ID NO: 1333; WAN024DJR_at; Start 434; Stop 458
aaacaactccaacaggaaatgatgg

SEQ ID NO: 160585 - DNA, 25 bp, Artificial
  probe
  misc_feature (1)..(25): SEQ ID NO: 1333; WAN024DJR_at; Start 99; Stop 123
tgttgccaatgacgaagtaagcacg

SEQ ID NO: 160586 - DNA, 25 bp, Artificial
  probe
  misc_feature (1)..(25): SEQ ID NO: 1333; WAN024DJR_at; Start 146; Stop 170
tgaaaacagttgtgccagactcagt

SEQ ID NO: 160587 - DNA, 25 bp, Artificial
  probe
  misc_feature (1)..(25): SEQ ID NO: 1333; WAN024DJR_at; Start 123; Stop 147
ggacaagatgcaacaaactctgatg

SEQ ID NO: 160588 - DNA, 25 bp, Artificial
  probe
  misc_feature (1)..(25): SEQ ID NO: 1333; WAN024DJR_at; Start 457; Stop 481
ggagctgttcaagtcaacattatgg

SEQ ID NO: 160589 - DNA, 25 bp, Artificial
  probe
  misc_feature (1)..(25): SEQ ID NO: 1333; WAN024DJR_at; Start 205; Stop 229
gatatcattcacaaggctaatcctg

SEQ ID NO: 160590 - DNA, 25 bp, Artificial
  probe
  misc_feature (1)..(25): SEQ ID NO: 1333; WAN024DJR_at; Start 336; Stop 360
tggtaaagagcaagtgacacgctcc

SEQ ID NO: 160591 - DNA, 25 bp, Artificial
  probe
  misc_feature (1)..(25): SEQ ID NO: 1333; WAN024DJR_at; Start 156; Stop 180
tgtgccagactcagttgccatgcgt

SEQ ID NO: 160592 - DNA, 25 bp, Artificial
  probe
  misc_feature (1)..(25): SEQ ID NO: 1333; WAN024DJR_at; Start 45; Stop 69
gattcatggacaaggacaactttgg

SEQ ID NO: 160593 - DNA, 25 bp, Artificial
  probe
  misc_feature (1)..(25): SEQ ID NO: 1333; WAN024DJR_at; Start 450; Stop 474
aaatgatggagctgttcaagtcaac

SEQ ID NO: 160594 - DNA, 25 bp, Artificial
  probe
  misc_feature (1)..(25): SEQ ID NO: 1333; WAN024DJR_at; Start 308; Stop 332
tcaatattgggaacattcacaatgc

SEQ ID NO: 160595 - DNA, 25 bp, Artificial
  probe
  misc_feature (1)..(25): SEQ ID NO: 1333; WAN024DJR_at; Start 174; Stop 198
catgcgtttcttccctttgcaaaag

SEQ ID NO: 160596 - DNA, 25 bp, Artificial
  probe
  misc_feature (1)..(25): SEQ ID NO: 1333; WAN024DJR_at; Start 76; Stop 100
tacctaggttgtaatacggtcattg

SEQ ID NO: 160597 - DNA, 25 bp, Artificial
  probe
  misc_feature (1)..(25): SEQ ID NO: 1333; WAN024DJR_at; Start 343; Stop 367
gagcaagtgacacgctccatcttcc

SEQ ID NO: 160598 - DNA, 25 bp, Artificial
  probe
  misc_feature (1)..(25): SEQ ID NO: 1333; WAN024DJR_at; Start 426; Stop 450
taatacgaaaacaactccaacagga

SEQ ID NO: 160599 - DNA, 25 bp, Artificial
  probe
  misc_feature (1)..(25): SEQ ID NO: 1333; WAN024DJR_at; Start 116; Stop 140
taagcacggacaagatgcaacaaac

SEQ ID NO: 160600 - DNA, 25 bp, Artificial
  probe
  misc_feature (1)..(25): SEQ ID NO: 1333; WAN024DJR_at; Start 216; Stop 240
caaggctaatcctgctcaaacgatc

SEQ ID NO: 160601 - DNA, 25 bp, Artificial
  probe
  misc_feature (1)..(25): SEQ ID NO: 1333; WAN024DJR_at; Start 297; Stop 321
tatcaaagaaatcaatattgggaac

SEQ ID NO: 160602 - DNA, 25 bp, Artificial
  probe
  misc_feature (1)..(25): SEQ ID NO: 764; WAN024DJS_at; Start 375; Stop 399
gaccctcaaattgatgtttgaacgc

SEQ ID NO: 160603 - DNA, 25 bp, Artificial
  probe
  misc_feature (1)..(25): SEQ ID NO: 764; WAN024DJS_at; Start 27; Stop 51
tagtcaagctagcaagaatcacatt

SEQ ID NO: 160604 - DNA, 25 bp, Artificial
  probe
  misc_feature (1)..(25): SEQ ID NO: 764; WAN024DJS_at; Start 55; Stop 79
tacgatagtctaaaagaagcgacag

SEQ ID NO: 160605 - DNA, 25 bp, Artificial
  probe
  misc_feature (1)..(25): SEQ ID NO: 764; WAN024DJS_at; Start 478; Stop 502
gaggtgaaacaaatcacccacaatg

SEQ ID NO: 160606 - DNA, 25 bp, Artificial
  probe
  misc_feature (1)..(25): SEQ ID NO: 764; WAN024DJS_at; Start 421; Stop 445
ggtggctacccaagagaacgtgtaa

SEQ ID NO: 160607 - DNA, 25 bp, Artificial
  probe
  misc_feature (1)..(25): SEQ ID NO: 764; WAN024DJS_at; Start 434; Stop 458
gagaacgtgtaatccctgaacaacg

SEQ ID NO: 160608 - DNA, 25 bp, Artificial
  probe
  misc_feature (1)..(25): SEQ ID NO: 764; WAN024DJS_at; Start 542; Stop 566
tcaaagacaccatctctggcaaata

SEQ ID NO: 160609 - DNA, 25 bp, Artificial
  probe
  misc_feature (1)..(25): SEQ ID NO: 764; WAN024DJS_at; Start 230; Stop 254
gggctatgcttgctttaaacagctt

SEQ ID NO: 160610 - DNA, 25 bp, Artificial
  probe
  misc_feature (1)..(25): SEQ ID NO: 764; WAN024DJS_at; Start 185; Stop 209
caaaggcagttgactttgttgttac

SEQ ID NO: 160611 - DNA, 25 bp, Artificial
  probe
  misc_feature (1)..(25): SEQ ID NO: 764; WAN024DJS_at; Start 281; Stop 305
tggacccaactgacgcttaccttta

SEQ ID NO: 160612 - DNA, 25 bp, Artificial
  probe
  misc_feature (1)..(25): SEQ ID NO: 764; WAN024DJS_at; Start 620; Stop 644
tgaaagaagtattagccaagtaact

SEQ ID NO: 160613 - DNA, 25 bp, Artificial
  probe
  misc_feature (1)..(25): SEQ ID NO: 764; WAN024DJS_at; Start 98; Stop 122
tatttaactatggtatgcgtggaga

SEQ ID NO: 160614 - DNA, 25 bp, Artificial
  probe
  misc_feature (1)..(25): SEQ ID NO: 764; WAN024DJS_at; Start 255; Stop 279
ccctggtgttgtctgtggtctagca

SEQ ID NO: 160615 - DNA, 25 bp, Artificial
  probe
  misc_feature (1)..(25): SEQ ID NO: 764; WAN024DJS_at; Start 292; Stop 316
gacgcttacctttattctcaaatca

SEQ ID NO: 160616 - DNA, 25 bp, Artificial
  probe
  misc_feature (1)..(25): SEQ ID NO: 764; WAN024DJS_at; Start 270; Stop 294
tggtctagcagtggacccaactgac

SEQ ID NO: 160617 - DNA, 25 bp, Artificial
  probe
  misc_feature (1)..(25): SEQ ID NO: 764; WAN024DJS_at; Start 462; Stop 486
cgctcgtatcttaaacgaggtgaaa

SEQ ID NO: 160618 - DNA, 25 bp, Artificial
  probe
  misc_feature (1)..(25): SEQ ID NO: 764; WAN024DJS_at; Start 494; Stop 518
cccacaatgatttgatgaccatcct

SEQ ID NO: 160619 - DNA, 25 bp, Artificial
  probe
  misc_feature (1)..(25): SEQ ID NO: 764; WAN024DJS_at; Start 399; Stop 423
cttatttgctgaagaaatgggcggt

SEQ ID NO: 160620 - DNA, 25 bp, Artificial
  probe
  misc_feature (1)..(25): SEQ ID NO: 764; WAN024DJS_at; Start 307; Stop 331
tctcaaatcaatggtggtaacgcct

SEQ ID NO: 160621 - DNA, 25 bp, Artificial
  probe
  misc_feature (1)..(25): SEQ ID NO: 764; WAN024DJS_at; Start 162; Stop 186
aatggctgccatccttttaaataca

SEQ ID NO: 160622 - DNA, 25 bp, Artificial
  probe
  misc_feature (1)..(25): SEQ ID NO: 764; WAN024DJS_at; Start 584; Stop 608
ttgaaaactgccaagatgatgaagt

SEQ ID NO: 160623 - DNA, 25 bp, Artificial
  probe
  misc_feature (1)..(25): SEQ ID NO: 764; WAN024DJS_at; Start 115; Stop 139
cgtggagaagaaggagaaagtcaat

SEQ ID NO: 160624 - DNA, 25 bp, Artificial
  probe
  misc_feature (1)..(25): SEQ ID NO: 764; WAN024DJS_at; Start 38; Stop 62
gcaagaatcacattatttacgatag

SEQ ID NO: 160625 - DNA, 25 bp, Artificial
  probe
  misc_feature (1)..(25): SEQ ID NO: 764; WAN024DJS_at; Start 410; Stop 434
aagaaatgggcggtggctacccaag

SEQ ID NO: 160626 - DNA, 25 bp, Artificial
  probe
  misc_feature (1)..(25): SEQ ID NO: 764; WAN024DJS_at; Start 175; Stop 199
cttttaaatacaaaggcagttgact

SEQ ID NO: 160627 - DNA, 25 bp, Artificial
  probe
  misc_feature (1)..(25): SEQ ID NO: 764; WAN024DJS_at; Start 151; Stop 175
cagaacggactaatggctgccatcc

SEQ ID NO: 160628 - DNA, 25 bp, Artificial
  probe
  misc_feature (1)..(25): SEQ ID NO: 764; WAN024DJS_at; Start 322; Stop 346
ggtaacgccttgtctatcccttatg

SEQ ID NO: 160629 - DNA, 25 bp, Artificial
  probe
  misc_feature (1)..(25): SEQ ID NO: 764; WAN024DJS_at; Start 136; Stop 160
caattaacttatgtgcagaacggac

SEQ ID NO: 160630 - DNA, 25 bp, Artificial
  probe
  misc_feature (1)..(25): SEQ ID NO: 764; WAN024DJS_at; Start 574; Stop 598
gaatacttctttgaaaactgccaag

SEQ ID NO: 160631 - DNA, 25 bp, Artificial
  probe
  misc_feature (1)..(25): SEQ ID NO: 764; WAN024DJS_at; Start 387; Stop 411
gatgtttgaacgcttatttgctgaa

SEQ ID NO: 160632 - DNA, 25 bp, Artificial
  probe
  misc_feature (1)..(25): SEQ ID NO: 764; WAN024DJS_at; Start 15; Stop 39
aatcaatgaaaatagtcaagctagc

SEQ ID NO: 160633 - DNA, 25 bp, Artificial
  probe
  misc_feature (1)..(25): SEQ ID NO: 764; WAN024DJS_at; Start 529; Stop 553
gaccaagacttcctcaaagacacca

SEQ ID NO: 160634 - DNA, 25 bp, Artificial
  probe
  misc_feature (1)..(25): SEQ ID NO: 764; WAN024DJS_at; Start 245; Stop 269
taaacagcttccctggtgttgtctg

SEQ ID NO: 160635 - DNA, 25 bp, Artificial
  probe
  misc_feature (1)..(25): SEQ ID NO: 764; WAN024DJS_at; Start 365; Stop 389
gggcagaactgaccctcaaattgat

SEQ ID NO: 160636 - DNA, 25 bp, Artificial
  probe
  misc_feature (1)..(25): SEQ ID NO: 1393; WAN024DJT_at; Start 559; Stop 583
aataaactcgcttcccaaggcaact

SEQ ID NO: 160637 - DNA, 25 bp, Artificial
  probe
  misc_feature (1)..(25): SEQ ID NO: 1393; WAN024DJT_at; Start 521; Stop 545
ctgctggtgcagatgccgttggaat

SEQ ID NO: 160638 - DNA, 25 bp, Artificial
  probe
  misc_feature (1)..(25): SEQ ID NO: 1393; WAN024DJT_at; Start 392; Stop 416
aaatcatcaaactcttcccaggtag

SEQ ID NO: 160639 - DNA, 25 bp, Artificial
  probe
  misc_feature (1)..(25): SEQ ID NO: 1393; WAN024DJT_at; Start 304; Stop 328
gcgaaaatgtgcaatctctacagca

SEQ ID NO: 160640 - DNA, 25 bp, Artificial
  probe
  misc_feature (1)..(25): SEQ ID NO: 1393; WAN024DJT_at; Start 138; Stop 162
taccaatcagtatgcaggacaaatc

SEQ ID NO: 160641 - DNA, 25 bp, Artificial
  probe
  misc_feature (1)..(25): SEQ ID NO: 1393; WAN024DJT_at; Start 379; Stop 403
gaagccggtagtgaaatcatcaaac

SEQ ID NO: 160642 - DNA, 25 bp, Artificial
  probe
  misc_feature (1)..(25): SEQ ID NO: 1393; WAN024DJT_at; Start 535; Stop 559
gccgttggaattggtggcgaactca

SEQ ID NO: 160643 - DNA, 25 bp, Artificial
  probe
  misc_feature (1)..(25): SEQ ID NO: 1393; WAN024DJT_at; Start 365; Stop 389
tcacgactgcacttgaagccggtag

SEQ ID NO: 160644 - DNA, 25 bp, Artificial
  probe
  misc_feature (1)..(25): SEQ ID NO: 1393; WAN024DJT_at; Start 89; Stop 113
cctcgattgcttgtatcaagggcgg

SEQ ID NO: 160645 - DNA, 25 bp, Artificial
  probe
  misc_feature (1)..(25): SEQ ID NO: 1393; WAN024DJT_at; Start 546; Stop 570
tggtggcgaactcaataaactcgct

SEQ ID NO: 160646 - DNA, 25 bp, Artificial
  probe
  misc_feature (1)..(25): SEQ ID NO: 1393; WAN024DJT_at; Start 102; Stop 126
tatcaagggcggtatcaaagctatt

SEQ ID NO: 160647 - DNA, 25 bp, Artificial
  probe
  misc_feature (1)..(25): SEQ ID NO: 1393; WAN024DJT_at; Start 182; Stop 206
tgtatcaggacgatcagagtgtttg

SEQ ID NO: 160648 - DNA, 25 bp, Artificial
  probe
  misc_feature (1)..(25): SEQ ID NO: 1393; WAN024DJT_at; Start 274; Stop 298
gttgtttctccatctttccatgctg

SEQ ID NO: 160649 - DNA, 25 bp, Artificial
  probe
  misc_feature (1)..(25): SEQ ID NO: 1393; WAN024DJT_at; Start 334; Stop 358
tacattccaggctgtattaccctca

SEQ ID NO: 160650 - DNA, 25 bp, Artificial
  probe
  misc_feature (1)..(25): SEQ ID NO: 1393; WAN024DJT_at; Start 450; Stop 474
ggcaccgatcccacaagtttccgta

SEQ ID NO: 160651 - DNA, 25 bp, Artificial
  probe
  misc_feature (1)..(25): SEQ ID NO: 1393; WAN024DJT_at; Start 590; Stop 614
gcatcagcgagattgcccaacagta

SEQ ID NO: 160652 - DNA, 25 bp, Artificial
  probe
  misc_feature (1)..(25): SEQ ID NO: 1393; WAN024DJT_at; Start 117; Stop 141
caaagctattgaaatcgcctatacc

SEQ ID NO: 160653 - DNA, 25 bp, Artificial
  probe
  misc_feature (1)..(25): SEQ ID NO: 1393; WAN024DJT_at; Start 575; Stop 599
aaggcaactttgaccgcatcagcga

SEQ ID NO: 160654 - DNA, 25 bp, Artificial
  probe
  misc_feature (1)..(25): SEQ ID NO: 1393; WAN024DJT_at; Start 229; Stop 253
gatgccgtaactgctagagatgcca

SEQ ID NO: 160655 - DNA, 25 bp, Artificial
  probe
  misc_feature (1)..(25): SEQ ID NO: 1393; WAN024DJT_at; Start 214; Stop 238
gcaggtactgtgcttgatgccgtaa

SEQ ID NO: 160656 - DNA, 25 bp, Artificial
  probe
  misc_feature (1)..(25): SEQ ID NO: 1393; WAN024DJT_at; Start 196; Stop 220
cagagtgtttgtatcggtgcaggta

SEQ ID NO: 160657 - DNA, 25 bp, Artificial
  probe
  misc_feature (1)..(25): SEQ ID NO: 1393; WAN024DJT_at; Start 150; Stop 174
tgcaggacaaatcatcaaggaactt

SEQ ID NO: 160658 - DNA, 25 bp, Artificial
  probe
  misc_feature (1)..(25): SEQ ID NO: 1393; WAN024DJT_at; Start 257; Stop 281
tagctggagcaaattacgttgtttc

SEQ ID NO: 160659 - DNA, 25 bp, Artificial
  probe
  misc_feature (1)..(25): SEQ ID NO: 1393; WAN024DJT_at; Start 290; Stop 314
tccatgctgaaactgcgaaaatgtg

SEQ ID NO: 160660 - DNA, 25 bp, Artificial
  probe
  misc_feature (1)..(25): SEQ ID NO: 1393; WAN024DJT_at; Start 322; Stop 346
tacagcacaccgtacattccaggct

SEQ ID NO: 160661 - DNA, 25 bp, Artificial
  probe
  misc_feature (1)..(25): SEQ ID NO: 1393; WAN024DJT_at; Start 73; Stop 97
gaagaaggactacaagcctcgattg

SEQ ID NO: 160662 - DNA, 25 bp, Artificial
  probe
  misc_feature (1)..(25): SEQ ID NO: 1393; WAN024DJT_at; Start 350; Stop 374
ttaccctcacagagatcacgactgc

SEQ ID NO: 160663 - DNA, 25 bp, Artificial
  probe
  misc_feature (1)..(25): SEQ ID NO: 1393; WAN024DJT_at; Start 507; Stop 531
ccctcaatggttcgctgctggtgca

SEQ ID NO: 160664 - DNA, 25 bp, Artificial
  probe
  misc_feature (1)..(25): SEQ ID NO: 1393; WAN024DJT_at; Start 169; Stop 193
gaacttgtagacttgtatcaggacg

SEQ ID NO: 160665 - DNA, 25 bp, Artificial
  probe
  misc_feature (1)..(25): SEQ ID NO: 1393; WAN024DJT_at; Start 3; Stop 27
gaccaaatcagatacgattattgaa

SEQ ID NO: 160666 - DNA, 25 bp, Artificial
  probe
  misc_feature (1)..(25): SEQ ID NO: 1393; WAN024DJT_at; Start 243; Stop 267
tagagatgccattctagctggagca

SEQ ID NO: 160667 - DNA, 25 bp, Artificial
  probe
  misc_feature (1)..(25): SEQ ID NO: 1393; WAN024DJT_at; Start 422; Stop 446
tcagtccagcatatatctctgcagt

SEQ ID NO: 160668 - DNA, 25 bp, Artificial
  probe
  misc_feature (1)..(25): SEQ ID NO: 1393; WAN024DJT_at; Start 57; Stop 81
tcgaggaaatacaaaggaagaagga

SEQ ID NO: 160669 - DNA, 25 bp, Artificial
  probe
  misc_feature (1)..(25): SEQ ID NO: 1393; WAN024DJT_at; Start 497; Stop 521
taaacaacatccctcaatggttcgc

SEQ ID NO: 160670 - DNA, 25 bp, Artificial
  probe
  misc_feature (1)..(25): SEQ ID NO: 3460; WAN024DJU_at; Start 79; Stop 103
gcaactcccttggatagctatcgtg

SEQ ID NO: 160671 - DNA, 25 bp, Artificial
  probe
  misc_feature (1)..(25): SEQ ID NO: 3460; WAN024DJU_at; Start 137; Stop 161
gatgtggtttaacgccccagtacca

SEQ ID NO: 160672 - DNA, 25 bp, Artificial
  probe
  misc_feature (1)..(25): SEQ ID NO: 3460; WAN024DJU_at; Start 326; Stop 350
tcaacggtaaggaagcagaccctct

SEQ ID NO: 160673 - DNA, 25 bp, Artificial
  probe
  misc_feature (1)..(25): SEQ ID NO: 3460; WAN024DJU_at; Start 169; Stop 193
caagaactctatgaacgctatcaag

SEQ ID NO: 160674 - DNA, 25 bp, Artificial
  probe
  misc_feature (1)..(25): SEQ ID NO: 3460; WAN024DJU_at; Start 333; Stop 357
taaggaagcagaccctctctatgtc

SEQ ID NO: 160675 - DNA, 25 bp, Artificial
  probe
  misc_feature (1)..(25): SEQ ID NO: 3460; WAN024DJU_at; Start 467; Stop 491
cagacccaaaacaaattgaagaggc

SEQ ID NO: 160676 - DNA, 25 bp, Artificial
  probe
  misc_feature (1)..(25): SEQ ID NO: 3460; WAN024DJU_at; Start 399; Stop 423
cgaatggaatttcgctaagtttctc

SEQ ID NO: 160677 - DNA, 25 bp, Artificial
  probe
  misc_feature (1)..(25): SEQ ID NO: 3460; WAN024DJU_at; Start 150; Stop 174
gccccagtaccagggacttcaagaa

SEQ ID NO: 160678 - DNA, 25 bp, Artificial
  probe
  misc_feature (1)..(25): SEQ ID NO: 3460; WAN024DJU_at; Start 25; Stop 49
gaggccctcatgacttcactttatg

SEQ ID NO: 160679 - DNA, 25 bp, Artificial
  probe
  misc_feature (1)..(25): SEQ ID NO: 3460; WAN024DJU_at; Start 304; Stop 328
ccacgttttgccaagattaaggtca

SEQ ID NO: 160680 - DNA, 25 bp, Artificial
  probe
  misc_feature (1)..(25): SEQ ID NO: 3460; WAN024DJU_at; Start 439; Stop 463
caagtctttgaacgcttttcttcaa

SEQ ID NO: 160681 - DNA, 25 bp, Artificial
  probe
  misc_feature (1)..(25): SEQ ID NO: 3460; WAN024DJU_at; Start 214; Stop 238
gatttcccttgcaatcagtttatgg

SEQ ID NO: 160682 - DNA, 25 bp, Artificial
  probe
  misc_feature (1)..(25): SEQ ID NO: 3460; WAN024DJU_at; Start 157; Stop 181
taccagggacttcaagaactctatg

SEQ ID NO: 160683 - DNA, 25 bp, Artificial
  probe
  misc_feature (1)..(25): SEQ ID NO: 3460; WAN024DJU_at; Start 178; Stop 202
tatgaacgctatcaagatcagggct

SEQ ID NO: 160684 - DNA, 25 bp, Artificial
  probe
  misc_feature (1)..(25): SEQ ID NO: 3460; WAN024DJU_at; Start 489; Stop 513
ggcgatacaaactctactataacta

SEQ ID NO: 160685 - DNA, 25 bp, Artificial
  probe
  misc_feature (1)..(25): SEQ ID NO: 3460; WAN024DJU_at; Start 231; Stop 255
gtttatgggacaagcacccggcagc

SEQ ID NO: 160686 - DNA, 25 bp, Artificial
  probe
  misc_feature (1)..(25): SEQ ID NO: 3460; WAN024DJU_at; Start 246; Stop 270
acccggcagcgcagaggaaatcaac

SEQ ID NO: 160687 - DNA, 25 bp, Artificial
  probe
  misc_feature (1)..(25): SEQ ID NO: 3460; WAN024DJU_at; Start 91; Stop 115
gatagctatcgtggcaaagttctct

SEQ ID NO: 160688 - DNA, 25 bp, Artificial
  probe
  misc_feature (1)..(25): SEQ ID NO: 3460; WAN024DJU_at; Start 5; Stop 29
tacaatgtagaaaaagaaaagaggc

SEQ ID NO: 160689 - DNA, 25 bp, Artificial
  probe
  misc_feature (1)..(25): SEQ ID NO: 3460; WAN024DJU_at; Start 62; Stop 86
tgaaccaaaacaaccaagcaactcc

SEQ ID NO: 160690 - DNA, 25 bp, Artificial
  probe
  misc_feature (1)..(25): SEQ ID NO: 3460; WAN024DJU_at; Start 339; Stop 363
agcagaccctctctatgtctggtta

SEQ ID NO: 160691 - DNA, 25 bp, Artificial
  probe
  misc_feature (1)..(25): SEQ ID NO: 3460; WAN024DJU_at; Start 277; Stop 301
tgtagcctacattttcaaaccacct

SEQ ID NO: 160692 - DNA, 25 bp, Artificial
  probe
  misc_feature (1)..(25): SEQ ID NO: 3460; WAN024DJU_at; Start 116; Stop 140
tgattgtcaacactgctactggatg

SEQ ID NO: 160693 - DNA, 25 bp, Artificial
  probe
  misc_feature (1)..(25): SEQ ID NO: 3460; WAN024DJU_at; Start 205; Stop 229
gaaatattggatttcccttgcaatc

SEQ ID NO: 160694 - DNA, 25 bp, Artificial
  probe
  misc_feature (1)..(25): SEQ ID NO: 3460; WAN024DJU_at; Start 297; Stop 321
caccttcccacgttttgccaagatt

SEQ ID NO: 160695 - DNA, 25 bp, Artificial
  probe
  misc_feature (1)..(25): SEQ ID NO: 3460; WAN024DJU_at; Start 482; Stop 506
ttgaagaggcgatacaaactctact

SEQ ID NO: 160696 - DNA, 25 bp, Artificial
  probe
  misc_feature (1)..(25): SEQ ID NO: 3460; WAN024DJU_at; Start 473; Stop 497
caaaacaaattgaagaggcgataca

SEQ ID NO: 160697 - DNA, 25 bp, Artificial
  probe
  misc_feature (1)..(25): SEQ ID NO: 3460; WAN024DJU_at; Start 224; Stop 248
gcaatcagtttatgggacaagcacc

SEQ ID NO: 160698 - DNA, 25 bp, Artificial
  probe
  misc_feature (1)..(25): SEQ ID NO: 3460; WAN024DJU_at; Start 35; Stop 59
tgacttcactttatgatttttccgt

SEQ ID NO: 160699 - DNA, 25 bp, Artificial
  probe
  misc_feature (1)..(25): SEQ ID NO: 3460; WAN024DJU_at; Start 312; Stop 336
tgccaagattaaggtcaacggtaag

SEQ ID NO: 160700 - DNA, 25 bp, Artificial
  probe
  misc_feature (1)..(25): SEQ ID NO: 3460; WAN024DJU_at; Start 433; Stop 457
gatgggcaagtctttgaacgctttt

SEQ ID NO: 160701 - DNA, 25 bp, Artificial
  probe
  misc_feature (1)..(25): SEQ ID NO: 3460; WAN024DJU_at; Start 130; Stop 154
gctactggatgtggtttaacgcccc

SEQ ID NO: 160702 - DNA, 25 bp, Artificial
  probe
  misc_feature (1)..(25): SEQ ID NO: 3460; WAN024DJU_at; Start 12; Stop 36
tagaaaaagaaaagaggccctcatg

SEQ ID NO: 160703 - DNA, 25 bp, Artificial
  probe
  misc_feature (1)..(25): SEQ ID NO: 3460; WAN024DJU_at; Start 103; Stop 127
ggcaaagttctcttgattgtcaaca

SEQ ID NO: 160704 - DNA, 25 bp, Artificial
  probe
  misc_feature (1)..(25): SEQ ID NO: 4887; WAN024DJV_at; Start 2060; Stop 2084
taaagacagcttctcttccatatga

SEQ ID NO: 160705 - DNA, 25 bp, Artificial
  probe
  misc_feature (1)..(25): SEQ ID NO: 4887; WAN024DJV_at; Start 699; Stop 723
tggctggacaggatatagttggaat

SEQ ID NO: 160706 - DNA, 25 bp, Artificial
  probe
  misc_feature (1)..(25): SEQ ID NO: 4887; WAN024DJV_at; Start 612; Stop 636
cagatttgaaacagagaaaattcca

SEQ ID NO: 160707 - DNA, 25 bp, Artificial
  probe
  misc_feature (1)..(25): SEQ ID NO: 4887; WAN024DJV_at; Start 299; Stop 323
cgttaaaaggaacagctcggactct

SEQ ID NO: 160708 - DNA, 25 bp, Artificial
  probe
  misc_feature (1)..(25): SEQ ID NO: 4887; WAN024DJV_at; Start 177; Stop 201
gacggactattttcatctgcacttt

SEQ ID NO: 160709 - DNA, 25 bp, Artificial
  probe
  misc_feature (1)..(25): SEQ ID NO: 4887; WAN024DJV_at; Start 1725; Stop 1749
cattcccttggttggttctgagata

SEQ ID NO: 160710 - DNA, 25 bp, Artificial
  probe
  misc_feature (1)..(25): SEQ ID NO: 4887; WAN024DJV_at; Start 2138; Stop 2162
taatgaatatcttgcatcatcagga

SEQ ID NO: 160711 - DNA, 25 bp, Artificial
  probe
  misc_feature (1)..(25): SEQ ID NO: 4887; WAN024DJV_at; Start 661; Stop 685
gattggcatataactgacattccag

SEQ ID NO: 160712 - DNA, 25 bp, Artificial
  probe
  misc_feature (1)..(25): SEQ ID NO: 4887; WAN024DJV_at; Start 1305; Stop 1329
tcgattacatagttctagaagtcct

SEQ ID NO: 160713 - DNA, 25 bp, Artificial
  probe
  misc_feature (1)..(25): SEQ ID NO: 4887; WAN024DJV_at; Start 309; Stop 333
aacagctcggactctggataaggca

SEQ ID NO: 160714 - DNA, 25 bp, Artificial
  probe
  misc_feature (1)..(25): SEQ ID NO: 4887; WAN024DJV_at; Start 1610; Stop 1634
tccctgaaggtgaatggtatgactt

SEQ ID NO: 160715 - DNA, 25 bp, Artificial
  probe
  misc_feature (1)..(25): SEQ ID NO: 4887; WAN024DJV_at; Start 2155; Stop 2179
catcaggataaggaattgagagggc

SEQ ID NO: 160716 - DNA, 25 bp, Artificial
  probe
  misc_feature (1)..(25): SEQ ID NO: 4887; WAN024DJV_at; Start 569; Stop 593
gatattggccttatacgtcggatga

SEQ ID NO: 160717 - DNA, 25 bp, Artificial
  probe
  misc_feature (1)..(25): SEQ ID NO: 4887; WAN024DJV_at; Start 1108; Stop 1132
caccgctaccctgttggtttttcag

SEQ ID NO: 160718 - DNA, 25 bp, Artificial
  probe
  misc_feature (1)..(25): SEQ ID NO: 4887; WAN024DJV_at; Start 815; Stop 839
tacgggcttatgaagaagcttatcc

SEQ ID NO: 160719 - DNA, 25 bp, Artificial
  probe
  misc_feature (1)..(25): SEQ ID NO: 4887; WAN024DJV_at; Start 627; Stop 651
gaaaattccattatctatcggtgtg

SEQ ID NO: 160720 - DNA, 25 bp, Artificial
  probe
  misc_feature (1)..(25): SEQ ID NO: 4887; WAN024DJV_at; Start 249; Stop 273
aaattttgccgtatatggtagtcgc

SEQ ID NO: 160721 - DNA, 25 bp, Artificial
  probe
  misc_feature (1)..(25): SEQ ID NO: 4887; WAN024DJV_at; Start 1775; Stop 1799
ttgtagattggtatgtattcccagg

SEQ ID NO: 160722 - DNA, 25 bp, Artificial
  probe
  misc_feature (1)..(25): SEQ ID NO: 4887; WAN024DJV_at; Start 511; Stop 535
catttgactggttcaacacccttgt

SEQ ID NO: 160723 - DNA, 25 bp, Artificial
  probe
  misc_feature (1)..(25): SEQ ID NO: 4887; WAN024DJV_at; Start 1904; Stop 1928
gagattctagtatcgttccaagcaa

SEQ ID NO: 160724 - DNA, 25 bp, Artificial
  probe
  misc_feature (1)..(25): SEQ ID NO: 4887; WAN024DJV_at; Start 470; Stop 494
cctatgggcatgattatagaggagc

SEQ ID NO: 160725 - DNA, 25 bp, Artificial
  probe
  misc_feature (1)..(25): SEQ ID NO: 4887; WAN024DJV_at; Start 644; Stop 668
tcggtgtgttagatatggattggca

SEQ ID NO: 160726 - DNA, 25 bp, Artificial
  probe
  misc_feature (1)..(25): SEQ ID NO: 4887; WAN024DJV_at; Start 1547; Stop 1571
tggtggctcccattgtagaaaagat

SEQ ID NO: 160727 - DNA, 25 bp, Artificial
  probe
  misc_feature (1)..(25): SEQ ID NO: 4887; WAN024DJV_at; Start 321; Stop 345
tctggataaggcagatggagcaatc

SEQ ID NO: 160728 - DNA, 25 bp, Artificial
  probe
  misc_feature (1)..(25): SEQ ID NO: 4887; WAN024DJV_at; Start 967; Stop 991
gatttttggtggattgactggcaac

SEQ ID NO: 160729 - DNA, 25 bp, Artificial
  probe
  misc_feature (1)..(25): SEQ ID NO: 4887; WAN024DJV_at; Start 863; Stop 887
taaatgtagaactagaagaacctgc

SEQ ID NO: 160730 - DNA, 25 bp, Artificial
  probe
  misc_feature (1)..(25): SEQ ID NO: 4887; WAN024DJV_at; Start 1945; Stop 1969
cattttaaaggaacgaatgtgtcta

SEQ ID NO: 160731 - DNA, 25 bp, Artificial
  probe
  misc_feature (1)..(25): SEQ ID NO: 4887; WAN024DJV_at; Start 136; Stop 160
tcgttagattatatcgagacatcaa

SEQ ID NO: 160732 - DNA, 25 bp, Artificial
  probe
  misc_feature (1)..(25): SEQ ID NO: 4887; WAN024DJV_at; Start 378; Stop 402
tatagccttattggatgattctcaa

SEQ ID NO: 160733 - DNA, 25 bp, Artificial
  probe
  misc_feature (1)..(25): SEQ ID NO: 4887; WAN024DJV_at; Start 739; Stop 763
aatccagaacagttattgcaacaac

SEQ ID NO: 160734 - DNA, 25 bp, Artificial
  probe
  misc_feature (1)..(25): SEQ ID NO: 4887; WAN024DJV_at; Start 1178; Stop 1202
ttacagcgacagcatctaatatcgg

SEQ ID NO: 160735 - DNA, 25 bp, Artificial
  probe
  misc_feature (1)..(25): SEQ ID NO: 4887; WAN024DJV_at; Start 1050; Stop 1074
tagttgtaaaaatgcagaaggtggt

SEQ ID NO: 160736 - DNA, 25 bp, Artificial
  probe
  misc_feature (1)..(25): SEQ ID NO: 4887; WAN024DJV_at; Start 1498; Stop 1522
gatgagagctataatgttccaaacc

SEQ ID NO: 160737 - DNA, 25 bp, Artificial
  probe
  misc_feature (1)..(25): SEQ ID NO: 4887; WAN024DJV_at; Start 1079; Stop 1103
ttttatcaagatatgcaggtcctgg

SEQ ID NO: 160738 - DNA, 25 bp, Artificial
  probe
  misc_feature (1)..(25): SEQ ID NO: 2346; WAN024DJW_at; Start 1234; Stop 1258
gatcttcgagctgtattagttgctc

SEQ ID NO: 160739 - DNA, 25 bp, Artificial
  probe
  misc_feature (1)..(25): SEQ ID NO: 2346; WAN024DJW_at; Start 609; Stop 633
aggagtttctcgtggatttaccgct

SEQ ID NO: 160740 - DNA, 25 bp, Artificial
  probe
  misc_feature (1)..(25): SEQ ID NO: 2346; WAN024DJW_at; Start 147; Stop 171
ggtattcagtattttgccacaagct

SEQ ID NO: 160741 - DNA, 25 bp, Artificial
  probe
  misc_feature (1)..(25): SEQ ID NO: 2346; WAN024DJW_at; Start 451; Stop 475
gcagtaattgcagatggatgggcaa

SEQ ID NO: 160742 - DNA, 25 bp, Artificial
  probe
  misc_feature (1)..(25): SEQ ID NO: 2346; WAN024DJW_at; Start 1107; Stop 1131
tattttagcaccaatggttactgct

SEQ ID NO: 160743 - DNA, 25 bp, Artificial
  probe
  misc_feature (1)..(25): SEQ ID NO: 2346; WAN024DJW_at; Start 394; Stop 418
ccgcaaatcatttttgatggtggaa

SEQ ID NO: 160744 - DNA, 25 bp, Artificial
  probe
  misc_feature (1)..(25): SEQ ID NO: 2346; WAN024DJW_at; Start 501; Stop 525
gacaacagggatttttaccgcaatc

SEQ ID NO: 160745 - DNA, 25 bp, Artificial
  probe
  misc_feature (1)..(25): SEQ ID NO: 2346; WAN024DJW_at; Start 1167; Stop 1191
taagccaattatcgcacaggttcca

SEQ ID NO: 160746 - DNA, 25 bp, Artificial
  probe
  misc_feature (1)..(25): SEQ ID NO: 2346; WAN024DJW_at; Start 577; Stop 601
tgggttattaaaatgcctgaagctg

SEQ ID NO: 160747 - DNA, 25 bp, Artificial
  probe
  misc_feature (1)..(25): SEQ ID NO: 2346; WAN024DJW_at; Start 592; Stop 616
cctgaagctgttccagaaggagttt

SEQ ID NO: 160748 - DNA, 25 bp, Artificial
  probe
  misc_feature (1)..(25): SEQ ID NO: 2346; WAN024DJW_at; Start 1074; Stop 1098
tattatctataatccagccttggct

SEQ ID NO: 160749 - DNA, 25 bp, Artificial
  probe
  misc_feature (1)..(25): SEQ ID NO: 2346; WAN024DJW_at; Start 999; Stop 1023
gcttaaagcaataggacgagcatct

SEQ ID NO: 160750 - DNA, 25 bp, Artificial
  probe
  misc_feature (1)..(25): SEQ ID NO: 2346; WAN024DJW_at; Start 816; Stop 840
ccacggtgcgaacattgtttttgca

SEQ ID NO: 160751 - DNA, 25 bp, Artificial
  probe
  misc_feature (1)..(25): SEQ ID NO: 2346; WAN024DJW_at; Start 77; Stop 101
aagtagtacgtgctatcacggctgc

SEQ ID NO: 160752 - DNA, 25 bp, Artificial
  probe
  misc_feature (1)..(25): SEQ ID NO: 2346; WAN024DJW_at; Start 1294; Stop 1318
ccattcatccgtgtatatgatcaaa

SEQ ID NO: 160753 - DNA, 25 bp, Artificial
  probe
  misc_feature (1)..(25): SEQ ID NO: 2346; WAN024DJW_at; Start 888; Stop 912
cgggcacttcgctgttgcaggtgaa

SEQ ID NO: 160754 - DNA, 25 bp, Artificial
  probe
  misc_feature (1)..(25): SEQ ID NO: 2346; WAN024DJW_at; Start 711; Stop 735
taaagtcattgcaattccatttggt

SEQ ID NO: 160755 - DNA, 25 bp, Artificial
  probe
  misc_feature (1)..(25): SEQ ID NO: 2346; WAN024DJW_at; Start 182; Stop 206
ggccaattgtggcagatattttctc

SEQ ID NO: 160756 - DNA, 25 bp, Artificial
  probe
  misc_feature (1)..(25): SEQ ID NO: 2346; WAN024DJW_at; Start 839; Stop 863
catttgttagtccaattgctcttgc

SEQ ID NO: 160757 - DNA, 25 bp, Artificial
  probe
  misc_feature (1)..(25): SEQ ID NO: 2346; WAN024DJW_at; Start 804; Stop 828
gattgtaggtatccacggtgcgaac

SEQ ID NO: 160758 - DNA, 25 bp, Artificial
  probe
  misc_feature (1)..(25): SEQ ID NO: 2346; WAN024DJW_at; Start 486; Stop 510
agtcgcacgttttgggacaacaggg

SEQ ID NO: 160759 - DNA, 25 bp, Artificial
  probe
  misc_feature (1)..(25): SEQ ID NO: 2346; WAN024DJW_at; Start 1357; Stop 1381
aaagtatactcgatgatagaatcca

SEQ ID NO: 160760 - DNA, 25 bp, Artificial
  probe
  misc_feature (1)..(25): SEQ ID NO: 2346; WAN024DJW_at; Start 516; Stop 540
taccgcaatcattatggcaattgtg

SEQ ID NO: 160761 - DNA, 25 bp, Artificial
  probe
  misc_feature (1)..(25): SEQ ID NO: 2346; WAN024DJW_at; Start 1206; Stop 1230
agggattggagctttcttagggaca

SEQ ID NO: 160762 - DNA, 25 bp, Artificial
  probe
  misc_feature (1)..(25): SEQ ID NO: 2346; WAN024DJW_at; Start 975; Stop 999
tgcttttgcctctaaatctgaacag

SEQ ID NO: 160763 - DNA, 25 bp, Artificial
  probe
  misc_feature (1)..(25): SEQ ID NO: 2346; WAN024DJW_at; Start 375; Stop 399
ggcttttgtcatgacagtaccgcaa

SEQ ID NO: 160764 - DNA, 25 bp, Artificial
  probe
  misc_feature (1)..(25): SEQ ID NO: 2346; WAN024DJW_at; Start 163; Stop 187
ccacaagctttctcattttggccaa

SEQ ID NO: 160765 - DNA, 25 bp, Artificial
  probe
  misc_feature (1)..(25): SEQ ID NO: 2346; WAN024DJW_at; Start 1220; Stop 1244
tcttagggacagcagatcttcgagc

SEQ ID NO: 160766 - DNA, 25 bp, Artificial
  probe
  misc_feature (1)..(25): SEQ ID NO: 2346; WAN024DJW_at; Start 675; Stop 699
caacggtcttcttgtagcaatggga

SEQ ID NO: 160767 - DNA, 25 bp, Artificial
  probe
  misc_feature (1)..(25): SEQ ID NO: 2346; WAN024DJW_at; Start 1325; Stop 1349
tgaaagaagagcaaggtatctaact

SEQ ID NO: 160768 - DNA, 25 bp, Artificial
  probe
  misc_feature (1)..(25): SEQ ID NO: 2346; WAN024DJW_at; Start 1013; Stop 1037
gacgagcatctgtagttccagcctt

SEQ ID NO: 160769 - DNA, 25 bp, Artificial
  probe
  misc_feature (1)..(25): SEQ ID NO: 2346; WAN024DJW_at; Start 314; Stop 338
tttatgcagaggaagaagaactcaa

SEQ ID NO: 160770 - DNA, 25 bp, Artificial
  probe
  misc_feature (1)..(25): SEQ ID NO: 2346; WAN024DJW_at; Start 929; Stop 953
taattgcaggtggttctggtgcaac

SEQ ID NO: 160771 - DNA, 25 bp, Artificial
  probe
  misc_feature (1)..(25): SEQ ID NO: 2346; WAN024DJW_at; Start 1185; Stop 1209
ggttccatggccaactccagtaggg

SEQ ID NO: 160772 - DNA, 25 bp, Artificial
  probe
  misc_feature (1)..(25): SEQ ID NO: 2334; WAN024DJX_at; Start 290; Stop 314
caataggattacttgttttaacttg

SEQ ID NO: 160773 - DNA, 25 bp, Artificial
  probe
  misc_feature (1)..(25): SEQ ID NO: 2334; WAN024DJX_at; Start 73; Stop 97
cgatatcttcttctacgttattcaa

SEQ ID NO: 160774 - DNA, 25 bp, Artificial
  probe
  misc_feature (1)..(25): SEQ ID NO: 2334; WAN024DJX_at; Start 190; Stop 214
ttttctattttagcaactgttgaac

SEQ ID NO: 160775 - DNA, 25 bp, Artificial
  probe
  misc_feature (1)..(25): SEQ ID NO: 2334; WAN024DJX_at; Start 200; Stop 224
tagcaactgttgaacaatttaaact

SEQ ID NO: 160776 - DNA, 25 bp, Artificial
  probe
  misc_feature (1)..(25): SEQ ID NO: 2334; WAN024DJX_at; Start 245; Stop 269
agttgggaataacactaatgtttgt

SEQ ID NO: 160777 - DNA, 25 bp, Artificial
  probe
  misc_feature (1)..(25): SEQ ID NO: 2334; WAN024DJX_at; Start 397; Stop 421
ggtttagttctgagtttgttagaca

SEQ ID NO: 160778 - DNA, 25 bp, Artificial
  probe
  misc_feature (1)..(25): SEQ ID NO: 2334; WAN024DJX_at; Start 28; Stop 52
gaacaacaacgtcgagagatggctc

SEQ ID NO: 160779 - DNA, 25 bp, Artificial
  probe
  misc_feature (1)..(25): SEQ ID NO: 2334; WAN024DJX_at; Start 474; Stop 498
tgtccaattggaaaagaactcactt

SEQ ID NO: 160780 - DNA, 25 bp, Artificial
  probe
  misc_feature (1)..(25): SEQ ID NO: 2334; WAN024DJX_at; Start 240; Stop 264
agaaaagttgggaataacactaatg

SEQ ID NO: 160781 - DNA, 25 bp, Artificial
  probe
  misc_feature (1)..(25): SEQ ID NO: 2334; WAN024DJX_at; Start 348; Stop 372
tgaaaataaccaagtagcacgttta

SEQ ID NO: 160782 - DNA, 25 bp, Artificial
  probe
  misc_feature (1)..(25): SEQ ID NO: 2334; WAN024DJX_at; Start 25; Stop 49
attgaacaacaacgtcgagagatgg

SEQ ID NO: 160783 - DNA, 25 bp, Artificial
  probe
  misc_feature (1)..(25): SEQ ID NO: 2334; WAN024DJX_at; Start 259; Stop 283
ctaatgtttgttagaatacaaatgc

SEQ ID NO: 160784 - DNA, 25 bp, Artificial
  probe
  misc_feature (1)..(25): SEQ ID NO: 2334; WAN024DJX_at; Start 277; Stop 301
caaatgcttatttcaataggattac

SEQ ID NO: 160785 - DNA, 25 bp, Artificial
  probe
  misc_feature (1)..(25): SEQ ID NO: 2334; WAN024DJX_at; Start 31; Stop 55
caacaacgtcgagagatggctctaa

SEQ ID NO: 160786 - DNA, 25 bp, Artificial
  probe
  misc_feature (1)..(25): SEQ ID NO: 2334; WAN024DJX_at; Start 112; Stop 136
tttgggaatatttattggcttttga

SEQ ID NO: 160787 - DNA, 25 bp, Artificial
  probe
  misc_feature (1)..(25): SEQ ID NO: 2334; WAN024DJX_at; Start 172; Stop 196
cccattatgctcatagtattttcta

SEQ ID NO: 160788 - DNA, 25 bp, Artificial
  probe
  misc_feature (1)..(25): SEQ ID NO: 2334; WAN024DJX_at; Start 405; Stop 429
tctgagtttgttagacattagaaga

SEQ ID NO: 160789 - DNA, 25 bp, Artificial
  probe
  misc_feature (1)..(25): SEQ ID NO: 2334; WAN024DJX_at; Start 272; Stop 296
gaatacaaatgcttatttcaatagg

SEQ ID NO: 160790 - DNA, 25 bp, Artificial
  probe
  misc_feature (1)..(25): SEQ ID NO: 2334; WAN024DJX_at; Start 282; Stop 306
gcttatttcaataggattacttgtt

SEQ ID NO: 160791 - DNA, 25 bp, Artificial
  probe
  misc_feature (1)..(25): SEQ ID NO: 2334; WAN024DJX_at; Start 410; Stop 434
gtttgttagacattagaagaattaa

SEQ ID NO: 160792 - DNA, 25 bp, Artificial
  probe
  misc_feature (1)..(25): SEQ ID NO: 2334; WAN024DJX_at; Start 465; Stop 489
tcaacaatttgtccaattggaaaag

SEQ ID NO: 160793 - DNA, 25 bp, Artificial
  probe
  misc_feature (1)..(25): SEQ ID NO: 2334; WAN024DJX_at; Start 387; Stop 411
tcttctattaggtttagttctgagt

SEQ ID NO: 160794 - DNA, 25 bp, Artificial
  probe
  misc_feature (1)..(25): SEQ ID NO: 2334; WAN024DJX_at; Start 95; Stop 119
caatagcactcttcttttttgggaa

SEQ ID NO: 160795 - DNA, 25 bp, Artificial
  probe
  misc_feature (1)..(25): SEQ ID NO: 2334; WAN024DJX_at; Start 353; Stop 377
ataaccaagtagcacgtttatttgt

SEQ ID NO: 160796 - DNA, 25 bp, Artificial
  probe
  misc_feature (1)..(25): SEQ ID NO: 2334; WAN024DJX_at; Start 81; Stop 105
tcttctacgttattcaatagcactc

SEQ ID NO: 160797 - DNA, 25 bp, Artificial
  probe
  misc_feature (1)..(25): SEQ ID NO: 2334; WAN024DJX_at; Start 39; Stop 63
tcgagagatggctctaactaatact

SEQ ID NO: 160798 - DNA, 25 bp, Artificial
  probe
  misc_feature (1)..(25): SEQ ID NO: 2334; WAN024DJX_at; Start 43; Stop 67
gagatggctctaactaatacttttt

SEQ ID NO: 160799 - DNA, 25 bp, Artificial
  probe
  misc_feature (1)..(25): SEQ ID NO: 2334; WAN024DJX_at; Start 98; Stop 122
tagcactcttcttttttgggaatat

SEQ ID NO: 160800 - DNA, 25 bp, Artificial
  probe
  misc_feature (1)..(25): SEQ ID NO: 2334; WAN024DJX_at; Start 84; Stop 108
tctacgttattcaatagcactcttc

SEQ ID NO: 160801 - DNA, 25 bp, Artificial
  probe
  misc_feature (1)..(25): SEQ ID NO: 2334; WAN024DJX_at; Start 27; Stop 51
tgaacaacaacgtcgagagatggct

SEQ ID NO: 160802 - DNA, 25 bp, Artificial
  probe
  misc_feature (1)..(25): SEQ ID NO: 2334; WAN024DJX_at; Start 34; Stop 58
caacgtcgagagatggctctaacta

SEQ ID NO: 160803 - DNA, 25 bp, Artificial
  probe
  misc_feature (1)..(25): SEQ ID NO: 2334; WAN024DJX_at; Start 166; Stop 190
attttccccattatgctcatagtat

SEQ ID NO: 160804 - DNA, 25 bp, Artificial
  probe
  misc_feature (1)..(25): SEQ ID NO: 2334; WAN024DJX_at; Start 249; Stop 273
gggaataacactaatgtttgttaga

SEQ ID NO: 160805 - DNA, 25 bp, Artificial
  probe
  misc_feature (1)..(25): SEQ ID NO: 2334; WAN024DJX_at; Start 358; Stop 382
caagtagcacgtttatttgtttttg

SEQ ID NO: 160806 - DNA, 25 bp, Artificial
  probe
  misc_feature (1)..(25): SEQ ID NO: 1225; WAN024DJY_at; Start 53; Stop 77
gaaatgcaaggtcagaaatacatga

SEQ ID NO: 160807 - DNA, 25 bp, Artificial
  probe
  misc_feature (1)..(25): SEQ ID NO: 1225; WAN024DJY_at; Start 19; Stop 43
caggttgcagcatttgaaattatcc

SEQ ID NO: 160808 - DNA, 25 bp, Artificial
  probe
  misc_feature (1)..(25): SEQ ID NO: 1225; WAN024DJY_at; Start 190; Stop 214
tacgcaagtggagtggaaattaaaa

SEQ ID NO: 160809 - DNA, 25 bp, Artificial
  probe
  misc_feature (1)..(25): SEQ ID NO: 1225; WAN024DJY_at; Start 282; Stop 306
ggaaatgttagctctttataagaaa

SEQ ID NO: 160810 - DNA, 25 bp, Artificial
  probe
  misc_feature (1)..(25): SEQ ID NO: 1225; WAN024DJY_at; Start 274; Stop 298
gtagcaaaggaaatgttagctcttt

SEQ ID NO: 160811 - DNA, 25 bp, Artificial
  probe
  misc_feature (1)..(25): SEQ ID NO: 1225; WAN024DJY_at; Start 241; Stop 265
gatcatttaatgaccactatgacat

SEQ ID NO: 160812 - DNA, 25 bp, Artificial
  probe
  misc_feature (1)..(25): SEQ ID NO: 1225; WAN024DJY_at; Start 212; Stop 236
aaattgaaattatcatggtacatgc

SEQ ID NO: 160813 - DNA, 25 bp, Artificial
  probe
  misc_feature (1)..(25): SEQ ID NO: 1225; WAN024DJY_at; Start 82; Stop 106
tttgcaaaaatgagagaaggtagtt

SEQ ID NO: 160814 - DNA, 25 bp, Artificial
  probe
  misc_feature (1)..(25): SEQ ID NO: 1225; WAN024DJY_at; Start 41; Stop 65
tcctgcattcgggaaatgcaaggtc

SEQ ID NO: 160815 - DNA, 25 bp, Artificial
  probe
  misc_feature (1)..(25): SEQ ID NO: 1225; WAN024DJY_at; Start 2; Stop 26
tgaatcaagaggaactgcaggttgc

SEQ ID NO: 160816 - DNA, 25 bp, Artificial
  probe
  misc_feature (1)..(25): SEQ ID NO: 1225; WAN024DJY_at; Start 156; Stop 180
agcgcatcatgcacaaaccaaactc

SEQ ID NO: 160817 - DNA, 25 bp, Artificial
  probe
  misc_feature (1)..(25): SEQ ID NO: 1225; WAN024DJY_at; Start 62; Stop 86
ggtcagaaatacatgaagcatttgc

SEQ ID NO: 160818 - DNA, 25 bp, Artificial
  probe
  misc_feature (1)..(25): SEQ ID NO: 1225; WAN024DJY_at; Start 29; Stop 53
catttgaaattatcctgcattcggg

SEQ ID NO: 160819 - DNA, 25 bp, Artificial
  probe
  misc_feature (1)..(25): SEQ ID NO: 1225; WAN024DJY_at; Start 49; Stop 73
tcgggaaatgcaaggtcagaaatac

SEQ ID NO: 160820 - DNA, 25 bp, Artificial
  probe
  misc_feature (1)..(25): SEQ ID NO: 1225; WAN024DJY_at; Start 73; Stop 97
catgaagcatttgcaaaaatgagag

SEQ ID NO: 160821 - DNA, 25 bp, Artificial
  probe
  misc_feature (1)..(25): SEQ ID NO: 1225; WAN024DJY_at; Start 254; Stop 278
ccactatgacattattagaagtagc

SEQ ID NO: 160822 - DNA, 25 bp, Artificial
  probe
  misc_feature (1)..(25): SEQ ID NO: 1225; WAN024DJY_at; Start 144; Stop 168
gataattcttgaagcgcatcatgca

SEQ ID NO: 160823 - DNA, 25 bp, Artificial
  probe
  misc_feature (1)..(25): SEQ ID NO: 1225; WAN024DJY_at; Start 269; Stop 293
tagaagtagcaaaggaaatgttagc

SEQ ID NO: 160824 - DNA, 25 bp, Artificial
  probe
  misc_feature (1)..(25): SEQ ID NO: 1225; WAN024DJY_at; Start 192; Stop 216
cgcaagtggagtggaaattaaaatt

SEQ ID NO: 160825 - DNA, 25 bp, Artificial
  probe
  misc_feature (1)..(25): SEQ ID NO: 1225; WAN024DJY_at; Start 46; Stop 70
cattcgggaaatgcaaggtcagaaa

SEQ ID NO: 160826 - DNA, 25 bp, Artificial
  probe
  misc_feature (1)..(25): SEQ ID NO: 1225; WAN024DJY_at; Start 98; Stop 122
aaggtagttttgatgatgcagaaag

SEQ ID NO: 160827 - DNA, 25 bp, Artificial
  probe
  misc_feature (1)..(25): SEQ ID NO: 1225; WAN024DJY_at; Start 153; Stop 177
tgaagcgcatcatgcacaaaccaaa

SEQ ID NO: 160828 - DNA, 25 bp, Artificial
  probe
  misc_feature (1)..(25): SEQ ID NO: 1225; WAN024DJY_at; Start 34; Stop 58
gaaattatcctgcattcgggaaatg

SEQ ID NO: 160829 - DNA, 25 bp, Artificial
  probe
  misc_feature (1)..(25): SEQ ID NO: 1225; WAN024DJY_at; Start 58; Stop 82
gcaaggtcagaaatacatgaagcat

SEQ ID NO: 160830 - DNA, 25 bp, Artificial
  probe
  misc_feature (1)..(25): SEQ ID NO: 1225; WAN024DJY_at; Start 13; Stop 37
gaactgcaggttgcagcatttgaaa

SEQ ID NO: 160831 - DNA, 25 bp, Artificial
  probe
  misc_feature (1)..(25): SEQ ID NO: 1225; WAN024DJY_at; Start 137; Stop 161
caaatgagataattcttgaagcgca

SEQ ID NO: 160832 - DNA, 25 bp, Artificial
  probe
  misc_feature (1)..(25): SEQ ID NO: 1225; WAN024DJY_at; Start 6; Stop 30
tcaagaggaactgcaggttgcagca

SEQ ID NO: 160833 - DNA, 25 bp, Artificial
  probe
  misc_feature (1)..(25): SEQ ID NO: 1225; WAN024DJY_at; Start 150; Stop 174
tcttgaagcgcatcatgcacaaacc

SEQ ID NO: 160834 - DNA, 25 bp, Artificial
  probe
  misc_feature (1)..(25): SEQ ID NO: 1225; WAN024DJY_at; Start 261; Stop 285
gacattattagaagtagcaaaggaa

SEQ ID NO: 160835 - DNA, 25 bp, Artificial
  probe
  misc_feature (1)..(25): SEQ ID NO: 1225; WAN024DJY_at; Start 183; Stop 207
gcaagaatacgcaagtggagtggaa

SEQ ID NO: 160836 - DNA, 25 bp, Artificial
  probe
  misc_feature (1)..(25): SEQ ID NO: 1225; WAN024DJY_at; Start 95; Stop 119
gagaaggtagttttgatgatgcaga

SEQ ID NO: 160837 - DNA, 25 bp, Artificial
  probe
  misc_feature (1)..(25): SEQ ID NO: 1225; WAN024DJY_at; Start 290; Stop 314
tagctctttataagaaagttaacta

SEQ ID NO: 160838 - DNA, 25 bp, Artificial
  probe
  misc_feature (1)..(25): SEQ ID NO: 1225; WAN024DJY_at; Start 217; Stop 241
gaaattatcatggtacatgctcaag

SEQ ID NO: 160839 - DNA, 25 bp, Artificial
  probe
  misc_feature (1)..(25): SEQ ID NO: 1225; WAN024DJY_at; Start 224; Stop 248
tcatggtacatgctcaagatcattt

SEQ ID NO: 160840 - DNA, 25 bp, Artificial
  probe
  misc_feature (1)..(25): SEQ ID NO: 1258; WAN024DJZ_at; Start 432; Stop 456
taatttgtccattgagagtagggcg

SEQ ID NO: 160841 - DNA, 25 bp, Artificial
  probe
  misc_feature (1)..(25): SEQ ID NO: 1258; WAN024DJZ_at; Start 816; Stop 840
tccagttcaggaaatagactacatt

SEQ ID NO: 160842 - DNA, 25 bp, Artificial
  probe
  misc_feature (1)..(25): SEQ ID NO: 1258; WAN024DJZ_at; Start 108; Stop 132
tagaactgtccgtaatgtactgaaa

SEQ ID NO: 160843 - DNA, 25 bp, Artificial
  probe
  misc_feature (1)..(25): SEQ ID NO: 1258; WAN024DJZ_at; Start 255; Stop 279
agaagactatacgaaaactgcggtt

SEQ ID NO: 160844 - DNA, 25 bp, Artificial
  probe
  misc_feature (1)..(25): SEQ ID NO: 1258; WAN024DJZ_at; Start 1787; Stop 1811
cgttactctgggataatcaaagttc

SEQ ID NO: 160845 - DNA, 25 bp, Artificial
  probe
  misc_feature (1)..(25): SEQ ID NO: 1258; WAN024DJZ_at; Start 373; Stop 397
gttagtcgttcaacattatctcatg

SEQ ID NO: 160846 - DNA, 25 bp, Artificial
  probe
  misc_feature (1)..(25): SEQ ID NO: 1258; WAN024DJZ_at; Start 156; Stop 180
tcaaggagtccggttgatttcaaaa

SEQ ID NO: 160847 - DNA, 25 bp, Artificial
  probe
  misc_feature (1)..(25): SEQ ID NO: 1258; WAN024DJZ_at; Start 173; Stop 197
tttcaaaacaaggtcaagggtatca

SEQ ID NO: 160848 - DNA, 25 bp, Artificial
  probe
  misc_feature (1)..(25): SEQ ID NO: 1258; WAN024DJZ_at; Start 1878; Stop 1902
taaaaagatagtctctctgacagag

SEQ ID NO: 160849 - DNA, 25 bp, Artificial
  probe
  misc_feature (1)..(25): SEQ ID NO: 1258; WAN024DJZ_at; Start 573; Stop 597
tgatcaaactgttccattagaagaa

SEQ ID NO: 160850 - DNA, 25 bp, Artificial
  probe
  misc_feature (1)..(25): SEQ ID NO: 1258; WAN024DJZ_at; Start 459; Stop 483
taaaggagtttatgtctcaggcgag

SEQ ID NO: 160851 - DNA, 25 bp, Artificial
  probe
  misc_feature (1)..(25): SEQ ID NO: 1258; WAN024DJZ_at; Start 95; Stop 119
tatcctgttcagatagaactgtccg

SEQ ID NO: 160852 - DNA, 25 bp, Artificial
  probe
  misc_feature (1)..(25): SEQ ID NO: 1258; WAN024DJZ_at; Start 1854; Stop 1878
gaacgaaggtttggcaactgtgact

SEQ ID NO: 160853 - DNA, 25 bp, Artificial
  probe
  misc_feature (1)..(25): SEQ ID NO: 1258; WAN024DJZ_at; Start 616; Stop 640
gatgaatgccaagaggccaacctaa

SEQ ID NO: 160854 - DNA, 25 bp, Artificial
  probe
  misc_feature (1)..(25): SEQ ID NO: 1258; WAN024DJZ_at; Start 328; Stop 352
gagcaagttccagttctttttgatg

SEQ ID NO: 160855 - DNA, 25 bp, Artificial
  probe
  misc_feature (1)..(25): SEQ ID NO: 1258; WAN024DJZ_at; Start 854; Stop 878
tagctaagagtcaacaatgtcaaaa

SEQ ID NO: 160856 - DNA, 25 bp, Artificial
  probe
  misc_feature (1)..(25): SEQ ID NO: 1258; WAN024DJZ_at; Start 1118; Stop 1142
caaatatggacaagttcttggagtg

SEQ ID NO: 160857 - DNA, 25 bp, Artificial
  probe
  misc_feature (1)..(25): SEQ ID NO: 1258; WAN024DJZ_at; Start 728; Stop 752
tagactgtcagatgactgatgatgc

SEQ ID NO: 160858 - DNA, 25 bp, Artificial
  probe
  misc_feature (1)..(25): SEQ ID NO: 1258; WAN024DJZ_at; Start 1839; Stop 1863
tccatcaatatatgggaacgaaggt

SEQ ID NO: 160859 - DNA, 25 bp, Artificial
  probe
  misc_feature (1)..(25): SEQ ID NO: 1258; WAN024DJZ_at; Start 473; Stop 497
tctcaggcgaggaacgtgataaacg

SEQ ID NO: 160860 - DNA, 25 bp, Artificial
  probe
  misc_feature (1)..(25): SEQ ID NO: 1258; WAN024DJZ_at; Start 349; Stop 373
gatgatttagctgatgaactttacg

SEQ ID NO: 160861 - DNA, 25 bp, Artificial
  probe
  misc_feature (1)..(25): SEQ ID NO: 1258; WAN024DJZ_at; Start 1013; Stop 1037
cactacaagtacgtttagaaagccg

SEQ ID NO: 160862 - DNA, 25 bp, Artificial
  probe
  misc_feature (1)..(25): SEQ ID NO: 1258; WAN024DJZ_at; Start 144; Stop 168
gacaatgattattcaaggagtccgg

SEQ ID NO: 160863 - DNA, 25 bp, Artificial
  probe
  misc_feature (1)..(25): SEQ ID NO: 1258; WAN024DJZ_at; Start 1194; Stop 1218
tatggaacgtagcaaagagagtact

SEQ ID NO: 160864 - DNA, 25 bp, Artificial
  probe
  misc_feature (1)..(25): SEQ ID NO: 1258; WAN024DJZ_at; Start 668; Stop 692
tagtagttcacatagcattgtctgt

SEQ ID NO: 160865 - DNA, 25 bp, Artificial
  probe
  misc_feature (1)..(25): SEQ ID NO: 1258; WAN024DJZ_at; Start 601; Stop 625
gctagaattgttttggatgaatgcc

SEQ ID NO: 160866 - DNA, 25 bp, Artificial
  probe
  misc_feature (1)..(25): SEQ ID NO: 1258; WAN024DJZ_at; Start 1255; Stop 1279
ggtgcagcccaaatgttaagaaatc

SEQ ID NO: 160867 - DNA, 25 bp, Artificial
  probe
  misc_feature (1)..(25): SEQ ID NO: 1258; WAN024DJZ_at; Start 269; Stop 293
aaactgcggtttcaaaaggtgatga

SEQ ID NO: 160868 - DNA, 25 bp, Artificial
  probe
  misc_feature (1)..(25): SEQ ID NO: 1258; WAN024DJZ_at; Start 1104; Stop 1128
tagagaaattcttgcaaatatggac

SEQ ID NO: 160869 - DNA, 25 bp, Artificial
  probe
  misc_feature (1)..(25): SEQ ID NO: 1258; WAN024DJZ_at; Start 1711; Stop 1735
gaaaaaattgcagttccgcatccta

SEQ ID NO: 160870 - DNA, 25 bp, Artificial
  probe
  misc_feature (1)..(25): SEQ ID NO: 1258; WAN024DJZ_at; Start 628; Stop 652
gaggccaacctaaaactatctgatt

SEQ ID NO: 160871 - DNA, 25 bp, Artificial
  probe
  misc_feature (1)..(25): SEQ ID NO: 1258; WAN024DJZ_at; Start 686; Stop 710
tgtctgtgattcgtttaaaatccgg

SEQ ID NO: 160872 - DNA, 25 bp, Artificial
  probe
  misc_feature (1)..(25): SEQ ID NO: 1258; WAN024DJZ_at; Start 796; Stop 820
gaagtaacaaatcaggaatttccag

SEQ ID NO: 160873 - DNA, 25 bp, Artificial
  probe
  misc_feature (1)..(25): SEQ ID NO: 1258; WAN024DJZ_at; Start 757; Stop 781
gagagaaaggttgcccaaagaattc

SEQ ID NO: 160874 - DNA, 25 bp, Artificial
  probe
  misc_feature (1)..(25): SEQ ID NO: 1852; WAN024DK2_at; Start 2; Stop 26
tgattggaagtattgcagcaatttt

SEQ ID NO: 160875 - DNA, 25 bp, Artificial
  probe
  misc_feature (1)..(25): SEQ ID NO: 1852; WAN024DK2_at; Start 99; Stop 123
tatgtatgttatgcaagttattggt

SEQ ID NO: 160876 - DNA, 25 bp, Artificial
  probe
  misc_feature (1)..(25): SEQ ID NO: 1852; WAN024DK2_at; Start 69; Stop 93
gacaaaggacacaggatctattgct

SEQ ID NO: 160877 - DNA, 25 bp, Artificial
  probe
  misc_feature (1)..(25): SEQ ID NO: 1852; WAN024DK2_at; Start 151; Stop 175
cgtataggagacttgcctttgattt

SEQ ID NO: 160878 - DNA, 25 bp, Artificial
  probe
  misc_feature (1)..(25): SEQ ID NO: 1852; WAN024DK2_at; Start 91; Stop 115
gctctaggtatgtatgttatgcaag

SEQ ID NO: 160879 - DNA, 25 bp, Artificial
  probe
  misc_feature (1)..(25): SEQ ID NO: 1852; WAN024DK2_at; Start 128; Stop 152
cattgtggcttgctcatggtattcg

SEQ ID NO: 160880 - DNA, 25 bp, Artificial
  probe
  misc_feature (1)..(25): SEQ ID NO: 1852; WAN024DK2_at; Start 83; Stop 107
gatctattgctctaggtatgtatgt

SEQ ID NO: 160881 - DNA, 25 bp, Artificial
  probe
  misc_feature (1)..(25): SEQ ID NO: 1852; WAN024DK2_at; Start 66; Stop 90
taagacaaaggacacaggatctatt

SEQ ID NO: 160882 - DNA, 25 bp, Artificial
  probe
  misc_feature (1)..(25): SEQ ID NO: 1852; WAN024DK2_at; Start 28; Stop 52
acaacatttgcatttttaccacaag

SEQ ID NO: 160883 - DNA, 25 bp, Artificial
  probe
  misc_feature (1)..(25): SEQ ID NO: 1852; WAN024DK2_at; Start 132; Stop 156
gtggcttgctcatggtattcgtata

SEQ ID NO: 160884 - DNA, 25 bp, Artificial
  probe
  misc_feature (1)..(25): SEQ ID NO: 1852; WAN024DK2_at; Start 32; Stop 56
catttgcatttttaccacaagtttt

SEQ ID NO: 160885 - DNA, 25 bp, Artificial
  probe
  misc_feature (1)..(25): SEQ ID NO: 1852; WAN024DK2_at; Start 138; Stop 162
tgctcatggtattcgtataggagac

SEQ ID NO: 160886 - DNA, 25 bp, Artificial
  probe
  misc_feature (1)..(25): SEQ ID NO: 1852; WAN024DK2_at; Start 55; Stop 79
tttcgtgtagttaagacaaaggaca

SEQ ID NO: 160887 - DNA, 25 bp, Artificial
  probe
  misc_feature (1)..(25): SEQ ID NO: 1852; WAN024DK2_at; Start 11; Stop 35
gtattgcagcaattttaacaacatt

SEQ ID NO: 160888 - DNA, 25 bp, Artificial
  probe
  misc_feature (1)..(25): SEQ ID NO: 1852; WAN024DK2_at; Start 71; Stop 95
caaaggacacaggatctattgctct

SEQ ID NO: 160889 - DNA, 25 bp, Artificial
  probe
  misc_feature (1)..(25): SEQ ID NO: 1852; WAN024DK2_at; Start 8; Stop 32
gaagtattgcagcaattttaacaac

SEQ ID NO: 160890 - DNA, 25 bp, Artificial
  probe
  misc_feature (1)..(25): SEQ ID NO: 1852; WAN024DK2_at; Start 144; Stop 168
tggtattcgtataggagacttgcct

SEQ ID NO: 160891 - DNA, 25 bp, Artificial
  probe
  misc_feature (1)..(25): SEQ ID NO: 1852; WAN024DK2_at; Start 155; Stop 179
taggagacttgcctttgattttagc

SEQ ID NO: 160892 - DNA, 25 bp, Artificial
  probe
  misc_feature (1)..(25): SEQ ID NO: 1852; WAN024DK2_at; Start 62; Stop 86
tagttaagacaaaggacacaggatc

SEQ ID NO: 160893 - DNA, 25 bp, Artificial
  probe
  misc_feature (1)..(25): SEQ ID NO: 1852; WAN024DK2_at; Start 80; Stop 104
caggatctattgctctaggtatgta

SEQ ID NO: 160894 - DNA, 25 bp, Artificial
  probe
  misc_feature (1)..(25): SEQ ID NO: 1852; WAN024DK2_at; Start 73; Stop 97
aaggacacaggatctattgctctag

SEQ ID NO: 160895 - DNA, 25 bp, Artificial
  probe
  misc_feature (1)..(25): SEQ ID NO: 1852; WAN024DK2_at; Start 94; Stop 118
ctaggtatgtatgttatgcaagtta

SEQ ID NO: 160896 - DNA, 25 bp, Artificial
  probe
  misc_feature (1)..(25): SEQ ID NO: 1852; WAN024DK2_at; Start 78; Stop 102
cacaggatctattgctctaggtatg

SEQ ID NO: 160897 - DNA, 25 bp, Artificial
  probe
  misc_feature (1)..(25): SEQ ID NO: 1852; WAN024DK2_at; Start 124; Stop 148
attgcattgtggcttgctcatggta

SEQ ID NO: 160898 - DNA, 25 bp, Artificial
  probe
  misc_feature (1)..(25): SEQ ID NO: 1852; WAN024DK2_at; Start 121; Stop 145
ggtattgcattgtggcttgctcatg

SEQ ID NO: 160899 - DNA, 25 bp, Artificial
  probe
  misc_feature (1)..(25): SEQ ID NO: 1852; WAN024DK2_at; Start 112; Stop 136
caagttattggtattgcattgtggc

SEQ ID NO: 160900 - DNA, 25 bp, Artificial
  probe
  misc_feature (1)..(25): SEQ ID NO: 1852; WAN024DK2_at; Start 57; Stop 81
tcgtgtagttaagacaaaggacaca

SEQ ID NO: 160901 - DNA, 25 bp, Artificial
  probe
  misc_feature (1)..(25): SEQ ID NO: 1852; WAN024DK2_at; Start 76; Stop 100
gacacaggatctattgctctaggta

SEQ ID NO: 160902 - DNA, 25 bp, Artificial
  probe
  misc_feature (1)..(25): SEQ ID NO: 1852; WAN024DK2_at; Start 142; Stop 166
catggtattcgtataggagacttgc

SEQ ID NO: 160903 - DNA, 25 bp, Artificial
  probe
  misc_feature (1)..(25): SEQ ID NO: 1852; WAN024DK2_at; Start 147; Stop 171
tattcgtataggagacttgcctttg

SEQ ID NO: 160904 - DNA, 25 bp, Artificial
  probe
  misc_feature (1)..(25): SEQ ID NO: 1852; WAN024DK2_at; Start 135; Stop 159
gcttgctcatggtattcgtatagga

SEQ ID NO: 160905 - DNA, 25 bp, Artificial
  probe
  misc_feature (1)..(25): SEQ ID NO: 1852; WAN024DK2_at; Start 64; Stop 88
gttaagacaaaggacacaggatcta

SEQ ID NO: 160906 - DNA, 25 bp, Artificial
  probe
  misc_feature (1)..(25): SEQ ID NO: 1852; WAN024DK2_at; Start 16; Stop 40
gcagcaattttaacaacatttgcat

SEQ ID NO: 160907 - DNA, 25 bp, Artificial
  probe
  misc_feature (1)..(25): SEQ ID NO: 1852; WAN024DK2_at; Start 116; Stop 140
ttattggtattgcattgtggcttgc

SEQ ID NO: 160908 - DNA, 25 bp, Artificial
  probe
  misc_feature (1)..(25): SEQ ID NO: 1446; WAN024DK3_at; Start 125; Stop 149
gagtagctcgtgaaattactttggg

SEQ ID NO: 160909 - DNA, 25 bp, Artificial
  probe
  misc_feature (1)..(25): SEQ ID NO: 1446; WAN024DK3_at; Start 299; Stop 323
tagagccgaatgaagaaggattaca

SEQ ID NO: 160910 - DNA, 25 bp, Artificial
  probe
  misc_feature (1)..(25): SEQ ID NO: 1446; WAN024DK3_at; Start 251; Stop 275
tccgtacctctattgcatggacacg

SEQ ID NO: 160911 - DNA, 25 bp, Artificial
  probe
  misc_feature (1)..(25): SEQ ID NO: 1446; WAN024DK3_at; Start 1192; Stop 1216
tatctaggtgcccatattcgtgaaa

SEQ ID NO: 160912 - DNA, 25 bp, Artificial
  probe
  misc_feature (1)..(25): SEQ ID NO: 1446; WAN024DK3_at; Start 637; Stop 661
tacgaattagttgcttctgcacgag

SEQ ID NO: 160913 - DNA, 25 bp, Artificial
  probe
  misc_feature (1)..(25): SEQ ID NO: 1446; WAN024DK3_at; Start 711; Stop 735
gattgcgatgtgtccaatttatcca

SEQ ID NO: 160914 - DNA, 25 bp, Artificial
  probe
  misc_feature (1)..(25): SEQ ID NO: 1446; WAN024DK3_at; Start 49; Stop 73
catcaacttgaaggtggatggcaag

SEQ ID NO: 160915 - DNA, 25 bp, Artificial
  probe
  misc_feature (1)..(25): SEQ ID NO: 1446; WAN024DK3_at; Start 1209; Stop 1233
tcgtgaaatgaaaaaggctgtagtt

SEQ ID NO: 160916 - DNA, 25 bp, Artificial
  probe
  misc_feature (1)..(25): SEQ ID NO: 1446; WAN024DK3_at; Start 556; Stop 580
gattttgcaccatttactaactcag

SEQ ID NO: 160917 - DNA, 25 bp, Artificial
  probe
  misc_feature (1)..(25): SEQ ID NO: 1446; WAN024DK3_at; Start 282; Stop 306
tccaaaaggtgatgagttagagccg

SEQ ID NO: 160918 - DNA, 25 bp, Artificial
  probe
  misc_feature (1)..(25): SEQ ID NO: 1446; WAN024DK3_at; Start 109; Stop 133
actgctggtcgtcatggagtagctc

SEQ ID NO: 160919 - DNA, 25 bp, Artificial
  probe
  misc_feature (1)..(25): SEQ ID NO: 1446; WAN024DK3_at; Start 30; Stop 54
gggtggtgctgttgctgctcatcaa

SEQ ID NO: 160920 - DNA, 25 bp, Artificial
  probe
  misc_feature (1)..(25): SEQ ID NO: 1446; WAN024DK3_at; Start 162; Stop 186
taaatattatccaaatcatgaggcg

SEQ ID NO: 160921 - DNA, 25 bp, Artificial
  probe
  misc_feature (1)..(25): SEQ ID NO: 1446; WAN024DK3_at; Start 1289; Stop 1313
cagctggtaccggtgaaatgcggaa

SEQ ID NO: 160922 - DNA, 25 bp, Artificial
  probe
  misc_feature (1)..(25): SEQ ID NO: 1446; WAN024DK3_at; Start 652; Stop 676
tctgcacgagctgtaaaaattggtc

SEQ ID NO: 160923 - DNA, 25 bp, Artificial
  probe
  misc_feature (1)..(25): SEQ ID NO: 1446; WAN024DK3_at; Start 831; Stop 855
gcatattttcaagtattgggaacga

SEQ ID NO: 160924 - DNA, 25 bp, Artificial
  probe
  misc_feature (1)..(25): SEQ ID NO: 1446; WAN024DK3_at; Start 758; Stop 782
tcttaatggcaatgaaagctatgca

SEQ ID NO: 160925 - DNA, 25 bp, Artificial
  probe
  misc_feature (1)..(25): SEQ ID NO: 1446; WAN024DK3_at; Start 1401; Stop 1425
ggaagttatttcatctaacggtgaa

SEQ ID NO: 160926 - DNA, 25 bp, Artificial
  probe
  misc_feature (1)..(25): SEQ ID NO: 1446; WAN024DK3_at; Start 94; Stop 118
gttgctgatgttatgactgctggtc

SEQ ID NO: 160927 - DNA, 25 bp, Artificial
  probe
  misc_feature (1)..(25): SEQ ID NO: 1446; WAN024DK3_at; Start 219; Stop 243
agcactttttgctgaaatgggattc

SEQ ID NO: 160928 - DNA, 25 bp, Artificial
  probe
  misc_feature (1)..(25): SEQ ID NO: 1446; WAN024DK3_at; Start 1148; Stop 1172
aagttgcagcagatggtatggtaca

SEQ ID NO: 160929 - DNA, 25 bp, Artificial
  probe
  misc_feature (1)..(25): SEQ ID NO: 1446; WAN024DK3_at; Start 1303; Stop 1327
gaaatgcggaaacgttatggcttta

SEQ ID NO: 160930 - DNA, 25 bp, Artificial
  probe
  misc_feature (1)..(25): SEQ ID NO: 1446; WAN024DK3_at; Start 899; Stop 923
tacttggtgggactgtagattacat

SEQ ID NO: 160931 - DNA, 25 bp, Artificial
  probe
  misc_feature (1)..(25): SEQ ID NO: 1446; WAN024DK3_at; Start 622; Stop 646
tatcaagcagcacattacgaattag

SEQ ID NO: 160932 - DNA, 25 bp, Artificial
  probe
  misc_feature (1)..(25): SEQ ID NO: 1446; WAN024DK3_at; Start 1043; Stop 1067
agtggcaaattgatccagaaggttt

SEQ ID NO: 160933 - DNA, 25 bp, Artificial
  probe
  misc_feature (1)..(25): SEQ ID NO: 1446; WAN024DK3_at; Start 542; Stop 566
cgaattatcaggaagattttgcacc

SEQ ID NO: 160934 - DNA, 25 bp, Artificial
  probe
  misc_feature (1)..(25): SEQ ID NO: 1446; WAN024DK3_at; Start 1246; Stop 1270
gatttaatgggttatactccatggg

SEQ ID NO: 160935 - DNA, 25 bp, Artificial
  probe
  misc_feature (1)..(25): SEQ ID NO: 1446; WAN024DK3_at; Start 234; Stop 258
aatgggattcaagtgcttccgtacc

SEQ ID NO: 160936 - DNA, 25 bp, Artificial
  probe
  misc_feature (1)..(25): SEQ ID NO: 1446; WAN024DK3_at; Start 406; Stop 430
cacttagtgaccgaatatggtggtt

SEQ ID NO: 160937 - DNA, 25 bp, Artificial
  probe
  misc_feature (1)..(25): SEQ ID NO: 1446; WAN024DK3_at; Start 357; Stop 381
gaatggtattgaacctgtcatcact

SEQ ID NO: 160938 - DNA, 25 bp, Artificial
  probe
  misc_feature (1)..(25): SEQ ID NO: 1446; WAN024DK3_at; Start 393; Stop 417
tgaaatgccttatcacttagtgacc

SEQ ID NO: 160939 - DNA, 25 bp, Artificial
  probe
  misc_feature (1)..(25): SEQ ID NO: 1446; WAN024DK3_at; Start 266; Stop 290
catggacacgtatctttccaaaagg

SEQ ID NO: 160940 - DNA, 25 bp, Artificial
  probe
  misc_feature (1)..(25): SEQ ID NO: 1446; WAN024DK3_at; Start 1026; Stop 1050
taaggcttctgaatgggagtggcaa

SEQ ID NO: 160941 - DNA, 25 bp, Artificial
  probe
  misc_feature (1)..(25): SEQ ID NO: 1446; WAN024DK3_at; Start 1072; Stop 1096
tatgcgttaaattggtttacagacc

SEQ ID NO: 160942 - DNA, 25 bp, Artificial
  probe
  misc_feature (1)..(25): SEQ ID NO: 4963; WAN024DK4_at; Start 181; Stop 205
actattctccttattgatcagtgga

SEQ ID NO: 160943 - DNA, 25 bp, Artificial
  probe
  misc_feature (1)..(25): SEQ ID NO: 4963; WAN024DK4_at; Start 332; Stop 356
aaagcgataagtcgtttatagacac

SEQ ID NO: 160944 - DNA, 25 bp, Artificial
  probe
  misc_feature (1)..(25): SEQ ID NO: 4963; WAN024DK4_at; Start 327; Stop 351
gccagaaagcgataagtcgtttata

SEQ ID NO: 160945 - DNA, 25 bp, Artificial
  probe
  misc_feature (1)..(25): SEQ ID NO: 4963; WAN024DK4_at; Start 43; Stop 67
catgtatattataaaggtgatggag

SEQ ID NO: 160946 - DNA, 25 bp, Artificial
  probe
  misc_feature (1)..(25): SEQ ID NO: 4963; WAN024DK4_at; Start 323; Stop 347
ggatgccagaaagcgataagtcgtt

SEQ ID NO: 160947 - DNA, 25 bp, Artificial
  probe
  misc_feature (1)..(25): SEQ ID NO: 4963; WAN024DK4_at; Start 52; Stop 76
tataaaggtgatggagatagtgcaa

SEQ ID NO: 160948 - DNA, 25 bp, Artificial
  probe
  misc_feature (1)..(25): SEQ ID NO: 4963; WAN024DK4_at; Start 243; Stop 267
gacaatgcagaaaatcttagattta

SEQ ID NO: 160949 - DNA, 25 bp, Artificial
  probe
  misc_feature (1)..(25): SEQ ID NO: 4963; WAN024DK4_at; Start 282; Stop 306
cttgcagatgcaagttgaacgttat

SEQ ID NO: 160950 - DNA, 25 bp, Artificial
  probe
  misc_feature (1)..(25): SEQ ID NO: 4963; WAN024DK4_at; Start 164; Stop 188
caattgaaaaagagggaactattct

SEQ ID NO: 160951 - DNA, 25 bp, Artificial
  probe
  misc_feature (1)..(25): SEQ ID NO: 4963; WAN024DK4_at; Start 238; Stop 262
tcaaagacaatgcagaaaatcttag

SEQ ID NO: 160952 - DNA, 25 bp, Artificial
  probe
  misc_feature (1)..(25): SEQ ID NO: 4963; WAN024DK4_at; Start 177; Stop 201
gggaactattctccttattgatcag

SEQ ID NO: 160953 - DNA, 25 bp, Artificial
  probe
  misc_feature (1)..(25): SEQ ID NO: 4963; WAN024DK4_at; Start 234; Stop 258
tcaatcaaagacaatgcagaaaatc

SEQ ID NO: 160954 - DNA, 25 bp, Artificial
  probe
  misc_feature (1)..(25): SEQ ID NO: 4963; WAN024DK4_at; Start 85; Stop 109
gcaagagaaatgcttgatagtggcc

SEQ ID NO: 160955 - DNA, 25 bp, Artificial
  probe
  misc_feature (1)..(25): SEQ ID NO: 4963; WAN024DK4_at; Start 291; Stop 315
gcaagttgaacgttatatagaagat

SEQ ID NO: 160956 - DNA, 25 bp, Artificial
  probe
  misc_feature (1)..(25): SEQ ID NO: 4963; WAN024DK4_at; Start 308; Stop 332
tagaagatgattctgggatgccaga

SEQ ID NO: 160957 - DNA, 25 bp, Artificial
  probe
  misc_feature (1)..(25): SEQ ID NO: 4963; WAN024DK4_at; Start 175; Stop 199
gagggaactattctccttattgatc

SEQ ID NO: 160958 - DNA, 25 bp, Artificial
  probe
  misc_feature (1)..(25): SEQ ID NO: 4963; WAN024DK4_at; Start 58; Stop 82
ggtgatggagatagtgcaataaagt

SEQ ID NO: 160959 - DNA, 25 bp, Artificial
  probe
  misc_feature (1)..(25): SEQ ID NO: 4963; WAN024DK4_at; Start 3; Stop 27
gaaggatgattttggaggatataag

SEQ ID NO: 160960 - DNA, 25 bp, Artificial
  probe
  misc_feature (1)..(25): SEQ ID NO: 4963; WAN024DK4_at; Start 89; Stop 113
gagaaatgcttgatagtggccttgt

SEQ ID NO: 160961 - DNA, 25 bp, Artificial
  probe
  misc_feature (1)..(25): SEQ ID NO: 4963; WAN024DK4_at; Start 319; Stop 343
tctgggatgccagaaagcgataagt

SEQ ID NO: 160962 - DNA, 25 bp, Artificial
  probe
  misc_feature (1)..(25): SEQ ID NO: 4963; WAN024DK4_at; Start 192; Stop 216
tattgatcagtggataaatcaagaa

SEQ ID NO: 160963 - DNA, 25 bp, Artificial
  probe
  misc_feature (1)..(25): SEQ ID NO: 4963; WAN024DK4_at; Start 22; Stop 46
tataagatgacattgactattcatg

SEQ ID NO: 160964 - DNA, 25 bp, Artificial
  probe
  misc_feature (1)..(25): SEQ ID NO: 4963; WAN024DK4_at; Start 271; Stop 295
aaaaaatatcacttgcagatgcaag

SEQ ID NO: 160965 - DNA, 25 bp, Artificial
  probe
  misc_feature (1)..(25): SEQ ID NO: 4963; WAN024DK4_at; Start 301; Stop 325
cgttatatagaagatgattctggga

SEQ ID NO: 160966 - DNA, 25 bp, Artificial
  probe
  misc_feature (1)..(25): SEQ ID NO: 4963; WAN024DK4_at; Start 313; Stop 337
gatgattctgggatgccagaaagcg

SEQ ID NO: 160967 - DNA, 25 bp, Artificial
  probe
  misc_feature (1)..(25): SEQ ID NO: 4963; WAN024DK4_at; Start 14; Stop 38
ttggaggatataagatgacattgac

SEQ ID NO: 160968 - DNA, 25 bp, Artificial
  probe
  misc_feature (1)..(25): SEQ ID NO: 4963; WAN024DK4_at; Start 35; Stop 59
tgactattcatgtatattataaagg

SEQ ID NO: 160969 - DNA, 25 bp, Artificial
  probe
  misc_feature (1)..(25): SEQ ID NO: 4963; WAN024DK4_at; Start 337; Stop 361
gataagtcgtttatagacacaggga

SEQ ID NO: 160970 - DNA, 25 bp, Artificial
  probe
  misc_feature (1)..(25): SEQ ID NO: 4963; WAN024DK4_at; Start 341; Stop 365
agtcgtttatagacacagggaatta

SEQ ID NO: 160971 - DNA, 25 bp, Artificial
  probe
  misc_feature (1)..(25): SEQ ID NO: 4963; WAN024DK4_at; Start 187; Stop 211
ctccttattgatcagtggataaatc

SEQ ID NO: 160972 - DNA, 25 bp, Artificial
  probe
  misc_feature (1)..(25): SEQ ID NO: 4963; WAN024DK4_at; Start 63; Stop 87
tggagatagtgcaataaagtttgca

SEQ ID NO: 160973 - DNA, 25 bp, Artificial
  probe
  misc_feature (1)..(25): SEQ ID NO: 4963; WAN024DK4_at; Start 321; Stop 345
tgggatgccagaaagcgataagtcg

SEQ ID NO: 160974 - DNA, 25 bp, Artificial
  probe
  misc_feature (1)..(25): SEQ ID NO: 4963; WAN024DK4_at; Start 306; Stop 330
tatagaagatgattctgggatgcca

SEQ ID NO: 160975 - DNA, 25 bp, Artificial
  probe
  misc_feature (1)..(25): SEQ ID NO: 4963; WAN024DK4_at; Start 74; Stop 98
caataaagtttgcaagagaaatgct

SEQ ID NO: 160976 - DNA, 25 bp, Artificial
  probe
  misc_feature (1)..(25): SEQ ID NO: 3400; WAN024DK5_at; Start 20; Stop 44
ctataaatcgctataagaaaaaatc

SEQ ID NO: 160977 - DNA, 25 bp, Artificial
  probe
  misc_feature (1)..(25): SEQ ID NO: 3400; WAN024DK5_at; Start 30; Stop 54
ctataagaaaaaatcattttattgg

SEQ ID NO: 160978 - DNA, 25 bp, Artificial
  probe
  misc_feature (1)..(25): SEQ ID NO: 3400; WAN024DK5_at; Start 16; Stop 40
ttgactataaatcgctataagaaaa

SEQ ID NO: 160979 - DNA, 25 bp, Artificial
  probe
  misc_feature (1)..(25): SEQ ID NO: 3400; WAN024DK5_at; Start 18; Stop 42
gactataaatcgctataagaaaaaa

SEQ ID NO: 160980 - DNA, 25 bp, Artificial
  probe
  misc_feature (1)..(25): SEQ ID NO: 3400; WAN024DK5_at; Start 27; Stop 51
tcgctataagaaaaaatcattttat

SEQ ID NO: 160981 - DNA, 25 bp, Artificial
  probe
  misc_feature (1)..(25): SEQ ID NO: 3400; WAN024DK5_at; Start 59; Stop 83
aagaagtgattgaaagtaatggcga

SEQ ID NO: 160982 - DNA, 25 bp, Artificial
  probe
  misc_feature (1)..(25): SEQ ID NO: 3400; WAN024DK5_at; Start 67; Stop 91
attgaaagtaatggcgaaacgttag

SEQ ID NO: 160983 - DNA, 25 bp, Artificial
  probe
  misc_feature (1)..(25): SEQ ID NO: 3400; WAN024DK5_at; Start 40; Stop 64
aaatcattttattggtataaagaag

SEQ ID NO: 160984 - DNA, 25 bp, Artificial
  probe
  misc_feature (1)..(25): SEQ ID NO: 3400; WAN024DK5_at; Start 62; Stop 86
aagtgattgaaagtaatggcgaaac

SEQ ID NO: 160985 - DNA, 25 bp, Artificial
  probe
  misc_feature (1)..(25): SEQ ID NO: 3400; WAN024DK5_at; Start 63; Stop 87
agtgattgaaagtaatggcgaaacg

SEQ ID NO: 160986 - DNA, 25 bp, Artificial
  probe
  misc_feature (1)..(25): SEQ ID NO: 3400; WAN024DK5_at; Start 72; Stop 96
aagtaatggcgaaacgttagataat

SEQ ID NO: 160987 - DNA, 25 bp, Artificial
  probe
  misc_feature (1)..(25): SEQ ID NO: 3400; WAN024DK5_at; Start 60; Stop 84
agaagtgattgaaagtaatggcgaa

SEQ ID NO: 160988 - DNA, 25 bp, Artificial
  probe
  misc_feature (1)..(25): SEQ ID NO: 3400; WAN024DK5_at; Start 15; Stop 39
attgactataaatcgctataagaaa

SEQ ID NO: 160989 - DNA, 25 bp, Artificial
  probe
  misc_feature (1)..(25): SEQ ID NO: 3400; WAN024DK5_at; Start 28; Stop 52
cgctataagaaaaaatcattttatt

SEQ ID NO: 160990 - DNA, 25 bp, Artificial
  probe
  misc_feature (1)..(25): SEQ ID NO: 3400; WAN024DK5_at; Start 70; Stop 94
gaaagtaatggcgaaacgttagata

SEQ ID NO: 160991 - DNA, 25 bp, Artificial
  probe
  misc_feature (1)..(25): SEQ ID NO: 3400; WAN024DK5_at; Start 73; Stop 97
agtaatggcgaaacgttagataatt

SEQ ID NO: 160992 - DNA, 25 bp, Artificial
  probe
  misc_feature (1)..(25): SEQ ID NO: 3400; WAN024DK5_at; Start 74; Stop 98
gtaatggcgaaacgttagataatta

SEQ ID NO: 160993 - DNA, 25 bp, Artificial
  probe
  misc_feature (1)..(25): SEQ ID NO: 3400; WAN024DK5_at; Start 13; Stop 37
caattgactataaatcgctataaga

SEQ ID NO: 160994 - DNA, 25 bp, Artificial
  probe
  misc_feature (1)..(25): SEQ ID NO: 3400; WAN024DK5_at; Start 21; Stop 45
tataaatcgctataagaaaaaatca

SEQ ID NO: 160995 - DNA, 25 bp, Artificial
  probe
  misc_feature (1)..(25): SEQ ID NO: 3400; WAN024DK5_at; Start 26; Stop 50
atcgctataagaaaaaatcatttta

SEQ ID NO: 160996 - DNA, 25 bp, Artificial
  probe
  misc_feature (1)..(25): SEQ ID NO: 3400; WAN024DK5_at; Start 14; Stop 38
aattgactataaatcgctataagaa

SEQ ID NO: 160997 - DNA, 25 bp, Artificial
  probe
  misc_feature (1)..(25): SEQ ID NO: 3400; WAN024DK5_at; Start 24; Stop 48
aaatcgctataagaaaaaatcattt

SEQ ID NO: 160998 - DNA, 25 bp, Artificial
  probe
  misc_feature (1)..(25): SEQ ID NO: 3400; WAN024DK5_at; Start 22; Stop 46
ataaatcgctataagaaaaaatcat

SEQ ID NO: 160999 - DNA, 25 bp, Artificial
  probe
  misc_feature (1)..(25): SEQ ID NO: 3400; WAN024DK5_at; Start 43; Stop 67
tcattttattggtataaagaagtga

SEQ ID NO: 161000 - DNA, 25 bp, Artificial
  probe
  misc_feature (1)..(25): SEQ ID NO: 3400; WAN024DK5_at; Start 44; Stop 68
cattttattggtataaagaagtgat

SEQ ID NO: 161001 - DNA, 25 bp, Artificial
  probe
  misc_feature (1)..(25): SEQ ID NO: 3400; WAN024DK5_at; Start 65; Stop 89
tgattgaaagtaatggcgaaacgtt

SEQ ID NO: 161002 - DNA, 25 bp, Artificial
  probe
  misc_feature (1)..(25): SEQ ID NO: 3400; WAN024DK5_at; Start 23; Stop 47
taaatcgctataagaaaaaatcatt

SEQ ID NO: 161003 - DNA, 25 bp, Artificial
  probe
  misc_feature (1)..(25): SEQ ID NO: 3400; WAN024DK5_at; Start 61; Stop 85
gaagtgattgaaagtaatggcgaaa

SEQ ID NO: 161004 - DNA, 25 bp, Artificial
  probe
  misc_feature (1)..(25): SEQ ID NO: 3400; WAN024DK5_at; Start 12; Stop 36
tcaattgactataaatcgctataag

SEQ ID NO: 161005 - DNA, 25 bp, Artificial
  probe
  misc_feature (1)..(25): SEQ ID NO: 3400; WAN024DK5_at; Start 75; Stop 99
taatggcgaaacgttagataattag

SEQ ID NO: 161006 - DNA, 25 bp, Artificial
  probe
  misc_feature (1)..(25): SEQ ID NO: 3400; WAN024DK5_at; Start 48; Stop 72
ttattggtataaagaagtgattgaa

SEQ ID NO: 161007 - DNA, 25 bp, Artificial
  probe
  misc_feature (1)..(25): SEQ ID NO: 3400; WAN024DK5_at; Start 64; Stop 88
gtgattgaaagtaatggcgaaacgt

SEQ ID NO: 161008 - DNA, 25 bp, Artificial
  probe
  misc_feature (1)..(25): SEQ ID NO: 3400; WAN024DK5_at; Start 66; Stop 90
gattgaaagtaatggcgaaacgtta

SEQ ID NO: 161009 - DNA, 25 bp, Artificial
  probe
  misc_feature (1)..(25): SEQ ID NO: 3400; WAN024DK5_at; Start 25; Stop 49
aatcgctataagaaaaaatcatttt

SEQ ID NO: 161010 - DNA, 25 bp, Artificial
  probe
  misc_feature (1)..(25): SEQ ID NO: 3420; WAN024DK6_at; Start 14; Stop 38
cgagctttcttaagatctggtttcc

SEQ ID NO: 161011 - DNA, 25 bp, Artificial
  probe
  misc_feature (1)..(25): SEQ ID NO: 3420; WAN024DK6_at; Start 52; Stop 76
tacacttatggtattgatgccccta

SEQ ID NO: 161012 - DNA, 25 bp, Artificial
  probe
  misc_feature (1)..(25): SEQ ID NO: 3420; WAN024DK6_at; Start 27; Stop 51
gatctggtttccaaaatactttgag

SEQ ID NO: 161013 - DNA, 25 bp, Artificial
  probe
  misc_feature (1)..(25): SEQ ID NO: 3420; WAN024DK6_at; Start 75; Stop 99
taaacatctaaaaactctggtagaa

SEQ ID NO: 161014 - DNA, 25 bp, Artificial
  probe
  misc_feature (1)..(25): SEQ ID NO: 3420; WAN024DK6_at; Start 97; Stop 121
gaaaaagggtatgctcttgtcgaaa

SEQ ID NO: 161015 - DNA, 25 bp, Artificial
  probe
  misc_feature (1)..(25): SEQ ID NO: 3420; WAN024DK6_at; Start 48; Stop 72
tgagtacacttatggtattgatgcc

SEQ ID NO: 161016 - DNA, 25 bp, Artificial
  probe
  misc_feature (1)..(25): SEQ ID NO: 3420; WAN024DK6_at; Start 106; Stop 130
tatgctcttgtcgaaacttcttttg

SEQ ID NO: 161017 - DNA, 25 bp, Artificial
  probe
  misc_feature (1)..(25): SEQ ID NO: 3420; WAN024DK6_at; Start 126; Stop 150
ttttgactcacttgaccatctaaat

SEQ ID NO: 161018 - DNA, 25 bp, Artificial
  probe
  misc_feature (1)..(25): SEQ ID NO: 3420; WAN024DK6_at; Start 90; Stop 114
tctggtagaaaaagggtatgctctt

SEQ ID NO: 161019 - DNA, 25 bp, Artificial
  probe
  misc_feature (1)..(25): SEQ ID NO: 3420; WAN024DK6_at; Start 10; Stop 34
tttacgagctttcttaagatctggt

SEQ ID NO: 161020 - DNA, 25 bp, Artificial
  probe
  misc_feature (1)..(25): SEQ ID NO: 3420; WAN024DK6_at; Start 73; Stop 97
cctaaacatctaaaaactctggtag

SEQ ID NO: 161021 - DNA, 25 bp, Artificial
  probe
  misc_feature (1)..(25): SEQ ID NO: 3420; WAN024DK6_at; Start 1; Stop 25
ctggctagctttacgagctttctta

SEQ ID NO: 161022 - DNA, 25 bp, Artificial
  probe
  misc_feature (1)..(25): SEQ ID NO: 3420; WAN024DK6_at; Start 43; Stop 67
tactttgagtacacttatggtattg

SEQ ID NO: 161023 - DNA, 25 bp, Artificial
  probe
  misc_feature (1)..(25): SEQ ID NO: 3420; WAN024DK6_at; Start 21; Stop 45
tcttaagatctggtttccaaaatac

SEQ ID NO: 161024 - DNA, 25 bp, Artificial
  probe
  misc_feature (1)..(25): SEQ ID NO: 3420; WAN024DK6_at; Start 99; Stop 123
aaaagggtatgctcttgtcgaaact

SEQ ID NO: 161025 - DNA, 25 bp, Artificial
  probe
  misc_feature (1)..(25): SEQ ID NO: 3420; WAN024DK6_at; Start 50; Stop 74
agtacacttatggtattgatgcccc

SEQ ID NO: 161026 - DNA, 25 bp, Artificial
  probe
  misc_feature (1)..(25): SEQ ID NO: 3420; WAN024DK6_at; Start 79; Stop 103
catctaaaaactctggtagaaaaag

SEQ ID NO: 161027 - DNA, 25 bp, Artificial
  probe
  misc_feature (1)..(25): SEQ ID NO: 3420; WAN024DK6_at; Start 54; Stop 78
cacttatggtattgatgcccctaaa

SEQ ID NO: 161028 - DNA, 25 bp, Artificial
  probe
  misc_feature (1)..(25): SEQ ID NO: 3420; WAN024DK6_at; Start 89; Stop 113
ctctggtagaaaaagggtatgctct

SEQ ID NO: 161029 - DNA, 25 bp, Artificial
  probe
  misc_feature (1)..(25): SEQ ID NO: 3420; WAN024DK6_at; Start 101; Stop 125
aagggtatgctcttgtcgaaacttc

SEQ ID NO: 161030 - DNA, 25 bp, Artificial
  probe
  misc_feature (1)..(25): SEQ ID NO: 3420; WAN024DK6_at; Start 109; Stop 133
gctcttgtcgaaacttcttttgact

SEQ ID NO: 161031 - DNA, 25 bp, Artificial
  probe
  misc_feature (1)..(25): SEQ ID NO: 3420; WAN024DK6_at; Start 38; Stop 62
caaaatactttgagtacacttatgg

SEQ ID NO: 161032 - DNA, 25 bp, Artificial
  probe
  misc_feature (1)..(25): SEQ ID NO: 3420; WAN024DK6_at; Start 62; Stop 86
gtattgatgcccctaaacatctaaa

SEQ ID NO: 161033 - DNA, 25 bp, Artificial
  probe
  misc_feature (1)..(25): SEQ ID NO: 3420; WAN024DK6_at; Start 4; Stop 28
gctagctttacgagctttcttaaga

SEQ ID NO: 161034 - DNA, 25 bp, Artificial
  probe
  misc_feature (1)..(25): SEQ ID NO: 3420; WAN024DK6_at; Start 31; Stop 55
tggtttccaaaatactttgagtaca

SEQ ID NO: 161035 - DNA, 25 bp, Artificial
  probe
  misc_feature (1)..(25): SEQ ID NO: 3420; WAN024DK6_at; Start 103; Stop 127
gggtatgctcttgtcgaaacttctt

SEQ ID NO: 161036 - DNA, 25 bp, Artificial
  probe
  misc_feature (1)..(25): SEQ ID NO: 3420; WAN024DK6_at; Start 93; Stop 117
ggtagaaaaagggtatgctcttgtc

SEQ ID NO: 161037 - DNA, 25 bp, Artificial
  probe
  misc_feature (1)..(25): SEQ ID NO: 3420; WAN024DK6_at; Start 69; Stop 93
tgcccctaaacatctaaaaactctg

SEQ ID NO: 161038 - DNA, 25 bp, Artificial
  probe
  misc_feature (1)..(25): SEQ ID NO: 3420; WAN024DK6_at; Start 95; Stop 119
tagaaaaagggtatgctcttgtcga

SEQ ID NO: 161039 - DNA, 25 bp, Artificial
  probe
  misc_feature (1)..(25): SEQ ID NO: 3420; WAN024DK6_at; Start 124; Stop 148
tcttttgactcacttgaccatctaa

SEQ ID NO: 161040 - DNA, 25 bp, Artificial
  probe
  misc_feature (1)..(25): SEQ ID NO: 3420; WAN024DK6_at; Start 87; Stop 111
aactctggtagaaaaagggtatgct

SEQ ID NO: 161041 - DNA, 25 bp, Artificial
  probe
  misc_feature (1)..(25): SEQ ID NO: 3420; WAN024DK6_at; Start 17; Stop 41
gctttcttaagatctggtttccaaa

SEQ ID NO: 161042 - DNA, 25 bp, Artificial
  probe
  misc_feature (1)..(25): SEQ ID NO: 3420; WAN024DK6_at; Start 8; Stop 32
gctttacgagctttcttaagatctg

SEQ ID NO: 161043 - DNA, 25 bp, Artificial
  probe
  misc_feature (1)..(25): SEQ ID NO: 3420; WAN024DK6_at; Start 56; Stop 80
cttatggtattgatgcccctaaaca

SEQ ID NO: 161044 - DNA, 25 bp, Artificial
  probe
  misc_feature (1)..(25): SEQ ID NO: 2846; WAN024DK7_at; Start 319; Stop 343
gactcacgtaaagttgaacgtaaga

SEQ ID NO: 161045 - DNA, 25 bp, Artificial
  probe
  misc_feature (1)..(25): SEQ ID NO: 2846; WAN024DK7_at; Start 121; Stop 145
cacgctgaccttcgtcttgtcatca

SEQ ID NO: 161046 - DNA, 25 bp, Artificial
  probe
  misc_feature (1)..(25): SEQ ID NO: 2846; WAN024DK7_at; Start 70; Stop 94
ggaactggtaaaatcactgttaaca

SEQ ID NO: 161047 - DNA, 25 bp, Artificial
  probe
  misc_feature (1)..(25): SEQ ID NO: 2846; WAN024DK7_at; Start 285; Stop 309
cgattcattgaaacgcgcaggactt

SEQ ID NO: 161048 - DNA, 25 bp, Artificial
  probe
  misc_feature (1)..(25): SEQ ID NO: 2846; WAN024DK7_at; Start 223; Stop 247
caatcaggagctatccgtcacggta

SEQ ID NO: 161049 - DNA, 25 bp, Artificial
  probe
  misc_feature (1)..(25): SEQ ID NO: 2846; WAN024DK7_at; Start 294; Stop 318
gaaacgcgcaggacttcttacacgt

SEQ ID NO: 161050 - DNA, 25 bp, Artificial
  probe
  misc_feature (1)..(25): SEQ ID NO: 2846; WAN024DK7_at; Start 234; Stop 258
tatccgtcacggtatcgctcgtgcc

SEQ ID NO: 161051 - DNA, 25 bp, Artificial
  probe
  misc_feature (1)..(25): SEQ ID NO: 2846; WAN024DK7_at; Start 264; Stop 288
tcaagtagacccagacttccgcgat

SEQ ID NO: 161052 - DNA, 25 bp, Artificial
  probe
  misc_feature (1)..(25): SEQ ID NO: 2846; WAN024DK7_at; Start 11; Stop 35
cacaatatgcaggtactggacgtcg

SEQ ID NO: 161053 - DNA, 25 bp, Artificial
  probe
  misc_feature (1)..(25): SEQ ID NO: 2846; WAN024DK7_at; Start 163; Stop 187
acttcaactgtaggttcatacgacg

SEQ ID NO: 161054 - DNA, 25 bp, Artificial
  probe
  misc_feature (1)..(25): SEQ ID NO: 2846; WAN024DK7_at; Start 275; Stop 299
cagacttccgcgattcattgaaacg

SEQ ID NO: 161055 - DNA, 25 bp, Artificial
  probe
  misc_feature (1)..(25): SEQ ID NO: 2846; WAN024DK7_at; Start 49; Stop 73
gcacgcgttcgccttgttccaggaa

SEQ ID NO: 161056 - DNA, 25 bp, Artificial
  probe
  misc_feature (1)..(25): SEQ ID NO: 2846; WAN024DK7_at; Start 53; Stop 77
gcgttcgccttgttccaggaactgg

SEQ ID NO: 161057 - DNA, 25 bp, Artificial
  probe
  misc_feature (1)..(25): SEQ ID NO: 2846; WAN024DK7_at; Start 2; Stop 26
tgtcacaagcacaatatgcaggtac

SEQ ID NO: 161058 - DNA, 25 bp, Artificial
  probe
  misc_feature (1)..(25): SEQ ID NO: 2846; WAN024DK7_at; Start 104; Stop 128
ttgaagagtacatcccacacgctga

SEQ ID NO: 161059 - DNA, 25 bp, Artificial
  probe
  misc_feature (1)..(25): SEQ ID NO: 2846; WAN024DK7_at; Start 95; Stop 119
aaaaagatgttgaagagtacatccc

SEQ ID NO: 161060 - DNA, 25 bp, Artificial
  probe
  misc_feature (1)..(25): SEQ ID NO: 2846; WAN024DK7_at; Start 243; Stop 267
cggtatcgctcgtgcccttcttcaa

SEQ ID NO: 161061 - DNA, 25 bp, Artificial
  probe
  misc_feature (1)..(25): SEQ ID NO: 2846; WAN024DK7_at; Start 152; Stop 176
cattcgcagttacttcaactgtagg

SEQ ID NO: 161062 - DNA, 25 bp, Artificial
  probe
  misc_feature (1)..(25): SEQ ID NO: 2846; WAN024DK7_at; Start 36; Stop 60
taaaaacgctgttgcacgcgttcgc

SEQ ID NO: 161063 - DNA, 25 bp, Artificial
  probe
  misc_feature (1)..(25): SEQ ID NO: 2846; WAN024DK7_at; Start 169; Stop 193
actgtaggttcatacgacgttttcg

SEQ ID NO: 161064 - DNA, 25 bp, Artificial
  probe
  misc_feature (1)..(25): SEQ ID NO: 2846; WAN024DK7_at; Start 254; Stop 278
gtgcccttcttcaagtagacccaga

SEQ ID NO: 161065 - DNA, 25 bp, Artificial
  probe
  misc_feature (1)..(25): SEQ ID NO: 2846; WAN024DK7_at; Start 18; Stop 42
tgcaggtactggacgtcgtaaaaac

SEQ ID NO: 161066 - DNA, 25 bp, Artificial
  probe
  misc_feature (1)..(25): SEQ ID NO: 2846; WAN024DK7_at; Start 84; Stop 108
cactgttaacaaaaaagatgttgaa

SEQ ID NO: 161067 - DNA, 25 bp, Artificial
  probe
  misc_feature (1)..(25): SEQ ID NO: 2846; WAN024DK7_at; Start 341; Stop 365
agaaaccaggtcttaagaaagctcg

SEQ ID NO: 161068 - DNA, 25 bp, Artificial
  probe
  misc_feature (1)..(25): SEQ ID NO: 2846; WAN024DK7_at; Start 301; Stop 325
gcaggacttcttacacgtgactcac

SEQ ID NO: 161069 - DNA, 25 bp, Artificial
  probe
  misc_feature (1)..(25): SEQ ID NO: 2846; WAN024DK7_at; Start 370; Stop 394
gcatcacaatttagtaaacgttaac

SEQ ID NO: 161070 - DNA, 25 bp, Artificial
  probe
  misc_feature (1)..(25): SEQ ID NO: 2846; WAN024DK7_at; Start 137; Stop 161
ttgtcatcaaccaaccattcgcagt

SEQ ID NO: 161071 - DNA, 25 bp, Artificial
  probe
  misc_feature (1)..(25): SEQ ID NO: 2846; WAN024DK7_at; Start 108; Stop 132
agagtacatcccacacgctgacctt

SEQ ID NO: 161072 - DNA, 25 bp, Artificial
  probe
  misc_feature (1)..(25): SEQ ID NO: 2846; WAN024DK7_at; Start 214; Stop 238
tacgctggtcaatcaggagctatcc

SEQ ID NO: 161073 - DNA, 25 bp, Artificial
  probe
  misc_feature (1)..(25): SEQ ID NO: 2846; WAN024DK7_at; Start 347; Stop 371
caggtcttaagaaagctcgtaaagc

SEQ ID NO: 161074 - DNA, 25 bp, Artificial
  probe
  misc_feature (1)..(25): SEQ ID NO: 2846; WAN024DK7_at; Start 357; Stop 381
gaaagctcgtaaagcatcacaattt

SEQ ID NO: 161075 - DNA, 25 bp, Artificial
  probe
  misc_feature (1)..(25): SEQ ID NO: 2846; WAN024DK7_at; Start 29; Stop 53
gacgtcgtaaaaacgctgttgcacg

SEQ ID NO: 161076 - DNA, 25 bp, Artificial
  probe
  misc_feature (1)..(25): SEQ ID NO: 2846; WAN024DK7_at; Start 66; Stop 90
tccaggaactggtaaaatcactgtt

SEQ ID NO: 161077 - DNA, 25 bp, Artificial
  probe
  misc_feature (1)..(25): SEQ ID NO: 2846; WAN024DK7_at; Start 314; Stop 338
cacgtgactcacgtaaagttgaacg

SEQ ID NO: 161078 - DNA, 25 bp, Artificial
  probe
  misc_feature (1)..(25): SEQ ID NO: 2347; WAN024DK8_at; Start 465; Stop 489
cagtgtcttagcgacggagccttgg

SEQ ID NO: 161079 - DNA, 25 bp, Artificial
  probe
  misc_feature (1)..(25): SEQ ID NO: 2347; WAN024DK8_at; Start 726; Stop 750
tgagtccttacaggaaattgcgcct

SEQ ID NO: 161080 - DNA, 25 bp, Artificial
  probe
  misc_feature (1)..(25): SEQ ID NO: 2347; WAN024DK8_at; Start 369; Stop 393
tatcgccctaggaagcaatatggga

SEQ ID NO: 161081 - DNA, 25 bp, Artificial
  probe
  misc_feature (1)..(25): SEQ ID NO: 2347; WAN024DK8_at; Start 565; Stop 589
gaaaccttgttagccattgagtcag

SEQ ID NO: 161082 - DNA, 25 bp, Artificial
  probe
  misc_feature (1)..(25): SEQ ID NO: 2347; WAN024DK8_at; Start 120; Stop 144
ggcagctacagacttggatttaaca

SEQ ID NO: 161083 - DNA, 25 bp, Artificial
  probe
  misc_feature (1)..(25): SEQ ID NO: 2347; WAN024DK8_at; Start 541; Stop 565
tggctaccagcacaagacttgttag

SEQ ID NO: 161084 - DNA, 25 bp, Artificial
  probe
  misc_feature (1)..(25): SEQ ID NO: 2347; WAN024DK8_at; Start 420; Stop 444
cattgacaaactgcgagctcgtggc

SEQ ID NO: 161085 - DNA, 25 bp, Artificial
  probe
  misc_feature (1)..(25): SEQ ID NO: 2347; WAN024DK8_at; Start 101; Stop 125
tatcctatgatatgaccaaggcagc

SEQ ID NO: 161086 - DNA, 25 bp, Artificial
  probe
  misc_feature (1)..(25): SEQ ID NO: 2347; WAN024DK8_at; Start 689; Stop 713
tgcctcatccttacatagcggaacg

SEQ ID NO: 161087 - DNA, 25 bp, Artificial
  probe
  misc_feature (1)..(25): SEQ ID NO: 2347; WAN024DK8_at; Start 224; Stop 248
tagcctataaactggtggaacgtac

SEQ ID NO: 161088 - DNA, 25 bp, Artificial
  probe
  misc_feature (1)..(25): SEQ ID NO: 2347; WAN024DK8_at; Start 527; Stop 551
ttgaggtggaaacctggctaccagc

SEQ ID NO: 161089 - DNA, 25 bp, Artificial
  probe
  misc_feature (1)..(25): SEQ ID NO: 2347; WAN024DK8_at; Start 655; Stop 679
gaggaccagatcctttatacagacg

SEQ ID NO: 161090 - DNA, 25 bp, Artificial
  probe
  misc_feature (1)..(25): SEQ ID NO: 2347; WAN024DK8_at; Start 494; Stop 518
gagtggagcaggatagctttgccaa

SEQ ID NO: 161091 - DNA, 25 bp, Artificial
  probe
  misc_feature (1)..(25): SEQ ID NO: 2347; WAN024DK8_at; Start 290; Stop 314
tgaaaaaaccttgggcaccggtgca

SEQ ID NO: 161092 - DNA, 25 bp, Artificial
  probe
  misc_feature (1)..(25): SEQ ID NO: 2347; WAN024DK8_at; Start 640; Stop 664
gacttgctctttgtggaggaccaga

SEQ ID NO: 161093 - DNA, 25 bp, Artificial
  probe
  misc_feature (1)..(25): SEQ ID NO: 2347; WAN024DK8_at; Start 357; Stop 381
gcaacgagcctttatcgccctagga

SEQ ID NO: 161094 - DNA, 25 bp, Artificial
  probe
  misc_feature (1)..(25): SEQ ID NO: 2347; WAN024DK8_at; Start 86; Stop 110
tcgtttcagccatcctatcctatga

SEQ ID NO: 161095 - DNA, 25 bp, Artificial
  probe
  misc_feature (1)..(25): SEQ ID NO: 2347; WAN024DK8_at; Start 4; Stop 28
gatcaactgcagattaaggatttgg

SEQ ID NO: 161096 - DNA, 25 bp, Artificial
  probe
  misc_feature (1)..(25): SEQ ID NO: 2347; WAN024DK8_at; Start 670; Stop 694
tatacagacgacctcatattgcctc

SEQ ID NO: 161097 - DNA, 25 bp, Artificial
  probe
  misc_feature (1)..(25): SEQ ID NO: 2347; WAN024DK8_at; Start 456; Stop 480
caaagagtccagtgtcttagcgacg

SEQ ID NO: 161098 - DNA, 25 bp, Artificial
  probe
  misc_feature (1)..(25): SEQ ID NO: 2347; WAN024DK8_at; Start 304; Stop 328
gcaccggtgcatttgtcactagata

SEQ ID NO: 161099 - DNA, 25 bp, Artificial
  probe
  misc_feature (1)..(25): SEQ ID NO: 2347; WAN024DK8_at; Start 208; Stop 232
gatttgattgaaacggtagcctata

SEQ ID NO: 161100 - DNA, 25 bp, Artificial
  probe
  misc_feature (1)..(25): SEQ ID NO: 2347; WAN024DK8_at; Start 618; Stop 642
gggacctcgtttgattgatttggac

SEQ ID NO: 161101 - DNA, 25 bp, Artificial
  probe
  misc_feature (1)..(25): SEQ ID NO: 2347; WAN024DK8_at; Start 756; Stop 780
tatccatccgatattaaaacaaccg

SEQ ID NO: 161102 - DNA, 25 bp, Artificial
  probe
  misc_feature (1)..(25): SEQ ID NO: 2347; WAN024DK8_at; Start 336; Stop 360
ggtaaccattcatcgccgcaagcaa

SEQ ID NO: 161103 - DNA, 25 bp, Artificial
  probe
  misc_feature (1)..(25): SEQ ID NO: 2347; WAN024DK8_at; Start 705; Stop 729
agcggaacgcctttttgtccttgag

SEQ ID NO: 161104 - DNA, 25 bp, Artificial
  probe
  misc_feature (1)..(25): SEQ ID NO: 2347; WAN024DK8_at; Start 319; Stop 343
tcactagatacttgctcggtaacca

SEQ ID NO: 161105 - DNA, 25 bp, Artificial
  probe
  misc_feature (1)..(25): SEQ ID NO: 2347; WAN024DK8_at; Start 140; Stop 164
taacagcctctgtccattacggaga

SEQ ID NO: 161106 - DNA, 25 bp, Artificial
  probe
  misc_feature (1)..(25): SEQ ID NO: 2347; WAN024DK8_at; Start 400; Stop 424
caagcaaacttgaagcaagccattg

SEQ ID NO: 161107 - DNA, 25 bp, Artificial
  probe
  misc_feature (1)..(25): SEQ ID NO: 2347; WAN024DK8_at; Start 40; Stop 64
tatcatggtctttttcctagtgaga

SEQ ID NO: 161108 - DNA, 25 bp, Artificial
  probe
  misc_feature (1)..(25): SEQ ID NO: 2347; WAN024DK8_at; Start 507; Stop 531
tagctttgccaatcaagtggttgag

SEQ ID NO: 161109 - DNA, 25 bp, Artificial
  probe
  misc_feature (1)..(25): SEQ ID NO: 2347; WAN024DK8_at; Start 175; Stop 199
cagtggacgacttggtttcaggaaa

SEQ ID NO: 161110 - DNA, 25 bp, Artificial
  probe
  misc_feature (1)..(25): SEQ ID NO: 2347; WAN024DK8_at; Start 153; Stop 177
ccattacggagaattgtgtcagcag

SEQ ID NO: 161111 - DNA, 25 bp, Artificial
  probe
  misc_feature (1)..(25): SEQ ID NO: 2347; WAN024DK8_at; Start 741; Stop 765
aattgcgcctcattttatccatccg

SEQ ID NO: 161112 - DNA, 25 bp, Artificial
  probe
  misc_feature (1)..(25): SEQ ID NO: 2324; WAN024DK9_at; Start 352; Stop 376
cgtttgaatatcgaagtggccgatg

SEQ ID NO: 161113 - DNA, 25 bp, Artificial
  probe
  misc_feature (1)..(25): SEQ ID NO: 2324; WAN024DK9_at; Start 186; Stop 210
tatggtggtagaaaaggatatcttt

SEQ ID NO: 161114 - DNA, 25 bp, Artificial
  probe
  misc_feature (1)..(25): SEQ ID NO: 2324; WAN024DK9_at; Start 362; Stop 386
tcgaagtggccgatgccttgatgga

SEQ ID NO: 161115 - DNA, 25 bp, Artificial
  probe
  misc_feature (1)..(25): SEQ ID NO: 2324; WAN024DK9_at; Start 388; Stop 412
tatctaggtgctaaaggagcctttg

SEQ ID NO: 161116 - DNA, 25 bp, Artificial
  probe
  misc_feature (1)..(25): SEQ ID NO: 2324; WAN024DK9_at; Start 460; Stop 484
aaaccaggcactgcaaccttgacga

SEQ ID NO: 161117 - DNA, 25 bp, Artificial
  probe
  misc_feature (1)..(25): SEQ ID NO: 2324; WAN024DK9_at; Start 457; Stop 481
agaaaaccaggcactgcaaccttga

SEQ ID NO: 161118 - DNA, 25 bp, Artificial
  probe
  misc_feature (1)..(25): SEQ ID NO: 2324; WAN024DK9_at; Start 357; Stop 381
gaatatcgaagtggccgatgccttg

SEQ ID NO: 161119 - DNA, 25 bp, Artificial
  probe
  misc_feature (1)..(25): SEQ ID NO: 2324; WAN024DK9_at; Start 485; Stop 509
cagtagctcgtggtctatttgaaac

SEQ ID NO: 161120 - DNA, 25 bp, Artificial
  probe
  misc_feature (1)..(25): SEQ ID NO: 2324; WAN024DK9_at; Start 336; Stop 360
accacaaattcaagaacgtttgaat

SEQ ID NO: 161121 - DNA, 25 bp, Artificial
  probe
  misc_feature (1)..(25): SEQ ID NO: 2324; WAN024DK9_at; Start 471; Stop 495
tgcaaccttgacgacagtagctcgt

SEQ ID NO: 161122 - DNA, 25 bp, Artificial
  probe
  misc_feature (1)..(25): SEQ ID NO: 2324; WAN024DK9_at; Start 473; Stop 497
caaccttgacgacagtagctcgtgg

SEQ ID NO: 161123 - DNA, 25 bp, Artificial
  probe
  misc_feature (1)..(25): SEQ ID NO: 2324; WAN024DK9_at; Start 479; Stop 503
tgacgacagtagctcgtggtctatt

SEQ ID NO: 161124 - DNA, 25 bp, Artificial
  probe
  misc_feature (1)..(25): SEQ ID NO: 2324; WAN024DK9_at; Start 206; Stop 230
tctttttccataccatgtgtgaaca

SEQ ID NO: 161125 - DNA, 25 bp, Artificial
  probe
  misc_feature (1)..(25): SEQ ID NO: 2324; WAN024DK9_at; Start 295; Stop 319
ttgtctaagctagcccgtacggttg

SEQ ID NO: 161126 - DNA, 25 bp, Artificial
  probe
  misc_feature (1)..(25): SEQ ID NO: 2324; WAN024DK9_at; Start 390; Stop 414
tctaggtgctaaaggagcctttgtt

SEQ ID NO: 161127 - DNA, 25 bp, Artificial
  probe
  misc_feature (1)..(25): SEQ ID NO: 2324; WAN024DK9_at; Start 198; Stop 222
aaaggatatctttttccataccatg

SEQ ID NO: 161128 - DNA, 25 bp, Artificial
  probe
  misc_feature (1)..(25): SEQ ID NO: 2324; WAN024DK9_at; Start 346; Stop 370
caagaacgtttgaatatcgaagtgg

SEQ ID NO: 161129 - DNA, 25 bp, Artificial
  probe
  misc_feature (1)..(25): SEQ ID NO: 2324; WAN024DK9_at; Start 416; Stop 440
tcattgaggcggaacatatgtgtat

SEQ ID NO: 161130 - DNA, 25 bp, Artificial
  probe
  misc_feature (1)..(25): SEQ ID NO: 2324; WAN024DK9_at; Start 483; Stop 507
gacagtagctcgtggtctatttgaa

SEQ ID NO: 161131 - DNA, 25 bp, Artificial
  probe
  misc_feature (1)..(25): SEQ ID NO: 2324; WAN024DK9_at; Start 466; Stop 490
ggcactgcaaccttgacgacagtag

SEQ ID NO: 161132 - DNA, 25 bp, Artificial
  probe
  misc_feature (1)..(25): SEQ ID NO: 2324; WAN024DK9_at; Start 354; Stop 378
tttgaatatcgaagtggccgatgcc

SEQ ID NO: 161133 - DNA, 25 bp, Artificial
  probe
  misc_feature (1)..(25): SEQ ID NO: 2324; WAN024DK9_at; Start 349; Stop 373
gaacgtttgaatatcgaagtggccg

SEQ ID NO: 161134 - DNA, 25 bp, Artificial
  probe
  misc_feature (1)..(25): SEQ ID NO: 2324; WAN024DK9_at; Start 180; Stop 204
cgataatatggtggtagaaaaggat

SEQ ID NO: 161135 - DNA, 25 bp, Artificial
  probe
  misc_feature (1)..(25): SEQ ID NO: 2324; WAN024DK9_at; Start 202; Stop 226
gatatctttttccataccatgtgtg

SEQ ID NO: 161136 - DNA, 25 bp, Artificial
  probe
  misc_feature (1)..(25): SEQ ID NO: 2324; WAN024DK9_at; Start 212; Stop 236
tccataccatgtgtgaacaccactt

SEQ ID NO: 161137 - DNA, 25 bp, Artificial
  probe
  misc_feature (1)..(25): SEQ ID NO: 2324; WAN024DK9_at; Start 419; Stop 443
ttgaggcggaacatatgtgtatgag

SEQ ID NO: 161138 - DNA, 25 bp, Artificial
  probe
  misc_feature (1)..(25): SEQ ID NO: 2324; WAN024DK9_at; Start 177; Stop 201
tgacgataatatggtggtagaaaag

SEQ ID NO: 161139 - DNA, 25 bp, Artificial
  probe
  misc_feature (1)..(25): SEQ ID NO: 2324; WAN024DK9_at; Start 490; Stop 514
gctcgtggtctatttgaaacagata

SEQ ID NO: 161140 - DNA, 25 bp, Artificial
  probe
  misc_feature (1)..(25): SEQ ID NO: 2324; WAN024DK9_at; Start 210; Stop 234
tttccataccatgtgtgaacaccac

SEQ ID NO: 161141 - DNA, 25 bp, Artificial
  probe
  misc_feature (1)..(25): SEQ ID NO: 2324; WAN024DK9_at; Start 464; Stop 488
caggcactgcaaccttgacgacagt

SEQ ID NO: 161142 - DNA, 25 bp, Artificial
  probe
  misc_feature (1)..(25): SEQ ID NO: 2324; WAN024DK9_at; Start 476; Stop 500
ccttgacgacagtagctcgtggtct

SEQ ID NO: 161143 - DNA, 25 bp, Artificial
  probe
  misc_feature (1)..(25): SEQ ID NO: 2324; WAN024DK9_at; Start 299; Stop 323
ctaagctagcccgtacggttgaagt

SEQ ID NO: 161144 - DNA, 25 bp, Artificial
  probe
  misc_feature (1)..(25): SEQ ID NO: 2324; WAN024DK9_at; Start 468; Stop 492
cactgcaaccttgacgacagtagct

SEQ ID NO: 161145 - DNA, 25 bp, Artificial
  probe
  misc_feature (1)..(25): SEQ ID NO: 2324; WAN024DK9_at; Start 488; Stop 512
tagctcgtggtctatttgaaacaga

SEQ ID NO: 161146 - DNA, 25 bp, Artificial
  probe
  misc_feature (1)..(25): SEQ ID NO: 7012; WAN024DKA_at; Start 154; Stop 178
atagcaggaactgccattattccgg

SEQ ID NO: 161147 - DNA, 25 bp, Artificial
  probe
  misc_feature (1)..(25): SEQ ID NO: 7012; WAN024DKA_at; Start 173; Stop 197
ttccggcagtactaggttccatgat

SEQ ID NO: 161148 - DNA, 25 bp, Artificial
  probe
  misc_feature (1)..(25): SEQ ID NO: 7012; WAN024DKA_at; Start 90; Stop 114
aatgtttctcggatggattggtgcc

SEQ ID NO: 161149 - DNA, 25 bp, Artificial
  probe
  misc_feature (1)..(25): SEQ ID NO: 7012; WAN024DKA_at; Start 112; Stop 136
gcctttataggccatttgctttttg

SEQ ID NO: 161150 - DNA, 25 bp, Artificial
  probe
  misc_feature (1)..(25): SEQ ID NO: 7012; WAN024DKA_at; Start 160; Stop 184
ggaactgccattattccggcagtac

SEQ ID NO: 161151 - DNA, 25 bp, Artificial
  probe
  misc_feature (1)..(25): SEQ ID NO: 7012; WAN024DKA_at; Start 148; Stop 172
ccgataatagcaggaactgccatta

SEQ ID NO: 161152 - DNA, 25 bp, Artificial
  probe
  misc_feature (1)..(25): SEQ ID NO: 7012; WAN024DKA_at; Start 175; Stop 199
ccggcagtactaggttccatgattg

SEQ ID NO: 161153 - DNA, 25 bp, Artificial
  probe
  misc_feature (1)..(25): SEQ ID NO: 7012; WAN024DKA_at; Start 120; Stop 144
aggccatttgctttttgggacttgg

SEQ ID NO: 161154 - DNA, 25 bp, Artificial
  probe
  misc_feature (1)..(25): SEQ ID NO: 7012; WAN024DKA_at; Start 134; Stop 158
ttgggacttggggaccgataatagc

SEQ ID NO: 161155 - DNA, 25 bp, Artificial
  probe
  misc_feature (1)..(25): SEQ ID NO: 7012; WAN024DKA_at; Start 117; Stop 141
tataggccatttgctttttgggact

SEQ ID NO: 161156 - DNA, 25 bp, Artificial
  probe
  misc_feature (1)..(25): SEQ ID NO: 7012; WAN024DKA_at; Start 63; Stop 87
tggagaacacatgggatgttttgga

SEQ ID NO: 161157 - DNA, 25 bp, Artificial
  probe
  misc_feature (1)..(25): SEQ ID NO: 7012; WAN024DKA_at; Start 169; Stop 193
attattccggcagtactaggttcca

SEQ ID NO: 161158 - DNA, 25 bp, Artificial
  probe
  misc_feature (1)..(25): SEQ ID NO: 7012; WAN024DKA_at; Start 100; Stop 124
ggatggattggtgcctttataggcc

SEQ ID NO: 161159 - DNA, 25 bp, Artificial
  probe
  misc_feature (1)..(25): SEQ ID NO: 7012; WAN024DKA_at; Start 187; Stop 211
ggttccatgattgttttagctattt

SEQ ID NO: 161160 - DNA, 25 bp, Artificial
  probe
  misc_feature (1)..(25): SEQ ID NO: 7012; WAN024DKA_at; Start 96; Stop 120
tctcggatggattggtgcctttata

SEQ ID NO: 161161 - DNA, 25 bp, Artificial
  probe
  misc_feature (1)..(25): SEQ ID NO: 7012; WAN024DKA_at; Start 87; Stop 111
aaaaatgtttctcggatggattggt

SEQ ID NO: 161162 - DNA, 25 bp, Artificial
  probe
  misc_feature (1)..(25): SEQ ID NO: 7012; WAN024DKA_at; Start 55; Stop 79
accaatcgtggagaacacatgggat

SEQ ID NO: 161163 - DNA, 25 bp, Artificial
  probe
  misc_feature (1)..(25): SEQ ID NO: 7012; WAN024DKA_at; Start 144; Stop 168
gggaccgataatagcaggaactgcc

SEQ ID NO: 161164 - DNA, 25 bp, Artificial
  probe
  misc_feature (1)..(25): SEQ ID NO: 7012; WAN024DKA_at; Start 92; Stop 116
tgtttctcggatggattggtgcctt

SEQ ID NO: 161165 - DNA, 25 bp, Artificial
  probe
  misc_feature (1)..(25): SEQ ID NO: 7012; WAN024DKA_at; Start 178; Stop 202
gcagtactaggttccatgattgttt

SEQ ID NO: 161166 - DNA, 25 bp, Artificial
  probe
  misc_feature (1)..(25): SEQ ID NO: 7012; WAN024DKA_at; Start 54; Stop 78
gaccaatcgtggagaacacatggga

SEQ ID NO: 161167 - DNA, 25 bp, Artificial
  probe
  misc_feature (1)..(25): SEQ ID NO: 7012; WAN024DKA_at; Start 182; Stop 206
tactaggttccatgattgttttagc

SEQ ID NO: 161168 - DNA, 25 bp, Artificial
  probe
  misc_feature (1)..(25): SEQ ID NO: 7012; WAN024DKA_at; Start 109; Stop 133
ggtgcctttataggccatttgcttt

SEQ ID NO: 161169 - DNA, 25 bp, Artificial
  probe
  misc_feature (1)..(25): SEQ ID NO: 7012; WAN024DKA_at; Start 171; Stop 195
tattccggcagtactaggttccatg

SEQ ID NO: 161170 - DNA, 25 bp, Artificial
  probe
  misc_feature (1)..(25): SEQ ID NO: 7012; WAN024DKA_at; Start 168; Stop 192
cattattccggcagtactaggttcc

SEQ ID NO: 161171 - DNA, 25 bp, Artificial
  probe
  misc_feature (1)..(25): SEQ ID NO: 7012; WAN024DKA_at; Start 146; Stop 170
gaccgataatagcaggaactgccat

SEQ ID NO: 161172 - DNA, 25 bp, Artificial
  probe
  misc_feature (1)..(25): SEQ ID NO: 7012; WAN024DKA_at; Start 105; Stop 129
gattggtgcctttataggccatttg

SEQ ID NO: 161173 - DNA, 25 bp, Artificial
  probe
  misc_feature (1)..(25): SEQ ID NO: 7012; WAN024DKA_at; Start 176; Stop 200
cggcagtactaggttccatgattgt

SEQ ID NO: 161174 - DNA, 25 bp, Artificial
  probe
  misc_feature (1)..(25): SEQ ID NO: 7012; WAN024DKA_at; Start 94; Stop 118
tttctcggatggattggtgccttta

SEQ ID NO: 161175 - DNA, 25 bp, Artificial
  probe
  misc_feature (1)..(25): SEQ ID NO: 7012; WAN024DKA_at; Start 158; Stop 182
caggaactgccattattccggcagt

SEQ ID NO: 161176 - DNA, 25 bp, Artificial
  probe
  misc_feature (1)..(25): SEQ ID NO: 7012; WAN024DKA_at; Start 152; Stop 176
taatagcaggaactgccattattcc

SEQ ID NO: 161177 - DNA, 25 bp, Artificial
  probe
  misc_feature (1)..(25): SEQ ID NO: 7012; WAN024DKA_at; Start 58; Stop 82
aatcgtggagaacacatgggatgtt

SEQ ID NO: 161178 - DNA, 25 bp, Artificial
  probe
  misc_feature (1)..(25): SEQ ID NO: 7012; WAN024DKA_at; Start 99; Stop 123
cggatggattggtgcctttataggc

SEQ ID NO: 161179 - DNA, 25 bp, Artificial
  probe
  misc_feature (1)..(25): SEQ ID NO: 7012; WAN024DKA_at; Start 156; Stop 180
agcaggaactgccattattccggca

SEQ ID NO: 161180 - DNA, 25 bp, Artificial
  probe
  misc_feature (1)..(25): SEQ ID NO: 3016; WAN024DKB_at; Start 90; Stop 114
aatgtttctcggttggatcggagcc

SEQ ID NO: 161181 - DNA, 25 bp, Artificial
  probe
  misc_feature (1)..(25): SEQ ID NO: 3016; WAN024DKB_at; Start 110; Stop 134
gagcctttctaggtcacttgctctt

SEQ ID NO: 161182 - DNA, 25 bp, Artificial
  probe
  misc_feature (1)..(25): SEQ ID NO: 3016; WAN024DKB_at; Start 103; Stop 127
tggatcggagcctttctaggtcact

SEQ ID NO: 161183 - DNA, 25 bp, Artificial
  probe
  misc_feature (1)..(25): SEQ ID NO: 3016; WAN024DKB_at; Start 96; Stop 120
tctcggttggatcggagcctttcta

SEQ ID NO: 161184 - DNA, 25 bp, Artificial
  probe
  misc_feature (1)..(25): SEQ ID NO: 3016; WAN024DKB_at; Start 153; Stop 177
tttatcaggaacagctattatccca

SEQ ID NO: 161185 - DNA, 25 bp, Artificial
  probe
  misc_feature (1)..(25): SEQ ID NO: 3016; WAN024DKB_at; Start 102; Stop 126
ttggatcggagcctttctaggtcac

SEQ ID NO: 161186 - DNA, 25 bp, Artificial
  probe
  misc_feature (1)..(25): SEQ ID NO: 3016; WAN024DKB_at; Start 146; Stop 170
ggccagttttatcaggaacagctat

SEQ ID NO: 161187 - DNA, 25 bp, Artificial
  probe
  misc_feature (1)..(25): SEQ ID NO: 3016; WAN024DKB_at; Start 112; Stop 136
gcctttctaggtcacttgctctttg

SEQ ID NO: 161188 - DNA, 25 bp, Artificial
  probe
  misc_feature (1)..(25): SEQ ID NO: 3016; WAN024DKB_at; Start 107; Stop 131
tcggagcctttctaggtcacttgct

SEQ ID NO: 161189 - DNA, 25 bp, Artificial
  probe
  misc_feature (1)..(25): SEQ ID NO: 3016; WAN024DKB_at; Start 109; Stop 133
ggagcctttctaggtcacttgctct

SEQ ID NO: 161190 - DNA, 25 bp, Artificial
  probe
  misc_feature (1)..(25): SEQ ID NO: 3016; WAN024DKB_at; Start 105; Stop 129
gatcggagcctttctaggtcacttg

SEQ ID NO: 161191 - DNA, 25 bp, Artificial
  probe
  misc_feature (1)..(25): SEQ ID NO: 3016; WAN024DKB_at; Start 92; Stop 116
tgtttctcggttggatcggagcctt

SEQ ID NO: 161192 - DNA, 25 bp, Artificial
  probe
  misc_feature (1)..(25): SEQ ID NO: 3016; WAN024DKB_at; Start 124; Stop 148
cacttgctctttggaacttgggggc

SEQ ID NO: 161193 - DNA, 25 bp, Artificial
  probe
  misc_feature (1)..(25): SEQ ID NO: 3016; WAN024DKB_at; Start 63; Stop 87
tggagagcgaatgggatgttttgga

SEQ ID NO: 161194 - DNA, 25 bp, Artificial
  probe
  misc_feature (1)..(25): SEQ ID NO: 3016; WAN024DKB_at; Start 99; Stop 123
cggttggatcggagcctttctaggt

SEQ ID NO: 161195 - DNA, 25 bp, Artificial
  probe
  misc_feature (1)..(25): SEQ ID NO: 3016; WAN024DKB_at; Start 55; Stop 79
accaatcgtggagagcgaatgggat

SEQ ID NO: 161196 - DNA, 25 bp, Artificial
  probe
  misc_feature (1)..(25): SEQ ID NO: 3016; WAN024DKB_at; Start 91; Stop 115
atgtttctcggttggatcggagcct

SEQ ID NO: 161197 - DNA, 25 bp, Artificial
  probe
  misc_feature (1)..(25): SEQ ID NO: 3016; WAN024DKB_at; Start 147; Stop 171
gccagttttatcaggaacagctatt

SEQ ID NO: 161198 - DNA, 25 bp, Artificial
  probe
  misc_feature (1)..(25): SEQ ID NO: 3016; WAN024DKB_at; Start 98; Stop 122
tcggttggatcggagcctttctagg

SEQ ID NO: 161199 - DNA, 25 bp, Artificial
  probe
  misc_feature (1)..(25): SEQ ID NO: 3016; WAN024DKB_at; Start 152; Stop 176
ttttatcaggaacagctattatccc

SEQ ID NO: 161200 - DNA, 25 bp, Artificial
  probe
  misc_feature (1)..(25): SEQ ID NO: 3016; WAN024DKB_at; Start 100; Stop 124
ggttggatcggagcctttctaggtc

SEQ ID NO: 161201 - DNA, 25 bp, Artificial
  probe
  misc_feature (1)..(25): SEQ ID NO: 3016; WAN024DKB_at; Start 127; Stop 151
ttgctctttggaacttgggggccag

SEQ ID NO: 161202 - DNA, 25 bp, Artificial
  probe
  misc_feature (1)..(25): SEQ ID NO: 3016; WAN024DKB_at; Start 148; Stop 172
ccagttttatcaggaacagctatta

SEQ ID NO: 161203 - DNA, 25 bp, Artificial
  probe
  misc_feature (1)..(25): SEQ ID NO: 3016; WAN024DKB_at; Start 106; Stop 130
atcggagcctttctaggtcacttgc

SEQ ID NO: 161204 - DNA, 25 bp, Artificial
  probe
  misc_feature (1)..(25): SEQ ID NO: 3016; WAN024DKB_at; Start 151; Stop 175
gttttatcaggaacagctattatcc

SEQ ID NO: 161205 - DNA, 25 bp, Artificial
  probe
  misc_feature (1)..(25): SEQ ID NO: 3016; WAN024DKB_at; Start 155; Stop 179
tatcaggaacagctattatcccagc

SEQ ID NO: 161206 - DNA, 25 bp, Artificial
  probe
  misc_feature (1)..(25): SEQ ID NO: 3016; WAN024DKB_at; Start 108; Stop 132
cggagcctttctaggtcacttgctc

SEQ ID NO: 161207 - DNA, 25 bp, Artificial
  probe
  misc_feature (1)..(25): SEQ ID NO: 3016; WAN024DKB_at; Start 145; Stop 169
gggccagttttatcaggaacagcta

SEQ ID NO: 161208 - DNA, 25 bp, Artificial
  probe
  misc_feature (1)..(25): SEQ ID NO: 3016; WAN024DKB_at; Start 94; Stop 118
tttctcggttggatcggagcctttc

SEQ ID NO: 161209 - DNA, 25 bp, Artificial
  probe
  misc_feature (1)..(25): SEQ ID NO: 3016; WAN024DKB_at; Start 154; Stop 178
ttatcaggaacagctattatcccag

SEQ ID NO: 161210 - DNA, 25 bp, Artificial
  probe
  misc_feature (1)..(25): SEQ ID NO: 3016; WAN024DKB_at; Start 104; Stop 128
ggatcggagcctttctaggtcactt

SEQ ID NO: 161211 - DNA, 25 bp, Artificial
  probe
  misc_feature (1)..(25): SEQ ID NO: 3016; WAN024DKB_at; Start 89; Stop 113
aaatgtttctcggttggatcggagc

SEQ ID NO: 161212 - DNA, 25 bp, Artificial
  probe
  misc_feature (1)..(25): SEQ ID NO: 3016; WAN024DKB_at; Start 95; Stop 119
ttctcggttggatcggagcctttct

SEQ ID NO: 161213 - DNA, 25 bp, Artificial
  probe
  misc_feature (1)..(25): SEQ ID NO: 3016; WAN024DKB_at; Start 149; Stop 173
cagttttatcaggaacagctattat

SEQ ID NO: 161214 - DNA, 25 bp, Artificial
  probe
  misc_feature (1)..(25): SEQ ID NO: 6570; WAN024DKC_at; Start 98; Stop 122
aagccaatctggctggatatggcac

SEQ ID NO: 161215 - DNA, 25 bp, Artificial
  probe
  misc_feature (1)..(25): SEQ ID NO: 6570; WAN024DKC_at; Start 123; Stop 147
tcacgaactccttgaaaatgcttgg

SEQ ID NO: 161216 - DNA, 25 bp, Artificial
  probe
  misc_feature (1)..(25): SEQ ID NO: 6570; WAN024DKC_at; Start 27; Stop 51
aacaaatcactatgactacctgtcc

SEQ ID NO: 161217 - DNA, 25 bp, Artificial
  probe
  misc_feature (1)..(25): SEQ ID NO: 6570; WAN024DKC_at; Start 106; Stop 130
ctggctggatatggcactcacgaac

SEQ ID NO: 161218 - DNA, 25 bp, Artificial
  probe
  misc_feature (1)..(25): SEQ ID NO: 6570; WAN024DKC_at; Start 137; Stop 161
aaaatgcttggatgccgtcaattga

SEQ ID NO: 161219 - DNA, 25 bp, Artificial
  probe
  misc_feature (1)..(25): SEQ ID NO: 6570; WAN024DKC_at; Start 118; Stop 142
ggcactcacgaactccttgaaaatg

SEQ ID NO: 161220 - DNA, 25 bp, Artificial
  probe
  misc_feature (1)..(25): SEQ ID NO: 6570; WAN024DKC_at; Start 37; Stop 61
tatgactacctgtcctcagcaaatt

SEQ ID NO: 161221 - DNA, 25 bp, Artificial
  probe
  misc_feature (1)..(25): SEQ ID NO: 6570; WAN024DKC_at; Start 72; Stop 96
tcttccttgtctactttataaacca

SEQ ID NO: 161222 - DNA, 25 bp, Artificial
  probe
  misc_feature (1)..(25): SEQ ID NO: 6570; WAN024DKC_at; Start 127; Stop 151
gaactccttgaaaatgcttggatgc

SEQ ID NO: 161223 - DNA, 25 bp, Artificial
  probe
  misc_feature (1)..(25): SEQ ID NO: 6570; WAN024DKC_at; Start 34; Stop 58
cactatgactacctgtcctcagcaa

SEQ ID NO: 161224 - DNA, 25 bp, Artificial
  probe
  misc_feature (1)..(25): SEQ ID NO: 6570; WAN024DKC_at; Start 150; Stop 174
gccgtcaattgatgatcacgatatc

SEQ ID NO: 161225 - DNA, 25 bp, Artificial
  probe
  misc_feature (1)..(25): SEQ ID NO: 6570; WAN024DKC_at; Start 135; Stop 159
tgaaaatgcttggatgccgtcaatt

SEQ ID NO: 161226 - DNA, 25 bp, Artificial
  probe
  misc_feature (1)..(25): SEQ ID NO: 6570; WAN024DKC_at; Start 103; Stop 127
aatctggctggatatggcactcacg

SEQ ID NO: 161227 - DNA, 25 bp, Artificial
  probe
  misc_feature (1)..(25): SEQ ID NO: 6570; WAN024DKC_at; Start 90; Stop 114
taaaccaaaagccaatctggctgga

SEQ ID NO: 161228 - DNA, 25 bp, Artificial
  probe
  misc_feature (1)..(25): SEQ ID NO: 6570; WAN024DKC_at; Start 120; Stop 144
cactcacgaactccttgaaaatgct

SEQ ID NO: 161229 - DNA, 25 bp, Artificial
  probe
  misc_feature (1)..(25): SEQ ID NO: 6570; WAN024DKC_at; Start 105; Stop 129
tctggctggatatggcactcacgaa

SEQ ID NO: 161230 - DNA, 25 bp, Artificial
  probe
  misc_feature (1)..(25): SEQ ID NO: 6570; WAN024DKC_at; Start 132; Stop 156
ccttgaaaatgcttggatgccgtca

SEQ ID NO: 161231 - DNA, 25 bp, Artificial
  probe
  misc_feature (1)..(25): SEQ ID NO: 6570; WAN024DKC_at; Start 147; Stop 171
gatgccgtcaattgatgatcacgat

SEQ ID NO: 161232 - DNA, 25 bp, Artificial
  probe
  misc_feature (1)..(25): SEQ ID NO: 6570; WAN024DKC_at; Start 111; Stop 135
tggatatggcactcacgaactcctt

SEQ ID NO: 161233 - DNA, 25 bp, Artificial
  probe
  misc_feature (1)..(25): SEQ ID NO: 6570; WAN024DKC_at; Start 31; Stop 55
aatcactatgactacctgtcctcag

SEQ ID NO: 161234 - DNA, 25 bp, Artificial
  probe
  misc_feature (1)..(25): SEQ ID NO: 6570; WAN024DKC_at; Start 145; Stop 169
tggatgccgtcaattgatgatcacg

SEQ ID NO: 161235 - DNA, 25 bp, Artificial
  probe
  misc_feature (1)..(25): SEQ ID NO: 6570; WAN024DKC_at; Start 62; Stop 86
taaaatcaattcttccttgtctact

SEQ ID NO: 161236 - DNA, 25 bp, Artificial
  probe
  misc_feature (1)..(25): SEQ ID NO: 6570; WAN024DKC_at; Start 95; Stop 119
caaaagccaatctggctggatatgg

SEQ ID NO: 161237 - DNA, 25 bp, Artificial
  probe
  misc_feature (1)..(25): SEQ ID NO: 6570; WAN024DKC_at; Start 45; Stop 69
cctgtcctcagcaaatttaaaatca

SEQ ID NO: 161238 - DNA, 25 bp, Artificial
  probe
  misc_feature (1)..(25): SEQ ID NO: 6570; WAN024DKC_at; Start 129; Stop 153
actccttgaaaatgcttggatgccg

SEQ ID NO: 161239 - DNA, 25 bp, Artificial
  probe
  misc_feature (1)..(25): SEQ ID NO: 6570; WAN024DKC_at; Start 115; Stop 139
tatggcactcacgaactccttgaaa

SEQ ID NO: 161240 - DNA, 25 bp, Artificial
  probe
  misc_feature (1)..(25): SEQ ID NO: 6570; WAN024DKC_at; Start 102; Stop 126
caatctggctggatatggcactcac

SEQ ID NO: 161241 - DNA, 25 bp, Artificial
  probe
  misc_feature (1)..(25): SEQ ID NO: 6570; WAN024DKC_at; Start 47; Stop 71
tgtcctcagcaaatttaaaatcaat

SEQ ID NO: 161242 - DNA, 25 bp, Artificial
  probe
  misc_feature (1)..(25): SEQ ID NO: 6570; WAN024DKC_at; Start 113; Stop 137
gatatggcactcacgaactccttga

SEQ ID NO: 161243 - DNA, 25 bp, Artificial
  probe
  misc_feature (1)..(25): SEQ ID NO: 6570; WAN024DKC_at; Start 142; Stop 166
gcttggatgccgtcaattgatgatc

SEQ ID NO: 161244 - DNA, 25 bp, Artificial
  probe
  misc_feature (1)..(25): SEQ ID NO: 6570; WAN024DKC_at; Start 40; Stop 64
gactacctgtcctcagcaaatttaa

SEQ ID NO: 161245 - DNA, 25 bp, Artificial
  probe
  misc_feature (1)..(25): SEQ ID NO: 6570; WAN024DKC_at; Start 124; Stop 148
cacgaactccttgaaaatgcttgga

SEQ ID NO: 161246 - DNA, 25 bp, Artificial
  probe
  misc_feature (1)..(25): SEQ ID NO: 6570; WAN024DKC_at; Start 24; Stop 48
taaaacaaatcactatgactacctg

SEQ ID NO: 161247 - DNA, 25 bp, Artificial
  probe
  misc_feature (1)..(25): SEQ ID NO: 6570; WAN024DKC_at; Start 108; Stop 132
ggctggatatggcactcacgaactc

SEQ ID NO: 161248 - DNA, 25 bp, Artificial
  probe
  misc_feature (1)..(25): SEQ ID NO: 4098; WAN024DKD_at; Start 3; Stop 27
gcttaagattcgttatcataaacag

SEQ ID NO: 161249 - DNA, 25 bp, Artificial
  probe
  misc_feature (1)..(25): SEQ ID NO: 4098; WAN024DKD_at; Start 39; Stop 63
ttttaagttggctatgaagcgtggt

SEQ ID NO: 161250 - DNA, 25 bp, Artificial
  probe
  misc_feature (1)..(25): SEQ ID NO: 4098; WAN024DKD_at; Start 41; Stop 65
ttaagttggctatgaagcgtggttt

SEQ ID NO: 161251 - DNA, 25 bp, Artificial
  probe
  misc_feature (1)..(25): SEQ ID NO: 4098; WAN024DKD_at; Start 40; Stop 64
tttaagttggctatgaagcgtggtt

SEQ ID NO: 161252 - DNA, 25 bp, Artificial
  probe
  misc_feature (1)..(25): SEQ ID NO: 4098; WAN024DKD_at; Start 155; Stop 179
ccaagcattttcaaggagttcgtga

SEQ ID NO: 161253 - DNA, 25 bp, Artificial
  probe
  misc_feature (1)..(25): SEQ ID NO: 4098; WAN024DKD_at; Start 154; Stop 178
tccaagcattttcaaggagttcgtg

SEQ ID NO: 161254 - DNA, 25 bp, Artificial
  probe
  misc_feature (1)..(25): SEQ ID NO: 4098; WAN024DKD_at; Start 190; Stop 214
cagccagattggcttttggtttata

SEQ ID NO: 161255 - DNA, 25 bp, Artificial
  probe
  misc_feature (1)..(25): SEQ ID NO: 4098; WAN024DKD_at; Start 144; Stop 168
attgacggcatccaagcattttcaa

SEQ ID NO: 161256 - DNA, 25 bp, Artificial
  probe
  misc_feature (1)..(25): SEQ ID NO: 4098; WAN024DKD_at; Start 233; Stop 257
tgattttaaatttgctgaggacagg

SEQ ID NO: 161257 - DNA, 25 bp, Artificial
  probe
  misc_feature (1)..(25): SEQ ID NO: 4098; WAN024DKD_at; Start 38; Stop 62
attttaagttggctatgaagcgtgg

SEQ ID NO: 161258 - DNA, 25 bp, Artificial
  probe
  misc_feature (1)..(25): SEQ ID NO: 4098; WAN024DKD_at; Start 36; Stop 60
agattttaagttggctatgaagcgt

SEQ ID NO: 161259 - DNA, 25 bp, Artificial
  probe
  misc_feature (1)..(25): SEQ ID NO: 4098; WAN024DKD_at; Start 6; Stop 30
taagattcgttatcataaacagttt

SEQ ID NO: 161260 - DNA, 25 bp, Artificial
  probe
  misc_feature (1)..(25): SEQ ID NO: 4098; WAN024DKD_at; Start 152; Stop 176
catccaagcattttcaaggagttcg

SEQ ID NO: 161261 - DNA, 25 bp, Artificial
  probe
  misc_feature (1)..(25): SEQ ID NO: 4098; WAN024DKD_at; Start 153; Stop 177
atccaagcattttcaaggagttcgt

SEQ ID NO: 161262 - DNA, 25 bp, Artificial
  probe
  misc_feature (1)..(25): SEQ ID NO: 4098; WAN024DKD_at; Start 8; Stop 32
agattcgttatcataaacagtttaa

SEQ ID NO: 161263 - DNA, 25 bp, Artificial
  probe
  misc_feature (1)..(25): SEQ ID NO: 4098; WAN024DKD_at; Start 34; Stop 58
aaagattttaagttggctatgaagc

SEQ ID NO: 161264 - DNA, 25 bp, Artificial
  probe
  misc_feature (1)..(25): SEQ ID NO: 4098; WAN024DKD_at; Start 4; Stop 28
cttaagattcgttatcataaacagt

SEQ ID NO: 161265 - DNA, 25 bp, Artificial
  probe
  misc_feature (1)..(25): SEQ ID NO: 4098; WAN024DKD_at; Start 150; Stop 174
ggcatccaagcattttcaaggagtt

SEQ ID NO: 161266 - DNA, 25 bp, Artificial
  probe
  misc_feature (1)..(25): SEQ ID NO: 4098; WAN024DKD_at; Start 9; Stop 33
gattcgttatcataaacagtttaaa

SEQ ID NO: 161267 - DNA, 25 bp, Artificial
  probe
  misc_feature (1)..(25): SEQ ID NO: 4098; WAN024DKD_at; Start 35; Stop 59
aagattttaagttggctatgaagcg

SEQ ID NO: 161268 - DNA, 25 bp, Artificial
  probe
  misc_feature (1)..(25): SEQ ID NO: 4098; WAN024DKD_at; Start 5; Stop 29
ttaagattcgttatcataaacagtt

SEQ ID NO: 161269 - DNA, 25 bp, Artificial
  probe
  misc_feature (1)..(25): SEQ ID NO: 4098; WAN024DKD_at; Start 147; Stop 171
gacggcatccaagcattttcaagga

SEQ ID NO: 161270 - DNA, 25 bp, Artificial
  probe
  misc_feature (1)..(25): SEQ ID NO: 4098; WAN024DKD_at; Start 44; Stop 68
agttggctatgaagcgtggtttgaa

SEQ ID NO: 161271 - DNA, 25 bp, Artificial
  probe
  misc_feature (1)..(25): SEQ ID NO: 4098; WAN024DKD_at; Start 149; Stop 173
cggcatccaagcattttcaaggagt

SEQ ID NO: 161272 - DNA, 25 bp, Artificial
  probe
  misc_feature (1)..(25): SEQ ID NO: 4098; WAN024DKD_at; Start 191; Stop 215
agccagattggcttttggtttataa

SEQ ID NO: 161273 - DNA, 25 bp, Artificial
  probe
  misc_feature (1)..(25): SEQ ID NO: 4098; WAN024DKD_at; Start 7; Stop 31
aagattcgttatcataaacagttta

SEQ ID NO: 161274 - DNA, 25 bp, Artificial
  probe
  misc_feature (1)..(25): SEQ ID NO: 4098; WAN024DKD_at; Start 2; Stop 26
tgcttaagattcgttatcataaaca

SEQ ID NO: 161275 - DNA, 25 bp, Artificial
  probe
  misc_feature (1)..(25): SEQ ID NO: 4098; WAN024DKD_at; Start 1; Stop 25
gtgcttaagattcgttatcataaac

SEQ ID NO: 161276 - DNA, 25 bp, Artificial
  probe
  misc_feature (1)..(25): SEQ ID NO: 4098; WAN024DKD_at; Start 148; Stop 172
acggcatccaagcattttcaaggag

SEQ ID NO: 161277 - DNA, 25 bp, Artificial
  probe
  misc_feature (1)..(25): SEQ ID NO: 4098; WAN024DKD_at; Start 43; Stop 67
aagttggctatgaagcgtggtttga

SEQ ID NO: 161278 - DNA, 25 bp, Artificial
  probe
  misc_feature (1)..(25): SEQ ID NO: 4098; WAN024DKD_at; Start 145; Stop 169
ttgacggcatccaagcattttcaag

SEQ ID NO: 161279 - DNA, 25 bp, Artificial
  probe
  misc_feature (1)..(25): SEQ ID NO: 4098; WAN024DKD_at; Start 42; Stop 66
taagttggctatgaagcgtggtttg

SEQ ID NO: 161280 - DNA, 25 bp, Artificial
  probe
  misc_feature (1)..(25): SEQ ID NO: 4098; WAN024DKD_at; Start 146; Stop 170
tgacggcatccaagcattttcaagg

SEQ ID NO: 161281 - DNA, 25 bp, Artificial
  probe
  misc_feature (1)..(25): SEQ ID NO: 4098; WAN024DKD_at; Start 151; Stop 175
gcatccaagcattttcaaggagttc

SEQ ID NO: 161282 - DNA, 25 bp, Artificial
  probe
  misc_feature (1)..(25): SEQ ID NO: 2670; WAN024DKE_at; Start 128; Stop 152
cggattatgcgccaaatatagatgt

SEQ ID NO: 161283 - DNA, 25 bp, Artificial
  probe
  misc_feature (1)..(25): SEQ ID NO: 2670; WAN024DKE_at; Start 229; Stop 253
gctgttattccgatgatggactatg

SEQ ID NO: 161284 - DNA, 25 bp, Artificial
  probe
  misc_feature (1)..(25): SEQ ID NO: 2670; WAN024DKE_at; Start 153; Stop 177
tgcactattgggtccacaagttgct

SEQ ID NO: 161285 - DNA, 25 bp, Artificial
  probe
  misc_feature (1)..(25): SEQ ID NO: 2670; WAN024DKE_at; Start 9; Stop 33
gattggtttgttttgtgcagcaggt

SEQ ID NO: 161286 - DNA, 25 bp, Artificial
  probe
  misc_feature (1)..(25): SEQ ID NO: 2670; WAN024DKE_at; Start 133; Stop 157
tatgcgccaaatatagatgttgcac

SEQ ID NO: 161287 - DNA, 25 bp, Artificial
  probe
  misc_feature (1)..(25): SEQ ID NO: 2670; WAN024DKE_at; Start 201; Stop 225
aatttgtgataagtgtgatgttccg

SEQ ID NO: 161288 - DNA, 25 bp, Artificial
  probe
  misc_feature (1)..(25): SEQ ID NO: 2670; WAN024DKE_at; Start 288; Stop 312
cctatctttgattagtgggtaacta

SEQ ID NO: 161289 - DNA, 25 bp, Artificial
  probe
  misc_feature (1)..(25): SEQ ID NO: 2670; WAN024DKE_at; Start 194; Stop 218
caaaagaaatttgtgataagtgtga

SEQ ID NO: 161290 - DNA, 25 bp, Artificial
  probe
  misc_feature (1)..(25): SEQ ID NO: 2670; WAN024DKE_at; Start 163; Stop 187
ggtccacaagttgcttatacattag

SEQ ID NO: 161291 - DNA, 25 bp, Artificial
  probe
  misc_feature (1)..(25): SEQ ID NO: 2670; WAN024DKE_at; Start 25; Stop 49
gcagcaggtttttctactggtatgc

SEQ ID NO: 161292 - DNA, 25 bp, Artificial
  probe
  misc_feature (1)..(25): SEQ ID NO: 2670; WAN024DKE_at; Start 87; Stop 111
agttgaggcagaaatagaggcgttt

SEQ ID NO: 161293 - DNA, 25 bp, Artificial
  probe
  misc_feature (1)..(25): SEQ ID NO: 2670; WAN024DKE_at; Start 118; Stop 142
tctaaattagcggattatgcgccaa

SEQ ID NO: 161294 - DNA, 25 bp, Artificial
  probe
  misc_feature (1)..(25): SEQ ID NO: 2670; WAN024DKE_at; Start 144; Stop 168
tatagatgttgcactattgggtcca

SEQ ID NO: 161295 - DNA, 25 bp, Artificial
  probe
  misc_feature (1)..(25): SEQ ID NO: 2670; WAN024DKE_at; Start 280; Stop 304
gatttggccctatctttgattagtg

SEQ ID NO: 161296 - DNA, 25 bp, Artificial
  probe
  misc_feature (1)..(25): SEQ ID NO: 2670; WAN024DKE_at; Start 6; Stop 30
gaagattggtttgttttgtgcagca

SEQ ID NO: 161297 - DNA, 25 bp, Artificial
  probe
  misc_feature (1)..(25): SEQ ID NO: 2670; WAN024DKE_at; Start 103; Stop 127
gaggcgttttctcagtctaaattag

SEQ ID NO: 161298 - DNA, 25 bp, Artificial
  probe
  misc_feature (1)..(25): SEQ ID NO: 2670; WAN024DKE_at; Start 107; Stop 131
cgttttctcagtctaaattagcgga

SEQ ID NO: 161299 - DNA, 25 bp, Artificial
  probe
  misc_feature (1)..(25): SEQ ID NO: 2670; WAN024DKE_at; Start 247; Stop 271
gactatggtatgttagatgggaaaa

SEQ ID NO: 161300 - DNA, 25 bp, Artificial
  probe
  misc_feature (1)..(25): SEQ ID NO: 2670; WAN024DKE_at; Start 158; Stop 182
tattgggtccacaagttgcttatac

SEQ ID NO: 161301 - DNA, 25 bp, Artificial
  probe
  misc_feature (1)..(25): SEQ ID NO: 2670; WAN024DKE_at; Start 91; Stop 115
gaggcagaaatagaggcgttttctc

SEQ ID NO: 161302 - DNA, 25 bp, Artificial
  probe
  misc_feature (1)..(25): SEQ ID NO: 2670; WAN024DKE_at; Start 270; Stop 294
aaaagtattagatttggccctatct

SEQ ID NO: 161303 - DNA, 25 bp, Artificial
  probe
  misc_feature (1)..(25): SEQ ID NO: 2670; WAN024DKE_at; Start 208; Stop 232
gataagtgtgatgttccgatagctg

SEQ ID NO: 161304 - DNA, 25 bp, Artificial
  probe
  misc_feature (1)..(25): SEQ ID NO: 2670; WAN024DKE_at; Start 97; Stop 121
gaaatagaggcgttttctcagtcta

SEQ ID NO: 161305 - DNA, 25 bp, Artificial
  probe
  misc_feature (1)..(25): SEQ ID NO: 2670; WAN024DKE_at; Start 40; Stop 64
actggtatgcttgtaaataatatga

SEQ ID NO: 161306 - DNA, 25 bp, Artificial
  probe
  misc_feature (1)..(25): SEQ ID NO: 2670; WAN024DKE_at; Start 255; Stop 279
tatgttagatgggaaaaaagtatta

SEQ ID NO: 161307 - DNA, 25 bp, Artificial
  probe
  misc_feature (1)..(25): SEQ ID NO: 2670; WAN024DKE_at; Start 237; Stop 261
tccgatgatggactatggtatgtta

SEQ ID NO: 161308 - DNA, 25 bp, Artificial
  probe
  misc_feature (1)..(25): SEQ ID NO: 2670; WAN024DKE_at; Start 224; Stop 248
cgatagctgttattccgatgatgga

SEQ ID NO: 161309 - DNA, 25 bp, Artificial
  probe
  misc_feature (1)..(25): SEQ ID NO: 2670; WAN024DKE_at; Start 167; Stop 191
cacaagttgcttatacattagataa

SEQ ID NO: 161310 - DNA, 25 bp, Artificial
  probe
  misc_feature (1)..(25): SEQ ID NO: 2670; WAN024DKE_at; Start 115; Stop 139
cagtctaaattagcggattatgcgc

SEQ ID NO: 161311 - DNA, 25 bp, Artificial
  probe
  misc_feature (1)..(25): SEQ ID NO: 2670; WAN024DKE_at; Start 31; Stop 55
ggtttttctactggtatgcttgtaa

SEQ ID NO: 161312 - DNA, 25 bp, Artificial
  probe
  misc_feature (1)..(25): SEQ ID NO: 2670; WAN024DKE_at; Start 217; Stop 241
gatgttccgatagctgttattccga

SEQ ID NO: 161313 - DNA, 25 bp, Artificial
  probe
  misc_feature (1)..(25): SEQ ID NO: 2670; WAN024DKE_at; Start 53; Stop 77
taaataatatgaaaattgcagcgca

SEQ ID NO: 161314 - DNA, 25 bp, Artificial
  probe
  misc_feature (1)..(25): SEQ ID NO: 2670; WAN024DKE_at; Start 175; Stop 199
gcttatacattagataaatcaaaag

SEQ ID NO: 161315 - DNA, 25 bp, Artificial
  probe
  misc_feature (1)..(25): SEQ ID NO: 2670; WAN024DKE_at; Start 148; Stop 172
gatgttgcactattgggtccacaag

SEQ ID NO: 161316 - DNA, 25 bp, Artificial
  probe
  misc_feature (1)..(25): SEQ ID NO: 2164; WAN024DKF_at; Start 13; Stop 37
gttccagatcaaattatcatgggtt

SEQ ID NO: 161317 - DNA, 25 bp, Artificial
  probe
  misc_feature (1)..(25): SEQ ID NO: 2164; WAN024DKF_at; Start 205; Stop 229
aagacagaaattacagctctctttg

SEQ ID NO: 161318 - DNA, 25 bp, Artificial
  probe
  misc_feature (1)..(25): SEQ ID NO: 2164; WAN024DKF_at; Start 17; Stop 41
cagatcaaattatcatgggtttaat

SEQ ID NO: 161319 - DNA, 25 bp, Artificial
  probe
  misc_feature (1)..(25): SEQ ID NO: 2164; WAN024DKF_at; Start 220; Stop 244
gctctctttgttcattcacaagatc

SEQ ID NO: 161320 - DNA, 25 bp, Artificial
  probe
  misc_feature (1)..(25): SEQ ID NO: 2164; WAN024DKF_at; Start 275; Stop 299
taatcaaagaaattattagtttgag

SEQ ID NO: 161321 - DNA, 25 bp, Artificial
  probe
  misc_feature (1)..(25): SEQ ID NO: 2164; WAN024DKF_at; Start 11; Stop 35
ttgttccagatcaaattatcatggg

SEQ ID NO: 161322 - DNA, 25 bp, Artificial
  probe
  misc_feature (1)..(25): SEQ ID NO: 2164; WAN024DKF_at; Start 291; Stop 315
tagtttgagaaaagaacttcataaa

SEQ ID NO: 161323 - DNA, 25 bp, Artificial
  probe
  misc_feature (1)..(25): SEQ ID NO: 2164; WAN024DKF_at; Start 261; Stop 285
gacggagattaatttaatcaaagaa

SEQ ID NO: 161324 - DNA, 25 bp, Artificial
  probe
  misc_feature (1)..(25): SEQ ID NO: 2164; WAN024DKF_at; Start 216; Stop 240
tacagctctctttgttcattcacaa

SEQ ID NO: 161325 - DNA, 25 bp, Artificial
  probe
  misc_feature (1)..(25): SEQ ID NO: 2164; WAN024DKF_at; Start 209; Stop 233
cagaaattacagctctctttgttca

SEQ ID NO: 161326 - DNA, 25 bp, Artificial
  probe
  misc_feature (1)..(25): SEQ ID NO: 2164; WAN024DKF_at; Start 16; Stop 40
ccagatcaaattatcatgggtttaa

SEQ ID NO: 161327 - DNA, 25 bp, Artificial
  probe
  misc_feature (1)..(25): SEQ ID NO: 2164; WAN024DKF_at; Start 256; Stop 280
agtatgacggagattaatttaatca

SEQ ID NO: 161328 - DNA, 25 bp, Artificial
  probe
  misc_feature (1)..(25): SEQ ID NO: 2164; WAN024DKF_at; Start 228; Stop 252
tgttcattcacaagatcatctcatg

SEQ ID NO: 161329 - DNA, 25 bp, Artificial
  probe
  misc_feature (1)..(25): SEQ ID NO: 2164; WAN024DKF_at; Start 191; Stop 215
aagcgtctggtacaaagacagaaat

SEQ ID NO: 161330 - DNA, 25 bp, Artificial
  probe
  misc_feature (1)..(25): SEQ ID NO: 2164; WAN024DKF_at; Start 12; Stop 36
tgttccagatcaaattatcatgggt

SEQ ID NO: 161331 - DNA, 25 bp, Artificial
  probe
  misc_feature (1)..(25): SEQ ID NO: 2164; WAN024DKF_at; Start 218; Stop 242
cagctctctttgttcattcacaaga

SEQ ID NO: 161332 - DNA, 25 bp, Artificial
  probe
  misc_feature (1)..(25): SEQ ID NO: 2164; WAN024DKF_at; Start 29; Stop 53
tcatgggtttaattttatatgctgg

SEQ ID NO: 161333 - DNA, 25 bp, Artificial
  probe
  misc_feature (1)..(25): SEQ ID NO: 2164; WAN024DKF_at; Start 199; Stop 223
ggtacaaagacagaaattacagctc

SEQ ID NO: 161334 - DNA, 25 bp, Artificial
  probe
  misc_feature (1)..(25): SEQ ID NO: 2164; WAN024DKF_at; Start 230; Stop 254
ttcattcacaagatcatctcatgac

SEQ ID NO: 161335 - DNA, 25 bp, Artificial
  probe
  misc_feature (1)..(25): SEQ ID NO: 2164; WAN024DKF_at; Start 190; Stop 214
gaagcgtctggtacaaagacagaaa

SEQ ID NO: 161336 - DNA, 25 bp, Artificial
  probe
  misc_feature (1)..(25): SEQ ID NO: 2164; WAN024DKF_at; Start 201; Stop 225
tacaaagacagaaattacagctctc

SEQ ID NO: 161337 - DNA, 25 bp, Artificial
  probe
  misc_feature (1)..(25): SEQ ID NO: 2164; WAN024DKF_at; Start 211; Stop 235
gaaattacagctctctttgttcatt

SEQ ID NO: 161338 - DNA, 25 bp, Artificial
  probe
  misc_feature (1)..(25): SEQ ID NO: 2164; WAN024DKF_at; Start 223; Stop 247
ctctttgttcattcacaagatcatc

SEQ ID NO: 161339 - DNA, 25 bp, Artificial
  probe
  misc_feature (1)..(25): SEQ ID NO: 2164; WAN024DKF_at; Start 196; Stop 220
tctggtacaaagacagaaattacag

SEQ ID NO: 161340 - DNA, 25 bp, Artificial
  probe
  misc_feature (1)..(25): SEQ ID NO: 2164; WAN024DKF_at; Start 203; Stop 227
caaagacagaaattacagctctctt

SEQ ID NO: 161341 - DNA, 25 bp, Artificial
  probe
  misc_feature (1)..(25): SEQ ID NO: 2164; WAN024DKF_at; Start 225; Stop 249
ctttgttcattcacaagatcatctc

SEQ ID NO: 161342 - DNA, 25 bp, Artificial
  probe
  misc_feature (1)..(25): SEQ ID NO: 2164; WAN024DKF_at; Start 193; Stop 217
gcgtctggtacaaagacagaaatta

SEQ ID NO: 161343 - DNA, 25 bp, Artificial
  probe
  misc_feature (1)..(25): SEQ ID NO: 2164; WAN024DKF_at; Start 55; Stop 79
gatgcgaaacaacatatttataaag

SEQ ID NO: 161344 - DNA, 25 bp, Artificial
  probe
  misc_feature (1)..(25): SEQ ID NO: 2164; WAN024DKF_at; Start 296; Stop 320
tgagaaaagaacttcataaaaaata

SEQ ID NO: 161345 - DNA, 25 bp, Artificial
  probe
  misc_feature (1)..(25): SEQ ID NO: 2164; WAN024DKF_at; Start 288; Stop 312
tattagtttgagaaaagaacttcat

SEQ ID NO: 161346 - DNA, 25 bp, Artificial
  probe
  misc_feature (1)..(25): SEQ ID NO: 2164; WAN024DKF_at; Start 198; Stop 222
tggtacaaagacagaaattacagct

SEQ ID NO: 161347 - DNA, 25 bp, Artificial
  probe
  misc_feature (1)..(25): SEQ ID NO: 2164; WAN024DKF_at; Start 56; Stop 80
atgcgaaacaacatatttataaagc

SEQ ID NO: 161348 - DNA, 25 bp, Artificial
  probe
  misc_feature (1)..(25): SEQ ID NO: 2164; WAN024DKF_at; Start 194; Stop 218
cgtctggtacaaagacagaaattac

SEQ ID NO: 161349 - DNA, 25 bp, Artificial
  probe
  misc_feature (1)..(25): SEQ ID NO: 2164; WAN024DKF_at; Start 207; Stop 231
gacagaaattacagctctctttgtt

SEQ ID NO: 161350 - DNA, 25 bp, Artificial
  probe
  misc_feature (1)..(25): SEQ ID NO: 1226; WAN024DKG_at; Start 430; Stop 454
ggtcctagtcacatacacgctaaat

SEQ ID NO: 161351 - DNA, 25 bp, Artificial
  probe
  misc_feature (1)..(25): SEQ ID NO: 1226; WAN024DKG_at; Start 871; Stop 895
tctgtcttgcgtgctaatttagtaa

SEQ ID NO: 161352 - DNA, 25 bp, Artificial
  probe
  misc_feature (1)..(25): SEQ ID NO: 1226; WAN024DKG_at; Start 71; Stop 95
cacaaatagcagcaaaattaggaat

SEQ ID NO: 161353 - DNA, 25 bp, Artificial
  probe
  misc_feature (1)..(25): SEQ ID NO: 1226; WAN024DKG_at; Start 89; Stop 113
taggaatttatagaacctctattag

SEQ ID NO: 161354 - DNA, 25 bp, Artificial
  probe
  misc_feature (1)..(25): SEQ ID NO: 1226; WAN024DKG_at; Start 485; Stop 509
ctagaaaatttcatggagagtgtac

SEQ ID NO: 161355 - DNA, 25 bp, Artificial
  probe
  misc_feature (1)..(25): SEQ ID NO: 1226; WAN024DKG_at; Start 844; Stop 868
ggtgatacgaaagtatcttcgattc

SEQ ID NO: 161356 - DNA, 25 bp, Artificial
  probe
  misc_feature (1)..(25): SEQ ID NO: 1226; WAN024DKG_at; Start 304; Stop 328
gtccttaggaatctaattgatgata

SEQ ID NO: 161357 - DNA, 25 bp, Artificial
  probe
  misc_feature (1)..(25): SEQ ID NO: 1226; WAN024DKG_at; Start 682; Stop 706
gatgactttaaagaattgaccaaag

SEQ ID NO: 161358 - DNA, 25 bp, Artificial
  probe
  misc_feature (1)..(25): SEQ ID NO: 1226; WAN024DKG_at; Start 321; Stop 345
tgatgataatatgaaaattggcttt

SEQ ID NO: 161359 - DNA, 25 bp, Artificial
  probe
  misc_feature (1)..(25): SEQ ID NO: 1226; WAN024DKG_at; Start 535; Stop 559
gaaaataaattgttagcagatggta

SEQ ID NO: 161360 - DNA, 25 bp, Artificial
  probe
  misc_feature (1)..(25): SEQ ID NO: 1226; WAN024DKG_at; Start 550; Stop 574
gcagatggtattttgcaatcaagat

SEQ ID NO: 161361 - DNA, 25 bp, Artificial
  probe
  misc_feature (1)..(25): SEQ ID NO: 1226; WAN024DKG_at; Start 277; Stop 301
gaaagaatttctcaagttgcagcag

SEQ ID NO: 161362 - DNA, 25 bp, Artificial
  probe
  misc_feature (1)..(25): SEQ ID NO: 1226; WAN024DKG_at; Start 711; Stop 735
aactgtaggagaaatttgttgtcga

SEQ ID NO: 161363 - DNA, 25 bp, Artificial
  probe
  misc_feature (1)..(25): SEQ ID NO: 1226; WAN024DKG_at; Start 459; Stop 483
tgtgaatacactgatttatgaaatg

SEQ ID NO: 161364 - DNA, 25 bp, Artificial
  probe
  misc_feature (1)..(25): SEQ ID NO: 1226; WAN024DKG_at; Start 742; Stop 766
gattcaaaaggtaaagaagtctatg

SEQ ID NO: 161365 - DNA, 25 bp, Artificial
  probe
  misc_feature (1)..(25): SEQ ID NO: 1226; WAN024DKG_at; Start 390; Stop 414
taaaagtgtccgaaatgttcacttc

SEQ ID NO: 161366 - DNA, 25 bp, Artificial
  probe
  misc_feature (1)..(25): SEQ ID NO: 1226; WAN024DKG_at; Start 172; Stop 196
gataccaatatgtttaagttggaaa

SEQ ID NO: 161367 - DNA, 25 bp, Artificial
  probe
  misc_feature (1)..(25): SEQ ID NO: 1226; WAN024DKG_at; Start 834; Stop 858
tgttgcttacggtgatacgaaagta

SEQ ID NO: 161368 - DNA, 25 bp, Artificial
  probe
  misc_feature (1)..(25): SEQ ID NO: 1226; WAN024DKG_at; Start 420; Stop 444
tctagcaggtggtcctagtcacata

SEQ ID NO: 161369 - DNA, 25 bp, Artificial
  probe
  misc_feature (1)..(25): SEQ ID NO: 1226; WAN024DKG_at; Start 655; Stop 679
catcaatggttagacatgcttacag

SEQ ID NO: 161370 - DNA, 25 bp, Artificial
  probe
  misc_feature (1)..(25): SEQ ID NO: 1226; WAN024DKG_at; Start 157; Stop 181
gaaatagagaattttgataccaata

SEQ ID NO: 161371 - DNA, 25 bp, Artificial
  probe
  misc_feature (1)..(25): SEQ ID NO: 1226; WAN024DKG_at; Start 698; Stop 722
tgaccaaagttaaaactgtaggaga

SEQ ID NO: 161372 - DNA, 25 bp, Artificial
  probe
  misc_feature (1)..(25): SEQ ID NO: 1226; WAN024DKG_at; Start 604; Stop 628
gatttagatatagctgtagtcggaa

SEQ ID NO: 161373 - DNA, 25 bp, Artificial
  probe
  misc_feature (1)..(25): SEQ ID NO: 1226; WAN024DKG_at; Start 378; Stop 402
tttaattcacagtaaaagtgtccga

SEQ ID NO: 161374 - DNA, 25 bp, Artificial
  probe
  misc_feature (1)..(25): SEQ ID NO: 1226; WAN024DKG_at; Start 2; Stop 26
tgaatcaagataggaataaactgct

SEQ ID NO: 161375 - DNA, 25 bp, Artificial
  probe
  misc_feature (1)..(25): SEQ ID NO: 1226; WAN024DKG_at; Start 496; Stop 520
catggagagtgtacatttatgaatg

SEQ ID NO: 161376 - DNA, 25 bp, Artificial
  probe
  misc_feature (1)..(25): SEQ ID NO: 1226; WAN024DKG_at; Start 667; Stop 691
gacatgcttacagaggatgacttta

SEQ ID NO: 161377 - DNA, 25 bp, Artificial
  probe
  misc_feature (1)..(25): SEQ ID NO: 1226; WAN024DKG_at; Start 448; Stop 472
gctaaataccatgtgaatacactga

SEQ ID NO: 161378 - DNA, 25 bp, Artificial
  probe
  misc_feature (1)..(25): SEQ ID NO: 1226; WAN024DKG_at; Start 620; Stop 644
tagtcggaattggtgattttagcaa

SEQ ID NO: 161379 - DNA, 25 bp, Artificial
  probe
  misc_feature (1)..(25): SEQ ID NO: 1226; WAN024DKG_at; Start 954; Stop 978
gacttttagagagattctaggtgag

SEQ ID NO: 161380 - DNA, 25 bp, Artificial
  probe
  misc_feature (1)..(25): SEQ ID NO: 1226; WAN024DKG_at; Start 60; Stop 84
cttaaatcagtcacaaatagcagca

SEQ ID NO: 161381 - DNA, 25 bp, Artificial
  probe
  misc_feature (1)..(25): SEQ ID NO: 1226; WAN024DKG_at; Start 520; Stop 544
gcaacgattgtgcaagaaaataaat

SEQ ID NO: 161382 - DNA, 25 bp, Artificial
  probe
  misc_feature (1)..(25): SEQ ID NO: 1226; WAN024DKG_at; Start 509; Stop 533
catttatgaatgcaacgattgtgca

SEQ ID NO: 161383 - DNA, 25 bp, Artificial
  probe
  misc_feature (1)..(25): SEQ ID NO: 1226; WAN024DKG_at; Start 405; Stop 429
tgttcacttctatcctctagcaggt

SEQ ID NO: 161384 - DNA, 25 bp, Artificial
  probe
  misc_feature (1)..(25): SEQ ID NO: 722; WAN024DKH_at; Start 532; Stop 556
ggaaaagatttaatgcgcagtgagg

SEQ ID NO: 161385 - DNA, 25 bp, Artificial
  probe
  misc_feature (1)..(25): SEQ ID NO: 722; WAN024DKH_at; Start 646; Stop 670
gctttaagtcaagtctatgaagtaa

SEQ ID NO: 161386 - DNA, 25 bp, Artificial
  probe
  misc_feature (1)..(25): SEQ ID NO: 722; WAN024DKH_at; Start 296; Stop 320
tacttgctgaggaaatttgcaagca

SEQ ID NO: 161387 - DNA, 25 bp, Artificial
  probe
  misc_feature (1)..(25): SEQ ID NO: 722; WAN024DKH_at; Start 168; Stop 192
tagtggagatgacttaaatgtacgt

SEQ ID NO: 161388 - DNA, 25 bp, Artificial
  probe
  misc_feature (1)..(25): SEQ ID NO: 722; WAN024DKH_at; Start 156; Stop 180
tgctgtattaaatagtggagatgac

SEQ ID NO: 161389 - DNA, 25 bp, Artificial
  probe
  misc_feature (1)..(25): SEQ ID NO: 722; WAN024DKH_at; Start 456; Stop 480
agaaatgatacagacttttcatgtg

SEQ ID NO: 161390 - DNA, 25 bp, Artificial
  probe
  misc_feature (1)..(25): SEQ ID NO: 722; WAN024DKH_at; Start 124; Stop 148
tcaaaaggtttattacacagagagc

SEQ ID NO: 161391 - DNA, 25 bp, Artificial
  probe
  misc_feature (1)..(25): SEQ ID NO: 722; WAN024DKH_at; Start 34; Stop 58
tcagaatatgaaaagatcgacgtta

SEQ ID NO: 161392 - DNA, 25 bp, Artificial
  probe
  misc_feature (1)..(25): SEQ ID NO: 722; WAN024DKH_at; Start 139; Stop 163
cacagagagcatggatatgctgtat

SEQ ID NO: 161393 - DNA, 25 bp, Artificial
  probe
  misc_feature (1)..(25): SEQ ID NO: 722; WAN024DKH_at; Start 178; Stop 202
gacttaaatgtacgtttgtcaatta

SEQ ID NO: 161394 - DNA, 25 bp, Artificial
  probe
  misc_feature (1)..(25): SEQ ID NO: 722; WAN024DKH_at; Start 213; Stop 237
taagagaaaaattgttcaggaagca

SEQ ID NO: 161395 - DNA, 25 bp, Artificial
  probe
  misc_feature (1)..(25): SEQ ID NO: 722; WAN024DKH_at; Start 312; Stop 336
ttgcaagcaaaaaagaaatgttacg

SEQ ID NO: 161396 - DNA, 25 bp, Artificial
  probe
  misc_feature (1)..(25): SEQ ID NO: 722; WAN024DKH_at; Start 598; Stop 622
ctaactgactcaagtaaatttgata

SEQ ID NO: 161397 - DNA, 25 bp, Artificial
  probe
  misc_feature (1)..(25): SEQ ID NO: 722; WAN024DKH_at; Start 712; Stop 736
gaaaatgctgggataatggttaagg

SEQ ID NO: 161398 - DNA, 25 bp, Artificial
  probe
  misc_feature (1)..(25): SEQ ID NO: 722; WAN024DKH_at; Start 445; Stop 469
cctttattaaaagaaatgatacaga

SEQ ID NO: 161399 - DNA, 25 bp, Artificial
  probe
  misc_feature (1)..(25): SEQ ID NO: 722; WAN024DKH_at; Start 542; Stop 566
taatgcgcagtgaggtagttcaata

SEQ ID NO: 161400 - DNA, 25 bp, Artificial
  probe
  misc_feature (1)..(25): SEQ ID NO: 722; WAN024DKH_at; Start 274; Stop 298
gaatctggatcgacctgtgctttac

SEQ ID NO: 161401 - DNA, 25 bp, Artificial
  probe
  misc_feature (1)..(25): SEQ ID NO: 722; WAN024DKH_at; Start 632; Stop 656
cagtaagaagatttgctttaagtca

SEQ ID NO: 161402 - DNA, 25 bp, Artificial
  probe
  misc_feature (1)..(25): SEQ ID NO: 722; WAN024DKH_at; Start 362; Stop 386
caaattttgtgagagcttatgattc

SEQ ID NO: 161403 - DNA, 25 bp, Artificial
  probe
  misc_feature (1)..(25): SEQ ID NO: 722; WAN024DKH_at; Start 134; Stop 158
tattacacagagagcatggatatgc

SEQ ID NO: 161404 - DNA, 25 bp, Artificial
  probe
  misc_feature (1)..(25): SEQ ID NO: 722; WAN024DKH_at; Start 488; Stop 512
cttttgttgggacagatggttacga

SEQ ID NO: 161405 - DNA, 25 bp, Artificial
  probe
  misc_feature (1)..(25): SEQ ID NO: 722; WAN024DKH_at; Start 661; Stop 685
tatgaagtaataacagacgaaaaac

SEQ ID NO: 161406 - DNA, 25 bp, Artificial
  probe
  misc_feature (1)..(25): SEQ ID NO: 722; WAN024DKH_at; Start 228; Stop 252
tcaggaagcagtaaaattggtgtca

SEQ ID NO: 161407 - DNA, 25 bp, Artificial
  probe
  misc_feature (1)..(25): SEQ ID NO: 722; WAN024DKH_at; Start 246; Stop 270
ggtgtcagataatgaaacaataatg

SEQ ID NO: 161408 - DNA, 25 bp, Artificial
  probe
  misc_feature (1)..(25): SEQ ID NO: 722; WAN024DKH_at; Start 684; Stop 708
actttctaaacaaaatatagctaca

SEQ ID NO: 161409 - DNA, 25 bp, Artificial
  probe
  misc_feature (1)..(25): SEQ ID NO: 722; WAN024DKH_at; Start 502; Stop 526
gatggttacgataaagagatgggct

SEQ ID NO: 161410 - DNA, 25 bp, Artificial
  probe
  misc_feature (1)..(25): SEQ ID NO: 722; WAN024DKH_at; Start 62; Stop 86
cattatcggaaaaattaaatgtatc

SEQ ID NO: 161411 - DNA, 25 bp, Artificial
  probe
  misc_feature (1)..(25): SEQ ID NO: 722; WAN024DKH_at; Start 48; Stop 72
gatcgacgttaatacattatcggaa

SEQ ID NO: 161412 - DNA, 25 bp, Artificial
  probe
  misc_feature (1)..(25): SEQ ID NO: 722; WAN024DKH_at; Start 553; Stop 577
gaggtagttcaatatatttcagcag

SEQ ID NO: 161413 - DNA, 25 bp, Artificial
  probe
  misc_feature (1)..(25): SEQ ID NO: 722; WAN024DKH_at; Start 285; Stop 309
gacctgtgctttacttgctgaggaa

SEQ ID NO: 161414 - DNA, 25 bp, Artificial
  probe
  misc_feature (1)..(25): SEQ ID NO: 722; WAN024DKH_at; Start 368; Stop 392
ttgtgagagcttatgattcatgtcg

SEQ ID NO: 161415 - DNA, 25 bp, Artificial
  probe
  misc_feature (1)..(25): SEQ ID NO: 722; WAN024DKH_at; Start 263; Stop 287
caataatgatagaatctggatcgac

SEQ ID NO: 161416 - DNA, 25 bp, Artificial
  probe
  misc_feature (1)..(25): SEQ ID NO: 722; WAN024DKH_at; Start 699; Stop 723
tatagctacattagaaaatgctggg

SEQ ID NO: 161417 - DNA, 25 bp, Artificial
  probe
  misc_feature (1)..(25): SEQ ID NO: 722; WAN024DKH_at; Start 483; Stop 507
tcaagcttttgttgggacagatggt

SEQ ID NO: 161418 - DNA, 25 bp, Artificial
  probe
  misc_feature (1)..(25): SEQ ID NO: 6814; WAN024DKI_at; Start 45; Stop 69
atacccggaccgtcatgaattgaaa

SEQ ID NO: 161419 - DNA, 25 bp, Artificial
  probe
  misc_feature (1)..(25): SEQ ID NO: 6814; WAN024DKI_at; Start 55; Stop 79
cgtcatgaattgaaaagtgttgaat

SEQ ID NO: 161420 - DNA, 25 bp, Artificial
  probe
  misc_feature (1)..(25): SEQ ID NO: 6814; WAN024DKI_at; Start 54; Stop 78
ccgtcatgaattgaaaagtgttgaa

SEQ ID NO: 161421 - DNA, 25 bp, Artificial
  probe
  misc_feature (1)..(25): SEQ ID NO: 6814; WAN024DKI_at; Start 37; Stop 61
ttgtacgaatacccggaccgtcatg

SEQ ID NO: 161422 - DNA, 25 bp, Artificial
  probe
  misc_feature (1)..(25): SEQ ID NO: 6814; WAN024DKI_at; Start 49; Stop 73
ccggaccgtcatgaattgaaaagtg

SEQ ID NO: 161423 - DNA, 25 bp, Artificial
  probe
  misc_feature (1)..(25): SEQ ID NO: 6814; WAN024DKI_at; Start 46; Stop 70
tacccggaccgtcatgaattgaaaa

SEQ ID NO: 161424 - DNA, 25 bp, Artificial
  probe
  misc_feature (1)..(25): SEQ ID NO: 6814; WAN024DKI_at; Start 51; Stop 75
ggaccgtcatgaattgaaaagtgtt

SEQ ID NO: 161425 - DNA, 25 bp, Artificial
  probe
  misc_feature (1)..(25): SEQ ID NO: 6814; WAN024DKI_at; Start 8; Stop 32
gcgcagaggacatccttttaaaaaa

SEQ ID NO: 161426 - DNA, 25 bp, Artificial
  probe
  misc_feature (1)..(25): SEQ ID NO: 6814; WAN024DKI_at; Start 1; Stop 25
atggacagcgcagaggacatccttt

SEQ ID NO: 161427 - DNA, 25 bp, Artificial
  probe
  misc_feature (1)..(25): SEQ ID NO: 6814; WAN024DKI_at; Start 44; Stop 68
aatacccggaccgtcatgaattgaa

SEQ ID NO: 161428 - DNA, 25 bp, Artificial
  probe
  misc_feature (1)..(25): SEQ ID NO: 6814; WAN024DKI_at; Start 48; Stop 72
cccggaccgtcatgaattgaaaagt

SEQ ID NO: 161429 - DNA, 25 bp, Artificial
  probe
  misc_feature (1)..(25): SEQ ID NO: 6814; WAN024DKI_at; Start 6; Stop 30
cagcgcagaggacatccttttaaaa

SEQ ID NO: 161430 - DNA, 25 bp, Artificial
  probe
  misc_feature (1)..(25): SEQ ID NO: 6814; WAN024DKI_at; Start 39; Stop 63
gtacgaatacccggaccgtcatgaa

SEQ ID NO: 161431 - DNA, 25 bp, Artificial
  probe
  misc_feature (1)..(25): SEQ ID NO: 6814; WAN024DKI_at; Start 56; Stop 80
gtcatgaattgaaaagtgttgaata

SEQ ID NO: 161432 - DNA, 25 bp, Artificial
  probe
  misc_feature (1)..(25): SEQ ID NO: 6814; WAN024DKI_at; Start 53; Stop 77
accgtcatgaattgaaaagtgttga

SEQ ID NO: 161433 - DNA, 25 bp, Artificial
  probe
  misc_feature (1)..(25): SEQ ID NO: 6814; WAN024DKI_at; Start 47; Stop 71
acccggaccgtcatgaattgaaaag

SEQ ID NO: 161434 - DNA, 25 bp, Artificial
  probe
  misc_feature (1)..(25): SEQ ID NO: 6814; WAN024DKI_at; Start 7; Stop 31
agcgcagaggacatccttttaaaaa

SEQ ID NO: 161435 - DNA, 25 bp, Artificial
  probe
  misc_feature (1)..(25): SEQ ID NO: 6814; WAN024DKI_at; Start 4; Stop 28
gacagcgcagaggacatccttttaa

SEQ ID NO: 161436 - DNA, 25 bp, Artificial
  probe
  misc_feature (1)..(25): SEQ ID NO: 6814; WAN024DKI_at; Start 2; Stop 26
tggacagcgcagaggacatcctttt

SEQ ID NO: 161437 - DNA, 25 bp, Artificial
  probe
  misc_feature (1)..(25): SEQ ID NO: 6814; WAN024DKI_at; Start 52; Stop 76
gaccgtcatgaattgaaaagtgttg

SEQ ID NO: 161438 - DNA, 25 bp, Artificial
  probe
  misc_feature (1)..(25): SEQ ID NO: 6814; WAN024DKI_at; Start 57; Stop 81
tcatgaattgaaaagtgttgaatat

SEQ ID NO: 161439 - DNA, 25 bp, Artificial
  probe
  misc_feature (1)..(25): SEQ ID NO: 6814; WAN024DKI_at; Start 41; Stop 65
acgaatacccggaccgtcatgaatt

SEQ ID NO: 161440 - DNA, 25 bp, Artificial
  probe
  misc_feature (1)..(25): SEQ ID NO: 6814; WAN024DKI_at; Start 43; Stop 67
gaatacccggaccgtcatgaattga

SEQ ID NO: 161441 - DNA, 25 bp, Artificial
  probe
  misc_feature (1)..(25): SEQ ID NO: 6814; WAN024DKI_at; Start 40; Stop 64
tacgaatacccggaccgtcatgaat

SEQ ID NO: 161442 - DNA, 25 bp, Artificial
  probe
  misc_feature (1)..(25): SEQ ID NO: 6814; WAN024DKI_at; Start 42; Stop 66
cgaatacccggaccgtcatgaattg

SEQ ID NO: 161443 - DNA, 25 bp, Artificial
  probe
  misc_feature (1)..(25): SEQ ID NO: 6814; WAN024DKI_at; Start 50; Stop 74
cggaccgtcatgaattgaaaagtgt

SEQ ID NO: 161444 - DNA, 25 bp, Artificial
  probe
  misc_feature (1)..(25): SEQ ID NO: 6814; WAN024DKI_at; Start 38; Stop 62
tgtacgaatacccggaccgtcatga

SEQ ID NO: 161445 - DNA, 25 bp, Artificial
  probe
  misc_feature (1)..(25): SEQ ID NO: 6814; WAN024DKI_at; Start 3; Stop 27
ggacagcgcagaggacatcctttta

SEQ ID NO: 161446 - DNA, 25 bp, Artificial
  probe
  misc_feature (1)..(25): SEQ ID NO: 6814; WAN024DKI_at; Start 5; Stop 29
acagcgcagaggacatccttttaaa

SEQ ID NO: 161447 - DNA, 25 bp, Artificial
  probe
  misc_feature (1)..(25): SEQ ID NO: 2158; WAN024DKJ_at; Start 179; Stop 203
ccttagtcggtgaagaaaagactgt

SEQ ID NO: 161448 - DNA, 25 bp, Artificial
  probe
  misc_feature (1)..(25): SEQ ID NO: 2158; WAN024DKJ_at; Start 417; Stop 441
tatctacacagacctaaaacattat

SEQ ID NO: 161449 - DNA, 25 bp, Artificial
  probe
  misc_feature (1)..(25): SEQ ID NO: 2158; WAN024DKJ_at; Start 166; Stop 190
cgagagaaattcaccttagtcggtg

SEQ ID NO: 161450 - DNA, 25 bp, Artificial
  probe
  misc_feature (1)..(25): SEQ ID NO: 2158; WAN024DKJ_at; Start 201; Stop 225
tgtagaagaaattattacagaggta

SEQ ID NO: 161451 - DNA, 25 bp, Artificial
  probe
  misc_feature (1)..(25): SEQ ID NO: 2158; WAN024DKJ_at; Start 320; Stop 344
taaaatcagctaaagaacatcacat

SEQ ID NO: 161452 - DNA, 25 bp, Artificial
  probe
  misc_feature (1)..(25): SEQ ID NO: 2158; WAN024DKJ_at; Start 110; Stop 134
ggtgttctaatcctgaatctcaaag

SEQ ID NO: 161453 - DNA, 25 bp, Artificial
  probe
  misc_feature (1)..(25): SEQ ID NO: 2158; WAN024DKJ_at; Start 121; Stop 145
cctgaatctcaaagaatgaaacctg

SEQ ID NO: 161454 - DNA, 25 bp, Artificial
  probe
  misc_feature (1)..(25): SEQ ID NO: 2158; WAN024DKJ_at; Start 137; Stop 161
tgaaacctgaaaaaatgaaagatgc

SEQ ID NO: 161455 - DNA, 25 bp, Artificial
  probe
  misc_feature (1)..(25): SEQ ID NO: 2158; WAN024DKJ_at; Start 260; Stop 284
gaggtttaactttatcaggaggtga

SEQ ID NO: 161456 - DNA, 25 bp, Artificial
  probe
  misc_feature (1)..(25): SEQ ID NO: 2158; WAN024DKJ_at; Start 148; Stop 172
aaaatgaaagatgctcaacgagaga

SEQ ID NO: 161457 - DNA, 25 bp, Artificial
  probe
  misc_feature (1)..(25): SEQ ID NO: 2158; WAN024DKJ_at; Start 98; Stop 122
tgcgctgtccatggtgttctaatcc

SEQ ID NO: 161458 - DNA, 25 bp, Artificial
  probe
  misc_feature (1)..(25): SEQ ID NO: 2158; WAN024DKJ_at; Start 632; Stop 656
tactcccttttcatcaatttggtga

SEQ ID NO: 161459 - DNA, 25 bp, Artificial
  probe
  misc_feature (1)..(25): SEQ ID NO: 2158; WAN024DKJ_at; Start 305; Stop 329
ttgctaaagccatcttaaaatcagc

SEQ ID NO: 161460 - DNA, 25 bp, Artificial
  probe
  misc_feature (1)..(25): SEQ ID NO: 2158; WAN024DKJ_at; Start 32; Stop 56
ttcaacacttttcaattcatgacgg

SEQ ID NO: 161461 - DNA, 25 bp, Artificial
  probe
  misc_feature (1)..(25): SEQ ID NO: 2158; WAN024DKJ_at; Start 602; Stop 626
ttaactcattaaatatcgaccaagt

SEQ ID NO: 161462 - DNA, 25 bp, Artificial
  probe
  misc_feature (1)..(25): SEQ ID NO: 2158; WAN024DKJ_at; Start 287; Stop 311
tatttgctcagtttgaatttgctaa

SEQ ID NO: 161463 - DNA, 25 bp, Artificial
  probe
  misc_feature (1)..(25): SEQ ID NO: 2158; WAN024DKJ_at; Start 730; Stop 754
gattatcaaaaggtatttctgaacc

SEQ ID NO: 161464 - DNA, 25 bp, Artificial
  probe
  misc_feature (1)..(25): SEQ ID NO: 2158; WAN024DKJ_at; Start 349; Stop 373
actgccattgaaactactgcctttg

SEQ ID NO: 161465 - DNA, 25 bp, Artificial
  probe
  misc_feature (1)..(25): SEQ ID NO: 2158; WAN024DKJ_at; Start 334; Stop 358
gaacatcacatacacactgccattg

SEQ ID NO: 161466 - DNA, 25 bp, Artificial
  probe
  misc_feature (1)..(25): SEQ ID NO: 2158; WAN024DKJ_at; Start 577; Stop 601
gatgcagaaaaattcgctactctat

SEQ ID NO: 161467 - DNA, 25 bp, Artificial
  probe
  misc_feature (1)..(25): SEQ ID NO: 2158; WAN024DKJ_at; Start 406; Stop 430
tatgtggattttatctacacagacc

SEQ ID NO: 161468 - DNA, 25 bp, Artificial
  probe
  misc_feature (1)..(25): SEQ ID NO: 2158; WAN024DKJ_at; Start 674; Stop 698
taaatcggaaatatgaaatggatgg

SEQ ID NO: 161469 - DNA, 25 bp, Artificial
  probe
  misc_feature (1)..(25): SEQ ID NO: 2158; WAN024DKJ_at; Start 363; Stop 387
tactgcctttgttgatcatgaaaaa

SEQ ID NO: 161470 - DNA, 25 bp, Artificial
  probe
  misc_feature (1)..(25): SEQ ID NO: 2158; WAN024DKJ_at; Start 84; Stop 108
aaaaggatgtcctctgcgctgtcca

SEQ ID NO: 161471 - DNA, 25 bp, Artificial
  probe
  misc_feature (1)..(25): SEQ ID NO: 2158; WAN024DKJ_at; Start 615; Stop 639
tatcgaccaagttcaactactccct

SEQ ID NO: 161472 - DNA, 25 bp, Artificial
  probe
  misc_feature (1)..(25): SEQ ID NO: 2158; WAN024DKJ_at; Start 272; Stop 296
tatcaggaggtgaaatatttgctca

SEQ ID NO: 161473 - DNA, 25 bp, Artificial
  probe
  misc_feature (1)..(25): SEQ ID NO: 2158; WAN024DKJ_at; Start 186; Stop 210
cggtgaagaaaagactgtagaagaa

SEQ ID NO: 161474 - DNA, 25 bp, Artificial
  probe
  misc_feature (1)..(25): SEQ ID NO: 2158; WAN024DKJ_at; Start 78; Stop 102
ttttttaaaaggatgtcctctgcgc

SEQ ID NO: 161475 - DNA, 25 bp, Artificial
  probe
  misc_feature (1)..(25): SEQ ID NO: 2158; WAN024DKJ_at; Start 741; Stop 765
ggtatttctgaaccaccatattaat

SEQ ID NO: 161476 - DNA, 25 bp, Artificial
  probe
  misc_feature (1)..(25): SEQ ID NO: 2158; WAN024DKJ_at; Start 157; Stop 181
gatgctcaacgagagaaattcacct

SEQ ID NO: 161477 - DNA, 25 bp, Artificial
  probe
  misc_feature (1)..(25): SEQ ID NO: 2158; WAN024DKJ_at; Start 216; Stop 240
tacagaggtattaaaagacaaagaa

SEQ ID NO: 161478 - DNA, 25 bp, Artificial
  probe
  misc_feature (1)..(25): SEQ ID NO: 2158; WAN024DKJ_at; Start 527; Stop 551
ctatcgttttaagaatcccagttat

SEQ ID NO: 161479 - DNA, 25 bp, Artificial
  probe
  misc_feature (1)..(25): SEQ ID NO: 2158; WAN024DKJ_at; Start 446; Stop 470
ctataaaacataaaaaagtgactgg

SEQ ID NO: 161480 - DNA, 25 bp, Artificial
  probe
  misc_feature (1)..(25): SEQ ID NO: 2158; WAN024DKJ_at; Start 569; Stop 593
gtttagaggatgcagaaaaattcgc

SEQ ID NO: 161481 - DNA, 25 bp, Artificial
  probe
  misc_feature (1)..(25): SEQ ID NO: 1452; WAN024DKK_at; Start 45; Stop 69
tatagataagatggctgaatctccc

SEQ ID NO: 161482 - DNA, 25 bp, Artificial
  probe
  misc_feature (1)..(25): SEQ ID NO: 1452; WAN024DKK_at; Start 49; Stop 73
gataagatggctgaatctcccaact

SEQ ID NO: 161483 - DNA, 25 bp, Artificial
  probe
  misc_feature (1)..(25): SEQ ID NO: 1452; WAN024DKK_at; Start 38; Stop 62
aacaagctatagataagatggctga

SEQ ID NO: 161484 - DNA, 25 bp, Artificial
  probe
  misc_feature (1)..(25): SEQ ID NO: 1452; WAN024DKK_at; Start 159; Stop 183
cccaaagaaattgaaatcactcgga

SEQ ID NO: 161485 - DNA, 25 bp, Artificial
  probe
  misc_feature (1)..(25): SEQ ID NO: 1452; WAN024DKK_at; Start 87; Stop 111
tatctctgaccaagttggattttca

SEQ ID NO: 161486 - DNA, 25 bp, Artificial
  probe
  misc_feature (1)..(25): SEQ ID NO: 1452; WAN024DKK_at; Start 167; Stop 191
aattgaaatcactcggaagaatagt

SEQ ID NO: 161487 - DNA, 25 bp, Artificial
  probe
  misc_feature (1)..(25): SEQ ID NO: 1452; WAN024DKK_at; Start 35; Stop 59
tgaaacaagctatagataagatggc

SEQ ID NO: 161488 - DNA, 25 bp, Artificial
  probe
  misc_feature (1)..(25): SEQ ID NO: 1452; WAN024DKK_at; Start 112; Stop 136
gactataaatattttgccaaagtat

SEQ ID NO: 161489 - DNA, 25 bp, Artificial
  probe
  misc_feature (1)..(25): SEQ ID NO: 1452; WAN024DKK_at; Start 126; Stop 150
tgccaaagtatttaaaaagtatctc

SEQ ID NO: 161490 - DNA, 25 bp, Artificial
  probe
  misc_feature (1)..(25): SEQ ID NO: 1452; WAN024DKK_at; Start 3; Stop 27
gactctaaatgaatatatcttacaa

SEQ ID NO: 161491 - DNA, 25 bp, Artificial
  probe
  misc_feature (1)..(25): SEQ ID NO: 1452; WAN024DKK_at; Start 157; Stop 181
tccccaaagaaattgaaatcactcg

SEQ ID NO: 161492 - DNA, 25 bp, Artificial
  probe
  misc_feature (1)..(25): SEQ ID NO: 1452; WAN024DKK_at; Start 25; Stop 49
caatatcgcctgaaacaagctatag

SEQ ID NO: 161493 - DNA, 25 bp, Artificial
  probe
  misc_feature (1)..(25): SEQ ID NO: 1452; WAN024DKK_at; Start 83; Stop 107
gcgctatctctgaccaagttggatt

SEQ ID NO: 161494 - DNA, 25 bp, Artificial
  probe
  misc_feature (1)..(25): SEQ ID NO: 1452; WAN024DKK_at; Start 77; Stop 101
ctttaagcgctatctctgaccaagt

SEQ ID NO: 161495 - DNA, 25 bp, Artificial
  probe
  misc_feature (1)..(25): SEQ ID NO: 1452; WAN024DKK_at; Start 80; Stop 104
taagcgctatctctgaccaagttgg

SEQ ID NO: 161496 - DNA, 25 bp, Artificial
  probe
  misc_feature (1)..(25): SEQ ID NO: 1452; WAN024DKK_at; Start 165; Stop 189
gaaattgaaatcactcggaagaata

SEQ ID NO: 161497 - DNA, 25 bp, Artificial
  probe
  misc_feature (1)..(25): SEQ ID NO: 1452; WAN024DKK_at; Start 142; Stop 166
aagtatctccatatttccccaaaga

SEQ ID NO: 161498 - DNA, 25 bp, Artificial
  probe
  misc_feature (1)..(25): SEQ ID NO: 1452; WAN024DKK_at; Start 13; Stop 37
gaatatatcttacaatatcgcctga

SEQ ID NO: 161499 - DNA, 25 bp, Artificial
  probe
  misc_feature (1)..(25): SEQ ID NO: 1452; WAN024DKK_at; Start 30; Stop 54
tcgcctgaaacaagctatagataag

SEQ ID NO: 161500 - DNA, 25 bp, Artificial
  probe
  misc_feature (1)..(25): SEQ ID NO: 1452; WAN024DKK_at; Start 75; Stop 99
ccctttaagcgctatctctgaccaa

SEQ ID NO: 161501 - DNA, 25 bp, Artificial
  probe
  misc_feature (1)..(25): SEQ ID NO: 1452; WAN024DKK_at; Start 161; Stop 185
caaagaaattgaaatcactcggaag

SEQ ID NO: 161502 - DNA, 25 bp, Artificial
  probe
  misc_feature (1)..(25): SEQ ID NO: 1452; WAN024DKK_at; Start 52; Stop 76
aagatggctgaatctcccaactccc

SEQ ID NO: 161503 - DNA, 25 bp, Artificial
  probe
  misc_feature (1)..(25): SEQ ID NO: 1452; WAN024DKK_at; Start 81; Stop 105
aagcgctatctctgaccaagttgga

SEQ ID NO: 161504 - DNA, 25 bp, Artificial
  probe
  misc_feature (1)..(25): SEQ ID NO: 1452; WAN024DKK_at; Start 23; Stop 47
tacaatatcgcctgaaacaagctat

SEQ ID NO: 161505 - DNA, 25 bp, Artificial
  probe
  misc_feature (1)..(25): SEQ ID NO: 1452; WAN024DKK_at; Start 138; Stop 162
taaaaagtatctccatatttcccca

SEQ ID NO: 161506 - DNA, 25 bp, Artificial
  probe
  misc_feature (1)..(25): SEQ ID NO: 1452; WAN024DKK_at; Start 40; Stop 64
caagctatagataagatggctgaat

SEQ ID NO: 161507 - DNA, 25 bp, Artificial
  probe
  misc_feature (1)..(25): SEQ ID NO: 1452; WAN024DKK_at; Start 70; Stop 94
aactcccctttaagcgctatctctg

SEQ ID NO: 161508 - DNA, 25 bp, Artificial
  probe
  misc_feature (1)..(25): SEQ ID NO: 1452; WAN024DKK_at; Start 18; Stop 42
tatcttacaatatcgcctgaaacaa

SEQ ID NO: 161509 - DNA, 25 bp, Artificial
  probe
  misc_feature (1)..(25): SEQ ID NO: 1452; WAN024DKK_at; Start 109; Stop 133
tcagactataaatattttgccaaag

SEQ ID NO: 161510 - DNA, 25 bp, Artificial
  probe
  misc_feature (1)..(25): SEQ ID NO: 1452; WAN024DKK_at; Start 92; Stop 116
ctgaccaagttggattttcagacta

SEQ ID NO: 161511 - DNA, 25 bp, Artificial
  probe
  misc_feature (1)..(25): SEQ ID NO: 1452; WAN024DKK_at; Start 32; Stop 56
gcctgaaacaagctatagataagat

SEQ ID NO: 161512 - DNA, 25 bp, Artificial
  probe
  misc_feature (1)..(25): SEQ ID NO: 1452; WAN024DKK_at; Start 144; Stop 168
gtatctccatatttccccaaagaaa

SEQ ID NO: 161513 - DNA, 25 bp, Artificial
  probe
  misc_feature (1)..(25): SEQ ID NO: 1452; WAN024DKK_at; Start 51; Stop 75
taagatggctgaatctcccaactcc

SEQ ID NO: 161514 - DNA, 25 bp, Artificial
  probe
  misc_feature (1)..(25): SEQ ID NO: 1452; WAN024DKK_at; Start 47; Stop 71
tagataagatggctgaatctcccaa

SEQ ID NO: 161515 - DNA, 25 bp, Artificial
  probe
  misc_feature (1)..(25): SEQ ID NO: 2247; WAN024DKL_at; Start 600; Stop 624
actagcagctccttgcttgtattta

SEQ ID NO: 161516 - DNA, 25 bp, Artificial
  probe
  misc_feature (1)..(25): SEQ ID NO: 2247; WAN024DKL_at; Start 321; Stop 345
tcctttcgtaggagcctactcctgg

SEQ ID NO: 161517 - DNA, 25 bp, Artificial
  probe
  misc_feature (1)..(25): SEQ ID NO: 2247; WAN024DKL_at; Start 369; Stop 393
ggtcatcactaaatttttgacaaat

SEQ ID NO: 161518 - DNA, 25 bp, Artificial
  probe
  misc_feature (1)..(25): SEQ ID NO: 2247; WAN024DKL_at; Start 532; Stop 556
gaaagcatggggtccttcggattta

SEQ ID NO: 161519 - DNA, 25 bp, Artificial
  probe
  misc_feature (1)..(25): SEQ ID NO: 2247; WAN024DKL_at; Start 86; Stop 110
ttaccgtgctcaagcaagcacttat

SEQ ID NO: 161520 - DNA, 25 bp, Artificial
  probe
  misc_feature (1)..(25): SEQ ID NO: 2247; WAN024DKL_at; Start 508; Stop 532
gacaattctctacttgaagcagctg

SEQ ID NO: 161521 - DNA, 25 bp, Artificial
  probe
  misc_feature (1)..(25): SEQ ID NO: 2247; WAN024DKL_at; Start 310; Stop 334
tccatgtcagctcctttcgtaggag

SEQ ID NO: 161522 - DNA, 25 bp, Artificial
  probe
  misc_feature (1)..(25): SEQ ID NO: 2247; WAN024DKL_at; Start 314; Stop 338
tgtcagctcctttcgtaggagccta

SEQ ID NO: 161523 - DNA, 25 bp, Artificial
  probe
  misc_feature (1)..(25): SEQ ID NO: 2247; WAN024DKL_at; Start 494; Stop 518
caatgaacagtattgacaattctct

SEQ ID NO: 161524 - DNA, 25 bp, Artificial
  probe
  misc_feature (1)..(25): SEQ ID NO: 2247; WAN024DKL_at; Start 444; Stop 468
tgtctttacactgcaactattccca

SEQ ID NO: 161525 - DNA, 25 bp, Artificial
  probe
  misc_feature (1)..(25): SEQ ID NO: 2247; WAN024DKL_at; Start 232; Stop 256
ggaaccctattagcttatctcttct

SEQ ID NO: 161526 - DNA, 25 bp, Artificial
  probe
  misc_feature (1)..(25): SEQ ID NO: 2247; WAN024DKL_at; Start 464; Stop 488
tcccactggtatttctatatgttgc

SEQ ID NO: 161527 - DNA, 25 bp, Artificial
  probe
  misc_feature (1)..(25): SEQ ID NO: 2247; WAN024DKL_at; Start 479; Stop 503
tatatgttgctggaacaatgaacag

SEQ ID NO: 161528 - DNA, 25 bp, Artificial
  probe
  misc_feature (1)..(25): SEQ ID NO: 2247; WAN024DKL_at; Start 124; Stop 148
ttctcactagctaattttgtcactt

SEQ ID NO: 161529 - DNA, 25 bp, Artificial
  probe
  misc_feature (1)..(25): SEQ ID NO: 2247; WAN024DKL_at; Start 452; Stop 476
cactgcaactattcccactggtatt

SEQ ID NO: 161530 - DNA, 25 bp, Artificial
  probe
  misc_feature (1)..(25): SEQ ID NO: 2247; WAN024DKL_at; Start 228; Stop 252
tgtaggaaccctattagcttatctc

SEQ ID NO: 161531 - DNA, 25 bp, Artificial
  probe
  misc_feature (1)..(25): SEQ ID NO: 2247; WAN024DKL_at; Start 222; Stop 246
cttagttgtaggaaccctattagct

SEQ ID NO: 161532 - DNA, 25 bp, Artificial
  probe
  misc_feature (1)..(25): SEQ ID NO: 2247; WAN024DKL_at; Start 375; Stop 399
cactaaatttttgacaaatgccctt

SEQ ID NO: 161533 - DNA, 25 bp, Artificial
  probe
  misc_feature (1)..(25): SEQ ID NO: 2247; WAN024DKL_at; Start 296; Stop 320
tgattatcattgcttccatgtcagc

SEQ ID NO: 161534 - DNA, 25 bp, Artificial
  probe
  misc_feature (1)..(25): SEQ ID NO: 2247; WAN024DKL_at; Start 518; Stop 542
tacttgaagcagctgaaagcatggg

SEQ ID NO: 161535 - DNA, 25 bp, Artificial
  probe
  misc_feature (1)..(25): SEQ ID NO: 2247; WAN024DKL_at; Start 448; Stop 472
tttacactgcaactattcccactgg

SEQ ID NO: 161536 - DNA, 25 bp, Artificial
  probe
  misc_feature (1)..(25): SEQ ID NO: 2247; WAN024DKL_at; Start 307; Stop 331
gcttccatgtcagctcctttcgtag

SEQ ID NO: 161537 - DNA, 25 bp, Artificial
  probe
  misc_feature (1)..(25): SEQ ID NO: 2247; WAN024DKL_at; Start 486; Stop 510
tgctggaacaatgaacagtattgac

SEQ ID NO: 161538 - DNA, 25 bp, Artificial
  probe
  misc_feature (1)..(25): SEQ ID NO: 2247; WAN024DKL_at; Start 594; Stop 618
aaccttactagcagctccttgcttg

SEQ ID NO: 161539 - DNA, 25 bp, Artificial
  probe
  misc_feature (1)..(25): SEQ ID NO: 2247; WAN024DKL_at; Start 514; Stop 538
tctctacttgaagcagctgaaagca

SEQ ID NO: 161540 - DNA, 25 bp, Artificial
  probe
  misc_feature (1)..(25): SEQ ID NO: 2247; WAN024DKL_at; Start 244; Stop 268
gcttatctcttctctatgtatgact

SEQ ID NO: 161541 - DNA, 25 bp, Artificial
  probe
  misc_feature (1)..(25): SEQ ID NO: 2247; WAN024DKL_at; Start 133; Stop 157
gctaattttgtcactttctttagta

SEQ ID NO: 161542 - DNA, 25 bp, Artificial
  probe
  misc_feature (1)..(25): SEQ ID NO: 2247; WAN024DKL_at; Start 284; Stop 308
ttctacaaatattgattatcattgc

SEQ ID NO: 161543 - DNA, 25 bp, Artificial
  probe
  misc_feature (1)..(25): SEQ ID NO: 2247; WAN024DKL_at; Start 161; Stop 185
cctactactctgagacactagtcaa

SEQ ID NO: 161544 - DNA, 25 bp, Artificial
  probe
  misc_feature (1)..(25): SEQ ID NO: 2247; WAN024DKL_at; Start 300; Stop 324
tatcattgcttccatgtcagctcct

SEQ ID NO: 161545 - DNA, 25 bp, Artificial
  probe
  misc_feature (1)..(25): SEQ ID NO: 2247; WAN024DKL_at; Start 169; Stop 193
tctgagacactagtcaacagtttca

SEQ ID NO: 161546 - DNA, 25 bp, Artificial
  probe
  misc_feature (1)..(25): SEQ ID NO: 2247; WAN024DKL_at; Start 89; Stop 113
ccgtgctcaagcaagcacttataca

SEQ ID NO: 161547 - DNA, 25 bp, Artificial
  probe
  misc_feature (1)..(25): SEQ ID NO: 2247; WAN024DKL_at; Start 166; Stop 190
tactctgagacactagtcaacagtt

SEQ ID NO: 161548 - DNA, 25 bp, Artificial
  probe
  misc_feature (1)..(25): SEQ ID NO: 2247; WAN024DKL_at; Start 471; Stop 495
ggtatttctatatgttgctggaaca

SEQ ID NO: 161549 - DNA, 25 bp, Artificial
  probe
  misc_feature (1)..(25): SEQ ID NO: 3113; WAN024DKM_at; Start 161; Stop 185
taaacatgttgagcttggtgtcggg

SEQ ID NO: 161550 - DNA, 25 bp, Artificial
  probe
  misc_feature (1)..(25): SEQ ID NO: 3113; WAN024DKM_at; Start 458; Stop 482
cgattggtatcatcttaacagctgg

SEQ ID NO: 161551 - DNA, 25 bp, Artificial
  probe
  misc_feature (1)..(25): SEQ ID NO: 3113; WAN024DKM_at; Start 544; Stop 568
tccatgattatctttgccgggattg

SEQ ID NO: 161552 - DNA, 25 bp, Artificial
  probe
  misc_feature (1)..(25): SEQ ID NO: 3113; WAN024DKM_at; Start 927; Stop 951
tacttctccaactggtattgccatg

SEQ ID NO: 161553 - DNA, 25 bp, Artificial
  probe
  misc_feature (1)..(25): SEQ ID NO: 3113; WAN024DKM_at; Start 899; Stop 923
taagggtagcacaagagatgttggc

SEQ ID NO: 161554 - DNA, 25 bp, Artificial
  probe
  misc_feature (1)..(25): SEQ ID NO: 3113; WAN024DKM_at; Start 829; Stop 853
agttcgattactgcagcgcctgcgg

SEQ ID NO: 161555 - DNA, 25 bp, Artificial
  probe
  misc_feature (1)..(25): SEQ ID NO: 3113; WAN024DKM_at; Start 574; Stop 598
tcaattccagagatgattcagggca

SEQ ID NO: 161556 - DNA, 25 bp, Artificial
  probe
  misc_feature (1)..(25): SEQ ID NO: 3113; WAN024DKM_at; Start 614; Stop 638
ttgtgaacgtcccaagtagccgtat

SEQ ID NO: 161557 - DNA, 25 bp, Artificial
  probe
  misc_feature (1)..(25): SEQ ID NO: 3113; WAN024DKM_at; Start 1228; Stop 1252
tctacaggtatcgaaggaatcaagc

SEQ ID NO: 161558 - DNA, 25 bp, Artificial
  probe
  misc_feature (1)..(25): SEQ ID NO: 3113; WAN024DKM_at; Start 806; Stop 830
gagttatccctgttatctttgccag

SEQ ID NO: 161559 - DNA, 25 bp, Artificial
  probe
  misc_feature (1)..(25): SEQ ID NO: 3113; WAN024DKM_at; Start 27; Stop 51
tcttaaagtcaagcaggttcgatca

SEQ ID NO: 161560 - DNA, 25 bp, Artificial
  probe
  misc_feature (1)..(25): SEQ ID NO: 3113; WAN024DKM_at; Start 518; Stop 542
cagataagggatacggaaacggtgt

SEQ ID NO: 161561 - DNA, 25 bp, Artificial
  probe
  misc_feature (1)..(25): SEQ ID NO: 3113; WAN024DKM_at; Start 1195; Stop 1219
gcctttggtggaacaagtctcttga

SEQ ID NO: 161562 - DNA, 25 bp, Artificial
  probe
  misc_feature (1)..(25): SEQ ID NO: 3113; WAN024DKM_at; Start 1117; Stop 1141
gttggttccctcttccttggtgtga

SEQ ID NO: 161563 - DNA, 25 bp, Artificial
  probe
  misc_feature (1)..(25): SEQ ID NO: 3113; WAN024DKM_at; Start 742; Stop 766
tatactaaggttgcacaaggtgctc

SEQ ID NO: 161564 - DNA, 25 bp, Artificial
  probe
  misc_feature (1)..(25): SEQ ID NO: 3113; WAN024DKM_at; Start 876; Stop 900
cacaggtcatgattgggcttgggta

SEQ ID NO: 161565 - DNA, 25 bp, Artificial
  probe
  misc_feature (1)..(25): SEQ ID NO: 3113; WAN024DKM_at; Start 1050; Stop 1074
ccatggagttcgtcctggtaaaggt

SEQ ID NO: 161566 - DNA, 25 bp, Artificial
  probe
  misc_feature (1)..(25): SEQ ID NO: 3113; WAN024DKM_at; Start 395; Stop 419
gttttaataccttggctggagctca

SEQ ID NO: 161567 - DNA, 25 bp, Artificial
  probe
  misc_feature (1)..(25): SEQ ID NO: 3113; WAN024DKM_at; Start 473; Stop 497
taacagctggtagtatgattgtcac

SEQ ID NO: 161568 - DNA, 25 bp, Artificial
  probe
  misc_feature (1)..(25): SEQ ID NO: 3113; WAN024DKM_at; Start 588; Stop 612
gattcagggcatctatgtggactac

SEQ ID NO: 161569 - DNA, 25 bp, Artificial
  probe
  misc_feature (1)..(25): SEQ ID NO: 3113; WAN024DKM_at; Start 220; Stop 244
ggagttagtccctatatcaccgctt

SEQ ID NO: 161570 - DNA, 25 bp, Artificial
  probe
  misc_feature (1)..(25): SEQ ID NO: 3113; WAN024DKM_at; Start 860; Stop 884
ttcagtttttgagtgccacaggtca

SEQ ID NO: 161571 - DNA, 25 bp, Artificial
  probe
  misc_feature (1)..(25): SEQ ID NO: 3113; WAN024DKM_at; Start 495; Stop 519
cacttggttgggtgagcaaattaca

SEQ ID NO: 161572 - DNA, 25 bp, Artificial
  probe
  misc_feature (1)..(25): SEQ ID NO: 3113; WAN024DKM_at; Start 105; Stop 129
tacagttcctggtgtgaatgccaat

SEQ ID NO: 161573 - DNA, 25 bp, Artificial
  probe
  misc_feature (1)..(25): SEQ ID NO: 3113; WAN024DKM_at; Start 559; Stop 583
gccgggattgtttcctcaattccag

SEQ ID NO: 161574 - DNA, 25 bp, Artificial
  probe
  misc_feature (1)..(25): SEQ ID NO: 3113; WAN024DKM_at; Start 999; Stop 1023
gattaatcctgaaaaagcagcagag

SEQ ID NO: 161575 - DNA, 25 bp, Artificial
  probe
  misc_feature (1)..(25): SEQ ID NO: 3113; WAN024DKM_at; Start 1032; Stop 1056
aaagagtggtgcctatatccatgga

SEQ ID NO: 161576 - DNA, 25 bp, Artificial
  probe
  misc_feature (1)..(25): SEQ ID NO: 3113; WAN024DKM_at; Start 1098; Stop 1122
tcttcgtcgtcttgcaactgttggt

SEQ ID NO: 161577 - DNA, 25 bp, Artificial
  probe
  misc_feature (1)..(25): SEQ ID NO: 3113; WAN024DKM_at; Start 1140; Stop 1164
gatttccattttaccgattgcagct

SEQ ID NO: 161578 - DNA, 25 bp, Artificial
  probe
  misc_feature (1)..(25): SEQ ID NO: 3113; WAN024DKM_at; Start 372; Stop 396
gcaatctatcgggattacagctggt

SEQ ID NO: 161579 - DNA, 25 bp, Artificial
  probe
  misc_feature (1)..(25): SEQ ID NO: 3113; WAN024DKM_at; Start 205; Stop 229
tcgatttttgccctaggagttagtc

SEQ ID NO: 161580 - DNA, 25 bp, Artificial
  probe
  misc_feature (1)..(25): SEQ ID NO: 3113; WAN024DKM_at; Start 1244; Stop 1268
gaatcaagcaattggaaggttacct

SEQ ID NO: 161581 - DNA, 25 bp, Artificial
  probe
  misc_feature (1)..(25): SEQ ID NO: 3113; WAN024DKM_at; Start 81; Stop 105
ggtctttcgtatcggaactagcatt

SEQ ID NO: 161582 - DNA, 25 bp, Artificial
  probe
  misc_feature (1)..(25): SEQ ID NO: 3113; WAN024DKM_at; Start 1282; Stop 1306
tatgttggtttcatggacagaacag

SEQ ID NO: 161583 - DNA, 25 bp, Artificial
  probe
  misc_feature (1)..(25): SEQ ID NO: 7168; WAN024DKN_at; Start 5; Stop 29
tcaatttgccaagtccaagtgctac

SEQ ID NO: 161584 - DNA, 25 bp, Artificial
  probe
  misc_feature (1)..(25): SEQ ID NO: 7168; WAN024DKN_at; Start 14; Stop 38
caagtccaagtgctacaacagtttt

SEQ ID NO: 161585 - DNA, 25 bp, Artificial
  probe
  misc_feature (1)..(25): SEQ ID NO: 7168; WAN024DKN_at; Start 50; Stop 74
gaatgcgtccgattggagacttagt

SEQ ID NO: 161586 - DNA, 25 bp, Artificial
  probe
  misc_feature (1)..(25): SEQ ID NO: 7168; WAN024DKN_at; Start 11; Stop 35
tgccaagtccaagtgctacaacagt

SEQ ID NO: 161587 - DNA, 25 bp, Artificial
  probe
  misc_feature (1)..(25): SEQ ID NO: 7168; WAN024DKN_at; Start 29; Stop 53
caacagttttacgttgtgatggaat

SEQ ID NO: 161588 - DNA, 25 bp, Artificial
  probe
  misc_feature (1)..(25): SEQ ID NO: 7168; WAN024DKN_at; Start 22; Stop 46
agtgctacaacagttttacgttgtg

SEQ ID NO: 161589 - DNA, 25 bp, Artificial
  probe
  misc_feature (1)..(25): SEQ ID NO: 7168; WAN024DKN_at; Start 42; Stop 66
ttgtgatggaatgcgtccgattgga

SEQ ID NO: 161590 - DNA, 25 bp, Artificial
  probe
  misc_feature (1)..(25): SEQ ID NO: 7168; WAN024DKN_at; Start 12; Stop 36
gccaagtccaagtgctacaacagtt

SEQ ID NO: 161591 - DNA, 25 bp, Artificial
  probe
  misc_feature (1)..(25): SEQ ID NO: 7168; WAN024DKN_at; Start 13; Stop 37
ccaagtccaagtgctacaacagttt

SEQ ID NO: 161592 - DNA, 25 bp, Artificial
  probe
  misc_feature (1)..(25): SEQ ID NO: 7168; WAN024DKN_at; Start 48; Stop 72
tggaatgcgtccgattggagactta

SEQ ID NO: 161593 - DNA, 25 bp, Artificial
  probe
  misc_feature (1)..(25): SEQ ID NO: 7168; WAN024DKN_at; Start 36; Stop 60
tttacgttgtgatggaatgcgtccg

SEQ ID NO: 161594 - DNA, 25 bp, Artificial
  probe
  misc_feature (1)..(25): SEQ ID NO: 7168; WAN024DKN_at; Start 40; Stop 64
cgttgtgatggaatgcgtccgattg

SEQ ID NO: 161595 - DNA, 25 bp, Artificial
  probe
  misc_feature (1)..(25): SEQ ID NO: 7168; WAN024DKN_at; Start 55; Stop 79
cgtccgattggagacttagtcaaag

SEQ ID NO: 161596 - DNA, 25 bp, Artificial
  probe
  misc_feature (1)..(25): SEQ ID NO: 7168; WAN024DKN_at; Start 53; Stop 77
tgcgtccgattggagacttagtcaa

SEQ ID NO: 161597 - DNA, 25 bp, Artificial
  probe
  misc_feature (1)..(25): SEQ ID NO: 7168; WAN024DKN_at; Start 38; Stop 62
tacgttgtgatggaatgcgtccgat

SEQ ID NO: 161598 - DNA, 25 bp, Artificial
  probe
  misc_feature (1)..(25): SEQ ID NO: 7168; WAN024DKN_at; Start 7; Stop 31
aatttgccaagtccaagtgctacaa

SEQ ID NO: 161599 - DNA, 25 bp, Artificial
  probe
  misc_feature (1)..(25): SEQ ID NO: 7168; WAN024DKN_at; Start 27; Stop 51
tacaacagttttacgttgtgatgga

SEQ ID NO: 161600 - DNA, 25 bp, Artificial
  probe
  misc_feature (1)..(25): SEQ ID NO: 7168; WAN024DKN_at; Start 18; Stop 42
tccaagtgctacaacagttttacgt

SEQ ID NO: 161601 - DNA, 25 bp, Artificial
  probe
  misc_feature (1)..(25): SEQ ID NO: 7168; WAN024DKN_at; Start 51; Stop 75
aatgcgtccgattggagacttagtc

SEQ ID NO: 161602 - DNA, 25 bp, Artificial
  probe
  misc_feature (1)..(25): SEQ ID NO: 7168; WAN024DKN_at; Start 3; Stop 27
gttcaatttgccaagtccaagtgct

SEQ ID NO: 161603 - DNA, 25 bp, Artificial
  probe
  misc_feature (1)..(25): SEQ ID NO: 7168; WAN024DKN_at; Start 37; Stop 61
ttacgttgtgatggaatgcgtccga

SEQ ID NO: 161604 - DNA, 25 bp, Artificial
  probe
  misc_feature (1)..(25): SEQ ID NO: 7168; WAN024DKN_at; Start 54; Stop 78
gcgtccgattggagacttagtcaaa

SEQ ID NO: 161605 - DNA, 25 bp, Artificial
  probe
  misc_feature (1)..(25): SEQ ID NO: 7168; WAN024DKN_at; Start 45; Stop 69
tgatggaatgcgtccgattggagac

SEQ ID NO: 161606 - DNA, 25 bp, Artificial
  probe
  misc_feature (1)..(25): SEQ ID NO: 7168; WAN024DKN_at; Start 2; Stop 26
tgttcaatttgccaagtccaagtgc

SEQ ID NO: 161607 - DNA, 25 bp, Artificial
  probe
  misc_feature (1)..(25): SEQ ID NO: 7168; WAN024DKN_at; Start 56; Stop 80
gtccgattggagacttagtcaaagt

SEQ ID NO: 161608 - DNA, 25 bp, Artificial
  probe
  misc_feature (1)..(25): SEQ ID NO: 7168; WAN024DKN_at; Start 9; Stop 33
tttgccaagtccaagtgctacaaca

SEQ ID NO: 161609 - DNA, 25 bp, Artificial
  probe
  misc_feature (1)..(25): SEQ ID NO: 7168; WAN024DKN_at; Start 32; Stop 56
cagttttacgttgtgatggaatgcg

SEQ ID NO: 161610 - DNA, 25 bp, Artificial
  probe
  misc_feature (1)..(25): SEQ ID NO: 7168; WAN024DKN_at; Start 15; Stop 39
aagtccaagtgctacaacagtttta

SEQ ID NO: 161611 - DNA, 25 bp, Artificial
  probe
  misc_feature (1)..(25): SEQ ID NO: 7168; WAN024DKN_at; Start 17; Stop 41
gtccaagtgctacaacagttttacg

SEQ ID NO: 161612 - DNA, 25 bp, Artificial
  probe
  misc_feature (1)..(25): SEQ ID NO: 7168; WAN024DKN_at; Start 58; Stop 82
ccgattggagacttagtcaaagtaa

SEQ ID NO: 161613 - DNA, 25 bp, Artificial
  probe
  misc_feature (1)..(25): SEQ ID NO: 7168; WAN024DKN_at; Start 35; Stop 59
ttttacgttgtgatggaatgcgtcc

SEQ ID NO: 161614 - DNA, 25 bp, Artificial
  probe
  misc_feature (1)..(25): SEQ ID NO: 7168; WAN024DKN_at; Start 6; Stop 30
caatttgccaagtccaagtgctaca

SEQ ID NO: 161615 - DNA, 25 bp, Artificial
  probe
  misc_feature (1)..(25): SEQ ID NO: 7168; WAN024DKN_at; Start 63; Stop 87
tggagacttagtcaaagtaatttta

SEQ ID NO: 161616 - DNA, 25 bp, Artificial
  probe
  misc_feature (1)..(25): SEQ ID NO: 7168; WAN024DKN_at; Start 20; Stop 44
caagtgctacaacagttttacgttg

SEQ ID NO: 161617 - DNA, 25 bp, Artificial
  probe
  misc_feature (1)..(25): SEQ ID NO: 2497; WAN024DKO_at; Start 12; Stop 36
taaaattactttgactaagtctcca

SEQ ID NO: 161618 - DNA, 25 bp, Artificial
  probe
  misc_feature (1)..(25): SEQ ID NO: 2497; WAN024DKO_at; Start 24; Stop 48
gactaagtctccaatcggacgcatt

SEQ ID NO: 161619 - DNA, 25 bp, Artificial
  probe
  misc_feature (1)..(25): SEQ ID NO: 2497; WAN024DKO_at; Start 18; Stop 42
tactttgactaagtctccaatcgga

SEQ ID NO: 161620 - DNA, 25 bp, Artificial
  probe
  misc_feature (1)..(25): SEQ ID NO: 2497; WAN024DKO_at; Start 116; Stop 140
ataacgctgctatccgtggtatgat

SEQ ID NO: 161621 - DNA, 25 bp, Artificial
  probe
  misc_feature (1)..(25): SEQ ID NO: 2497; WAN024DKO_at; Start 62; Stop 86
aaactgttgtagcacttggacttgg

SEQ ID NO: 161622 - DNA, 25 bp, Artificial
  probe
  misc_feature (1)..(25): SEQ ID NO: 2497; WAN024DKO_at; Start 2; Stop 26
tggctcaaattaaaattactttgac

SEQ ID NO: 161623 - DNA, 25 bp, Artificial
  probe
  misc_feature (1)..(25): SEQ ID NO: 2497; WAN024DKO_at; Start 93; Stop 117
gaacagctctgttattaaagaagat

SEQ ID NO: 161624 - DNA, 25 bp, Artificial
  probe
  misc_feature (1)..(25): SEQ ID NO: 2497; WAN024DKO_at; Start 112; Stop 136
gaagataacgctgctatccgtggta

SEQ ID NO: 161625 - DNA, 25 bp, Artificial
  probe
  misc_feature (1)..(25): SEQ ID NO: 2497; WAN024DKO_at; Start 102; Stop 126
tgttattaaagaagataacgctgct

SEQ ID NO: 161626 - DNA, 25 bp, Artificial
  probe
  misc_feature (1)..(25): SEQ ID NO: 2497; WAN024DKO_at; Start 148; Stop 172
gtatctcacttagtaacagttgaag

SEQ ID NO: 161627 - DNA, 25 bp, Artificial
  probe
  misc_feature (1)..(25): SEQ ID NO: 2497; WAN024DKO_at; Start 66; Stop 90
tgttgtagcacttggacttggcaaa

SEQ ID NO: 161628 - DNA, 25 bp, Artificial
  probe
  misc_feature (1)..(25): SEQ ID NO: 2497; WAN024DKO_at; Start 145; Stop 169
gcagtatctcacttagtaacagttg

SEQ ID NO: 161629 - DNA, 25 bp, Artificial
  probe
  misc_feature (1)..(25): SEQ ID NO: 2497; WAN024DKO_at; Start 44; Stop 68
gcattccatcacaacgtaaaactgt

SEQ ID NO: 161630 - DNA, 25 bp, Artificial
  probe
  misc_feature (1)..(25): SEQ ID NO: 2497; WAN024DKO_at; Start 35; Stop 59
caatcggacgcattccatcacaacg

SEQ ID NO: 161631 - DNA, 25 bp, Artificial
  probe
  misc_feature (1)..(25): SEQ ID NO: 2497; WAN024DKO_at; Start 107; Stop 131
ttaaagaagataacgctgctatccg

SEQ ID NO: 161632 - DNA, 25 bp, Artificial
  probe
  misc_feature (1)..(25): SEQ ID NO: 2497; WAN024DKO_at; Start 115; Stop 139
gataacgctgctatccgtggtatga

SEQ ID NO: 161633 - DNA, 25 bp, Artificial
  probe
  misc_feature (1)..(25): SEQ ID NO: 2497; WAN024DKO_at; Start 82; Stop 106
cttggcaaattgaacagctctgtta

SEQ ID NO: 161634 - DNA, 25 bp, Artificial
  probe
  misc_feature (1)..(25): SEQ ID NO: 2497; WAN024DKO_at; Start 78; Stop 102
tggacttggcaaattgaacagctct

SEQ ID NO: 161635 - DNA, 25 bp, Artificial
  probe
  misc_feature (1)..(25): SEQ ID NO: 2497; WAN024DKO_at; Start 98; Stop 122
gctctgttattaaagaagataacgc

SEQ ID NO: 161636 - DNA, 25 bp, Artificial
  probe
  misc_feature (1)..(25): SEQ ID NO: 2497; WAN024DKO_at; Start 30; Stop 54
gtctccaatcggacgcattccatca

SEQ ID NO: 161637 - DNA, 25 bp, Artificial
  probe
  misc_feature (1)..(25): SEQ ID NO: 2497; WAN024DKO_at; Start 142; Stop 166
acagcagtatctcacttagtaacag

SEQ ID NO: 161638 - DNA, 25 bp, Artificial
  probe
  misc_feature (1)..(25): SEQ ID NO: 2497; WAN024DKO_at; Start 27; Stop 51
taagtctccaatcggacgcattcca

SEQ ID NO: 161639 - DNA, 25 bp, Artificial
  probe
  misc_feature (1)..(25): SEQ ID NO: 2497; WAN024DKO_at; Start 151; Stop 175
tctcacttagtaacagttgaagaag

SEQ ID NO: 161640 - DNA, 25 bp, Artificial
  probe
  misc_feature (1)..(25): SEQ ID NO: 2497; WAN024DKO_at; Start 73; Stop 97
gcacttggacttggcaaattgaaca

SEQ ID NO: 161641 - DNA, 25 bp, Artificial
  probe
  misc_feature (1)..(25): SEQ ID NO: 2497; WAN024DKO_at; Start 40; Stop 64
ggacgcattccatcacaacgtaaaa

SEQ ID NO: 161642 - DNA, 25 bp, Artificial
  probe
  misc_feature (1)..(25): SEQ ID NO: 2497; WAN024DKO_at; Start 110; Stop 134
aagaagataacgctgctatccgtgg

SEQ ID NO: 161643 - DNA, 25 bp, Artificial
  probe
  misc_feature (1)..(25): SEQ ID NO: 2497; WAN024DKO_at; Start 69; Stop 93
tgtagcacttggacttggcaaattg

SEQ ID NO: 161644 - DNA, 25 bp, Artificial
  probe
  misc_feature (1)..(25): SEQ ID NO: 2497; WAN024DKO_at; Start 58; Stop 82
cgtaaaactgttgtagcacttggac

SEQ ID NO: 161645 - DNA, 25 bp, Artificial
  probe
  misc_feature (1)..(25): SEQ ID NO: 2497; WAN024DKO_at; Start 21; Stop 45
tttgactaagtctccaatcggacgc

SEQ ID NO: 161646 - DNA, 25 bp, Artificial
  probe
  misc_feature (1)..(25): SEQ ID NO: 2497; WAN024DKO_at; Start 80; Stop 104
gacttggcaaattgaacagctctgt

SEQ ID NO: 161647 - DNA, 25 bp, Artificial
  probe
  misc_feature (1)..(25): SEQ ID NO: 2497; WAN024DKO_at; Start 64; Stop 88
actgttgtagcacttggacttggca

SEQ ID NO: 161648 - DNA, 25 bp, Artificial
  probe
  misc_feature (1)..(25): SEQ ID NO: 2497; WAN024DKO_at; Start 158; Stop 182
tagtaacagttgaagaagtaaacta

SEQ ID NO: 161649 - DNA, 25 bp, Artificial
  probe
  misc_feature (1)..(25): SEQ ID NO: 2497; WAN024DKO_at; Start 75; Stop 99
acttggacttggcaaattgaacagc

SEQ ID NO: 161650 - DNA, 25 bp, Artificial
  probe
  misc_feature (1)..(25): SEQ ID NO: 2497; WAN024DKO_at; Start 38; Stop 62
tcggacgcattccatcacaacgtaa

SEQ ID NO: 161651 - DNA, 25 bp, Artificial
  probe
  misc_feature (1)..(25): SEQ ID NO: 3099; WAN024DKP_at; Start 165; Stop 189
tatcatcgagaaagaagcagctatc

SEQ ID NO: 161652 - DNA, 25 bp, Artificial
  probe
  misc_feature (1)..(25): SEQ ID NO: 3099; WAN024DKP_at; Start 167; Stop 191
tcatcgagaaagaagcagctatcca

SEQ ID NO: 161653 - DNA, 25 bp, Artificial
  probe
  misc_feature (1)..(25): SEQ ID NO: 3099; WAN024DKP_at; Start 268; Stop 292
gttcgctacaacaaaaaatcaggcg

SEQ ID NO: 161654 - DNA, 25 bp, Artificial
  probe
  misc_feature (1)..(25): SEQ ID NO: 3099; WAN024DKP_at; Start 217; Stop 241
aaaaatggtgtagctggtcgtgttg

SEQ ID NO: 161655 - DNA, 25 bp, Artificial
  probe
  misc_feature (1)..(25): SEQ ID NO: 3099; WAN024DKP_at; Start 214; Stop 238
gacaaaaatggtgtagctggtcgtg

SEQ ID NO: 161656 - DNA, 25 bp, Artificial
  probe
  misc_feature (1)..(25): SEQ ID NO: 3099; WAN024DKP_at; Start 23; Stop 47
aagttcgcgtaatcgctggtaaaga

SEQ ID NO: 161657 - DNA, 25 bp, Artificial
  probe
  misc_feature (1)..(25): SEQ ID NO: 3099; WAN024DKP_at; Start 144; Stop 168
taacgagcttcctcaaggtggtatc

SEQ ID NO: 161658 - DNA, 25 bp, Artificial
  probe
  misc_feature (1)..(25): SEQ ID NO: 3099; WAN024DKP_at; Start 153; Stop 177
tcctcaaggtggtatcatcgagaaa

SEQ ID NO: 161659 - DNA, 25 bp, Artificial
  probe
  misc_feature (1)..(25): SEQ ID NO: 3099; WAN024DKP_at; Start 13; Stop 37
aaaggcgacaaagttcgcgtaatcg

SEQ ID NO: 161660 - DNA, 25 bp, Artificial
  probe
  misc_feature (1)..(25): SEQ ID NO: 3099; WAN024DKP_at; Start 16; Stop 40
ggcgacaaagttcgcgtaatcgctg

SEQ ID NO: 161661 - DNA, 25 bp, Artificial
  probe
  misc_feature (1)..(25): SEQ ID NO: 3099; WAN024DKP_at; Start 50; Stop 74
agggaacagaagctgttgtccttac

SEQ ID NO: 161662 - DNA, 25 bp, Artificial
  probe
  misc_feature (1)..(25): SEQ ID NO: 3099; WAN024DKP_at; Start 178; Stop 202
gaagcagctatccacgtatcaaacg

SEQ ID NO: 161663 - DNA, 25 bp, Artificial
  probe
  misc_feature (1)..(25): SEQ ID NO: 3099; WAN024DKP_at; Start 194; Stop 218
tatcaaacgttcaagttttggacaa

SEQ ID NO: 161664 - DNA, 25 bp, Artificial
  probe
  misc_feature (1)..(25): SEQ ID NO: 3099; WAN024DKP_at; Start 209; Stop 233
ttttggacaaaaatggtgtagctgg

SEQ ID NO: 161665 - DNA, 25 bp, Artificial
  probe
  misc_feature (1)..(25): SEQ ID NO: 3099; WAN024DKP_at; Start 21; Stop 45
caaagttcgcgtaatcgctggtaaa

SEQ ID NO: 161666 - DNA, 25 bp, Artificial
  probe
  misc_feature (1)..(25): SEQ ID NO: 3099; WAN024DKP_at; Start 181; Stop 205
gcagctatccacgtatcaaacgttc

SEQ ID NO: 161667 - DNA, 25 bp, Artificial
  probe
  misc_feature (1)..(25): SEQ ID NO: 3099; WAN024DKP_at; Start 54; Stop 78
aacagaagctgttgtccttactgcc

SEQ ID NO: 161668 - DNA, 25 bp, Artificial
  probe
  misc_feature (1)..(25): SEQ ID NO: 3099; WAN024DKP_at; Start 276; Stop 300
caacaaaaaatcaggcgaagtgctt

SEQ ID NO: 161669 - DNA, 25 bp, Artificial
  probe
  misc_feature (1)..(25): SEQ ID NO: 3099; WAN024DKP_at; Start 272; Stop 296
gctacaacaaaaaatcaggcgaagt

SEQ ID NO: 161670 - DNA, 25 bp, Artificial
  probe
  misc_feature (1)..(25): SEQ ID NO: 3099; WAN024DKP_at; Start 162; Stop 186
tggtatcatcgagaaagaagcagct

SEQ ID NO: 161671 - DNA, 25 bp, Artificial
  probe
  misc_feature (1)..(25): SEQ ID NO: 3099; WAN024DKP_at; Start 157; Stop 181
caaggtggtatcatcgagaaagaag

SEQ ID NO: 161672 - DNA, 25 bp, Artificial
  probe
  misc_feature (1)..(25): SEQ ID NO: 3099; WAN024DKP_at; Start 56; Stop 80
cagaagctgttgtccttactgccct

SEQ ID NO: 161673 - DNA, 25 bp, Artificial
  probe
  misc_feature (1)..(25): SEQ ID NO: 3099; WAN024DKP_at; Start 175; Stop 199
aaagaagcagctatccacgtatcaa

SEQ ID NO: 161674 - DNA, 25 bp, Artificial
  probe
  misc_feature (1)..(25): SEQ ID NO: 3099; WAN024DKP_at; Start 148; Stop 172
gagcttcctcaaggtggtatcatcg

SEQ ID NO: 161675 - DNA, 25 bp, Artificial
  probe
  misc_feature (1)..(25): SEQ ID NO: 3099; WAN024DKP_at; Start 286; Stop 310
tcaggcgaagtgcttgattaactaa

SEQ ID NO: 161676 - DNA, 25 bp, Artificial
  probe
  misc_feature (1)..(25): SEQ ID NO: 3099; WAN024DKP_at; Start 266; Stop 290
aagttcgctacaacaaaaaatcagg

SEQ ID NO: 161677 - DNA, 25 bp, Artificial
  probe
  misc_feature (1)..(25): SEQ ID NO: 3099; WAN024DKP_at; Start 184; Stop 208
gctatccacgtatcaaacgttcaag

SEQ ID NO: 161678 - DNA, 25 bp, Artificial
  probe
  misc_feature (1)..(25): SEQ ID NO: 3099; WAN024DKP_at; Start 150; Stop 174
gcttcctcaaggtggtatcatcgag

SEQ ID NO: 161679 - DNA, 25 bp, Artificial
  probe
  misc_feature (1)..(25): SEQ ID NO: 3099; WAN024DKP_at; Start 19; Stop 43
gacaaagttcgcgtaatcgctggta

SEQ ID NO: 161680 - DNA, 25 bp, Artificial
  probe
  misc_feature (1)..(25): SEQ ID NO: 3099; WAN024DKP_at; Start 61; Stop 85
gctgttgtccttactgcccttccaa

SEQ ID NO: 161681 - DNA, 25 bp, Artificial
  probe
  misc_feature (1)..(25): SEQ ID NO: 3099; WAN024DKP_at; Start 189; Stop 213
ccacgtatcaaacgttcaagttttg

SEQ ID NO: 161682 - DNA, 25 bp, Artificial
  probe
  misc_feature (1)..(25): SEQ ID NO: 3099; WAN024DKP_at; Start 170; Stop 194
tcgagaaagaagcagctatccacgt

SEQ ID NO: 161683 - DNA, 25 bp, Artificial
  probe
  misc_feature (1)..(25): SEQ ID NO: 3099; WAN024DKP_at; Start 63; Stop 87
tgttgtccttactgcccttccaaaa

SEQ ID NO: 161684 - DNA, 25 bp, Artificial
  probe
  misc_feature (1)..(25): SEQ ID NO: 3099; WAN024DKP_at; Start 140; Stop 164
caactaacgagcttcctcaaggtgg

SEQ ID NO: 161685 - DNA, 25 bp, Artificial
  probe
  misc_feature (1)..(25): SEQ ID NO: 2190; WAN024DKQ_at; Start 181; Stop 205
cgtatcatggaaactcgcccgcttt

SEQ ID NO: 161686 - DNA, 25 bp, Artificial
  probe
  misc_feature (1)..(25): SEQ ID NO: 2190; WAN024DKQ_at; Start 83; Stop 107
caaaacgtaaccacccagtctatgg

SEQ ID NO: 161687 - DNA, 25 bp, Artificial
  probe
  misc_feature (1)..(25): SEQ ID NO: 2190; WAN024DKQ_at; Start 94; Stop 118
cacccagtctatggtaaacgtatta

SEQ ID NO: 161688 - DNA, 25 bp, Artificial
  probe
  misc_feature (1)..(25): SEQ ID NO: 2190; WAN024DKQ_at; Start 66; Stop 90
cacagttgtagttgaaacaaaacgt

SEQ ID NO: 161689 - DNA, 25 bp, Artificial
  probe
  misc_feature (1)..(25): SEQ ID NO: 2190; WAN024DKQ_at; Start 179; Stop 203
tacgtatcatggaaactcgcccgct

SEQ ID NO: 161690 - DNA, 25 bp, Artificial
  probe
  misc_feature (1)..(25): SEQ ID NO: 2190; WAN024DKQ_at; Start 20; Stop 44
aagttcttgttggacgtgttgtatc

SEQ ID NO: 161691 - DNA, 25 bp, Artificial
  probe
  misc_feature (1)..(25): SEQ ID NO: 2190; WAN024DKQ_at; Start 139; Stop 163
gctcatgatgaaaacaatgttgcca

SEQ ID NO: 161692 - DNA, 25 bp, Artificial
  probe
  misc_feature (1)..(25): SEQ ID NO: 2190; WAN024DKQ_at; Start 241; Stop 265
gaagaagcggtcatcatctaactaa

SEQ ID NO: 161693 - DNA, 25 bp, Artificial
  probe
  misc_feature (1)..(25): SEQ ID NO: 2190; WAN024DKQ_at; Start 160; Stop 184
gccaaagaaggcgatatcgtacgta

SEQ ID NO: 161694 - DNA, 25 bp, Artificial
  probe
  misc_feature (1)..(25): SEQ ID NO: 2190; WAN024DKQ_at; Start 101; Stop 125
tctatggtaaacgtattaactactc

SEQ ID NO: 161695 - DNA, 25 bp, Artificial
  probe
  misc_feature (1)..(25): SEQ ID NO: 2190; WAN024DKQ_at; Start 24; Stop 48
tcttgttggacgtgttgtatctgac

SEQ ID NO: 161696 - DNA, 25 bp, Artificial
  probe
  misc_feature (1)..(25): SEQ ID NO: 2190; WAN024DKQ_at; Start 232; Stop 256
gaagttgttgaagaagcggtcatca

SEQ ID NO: 161697 - DNA, 25 bp, Artificial
  probe
  misc_feature (1)..(25): SEQ ID NO: 2190; WAN024DKQ_at; Start 166; Stop 190
gaaggcgatatcgtacgtatcatgg

SEQ ID NO: 161698 - DNA, 25 bp, Artificial
  probe
  misc_feature (1)..(25): SEQ ID NO: 2190; WAN024DKQ_at; Start 147; Stop 171
tgaaaacaatgttgccaaagaaggc

SEQ ID NO: 161699 - DNA, 25 bp, Artificial
  probe
  misc_feature (1)..(25): SEQ ID NO: 2190; WAN024DKQ_at; Start 183; Stop 207
tatcatggaaactcgcccgctttca

SEQ ID NO: 161700 - DNA, 25 bp, Artificial
  probe
  misc_feature (1)..(25): SEQ ID NO: 2190; WAN024DKQ_at; Start 46; Stop 70
gacaaaatggacaagacaatcacag

SEQ ID NO: 161701 - DNA, 25 bp, Artificial
  probe
  misc_feature (1)..(25): SEQ ID NO: 2190; WAN024DKQ_at; Start 2; Stop 26
tggaacgcaataatcgtaaagttct

SEQ ID NO: 161702 - DNA, 25 bp, Artificial
  probe
  misc_feature (1)..(25): SEQ ID NO: 2190; WAN024DKQ_at; Start 32; Stop 56
gacgtgttgtatctgacaaaatgga

SEQ ID NO: 161703 - DNA, 25 bp, Artificial
  probe
  misc_feature (1)..(25): SEQ ID NO: 2190; WAN024DKQ_at; Start 162; Stop 186
caaagaaggcgatatcgtacgtatc

SEQ ID NO: 161704 - DNA, 25 bp, Artificial
  probe
  misc_feature (1)..(25): SEQ ID NO: 2190; WAN024DKQ_at; Start 190; Stop 214
gaaactcgcccgctttcagctacaa

SEQ ID NO: 161705 - DNA, 25 bp, Artificial
  probe
  misc_feature (1)..(25): SEQ ID NO: 2190; WAN024DKQ_at; Start 9; Stop 33
caataatcgtaaagttcttgttgga

SEQ ID NO: 161706 - DNA, 25 bp, Artificial
  probe
  misc_feature (1)..(25): SEQ ID NO: 2190; WAN024DKQ_at; Start 174; Stop 198
tatcgtacgtatcatggaaactcgc

SEQ ID NO: 161707 - DNA, 25 bp, Artificial
  probe
  misc_feature (1)..(25): SEQ ID NO: 2190; WAN024DKQ_at; Start 119; Stop 143
actactctaaaaaatacaaagctca

SEQ ID NO: 161708 - DNA, 25 bp, Artificial
  probe
  misc_feature (1)..(25): SEQ ID NO: 2190; WAN024DKQ_at; Start 60; Stop 84
gacaatcacagttgtagttgaaaca

SEQ ID NO: 161709 - DNA, 25 bp, Artificial
  probe
  misc_feature (1)..(25): SEQ ID NO: 2190; WAN024DKQ_at; Start 228; Stop 252
tgtagaagttgttgaagaagcggtc

SEQ ID NO: 161710 - DNA, 25 bp, Artificial
  probe
  misc_feature (1)..(25): SEQ ID NO: 2190; WAN024DKQ_at; Start 177; Stop 201
cgtacgtatcatggaaactcgcccg

SEQ ID NO: 161711 - DNA, 25 bp, Artificial
  probe
  misc_feature (1)..(25): SEQ ID NO: 2190; WAN024DKQ_at; Start 195; Stop 219
tcgcccgctttcagctacaaaacgt

SEQ ID NO: 161712 - DNA, 25 bp, Artificial
  probe
  misc_feature (1)..(25): SEQ ID NO: 2190; WAN024DKQ_at; Start 205; Stop 229
tcagctacaaaacgtttccgtcttg

SEQ ID NO: 161713 - DNA, 25 bp, Artificial
  probe
  misc_feature (1)..(25): SEQ ID NO: 2190; WAN024DKQ_at; Start 217; Stop 241
cgtttccgtcttgtagaagttgttg

SEQ ID NO: 161714 - DNA, 25 bp, Artificial
  probe
  misc_feature (1)..(25): SEQ ID NO: 2190; WAN024DKQ_at; Start 39; Stop 63
tgtatctgacaaaatggacaagaca

SEQ ID NO: 161715 - DNA, 25 bp, Artificial
  probe
  misc_feature (1)..(25): SEQ ID NO: 2190; WAN024DKQ_at; Start 124; Stop 148
tctaaaaaatacaaagctcatgatg

SEQ ID NO: 161716 - DNA, 25 bp, Artificial
  probe
  misc_feature (1)..(25): SEQ ID NO: 2190; WAN024DKQ_at; Start 200; Stop 224
cgctttcagctacaaaacgtttccg

SEQ ID NO: 161717 - DNA, 25 bp, Artificial
  probe
  misc_feature (1)..(25): SEQ ID NO: 2190; WAN024DKQ_at; Start 235; Stop 259
gttgttgaagaagcggtcatcatct

SEQ ID NO: 161718 - DNA, 25 bp, Artificial
  probe
  misc_feature (1)..(25): SEQ ID NO: 2190; WAN024DKQ_at; Start 53; Stop 77
tggacaagacaatcacagttgtagt

SEQ ID NO: 161719 - DNA, 25 bp, Artificial
  probe
  misc_feature (1)..(25): SEQ ID NO: 6900; WAN024DKR_at; Start 50; Stop 74
ttggctctgttgcaggtttttcttc

SEQ ID NO: 161720 - DNA, 25 bp, Artificial
  probe
  misc_feature (1)..(25): SEQ ID NO: 6900; WAN024DKR_at; Start 49; Stop 73
gttggctctgttgcaggtttttctt

SEQ ID NO: 161721 - DNA, 25 bp, Artificial
  probe
  misc_feature (1)..(25): SEQ ID NO: 6900; WAN024DKR_at; Start 45; Stop 69
agtagttggctctgttgcaggtttt

SEQ ID NO: 161722 - DNA, 25 bp, Artificial
  probe
  misc_feature (1)..(25): SEQ ID NO: 6900; WAN024DKR_at; Start 51; Stop 75
tggctctgttgcaggtttttcttct

SEQ ID NO: 161723 - DNA, 25 bp, Artificial
  probe
  misc_feature (1)..(25): SEQ ID NO: 6900; WAN024DKR_at; Start 44; Stop 68
aagtagttggctctgttgcaggttt

SEQ ID NO: 161724 - DNA, 25 bp, Artificial
  probe
  misc_feature (1)..(25): SEQ ID NO: 6900; WAN024DKR_at; Start 43; Stop 67
gaagtagttggctctgttgcaggtt

SEQ ID NO: 161725 - DNA, 25 bp, Artificial
  probe
  misc_feature (1)..(25): SEQ ID NO: 6900; WAN024DKR_at; Start 47; Stop 71
tagttggctctgttgcaggtttttc

SEQ ID NO: 161726 - DNA, 25 bp, Artificial
  probe
  misc_feature (1)..(25): SEQ ID NO: 6900; WAN024DKR_at; Start 48; Stop 72
agttggctctgttgcaggtttttct

SEQ ID NO: 161727 - DNA, 25 bp, Artificial
  probe
  misc_feature (1)..(25): SEQ ID NO: 6900; WAN024DKR_at; Start 42; Stop 66
agaagtagttggctctgttgcaggt

SEQ ID NO: 161728 - DNA, 25 bp, Artificial
  probe
  misc_feature (1)..(25): SEQ ID NO: 6900; WAN024DKR_at; Start 46; Stop 70
gtagttggctctgttgcaggttttt

SEQ ID NO: 161729 - DNA, 25 bp, Artificial
  probe
  misc_feature (1)..(25): SEQ ID NO: 6899; WAN024DKS_at; Start 60; Stop 84
tgaacgatcttgtccagtttgtggt

SEQ ID NO: 161730 - DNA, 25 bp, Artificial
  probe
  misc_feature (1)..(25): SEQ ID NO: 6899; WAN024DKS_at; Start 64; Stop 88
cgatcttgtccagtttgtggtgctg

SEQ ID NO: 161731 - DNA, 25 bp, Artificial
  probe
  misc_feature (1)..(25): SEQ ID NO: 6899; WAN024DKS_at; Start 63; Stop 87
acgatcttgtccagtttgtggtgct

SEQ ID NO: 161732 - DNA, 25 bp, Artificial
  probe
  misc_feature (1)..(25): SEQ ID NO: 6899; WAN024DKS_at; Start 90; Stop 114
atcggctgggcttgcagcaggtttt

SEQ ID NO: 161733 - DNA, 25 bp, Artificial
  probe
  misc_feature (1)..(25): SEQ ID NO: 6899; WAN024DKS_at; Start 92; Stop 116
cggctgggcttgcagcaggtttttc

SEQ ID NO: 161734 - DNA, 25 bp, Artificial
  probe
  misc_feature (1)..(25): SEQ ID NO: 6899; WAN024DKS_at; Start 57; Stop 81
acttgaacgatcttgtccagtttgt

SEQ ID NO: 161735 - DNA, 25 bp, Artificial
  probe
  misc_feature (1)..(25): SEQ ID NO: 6899; WAN024DKS_at; Start 54; Stop 78
ctcacttgaacgatcttgtccagtt

SEQ ID NO: 161736 - DNA, 25 bp, Artificial
  probe
  misc_feature (1)..(25): SEQ ID NO: 6899; WAN024DKS_at; Start 91; Stop 115
tcggctgggcttgcagcaggttttt

SEQ ID NO: 161737 - DNA, 25 bp, Artificial
  probe
  misc_feature (1)..(25): SEQ ID NO: 6899; WAN024DKS_at; Start 61; Stop 85
gaacgatcttgtccagtttgtggtg

SEQ ID NO: 161738 - DNA, 25 bp, Artificial
  probe
  misc_feature (1)..(25): SEQ ID NO: 6899; WAN024DKS_at; Start 69; Stop 93
ttgtccagtttgtggtgctggatcg

SEQ ID NO: 161739 - DNA, 25 bp, Artificial
  probe
  misc_feature (1)..(25): SEQ ID NO: 6899; WAN024DKS_at; Start 49; Stop 73
gttggctcacttgaacgatcttgtc

SEQ ID NO: 161740 - DNA, 25 bp, Artificial
  probe
  misc_feature (1)..(25): SEQ ID NO: 6899; WAN024DKS_at; Start 80; Stop 104
gtggtgctggatcggctgggcttgc

SEQ ID NO: 161741 - DNA, 25 bp, Artificial
  probe
  misc_feature (1)..(25): SEQ ID NO: 6899; WAN024DKS_at; Start 50; Stop 74
ttggctcacttgaacgatcttgtcc

SEQ ID NO: 161742 - DNA, 25 bp, Artificial
  probe
  misc_feature (1)..(25): SEQ ID NO: 6899; WAN024DKS_at; Start 45; Stop 69
agtagttggctcacttgaacgatct

SEQ ID NO: 161743 - DNA, 25 bp, Artificial
  probe
  misc_feature (1)..(25): SEQ ID NO: 6899; WAN024DKS_at; Start 48; Stop 72
agttggctcacttgaacgatcttgt

SEQ ID NO: 161744 - DNA, 25 bp, Artificial
  probe
  misc_feature (1)..(25): SEQ ID NO: 6899; WAN024DKS_at; Start 68; Stop 92
cttgtccagtttgtggtgctggatc

SEQ ID NO: 161745 - DNA, 25 bp, Artificial
  probe
  misc_feature (1)..(25): SEQ ID NO: 6899; WAN024DKS_at; Start 56; Stop 80
cacttgaacgatcttgtccagtttg

SEQ ID NO: 161746 - DNA, 25 bp, Artificial
  probe
  misc_feature (1)..(25): SEQ ID NO: 6899; WAN024DKS_at; Start 58; Stop 82
cttgaacgatcttgtccagtttgtg

SEQ ID NO: 161747 - DNA, 25 bp, Artificial
  probe
  misc_feature (1)..(25): SEQ ID NO: 6899; WAN024DKS_at; Start 44; Stop 68
aagtagttggctcacttgaacgatc

SEQ ID NO: 161748 - DNA, 25 bp, Artificial
  probe
  misc_feature (1)..(25): SEQ ID NO: 6899; WAN024DKS_at; Start 67; Stop 91
tcttgtccagtttgtggtgctggat

SEQ ID NO: 161749 - DNA, 25 bp, Artificial
  probe
  misc_feature (1)..(25): SEQ ID NO: 6899; WAN024DKS_at; Start 43; Stop 67
gaagtagttggctcacttgaacgat

SEQ ID NO: 161750 - DNA, 25 bp, Artificial
  probe
  misc_feature (1)..(25): SEQ ID NO: 6899; WAN024DKS_at; Start 59; Stop 83
ttgaacgatcttgtccagtttgtgg

SEQ ID NO: 161751 - DNA, 25 bp, Artificial
  probe
  misc_feature (1)..(25): SEQ ID NO: 6899; WAN024DKS_at; Start 55; Stop 79
tcacttgaacgatcttgtccagttt

SEQ ID NO: 161752 - DNA, 25 bp, Artificial
  probe
  misc_feature (1)..(25): SEQ ID NO: 6899; WAN024DKS_at; Start 52; Stop 76
ggctcacttgaacgatcttgtccag

SEQ ID NO: 161753 - DNA, 25 bp, Artificial
  probe
  misc_feature (1)..(25): SEQ ID NO: 6899; WAN024DKS_at; Start 47; Stop 71
tagttggctcacttgaacgatcttg

SEQ ID NO: 161754 - DNA, 25 bp, Artificial
  probe
  misc_feature (1)..(25): SEQ ID NO: 6899; WAN024DKS_at; Start 53; Stop 77
gctcacttgaacgatcttgtccagt

SEQ ID NO: 161755 - DNA, 25 bp, Artificial
  probe
  misc_feature (1)..(25): SEQ ID NO: 6899; WAN024DKS_at; Start 66; Stop 90
atcttgtccagtttgtggtgctgga

SEQ ID NO: 161756 - DNA, 25 bp, Artificial
  probe
  misc_feature (1)..(25): SEQ ID NO: 6899; WAN024DKS_at; Start 51; Stop 75
tggctcacttgaacgatcttgtcca

SEQ ID NO: 161757 - DNA, 25 bp, Artificial
  probe
  misc_feature (1)..(25): SEQ ID NO: 6899; WAN024DKS_at; Start 62; Stop 86
aacgatcttgtccagtttgtggtgc

SEQ ID NO: 161758 - DNA, 25 bp, Artificial
  probe
  misc_feature (1)..(25): SEQ ID NO: 6899; WAN024DKS_at; Start 65; Stop 89
gatcttgtccagtttgtggtgctgg

SEQ ID NO: 161759 - DNA, 25 bp, Artificial
  probe
  misc_feature (1)..(25): SEQ ID NO: 6899; WAN024DKS_at; Start 72; Stop 96
tccagtttgtggtgctggatcggct

SEQ ID NO: 161760 - DNA, 25 bp, Artificial
  probe
  misc_feature (1)..(25): SEQ ID NO: 6899; WAN024DKS_at; Start 42; Stop 66
agaagtagttggctcacttgaacga

SEQ ID NO: 161761 - DNA, 25 bp, Artificial
  probe
  misc_feature (1)..(25): SEQ ID NO: 6899; WAN024DKS_at; Start 77; Stop 101
tttgtggtgctggatcggctgggct

SEQ ID NO: 161762 - DNA, 25 bp, Artificial
  probe
  misc_feature (1)..(25): SEQ ID NO: 6899; WAN024DKS_at; Start 46; Stop 70
gtagttggctcacttgaacgatctt

SEQ ID NO: 161763 - DNA, 25 bp, Artificial
  probe
  misc_feature (1)..(25): SEQ ID NO: 2384; WAN024DKT_at; Start 201; Stop 225
gcgtacacacaaacgtttgatcgat

SEQ ID NO: 161764 - DNA, 25 bp, Artificial
  probe
  misc_feature (1)..(25): SEQ ID NO: 2384; WAN024DKT_at; Start 77; Stop 101
tagaatcagctactcgtacaggtgc

SEQ ID NO: 161765 - DNA, 25 bp, Artificial
  probe
  misc_feature (1)..(25): SEQ ID NO: 2384; WAN024DKT_at; Start 21; Stop 45
tatccgtttgaaagcttacgaacac

SEQ ID NO: 161766 - DNA, 25 bp, Artificial
  probe
  misc_feature (1)..(25): SEQ ID NO: 2384; WAN024DKT_at; Start 273; Stop 297
tcttccaagtggtgtaaacgtagaa

SEQ ID NO: 161767 - DNA, 25 bp, Artificial
  probe
  misc_feature (1)..(25): SEQ ID NO: 2384; WAN024DKT_at; Start 122; Stop 146
cacttccaactgaacgtagcctcta

SEQ ID NO: 161768 - DNA, 25 bp, Artificial
  probe
  misc_feature (1)..(25): SEQ ID NO: 2384; WAN024DKT_at; Start 136; Stop 160
cgtagcctctacacaatcattcgtg

SEQ ID NO: 161769 - DNA, 25 bp, Artificial
  probe
  misc_feature (1)..(25): SEQ ID NO: 2384; WAN024DKT_at; Start 214; Stop 238
cgtttgatcgatatcgttaacccaa

SEQ ID NO: 161770 - DNA, 25 bp, Artificial
  probe
  misc_feature (1)..(25): SEQ ID NO: 2384; WAN024DKT_at; Start 162; Stop 186
gactcacaaatacaaagactctcgc

SEQ ID NO: 161771 - DNA, 25 bp, Artificial
  probe
  misc_feature (1)..(25): SEQ ID NO: 2384; WAN024DKT_at; Start 17; Stop 41
tccgtatccgtttgaaagcttacga

SEQ ID NO: 161772 - DNA, 25 bp, Artificial
  probe
  misc_feature (1)..(25): SEQ ID NO: 2384; WAN024DKT_at; Start 40; Stop 64
gaacaccgtacgcttgacacagcgg

SEQ ID NO: 161773 - DNA, 25 bp, Artificial
  probe
  misc_feature (1)..(25): SEQ ID NO: 2384; WAN024DKT_at; Start 195; Stop 219
tgaaatgcgtacacacaaacgtttg

SEQ ID NO: 161774 - DNA, 25 bp, Artificial
  probe
  misc_feature (1)..(25): SEQ ID NO: 2384; WAN024DKT_at; Start 59; Stop 83
cagcggctgcaaaaatcgtagaatc

SEQ ID NO: 161775 - DNA, 25 bp, Artificial
  probe
  misc_feature (1)..(25): SEQ ID NO: 2384; WAN024DKT_at; Start 255; Stop 279
tgccttgatgaaattggatcttcca

SEQ ID NO: 161776 - DNA, 25 bp, Artificial
  probe
  misc_feature (1)..(25): SEQ ID NO: 2384; WAN024DKT_at; Start 268; Stop 292
ttggatcttccaagtggtgtaaacg

SEQ ID NO: 161777 - DNA, 25 bp, Artificial
  probe
  misc_feature (1)..(25): SEQ ID NO: 2384; WAN024DKT_at; Start 248; Stop 272
cagttgatgccttgatgaaattgga

SEQ ID NO: 161778 - DNA, 25 bp, Artificial
  probe
  misc_feature (1)..(25): SEQ ID NO: 2384; WAN024DKT_at; Start 55; Stop 79
gacacagcggctgcaaaaatcgtag

SEQ ID NO: 161779 - DNA, 25 bp, Artificial
  probe
  misc_feature (1)..(25): SEQ ID NO: 2384; WAN024DKT_at; Start 178; Stop 202
gactctcgcgaacaatttgaaatgc

SEQ ID NO: 161780 - DNA, 25 bp, Artificial
  probe
  misc_feature (1)..(25): SEQ ID NO: 2384; WAN024DKT_at; Start 46; Stop 70
cgtacgcttgacacagcggctgcaa

SEQ ID NO: 161781 - DNA, 25 bp, Artificial
  probe
  misc_feature (1)..(25): SEQ ID NO: 2384; WAN024DKT_at; Start 157; Stop 181
cgtgcgactcacaaatacaaagact

SEQ ID NO: 161782 - DNA, 25 bp, Artificial
  probe
  misc_feature (1)..(25): SEQ ID NO: 2384; WAN024DKT_at; Start 29; Stop 53
tgaaagcttacgaacaccgtacgct

SEQ ID NO: 161783 - DNA, 25 bp, Artificial
  probe
  misc_feature (1)..(25): SEQ ID NO: 2384; WAN024DKT_at; Start 97; Stop 121
ggtgcacaagttgcgggtccaatcc

SEQ ID NO: 161784 - DNA, 25 bp, Artificial
  probe
  misc_feature (1)..(25): SEQ ID NO: 2384; WAN024DKT_at; Start 111; Stop 135
gggtccaatcccacttccaactgaa

SEQ ID NO: 161785 - DNA, 25 bp, Artificial
  probe
  misc_feature (1)..(25): SEQ ID NO: 2384; WAN024DKT_at; Start 68; Stop 92
caaaaatcgtagaatcagctactcg

SEQ ID NO: 161786 - DNA, 25 bp, Artificial
  probe
  misc_feature (1)..(25): SEQ ID NO: 2384; WAN024DKT_at; Start 168; Stop 192
caaatacaaagactctcgcgaacaa

SEQ ID NO: 161787 - DNA, 25 bp, Artificial
  probe
  misc_feature (1)..(25): SEQ ID NO: 2384; WAN024DKT_at; Start 87; Stop 111
tactcgtacaggtgcacaagttgcg

SEQ ID NO: 161788 - DNA, 25 bp, Artificial
  probe
  misc_feature (1)..(25): SEQ ID NO: 2384; WAN024DKT_at; Start 103; Stop 127
caagttgcgggtccaatcccacttc

SEQ ID NO: 161789 - DNA, 25 bp, Artificial
  probe
  misc_feature (1)..(25): SEQ ID NO: 2384; WAN024DKT_at; Start 145; Stop 169
tacacaatcattcgtgcgactcaca

SEQ ID NO: 161790 - DNA, 25 bp, Artificial
  probe
  misc_feature (1)..(25): SEQ ID NO: 2384; WAN024DKT_at; Start 278; Stop 302
caagtggtgtaaacgtagaaatcaa

SEQ ID NO: 161791 - DNA, 25 bp, Artificial
  probe
  misc_feature (1)..(25): SEQ ID NO: 2384; WAN024DKT_at; Start 93; Stop 117
tacaggtgcacaagttgcgggtcca

SEQ ID NO: 161792 - DNA, 25 bp, Artificial
  probe
  misc_feature (1)..(25): SEQ ID NO: 2384; WAN024DKT_at; Start 37; Stop 61
tacgaacaccgtacgcttgacacag

SEQ ID NO: 161793 - DNA, 25 bp, Artificial
  probe
  misc_feature (1)..(25): SEQ ID NO: 2384; WAN024DKT_at; Start 241; Stop 265
caaaaaacagttgatgccttgatga

SEQ ID NO: 161794 - DNA, 25 bp, Artificial
  probe
  misc_feature (1)..(25): SEQ ID NO: 2384; WAN024DKT_at; Start 219; Stop 243
gatcgatatcgttaacccaactcaa

SEQ ID NO: 161795 - DNA, 25 bp, Artificial
  probe
  misc_feature (1)..(25): SEQ ID NO: 2384; WAN024DKT_at; Start 82; Stop 106
tcagctactcgtacaggtgcacaag

SEQ ID NO: 161796 - DNA, 25 bp, Artificial
  probe
  misc_feature (1)..(25): SEQ ID NO: 2384; WAN024DKT_at; Start 184; Stop 208
cgcgaacaatttgaaatgcgtacac

SEQ ID NO: 161797 - DNA, 25 bp, Artificial
  probe
  misc_feature (1)..(25): SEQ ID NO: 6939; WAN024DKU_at; Start 81; Stop 105
gacctcactagccttccaaggttct

SEQ ID NO: 161798 - DNA, 25 bp, Artificial
  probe
  misc_feature (1)..(25): SEQ ID NO: 6939; WAN024DKU_at; Start 167; Stop 191
ttcatgcgccactggcagactggct

SEQ ID NO: 161799 - DNA, 25 bp, Artificial
  probe
  misc_feature (1)..(25): SEQ ID NO: 6939; WAN024DKU_at; Start 63; Stop 87
tggtttggctccagacaagacctca

SEQ ID NO: 161800 - DNA, 25 bp, Artificial
  probe
  misc_feature (1)..(25): SEQ ID NO: 6939; WAN024DKU_at; Start 206; Stop 230
cggcgcgtccttgggtactaccaga

SEQ ID NO: 161801 - DNA, 25 bp, Artificial
  probe
  misc_feature (1)..(25): SEQ ID NO: 6939; WAN024DKU_at; Start 10; Stop 34
tcaaagagttccttgggtagaaagc

SEQ ID NO: 161802 - DNA, 25 bp, Artificial
  probe
  misc_feature (1)..(25): SEQ ID NO: 6939; WAN024DKU_at; Start 135; Stop 159
caagcaaggatatctctctgcaaac

SEQ ID NO: 161803 - DNA, 25 bp, Artificial
  probe
  misc_feature (1)..(25): SEQ ID NO: 6939; WAN024DKU_at; Start 156; Stop 180
aaactctccagttcatgcgccactg

SEQ ID NO: 161804 - DNA, 25 bp, Artificial
  probe
  misc_feature (1)..(25): SEQ ID NO: 6939; WAN024DKU_at; Start 51; Stop 75
gacaatcaaaattggtttggctcca

SEQ ID NO: 161805 - DNA, 25 bp, Artificial
  probe
  misc_feature (1)..(25): SEQ ID NO: 6939; WAN024DKU_at; Start 130; Stop 154
gcctgcaagcaaggatatctctctg

SEQ ID NO: 161806 - DNA, 25 bp, Artificial
  probe
  misc_feature (1)..(25): SEQ ID NO: 6939; WAN024DKU_at; Start 25; Stop 49
ggtagaaagccaacagacatccctt

SEQ ID NO: 161807 - DNA, 25 bp, Artificial
  probe
  misc_feature (1)..(25): SEQ ID NO: 6939; WAN024DKU_at; Start 19; Stop 43
tccttgggtagaaagccaacagaca

SEQ ID NO: 161808 - DNA, 25 bp, Artificial
  probe
  misc_feature (1)..(25): SEQ ID NO: 6939; WAN024DKU_at; Start 125; Stop 149
tacccgcctgcaagcaaggatatct

SEQ ID NO: 161809 - DNA, 25 bp, Artificial
  probe
  misc_feature (1)..(25): SEQ ID NO: 6939; WAN024DKU_at; Start 76; Stop 100
gacaagacctcactagccttccaag

SEQ ID NO: 161810 - DNA, 25 bp, Artificial
  probe
  misc_feature (1)..(25): SEQ ID NO: 6939; WAN024DKU_at; Start 194; Stop 218
caccttttgattcggcgcgtccttg

SEQ ID NO: 161811 - DNA, 25 bp, Artificial
  probe
  misc_feature (1)..(25): SEQ ID NO: 6939; WAN024DKU_at; Start 67; Stop 91
ttggctccagacaagacctcactag

SEQ ID NO: 161812 - DNA, 25 bp, Artificial
  probe
  misc_feature (1)..(25): SEQ ID NO: 6939; WAN024DKU_at; Start 176; Stop 200
cactggcagactggctgtcaccttt

SEQ ID NO: 161813 - DNA, 25 bp, Artificial
  probe
  misc_feature (1)..(25): SEQ ID NO: 6939; WAN024DKU_at; Start 191; Stop 215
tgtcaccttttgattcggcgcgtcc

SEQ ID NO: 161814 - DNA, 25 bp, Artificial
  probe
  misc_feature (1)..(25): SEQ ID NO: 6939; WAN024DKU_at; Start 40; Stop 64
gacatcccttcgacaatcaaaattg

SEQ ID NO: 161815 - DNA, 25 bp, Artificial
  probe
  misc_feature (1)..(25): SEQ ID NO: 6939; WAN024DKU_at; Start 220; Stop 244
gtactaccagatggcgtcctgaggt

SEQ ID NO: 161816 - DNA, 25 bp, Artificial
  probe
  misc_feature (1)..(25): SEQ ID NO: 6939; WAN024DKU_at; Start 184; Stop 208
gactggctgtcaccttttgattcgg

SEQ ID NO: 161817 - DNA, 25 bp, Artificial
  probe
  misc_feature (1)..(25): SEQ ID NO: 6939; WAN024DKU_at; Start 202; Stop 226
gattcggcgcgtccttgggtactac

SEQ ID NO: 161818 - DNA, 25 bp, Artificial
  probe
  misc_feature (1)..(25): SEQ ID NO: 6939; WAN024DKU_at; Start 180; Stop 204
ggcagactggctgtcaccttttgat

SEQ ID NO: 161819 - DNA, 25 bp, Artificial
  probe
  misc_feature (1)..(25): SEQ ID NO: 6939; WAN024DKU_at; Start 96; Stop 120
ccaaggttcttcaattgtcaagaca

SEQ ID NO: 161820 - DNA, 25 bp, Artificial
  probe
  misc_feature (1)..(25): SEQ ID NO: 6939; WAN024DKU_at; Start 15; Stop 39
gagttccttgggtagaaagccaaca

SEQ ID NO: 161821 - DNA, 25 bp, Artificial
  probe
  misc_feature (1)..(25): SEQ ID NO: 6939; WAN024DKU_at; Start 142; Stop 166
ggatatctctctgcaaactctccag

SEQ ID NO: 161822 - DNA, 25 bp, Artificial
  probe
  misc_feature (1)..(25): SEQ ID NO: 6939; WAN024DKU_at; Start 213; Stop 237
tccttgggtactaccagatggcgtc

SEQ ID NO: 161823 - DNA, 25 bp, Artificial
  probe
  misc_feature (1)..(25): SEQ ID NO: 6939; WAN024DKU_at; Start 153; Stop 177
tgcaaactctccagttcatgcgcca

SEQ ID NO: 161824 - DNA, 25 bp, Artificial
  probe
  misc_feature (1)..(25): SEQ ID NO: 6939; WAN024DKU_at; Start 108; Stop 132
aattgtcaagacatccatacccgcc

SEQ ID NO: 161825 - DNA, 25 bp, Artificial
  probe
  misc_feature (1)..(25): SEQ ID NO: 6939; WAN024DKU_at; Start 217; Stop 241
tgggtactaccagatggcgtcctga

SEQ ID NO: 161826 - DNA, 25 bp, Artificial
  probe
  misc_feature (1)..(25): SEQ ID NO: 6939; WAN024DKU_at; Start 91; Stop 115
gccttccaaggttcttcaattgtca

SEQ ID NO: 161827 - DNA, 25 bp, Artificial
  probe
  misc_feature (1)..(25): SEQ ID NO: 6939; WAN024DKU_at; Start 35; Stop 59
caacagacatcccttcgacaatcaa

SEQ ID NO: 161828 - DNA, 25 bp, Artificial
  probe
  misc_feature (1)..(25): SEQ ID NO: 6939; WAN024DKU_at; Start 188; Stop 212
ggctgtcaccttttgattcggcgcg

SEQ ID NO: 161829 - DNA, 25 bp, Artificial
  probe
  misc_feature (1)..(25): SEQ ID NO: 6939; WAN024DKU_at; Start 120; Stop 144
atccatacccgcctgcaagcaagga

SEQ ID NO: 161830 - DNA, 25 bp, Artificial
  probe
  misc_feature (1)..(25): SEQ ID NO: 6939; WAN024DKU_at; Start 29; Stop 53
gaaagccaacagacatcccttcgac

SEQ ID NO: 161831 - DNA, 25 bp, Artificial
  probe
  misc_feature (1)..(25): SEQ ID NO: 1060; WAN024DKV_at; Start 456; Stop 480
ccttgctagagatacgactgtgaga

SEQ ID NO: 161832 - DNA, 25 bp, Artificial
  probe
  misc_feature (1)..(25): SEQ ID NO: 1060; WAN024DKV_at; Start 546; Stop 570
taaagaaactgagtctaaggcggat

SEQ ID NO: 161833 - DNA, 25 bp, Artificial
  probe
  misc_feature (1)..(25): SEQ ID NO: 1060; WAN024DKV_at; Start 118; Stop 142
taccaagctttagattctactacag

SEQ ID NO: 161834 - DNA, 25 bp, Artificial
  probe
  misc_feature (1)..(25): SEQ ID NO: 1060; WAN024DKV_at; Start 327; Stop 351
tagtgaggtcttgtctggagccaaa

SEQ ID NO: 161835 - DNA, 25 bp, Artificial
  probe
  misc_feature (1)..(25): SEQ ID NO: 1060; WAN024DKV_at; Start 62; Stop 86
cactgggaatatacggtcatggagc

SEQ ID NO: 161836 - DNA, 25 bp, Artificial
  probe
  misc_feature (1)..(25): SEQ ID NO: 1060; WAN024DKV_at; Start 343; Stop 367
ggagccaaaccaattttgattgtcg

SEQ ID NO: 161837 - DNA, 25 bp, Artificial
  probe
  misc_feature (1)..(25): SEQ ID NO: 1060; WAN024DKV_at; Start 253; Stop 277
gagagtttgcagagagatatccttg

SEQ ID NO: 161838 - DNA, 25 bp, Artificial
  probe
  misc_feature (1)..(25): SEQ ID NO: 1060; WAN024DKV_at; Start 486; Stop 510
cgatgcatcctttatattggctagc

SEQ ID NO: 161839 - DNA, 25 bp, Artificial
  probe
  misc_feature (1)..(25): SEQ ID NO: 1060; WAN024DKV_at; Start 500; Stop 524
tattggctagccatcagatgagacg

SEQ ID NO: 161840 - DNA, 25 bp, Artificial
  probe
  misc_feature (1)..(25): SEQ ID NO: 1060; WAN024DKV_at; Start 207; Stop 231
gccgaatcaaaaggtgacagccagt

SEQ ID NO: 161841 - DNA, 25 bp, Artificial
  probe
  misc_feature (1)..(25): SEQ ID NO: 1060; WAN024DKV_at; Start 188; Stop 212
tggtagtacccaaggacgcgccgaa

SEQ ID NO: 161842 - DNA, 25 bp, Artificial
  probe
  misc_feature (1)..(25): SEQ ID NO: 1060; WAN024DKV_at; Start 432; Stop 456
tgaggagaccgaattaaagcgacgc

SEQ ID NO: 161843 - DNA, 25 bp, Artificial
  probe
  misc_feature (1)..(25): SEQ ID NO: 1060; WAN024DKV_at; Start 596; Stop 620
aatttgatgtcaagaggacttaact

SEQ ID NO: 161844 - DNA, 25 bp, Artificial
  probe
  misc_feature (1)..(25): SEQ ID NO: 1060; WAN024DKV_at; Start 49; Stop 73
gggaaagtcaggacactgggaatat

SEQ ID NO: 161845 - DNA, 25 bp, Artificial
  probe
  misc_feature (1)..(25): SEQ ID NO: 1060; WAN024DKV_at; Start 214; Stop 238
caaaaggtgacagccagtctgccag

SEQ ID NO: 161846 - DNA, 25 bp, Artificial
  probe
  misc_feature (1)..(25): SEQ ID NO: 1060; WAN024DKV_at; Start 130; Stop 154
gattctactacagtaaatttgctag

SEQ ID NO: 161847 - DNA, 25 bp, Artificial
  probe
  misc_feature (1)..(25): SEQ ID NO: 1060; WAN024DKV_at; Start 510; Stop 534
ccatcagatgagacgggagcagtat

SEQ ID NO: 161848 - DNA, 25 bp, Artificial
  probe
  misc_feature (1)..(25): SEQ ID NO: 1060; WAN024DKV_at; Start 519; Stop 543
gagacgggagcagtatctgcgatac

SEQ ID NO: 161849 - DNA, 25 bp, Artificial
  probe
  misc_feature (1)..(25): SEQ ID NO: 1060; WAN024DKV_at; Start 408; Stop 432
aaaaaccatctgtttctacacggat

SEQ ID NO: 161850 - DNA, 25 bp, Artificial
  probe
  misc_feature (1)..(25): SEQ ID NO: 1060; WAN024DKV_at; Start 106; Stop 130
gcacaggaattgtaccaagctttag

SEQ ID NO: 161851 - DNA, 25 bp, Artificial
  probe
  misc_feature (1)..(25): SEQ ID NO: 1060; WAN024DKV_at; Start 471; Stop 495
gactgtgagaaatcgcgatgcatcc

SEQ ID NO: 161852 - DNA, 25 bp, Artificial
  probe
  misc_feature (1)..(25): SEQ ID NO: 1060; WAN024DKV_at; Start 447; Stop 471
aaagcgacgccttgctagagatacg

SEQ ID NO: 161853 - DNA, 25 bp, Artificial
  probe
  misc_feature (1)..(25): SEQ ID NO: 1060; WAN024DKV_at; Start 225; Stop 249
agccagtctgccagtggcgcatgaa

SEQ ID NO: 161854 - DNA, 25 bp, Artificial
  probe
  misc_feature (1)..(25): SEQ ID NO: 1060; WAN024DKV_at; Start 239; Stop 263
tggcgcatgaactggagagtttgca

SEQ ID NO: 161855 - DNA, 25 bp, Artificial
  probe
  misc_feature (1)..(25): SEQ ID NO: 1060; WAN024DKV_at; Start 26; Stop 50
aactagtctcagagatcgagacggg

SEQ ID NO: 161856 - DNA, 25 bp, Artificial
  probe
  misc_feature (1)..(25): SEQ ID NO: 1060; WAN024DKV_at; Start 264; Stop 288
gagagatatccttgccttgcaggcg

SEQ ID NO: 161857 - DNA, 25 bp, Artificial
  probe
  misc_feature (1)..(25): SEQ ID NO: 1060; WAN024DKV_at; Start 577; Stop 601
gtggaccaatcagaagataaatttg

SEQ ID NO: 161858 - DNA, 25 bp, Artificial
  probe
  misc_feature (1)..(25): SEQ ID NO: 1060; WAN024DKV_at; Start 528; Stop 552
gcagtatctgcgatactataaagaa

SEQ ID NO: 161859 - DNA, 25 bp, Artificial
  probe
  misc_feature (1)..(25): SEQ ID NO: 1060; WAN024DKV_at; Start 561; Stop 585
taaggcggatatcttagtggaccaa

SEQ ID NO: 161860 - DNA, 25 bp, Artificial
  probe
  misc_feature (1)..(25): SEQ ID NO: 1060; WAN024DKV_at; Start 198; Stop 222
caaggacgcgccgaatcaaaaggtg

SEQ ID NO: 161861 - DNA, 25 bp, Artificial
  probe
  misc_feature (1)..(25): SEQ ID NO: 1060; WAN024DKV_at; Start 75; Stop 99
cggtcatggagcttcaggtaaatca

SEQ ID NO: 161862 - DNA, 25 bp, Artificial
  probe
  misc_feature (1)..(25): SEQ ID NO: 1060; WAN024DKV_at; Start 422; Stop 446
tctacacggatgaggagaccgaatt

SEQ ID NO: 161863 - DNA, 25 bp, Artificial
  probe
  misc_feature (1)..(25): SEQ ID NO: 1060; WAN024DKV_at; Start 91; Stop 115
ggtaaatcaacctttgcacaggaat

SEQ ID NO: 161864 - DNA, 25 bp, Artificial
  probe
  misc_feature (1)..(25): SEQ ID NO: 1060; WAN024DKV_at; Start 13; Stop 37
gacttagtagaccaactagtctcag

SEQ ID NO: 161865 - DNA, 25 bp, Artificial
  probe
  misc_feature (1)..(25): SEQ ID NO: 1186; WAN024DKW_at; Start 495; Stop 519
tatcgatgtgcaaaaatcgctcaaa

SEQ ID NO: 161866 - DNA, 25 bp, Artificial
  probe
  misc_feature (1)..(25): SEQ ID NO: 1186; WAN024DKW_at; Start 511; Stop 535
tcgctcaaaagtgggcaagtagtga

SEQ ID NO: 161867 - DNA, 25 bp, Artificial
  probe
  misc_feature (1)..(25): SEQ ID NO: 1186; WAN024DKW_at; Start 54; Stop 78
tatcattgactacaaggcctttaac

SEQ ID NO: 161868 - DNA, 25 bp, Artificial
  probe
  misc_feature (1)..(25): SEQ ID NO: 1186; WAN024DKW_at; Start 491; Stop 515
gaattatcgatgtgcaaaaatcgct

SEQ ID NO: 161869 - DNA, 25 bp, Artificial
  probe
  misc_feature (1)..(25): SEQ ID NO: 1186; WAN024DKW_at; Start 484; Stop 508
aaccaacgaattatcgatgtgcaaa

SEQ ID NO: 161870 - DNA, 25 bp, Artificial
  probe
  misc_feature (1)..(25): SEQ ID NO: 1186; WAN024DKW_at; Start 553; Stop 577
gacggaaaagaaagctatgaacagg

SEQ ID NO: 161871 - DNA, 25 bp, Artificial
  probe
  misc_feature (1)..(25): SEQ ID NO: 1186; WAN024DKW_at; Start 17; Stop 41
cacaagaatggaaaagcgaggaact

SEQ ID NO: 161872 - DNA, 25 bp, Artificial
  probe
  misc_feature (1)..(25): SEQ ID NO: 1186; WAN024DKW_at; Start 25; Stop 49
tggaaaagcgaggaacttagtcaag

SEQ ID NO: 161873 - DNA, 25 bp, Artificial
  probe
  misc_feature (1)..(25): SEQ ID NO: 1186; WAN024DKW_at; Start 547; Stop 571
ctcaatgacggaaaagaaagctatg

SEQ ID NO: 161874 - DNA, 25 bp, Artificial
  probe
  misc_feature (1)..(25): SEQ ID NO: 1186; WAN024DKW_at; Start 10; Stop 34
ccaaaaccacaagaatggaaaagcg

SEQ ID NO: 161875 - DNA, 25 bp, Artificial
  probe
  misc_feature (1)..(25): SEQ ID NO: 1186; WAN024DKW_at; Start 499; Stop 523
gatgtgcaaaaatcgctcaaaagtg

SEQ ID NO: 161876 - DNA, 25 bp, Artificial
  probe
  misc_feature (1)..(25): SEQ ID NO: 1186; WAN024DKW_at; Start 505; Stop 529
caaaaatcgctcaaaagtgggcaag

SEQ ID NO: 161877 - DNA, 25 bp, Artificial
  probe
  misc_feature (1)..(25): SEQ ID NO: 1186; WAN024DKW_at; Start 557; Stop 581
gaaaagaaagctatgaacaggtgaa

SEQ ID NO: 161878 - DNA, 25 bp, Artificial
  probe
  misc_feature (1)..(25): SEQ ID NO: 1186; WAN024DKW_at; Start 543; Stop 567
caagctcaatgacggaaaagaaagc

SEQ ID NO: 161879 - DNA, 25 bp, Artificial
  probe
  misc_feature (1)..(25): SEQ ID NO: 1186; WAN024DKW_at; Start 29; Stop 53
aaagcgaggaacttagtcaaggtcg

SEQ ID NO: 161880 - DNA, 25 bp, Artificial
  probe
  misc_feature (1)..(25): SEQ ID NO: 1186; WAN024DKW_at; Start 22; Stop 46
gaatggaaaagcgaggaacttagtc

SEQ ID NO: 161881 - DNA, 25 bp, Artificial
  probe
  misc_feature (1)..(25): SEQ ID NO: 1186; WAN024DKW_at; Start 361; Stop 385
tgggaagaaatgatgttggaaactc

SEQ ID NO: 161882 - DNA, 25 bp, Artificial
  probe
  misc_feature (1)..(25): SEQ ID NO: 1186; WAN024DKW_at; Start 46; Stop 70
caaggtcgtatcattgactacaagg

SEQ ID NO: 161883 - DNA, 25 bp, Artificial
  probe
  misc_feature (1)..(25): SEQ ID NO: 1186; WAN024DKW_at; Start 51; Stop 75
tcgtatcattgactacaaggccttt

SEQ ID NO: 161884 - DNA, 25 bp, Artificial
  probe
  misc_feature (1)..(25): SEQ ID NO: 1186; WAN024DKW_at; Start 534; Stop 558
gatttgggacaagctcaatgacgga

SEQ ID NO: 161885 - DNA, 25 bp, Artificial
  probe
  misc_feature (1)..(25): SEQ ID NO: 1186; WAN024DKW_at; Start 526; Stop 550
caagtagtgatttgggacaagctca

SEQ ID NO: 161886 - DNA, 25 bp, Artificial
  probe
  misc_feature (1)..(25): SEQ ID NO: 1186; WAN024DKW_at; Start 564; Stop 588
aagctatgaacaggtgaagagagaa

SEQ ID NO: 161887 - DNA, 25 bp, Artificial
  probe
  misc_feature (1)..(25): SEQ ID NO: 1186; WAN024DKW_at; Start 502; Stop 526
gtgcaaaaatcgctcaaaagtgggc

SEQ ID NO: 161888 - DNA, 25 bp, Artificial
  probe
  misc_feature (1)..(25): SEQ ID NO: 1186; WAN024DKW_at; Start 57; Stop 81
cattgactacaaggcctttaacttt

SEQ ID NO: 161889 - DNA, 25 bp, Artificial
  probe
  misc_feature (1)..(25): SEQ ID NO: 1186; WAN024DKW_at; Start 375; Stop 399
gttggaaactccagataaactggaa

SEQ ID NO: 161890 - DNA, 25 bp, Artificial
  probe
  misc_feature (1)..(25): SEQ ID NO: 1186; WAN024DKW_at; Start 538; Stop 562
tgggacaagctcaatgacggaaaag

SEQ ID NO: 161891 - DNA, 25 bp, Artificial
  probe
  misc_feature (1)..(25): SEQ ID NO: 1186; WAN024DKW_at; Start 33; Stop 57
cgaggaacttagtcaaggtcgtatc

SEQ ID NO: 161892 - DNA, 25 bp, Artificial
  probe
  misc_feature (1)..(25): SEQ ID NO: 1186; WAN024DKW_at; Start 364; Stop 388
gaagaaatgatgttggaaactccag

SEQ ID NO: 161893 - DNA, 25 bp, Artificial
  probe
  misc_feature (1)..(25): SEQ ID NO: 1186; WAN024DKW_at; Start 372; Stop 396
gatgttggaaactccagataaactg

SEQ ID NO: 161894 - DNA, 25 bp, Artificial
  probe
  misc_feature (1)..(25): SEQ ID NO: 1186; WAN024DKW_at; Start 2; Stop 26
tgaataatccaaaaccacaagaatg

SEQ ID NO: 161895 - DNA, 25 bp, Artificial
  probe
  misc_feature (1)..(25): SEQ ID NO: 1186; WAN024DKW_at; Start 37; Stop 61
gaacttagtcaaggtcgtatcattg

SEQ ID NO: 161896 - DNA, 25 bp, Artificial
  probe
  misc_feature (1)..(25): SEQ ID NO: 1186; WAN024DKW_at; Start 530; Stop 554
tagtgatttgggacaagctcaatga

SEQ ID NO: 161897 - DNA, 25 bp, Artificial
  probe
  misc_feature (1)..(25): SEQ ID NO: 1186; WAN024DKW_at; Start 367; Stop 391
gaaatgatgttggaaactccagata

SEQ ID NO: 161898 - DNA, 25 bp, Artificial
  probe
  misc_feature (1)..(25): SEQ ID NO: 1186; WAN024DKW_at; Start 508; Stop 532
aaatcgctcaaaagtgggcaagtag

SEQ ID NO: 161899 - DNA, 25 bp, Artificial
  probe
  misc_feature (1)..(25): SEQ ID NO: 6806; WAN024DKX_at; Start 54; Stop 78
gacagagtttgaaaagagccaatca

SEQ ID NO: 161900 - DNA, 25 bp, Artificial
  probe
  misc_feature (1)..(25): SEQ ID NO: 6806; WAN024DKX_at; Start 67; Stop 91
aagagccaatcagcccatgatggag

SEQ ID NO: 161901 - DNA, 25 bp, Artificial
  probe
  misc_feature (1)..(25): SEQ ID NO: 6806; WAN024DKX_at; Start 77; Stop 101
cagcccatgatggaggattttggga

SEQ ID NO: 161902 - DNA, 25 bp, Artificial
  probe
  misc_feature (1)..(25): SEQ ID NO: 6806; WAN024DKX_at; Start 268; Stop 292
ctgaattatgctggccacattggct

SEQ ID NO: 161903 - DNA, 25 bp, Artificial
  probe
  misc_feature (1)..(25): SEQ ID NO: 6806; WAN024DKX_at; Start 147; Stop 171
taaagaaatgggaatatggctacct

SEQ ID NO: 161904 - DNA, 25 bp, Artificial
  probe
  misc_feature (1)..(25): SEQ ID NO: 6806; WAN024DKX_at; Start 106; Stop 130
gaggatttttcttacgaggagtggc

SEQ ID NO: 161905 - DNA, 25 bp, Artificial
  probe
  misc_feature (1)..(25): SEQ ID NO: 6806; WAN024DKX_at; Start 61; Stop 85
tttgaaaagagccaatcagcccatg

SEQ ID NO: 161906 - DNA, 25 bp, Artificial
  probe
  misc_feature (1)..(25): SEQ ID NO: 6806; WAN024DKX_at; Start 193; Stop 217
cagttcgtattgtttggtgaatcag

SEQ ID NO: 161907 - DNA, 25 bp, Artificial
  probe
  misc_feature (1)..(25): SEQ ID NO: 6806; WAN024DKX_at; Start 266; Stop 290
tactgaattatgctggccacattgg

SEQ ID NO: 161908 - DNA, 25 bp, Artificial
  probe
  misc_feature (1)..(25): SEQ ID NO: 6806; WAN024DKX_at; Start 200; Stop 224
tattgtttggtgaatcaggttgtgc

SEQ ID NO: 161909 - DNA, 25 bp, Artificial
  probe
  misc_feature (1)..(25): SEQ ID NO: 6806; WAN024DKX_at; Start 172; Stop 196
gaaaatcgcgttccatcgatacagt

SEQ ID NO: 161910 - DNA, 25 bp, Artificial
  probe
  misc_feature (1)..(25): SEQ ID NO: 6806; WAN024DKX_at; Start 71; Stop 95
gccaatcagcccatgatggaggatt

SEQ ID NO: 161911 - DNA, 25 bp, Artificial
  probe
  misc_feature (1)..(25): SEQ ID NO: 6806; WAN024DKX_at; Start 273; Stop 297
ttatgctggccacattggctactcc

SEQ ID NO: 161912 - DNA, 25 bp, Artificial
  probe
  misc_feature (1)..(25): SEQ ID NO: 6806; WAN024DKX_at; Start 58; Stop 82
gagtttgaaaagagccaatcagccc

SEQ ID NO: 161913 - DNA, 25 bp, Artificial
  probe
  misc_feature (1)..(25): SEQ ID NO: 6806; WAN024DKX_at; Start 142; Stop 166
cgtaataaagaaatgggaatatggc

SEQ ID NO: 161914 - DNA, 25 bp, Artificial
  probe
  misc_feature (1)..(25): SEQ ID NO: 6806; WAN024DKX_at; Start 236; Stop 260
tgaatctgcgattgagactgaatga

SEQ ID NO: 161915 - DNA, 25 bp, Artificial
  probe
  misc_feature (1)..(25): SEQ ID NO: 6806; WAN024DKX_at; Start 165; Stop 189
gctacctgaaaatcgcgttccatcg

SEQ ID NO: 161916 - DNA, 25 bp, Artificial
  probe
  misc_feature (1)..(25): SEQ ID NO: 6806; WAN024DKX_at; Start 151; Stop 175
gaaatgggaatatggctacctgaaa

SEQ ID NO: 161917 - DNA, 25 bp, Artificial
  probe
  misc_feature (1)..(25): SEQ ID NO: 6806; WAN024DKX_at; Start 262; Stop 286
gggttactgaattatgctggccaca

SEQ ID NO: 161918 - DNA, 25 bp, Artificial
  probe
  misc_feature (1)..(25): SEQ ID NO: 6806; WAN024DKX_at; Start 64; Stop 88
gaaaagagccaatcagcccatgatg

SEQ ID NO: 161919 - DNA, 25 bp, Artificial
  probe
  misc_feature (1)..(25): SEQ ID NO: 6806; WAN024DKX_at; Start 115; Stop 139
tcttacgaggagtggctagaaggta

SEQ ID NO: 161920 - DNA, 25 bp, Artificial
  probe
  misc_feature (1)..(25): SEQ ID NO: 6806; WAN024DKX_at; Start 81; Stop 105
ccatgatggaggattttgggatgtt

SEQ ID NO: 161921 - DNA, 25 bp, Artificial
  probe
  misc_feature (1)..(25): SEQ ID NO: 6806; WAN024DKX_at; Start 109; Stop 133
gatttttcttacgaggagtggctag

SEQ ID NO: 161922 - DNA, 25 bp, Artificial
  probe
  misc_feature (1)..(25): SEQ ID NO: 6806; WAN024DKX_at; Start 207; Stop 231
tggtgaatcaggttgtgctctagga

SEQ ID NO: 161923 - DNA, 25 bp, Artificial
  probe
  misc_feature (1)..(25): SEQ ID NO: 6806; WAN024DKX_at; Start 158; Stop 182
gaatatggctacctgaaaatcgcgt

SEQ ID NO: 161924 - DNA, 25 bp, Artificial
  probe
  misc_feature (1)..(25): SEQ ID NO: 6806; WAN024DKX_at; Start 185; Stop 209
catcgatacagttcgtattgtttgg

SEQ ID NO: 161925 - DNA, 25 bp, Artificial
  probe
  misc_feature (1)..(25): SEQ ID NO: 6806; WAN024DKX_at; Start 222; Stop 246
tgctctaggatttttgaatctgcga

SEQ ID NO: 161926 - DNA, 25 bp, Artificial
  probe
  misc_feature (1)..(25): SEQ ID NO: 6806; WAN024DKX_at; Start 124; Stop 148
gagtggctagaaggtaaccgtaata

SEQ ID NO: 161927 - DNA, 25 bp, Artificial
  probe
  misc_feature (1)..(25): SEQ ID NO: 6806; WAN024DKX_at; Start 97; Stop 121
tgggatgttgaggatttttcttacg

SEQ ID NO: 161928 - DNA, 25 bp, Artificial
  probe
  misc_feature (1)..(25): SEQ ID NO: 6806; WAN024DKX_at; Start 229; Stop 253
ggatttttgaatctgcgattgagac

SEQ ID NO: 161929 - DNA, 25 bp, Artificial
  probe
  misc_feature (1)..(25): SEQ ID NO: 6806; WAN024DKX_at; Start 161; Stop 185
tatggctacctgaaaatcgcgttcc

SEQ ID NO: 161930 - DNA, 25 bp, Artificial
  probe
  misc_feature (1)..(25): SEQ ID NO: 6806; WAN024DKX_at; Start 239; Stop 263
atctgcgattgagactgaatgaggg

SEQ ID NO: 161931 - DNA, 25 bp, Artificial
  probe
  misc_feature (1)..(25): SEQ ID NO: 6806; WAN024DKX_at; Start 178; Stop 202
cgcgttccatcgatacagttcgtat

SEQ ID NO: 161932 - DNA, 25 bp, Artificial
  probe
  misc_feature (1)..(25): SEQ ID NO: 6806; WAN024DKX_at; Start 215; Stop 239
caggttgtgctctaggatttttgaa

SEQ ID NO: 161933 - DNA, 25 bp, Artificial
  probe
  misc_feature (1)..(25): SEQ ID NO: 2237; WAN024DKY_at; Start 185; Stop 209
ctgcaattcagttagtggctttttc

SEQ ID NO: 161934 - DNA, 25 bp, Artificial
  probe
  misc_feature (1)..(25): SEQ ID NO: 2237; WAN024DKY_at; Start 220; Stop 244
caagcagttggatttcttaatctcc

SEQ ID NO: 161935 - DNA, 25 bp, Artificial
  probe
  misc_feature (1)..(25): SEQ ID NO: 2237; WAN024DKY_at; Start 197; Stop 221
tagtggctttttctgagaaaggtca

SEQ ID NO: 161936 - DNA, 25 bp, Artificial
  probe
  misc_feature (1)..(25): SEQ ID NO: 2237; WAN024DKY_at; Start 205; Stop 229
ttttctgagaaaggtcaagcagttg

SEQ ID NO: 161937 - DNA, 25 bp, Artificial
  probe
  misc_feature (1)..(25): SEQ ID NO: 2237; WAN024DKY_at; Start 207; Stop 231
ttctgagaaaggtcaagcagttgga

SEQ ID NO: 161938 - DNA, 25 bp, Artificial
  probe
  misc_feature (1)..(25): SEQ ID NO: 2237; WAN024DKY_at; Start 201; Stop 225
ggctttttctgagaaaggtcaagca

SEQ ID NO: 161939 - DNA, 25 bp, Artificial
  probe
  misc_feature (1)..(25): SEQ ID NO: 2237; WAN024DKY_at; Start 189; Stop 213
aattcagttagtggctttttctgag

SEQ ID NO: 161940 - DNA, 25 bp, Artificial
  probe
  misc_feature (1)..(25): SEQ ID NO: 2237; WAN024DKY_at; Start 226; Stop 250
gttggatttcttaatctccggttgc

SEQ ID NO: 161941 - DNA, 25 bp, Artificial
  probe
  misc_feature (1)..(25): SEQ ID NO: 2237; WAN024DKY_at; Start 231; Stop 255
atttcttaatctccggttgcgcctc

SEQ ID NO: 161942 - DNA, 25 bp, Artificial
  probe
  misc_feature (1)..(25): SEQ ID NO: 2237; WAN024DKY_at; Start 230; Stop 254
gatttcttaatctccggttgcgcct

SEQ ID NO: 161943 - DNA, 25 bp, Artificial
  probe
  misc_feature (1)..(25): SEQ ID NO: 2237; WAN024DKY_at; Start 229; Stop 253
ggatttcttaatctccggttgcgcc

SEQ ID NO: 161944 - DNA, 25 bp, Artificial
  probe
  misc_feature (1)..(25): SEQ ID NO: 2237; WAN024DKY_at; Start 214; Stop 238
aaaggtcaagcagttggatttctta

SEQ ID NO: 161945 - DNA, 25 bp, Artificial
  probe
  misc_feature (1)..(25): SEQ ID NO: 2237; WAN024DKY_at; Start 194; Stop 218
agttagtggctttttctgagaaagg

SEQ ID NO: 161946 - DNA, 25 bp, Artificial
  probe
  misc_feature (1)..(25): SEQ ID NO: 2237; WAN024DKY_at; Start 228; Stop 252
tggatttcttaatctccggttgcgc

SEQ ID NO: 161947 - DNA, 25 bp, Artificial
  probe
  misc_feature (1)..(25): SEQ ID NO: 2237; WAN024DKY_at; Start 206; Stop 230
tttctgagaaaggtcaagcagttgg

SEQ ID NO: 161948 - DNA, 25 bp, Artificial
  probe
  misc_feature (1)..(25): SEQ ID NO: 2237; WAN024DKY_at; Start 224; Stop 248
cagttggatttcttaatctccggtt

SEQ ID NO: 161949 - DNA, 25 bp, Artificial
  probe
  misc_feature (1)..(25): SEQ ID NO: 2237; WAN024DKY_at; Start 134; Stop 158
aaagcaatcaggaacaggaaatggg

SEQ ID NO: 161950 - DNA, 25 bp, Artificial
  probe
  misc_feature (1)..(25): SEQ ID NO: 2237; WAN024DKY_at; Start 222; Stop 246
agcagttggatttcttaatctccgg

SEQ ID NO: 161951 - DNA, 25 bp, Artificial
  probe
  misc_feature (1)..(25): SEQ ID NO: 2237; WAN024DKY_at; Start 237; Stop 261
taatctccggttgcgcctcagtaac

SEQ ID NO: 161952 - DNA, 25 bp, Artificial
  probe
  misc_feature (1)..(25): SEQ ID NO: 2237; WAN024DKY_at; Start 209; Stop 233
ctgagaaaggtcaagcagttggatt

SEQ ID NO: 161953 - DNA, 25 bp, Artificial
  probe
  misc_feature (1)..(25): SEQ ID NO: 2237; WAN024DKY_at; Start 217; Stop 241
ggtcaagcagttggatttcttaatc

SEQ ID NO: 161954 - DNA, 25 bp, Artificial
  probe
  misc_feature (1)..(25): SEQ ID NO: 2237; WAN024DKY_at; Start 227; Stop 251
ttggatttcttaatctccggttgcg

SEQ ID NO: 161955 - DNA, 25 bp, Artificial
  probe
  misc_feature (1)..(25): SEQ ID NO: 2237; WAN024DKY_at; Start 211; Stop 235
gagaaaggtcaagcagttggatttc

SEQ ID NO: 161956 - DNA, 25 bp, Artificial
  probe
  misc_feature (1)..(25): SEQ ID NO: 2237; WAN024DKY_at; Start 236; Stop 260
ttaatctccggttgcgcctcagtaa

SEQ ID NO: 161957 - DNA, 25 bp, Artificial
  probe
  misc_feature (1)..(25): SEQ ID NO: 2237; WAN024DKY_at; Start 187; Stop 211
gcaattcagttagtggctttttctg

SEQ ID NO: 161958 - DNA, 25 bp, Artificial
  probe
  misc_feature (1)..(25): SEQ ID NO: 2237; WAN024DKY_at; Start 240; Stop 264
tctccggttgcgcctcagtaacttt

SEQ ID NO: 161959 - DNA, 25 bp, Artificial
  probe
  misc_feature (1)..(25): SEQ ID NO: 2237; WAN024DKY_at; Start 203; Stop 227
ctttttctgagaaaggtcaagcagt

SEQ ID NO: 161960 - DNA, 25 bp, Artificial
  probe
  misc_feature (1)..(25): SEQ ID NO: 2237; WAN024DKY_at; Start 200; Stop 224
tggctttttctgagaaaggtcaagc

SEQ ID NO: 161961 - DNA, 25 bp, Artificial
  probe
  misc_feature (1)..(25): SEQ ID NO: 2237; WAN024DKY_at; Start 193; Stop 217
cagttagtggctttttctgagaaag

SEQ ID NO: 161962 - DNA, 25 bp, Artificial
  probe
  misc_feature (1)..(25): SEQ ID NO: 2237; WAN024DKY_at; Start 234; Stop 258
tcttaatctccggttgcgcctcagt

SEQ ID NO: 161963 - DNA, 25 bp, Artificial
  probe
  misc_feature (1)..(25): SEQ ID NO: 2237; WAN024DKY_at; Start 133; Stop 157
gaaagcaatcaggaacaggaaatgg

SEQ ID NO: 161964 - DNA, 25 bp, Artificial
  probe
  misc_feature (1)..(25): SEQ ID NO: 2237; WAN024DKY_at; Start 208; Stop 232
tctgagaaaggtcaagcagttggat

SEQ ID NO: 161965 - DNA, 25 bp, Artificial
  probe
  misc_feature (1)..(25): SEQ ID NO: 2237; WAN024DKY_at; Start 235; Stop 259
cttaatctccggttgcgcctcagta

SEQ ID NO: 161966 - DNA, 25 bp, Artificial
  probe
  misc_feature (1)..(25): SEQ ID NO: 2237; WAN024DKY_at; Start 223; Stop 247
gcagttggatttcttaatctccggt

SEQ ID NO: 161967 - DNA, 25 bp, Artificial
  probe
  misc_feature (1)..(25): SEQ ID NO: 5780; WAN024DKZ_at; Start 327; Stop 351
aaattaccaacaagtaaagactgat

SEQ ID NO: 161968 - DNA, 25 bp, Artificial
  probe
  misc_feature (1)..(25): SEQ ID NO: 5780; WAN024DKZ_at; Start 341; Stop 365
taaagactgattactcagagtttaa

SEQ ID NO: 161969 - DNA, 25 bp, Artificial
  probe
  misc_feature (1)..(25): SEQ ID NO: 5780; WAN024DKZ_at; Start 329; Stop 353
attaccaacaagtaaagactgatta

SEQ ID NO: 161970 - DNA, 25 bp, Artificial
  probe
  misc_feature (1)..(25): SEQ ID NO: 5780; WAN024DKZ_at; Start 56; Stop 80
cggtacccttatcaagacgtaatcg

SEQ ID NO: 161971 - DNA, 25 bp, Artificial
  probe
  misc_feature (1)..(25): SEQ ID NO: 5780; WAN024DKZ_at; Start 328; Stop 352
aattaccaacaagtaaagactgatt

SEQ ID NO: 161972 - DNA, 25 bp, Artificial
  probe
  misc_feature (1)..(25): SEQ ID NO: 5780; WAN024DKZ_at; Start 52; Stop 76
agctcggtacccttatcaagacgta

SEQ ID NO: 161973 - DNA, 25 bp, Artificial
  probe
  misc_feature (1)..(25): SEQ ID NO: 5780; WAN024DKZ_at; Start 54; Stop 78
ctcggtacccttatcaagacgtaat

SEQ ID NO: 161974 - DNA, 25 bp, Artificial
  probe
  misc_feature (1)..(25): SEQ ID NO: 5780; WAN024DKZ_at; Start 338; Stop 362
aagtaaagactgattactcagagtt

SEQ ID NO: 161975 - DNA, 25 bp, Artificial
  probe
  misc_feature (1)..(25): SEQ ID NO: 5780; WAN024DKZ_at; Start 339; Stop 363
agtaaagactgattactcagagttt

SEQ ID NO: 161976 - DNA, 25 bp, Artificial
  probe
  misc_feature (1)..(25): SEQ ID NO: 5780; WAN024DKZ_at; Start 51; Stop 75
gagctcggtacccttatcaagacgt

SEQ ID NO: 161977 - DNA, 25 bp, Artificial
  probe
  misc_feature (1)..(25): SEQ ID NO: 5780; WAN024DKZ_at; Start 343; Stop 367
aagactgattactcagagtttaaag

SEQ ID NO: 161978 - DNA, 25 bp, Artificial
  probe
  misc_feature (1)..(25): SEQ ID NO: 5780; WAN024DKZ_at; Start 333; Stop 357
ccaacaagtaaagactgattactca

SEQ ID NO: 161979 - DNA, 25 bp, Artificial
  probe
  misc_feature (1)..(25): SEQ ID NO: 5780; WAN024DKZ_at; Start 331; Stop 355
taccaacaagtaaagactgattact

SEQ ID NO: 161980 - DNA, 25 bp, Artificial
  probe
  misc_feature (1)..(25): SEQ ID NO: 5780; WAN024DKZ_at; Start 50; Stop 74
cgagctcggtacccttatcaagacg

SEQ ID NO: 161981 - DNA, 25 bp, Artificial
  probe
  misc_feature (1)..(25): SEQ ID NO: 5780; WAN024DKZ_at; Start 330; Stop 354
ttaccaacaagtaaagactgattac

SEQ ID NO: 161982 - DNA, 25 bp, Artificial
  probe
  misc_feature (1)..(25): SEQ ID NO: 5780; WAN024DKZ_at; Start 334; Stop 358
caacaagtaaagactgattactcag

SEQ ID NO: 161983 - DNA, 25 bp, Artificial
  probe
  misc_feature (1)..(25): SEQ ID NO: 5780; WAN024DKZ_at; Start 342; Stop 366
aaagactgattactcagagtttaaa

SEQ ID NO: 161984 - DNA, 25 bp, Artificial
  probe
  misc_feature (1)..(25): SEQ ID NO: 5780; WAN024DKZ_at; Start 53; Stop 77
gctcggtacccttatcaagacgtaa

SEQ ID NO: 161985 - DNA, 25 bp, Artificial
  probe
  misc_feature (1)..(25): SEQ ID NO: 5780; WAN024DKZ_at; Start 58; Stop 82
gtacccttatcaagacgtaatcgtc

SEQ ID NO: 161986 - DNA, 25 bp, Artificial
  probe
  misc_feature (1)..(25): SEQ ID NO: 5780; WAN024DKZ_at; Start 332; Stop 356
accaacaagtaaagactgattactc

SEQ ID NO: 161987 - DNA, 25 bp, Artificial
  probe
  misc_feature (1)..(25): SEQ ID NO: 5780; WAN024DKZ_at; Start 55; Stop 79
tcggtacccttatcaagacgtaatc

SEQ ID NO: 161988 - DNA, 25 bp, Artificial
  probe
  misc_feature (1)..(25): SEQ ID NO: 5780; WAN024DKZ_at; Start 340; Stop 364
gtaaagactgattactcagagttta

SEQ ID NO: 161989 - DNA, 25 bp, Artificial
  probe
  misc_feature (1)..(25): SEQ ID NO: 5780; WAN024DKZ_at; Start 344; Stop 368
agactgattactcagagtttaaagt

SEQ ID NO: 161990 - DNA, 25 bp, Artificial
  probe
  misc_feature (1)..(25): SEQ ID NO: 5780; WAN024DKZ_at; Start 345; Stop 369
gactgattactcagagtttaaagtc

SEQ ID NO: 161991 - DNA, 25 bp, Artificial
  probe
  misc_feature (1)..(25): SEQ ID NO: 5780; WAN024DKZ_at; Start 335; Stop 359
aacaagtaaagactgattactcaga

SEQ ID NO: 161992 - DNA, 25 bp, Artificial
  probe
  misc_feature (1)..(25): SEQ ID NO: 5780; WAN024DKZ_at; Start 337; Stop 361
caagtaaagactgattactcagagt

SEQ ID NO: 161993 - DNA, 25 bp, Artificial
  probe
  misc_feature (1)..(25): SEQ ID NO: 5780; WAN024DKZ_at; Start 336; Stop 360
acaagtaaagactgattactcagag

SEQ ID NO: 161994 - DNA, 25 bp, Artificial
  probe
  misc_feature (1)..(25): SEQ ID NO: 4920; WAN024DL2_at; Start 440; Stop 464
tttacatgctagttacaggtcttgc

SEQ ID NO: 161995 - DNA, 25 bp, Artificial
  probe
  misc_feature (1)..(25): SEQ ID NO: 4920; WAN024DL2_at; Start 739; Stop 763
tatccaactgcctactatagtgctg

SEQ ID NO: 161996 - DNA, 25 bp, Artificial
  probe
  misc_feature (1)..(25): SEQ ID NO: 4920; WAN024DL2_at; Start 91; Stop 115
gaatcgcatcatcgtgaatcaagtc

SEQ ID NO: 161997 - DNA, 25 bp, Artificial
  probe
  misc_feature (1)..(25): SEQ ID NO: 4920; WAN024DL2_at; Start 471; Stop 495
tggaggctatgcgactcttttagcg

SEQ ID NO: 161998 - DNA, 25 bp, Artificial
  probe
  misc_feature (1)..(25): SEQ ID NO: 4920; WAN024DL2_at; Start 73; Stop 97
gaataccaaatcgaacaagaatcgc

SEQ ID NO: 161999 - DNA, 25 bp, Artificial
  probe
  misc_feature (1)..(25): SEQ ID NO: 4920; WAN024DL2_at; Start 190; Stop 214
gacttaatgagtgcacaagaagtgc

SEQ ID NO: 162000 - DNA, 25 bp, Artificial
  probe
  misc_feature (1)..(25): SEQ ID NO: 4920; WAN024DL2_at; Start 243; Stop 267
tcagacagggaagatttacagcgac

SEQ ID NO: 162001 - DNA, 25 bp, Artificial
  probe
  misc_feature (1)..(25): SEQ ID NO: 4920; WAN024DL2_at; Start 1066; Stop 1090
accaatattaagagtcaacagaggg

SEQ ID NO: 162002 - DNA, 25 bp, Artificial
  probe
  misc_feature (1)..(25): SEQ ID NO: 4920; WAN024DL2_at; Start 798; Stop 822
tcgttatcctattgacagtattcgc

SEQ ID NO: 162003 - DNA, 25 bp, Artificial
  probe
  misc_feature (1)..(25): SEQ ID NO: 4920; WAN024DL2_at; Start 558; Stop 582
taagggatttgtacggattgggcta

SEQ ID NO: 162004 - DNA, 25 bp, Artificial
  probe
  misc_feature (1)..(25): SEQ ID NO: 4920; WAN024DL2_at; Start 756; Stop 780
tagtgctgcaacaggaagttttggg

SEQ ID NO: 162005 - DNA, 25 bp, Artificial
  probe
  misc_feature (1)..(25): SEQ ID NO: 4920; WAN024DL2_at; Start 259; Stop 283
tacagcgactattatggaagtcaag

SEQ ID NO: 162006 - DNA, 25 bp, Artificial
  probe
  misc_feature (1)..(25): SEQ ID NO: 4920; WAN024DL2_at; Start 1029; Stop 1053
gatggtcgtcttccctgttttccta

SEQ ID NO: 162007 - DNA, 25 bp, Artificial
  probe
  misc_feature (1)..(25): SEQ ID NO: 4920; WAN024DL2_at; Start 995; Stop 1019
tcttttcacaagagcctctgcacgc

SEQ ID NO: 162008 - DNA, 25 bp, Artificial
  probe
  misc_feature (1)..(25): SEQ ID NO: 4920; WAN024DL2_at; Start 306; Stop 330
ttacgtgagtcagggcggatttttc

SEQ ID NO: 162009 - DNA, 25 bp, Artificial
  probe
  misc_feature (1)..(25): SEQ ID NO: 4920; WAN024DL2_at; Start 1115; Stop 1139
gagaaacgccagttagcctatggag

SEQ ID NO: 162010 - DNA, 25 bp, Artificial
  probe
  misc_feature (1)..(25): SEQ ID NO: 4920; WAN024DL2_at; Start 455; Stop 479
caggtcttgcttttggtggaggcta

SEQ ID NO: 162011 - DNA, 25 bp, Artificial
  probe
  misc_feature (1)..(25): SEQ ID NO: 4920; WAN024DL2_at; Start 383; Stop 407
gatcagcggacaccttgacagagca

SEQ ID NO: 162012 - DNA, 25 bp, Artificial
  probe
  misc_feature (1)..(25): SEQ ID NO: 4920; WAN024DL2_at; Start 398; Stop 422
tgacagagcaaggagaccaagctgg

SEQ ID NO: 162013 - DNA, 25 bp, Artificial
  probe
  misc_feature (1)..(25): SEQ ID NO: 4920; WAN024DL2_at; Start 106; Stop 130
gaatcaagtcgtcttcctttggtga

SEQ ID NO: 162014 - DNA, 25 bp, Artificial
  probe
  misc_feature (1)..(25): SEQ ID NO: 4920; WAN024DL2_at; Start 650; Stop 674
gcttgttggtctttaaccttgggca

SEQ ID NO: 162015 - DNA, 25 bp, Artificial
  probe
  misc_feature (1)..(25): SEQ ID NO: 4920; WAN024DL2_at; Start 491; Stop 515
tagcgcttcctttcttattcgcagc

SEQ ID NO: 162016 - DNA, 25 bp, Artificial
  probe
  misc_feature (1)..(25): SEQ ID NO: 4920; WAN024DL2_at; Start 415; Stop 439
caagctggacatctggtgactattt

SEQ ID NO: 162017 - DNA, 25 bp, Artificial
  probe
  misc_feature (1)..(25): SEQ ID NO: 4920; WAN024DL2_at; Start 1132; Stop 1156
ctatggagtcgtttcttcaaaggaa

SEQ ID NO: 162018 - DNA, 25 bp, Artificial
  probe
  misc_feature (1)..(25): SEQ ID NO: 4920; WAN024DL2_at; Start 539; Stop 563
taagcaatccaagccatgataaggg

SEQ ID NO: 162019 - DNA, 25 bp, Artificial
  probe
  misc_feature (1)..(25): SEQ ID NO: 4920; WAN024DL2_at; Start 938; Stop 962
tatacgtcatttcggttcctgcaag

SEQ ID NO: 162020 - DNA, 25 bp, Artificial
  probe
  misc_feature (1)..(25): SEQ ID NO: 4920; WAN024DL2_at; Start 579; Stop 603
gctagctttggcaggcggatttttc

SEQ ID NO: 162021 - DNA, 25 bp, Artificial
  probe
  misc_feature (1)..(25): SEQ ID NO: 4920; WAN024DL2_at; Start 137; Stop 161
tactatggagtacgcttgtaacggg

SEQ ID NO: 162022 - DNA, 25 bp, Artificial
  probe
  misc_feature (1)..(25): SEQ ID NO: 4920; WAN024DL2_at; Start 161; Stop 185
ggataactctaggagtaccgctatt

SEQ ID NO: 162023 - DNA, 25 bp, Artificial
  probe
  misc_feature (1)..(25): SEQ ID NO: 4920; WAN024DL2_at; Start 57; Stop 81
gaatcgtgaacctctagaataccaa

SEQ ID NO: 162024 - DNA, 25 bp, Artificial
  probe
  misc_feature (1)..(25): SEQ ID NO: 4920; WAN024DL2_at; Start 862; Stop 886
tatggcttgttgtcccttggtttgg

SEQ ID NO: 162025 - DNA, 25 bp, Artificial
  probe
  misc_feature (1)..(25): SEQ ID NO: 4920; WAN024DL2_at; Start 336; Stop 360
catctttgagtggttagccttggta

SEQ ID NO: 162026 - DNA, 25 bp, Artificial
  probe
  misc_feature (1)..(25): SEQ ID NO: 4920; WAN024DL2_at; Start 524; Stop 548
tagttgcggcttacctaagcaatcc

SEQ ID NO: 162027 - DNA, 25 bp, Artificial
  probe
  misc_feature (1)..(25): SEQ ID NO: 4920; WAN024DL2_at; Start 352; Stop 376
gccttggtagcaggaggatttttcc

SEQ ID NO: 162028 - DNA, 25 bp, Artificial
  probe
  misc_feature (1)..(25): SEQ ID NO: 2061; WAN024DL3_at; Start 2; Stop 26
tgctaactaaggaagaagtgaatga

SEQ ID NO: 162029 - DNA, 25 bp, Artificial
  probe
  misc_feature (1)..(25): SEQ ID NO: 2061; WAN024DL3_at; Start 41; Stop 65
aacagacacatttacaccgctttcg

SEQ ID NO: 162030 - DNA, 25 bp, Artificial
  probe
  misc_feature (1)..(25): SEQ ID NO: 2061; WAN024DL3_at; Start 44; Stop 68
agacacatttacaccgctttcggga

SEQ ID NO: 162031 - DNA, 25 bp, Artificial
  probe
  misc_feature (1)..(25): SEQ ID NO: 2061; WAN024DL3_at; Start 4; Stop 28
ctaactaaggaagaagtgaatgata

SEQ ID NO: 162032 - DNA, 25 bp, Artificial
  probe
  misc_feature (1)..(25): SEQ ID NO: 2061; WAN024DL3_at; Start 25; Stop 49
gatatgattgagttcaaacagacac

SEQ ID NO: 162033 - DNA, 25 bp, Artificial
  probe
  misc_feature (1)..(25): SEQ ID NO: 2061; WAN024DL3_at; Start 84; Stop 108
gaaactatgcaaaaaatcactcaaa

SEQ ID NO: 162034 - DNA, 25 bp, Artificial
  probe
  misc_feature (1)..(25): SEQ ID NO: 2061; WAN024DL3_at; Start 106; Stop 130
aaacagccatcgcaagctgacaatc

SEQ ID NO: 162035 - DNA, 25 bp, Artificial
  probe
  misc_feature (1)..(25): SEQ ID NO: 2061; WAN024DL3_at; Start 101; Stop 125
cactcaaacagccatcgcaagctga

SEQ ID NO: 162036 - DNA, 25 bp, Artificial
  probe
  misc_feature (1)..(25): SEQ ID NO: 2061; WAN024DL3_at; Start 43; Stop 67
cagacacatttacaccgctttcggg

SEQ ID NO: 162037 - DNA, 25 bp, Artificial
  probe
  misc_feature (1)..(25): SEQ ID NO: 2061; WAN024DL3_at; Start 8; Stop 32
ctaaggaagaagtgaatgatatgat

SEQ ID NO: 162038 - DNA, 25 bp, Artificial
  probe
  misc_feature (1)..(25): SEQ ID NO: 2061; WAN024DL3_at; Start 117; Stop 141
gcaagctgacaatcctaggactttt

SEQ ID NO: 162039 - DNA, 25 bp, Artificial
  probe
  misc_feature (1)..(25): SEQ ID NO: 2061; WAN024DL3_at; Start 27; Stop 51
tatgattgagttcaaacagacacat

SEQ ID NO: 162040 - DNA, 25 bp, Artificial
  probe
  misc_feature (1)..(25): SEQ ID NO: 2061; WAN024DL3_at; Start 120; Stop 144
agctgacaatcctaggactttttga

SEQ ID NO: 162041 - DNA, 25 bp, Artificial
  probe
  misc_feature (1)..(25): SEQ ID NO: 2061; WAN024DL3_at; Start 113; Stop 137
catcgcaagctgacaatcctaggac

SEQ ID NO: 162042 - DNA, 25 bp, Artificial
  probe
  misc_feature (1)..(25): SEQ ID NO: 2061; WAN024DL3_at; Start 69; Stop 93
aattgaaacctttgtgaaactatgc

SEQ ID NO: 162043 - DNA, 25 bp, Artificial
  probe
  misc_feature (1)..(25): SEQ ID NO: 2061; WAN024DL3_at; Start 45; Stop 69
gacacatttacaccgctttcgggaa

SEQ ID NO: 162044 - DNA, 25 bp, Artificial
  probe
  misc_feature (1)..(25): SEQ ID NO: 2061; WAN024DL3_at; Start 38; Stop 62
tcaaacagacacatttacaccgctt

SEQ ID NO: 162045 - DNA, 25 bp, Artificial
  probe
  misc_feature (1)..(25): SEQ ID NO: 2061; WAN024DL3_at; Start 21; Stop 45
gaatgatatgattgagttcaaacag

SEQ ID NO: 162046 - DNA, 25 bp, Artificial
  probe
  misc_feature (1)..(25): SEQ ID NO: 2061; WAN024DL3_at; Start 30; Stop 54
gattgagttcaaacagacacattta

SEQ ID NO: 162047 - DNA, 25 bp, Artificial
  probe
  misc_feature (1)..(25): SEQ ID NO: 2061; WAN024DL3_at; Start 94; Stop 118
aaaaaatcactcaaacagccatcgc

SEQ ID NO: 162048 - DNA, 25 bp, Artificial
  probe
  misc_feature (1)..(25): SEQ ID NO: 2061; WAN024DL3_at; Start 104; Stop 128
tcaaacagccatcgcaagctgacaa

SEQ ID NO: 162049 - DNA, 25 bp, Artificial
  probe
  misc_feature (1)..(25): SEQ ID NO: 2061; WAN024DL3_at; Start 111; Stop 135
gccatcgcaagctgacaatcctagg

SEQ ID NO: 162050 - DNA, 25 bp, Artificial
  probe
  misc_feature (1)..(25): SEQ ID NO: 2061; WAN024DL3_at; Start 33; Stop 57
tgagttcaaacagacacatttacac

SEQ ID NO: 162051 - DNA, 25 bp, Artificial
  probe
  misc_feature (1)..(25): SEQ ID NO: 2061; WAN024DL3_at; Start 36; Stop 60
gttcaaacagacacatttacaccgc

SEQ ID NO: 162052 - DNA, 25 bp, Artificial
  probe
  misc_feature (1)..(25): SEQ ID NO: 2061; WAN024DL3_at; Start 49; Stop 73
catttacaccgctttcgggaaattg

SEQ ID NO: 162053 - DNA, 25 bp, Artificial
  probe
  misc_feature (1)..(25): SEQ ID NO: 2061; WAN024DL3_at; Start 77; Stop 101
cctttgtgaaactatgcaaaaaatc

SEQ ID NO: 162054 - DNA, 25 bp, Artificial
  probe
  misc_feature (1)..(25): SEQ ID NO: 2061; WAN024DL3_at; Start 73; Stop 97
gaaacctttgtgaaactatgcaaaa

SEQ ID NO: 162055 - DNA, 25 bp, Artificial
  probe
  misc_feature (1)..(25): SEQ ID NO: 2061; WAN024DL3_at; Start 91; Stop 115
tgcaaaaaatcactcaaacagccat

SEQ ID NO: 162056 - DNA, 25 bp, Artificial
  probe
  misc_feature (1)..(25): SEQ ID NO: 2061; WAN024DL3_at; Start 98; Stop 122
aatcactcaaacagccatcgcaagc

SEQ ID NO: 162057 - DNA, 25 bp, Artificial
  probe
  misc_feature (1)..(25): SEQ ID NO: 2061; WAN024DL3_at; Start 112; Stop 136
ccatcgcaagctgacaatcctagga

SEQ ID NO: 162058 - DNA, 25 bp, Artificial
  probe
  misc_feature (1)..(25): SEQ ID NO: 2061; WAN024DL3_at; Start 89; Stop 113
tatgcaaaaaatcactcaaacagcc

SEQ ID NO: 162059 - DNA, 25 bp, Artificial
  probe
  misc_feature (1)..(25): SEQ ID NO: 2061; WAN024DL3_at; Start 115; Stop 139
tcgcaagctgacaatcctaggactt

SEQ ID NO: 162060 - DNA, 25 bp, Artificial
  probe
  misc_feature (1)..(25): SEQ ID NO: 2061; WAN024DL3_at; Start 81; Stop 105
tgtgaaactatgcaaaaaatcactc

SEQ ID NO: 162061 - DNA, 25 bp, Artificial
  probe
  misc_feature (1)..(25): SEQ ID NO: 2061; WAN024DL3_at; Start 97; Stop 121
aaatcactcaaacagccatcgcaag

SEQ ID NO: 162062 - DNA, 25 bp, Artificial
  probe
  misc_feature (1)..(25): SEQ ID NO: 943; WAN024DL4_at; Start 372; Stop 396
caaggcagcttatggagtcatcaag

SEQ ID NO: 162063 - DNA, 25 bp, Artificial
  probe
  misc_feature (1)..(25): SEQ ID NO: 943; WAN024DL4_at; Start 707; Stop 731
aagttattcctcgtttgacagtggc

SEQ ID NO: 162064 - DNA, 25 bp, Artificial
  probe
  misc_feature (1)..(25): SEQ ID NO: 943; WAN024DL4_at; Start 457; Stop 481
cctaacggagaagctatgtggaaaa

SEQ ID NO: 162065 - DNA, 25 bp, Artificial
  probe
  misc_feature (1)..(25): SEQ ID NO: 943; WAN024DL4_at; Start 1342; Stop 1366
gactaccggagcttggtacaccatt

SEQ ID NO: 162066 - DNA, 25 bp, Artificial
  probe
  misc_feature (1)..(25): SEQ ID NO: 943; WAN024DL4_at; Start 682; Stop 706
ggcatcgaggcccataaattcaata

SEQ ID NO: 162067 - DNA, 25 bp, Artificial
  probe
  misc_feature (1)..(25): SEQ ID NO: 943; WAN024DL4_at; Start 810; Stop 834
tgagtacattaaccacgtcgagaga

SEQ ID NO: 162068 - DNA, 25 bp, Artificial
  probe
  misc_feature (1)..(25): SEQ ID NO: 943; WAN024DL4_at; Start 850; Stop 874
gatagtggaattcgcttagacggac

SEQ ID NO: 162069 - DNA, 25 bp, Artificial
  probe
  misc_feature (1)..(25): SEQ ID NO: 943; WAN024DL4_at; Start 891; Stop 915
gacacgcttatttttgaccacttgg

SEQ ID NO: 162070 - DNA, 25 bp, Artificial
  probe
  misc_feature (1)..(25): SEQ ID NO: 943; WAN024DL4_at; Start 1327; Stop 1351
gggacaatcaatctcgactaccgga

SEQ ID NO: 162071 - DNA, 25 bp, Artificial
  probe
  misc_feature (1)..(25): SEQ ID NO: 943; WAN024DL4_at; Start 609; Stop 633
taagatgctctatgatgatatcggc

SEQ ID NO: 162072 - DNA, 25 bp, Artificial
  probe
  misc_feature (1)..(25): SEQ ID NO: 943; WAN024DL4_at; Start 1076; Stop 1100
cagaatcggtctatattacgacacc

SEQ ID NO: 162073 - DNA, 25 bp, Artificial
  probe
  misc_feature (1)..(25): SEQ ID NO: 943; WAN024DL4_at; Start 998; Stop 1022
catacggaagtggacccaagccaat

SEQ ID NO: 162074 - DNA, 25 bp, Artificial
  probe
  misc_feature (1)..(25): SEQ ID NO: 943; WAN024DL4_at; Start 290; Stop 314
tcaaacaactgaagaagctaggctc

SEQ ID NO: 162075 - DNA, 25 bp, Artificial
  probe
  misc_feature (1)..(25): SEQ ID NO: 943; WAN024DL4_at; Start 962; Stop 986
aaaatcattctatcccgagtgacgg

SEQ ID NO: 162076 - DNA, 25 bp, Artificial
  probe
  misc_feature (1)..(25): SEQ ID NO: 943; WAN024DL4_at; Start 305; Stop 329
agctaggctctatgcatttccaaga

SEQ ID NO: 162077 - DNA, 25 bp, Artificial
  probe
  misc_feature (1)..(25): SEQ ID NO: 943; WAN024DL4_at; Start 1196; Stop 1220
agaagttcattcagttagtcacgag

SEQ ID NO: 162078 - DNA, 25 bp, Artificial
  probe
  misc_feature (1)..(25): SEQ ID NO: 943; WAN024DL4_at; Start 1211; Stop 1235
tagtcacgagaggagcttatcccga

SEQ ID NO: 162079 - DNA, 25 bp, Artificial
  probe
  misc_feature (1)..(25): SEQ ID NO: 943; WAN024DL4_at; Start 575; Stop 599
tactagagcaaaaggtagctcaggg

SEQ ID NO: 162080 - DNA, 25 bp, Artificial
  probe
  misc_feature (1)..(25): SEQ ID NO: 943; WAN024DL4_at; Start 906; Stop 930
gaccacttggtacattaatcgagga

SEQ ID NO: 162081 - DNA, 25 bp, Artificial
  probe
  misc_feature (1)..(25): SEQ ID NO: 943; WAN024DL4_at; Start 93; Stop 117
tctttatttaggacgcatggctccc

SEQ ID NO: 162082 - DNA, 25 bp, Artificial
  probe
  misc_feature (1)..(25): SEQ ID NO: 943; WAN024DL4_at; Start 1396; Stop 1420
ccttctataagggaaatcgcccgag

SEQ ID NO: 162083 - DNA, 25 bp, Artificial
  probe
  misc_feature (1)..(25): SEQ ID NO: 943; WAN024DL4_at; Start 1124; Stop 1148
taacagagacaatcaaaaatgcagc

SEQ ID NO: 162084 - DNA, 25 bp, Artificial
  probe
  misc_feature (1)..(25): SEQ ID NO: 943; WAN024DL4_at; Start 1488; Stop 1512
aaagcttgtaaaagaaatcgcccag

SEQ ID NO: 162085 - DNA, 25 bp, Artificial
  probe
  misc_feature (1)..(25): SEQ ID NO: 943; WAN024DL4_at; Start 186; Stop 210
gactcctgagaataaggtaacctgg

SEQ ID NO: 162086 - DNA, 25 bp, Artificial
  probe
  misc_feature (1)..(25): SEQ ID NO: 943; WAN024DL4_at; Start 632; Stop 656
gctgtatggctactttaacaggaga

SEQ ID NO: 162087 - DNA, 25 bp, Artificial
  probe
  misc_feature (1)..(25): SEQ ID NO: 943; WAN024DL4_at; Start 662; Stop 686
cacatcgacttcgtcagctgggcat

SEQ ID NO: 162088 - DNA, 25 bp, Artificial
  probe
  misc_feature (1)..(25): SEQ ID NO: 943; WAN024DL4_at; Start 248; Stop 272
tctatctgatgtttggtgaaaggcg

SEQ ID NO: 162089 - DNA, 25 bp, Artificial
  probe
  misc_feature (1)..(25): SEQ ID NO: 943; WAN024DL4_at; Start 981; Stop 1005
tgacggtttaaccattccatacgga

SEQ ID NO: 162090 - DNA, 25 bp, Artificial
  probe
  misc_feature (1)..(25): SEQ ID NO: 943; WAN024DL4_at; Start 319; Stop 343
catttccaagaagcaaatagccagc

SEQ ID NO: 162091 - DNA, 25 bp, Artificial
  probe
  misc_feature (1)..(25): SEQ ID NO: 943; WAN024DL4_at; Start 1234; Stop 1258
gaccttctttctgctggtgttcgga

SEQ ID NO: 162092 - DNA, 25 bp, Artificial
  probe
  misc_feature (1)..(25): SEQ ID NO: 943; WAN024DL4_at; Start 1018; Stop 1042
ccaatttttcgagcgcaggtaggga

SEQ ID NO: 162093 - DNA, 25 bp, Artificial
  probe
  misc_feature (1)..(25): SEQ ID NO: 943; WAN024DL4_at; Start 1061; Stop 1085
taatcaatcaagcaacagaatcggt

SEQ ID NO: 162094 - DNA, 25 bp, Artificial
  probe
  misc_feature (1)..(25): SEQ ID NO: 943; WAN024DL4_at; Start 647; Stop 671
taacaggagattatgcacatcgact

SEQ ID NO: 162095 - DNA, 25 bp, Artificial
  probe
  misc_feature (1)..(25): SEQ ID NO: 943; WAN024DL4_at; Start 1462; Stop 1486
cattctatcaaaacgagctggtatc

SEQ ID NO: 162096 - DNA, 25 bp, Artificial
  probe
  misc_feature (1)..(25): SEQ ID NO: 7446; WAN024DL5_at; Start 17; Stop 41
aacttgttatactaggggaattgct

SEQ ID NO: 162097 - DNA, 25 bp, Artificial
  probe
  misc_feature (1)..(25): SEQ ID NO: 7446; WAN024DL5_at; Start 67; Stop 91
gtagcagaaaggaaattcatcatga

SEQ ID NO: 162098 - DNA, 25 bp, Artificial
  probe
  misc_feature (1)..(25): SEQ ID NO: 7446; WAN024DL5_at; Start 39; Stop 63
gctggttagagaaaatttctctaaa

SEQ ID NO: 162099 - DNA, 25 bp, Artificial
  probe
  misc_feature (1)..(25): SEQ ID NO: 7446; WAN024DL5_at; Start 78; Stop 102
gaaattcatcatgaaattaaaaaga

SEQ ID NO: 162100 - DNA, 25 bp, Artificial
  probe
  misc_feature (1)..(25): SEQ ID NO: 7446; WAN024DL5_at; Start 22; Stop 46
gttatactaggggaattgctggtta

SEQ ID NO: 162101 - DNA, 25 bp, Artificial
  probe
  misc_feature (1)..(25): SEQ ID NO: 7446; WAN024DL5_at; Start 69; Stop 93
agcagaaaggaaattcatcatgaaa

SEQ ID NO: 162102 - DNA, 25 bp, Artificial
  probe
  misc_feature (1)..(25): SEQ ID NO: 7446; WAN024DL5_at; Start 77; Stop 101
ggaaattcatcatgaaattaaaaag

SEQ ID NO: 162103 - DNA, 25 bp, Artificial
  probe
  misc_feature (1)..(25): SEQ ID NO: 7446; WAN024DL5_at; Start 71; Stop 95
cagaaaggaaattcatcatgaaatt

SEQ ID NO: 162104 - DNA, 25 bp, Artificial
  probe
  misc_feature (1)..(25): SEQ ID NO: 7446; WAN024DL5_at; Start 15; Stop 39
tgaacttgttatactaggggaattg

SEQ ID NO: 162105 - DNA, 25 bp, Artificial
  probe
  misc_feature (1)..(25): SEQ ID NO: 7446; WAN024DL5_at; Start 74; Stop 98
aaaggaaattcatcatgaaattaaa

SEQ ID NO: 162106 - DNA, 25 bp, Artificial
  probe
  misc_feature (1)..(25): SEQ ID NO: 7446; WAN024DL5_at; Start 49; Stop 73
gaaaatttctctaaattggtagcag

SEQ ID NO: 162107 - DNA, 25 bp, Artificial
  probe
  misc_feature (1)..(25): SEQ ID NO: 7446; WAN024DL5_at; Start 38; Stop 62
tgctggttagagaaaatttctctaa

SEQ ID NO: 162108 - DNA, 25 bp, Artificial
  probe
  misc_feature (1)..(25): SEQ ID NO: 7446; WAN024DL5_at; Start 48; Stop 72
agaaaatttctctaaattggtagca

SEQ ID NO: 162109 - DNA, 25 bp, Artificial
  probe
  misc_feature (1)..(25): SEQ ID NO: 7446; WAN024DL5_at; Start 16; Stop 40
gaacttgttatactaggggaattgc

SEQ ID NO: 162110 - DNA, 25 bp, Artificial
  probe
  misc_feature (1)..(25): SEQ ID NO: 7446; WAN024DL5_at; Start 25; Stop 49
atactaggggaattgctggttagag

SEQ ID NO: 162111 - DNA, 25 bp, Artificial
  probe
  misc_feature (1)..(25): SEQ ID NO: 7446; WAN024DL5_at; Start 33; Stop 57
ggaattgctggttagagaaaatttc

SEQ ID NO: 162112 - DNA, 25 bp, Artificial
  probe
  misc_feature (1)..(25): SEQ ID NO: 7446; WAN024DL5_at; Start 26; Stop 50
tactaggggaattgctggttagaga

SEQ ID NO: 162113 - DNA, 25 bp, Artificial
  probe
  misc_feature (1)..(25): SEQ ID NO: 7446; WAN024DL5_at; Start 20; Stop 44
ttgttatactaggggaattgctggt

SEQ ID NO: 162114 - DNA, 25 bp, Artificial
  probe
  misc_feature (1)..(25): SEQ ID NO: 7446; WAN024DL5_at; Start 18; Stop 42
acttgttatactaggggaattgctg

SEQ ID NO: 162115 - DNA, 25 bp, Artificial
  probe
  misc_feature (1)..(25): SEQ ID NO: 7446; WAN024DL5_at; Start 29; Stop 53
taggggaattgctggttagagaaaa

SEQ ID NO: 162116 - DNA, 25 bp, Artificial
  probe
  misc_feature (1)..(25): SEQ ID NO: 7446; WAN024DL5_at; Start 66; Stop 90
ggtagcagaaaggaaattcatcatg

SEQ ID NO: 162117 - DNA, 25 bp, Artificial
  probe
  misc_feature (1)..(25): SEQ ID NO: 7446; WAN024DL5_at; Start 35; Stop 59
aattgctggttagagaaaatttctc

SEQ ID NO: 162118 - DNA, 25 bp, Artificial
  probe
  misc_feature (1)..(25): SEQ ID NO: 7446; WAN024DL5_at; Start 37; Stop 61
ttgctggttagagaaaatttctcta

SEQ ID NO: 162119 - DNA, 25 bp, Artificial
  probe
  misc_feature (1)..(25): SEQ ID NO: 7446; WAN024DL5_at; Start 68; Stop 92
tagcagaaaggaaattcatcatgaa

SEQ ID NO: 162120 - DNA, 25 bp, Artificial
  probe
  misc_feature (1)..(25): SEQ ID NO: 7446; WAN024DL5_at; Start 72; Stop 96
agaaaggaaattcatcatgaaatta

SEQ ID NO: 162121 - DNA, 25 bp, Artificial
  probe
  misc_feature (1)..(25): SEQ ID NO: 7446; WAN024DL5_at; Start 70; Stop 94
gcagaaaggaaattcatcatgaaat

SEQ ID NO: 162122 - DNA, 25 bp, Artificial
  probe
  misc_feature (1)..(25): SEQ ID NO: 7446; WAN024DL5_at; Start 23; Stop 47
ttatactaggggaattgctggttag

SEQ ID NO: 162123 - DNA, 25 bp, Artificial
  probe
  misc_feature (1)..(25): SEQ ID NO: 7446; WAN024DL5_at; Start 50; Stop 74
aaaatttctctaaattggtagcaga

SEQ ID NO: 162124 - DNA, 25 bp, Artificial
  probe
  misc_feature (1)..(25): SEQ ID NO: 7446; WAN024DL5_at; Start 73; Stop 97
gaaaggaaattcatcatgaaattaa

SEQ ID NO: 162125 - DNA, 25 bp, Artificial
  probe
  misc_feature (1)..(25): SEQ ID NO: 7446; WAN024DL5_at; Start 34; Stop 58
gaattgctggttagagaaaatttct

SEQ ID NO: 162126 - DNA, 25 bp, Artificial
  probe
  misc_feature (1)..(25): SEQ ID NO: 7446; WAN024DL5_at; Start 36; Stop 60
attgctggttagagaaaatttctct

SEQ ID NO: 162127 - DNA, 25 bp, Artificial
  probe
  misc_feature (1)..(25): SEQ ID NO: 7446; WAN024DL5_at; Start 19; Stop 43
cttgttatactaggggaattgctgg

SEQ ID NO: 162128 - DNA, 25 bp, Artificial
  probe
  misc_feature (1)..(25): SEQ ID NO: 7446; WAN024DL5_at; Start 24; Stop 48
tatactaggggaattgctggttaga

SEQ ID NO: 162129 - DNA, 25 bp, Artificial
  probe
  misc_feature (1)..(25): SEQ ID NO: 7446; WAN024DL5_at; Start 27; Stop 51
actaggggaattgctggttagagaa

SEQ ID NO: 162130 - DNA, 25 bp, Artificial
  probe
  misc_feature (1)..(25): SEQ ID NO: 3412; WAN024DL6_at; Start 85; Stop 109
caggctgttgaacctgttgagctct

SEQ ID NO: 162131 - DNA, 25 bp, Artificial
  probe
  misc_feature (1)..(25): SEQ ID NO: 3412; WAN024DL6_at; Start 22; Stop 46
tacctcctgcatttgcagtattggt

SEQ ID NO: 162132 - DNA, 25 bp, Artificial
  probe
  misc_feature (1)..(25): SEQ ID NO: 3412; WAN024DL6_at; Start 3; Stop 27
ggagccgcttgattttggttacctc

SEQ ID NO: 162133 - DNA, 25 bp, Artificial
  probe
  misc_feature (1)..(25): SEQ ID NO: 3412; WAN024DL6_at; Start 19; Stop 43
ggttacctcctgcatttgcagtatt

SEQ ID NO: 162134 - DNA, 25 bp, Artificial
  probe
  misc_feature (1)..(25): SEQ ID NO: 3412; WAN024DL6_at; Start 36; Stop 60
gcagtattggtattctgttgagcag

SEQ ID NO: 162135 - DNA, 25 bp, Artificial
  probe
  misc_feature (1)..(25): SEQ ID NO: 3412; WAN024DL6_at; Start 72; Stop 96
tgctgctgagcaacaggctgttgaa

SEQ ID NO: 162136 - DNA, 25 bp, Artificial
  probe
  misc_feature (1)..(25): SEQ ID NO: 3412; WAN024DL6_at; Start 8; Stop 32
cgcttgattttggttacctcctgca

SEQ ID NO: 162137 - DNA, 25 bp, Artificial
  probe
  misc_feature (1)..(25): SEQ ID NO: 3412; WAN024DL6_at; Start 13; Stop 37
gattttggttacctcctgcatttgc

SEQ ID NO: 162138 - DNA, 25 bp, Artificial
  probe
  misc_feature (1)..(25): SEQ ID NO: 3412; WAN024DL6_at; Start 17; Stop 41
ttggttacctcctgcatttgcagta

SEQ ID NO: 162139 - DNA, 25 bp, Artificial
  probe
  misc_feature (1)..(25): SEQ ID NO: 3412; WAN024DL6_at; Start 93; Stop 117
tgaacctgttgagctctttgtgaac

SEQ ID NO: 162140 - DNA, 25 bp, Artificial
  probe
  misc_feature (1)..(25): SEQ ID NO: 3412; WAN024DL6_at; Start 104; Stop 128
agctctttgtgaacaagctactaag

SEQ ID NO: 162141 - DNA, 25 bp, Artificial
  probe
  misc_feature (1)..(25): SEQ ID NO: 3412; WAN024DL6_at; Start 88; Stop 112
gctgttgaacctgttgagctctttg

SEQ ID NO: 162142 - DNA, 25 bp, Artificial
  probe
  misc_feature (1)..(25): SEQ ID NO: 3412; WAN024DL6_at; Start 64; Stop 88
gttggacctgctgctgagcaacagg

SEQ ID NO: 162143 - DNA, 25 bp, Artificial
  probe
  misc_feature (1)..(25): SEQ ID NO: 3412; WAN024DL6_at; Start 99; Stop 123
tgttgagctctttgtgaacaagcta

SEQ ID NO: 162144 - DNA, 25 bp, Artificial
  probe
  misc_feature (1)..(25): SEQ ID NO: 3412; WAN024DL6_at; Start 97; Stop 121
cctgttgagctctttgtgaacaagc

SEQ ID NO: 162145 - DNA, 25 bp, Artificial
  probe
  misc_feature (1)..(25): SEQ ID NO: 3412; WAN024DL6_at; Start 94; Stop 118
gaacctgttgagctctttgtgaaca

SEQ ID NO: 162146 - DNA, 25 bp, Artificial
  probe
  misc_feature (1)..(25): SEQ ID NO: 3412; WAN024DL6_at; Start 68; Stop 92
gacctgctgctgagcaacaggctgt

SEQ ID NO: 162147 - DNA, 25 bp, Artificial
  probe
  misc_feature (1)..(25): SEQ ID NO: 3412; WAN024DL6_at; Start 91; Stop 115
gttgaacctgttgagctctttgtga

SEQ ID NO: 162148 - DNA, 25 bp, Artificial
  probe
  misc_feature (1)..(25): SEQ ID NO: 3412; WAN024DL6_at; Start 78; Stop 102
tgagcaacaggctgttgaacctgtt

SEQ ID NO: 162149 - DNA, 25 bp, Artificial
  probe
  misc_feature (1)..(25): SEQ ID NO: 3412; WAN024DL6_at; Start 6; Stop 30
gccgcttgattttggttacctcctg

SEQ ID NO: 162150 - DNA, 25 bp, Artificial
  probe
  misc_feature (1)..(25): SEQ ID NO: 3412; WAN024DL6_at; Start 66; Stop 90
tggacctgctgctgagcaacaggct

SEQ ID NO: 162151 - DNA, 25 bp, Artificial
  probe
  misc_feature (1)..(25): SEQ ID NO: 3412; WAN024DL6_at; Start 95; Stop 119
aacctgttgagctctttgtgaacaa

SEQ ID NO: 162152 - DNA, 25 bp, Artificial
  probe
  misc_feature (1)..(25): SEQ ID NO: 3412; WAN024DL6_at; Start 63; Stop 87
tgttggacctgctgctgagcaacag

SEQ ID NO: 162153 - DNA, 25 bp, Artificial
  probe
  misc_feature (1)..(25): SEQ ID NO: 3412; WAN024DL6_at; Start 102; Stop 126
tgagctctttgtgaacaagctacta

SEQ ID NO: 162154 - DNA, 25 bp, Artificial
  probe
  misc_feature (1)..(25): SEQ ID NO: 3412; WAN024DL6_at; Start 4; Stop 28
gagccgcttgattttggttacctcc

SEQ ID NO: 162155 - DNA, 25 bp, Artificial
  probe
  misc_feature (1)..(25): SEQ ID NO: 3412; WAN024DL6_at; Start 70; Stop 94
cctgctgctgagcaacaggctgttg

SEQ ID NO: 162156 - DNA, 25 bp, Artificial
  probe
  misc_feature (1)..(25): SEQ ID NO: 3412; WAN024DL6_at; Start 15; Stop 39
ttttggttacctcctgcatttgcag

SEQ ID NO: 162157 - DNA, 25 bp, Artificial
  probe
  misc_feature (1)..(25): SEQ ID NO: 3412; WAN024DL6_at; Start 115; Stop 139
aacaagctactaagagacctaacta

SEQ ID NO: 162158 - DNA, 25 bp, Artificial
  probe
  misc_feature (1)..(25): SEQ ID NO: 3412; WAN024DL6_at; Start 37; Stop 61
cagtattggtattctgttgagcagg

SEQ ID NO: 162159 - DNA, 25 bp, Artificial
  probe
  misc_feature (1)..(25): SEQ ID NO: 3412; WAN024DL6_at; Start 9; Stop 33
gcttgattttggttacctcctgcat

SEQ ID NO: 162160 - DNA, 25 bp, Artificial
  probe
  misc_feature (1)..(25): SEQ ID NO: 3412; WAN024DL6_at; Start 27; Stop 51
cctgcatttgcagtattggtattct

SEQ ID NO: 162161 - DNA, 25 bp, Artificial
  probe
  misc_feature (1)..(25): SEQ ID NO: 3412; WAN024DL6_at; Start 82; Stop 106
caacaggctgttgaacctgttgagc

SEQ ID NO: 162162 - DNA, 25 bp, Artificial
  probe
  misc_feature (1)..(25): SEQ ID NO: 3412; WAN024DL6_at; Start 117; Stop 141
caagctactaagagacctaactaat

SEQ ID NO: 162163 - DNA, 25 bp, Artificial
  probe
  misc_feature (1)..(25): SEQ ID NO: 3412; WAN024DL6_at; Start 75; Stop 99
tgctgagcaacaggctgttgaacct

SEQ ID NO: 162164 - DNA, 25 bp, Artificial
  probe
  misc_feature (1)..(25): SEQ ID NO: 962; WAN024DL7_at; Start 86; Stop 110
ttcaacagcctgttgctcagcagca

SEQ ID NO: 162165 - DNA, 25 bp, Artificial
  probe
  misc_feature (1)..(25): SEQ ID NO: 962; WAN024DL7_at; Start 90; Stop 114
acagcctgttgctcagcagcaggtc

SEQ ID NO: 162166 - DNA, 25 bp, Artificial
  probe
  misc_feature (1)..(25): SEQ ID NO: 962; WAN024DL7_at; Start 87; Stop 111
tcaacagcctgttgctcagcagcag

SEQ ID NO: 162167 - DNA, 25 bp, Artificial
  probe
  misc_feature (1)..(25): SEQ ID NO: 962; WAN024DL7_at; Start 93; Stop 117
gcctgttgctcagcagcaggtccaa

SEQ ID NO: 162168 - DNA, 25 bp, Artificial
  probe
  misc_feature (1)..(25): SEQ ID NO: 962; WAN024DL7_at; Start 95; Stop 119
ctgttgctcagcagcaggtccaaca

SEQ ID NO: 162169 - DNA, 25 bp, Artificial
  probe
  misc_feature (1)..(25): SEQ ID NO: 962; WAN024DL7_at; Start 94; Stop 118
cctgttgctcagcagcaggtccaac

SEQ ID NO: 162170 - DNA, 25 bp, Artificial
  probe
  misc_feature (1)..(25): SEQ ID NO: 962; WAN024DL7_at; Start 84; Stop 108
ggttcaacagcctgttgctcagcag

SEQ ID NO: 162171 - DNA, 25 bp, Artificial
  probe
  misc_feature (1)..(25): SEQ ID NO: 962; WAN024DL7_at; Start 85; Stop 109
gttcaacagcctgttgctcagcagc

SEQ ID NO: 162172 - DNA, 25 bp, Artificial
  probe
  misc_feature (1)..(25): SEQ ID NO: 962; WAN024DL7_at; Start 88; Stop 112
caacagcctgttgctcagcagcagg

SEQ ID NO: 162173 - DNA, 25 bp, Artificial
  probe
  misc_feature (1)..(25): SEQ ID NO: 962; WAN024DL7_at; Start 92; Stop 116
agcctgttgctcagcagcaggtcca

SEQ ID NO: 162174 - DNA, 25 bp, Artificial
  probe
  misc_feature (1)..(25): SEQ ID NO: 962; WAN024DL7_at; Start 89; Stop 113
aacagcctgttgctcagcagcaggt

SEQ ID NO: 162175 - DNA, 25 bp, Artificial
  probe
  misc_feature (1)..(25): SEQ ID NO: 962; WAN024DL7_at; Start 91; Stop 115
cagcctgttgctcagcagcaggtcc

SEQ ID NO: 162176 - DNA, 25 bp, Artificial
  probe
  misc_feature (1)..(25): SEQ ID NO: 962; WAN024DL7_at; Start 83; Stop 107
aggttcaacagcctgttgctcagca

SEQ ID NO: 162177 - DNA, 25 bp, Artificial
  probe
  misc_feature (1)..(25): SEQ ID NO: 3028; WAN024DL8_at; Start 294; Stop 318
tacaggacacattgatggtacagga

SEQ ID NO: 162178 - DNA, 25 bp, Artificial
  probe
  misc_feature (1)..(25): SEQ ID NO: 3028; WAN024DL8_at; Start 5; Stop 29
tcacaggaataattgaagaaatcgg

SEQ ID NO: 162179 - DNA, 25 bp, Artificial
  probe
  misc_feature (1)..(25): SEQ ID NO: 3028; WAN024DL8_at; Start 137; Stop 161
tctgtcttacagttactcatttcaa

SEQ ID NO: 162180 - DNA, 25 bp, Artificial
  probe
  misc_feature (1)..(25): SEQ ID NO: 3028; WAN024DL8_at; Start 310; Stop 334
ggtacaggaaaaatctcgtcaataa

SEQ ID NO: 162181 - DNA, 25 bp, Artificial
  probe
  misc_feature (1)..(25): SEQ ID NO: 3028; WAN024DL8_at; Start 429; Stop 453
tagtctgactgtcgctaaagtctcc

SEQ ID NO: 162182 - DNA, 25 bp, Artificial
  probe
  misc_feature (1)..(25): SEQ ID NO: 3028; WAN024DL8_at; Start 189; Stop 213
gaatgaaacatggagtcgaacagct

SEQ ID NO: 162183 - DNA, 25 bp, Artificial
  probe
  misc_feature (1)..(25): SEQ ID NO: 3028; WAN024DL8_at; Start 32; Stop 56
aagttgaaagaatacagaaagactc

SEQ ID NO: 162184 - DNA, 25 bp, Artificial
  probe
  misc_feature (1)..(25): SEQ ID NO: 3028; WAN024DL8_at; Start 46; Stop 70
cagaaagactctcgtaattgtaaac

SEQ ID NO: 162185 - DNA, 25 bp, Artificial
  probe
  misc_feature (1)..(25): SEQ ID NO: 3028; WAN024DL8_at; Start 282; Stop 306
gggtcacgtcgttacaggacacatt

SEQ ID NO: 162186 - DNA, 25 bp, Artificial
  probe
  misc_feature (1)..(25): SEQ ID NO: 3028; WAN024DL8_at; Start 82; Stop 106
gcctcaaaaatattaacggatatcc

SEQ ID NO: 162187 - DNA, 25 bp, Artificial
  probe
  misc_feature (1)..(25): SEQ ID NO: 3028; WAN024DL8_at; Start 566; Stop 590
tgcaaaaactgatggataactctcc

SEQ ID NO: 162188 - DNA, 25 bp, Artificial
  probe
  misc_feature (1)..(25): SEQ ID NO: 3028; WAN024DL8_at; Start 303; Stop 327
cattgatggtacaggaaaaatctcg

SEQ ID NO: 162189 - DNA, 25 bp, Artificial
  probe
  misc_feature (1)..(25): SEQ ID NO: 3028; WAN024DL8_at; Start 360; Stop 384
tcaaatcaacacacaaaaagaaatt

SEQ ID NO: 162190 - DNA, 25 bp, Artificial
  probe
  misc_feature (1)..(25): SEQ ID NO: 3028; WAN024DL8_at; Start 533; Stop 557
taaatcttgaaaatgatatcttagg

SEQ ID NO: 162191 - DNA, 25 bp, Artificial
  probe
  misc_feature (1)..(25): SEQ ID NO: 3028; WAN024DL8_at; Start 89; Stop 113
aaatattaacggatatccatttagg

SEQ ID NO: 162192 - DNA, 25 bp, Artificial
  probe
  misc_feature (1)..(25): SEQ ID NO: 3028; WAN024DL8_at; Start 416; Stop 440
caattgacggcattagtctgactgt

SEQ ID NO: 162193 - DNA, 25 bp, Artificial
  probe
  misc_feature (1)..(25): SEQ ID NO: 3028; WAN024DL8_at; Start 453; Stop 477
caaagtaaacttttcagtatctgtt

SEQ ID NO: 162194 - DNA, 25 bp, Artificial
  probe
  misc_feature (1)..(25): SEQ ID NO: 3028; WAN024DL8_at; Start 18; Stop 42
tgaagaaatcggaaaagttgaaaga

SEQ ID NO: 162195 - DNA, 25 bp, Artificial
  probe
  misc_feature (1)..(25): SEQ ID NO: 3028; WAN024DL8_at; Start 402; Stop 426
aaaaggatctattacaattgacggc

SEQ ID NO: 162196 - DNA, 25 bp, Artificial
  probe
  misc_feature (1)..(25): SEQ ID NO: 3028; WAN024DL8_at; Start 166; Stop 190
caatcctttacagttgatgtaatga

SEQ ID NO: 162197 - DNA, 25 bp, Artificial
  probe
  misc_feature (1)..(25): SEQ ID NO: 3028; WAN024DL8_at; Start 386; Stop 410
tagatttaatagttgaaaaaggatc

SEQ ID NO: 162198 - DNA, 25 bp, Artificial
  probe
  misc_feature (1)..(25): SEQ ID NO: 3028; WAN024DL8_at; Start 551; Stop 575
tcttaggtaaatatgtgcaaaaact

SEQ ID NO: 162199 - DNA, 25 bp, Artificial
  probe
  misc_feature (1)..(25): SEQ ID NO: 3028; WAN024DL8_at; Start 219; Stop 243
tctattaaaacatggaagtgaggtg

SEQ ID NO: 162200 - DNA, 25 bp, Artificial
  probe
  misc_feature (1)..(25): SEQ ID NO: 3028; WAN024DL8_at; Start 201; Stop 225
gagtcgaacagctcttactctatta

SEQ ID NO: 162201 - DNA, 25 bp, Artificial
  probe
  misc_feature (1)..(25): SEQ ID NO: 3028; WAN024DL8_at; Start 174; Stop 198
tacagttgatgtaatgaatgaaaca

SEQ ID NO: 162202 - DNA, 25 bp, Artificial
  probe
  misc_feature (1)..(25): SEQ ID NO: 3028; WAN024DL8_at; Start 234; Stop 258
aagtgaggtgaatctagaaagagcc

SEQ ID NO: 162203 - DNA, 25 bp, Artificial
  probe
  misc_feature (1)..(25): SEQ ID NO: 3028; WAN024DL8_at; Start 438; Stop 462
tgtcgctaaagtctccaaagtaaac

SEQ ID NO: 162204 - DNA, 25 bp, Artificial
  probe
  misc_feature (1)..(25): SEQ ID NO: 3028; WAN024DL8_at; Start 468; Stop 492
agtatctgttatccctcataccttg

SEQ ID NO: 162205 - DNA, 25 bp, Artificial
  probe
  misc_feature (1)..(25): SEQ ID NO: 3028; WAN024DL8_at; Start 248; Stop 272
tagaaagagccttatctgtcaacgg

SEQ ID NO: 162206 - DNA, 25 bp, Artificial
  probe
  misc_feature (1)..(25): SEQ ID NO: 3028; WAN024DL8_at; Start 64; Stop 88
tgtaaactatcaattaaagcctcaa

SEQ ID NO: 162207 - DNA, 25 bp, Artificial
  probe
  misc_feature (1)..(25): SEQ ID NO: 3028; WAN024DL8_at; Start 258; Stop 282
cttatctgtcaacggtcgacttggg

SEQ ID NO: 162208 - DNA, 25 bp, Artificial
  probe
  misc_feature (1)..(25): SEQ ID NO: 3028; WAN024DL8_at; Start 115; Stop 139
gatagtatagcagtaaatggtatct

SEQ ID NO: 162209 - DNA, 25 bp, Artificial
  probe
  misc_feature (1)..(25): SEQ ID NO: 3028; WAN024DL8_at; Start 579; Stop 603
ggataactctccaaaatcagaaata

SEQ ID NO: 162210 - DNA, 25 bp, Artificial
  probe
  misc_feature (1)..(25): SEQ ID NO: 3028; WAN024DL8_at; Start 124; Stop 148
gcagtaaatggtatctgtcttacag

SEQ ID NO: 162211 - DNA, 25 bp, Artificial
  probe
  misc_feature (1)..(25): SEQ ID NO: 2290; WAN024DL9_at; Start 403; Stop 427
gaaatgcgaggcatgctggaagata

SEQ ID NO: 162212 - DNA, 25 bp, Artificial
  probe
  misc_feature (1)..(25): SEQ ID NO: 2290; WAN024DL9_at; Start 58; Stop 82
gaaagttttgtgacgcgcttgaaag

SEQ ID NO: 162213 - DNA, 25 bp, Artificial
  probe
  misc_feature (1)..(25): SEQ ID NO: 2290; WAN024DL9_at; Start 262; Stop 286
ggagattttattgcctatggtaaca

SEQ ID NO: 162214 - DNA, 25 bp, Artificial
  probe
  misc_feature (1)..(25): SEQ ID NO: 2290; WAN024DL9_at; Start 394; Stop 418
gctgactttgaaatgcgaggcatgc

SEQ ID NO: 162215 - DNA, 25 bp, Artificial
  probe
  misc_feature (1)..(25): SEQ ID NO: 2290; WAN024DL9_at; Start 324; Stop 348
tcgtaactttaataaccaatactgc

SEQ ID NO: 162216 - DNA, 25 bp, Artificial
  probe
  misc_feature (1)..(25): SEQ ID NO: 2290; WAN024DL9_at; Start 174; Stop 198
ccatccctatgtcgcttttttgccg

SEQ ID NO: 162217 - DNA, 25 bp, Artificial
  probe
  misc_feature (1)..(25): SEQ ID NO: 2290; WAN024DL9_at; Start 421; Stop 445
gaagatatcaaacatgtcgcagcta

SEQ ID NO: 162218 - DNA, 25 bp, Artificial
  probe
  misc_feature (1)..(25): SEQ ID NO: 2290; WAN024DL9_at; Start 285; Stop 309
caatgctagtaagtgttttggtgtg

SEQ ID NO: 162219 - DNA, 25 bp, Artificial
  probe
  misc_feature (1)..(25): SEQ ID NO: 2290; WAN024DL9_at; Start 339; Stop 363
ccaatactgcctaacagccaagcaa

SEQ ID NO: 162220 - DNA, 25 bp, Artificial
  probe
  misc_feature (1)..(25): SEQ ID NO: 2290; WAN024DL9_at; Start 131; Stop 155
tcaaggatttggtcaaggaaggcaa

SEQ ID NO: 162221 - DNA, 25 bp, Artificial
  probe
  misc_feature (1)..(25): SEQ ID NO: 2290; WAN024DL9_at; Start 165; Stop 189
tgaaatggaccatccctatgtcgct

SEQ ID NO: 162222 - DNA, 25 bp, Artificial
  probe
  misc_feature (1)..(25): SEQ ID NO: 2290; WAN024DL9_at; Start 430; Stop 454
aaacatgtcgcagctattatcgcag

SEQ ID NO: 162223 - DNA, 25 bp, Artificial
  probe
  misc_feature (1)..(25): SEQ ID NO: 2290; WAN024DL9_at; Start 187; Stop 211
gcttttttgccgacctatctcgaag

SEQ ID NO: 162224 - DNA, 25 bp, Artificial
  probe
  misc_feature (1)..(25): SEQ ID NO: 2290; WAN024DL9_at; Start 78; Stop 102
gaaagactatctcttgtcccagtac

SEQ ID NO: 162225 - DNA, 25 bp, Artificial
  probe
  misc_feature (1)..(25): SEQ ID NO: 2290; WAN024DL9_at; Start 385; Stop 409
cctgtattggctgactttgaaatgc

SEQ ID NO: 162226 - DNA, 25 bp, Artificial
  probe
  misc_feature (1)..(25): SEQ ID NO: 2290; WAN024DL9_at; Start 156; Stop 180
aaatttctatgaaatggaccatccc

SEQ ID NO: 162227 - DNA, 25 bp, Artificial
  probe
  misc_feature (1)..(25): SEQ ID NO: 2290; WAN024DL9_at; Start 108; Stop 132
gattgaggttcaaaagattcatatc

SEQ ID NO: 162228 - DNA, 25 bp, Artificial
  probe
  misc_feature (1)..(25): SEQ ID NO: 2290; WAN024DL9_at; Start 66; Stop 90
tgtgacgcgcttgaaagactatctc

SEQ ID NO: 162229 - DNA, 25 bp, Artificial
  probe
  misc_feature (1)..(25): SEQ ID NO: 2290; WAN024DL9_at; Start 350; Stop 374
taacagccaagcaatacagtcaacg

SEQ ID NO: 162230 - DNA, 25 bp, Artificial
  probe
  misc_feature (1)..(25): SEQ ID NO: 2290; WAN024DL9_at; Start 364; Stop 388
tacagtcaacgctttggcttccctg

SEQ ID NO: 162231 - DNA, 25 bp, Artificial
  probe
  misc_feature (1)..(25): SEQ ID NO: 2290; WAN024DL9_at; Start 123; Stop 147
gattcatatcaaggatttggtcaag

SEQ ID NO: 162232 - DNA, 25 bp, Artificial
  probe
  misc_feature (1)..(25): SEQ ID NO: 2290; WAN024DL9_at; Start 416; Stop 440
tgctggaagatatcaaacatgtcgc

SEQ ID NO: 162233 - DNA, 25 bp, Artificial
  probe
  misc_feature (1)..(25): SEQ ID NO: 2290; WAN024DL9_at; Start 200; Stop 224
cctatctcgaaggtgggaatggcgt

SEQ ID NO: 162234 - DNA, 25 bp, Artificial
  probe
  misc_feature (1)..(25): SEQ ID NO: 2290; WAN024DL9_at; Start 306; Stop 330
tgtggttgggtcaggaaatcgtaac

SEQ ID NO: 162235 - DNA, 25 bp, Artificial
  probe
  misc_feature (1)..(25): SEQ ID NO: 2290; WAN024DL9_at; Start 142; Stop 166
gtcaaggaaggcaaaaatttctatg

SEQ ID NO: 162236 - DNA, 25 bp, Artificial
  probe
  misc_feature (1)..(25): SEQ ID NO: 2290; WAN024DL9_at; Start 460; Stop 484
tatgagttggaaaaggagaattaac

SEQ ID NO: 162237 - DNA, 25 bp, Artificial
  probe
  misc_feature (1)..(25): SEQ ID NO: 2290; WAN024DL9_at; Start 51; Stop 75
caacactgaaagttttgtgacgcgc

SEQ ID NO: 162238 - DNA, 25 bp, Artificial
  probe
  misc_feature (1)..(25): SEQ ID NO: 2290; WAN024DL9_at; Start 374; Stop 398
gctttggcttccctgtattggctga

SEQ ID NO: 162239 - DNA, 25 bp, Artificial
  probe
  misc_feature (1)..(25): SEQ ID NO: 2290; WAN024DL9_at; Start 273; Stop 297
tgcctatggtaacaatgctagtaag

SEQ ID NO: 162240 - DNA, 25 bp, Artificial
  probe
  misc_feature (1)..(25): SEQ ID NO: 2290; WAN024DL9_at; Start 447; Stop 471
tatcgcagatttgtatgagttggaa

SEQ ID NO: 162241 - DNA, 25 bp, Artificial
  probe
  misc_feature (1)..(25): SEQ ID NO: 2290; WAN024DL9_at; Start 34; Stop 58
tatattagtttgagtggcaacactg

SEQ ID NO: 162242 - DNA, 25 bp, Artificial
  probe
  misc_feature (1)..(25): SEQ ID NO: 2290; WAN024DL9_at; Start 435; Stop 459
tgtcgcagctattatcgcagatttg

SEQ ID NO: 162243 - DNA, 25 bp, Artificial
  probe
  misc_feature (1)..(25): SEQ ID NO: 2290; WAN024DL9_at; Start 251; Stop 275
cgacaccggtgggagattttattgc

SEQ ID NO: 162244 - DNA, 25 bp, Artificial
  probe
  misc_feature (1)..(25): SEQ ID NO: 2290; WAN024DL9_at; Start 2; Stop 26
tggaggtacatatgaagacaatttc

SEQ ID NO: 162245 - DNA, 25 bp, Artificial
  probe
  misc_feature (1)..(25): SEQ ID NO: 5689; WAN024DLA_at; Start 94; Stop 118
gcccttatttcagttccgtctctgt

SEQ ID NO: 162246 - DNA, 25 bp, Artificial
  probe
  misc_feature (1)..(25): SEQ ID NO: 5689; WAN024DLA_at; Start 227; Stop 251
gagtagcagaagcatctcattctat

SEQ ID NO: 162247 - DNA, 25 bp, Artificial
  probe
  misc_feature (1)..(25): SEQ ID NO: 5689; WAN024DLA_at; Start 1; Stop 25
ttgtattcctttacaaaaggtgcta

SEQ ID NO: 162248 - DNA, 25 bp, Artificial
  probe
  misc_feature (1)..(25): SEQ ID NO: 5689; WAN024DLA_at; Start 493; Stop 517
aatgttctcttcctagcccttgtct

SEQ ID NO: 162249 - DNA, 25 bp, Artificial
  probe
  misc_feature (1)..(25): SEQ ID NO: 5689; WAN024DLA_at; Start 123; Stop 147
aattgtgagtcccttgcctagtaaa

SEQ ID NO: 162250 - DNA, 25 bp, Artificial
  probe
  misc_feature (1)..(25): SEQ ID NO: 5689; WAN024DLA_at; Start 551; Stop 575
cagaagaagaggaaacagaagagct

SEQ ID NO: 162251 - DNA, 25 bp, Artificial
  probe
  misc_feature (1)..(25): SEQ ID NO: 5689; WAN024DLA_at; Start 14; Stop 38
caaaaggtgctataatattatcagg

SEQ ID NO: 162252 - DNA, 25 bp, Artificial
  probe
  misc_feature (1)..(25): SEQ ID NO: 5689; WAN024DLA_at; Start 44; Stop 68
ctatcatgaaaaagaaaccaattta

SEQ ID NO: 162253 - DNA, 25 bp, Artificial
  probe
  misc_feature (1)..(25): SEQ ID NO: 5689; WAN024DLA_at; Start 277; Stop 301
tctactattttagtggtcgtagcga

SEQ ID NO: 162254 - DNA, 25 bp, Artificial
  probe
  misc_feature (1)..(25): SEQ ID NO: 5689; WAN024DLA_at; Start 219; Stop 243
tacctatagagtagcagaagcatct

SEQ ID NO: 162255 - DNA, 25 bp, Artificial
  probe
  misc_feature (1)..(25): SEQ ID NO: 5689; WAN024DLA_at; Start 290; Stop 314
tggtcgtagcgattgtcttccttgt

SEQ ID NO: 162256 - DNA, 25 bp, Artificial
  probe
  misc_feature (1)..(25): SEQ ID NO: 5689; WAN024DLA_at; Start 430; Stop 454
gagagcatgcgtttgacagtgagta

SEQ ID NO: 162257 - DNA, 25 bp, Artificial
  probe
  misc_feature (1)..(25): SEQ ID NO: 5689; WAN024DLA_at; Start 145; Stop 169
aaagaagcccttcgtgctgctcaga

SEQ ID NO: 162258 - DNA, 25 bp, Artificial
  probe
  misc_feature (1)..(25): SEQ ID NO: 5689; WAN024DLA_at; Start 466; Stop 490
gctgttagcattttctatatcgtca

SEQ ID NO: 162259 - DNA, 25 bp, Artificial
  probe
  misc_feature (1)..(25): SEQ ID NO: 5689; WAN024DLA_at; Start 134; Stop 158
ccttgcctagtaaagaagcccttcg

SEQ ID NO: 162260 - DNA, 25 bp, Artificial
  probe
  misc_feature (1)..(25): SEQ ID NO: 5689; WAN024DLA_at; Start 415; Stop 439
cagttggttcaagatgagagcatgc

SEQ ID NO: 162261 - DNA, 25 bp, Artificial
  probe
  misc_feature (1)..(25): SEQ ID NO: 5689; WAN024DLA_at; Start 510; Stop 534
ccttgtcttctataagatgtggcga

SEQ ID NO: 162262 - DNA, 25 bp, Artificial
  probe
  misc_feature (1)..(25): SEQ ID NO: 5689; WAN024DLA_at; Start 525; Stop 549
gatgtggcgacaacagaaagccttg

SEQ ID NO: 162263 - DNA, 25 bp, Artificial
  probe
  misc_feature (1)..(25): SEQ ID NO: 5689; WAN024DLA_at; Start 481; Stop 505
tatatcgtcatcaatgttctcttcc

SEQ ID NO: 162264 - DNA, 25 bp, Artificial
  probe
  misc_feature (1)..(25): SEQ ID NO: 5689; WAN024DLA_at; Start 182; Stop 206
gggtcaatgctcagcaattagaaga

SEQ ID NO: 162265 - DNA, 25 bp, Artificial
  probe
  misc_feature (1)..(25): SEQ ID NO: 5689; WAN024DLA_at; Start 81; Stop 105
gctaatcttgtctgcccttatttca

SEQ ID NO: 162266 - DNA, 25 bp, Artificial
  probe
  misc_feature (1)..(25): SEQ ID NO: 5689; WAN024DLA_at; Start 190; Stop 214
gctcagcaattagaagaccagctta

SEQ ID NO: 162267 - DNA, 25 bp, Artificial
  probe
  misc_feature (1)..(25): SEQ ID NO: 5689; WAN024DLA_at; Start 109; Stop 133
ccgtctctgtttggaattgtgagtc

SEQ ID NO: 162268 - DNA, 25 bp, Artificial
  probe
  misc_feature (1)..(25): SEQ ID NO: 5689; WAN024DLA_at; Start 254; Stop 278
ttaatgttgctttgattgtgctatc

SEQ ID NO: 162269 - DNA, 25 bp, Artificial
  probe
  misc_feature (1)..(25): SEQ ID NO: 5689; WAN024DLA_at; Start 159; Stop 183
tgctgctcagaaacaagttgcaggg

SEQ ID NO: 162270 - DNA, 25 bp, Artificial
  probe
  misc_feature (1)..(25): SEQ ID NO: 5689; WAN024DLA_at; Start 540; Stop 564
gaaagccttggcagaagaagaggaa

SEQ ID NO: 162271 - DNA, 25 bp, Artificial
  probe
  misc_feature (1)..(25): SEQ ID NO: 5689; WAN024DLA_at; Start 335; Stop 359
caaactatacttacgttggctatgt

SEQ ID NO: 162272 - DNA, 25 bp, Artificial
  probe
  misc_feature (1)..(25): SEQ ID NO: 5689; WAN024DLA_at; Start 366; Stop 390
agctattattggttcgatttatggc

SEQ ID NO: 162273 - DNA, 25 bp, Artificial
  probe
  misc_feature (1)..(25): SEQ ID NO: 5689; WAN024DLA_at; Start 403; Stop 427
caagacgctgtgcagttggttcaag

SEQ ID NO: 162274 - DNA, 25 bp, Artificial
  probe
  misc_feature (1)..(25): SEQ ID NO: 5689; WAN024DLA_at; Start 205; Stop 229
gaccagcttaattatacctatagag

SEQ ID NO: 162275 - DNA, 25 bp, Artificial
  probe
  misc_feature (1)..(25): SEQ ID NO: 5689; WAN024DLA_at; Start 305; Stop 329
tcttccttgttcgtaaaaatttgca

SEQ ID NO: 162276 - DNA, 25 bp, Artificial
  probe
  misc_feature (1)..(25): SEQ ID NO: 5689; WAN024DLA_at; Start 326; Stop 350
tgcaatatgcaaactatacttacgt

SEQ ID NO: 162277 - DNA, 25 bp, Artificial
  probe
  misc_feature (1)..(25): SEQ ID NO: 5689; WAN024DLA_at; Start 380; Stop 404
cgatttatggctatgttggtttaca

SEQ ID NO: 162278 - DNA, 25 bp, Artificial
  probe
  misc_feature (1)..(25): SEQ ID NO: 5689; WAN024DLA_at; Start 391; Stop 415
tatgttggtttacaagacgctgtgc

SEQ ID NO: 162279 - DNA, 25 bp, Artificial
  probe
  misc_feature (1)..(25): SEQ ID NO: 7612; WAN024DLB_at; Start 75; Stop 99
ggtcagtttttatgaagaggatacc

SEQ ID NO: 162280 - DNA, 25 bp, Artificial
  probe
  misc_feature (1)..(25): SEQ ID NO: 7612; WAN024DLB_at; Start 71; Stop 95
aagaggtcagtttttatgaagagga

SEQ ID NO: 162281 - DNA, 25 bp, Artificial
  probe
  misc_feature (1)..(25): SEQ ID NO: 7612; WAN024DLB_at; Start 30; Stop 54
cagagagtccttcttgatagctaat

SEQ ID NO: 162282 - DNA, 25 bp, Artificial
  probe
  misc_feature (1)..(25): SEQ ID NO: 7612; WAN024DLB_at; Start 69; Stop 93
tcaagaggtcagtttttatgaagag

SEQ ID NO: 162283 - DNA, 25 bp, Artificial
  probe
  misc_feature (1)..(25): SEQ ID NO: 7612; WAN024DLB_at; Start 14; Stop 38
tggcaaaaggattttacagagagtc

SEQ ID NO: 162284 - DNA, 25 bp, Artificial
  probe
  misc_feature (1)..(25): SEQ ID NO: 7612; WAN024DLB_at; Start 34; Stop 58
gagtccttcttgatagctaatcgtt

SEQ ID NO: 162285 - DNA, 25 bp, Artificial
  probe
  misc_feature (1)..(25): SEQ ID NO: 7612; WAN024DLB_at; Start 22; Stop 46
ggattttacagagagtccttcttga

SEQ ID NO: 162286 - DNA, 25 bp, Artificial
  probe
  misc_feature (1)..(25): SEQ ID NO: 7612; WAN024DLB_at; Start 1; Stop 25
ttggagcaaatgctggcaaaaggat

SEQ ID NO: 162287 - DNA, 25 bp, Artificial
  probe
  misc_feature (1)..(25): SEQ ID NO: 7612; WAN024DLB_at; Start 12; Stop 36
gctggcaaaaggattttacagagag

SEQ ID NO: 162288 - DNA, 25 bp, Artificial
  probe
  misc_feature (1)..(25): SEQ ID NO: 7612; WAN024DLB_at; Start 70; Stop 94
caagaggtcagtttttatgaagagg

SEQ ID NO: 162289 - DNA, 25 bp, Artificial
  probe
  misc_feature (1)..(25): SEQ ID NO: 7612; WAN024DLB_at; Start 47; Stop 71
tagctaatcgttttttctactttca

SEQ ID NO: 162290 - DNA, 25 bp, Artificial
  probe
  misc_feature (1)..(25): SEQ ID NO: 7612; WAN024DLB_at; Start 8; Stop 32
aaatgctggcaaaaggattttacag

SEQ ID NO: 162291 - DNA, 25 bp, Artificial
  probe
  misc_feature (1)..(25): SEQ ID NO: 7612; WAN024DLB_at; Start 16; Stop 40
gcaaaaggattttacagagagtcct

SEQ ID NO: 162292 - DNA, 25 bp, Artificial
  probe
  misc_feature (1)..(25): SEQ ID NO: 7612; WAN024DLB_at; Start 9; Stop 33
aatgctggcaaaaggattttacaga

SEQ ID NO: 162293 - DNA, 25 bp, Artificial
  probe
  misc_feature (1)..(25): SEQ ID NO: 7612; WAN024DLB_at; Start 2; Stop 26
tggagcaaatgctggcaaaaggatt

SEQ ID NO: 162294 - DNA, 25 bp, Artificial
  probe
  misc_feature (1)..(25): SEQ ID NO: 7612; WAN024DLB_at; Start 64; Stop 88
tactttcaagaggtcagtttttatg

SEQ ID NO: 162295 - DNA, 25 bp, Artificial
  probe
  misc_feature (1)..(25): SEQ ID NO: 7612; WAN024DLB_at; Start 19; Stop 43
aaaggattttacagagagtccttct

SEQ ID NO: 162296 - DNA, 25 bp, Artificial
  probe
  misc_feature (1)..(25): SEQ ID NO: 7612; WAN024DLB_at; Start 62; Stop 86
tctactttcaagaggtcagttttta

SEQ ID NO: 162297 - DNA, 25 bp, Artificial
  probe
  misc_feature (1)..(25): SEQ ID NO: 7612; WAN024DLB_at; Start 3; Stop 27
ggagcaaatgctggcaaaaggattt

SEQ ID NO: 162298 - DNA, 25 bp, Artificial
  probe
  misc_feature (1)..(25): SEQ ID NO: 7612; WAN024DLB_at; Start 28; Stop 52
tacagagagtccttcttgatagcta

SEQ ID NO: 162299 - DNA, 25 bp, Artificial
  probe
  misc_feature (1)..(25): SEQ ID NO: 7612; WAN024DLB_at; Start 65; Stop 89
actttcaagaggtcagtttttatga

SEQ ID NO: 162300 - DNA, 25 bp, Artificial
  probe
  misc_feature (1)..(25): SEQ ID NO: 7612; WAN024DLB_at; Start 7; Stop 31
caaatgctggcaaaaggattttaca

SEQ ID NO: 162301 - DNA, 25 bp, Artificial
  probe
  misc_feature (1)..(25): SEQ ID NO: 7612; WAN024DLB_at; Start 17; Stop 41
caaaaggattttacagagagtcctt

SEQ ID NO: 162302 - DNA, 25 bp, Artificial
  probe
  misc_feature (1)..(25): SEQ ID NO: 7612; WAN024DLB_at; Start 26; Stop 50
tttacagagagtccttcttgatagc

SEQ ID NO: 162303 - DNA, 25 bp, Artificial
  probe
  misc_feature (1)..(25): SEQ ID NO: 7612; WAN024DLB_at; Start 11; Stop 35
tgctggcaaaaggattttacagaga

SEQ ID NO: 162304 - DNA, 25 bp, Artificial
  probe
  misc_feature (1)..(25): SEQ ID NO: 7612; WAN024DLB_at; Start 27; Stop 51
ttacagagagtccttcttgatagct

SEQ ID NO: 162305 - DNA, 25 bp, Artificial
  probe
  misc_feature (1)..(25): SEQ ID NO: 7612; WAN024DLB_at; Start 42; Stop 66
cttgatagctaatcgttttttctac

SEQ ID NO: 162306 - DNA, 25 bp, Artificial
  probe
  misc_feature (1)..(25): SEQ ID NO: 7612; WAN024DLB_at; Start 32; Stop 56
gagagtccttcttgatagctaatcg

SEQ ID NO: 162307 - DNA, 25 bp, Artificial
  probe
  misc_feature (1)..(25): SEQ ID NO: 7612; WAN024DLB_at; Start 29; Stop 53
acagagagtccttcttgatagctaa

SEQ ID NO: 162308 - DNA, 25 bp, Artificial
  probe
  misc_feature (1)..(25): SEQ ID NO: 7612; WAN024DLB_at; Start 23; Stop 47
gattttacagagagtccttcttgat

SEQ ID NO: 162309 - DNA, 25 bp, Artificial
  probe
  misc_feature (1)..(25): SEQ ID NO: 7612; WAN024DLB_at; Start 38; Stop 62
ccttcttgatagctaatcgtttttt

SEQ ID NO: 162310 - DNA, 25 bp, Artificial
  probe
  misc_feature (1)..(25): SEQ ID NO: 7612; WAN024DLB_at; Start 6; Stop 30
gcaaatgctggcaaaaggattttac

SEQ ID NO: 162311 - DNA, 25 bp, Artificial
  probe
  misc_feature (1)..(25): SEQ ID NO: 7612; WAN024DLB_at; Start 36; Stop 60
gtccttcttgatagctaatcgtttt

SEQ ID NO: 162312 - DNA, 25 bp, Artificial
  probe
  misc_feature (1)..(25): SEQ ID NO: 7612; WAN024DLB_at; Start 15; Stop 39
ggcaaaaggattttacagagagtcc

SEQ ID NO: 162313 - DNA, 25 bp, Artificial
  probe
  misc_feature (1)..(25): SEQ ID NO: 4008; WAN024DLC_at; Start 1135; Stop 1159
gctactagctttggaactctggcag

SEQ ID NO: 162314 - DNA, 25 bp, Artificial
  probe
  misc_feature (1)..(25): SEQ ID NO: 4008; WAN024DLC_at; Start 832; Stop 856
tcagccctgattgtcggaagccttg

SEQ ID NO: 162315 - DNA, 25 bp, Artificial
  probe
  misc_feature (1)..(25): SEQ ID NO: 4008; WAN024DLC_at; Start 559; Stop 583
ggtatcctcttcataaaaactgacc

SEQ ID NO: 162316 - DNA, 25 bp, Artificial
  probe
  misc_feature (1)..(25): SEQ ID NO: 4008; WAN024DLC_at; Start 848; Stop 872
gaagccttgtaagtggctatctgca

SEQ ID NO: 162317 - DNA, 25 bp, Artificial
  probe
  misc_feature (1)..(25): SEQ ID NO: 4008; WAN024DLC_at; Start 33; Stop 57
taggcaattaactatcaaccagtgg

SEQ ID NO: 162318 - DNA, 25 bp, Artificial
  probe
  misc_feature (1)..(25): SEQ ID NO: 4008; WAN024DLC_at; Start 705; Stop 729
tattatctctactagtcaagcagtg

SEQ ID NO: 162319 - DNA, 25 bp, Artificial
  probe
  misc_feature (1)..(25): SEQ ID NO: 4008; WAN024DLC_at; Start 632; Stop 656
aatccttttgccagcatttgctcca

SEQ ID NO: 162320 - DNA, 25 bp, Artificial
  probe
  misc_feature (1)..(25): SEQ ID NO: 4008; WAN024DLC_at; Start 915; Stop 939
catccagttgcttcttctagtagga

SEQ ID NO: 162321 - DNA, 25 bp, Artificial
  probe
  misc_feature (1)..(25): SEQ ID NO: 4008; WAN024DLC_at; Start 901; Stop 925
tatgcctcacttgtcatccagttgc

SEQ ID NO: 162322 - DNA, 25 bp, Artificial
  probe
  misc_feature (1)..(25): SEQ ID NO: 4008; WAN024DLC_at; Start 716; Stop 740
ctagtcaagcagtgataaatgttac

SEQ ID NO: 162323 - DNA, 25 bp, Artificial
  probe
  misc_feature (1)..(25): SEQ ID NO: 4008; WAN024DLC_at; Start 992; Stop 1016
ttttcgcaggtgttctctctcctag

SEQ ID NO: 162324 - DNA, 25 bp, Artificial
  probe
  misc_feature (1)..(25): SEQ ID NO: 4008; WAN024DLC_at; Start 1187; Stop 1211
tagttgcctttgttatgcttctgaa

SEQ ID NO: 162325 - DNA, 25 bp, Artificial
  probe
  misc_feature (1)..(25): SEQ ID NO: 4008; WAN024DLC_at; Start 945; Stop 969
cacagttcgttttgactggattctc

SEQ ID NO: 162326 - DNA, 25 bp, Artificial
  probe
  misc_feature (1)..(25): SEQ ID NO: 4008; WAN024DLC_at; Start 572; Stop 596
taaaaactgacctcttgaaagtaga

SEQ ID NO: 162327 - DNA, 25 bp, Artificial
  probe
  misc_feature (1)..(25): SEQ ID NO: 4008; WAN024DLC_at; Start 1149; Stop 1173
aactctggcagttagctttgtttta

SEQ ID NO: 162328 - DNA, 25 bp, Artificial
  probe
  misc_feature (1)..(25): SEQ ID NO: 4008; WAN024DLC_at; Start 1007; Stop 1031
tctctcctagattgcaagaactcgt

SEQ ID NO: 162329 - DNA, 25 bp, Artificial
  probe
  misc_feature (1)..(25): SEQ ID NO: 4008; WAN024DLC_at; Start 669; Stop 693
gatatggaatatgaataaggtgctc

SEQ ID NO: 162330 - DNA, 25 bp, Artificial
  probe
  misc_feature (1)..(25): SEQ ID NO: 4008; WAN024DLC_at; Start 930; Stop 954
tctagtaggatttgccacagttcgt

SEQ ID NO: 162331 - DNA, 25 bp, Artificial
  probe
  misc_feature (1)..(25): SEQ ID NO: 4008; WAN024DLC_at; Start 176; Stop 200
tacaaatctttctgggagttttggc

SEQ ID NO: 162332 - DNA, 25 bp, Artificial
  probe
  misc_feature (1)..(25): SEQ ID NO: 4008; WAN024DLC_at; Start 370; Stop 394
gccatgctcactccgattttcatta

SEQ ID NO: 162333 - DNA, 25 bp, Artificial
  probe
  misc_feature (1)..(25): SEQ ID NO: 4008; WAN024DLC_at; Start 1200; Stop 1224
tatgcttctgaatattcgtgaaagt

SEQ ID NO: 162334 - DNA, 25 bp, Artificial
  probe
  misc_feature (1)..(25): SEQ ID NO: 4008; WAN024DLC_at; Start 545; Stop 569
taatcgcatttttaggtatcctctt

SEQ ID NO: 162335 - DNA, 25 bp, Artificial
  probe
  misc_feature (1)..(25): SEQ ID NO: 4008; WAN024DLC_at; Start 976; Stop 1000
agtaccttggatgcctttttcgcag

SEQ ID NO: 162336 - DNA, 25 bp, Artificial
  probe
  misc_feature (1)..(25): SEQ ID NO: 4008; WAN024DLC_at; Start 961; Stop 985
tggattctcatctttagtaccttgg

SEQ ID NO: 162337 - DNA, 25 bp, Artificial
  probe
  misc_feature (1)..(25): SEQ ID NO: 4008; WAN024DLC_at; Start 528; Stop 552
gaacgctcttacctttttaatcgca

SEQ ID NO: 162338 - DNA, 25 bp, Artificial
  probe
  misc_feature (1)..(25): SEQ ID NO: 4008; WAN024DLC_at; Start 383; Stop 407
cgattttcattagaattattgggca

SEQ ID NO: 162339 - DNA, 25 bp, Artificial
  probe
  misc_feature (1)..(25): SEQ ID NO: 4008; WAN024DLC_at; Start 439; Stop 463
cagtcaactgttagtttagtgaaaa

SEQ ID NO: 162340 - DNA, 25 bp, Artificial
  probe
  misc_feature (1)..(25): SEQ ID NO: 4008; WAN024DLC_at; Start 862; Stop 886
ggctatctgcaacataccatttcca

SEQ ID NO: 162341 - DNA, 25 bp, Artificial
  probe
  misc_feature (1)..(25): SEQ ID NO: 4008; WAN024DLC_at; Start 612; Stop 636
tcaagaaggactctctgtaaaatcc

SEQ ID NO: 162342 - DNA, 25 bp, Artificial
  probe
  misc_feature (1)..(25): SEQ ID NO: 4008; WAN024DLC_at; Start 48; Stop 72
caaccagtggatttcaacgcttggg

SEQ ID NO: 162343 - DNA, 25 bp, Artificial
  probe
  misc_feature (1)..(25): SEQ ID NO: 4008; WAN024DLC_at; Start 1121; Stop 1145
ctttggtaaccattgctactagctt

SEQ ID NO: 162344 - DNA, 25 bp, Artificial
  probe
  misc_feature (1)..(25): SEQ ID NO: 4008; WAN024DLC_at; Start 202; Stop 226
gattttcaacatcatcgtgtcttga

SEQ ID NO: 162345 - DNA, 25 bp, Artificial
  probe
  misc_feature (1)..(25): SEQ ID NO: 4008; WAN024DLC_at; Start 214; Stop 238
catcgtgtcttgaaatacacagtca

SEQ ID NO: 162346 - DNA, 25 bp, Artificial
  probe
  misc_feature (1)..(25): SEQ ID NO: 4008; WAN024DLC_at; Start 887; Stop 911
taaaaacagctctctatgcctcact

SEQ ID NO: 162347 - DNA, 25 bp, Artificial
  probe
  misc_feature (1)..(25): SEQ ID NO: 676; WAN024DLD_at; Start 515; Stop 539
gtaatcacggttgggtcttgacaga

SEQ ID NO: 162348 - DNA, 25 bp, Artificial
  probe
  misc_feature (1)..(25): SEQ ID NO: 676; WAN024DLD_at; Start 127; Stop 151
ctgtcggatatgatgttgaattttc

SEQ ID NO: 162349 - DNA, 25 bp, Artificial
  probe
  misc_feature (1)..(25): SEQ ID NO: 676; WAN024DLD_at; Start 527; Stop 551
gggtcttgacagactttgtcttcta

SEQ ID NO: 162350 - DNA, 25 bp, Artificial
  probe
  misc_feature (1)..(25): SEQ ID NO: 676; WAN024DLD_at; Start 3; Stop 27
gaaaaagataatctcacaccgctac

SEQ ID NO: 162351 - DNA, 25 bp, Artificial
  probe
  misc_feature (1)..(25): SEQ ID NO: 676; WAN024DLD_at; Start 538; Stop 562
gactttgtcttctatatgggtggag

SEQ ID NO: 162352 - DNA, 25 bp, Artificial
  probe
  misc_feature (1)..(25): SEQ ID NO: 676; WAN024DLD_at; Start 51; Stop 75
tattgctgaccagaagttcagtgtt

SEQ ID NO: 162353 - DNA, 25 bp, Artificial
  probe
  misc_feature (1)..(25): SEQ ID NO: 676; WAN024DLD_at; Start 587; Stop 611
gaatgacaaagtcaatttattggcc

SEQ ID NO: 162354 - DNA, 25 bp, Artificial
  probe
  misc_feature (1)..(25): SEQ ID NO: 676; WAN024DLD_at; Start 47; Stop 71
tagttattgctgaccagaagttcag

SEQ ID NO: 162355 - DNA, 25 bp, Artificial
  probe
  misc_feature (1)..(25): SEQ ID NO: 676; WAN024DLD_at; Start 599; Stop 623
caatttattggcctattggactgca

SEQ ID NO: 162356 - DNA, 25 bp, Artificial
  probe
  misc_feature (1)..(25): SEQ ID NO: 676; WAN024DLD_at; Start 42; Stop 66
tctactagttattgctgaccagaag

SEQ ID NO: 162357 - DNA, 25 bp, Artificial
  probe
  misc_feature (1)..(25): SEQ ID NO: 676; WAN024DLD_at; Start 559; Stop 583
ggaggtcttatatttgcagtcttat

SEQ ID NO: 162358 - DNA, 25 bp, Artificial
  probe
  misc_feature (1)..(25): SEQ ID NO: 676; WAN024DLD_at; Start 646; Stop 670
cagcttttgatgttactgtaactaa

SEQ ID NO: 162359 - DNA, 25 bp, Artificial
  probe
  misc_feature (1)..(25): SEQ ID NO: 676; WAN024DLD_at; Start 206; Stop 230
tcaatagtagaaagtttaaaggatc

SEQ ID NO: 162360 - DNA, 25 bp, Artificial
  probe
  misc_feature (1)..(25): SEQ ID NO: 676; WAN024DLD_at; Start 388; Stop 412
gtgattgcaggtcccatttttgaag

SEQ ID NO: 162361 - DNA, 25 bp, Artificial
  probe
  misc_feature (1)..(25): SEQ ID NO: 676; WAN024DLD_at; Start 118; Stop 142
gcctattatctgtcggatatgatgt

SEQ ID NO: 162362 - DNA, 25 bp, Artificial
  probe
  misc_feature (1)..(25): SEQ ID NO: 676; WAN024DLD_at; Start 299; Stop 323
tcccacctactcgaaatgaaatttc

SEQ ID NO: 162363 - DNA, 25 bp, Artificial
  probe
  misc_feature (1)..(25): SEQ ID NO: 676; WAN024DLD_at; Start 101; Stop 125
ctgggctatctgactttgcctatta

SEQ ID NO: 162364 - DNA, 25 bp, Artificial
  probe
  misc_feature (1)..(25): SEQ ID NO: 676; WAN024DLD_at; Start 196; Stop 220
tggcagaaaatcaatagtagaaagt

SEQ ID NO: 162365 - DNA, 25 bp, Artificial
  probe
  misc_feature (1)..(25): SEQ ID NO: 676; WAN024DLD_at; Start 191; Stop 215
ggaaatggcagaaaatcaatagtag

SEQ ID NO: 162366 - DNA, 25 bp, Artificial
  probe
  misc_feature (1)..(25): SEQ ID NO: 676; WAN024DLD_at; Start 643; Stop 667
ggtcagcttttgatgttactgtaac

SEQ ID NO: 162367 - DNA, 25 bp, Artificial
  probe
  misc_feature (1)..(25): SEQ ID NO: 676; WAN024DLD_at; Start 112; Stop 136
gactttgcctattatctgtcggata

SEQ ID NO: 162368 - DNA, 25 bp, Artificial
  probe
  misc_feature (1)..(25): SEQ ID NO: 676; WAN024DLD_at; Start 152; Stop 176
ttgtggttttatttgctcttattgc

SEQ ID NO: 162369 - DNA, 25 bp, Artificial
  probe
  misc_feature (1)..(25): SEQ ID NO: 676; WAN024DLD_at; Start 520; Stop 544
cacggttgggtcttgacagactttg

SEQ ID NO: 162370 - DNA, 25 bp, Artificial
  probe
  misc_feature (1)..(25): SEQ ID NO: 676; WAN024DLD_at; Start 167; Stop 191
ctcttattgctatgatttggtcggg

SEQ ID NO: 162371 - DNA, 25 bp, Artificial
  probe
  misc_feature (1)..(25): SEQ ID NO: 676; WAN024DLD_at; Start 294; Stop 318
tcttttcccacctactcgaaatgaa

SEQ ID NO: 162372 - DNA, 25 bp, Artificial
  probe
  misc_feature (1)..(25): SEQ ID NO: 676; WAN024DLD_at; Start 14; Stop 38
tctcacaccgctactttattatagt

SEQ ID NO: 162373 - DNA, 25 bp, Artificial
  probe
  misc_feature (1)..(25): SEQ ID NO: 676; WAN024DLD_at; Start 508; Stop 532
cacattagtaatcacggttgggtct

SEQ ID NO: 162374 - DNA, 25 bp, Artificial
  probe
  misc_feature (1)..(25): SEQ ID NO: 676; WAN024DLD_at; Start 222; Stop 246
taaaggatcctatcttttctattcc

SEQ ID NO: 162375 - DNA, 25 bp, Artificial
  probe
  misc_feature (1)..(25): SEQ ID NO: 676; WAN024DLD_at; Start 545; Stop 569
tcttctatatgggtggaggtcttat

SEQ ID NO: 162376 - DNA, 25 bp, Artificial
  probe
  misc_feature (1)..(25): SEQ ID NO: 676; WAN024DLD_at; Start 555; Stop 579
gggtggaggtcttatatttgcagtc

SEQ ID NO: 162377 - DNA, 25 bp, Artificial
  probe
  misc_feature (1)..(25): SEQ ID NO: 676; WAN024DLD_at; Start 239; Stop 263
tctattccttcctagctctgcttgc

SEQ ID NO: 162378 - DNA, 25 bp, Artificial
  probe
  misc_feature (1)..(25): SEQ ID NO: 676; WAN024DLD_at; Start 247; Stop 271
ttcctagctctgcttgcttttgttg

SEQ ID NO: 162379 - DNA, 25 bp, Artificial
  probe
  misc_feature (1)..(25): SEQ ID NO: 676; WAN024DLD_at; Start 382; Stop 406
tatcctgtgattgcaggtcccattt

SEQ ID NO: 162380 - DNA, 25 bp, Artificial
  probe
  misc_feature (1)..(25): SEQ ID NO: 676; WAN024DLD_at; Start 500; Stop 524
gggtctcgcacattagtaatcacgg

SEQ ID NO: 162381 - DNA, 25 bp, Artificial
  probe
  misc_feature (1)..(25): SEQ ID NO: 7709; WAN024DLE_at; Start 5; Stop 29
tagatttgcccacacgaacaataag

SEQ ID NO: 162382 - DNA, 25 bp, Artificial
  probe
  misc_feature (1)..(25): SEQ ID NO: 7709; WAN024DLE_at; Start 75; Stop 99
aaacgaccacactctttccaatgtt

SEQ ID NO: 162383 - DNA, 25 bp, Artificial
  probe
  misc_feature (1)..(25): SEQ ID NO: 7709; WAN024DLE_at; Start 3; Stop 27
gttagatttgcccacacgaacaata

SEQ ID NO: 162384 - DNA, 25 bp, Artificial
  probe
  misc_feature (1)..(25): SEQ ID NO: 7709; WAN024DLE_at; Start 66; Stop 90
cgaaactggaaacgaccacactctt

SEQ ID NO: 162385 - DNA, 25 bp, Artificial
  probe
  misc_feature (1)..(25): SEQ ID NO: 7709; WAN024DLE_at; Start 49; Stop 73
cacccaggtaagaccaacgaaactg

SEQ ID NO: 162386 - DNA, 25 bp, Artificial
  probe
  misc_feature (1)..(25): SEQ ID NO: 7709; WAN024DLE_at; Start 65; Stop 89
acgaaactggaaacgaccacactct

SEQ ID NO: 162387 - DNA, 25 bp, Artificial
  probe
  misc_feature (1)..(25): SEQ ID NO: 7709; WAN024DLE_at; Start 74; Stop 98
gaaacgaccacactctttccaatgt

SEQ ID NO: 162388 - DNA, 25 bp, Artificial
  probe
  misc_feature (1)..(25): SEQ ID NO: 7709; WAN024DLE_at; Start 83; Stop 107
acactctttccaatgttcactttct

SEQ ID NO: 162389 - DNA, 25 bp, Artificial
  probe
  misc_feature (1)..(25): SEQ ID NO: 7709; WAN024DLE_at; Start 9; Stop 33
tttgcccacacgaacaataagaaaa

SEQ ID NO: 162390 - DNA, 25 bp, Artificial
  probe
  misc_feature (1)..(25): SEQ ID NO: 7709; WAN024DLE_at; Start 80; Stop 104
accacactctttccaatgttcactt

SEQ ID NO: 162391 - DNA, 25 bp, Artificial
  probe
  misc_feature (1)..(25): SEQ ID NO: 7709; WAN024DLE_at; Start 4; Stop 28
ttagatttgcccacacgaacaataa

SEQ ID NO: 162392 - DNA, 25 bp, Artificial
  probe
  misc_feature (1)..(25): SEQ ID NO: 7709; WAN024DLE_at; Start 10; Stop 34
ttgcccacacgaacaataagaaaaa

SEQ ID NO: 162393 - DNA, 25 bp, Artificial
  probe
  misc_feature (1)..(25): SEQ ID NO: 7709; WAN024DLE_at; Start 85; Stop 109
actctttccaatgttcactttctaa

SEQ ID NO: 162394 - DNA, 25 bp, Artificial
  probe
  misc_feature (1)..(25): SEQ ID NO: 7709; WAN024DLE_at; Start 90; Stop 114
ttccaatgttcactttctaactaat

SEQ ID NO: 162395 - DNA, 25 bp, Artificial
  probe
  misc_feature (1)..(25): SEQ ID NO: 7709; WAN024DLE_at; Start 81; Stop 105
ccacactctttccaatgttcacttt

SEQ ID NO: 162396 - DNA, 25 bp, Artificial
  probe
  misc_feature (1)..(25): SEQ ID NO: 7709; WAN024DLE_at; Start 84; Stop 108
cactctttccaatgttcactttcta

SEQ ID NO: 162397 - DNA, 25 bp, Artificial
  probe
  misc_feature (1)..(25): SEQ ID NO: 7709; WAN024DLE_at; Start 86; Stop 110
ctctttccaatgttcactttctaac

SEQ ID NO: 162398 - DNA, 25 bp, Artificial
  probe
  misc_feature (1)..(25): SEQ ID NO: 7709; WAN024DLE_at; Start 78; Stop 102
cgaccacactctttccaatgttcac

SEQ ID NO: 162399 - DNA, 25 bp, Artificial
  probe
  misc_feature (1)..(25): SEQ ID NO: 7709; WAN024DLE_at; Start 70; Stop 94
actggaaacgaccacactctttcca

SEQ ID NO: 162400 - DNA, 25 bp, Artificial
  probe
  misc_feature (1)..(25): SEQ ID NO: 7709; WAN024DLE_at; Start 71; Stop 95
ctggaaacgaccacactctttccaa

SEQ ID NO: 162401 - DNA, 25 bp, Artificial
  probe
  misc_feature (1)..(25): SEQ ID NO: 7709; WAN024DLE_at; Start 7; Stop 31
gatttgcccacacgaacaataagaa

SEQ ID NO: 162402 - DNA, 25 bp, Artificial
  probe
  misc_feature (1)..(25): SEQ ID NO: 7709; WAN024DLE_at; Start 76; Stop 100
aacgaccacactctttccaatgttc

SEQ ID NO: 162403 - DNA, 25 bp, Artificial
  probe
  misc_feature (1)..(25): SEQ ID NO: 7709; WAN024DLE_at; Start 77; Stop 101
acgaccacactctttccaatgttca

SEQ ID NO: 162404 - DNA, 25 bp, Artificial
  probe
  misc_feature (1)..(25): SEQ ID NO: 7709; WAN024DLE_at; Start 6; Stop 30
agatttgcccacacgaacaataaga

SEQ ID NO: 162405 - DNA, 25 bp, Artificial
  probe
  misc_feature (1)..(25): SEQ ID NO: 7709; WAN024DLE_at; Start 8; Stop 32
atttgcccacacgaacaataagaaa

SEQ ID NO: 162406 - DNA, 25 bp, Artificial
  probe
  misc_feature (1)..(25): SEQ ID NO: 7709; WAN024DLE_at; Start 89; Stop 113
tttccaatgttcactttctaactaa

SEQ ID NO: 162407 - DNA, 25 bp, Artificial
  probe
  misc_feature (1)..(25): SEQ ID NO: 7709; WAN024DLE_at; Start 11; Stop 35
tgcccacacgaacaataagaaaaaa

SEQ ID NO: 162408 - DNA, 25 bp, Artificial
  probe
  misc_feature (1)..(25): SEQ ID NO: 7709; WAN024DLE_at; Start 79; Stop 103
gaccacactctttccaatgttcact

SEQ ID NO: 162409 - DNA, 25 bp, Artificial
  probe
  misc_feature (1)..(25): SEQ ID NO: 7709; WAN024DLE_at; Start 63; Stop 87
caacgaaactggaaacgaccacact

SEQ ID NO: 162410 - DNA, 25 bp, Artificial
  probe
  misc_feature (1)..(25): SEQ ID NO: 7709; WAN024DLE_at; Start 73; Stop 97
ggaaacgaccacactctttccaatg

SEQ ID NO: 162411 - DNA, 25 bp, Artificial
  probe
  misc_feature (1)..(25): SEQ ID NO: 7709; WAN024DLE_at; Start 72; Stop 96
tggaaacgaccacactctttccaat

SEQ ID NO: 162412 - DNA, 25 bp, Artificial
  probe
  misc_feature (1)..(25): SEQ ID NO: 7709; WAN024DLE_at; Start 88; Stop 112
ctttccaatgttcactttctaacta

SEQ ID NO: 162413 - DNA, 25 bp, Artificial
  probe
  misc_feature (1)..(25): SEQ ID NO: 7709; WAN024DLE_at; Start 82; Stop 106
cacactctttccaatgttcactttc

SEQ ID NO: 162414 - DNA, 25 bp, Artificial
  probe
  misc_feature (1)..(25): SEQ ID NO: 7709; WAN024DLE_at; Start 87; Stop 111
tctttccaatgttcactttctaact

SEQ ID NO: 162415 - DNA, 25 bp, Artificial
  probe
  misc_feature (1)..(25): SEQ ID NO: 1067; WAN024DLF_at; Start 80; Stop 104
catcagacttagattttatggttgc

SEQ ID NO: 162416 - DNA, 25 bp, Artificial
  probe
  misc_feature (1)..(25): SEQ ID NO: 1067; WAN024DLF_at; Start 587; Stop 611
gctacacccgatccatctattgggc

SEQ ID NO: 162417 - DNA, 25 bp, Artificial
  probe
  misc_feature (1)..(25): SEQ ID NO: 1067; WAN024DLF_at; Start 319; Stop 343
agtacagtcgtagaagtagccacca

SEQ ID NO: 162418 - DNA, 25 bp, Artificial
  probe
  misc_feature (1)..(25): SEQ ID NO: 1067; WAN024DLF_at; Start 189; Stop 213
tgaacattggaaagagtgtggtcgt

SEQ ID NO: 162419 - DNA, 25 bp, Artificial
  probe
  misc_feature (1)..(25): SEQ ID NO: 1067; WAN024DLF_at; Start 365; Stop 389
ttgttacgcgaatactttatactag

SEQ ID NO: 162420 - DNA, 25 bp, Artificial
  probe
  misc_feature (1)..(25): SEQ ID NO: 1067; WAN024DLF_at; Start 152; Stop 176
ttctgggaactatagctacaattgc

SEQ ID NO: 162421 - DNA, 25 bp, Artificial
  probe
  misc_feature (1)..(25): SEQ ID NO: 1067; WAN024DLF_at; Start 35; Stop 59
caactggcttgttgattttgactta

SEQ ID NO: 162422 - DNA, 25 bp, Artificial
  probe
  misc_feature (1)..(25): SEQ ID NO: 1067; WAN024DLF_at; Start 139; Stop 163
ttattggtacttattctgggaacta

SEQ ID NO: 162423 - DNA, 25 bp, Artificial
  probe
  misc_feature (1)..(25): SEQ ID NO: 1067; WAN024DLF_at; Start 392; Stop 416
ttatcgcacctgtatcagaagaggt

SEQ ID NO: 162424 - DNA, 25 bp, Artificial
  probe
  misc_feature (1)..(25): SEQ ID NO: 1067; WAN024DLF_at; Start 468; Stop 492
tcttgatgttcttgtttccgctgcc

SEQ ID NO: 162425 - DNA, 25 bp, Artificial
  probe
  misc_feature (1)..(25): SEQ ID NO: 1067; WAN024DLF_at; Start 99; Stop 123
ggttgctttgtctgataatatgtac

SEQ ID NO: 162426 - DNA, 25 bp, Artificial
  probe
  misc_feature (1)..(25): SEQ ID NO: 1067; WAN024DLF_at; Start 63; Stop 87
cctcatttttaatgtcacatcagac

SEQ ID NO: 162427 - DNA, 25 bp, Artificial
  probe
  misc_feature (1)..(25): SEQ ID NO: 1067; WAN024DLF_at; Start 480; Stop 504
tgtttccgctgccatatttggcgct

SEQ ID NO: 162428 - DNA, 25 bp, Artificial
  probe
  misc_feature (1)..(25): SEQ ID NO: 1067; WAN024DLF_at; Start 543; Stop 567
cataaagtattttggaatgggcttg

SEQ ID NO: 162429 - DNA, 25 bp, Artificial
  probe
  misc_feature (1)..(25): SEQ ID NO: 1067; WAN024DLF_at; Start 494; Stop 518
tatttggcgctatgcatgttttgca

SEQ ID NO: 162430 - DNA, 25 bp, Artificial
  probe
  misc_feature (1)..(25): SEQ ID NO: 1067; WAN024DLF_at; Start 556; Stop 580
ggaatgggcttgatattttgtatga

SEQ ID NO: 162431 - DNA, 25 bp, Artificial
  probe
  misc_feature (1)..(25): SEQ ID NO: 1067; WAN024DLF_at; Start 19; Stop 43
gtgaaatttcacctagcaactggct

SEQ ID NO: 162432 - DNA, 25 bp, Artificial
  probe
  misc_feature (1)..(25): SEQ ID NO: 1067; WAN024DLF_at; Start 574; Stop 598
tgtatgatgtttcgctacacccgat

SEQ ID NO: 162433 - DNA, 25 bp, Artificial
  probe
  misc_feature (1)..(25): SEQ ID NO: 1067; WAN024DLF_at; Start 259; Stop 283
ttcttattgttcgtgtgggcaaatc

SEQ ID NO: 162434 - DNA, 25 bp, Artificial
  probe
  misc_feature (1)..(25): SEQ ID NO: 1067; WAN024DLF_at; Start 175; Stop 199
gcttttgtcaaaagtgaacattgga

SEQ ID NO: 162435 - DNA, 25 bp, Artificial
  probe
  misc_feature (1)..(25): SEQ ID NO: 1067; WAN024DLF_at; Start 350; Stop 374
caggaattagctattttgttacgcg

SEQ ID NO: 162436 - DNA, 25 bp, Artificial
  probe
  misc_feature (1)..(25): SEQ ID NO: 1067; WAN024DLF_at; Start 406; Stop 430
tcagaagaggttgtttgtcgtggtc

SEQ ID NO: 162437 - DNA, 25 bp, Artificial
  probe
  misc_feature (1)..(25): SEQ ID NO: 1067; WAN024DLF_at; Start 294; Stop 318
tatctttcctcgtacccagaatgga

SEQ ID NO: 162438 - DNA, 25 bp, Artificial
  probe
  misc_feature (1)..(25): SEQ ID NO: 1067; WAN024DLF_at; Start 112; Stop 136
gataatatgtactatgtgttccaag

SEQ ID NO: 162439 - DNA, 25 bp, Artificial
  probe
  misc_feature (1)..(25): SEQ ID NO: 1067; WAN024DLF_at; Start 515; Stop 539
tgcagtatggttggataacgacaga

SEQ ID NO: 162440 - DNA, 25 bp, Artificial
  probe
  misc_feature (1)..(25): SEQ ID NO: 1067; WAN024DLF_at; Start 274; Stop 298
tgggcaaatctaacaacctatatct

SEQ ID NO: 162441 - DNA, 25 bp, Artificial
  probe
  misc_feature (1)..(25): SEQ ID NO: 1067; WAN024DLF_at; Start 614; Stop 638
tagctctgcatgcttcatggaatag

SEQ ID NO: 162442 - DNA, 25 bp, Artificial
  probe
  misc_feature (1)..(25): SEQ ID NO: 1067; WAN024DLF_at; Start 203; Stop 227
agtgtggtcgtttccagtttcgttg

SEQ ID NO: 162443 - DNA, 25 bp, Artificial
  probe
  misc_feature (1)..(25): SEQ ID NO: 1067; WAN024DLF_at; Start 164; Stop 188
tagctacaattgcttttgtcaaaag

SEQ ID NO: 162444 - DNA, 25 bp, Artificial
  probe
  misc_feature (1)..(25): SEQ ID NO: 1067; WAN024DLF_at; Start 527; Stop 551
ggataacgacagatttcataaagta

SEQ ID NO: 162445 - DNA, 25 bp, Artificial
  probe
  misc_feature (1)..(25): SEQ ID NO: 1067; WAN024DLF_at; Start 602; Stop 626
tctattgggctatagctctgcatgc

SEQ ID NO: 162446 - DNA, 25 bp, Artificial
  probe
  misc_feature (1)..(25): SEQ ID NO: 1067; WAN024DLF_at; Start 308; Stop 332
cccagaatggaagtacagtcgtaga

SEQ ID NO: 162447 - DNA, 25 bp, Artificial
  probe
  misc_feature (1)..(25): SEQ ID NO: 1067; WAN024DLF_at; Start 380; Stop 404
tttatactagtattatcgcacctgt

SEQ ID NO: 162448 - DNA, 25 bp, Artificial
  probe
  misc_feature (1)..(25): SEQ ID NO: 1067; WAN024DLF_at; Start 424; Stop 448
cgtggtcttttgatgacaagtttat

SEQ ID NO: 162449 - DNA, 25 bp, Artificial
  probe
  misc_feature (1)..(25): SEQ ID NO: 7001; WAN024DLG_at; Start 163; Stop 187
catgattcttccactgttaatcgtc

SEQ ID NO: 162450 - DNA, 25 bp, Artificial
  probe
  misc_feature (1)..(25): SEQ ID NO: 7001; WAN024DLG_at; Start 164; Stop 188
atgattcttccactgttaatcgtcg

SEQ ID NO: 162451 - DNA, 25 bp, Artificial
  probe
  misc_feature (1)..(25): SEQ ID NO: 7001; WAN024DLG_at; Start 169; Stop 193
tcttccactgttaatcgtcgccatt

SEQ ID NO: 162452 - DNA, 25 bp, Artificial
  probe
  misc_feature (1)..(25): SEQ ID NO: 7001; WAN024DLG_at; Start 145; Stop 169
tggaagaaatattttaaccatgatt

SEQ ID NO: 162453 - DNA, 25 bp, Artificial
  probe
  misc_feature (1)..(25): SEQ ID NO: 7001; WAN024DLG_at; Start 151; Stop 175
aaatattttaaccatgattcttcca

SEQ ID NO: 162454 - DNA, 25 bp, Artificial
  probe
  misc_feature (1)..(25): SEQ ID NO: 7001; WAN024DLG_at; Start 165; Stop 189
tgattcttccactgttaatcgtcgc

SEQ ID NO: 162455 - DNA, 25 bp, Artificial
  probe
  misc_feature (1)..(25): SEQ ID NO: 7001; WAN024DLG_at; Start 155; Stop 179
attttaaccatgattcttccactgt

SEQ ID NO: 162456 - DNA, 25 bp, Artificial
  probe
  misc_feature (1)..(25): SEQ ID NO: 7001; WAN024DLG_at; Start 171; Stop 195
ttccactgttaatcgtcgccattat

SEQ ID NO: 162457 - DNA, 25 bp, Artificial
  probe
  misc_feature (1)..(25): SEQ ID NO: 7001; WAN024DLG_at; Start 167; Stop 191
attcttccactgttaatcgtcgcca

SEQ ID NO: 162458 - DNA, 25 bp, Artificial
  probe
  misc_feature (1)..(25): SEQ ID NO: 7001; WAN024DLG_at; Start 156; Stop 180
ttttaaccatgattcttccactgtt

SEQ ID NO: 162459 - DNA, 25 bp, Artificial
  probe
  misc_feature (1)..(25): SEQ ID NO: 7001; WAN024DLG_at; Start 158; Stop 182
ttaaccatgattcttccactgttaa

SEQ ID NO: 162460 - DNA, 25 bp, Artificial
  probe
  misc_feature (1)..(25): SEQ ID NO: 7001; WAN024DLG_at; Start 168; Stop 192
ttcttccactgttaatcgtcgccat

SEQ ID NO: 162461 - DNA, 25 bp, Artificial
  probe
  misc_feature (1)..(25): SEQ ID NO: 7001; WAN024DLG_at; Start 162; Stop 186
ccatgattcttccactgttaatcgt

SEQ ID NO: 162462 - DNA, 25 bp, Artificial
  probe
  misc_feature (1)..(25): SEQ ID NO: 7001; WAN024DLG_at; Start 159; Stop 183
taaccatgattcttccactgttaat

SEQ ID NO: 162463 - DNA, 25 bp, Artificial
  probe
  misc_feature (1)..(25): SEQ ID NO: 7001; WAN024DLG_at; Start 115; Stop 139
ttaggaacgtcttggtcaatcacta

SEQ ID NO: 162464 - DNA, 25 bp, Artificial
  probe
  misc_feature (1)..(25): SEQ ID NO: 7001; WAN024DLG_at; Start 146; Stop 170
ggaagaaatattttaaccatgattc

SEQ ID NO: 162465 - DNA, 25 bp, Artificial
  probe
  misc_feature (1)..(25): SEQ ID NO: 7001; WAN024DLG_at; Start 153; Stop 177
atattttaaccatgattcttccact

SEQ ID NO: 162466 - DNA, 25 bp, Artificial
  probe
  misc_feature (1)..(25): SEQ ID NO: 7001; WAN024DLG_at; Start 143; Stop 167
tctggaagaaatattttaaccatga

SEQ ID NO: 162467 - DNA, 25 bp, Artificial
  probe
  misc_feature (1)..(25): SEQ ID NO: 7001; WAN024DLG_at; Start 161; Stop 185
accatgattcttccactgttaatcg

SEQ ID NO: 162468 - DNA, 25 bp, Artificial
  probe
  misc_feature (1)..(25): SEQ ID NO: 7001; WAN024DLG_at; Start 113; Stop 137
gtttaggaacgtcttggtcaatcac

SEQ ID NO: 162469 - DNA, 25 bp, Artificial
  probe
  misc_feature (1)..(25): SEQ ID NO: 7001; WAN024DLG_at; Start 112; Stop 136
ggtttaggaacgtcttggtcaatca

SEQ ID NO: 162470 - DNA, 25 bp, Artificial
  probe
  misc_feature (1)..(25): SEQ ID NO: 7001; WAN024DLG_at; Start 150; Stop 174
gaaatattttaaccatgattcttcc

SEQ ID NO: 162471 - DNA, 25 bp, Artificial
  probe
  misc_feature (1)..(25): SEQ ID NO: 7001; WAN024DLG_at; Start 152; Stop 176
aatattttaaccatgattcttccac

SEQ ID NO: 162472 - DNA, 25 bp, Artificial
  probe
  misc_feature (1)..(25): SEQ ID NO: 7001; WAN024DLG_at; Start 147; Stop 171
gaagaaatattttaaccatgattct

SEQ ID NO: 162473 - DNA, 25 bp, Artificial
  probe
  misc_feature (1)..(25): SEQ ID NO: 7001; WAN024DLG_at; Start 170; Stop 194
cttccactgttaatcgtcgccatta

SEQ ID NO: 162474 - DNA, 25 bp, Artificial
  probe
  misc_feature (1)..(25): SEQ ID NO: 7001; WAN024DLG_at; Start 148; Stop 172
aagaaatattttaaccatgattctt

SEQ ID NO: 162475 - DNA, 25 bp, Artificial
  probe
  misc_feature (1)..(25): SEQ ID NO: 7001; WAN024DLG_at; Start 149; Stop 173
agaaatattttaaccatgattcttc

SEQ ID NO: 162476 - DNA, 25 bp, Artificial
  probe
  misc_feature (1)..(25): SEQ ID NO: 7001; WAN024DLG_at; Start 157; Stop 181
tttaaccatgattcttccactgtta

SEQ ID NO: 162477 - DNA, 25 bp, Artificial
  probe
  misc_feature (1)..(25): SEQ ID NO: 7001; WAN024DLG_at; Start 166; Stop 190
gattcttccactgttaatcgtcgcc

SEQ ID NO: 162478 - DNA, 25 bp, Artificial
  probe
  misc_feature (1)..(25): SEQ ID NO: 7001; WAN024DLG_at; Start 144; Stop 168
ctggaagaaatattttaaccatgat

SEQ ID NO: 162479 - DNA, 25 bp, Artificial
  probe
  misc_feature (1)..(25): SEQ ID NO: 7001; WAN024DLG_at; Start 154; Stop 178
tattttaaccatgattcttccactg

SEQ ID NO: 162480 - DNA, 25 bp, Artificial
  probe
  misc_feature (1)..(25): SEQ ID NO: 7001; WAN024DLG_at; Start 160; Stop 184
aaccatgattcttccactgttaatc

SEQ ID NO: 162481 - DNA, 25 bp, Artificial
  probe
  misc_feature (1)..(25): SEQ ID NO: 7001; WAN024DLG_at; Start 114; Stop 138
tttaggaacgtcttggtcaatcact

SEQ ID NO: 162482 - DNA, 25 bp, Artificial
  probe
  misc_feature (1)..(25): SEQ ID NO: 7002; WAN024DLH_at; Start 112; Stop 136
gggttcgggacaccttggtcaatca

SEQ ID NO: 162483 - DNA, 25 bp, Artificial
  probe
  misc_feature (1)..(25): SEQ ID NO: 7002; WAN024DLH_at; Start 115; Stop 139
ttcgggacaccttggtcaatcacta

SEQ ID NO: 162484 - DNA, 25 bp, Artificial
  probe
  misc_feature (1)..(25): SEQ ID NO: 7002; WAN024DLH_at; Start 113; Stop 137
ggttcgggacaccttggtcaatcac

SEQ ID NO: 162485 - DNA, 25 bp, Artificial
  probe
  misc_feature (1)..(25): SEQ ID NO: 7002; WAN024DLH_at; Start 158; Stop 182
ttaacgatagacctgactttgattc

SEQ ID NO: 162486 - DNA, 25 bp, Artificial
  probe
  misc_feature (1)..(25): SEQ ID NO: 7002; WAN024DLH_at; Start 154; Stop 178
aattttaacgatagacctgactttg

SEQ ID NO: 162487 - DNA, 25 bp, Artificial
  probe
  misc_feature (1)..(25): SEQ ID NO: 7002; WAN024DLH_at; Start 172; Stop 196
gactttgattctgaccgccgtcgtt

SEQ ID NO: 162488 - DNA, 25 bp, Artificial
  probe
  misc_feature (1)..(25): SEQ ID NO: 7002; WAN024DLH_at; Start 156; Stop 180
ttttaacgatagacctgactttgat

SEQ ID NO: 162489 - DNA, 25 bp, Artificial
  probe
  misc_feature (1)..(25): SEQ ID NO: 7002; WAN024DLH_at; Start 164; Stop 188
atagacctgactttgattctgaccg

SEQ ID NO: 162490 - DNA, 25 bp, Artificial
  probe
  misc_feature (1)..(25): SEQ ID NO: 7002; WAN024DLH_at; Start 173; Stop 197
actttgattctgaccgccgtcgtta

SEQ ID NO: 162491 - DNA, 25 bp, Artificial
  probe
  misc_feature (1)..(25): SEQ ID NO: 7002; WAN024DLH_at; Start 161; Stop 185
acgatagacctgactttgattctga

SEQ ID NO: 162492 - DNA, 25 bp, Artificial
  probe
  misc_feature (1)..(25): SEQ ID NO: 7002; WAN024DLH_at; Start 167; Stop 191
gacctgactttgattctgaccgccg

SEQ ID NO: 162493 - DNA, 25 bp, Artificial
  probe
  misc_feature (1)..(25): SEQ ID NO: 7002; WAN024DLH_at; Start 171; Stop 195
tgactttgattctgaccgccgtcgt

SEQ ID NO: 162494 - DNA, 25 bp, Artificial
  probe
  misc_feature (1)..(25): SEQ ID NO: 7002; WAN024DLH_at; Start 157; Stop 181
tttaacgatagacctgactttgatt

SEQ ID NO: 162495 - DNA, 25 bp, Artificial
  probe
  misc_feature (1)..(25): SEQ ID NO: 7002; WAN024DLH_at; Start 168; Stop 192
acctgactttgattctgaccgccgt

SEQ ID NO: 162496 - DNA, 25 bp, Artificial
  probe
  misc_feature (1)..(25): SEQ ID NO: 7002; WAN024DLH_at; Start 163; Stop 187
gatagacctgactttgattctgacc

SEQ ID NO: 162497 - DNA, 25 bp, Artificial
  probe
  misc_feature (1)..(25): SEQ ID NO: 7002; WAN024DLH_at; Start 174; Stop 198
ctttgattctgaccgccgtcgttat

SEQ ID NO: 162498 - DNA, 25 bp, Artificial
  probe
  misc_feature (1)..(25): SEQ ID NO: 7002; WAN024DLH_at; Start 159; Stop 183
taacgatagacctgactttgattct

SEQ ID NO: 162499 - DNA, 25 bp, Artificial
  probe
  misc_feature (1)..(25): SEQ ID NO: 7002; WAN024DLH_at; Start 166; Stop 190
agacctgactttgattctgaccgcc

SEQ ID NO: 162500 - DNA, 25 bp, Artificial
  probe
  misc_feature (1)..(25): SEQ ID NO: 7002; WAN024DLH_at; Start 114; Stop 138
gttcgggacaccttggtcaatcact

SEQ ID NO: 162501 - DNA, 25 bp, Artificial
  probe
  misc_feature (1)..(25): SEQ ID NO: 7002; WAN024DLH_at; Start 160; Stop 184
aacgatagacctgactttgattctg

SEQ ID NO: 162502 - DNA, 25 bp, Artificial
  probe
  misc_feature (1)..(25): SEQ ID NO: 7002; WAN024DLH_at; Start 169; Stop 193
cctgactttgattctgaccgccgtc

SEQ ID NO: 162503 - DNA, 25 bp, Artificial
  probe
  misc_feature (1)..(25): SEQ ID NO: 7002; WAN024DLH_at; Start 155; Stop 179
attttaacgatagacctgactttga

SEQ ID NO: 162504 - DNA, 25 bp, Artificial
  probe
  misc_feature (1)..(25): SEQ ID NO: 7002; WAN024DLH_at; Start 170; Stop 194
ctgactttgattctgaccgccgtcg

SEQ ID NO: 162505 - DNA, 25 bp, Artificial
  probe
  misc_feature (1)..(25): SEQ ID NO: 7002; WAN024DLH_at; Start 162; Stop 186
cgatagacctgactttgattctgac

SEQ ID NO: 162506 - DNA, 25 bp, Artificial
  probe
  misc_feature (1)..(25): SEQ ID NO: 7002; WAN024DLH_at; Start 165; Stop 189
tagacctgactttgattctgaccgc

SEQ ID NO: 162507 - DNA, 25 bp, Artificial
  probe
  misc_feature (1)..(25): SEQ ID NO: 2989; WAN024DLI_at; Start 38; Stop 62
cagaagctgagttgcaagatgttag

SEQ ID NO: 162508 - DNA, 25 bp, Artificial
  probe
  misc_feature (1)..(25): SEQ ID NO: 2989; WAN024DLI_at; Start 162; Stop 186
gagtcctaatcgtggagcttttgat

SEQ ID NO: 162509 - DNA, 25 bp, Artificial
  probe
  misc_feature (1)..(25): SEQ ID NO: 2989; WAN024DLI_at; Start 153; Stop 177
tcaagggatgagtcctaatcgtgga

SEQ ID NO: 162510 - DNA, 25 bp, Artificial
  probe
  misc_feature (1)..(25): SEQ ID NO: 2989; WAN024DLI_at; Start 64; Stop 88
ggaggcaacctcgtaaattctatgg

SEQ ID NO: 162511 - DNA, 25 bp, Artificial
  probe
  misc_feature (1)..(25): SEQ ID NO: 2989; WAN024DLI_at; Start 52; Stop 76
caagatgttagaggaggcaacctcg

SEQ ID NO: 162512 - DNA, 25 bp, Artificial
  probe
  misc_feature (1)..(25): SEQ ID NO: 2989; WAN024DLI_at; Start 73; Stop 97
ctcgtaaattctatgggaggtggtg

SEQ ID NO: 162513 - DNA, 25 bp, Artificial
  probe
  misc_feature (1)..(25): SEQ ID NO: 2989; WAN024DLI_at; Start 147; Stop 171
gggcaatcaagggatgagtcctaat

SEQ ID NO: 162514 - DNA, 25 bp, Artificial
  probe
  misc_feature (1)..(25): SEQ ID NO: 2989; WAN024DLI_at; Start 55; Stop 79
gatgttagaggaggcaacctcgtaa

SEQ ID NO: 162515 - DNA, 25 bp, Artificial
  probe
  misc_feature (1)..(25): SEQ ID NO: 2989; WAN024DLI_at; Start 199; Stop 223
ttagcagatggattgtttggccgcc

SEQ ID NO: 162516 - DNA, 25 bp, Artificial
  probe
  misc_feature (1)..(25): SEQ ID NO: 2989; WAN024DLI_at; Start 203; Stop 227
cagatggattgtttggccgccgtag

SEQ ID NO: 162517 - DNA, 25 bp, Artificial
  probe
  misc_feature (1)..(25): SEQ ID NO: 2989; WAN024DLI_at; Start 84; Stop 108
tatgggaggtggtggaagaagtggt

SEQ ID NO: 162518 - DNA, 25 bp, Artificial
  probe
  misc_feature (1)..(25): SEQ ID NO: 2989; WAN024DLI_at; Start 205; Stop 229
gatggattgtttggccgccgtagaa

SEQ ID NO: 162519 - DNA, 25 bp, Artificial
  probe
  misc_feature (1)..(25): SEQ ID NO: 2989; WAN024DLI_at; Start 57; Stop 81
tgttagaggaggcaacctcgtaaat

SEQ ID NO: 162520 - DNA, 25 bp, Artificial
  probe
  misc_feature (1)..(25): SEQ ID NO: 2989; WAN024DLI_at; Start 131; Stop 155
gaatttaccctggttggggcaatca

SEQ ID NO: 162521 - DNA, 25 bp, Artificial
  probe
  misc_feature (1)..(25): SEQ ID NO: 2989; WAN024DLI_at; Start 166; Stop 190
cctaatcgtggagcttttgattgga

SEQ ID NO: 162522 - DNA, 25 bp, Artificial
  probe
  misc_feature (1)..(25): SEQ ID NO: 2989; WAN024DLI_at; Start 60; Stop 84
tagaggaggcaacctcgtaaattct

SEQ ID NO: 162523 - DNA, 25 bp, Artificial
  probe
  misc_feature (1)..(25): SEQ ID NO: 2989; WAN024DLI_at; Start 156; Stop 180
agggatgagtcctaatcgtggagct

SEQ ID NO: 162524 - DNA, 25 bp, Artificial
  probe
  misc_feature (1)..(25): SEQ ID NO: 2989; WAN024DLI_at; Start 200; Stop 224
tagcagatggattgtttggccgccg

SEQ ID NO: 162525 - DNA, 25 bp, Artificial
  probe
  misc_feature (1)..(25): SEQ ID NO: 2989; WAN024DLI_at; Start 175; Stop 199
ggagcttttgattggactatagatt

SEQ ID NO: 162526 - DNA, 25 bp, Artificial
  probe
  misc_feature (1)..(25): SEQ ID NO: 2989; WAN024DLI_at; Start 105; Stop 129
tggtatatctggttggggcgtccca

SEQ ID NO: 162527 - DNA, 25 bp, Artificial
  probe
  misc_feature (1)..(25): SEQ ID NO: 2989; WAN024DLI_at; Start 159; Stop 183
gatgagtcctaatcgtggagctttt

SEQ ID NO: 162528 - DNA, 25 bp, Artificial
  probe
  misc_feature (1)..(25): SEQ ID NO: 2989; WAN024DLI_at; Start 42; Stop 66
agctgagttgcaagatgttagagga

SEQ ID NO: 162529 - DNA, 25 bp, Artificial
  probe
  misc_feature (1)..(25): SEQ ID NO: 2989; WAN024DLI_at; Start 202; Stop 226
gcagatggattgtttggccgccgta

SEQ ID NO: 162530 - DNA, 25 bp, Artificial
  probe
  misc_feature (1)..(25): SEQ ID NO: 2989; WAN024DLI_at; Start 69; Stop 93
caacctcgtaaattctatgggaggt

SEQ ID NO: 162531 - DNA, 25 bp, Artificial
  probe
  misc_feature (1)..(25): SEQ ID NO: 2989; WAN024DLI_at; Start 169; Stop 193
aatcgtggagcttttgattggacta

SEQ ID NO: 162532 - DNA, 25 bp, Artificial
  probe
  misc_feature (1)..(25): SEQ ID NO: 2989; WAN024DLI_at; Start 93; Stop 117
tggtggaagaagtggtatatctggt

SEQ ID NO: 162533 - DNA, 25 bp, Artificial
  probe
  misc_feature (1)..(25): SEQ ID NO: 2989; WAN024DLI_at; Start 181; Stop 205
tttgattggactatagatttagcag

SEQ ID NO: 162534 - DNA, 25 bp, Artificial
  probe
  misc_feature (1)..(25): SEQ ID NO: 2989; WAN024DLI_at; Start 189; Stop 213
gactatagatttagcagatggattg

SEQ ID NO: 162535 - DNA, 25 bp, Artificial
  probe
  misc_feature (1)..(25): SEQ ID NO: 2989; WAN024DLI_at; Start 65; Stop 89
gaggcaacctcgtaaattctatggg

SEQ ID NO: 162536 - DNA, 25 bp, Artificial
  probe
  misc_feature (1)..(25): SEQ ID NO: 2989; WAN024DLI_at; Start 172; Stop 196
cgtggagcttttgattggactatag

SEQ ID NO: 162537 - DNA, 25 bp, Artificial
  probe
  misc_feature (1)..(25): SEQ ID NO: 2989; WAN024DLI_at; Start 186; Stop 210
ttggactatagatttagcagatgga

SEQ ID NO: 162538 - DNA, 25 bp, Artificial
  probe
  misc_feature (1)..(25): SEQ ID NO: 2989; WAN024DLI_at; Start 67; Stop 91
ggcaacctcgtaaattctatgggag

SEQ ID NO: 162539 - DNA, 25 bp, Artificial
  probe
  misc_feature (1)..(25): SEQ ID NO: 2989; WAN024DLI_at; Start 50; Stop 74
tgcaagatgttagaggaggcaacct

SEQ ID NO: 162540 - DNA, 25 bp, Artificial
  probe
  misc_feature (1)..(25): SEQ ID NO: 2989; WAN024DLI_at; Start 150; Stop 174
caatcaagggatgagtcctaatcgt

SEQ ID NO: 162541 - DNA, 25 bp, Artificial
  probe
  misc_feature (1)..(25): SEQ ID NO: 1841; WAN024DLJ_at; Start 383; Stop 407
aaagctacccactagcagaggagga

SEQ ID NO: 162542 - DNA, 25 bp, Artificial
  probe
  misc_feature (1)..(25): SEQ ID NO: 1841; WAN024DLJ_at; Start 31; Stop 55
tacaaggaattacgtttggcgagaa

SEQ ID NO: 162543 - DNA, 25 bp, Artificial
  probe
  misc_feature (1)..(25): SEQ ID NO: 1841; WAN024DLJ_at; Start 381; Stop 405
taaaagctacccactagcagaggag

SEQ ID NO: 162544 - DNA, 25 bp, Artificial
  probe
  misc_feature (1)..(25): SEQ ID NO: 1841; WAN024DLJ_at; Start 33; Stop 57
caaggaattacgtttggcgagaaag

SEQ ID NO: 162545 - DNA, 25 bp, Artificial
  probe
  misc_feature (1)..(25): SEQ ID NO: 1841; WAN024DLJ_at; Start 454; Stop 478
tggtttgaactctatctcttttgca

SEQ ID NO: 162546 - DNA, 25 bp, Artificial
  probe
  misc_feature (1)..(25): SEQ ID NO: 1841; WAN024DLJ_at; Start 412; Stop 436
gagtttttgaccacctatctctatg

SEQ ID NO: 162547 - DNA, 25 bp, Artificial
  probe
  misc_feature (1)..(25): SEQ ID NO: 1841; WAN024DLJ_at; Start 440; Stop 464
tcgagtcttggacctggtttgaact

SEQ ID NO: 162548 - DNA, 25 bp, Artificial
  probe
  misc_feature (1)..(25): SEQ ID NO: 1841; WAN024DLJ_at; Start 458; Stop 482
ttgaactctatctcttttgcaatac

SEQ ID NO: 162549 - DNA, 25 bp, Artificial
  probe
  misc_feature (1)..(25): SEQ ID NO: 1841; WAN024DLJ_at; Start 92; Stop 116
cagcttctcagttgtccaagtttga

SEQ ID NO: 162550 - DNA, 25 bp, Artificial
  probe
  misc_feature (1)..(25): SEQ ID NO: 1841; WAN024DLJ_at; Start 444; Stop 468
gtcttggacctggtttgaactctat

SEQ ID NO: 162551 - DNA, 25 bp, Artificial
  probe
  misc_feature (1)..(25): SEQ ID NO: 1841; WAN024DLJ_at; Start 390; Stop 414
cccactagcagaggaggatagcgag

SEQ ID NO: 162552 - DNA, 25 bp, Artificial
  probe
  misc_feature (1)..(25): SEQ ID NO: 1841; WAN024DLJ_at; Start 208; Stop 232
aactatcaagaatctccacatatgc

SEQ ID NO: 162553 - DNA, 25 bp, Artificial
  probe
  misc_feature (1)..(25): SEQ ID NO: 1841; WAN024DLJ_at; Start 518; Stop 542
tatcaacctccttactcgaaaaatc

SEQ ID NO: 162554 - DNA, 25 bp, Artificial
  probe
  misc_feature (1)..(25): SEQ ID NO: 1841; WAN024DLJ_at; Start 402; Stop 426
ggaggatagcgagtttttgaccacc

SEQ ID NO: 162555 - DNA, 25 bp, Artificial
  probe
  misc_feature (1)..(25): SEQ ID NO: 1841; WAN024DLJ_at; Start 438; Stop 462
tatcgagtcttggacctggtttgaa

SEQ ID NO: 162556 - DNA, 25 bp, Artificial
  probe
  misc_feature (1)..(25): SEQ ID NO: 1841; WAN024DLJ_at; Start 88; Stop 112
ctaacagcttctcagttgtccaagt

SEQ ID NO: 162557 - DNA, 25 bp, Artificial
  probe
  misc_feature (1)..(25): SEQ ID NO: 1841; WAN024DLJ_at; Start 572; Stop 596
gattgtatatgaagcaaggactctt

SEQ ID NO: 162558 - DNA, 25 bp, Artificial
  probe
  misc_feature (1)..(25): SEQ ID NO: 1841; WAN024DLJ_at; Start 520; Stop 544
tcaacctccttactcgaaaaatcca

SEQ ID NO: 162559 - DNA, 25 bp, Artificial
  probe
  misc_feature (1)..(25): SEQ ID NO: 1841; WAN024DLJ_at; Start 35; Stop 59
aggaattacgtttggcgagaaagct

SEQ ID NO: 162560 - DNA, 25 bp, Artificial
  probe
  misc_feature (1)..(25): SEQ ID NO: 1841; WAN024DLJ_at; Start 194; Stop 218
ggcacaagctcaacaactatcaaga

SEQ ID NO: 162561 - DNA, 25 bp, Artificial
  probe
  misc_feature (1)..(25): SEQ ID NO: 1841; WAN024DLJ_at; Start 748; Stop 772
ggaagcaatcaaaaagagattgaac

SEQ ID NO: 162562 - DNA, 25 bp, Artificial
  probe
  misc_feature (1)..(25): SEQ ID NO: 1841; WAN024DLJ_at; Start 408; Stop 432
tagcgagtttttgaccacctatctc

SEQ ID NO: 162563 - DNA, 25 bp, Artificial
  probe
  misc_feature (1)..(25): SEQ ID NO: 1841; WAN024DLJ_at; Start 398; Stop 422
cagaggaggatagcgagtttttgac

SEQ ID NO: 162564 - DNA, 25 bp, Artificial
  probe
  misc_feature (1)..(25): SEQ ID NO: 1841; WAN024DLJ_at; Start 392; Stop 416
cactagcagaggaggatagcgagtt

SEQ ID NO: 162565 - DNA, 25 bp, Artificial
  probe
  misc_feature (1)..(25): SEQ ID NO: 1841; WAN024DLJ_at; Start 485; Stop 509
tgcccttcttgagcaatcaagatct

SEQ ID NO: 162566 - DNA, 25 bp, Artificial
  probe
  misc_feature (1)..(25): SEQ ID NO: 1841; WAN024DLJ_at; Start 394; Stop 418
ctagcagaggaggatagcgagtttt

SEQ ID NO: 162567 - DNA, 25 bp, Artificial
  probe
  misc_feature (1)..(25): SEQ ID NO: 1841; WAN024DLJ_at; Start 388; Stop 412
tacccactagcagaggaggatagcg

SEQ ID NO: 162568 - DNA, 25 bp, Artificial
  probe
  misc_feature (1)..(25): SEQ ID NO: 1841; WAN024DLJ_at; Start 201; Stop 225
gctcaacaactatcaagaatctcca

SEQ ID NO: 162569 - DNA, 25 bp, Artificial
  probe
  misc_feature (1)..(25): SEQ ID NO: 1841; WAN024DLJ_at; Start 405; Stop 429
ggatagcgagtttttgaccacctat

SEQ ID NO: 162570 - DNA, 25 bp, Artificial
  probe
  misc_feature (1)..(25): SEQ ID NO: 1841; WAN024DLJ_at; Start 579; Stop 603
tatgaagcaaggactcttaaatatc

SEQ ID NO: 162571 - DNA, 25 bp, Artificial
  probe
  misc_feature (1)..(25): SEQ ID NO: 1841; WAN024DLJ_at; Start 198; Stop 222
caagctcaacaactatcaagaatct

SEQ ID NO: 162572 - DNA, 25 bp, Artificial
  probe
  misc_feature (1)..(25): SEQ ID NO: 1841; WAN024DLJ_at; Start 570; Stop 594
tcgattgtatatgaagcaaggactc

SEQ ID NO: 162573 - DNA, 25 bp, Artificial
  probe
  misc_feature (1)..(25): SEQ ID NO: 1841; WAN024DLJ_at; Start 488; Stop 512
ccttcttgagcaatcaagatctgat

SEQ ID NO: 162574 - DNA, 25 bp, Artificial
  probe
  misc_feature (1)..(25): SEQ ID NO: 1841; WAN024DLJ_at; Start 448; Stop 472
tggacctggtttgaactctatctct

SEQ ID NO: 162575 - DNA, 25 bp, Artificial
  probe
  misc_feature (1)..(25): SEQ ID NO: 1210; WAN024DLK_at; Start 226; Stop 250
tattatattattgcgcttccgacag

SEQ ID NO: 162576 - DNA, 25 bp, Artificial
  probe
  misc_feature (1)..(25): SEQ ID NO: 1210; WAN024DLK_at; Start 309; Stop 333
gattctgagggtaaaacctaatgga

SEQ ID NO: 162577 - DNA, 25 bp, Artificial
  probe
  misc_feature (1)..(25): SEQ ID NO: 1210; WAN024DLK_at; Start 660; Stop 684
tgctgagaggagaagtttaaatgct

SEQ ID NO: 162578 - DNA, 25 bp, Artificial
  probe
  misc_feature (1)..(25): SEQ ID NO: 1210; WAN024DLK_at; Start 500; Stop 524
gaagaaaaattgcagagttgttcct

SEQ ID NO: 162579 - DNA, 25 bp, Artificial
  probe
  misc_feature (1)..(25): SEQ ID NO: 1210; WAN024DLK_at; Start 936; Stop 960
ttcagataattacaaagagtcagct

SEQ ID NO: 162580 - DNA, 25 bp, Artificial
  probe
  misc_feature (1)..(25): SEQ ID NO: 1210; WAN024DLK_at; Start 566; Stop 590
tgttagtttctcctactgaagcaga

SEQ ID NO: 162581 - DNA, 25 bp, Artificial
  probe
  misc_feature (1)..(25): SEQ ID NO: 1210; WAN024DLK_at; Start 36; Stop 60
gctggcctacgcgttactatttgca

SEQ ID NO: 162582 - DNA, 25 bp, Artificial
  probe
  misc_feature (1)..(25): SEQ ID NO: 1210; WAN024DLK_at; Start 873; Stop 897
taaacaaatattggaacgaaagcca

SEQ ID NO: 162583 - DNA, 25 bp, Artificial
  probe
  misc_feature (1)..(25): SEQ ID NO: 1210; WAN024DLK_at; Start 681; Stop 705
tgctgaagttgtaataaaaggtgtt

SEQ ID NO: 162584 - DNA, 25 bp, Artificial
  probe
  misc_feature (1)..(25): SEQ ID NO: 1210; WAN024DLK_at; Start 295; Stop 319
caaacggtatcgaagattctgaggg

SEQ ID NO: 162585 - DNA, 25 bp, Artificial
  probe
  misc_feature (1)..(25): SEQ ID NO: 1210; WAN024DLK_at; Start 1116; Stop 1140
gggccttgaagcttataaagataaa

SEQ ID NO: 162586 - DNA, 25 bp, Artificial
  probe
  misc_feature (1)..(25): SEQ ID NO: 1210; WAN024DLK_at; Start 238; Stop 262
gcgcttccgacagattatgatgaga

SEQ ID NO: 162587 - DNA, 25 bp, Artificial
  probe
  misc_feature (1)..(25): SEQ ID NO: 1210; WAN024DLK_at; Start 702; Stop 726
tgtttgtttagatccaagaattgga

SEQ ID NO: 162588 - DNA, 25 bp, Artificial
  probe
  misc_feature (1)..(25): SEQ ID NO: 1210; WAN024DLK_at; Start 113; Stop 137
taaaaaagggcattcttccatctaa

SEQ ID NO: 162589 - DNA, 25 bp, Artificial
  probe
  misc_feature (1)..(25): SEQ ID NO: 1210; WAN024DLK_at; Start 1066; Stop 1090
gaactatttacaaaacaaagtgatc

SEQ ID NO: 162590 - DNA, 25 bp, Artificial
  probe
  misc_feature (1)..(25): SEQ ID NO: 1210; WAN024DLK_at; Start 751; Stop 775
ggatttggaggatattgtcttccca

SEQ ID NO: 162591 - DNA, 25 bp, Artificial
  probe
  misc_feature (1)..(25): SEQ ID NO: 1210; WAN024DLK_at; Start 468; Stop 492
tcgcatagttgttggagatgagaca

SEQ ID NO: 162592 - DNA, 25 bp, Artificial
  probe
  misc_feature (1)..(25): SEQ ID NO: 1210; WAN024DLK_at; Start 129; Stop 153
tccatctaaaaatgaagagcttatg

SEQ ID NO: 162593 - DNA, 25 bp, Artificial
  probe
  misc_feature (1)..(25): SEQ ID NO: 1210; WAN024DLK_at; Start 27; Stop 51
gcatgttgggctggcctacgcgtta

SEQ ID NO: 162594 - DNA, 25 bp, Artificial
  probe
  misc_feature (1)..(25): SEQ ID NO: 1210; WAN024DLK_at; Start 512; Stop 536
cagagttgttcctttcgattagtac

SEQ ID NO: 162595 - DNA, 25 bp, Artificial
  probe
  misc_feature (1)..(25): SEQ ID NO: 1210; WAN024DLK_at; Start 540; Stop 564
tagtactgccaatattaaaaatgtt

SEQ ID NO: 162596 - DNA, 25 bp, Artificial
  probe
  misc_feature (1)..(25): SEQ ID NO: 1210; WAN024DLK_at; Start 802; Stop 826
tttatagaaataaatgccccagtga

SEQ ID NO: 162597 - DNA, 25 bp, Artificial
  probe
  misc_feature (1)..(25): SEQ ID NO: 1210; WAN024DLK_at; Start 886; Stop 910
gaacgaaagccaaagatagtaggaa

SEQ ID NO: 162598 - DNA, 25 bp, Artificial
  probe
  misc_feature (1)..(25): SEQ ID NO: 1210; WAN024DLK_at; Start 414; Stop 438
tgtccctgaatttttgagagaaggt

SEQ ID NO: 162599 - DNA, 25 bp, Artificial
  probe
  misc_feature (1)..(25): SEQ ID NO: 1210; WAN024DLK_at; Start 817; Stop 841
gccccagtgatagaagcgattgata

SEQ ID NO: 162600 - DNA, 25 bp, Artificial
  probe
  misc_feature (1)..(25): SEQ ID NO: 1210; WAN024DLK_at; Start 451; Stop 475
gataatttatatccaagtcgcatag

SEQ ID NO: 162601 - DNA, 25 bp, Artificial
  probe
  misc_feature (1)..(25): SEQ ID NO: 1210; WAN024DLK_at; Start 971; Stop 995
taattaatgaactattgattgtcgg

SEQ ID NO: 162602 - DNA, 25 bp, Artificial
  probe
  misc_feature (1)..(25): SEQ ID NO: 1210; WAN024DLK_at; Start 2; Stop 26
tgaatatagcagtaattggtttggg

SEQ ID NO: 162603 - DNA, 25 bp, Artificial
  probe
  misc_feature (1)..(25): SEQ ID NO: 1210; WAN024DLK_at; Start 281; Stop 305
catatgaaatcgaacaaacggtatc

SEQ ID NO: 162604 - DNA, 25 bp, Artificial
  probe
  misc_feature (1)..(25): SEQ ID NO: 1210; WAN024DLK_at; Start 607; Stop 631
tctaacacattcttagctctccgtg

SEQ ID NO: 162605 - DNA, 25 bp, Artificial
  probe
  misc_feature (1)..(25): SEQ ID NO: 1210; WAN024DLK_at; Start 1093; Stop 1117
attgttgcaaatagatgggataggg

SEQ ID NO: 162606 - DNA, 25 bp, Artificial
  probe
  misc_feature (1)..(25): SEQ ID NO: 1210; WAN024DLK_at; Start 577; Stop 601
cctactgaagcagaagcaattaagc

SEQ ID NO: 162607 - DNA, 25 bp, Artificial
  probe
  misc_feature (1)..(25): SEQ ID NO: 1210; WAN024DLK_at; Start 482; Stop 506
gagatgagacagttgaaggaagaaa

SEQ ID NO: 162608 - DNA, 25 bp, Artificial
  probe
  misc_feature (1)..(25): SEQ ID NO: 1210; WAN024DLK_at; Start 829; Stop 853
gaagcgattgatatttcaaacacaa

SEQ ID NO: 162609 - DNA, 25 bp, Artificial
  probe
  misc_feature (1)..(25): SEQ ID NO: 7133; WAN024DLL_at; Start 28; Stop 52
gagaagcttcattttgatgttcagg

SEQ ID NO: 162610 - DNA, 25 bp, Artificial
  probe
  misc_feature (1)..(25): SEQ ID NO: 7133; WAN024DLL_at; Start 62; Stop 86
ggttgagtctggtttctcttctgca

SEQ ID NO: 162611 - DNA, 25 bp, Artificial
  probe
  misc_feature (1)..(25): SEQ ID NO: 7133; WAN024DLL_at; Start 30; Stop 54
gaagcttcattttgatgttcaggct

SEQ ID NO: 162612 - DNA, 25 bp, Artificial
  probe
  misc_feature (1)..(25): SEQ ID NO: 7133; WAN024DLL_at; Start 15; Stop 39
tgatgtgcagggtgagaagcttcat

SEQ ID NO: 162613 - DNA, 25 bp, Artificial
  probe
  misc_feature (1)..(25): SEQ ID NO: 7133; WAN024DLL_at; Start 16; Stop 40
gatgtgcagggtgagaagcttcatt

SEQ ID NO: 162614 - DNA, 25 bp, Artificial
  probe
  misc_feature (1)..(25): SEQ ID NO: 7133; WAN024DLL_at; Start 20; Stop 44
tgcagggtgagaagcttcattttga

SEQ ID NO: 162615 - DNA, 25 bp, Artificial
  probe
  misc_feature (1)..(25): SEQ ID NO: 7133; WAN024DLL_at; Start 66; Stop 90
gagtctggtttctcttctgcagttg

SEQ ID NO: 162616 - DNA, 25 bp, Artificial
  probe
  misc_feature (1)..(25): SEQ ID NO: 7133; WAN024DLL_at; Start 74; Stop 98
tttctcttctgcagttgactcatgg

SEQ ID NO: 162617 - DNA, 25 bp, Artificial
  probe
  misc_feature (1)..(25): SEQ ID NO: 7133; WAN024DLL_at; Start 71; Stop 95
tggtttctcttctgcagttgactca

SEQ ID NO: 162618 - DNA, 25 bp, Artificial
  probe
  misc_feature (1)..(25): SEQ ID NO: 7133; WAN024DLL_at; Start 21; Stop 45
gcagggtgagaagcttcattttgat

SEQ ID NO: 162619 - DNA, 25 bp, Artificial
  probe
  misc_feature (1)..(25): SEQ ID NO: 7133; WAN024DLL_at; Start 33; Stop 57
gcttcattttgatgttcaggcttgg

SEQ ID NO: 162620 - DNA, 25 bp, Artificial
  probe
  misc_feature (1)..(25): SEQ ID NO: 7133; WAN024DLL_at; Start 3; Stop 27
ggagctgggtcttgatgtgcagggt

SEQ ID NO: 162621 - DNA, 25 bp, Artificial
  probe
  misc_feature (1)..(25): SEQ ID NO: 7133; WAN024DLL_at; Start 36; Stop 60
tcattttgatgttcaggcttggaag

SEQ ID NO: 162622 - DNA, 25 bp, Artificial
  probe
  misc_feature (1)..(25): SEQ ID NO: 7133; WAN024DLL_at; Start 64; Stop 88
ttgagtctggtttctcttctgcagt

SEQ ID NO: 162623 - DNA, 25 bp, Artificial
  probe
  misc_feature (1)..(25): SEQ ID NO: 7133; WAN024DLL_at; Start 22; Stop 46
cagggtgagaagcttcattttgatg

SEQ ID NO: 162624 - DNA, 25 bp, Artificial
  probe
  misc_feature (1)..(25): SEQ ID NO: 7133; WAN024DLL_at; Start 18; Stop 42
tgtgcagggtgagaagcttcatttt

SEQ ID NO: 162625 - DNA, 25 bp, Artificial
  probe
  misc_feature (1)..(25): SEQ ID NO: 7133; WAN024DLL_at; Start 23; Stop 47
agggtgagaagcttcattttgatgt

SEQ ID NO: 162626 - DNA, 25 bp, Artificial
  probe
  misc_feature (1)..(25): SEQ ID NO: 7133; WAN024DLL_at; Start 68; Stop 92
gtctggtttctcttctgcagttgac

SEQ ID NO: 162627 - DNA, 25 bp, Artificial
  probe
  misc_feature (1)..(25): SEQ ID NO: 7133; WAN024DLL_at; Start 69; Stop 93
tctggtttctcttctgcagttgact

SEQ ID NO: 162628 - DNA, 25 bp, Artificial
  probe
  misc_feature (1)..(25): SEQ ID NO: 7133; WAN024DLL_at; Start 25; Stop 49
ggtgagaagcttcattttgatgttc

SEQ ID NO: 162629 - DNA, 25 bp, Artificial
  probe
  misc_feature (1)..(25): SEQ ID NO: 7133; WAN024DLL_at; Start 29; Stop 53
agaagcttcattttgatgttcaggc

SEQ ID NO: 162630 - DNA, 25 bp, Artificial
  probe
  misc_feature (1)..(25): SEQ ID NO: 7133; WAN024DLL_at; Start 72; Stop 96
ggtttctcttctgcagttgactcat

SEQ ID NO: 162631 - DNA, 25 bp, Artificial
  probe
  misc_feature (1)..(25): SEQ ID NO: 7133; WAN024DLL_at; Start 61; Stop 85
gggttgagtctggtttctcttctgc

SEQ ID NO: 162632 - DNA, 25 bp, Artificial
  probe
  misc_feature (1)..(25): SEQ ID NO: 7133; WAN024DLL_at; Start 19; Stop 43
gtgcagggtgagaagcttcattttg

SEQ ID NO: 162633 - DNA, 25 bp, Artificial
  probe
  misc_feature (1)..(25): SEQ ID NO: 7133; WAN024DLL_at; Start 63; Stop 87
gttgagtctggtttctcttctgcag

SEQ ID NO: 162634 - DNA, 25 bp, Artificial
  probe
  misc_feature (1)..(25): SEQ ID NO: 7133; WAN024DLL_at; Start 67; Stop 91
agtctggtttctcttctgcagttga

SEQ ID NO: 162635 - DNA, 25 bp, Artificial
  probe
  misc_feature (1)..(25): SEQ ID NO: 7133; WAN024DLL_at; Start 38; Stop 62
attttgatgttcaggcttggaaggg

SEQ ID NO: 162636 - DNA, 25 bp, Artificial
  probe
  misc_feature (1)..(25): SEQ ID NO: 7133; WAN024DLL_at; Start 73; Stop 97
gtttctcttctgcagttgactcatg

SEQ ID NO: 162637 - DNA, 25 bp, Artificial
  probe
  misc_feature (1)..(25): SEQ ID NO: 7133; WAN024DLL_at; Start 34; Stop 58
cttcattttgatgttcaggcttgga

SEQ ID NO: 162638 - DNA, 25 bp, Artificial
  probe
  misc_feature (1)..(25): SEQ ID NO: 7133; WAN024DLL_at; Start 12; Stop 36
tcttgatgtgcagggtgagaagctt

SEQ ID NO: 162639 - DNA, 25 bp, Artificial
  probe
  misc_feature (1)..(25): SEQ ID NO: 7133; WAN024DLL_at; Start 17; Stop 41
atgtgcagggtgagaagcttcattt

SEQ ID NO: 162640 - DNA, 25 bp, Artificial
  probe
  misc_feature (1)..(25): SEQ ID NO: 7133; WAN024DLL_at; Start 37; Stop 61
cattttgatgttcaggcttggaagg

SEQ ID NO: 162641 - DNA, 25 bp, Artificial
  probe
  misc_feature (1)..(25): SEQ ID NO: 7133; WAN024DLL_at; Start 75; Stop 99
ttctcttctgcagttgactcatggc

SEQ ID NO: 162642 - DNA, 25 bp, Artificial
  probe
  misc_feature (1)..(25): SEQ ID NO: 7133; WAN024DLL_at; Start 14; Stop 38
ttgatgtgcagggtgagaagcttca

SEQ ID NO: 162643 - DNA, 25 bp, Artificial
  probe
  misc_feature (1)..(25): SEQ ID NO: 7727; WAN024DLM_at; Start 153; Stop 177
tgaatcagctgtagcttggctaggt

SEQ ID NO: 162644 - DNA, 25 bp, Artificial
  probe
  misc_feature (1)..(25): SEQ ID NO: 7727; WAN024DLM_at; Start 71; Stop 95
tgctagagttttctaccgattcgtt

SEQ ID NO: 162645 - DNA, 25 bp, Artificial
  probe
  misc_feature (1)..(25): SEQ ID NO: 7727; WAN024DLM_at; Start 212; Stop 236
tagtagaatcaggtctagcttctgg

SEQ ID NO: 162646 - DNA, 25 bp, Artificial
  probe
  misc_feature (1)..(25): SEQ ID NO: 7727; WAN024DLM_at; Start 118; Stop 142
gatgcttgtgcttcttgtgctggtt

SEQ ID NO: 162647 - DNA, 25 bp, Artificial
  probe
  misc_feature (1)..(25): SEQ ID NO: 7727; WAN024DLM_at; Start 215; Stop 239
tagaatcaggtctagcttctggagc

SEQ ID NO: 162648 - DNA, 25 bp, Artificial
  probe
  misc_feature (1)..(25): SEQ ID NO: 7727; WAN024DLM_at; Start 50; Stop 74
gggttgcaggtatattttccttgct

SEQ ID NO: 162649 - DNA, 25 bp, Artificial
  probe
  misc_feature (1)..(25): SEQ ID NO: 7727; WAN024DLM_at; Start 113; Stop 137
cagatgatgcttgtgcttcttgtgc

SEQ ID NO: 162650 - DNA, 25 bp, Artificial
  probe
  misc_feature (1)..(25): SEQ ID NO: 7727; WAN024DLM_at; Start 124; Stop 148
tgtgcttcttgtgctggttgttcag

SEQ ID NO: 162651 - DNA, 25 bp, Artificial
  probe
  misc_feature (1)..(25): SEQ ID NO: 7727; WAN024DLM_at; Start 7; Stop 31
tcgtttttgattcctgtatttggaa

SEQ ID NO: 162652 - DNA, 25 bp, Artificial
  probe
  misc_feature (1)..(25): SEQ ID NO: 7727; WAN024DLM_at; Start 220; Stop 244
tcaggtctagcttctggagctgggt

SEQ ID NO: 162653 - DNA, 25 bp, Artificial
  probe
  misc_feature (1)..(25): SEQ ID NO: 7727; WAN024DLM_at; Start 103; Stop 127
gcttcttttacagatgatgcttgtg

SEQ ID NO: 162654 - DNA, 25 bp, Artificial
  probe
  misc_feature (1)..(25): SEQ ID NO: 7727; WAN024DLM_at; Start 158; Stop 182
cagctgtagcttggctaggtttatt

SEQ ID NO: 162655 - DNA, 25 bp, Artificial
  probe
  misc_feature (1)..(25): SEQ ID NO: 7727; WAN024DLM_at; Start 18; Stop 42
tcctgtatttggaagttcagcttgt

SEQ ID NO: 162656 - DNA, 25 bp, Artificial
  probe
  misc_feature (1)..(25): SEQ ID NO: 7727; WAN024DLM_at; Start 223; Stop 247
ggtctagcttctggagctgggtctt

SEQ ID NO: 162657 - DNA, 25 bp, Artificial
  probe
  misc_feature (1)..(25): SEQ ID NO: 7727; WAN024DLM_at; Start 164; Stop 188
tagcttggctaggtttattttccgc

SEQ ID NO: 162658 - DNA, 25 bp, Artificial
  probe
  misc_feature (1)..(25): SEQ ID NO: 7727; WAN024DLM_at; Start 182; Stop 206
tttccgcatcagctactttggcatc

SEQ ID NO: 162659 - DNA, 25 bp, Artificial
  probe
  misc_feature (1)..(25): SEQ ID NO: 7727; WAN024DLM_at; Start 173; Stop 197
taggtttattttccgcatcagctac

SEQ ID NO: 162660 - DNA, 25 bp, Artificial
  probe
  misc_feature (1)..(25): SEQ ID NO: 7727; WAN024DLM_at; Start 148; Stop 172
gcttgtgaatcagctgtagcttggc

SEQ ID NO: 162661 - DNA, 25 bp, Artificial
  probe
  misc_feature (1)..(25): SEQ ID NO: 7727; WAN024DLM_at; Start 202; Stop 226
gcatctggtttagtagaatcaggtc

SEQ ID NO: 162662 - DNA, 25 bp, Artificial
  probe
  misc_feature (1)..(25): SEQ ID NO: 7727; WAN024DLM_at; Start 179; Stop 203
tattttccgcatcagctactttggc

SEQ ID NO: 162663 - DNA, 25 bp, Artificial
  probe
  misc_feature (1)..(25): SEQ ID NO: 7727; WAN024DLM_at; Start 27; Stop 51
tggaagttcagcttgtttatctggg

SEQ ID NO: 162664 - DNA, 25 bp, Artificial
  probe
  misc_feature (1)..(25): SEQ ID NO: 7727; WAN024DLM_at; Start 191; Stop 215
cagctactttggcatctggtttagt

SEQ ID NO: 162665 - DNA, 25 bp, Artificial
  probe
  misc_feature (1)..(25): SEQ ID NO: 7727; WAN024DLM_at; Start 94; Stop 118
tttcgaaccgcttcttttacagatg

SEQ ID NO: 162666 - DNA, 25 bp, Artificial
  probe
  misc_feature (1)..(25): SEQ ID NO: 7727; WAN024DLM_at; Start 98; Stop 122
gaaccgcttcttttacagatgatgc

SEQ ID NO: 162667 - DNA, 25 bp, Artificial
  probe
  misc_feature (1)..(25): SEQ ID NO: 7727; WAN024DLM_at; Start 206; Stop 230
ctggtttagtagaatcaggtctagc

SEQ ID NO: 162668 - DNA, 25 bp, Artificial
  probe
  misc_feature (1)..(25): SEQ ID NO: 7727; WAN024DLM_at; Start 15; Stop 39
gattcctgtatttggaagttcagct

SEQ ID NO: 162669 - DNA, 25 bp, Artificial
  probe
  misc_feature (1)..(25): SEQ ID NO: 7727; WAN024DLM_at; Start 55; Stop 79
gcaggtatattttccttgctagagt

SEQ ID NO: 162670 - DNA, 25 bp, Artificial
  probe
  misc_feature (1)..(25): SEQ ID NO: 7727; WAN024DLM_at; Start 137; Stop 161
ctggttgttcagcttgtgaatcagc

SEQ ID NO: 162671 - DNA, 25 bp, Artificial
  probe
  misc_feature (1)..(25): SEQ ID NO: 7727; WAN024DLM_at; Start 169; Stop 193
tggctaggtttattttccgcatcag

SEQ ID NO: 162672 - DNA, 25 bp, Artificial
  probe
  misc_feature (1)..(25): SEQ ID NO: 7727; WAN024DLM_at; Start 186; Stop 210
cgcatcagctactttggcatctggt

SEQ ID NO: 162673 - DNA, 25 bp, Artificial
  probe
  misc_feature (1)..(25): SEQ ID NO: 7727; WAN024DLM_at; Start 65; Stop 89
tttccttgctagagttttctaccga

SEQ ID NO: 162674 - DNA, 25 bp, Artificial
  probe
  misc_feature (1)..(25): SEQ ID NO: 7727; WAN024DLM_at; Start 131; Stop 155
cttgtgctggttgttcagcttgtga

SEQ ID NO: 162675 - DNA, 25 bp, Artificial
  probe
  misc_feature (1)..(25): SEQ ID NO: 7727; WAN024DLM_at; Start 197; Stop 221
ctttggcatctggtttagtagaatc

SEQ ID NO: 162676 - DNA, 25 bp, Artificial
  probe
  misc_feature (1)..(25): SEQ ID NO: 7727; WAN024DLM_at; Start 217; Stop 241
gaatcaggtctagcttctggagctg

SEQ ID NO: 162677 - DNA, 25 bp, Artificial
  probe
  misc_feature (1)..(25): SEQ ID NO: 2950; WAN024DLN_at; Start 207; Stop 231
gacgaagggcaatcaaacctttcat

SEQ ID NO: 162678 - DNA, 25 bp, Artificial
  probe
  misc_feature (1)..(25): SEQ ID NO: 2950; WAN024DLN_at; Start 350; Stop 374
aatgggttgccgtccttatcacgca

SEQ ID NO: 162679 - DNA, 25 bp, Artificial
  probe
  misc_feature (1)..(25): SEQ ID NO: 2950; WAN024DLN_at; Start 39; Stop 63
tttcatccgcattgacaaagactgc

SEQ ID NO: 162680 - DNA, 25 bp, Artificial
  probe
  misc_feature (1)..(25): SEQ ID NO: 2950; WAN024DLN_at; Start 220; Stop 244
caaacctttcatatagtcacggctc

SEQ ID NO: 162681 - DNA, 25 bp, Artificial
  probe
  misc_feature (1)..(25): SEQ ID NO: 2950; WAN024DLN_at; Start 265; Stop 289
tttaccatctgtagccttagtccag

SEQ ID NO: 162682 - DNA, 25 bp, Artificial
  probe
  misc_feature (1)..(25): SEQ ID NO: 2950; WAN024DLN_at; Start 392; Stop 416
ggaaccttatcctctgctactggag

SEQ ID NO: 162683 - DNA, 25 bp, Artificial
  probe
  misc_feature (1)..(25): SEQ ID NO: 2950; WAN024DLN_at; Start 247; Stop 271
gacattttcaggataagctttacca

SEQ ID NO: 162684 - DNA, 25 bp, Artificial
  probe
  misc_feature (1)..(25): SEQ ID NO: 2950; WAN024DLN_at; Start 140; Stop 164
acagtgatgaggtggacacggtctt

SEQ ID NO: 162685 - DNA, 25 bp, Artificial
  probe
  misc_feature (1)..(25): SEQ ID NO: 2950; WAN024DLN_at; Start 459; Stop 483
cctgaccggagtggataaatggagt

SEQ ID NO: 162686 - DNA, 25 bp, Artificial
  probe
  misc_feature (1)..(25): SEQ ID NO: 2950; WAN024DLN_at; Start 410; Stop 434
actggagtcttgtaggctgggtcac

SEQ ID NO: 162687 - DNA, 25 bp, Artificial
  probe
  misc_feature (1)..(25): SEQ ID NO: 2950; WAN024DLN_at; Start 65; Stop 89
tagatatcgccgtttggagcagtga

SEQ ID NO: 162688 - DNA, 25 bp, Artificial
  probe
  misc_feature (1)..(25): SEQ ID NO: 2950; WAN024DLN_at; Start 10; Stop 34
ggcagttcccaaattaaattcgcga

SEQ ID NO: 162689 - DNA, 25 bp, Artificial
  probe
  misc_feature (1)..(25): SEQ ID NO: 2950; WAN024DLN_at; Start 425; Stop 449
gctgggtcacggaattgtttagtac

SEQ ID NO: 162690 - DNA, 25 bp, Artificial
  probe
  misc_feature (1)..(25): SEQ ID NO: 2950; WAN024DLN_at; Start 150; Stop 174
ggtggacacggtctttgatatcttg

SEQ ID NO: 162691 - DNA, 25 bp, Artificial
  probe
  misc_feature (1)..(25): SEQ ID NO: 2950; WAN024DLN_at; Start 24; Stop 48
taaattcgcgagctttttcatccgc

SEQ ID NO: 162692 - DNA, 25 bp, Artificial
  probe
  misc_feature (1)..(25): SEQ ID NO: 2950; WAN024DLN_at; Start 498; Stop 522
agaccatgagatttccaagtcgtaa

SEQ ID NO: 162693 - DNA, 25 bp, Artificial
  probe
  misc_feature (1)..(25): SEQ ID NO: 2950; WAN024DLN_at; Start 361; Stop 385
gtccttatcacgcaacaagtgagat

SEQ ID NO: 162694 - DNA, 25 bp, Artificial
  probe
  misc_feature (1)..(25): SEQ ID NO: 2950; WAN024DLN_at; Start 194; Stop 218
gcatctgtagattgacgaagggcaa

SEQ ID NO: 162695 - DNA, 25 bp, Artificial
  probe
  misc_feature (1)..(25): SEQ ID NO: 2950; WAN024DLN_at; Start 255; Stop 279
caggataagctttaccatctgtagc

SEQ ID NO: 162696 - DNA, 25 bp, Artificial
  probe
  misc_feature (1)..(25): SEQ ID NO: 2950; WAN024DLN_at; Start 116; Stop 140
ttttccacaccattttggcctggga

SEQ ID NO: 162697 - DNA, 25 bp, Artificial
  probe
  misc_feature (1)..(25): SEQ ID NO: 2950; WAN024DLN_at; Start 90; Stop 114
tttggtagccaatcactacatcctc

SEQ ID NO: 162698 - DNA, 25 bp, Artificial
  probe
  misc_feature (1)..(25): SEQ ID NO: 2950; WAN024DLN_at; Start 444; Stop 468
tagtacgtccatattcctgaccgga

SEQ ID NO: 162699 - DNA, 25 bp, Artificial
  probe
  misc_feature (1)..(25): SEQ ID NO: 2950; WAN024DLN_at; Start 2; Stop 26
tgtgcaaaggcagttcccaaattaa

SEQ ID NO: 162700 - DNA, 25 bp, Artificial
  probe
  misc_feature (1)..(25): SEQ ID NO: 2950; WAN024DLN_at; Start 178; Stop 202
actcttaagtcggaaggcatctgta

SEQ ID NO: 162701 - DNA, 25 bp, Artificial
  probe
  misc_feature (1)..(25): SEQ ID NO: 2950; WAN024DLN_at; Start 278; Stop 302
gccttagtccagtcaaacttgttga

SEQ ID NO: 162702 - DNA, 25 bp, Artificial
  probe
  misc_feature (1)..(25): SEQ ID NO: 2950; WAN024DLN_at; Start 474; Stop 498
taaatggagttccttgagctgtcaa

SEQ ID NO: 162703 - DNA, 25 bp, Artificial
  probe
  misc_feature (1)..(25): SEQ ID NO: 2950; WAN024DLN_at; Start 376; Stop 400
caagtgagatttgtttggaacctta

SEQ ID NO: 162704 - DNA, 25 bp, Artificial
  probe
  misc_feature (1)..(25): SEQ ID NO: 2950; WAN024DLN_at; Start 234; Stop 258
agtcacggctcttgacattttcagg

SEQ ID NO: 162705 - DNA, 25 bp, Artificial
  probe
  misc_feature (1)..(25): SEQ ID NO: 2950; WAN024DLN_at; Start 75; Stop 99
cgtttggagcagtgatttggtagcc

SEQ ID NO: 162706 - DNA, 25 bp, Artificial
  probe
  misc_feature (1)..(25): SEQ ID NO: 2950; WAN024DLN_at; Start 341; Stop 365
ggatagtcaaatgggttgccgtcct

SEQ ID NO: 162707 - DNA, 25 bp, Artificial
  probe
  misc_feature (1)..(25): SEQ ID NO: 2950; WAN024DLN_at; Start 489; Stop 513
gagctgtcaagaccatgagatttcc

SEQ ID NO: 162708 - DNA, 25 bp, Artificial
  probe
  misc_feature (1)..(25): SEQ ID NO: 2950; WAN024DLN_at; Start 125; Stop 149
ccattttggcctgggacagtgatga

SEQ ID NO: 162709 - DNA, 25 bp, Artificial
  probe
  misc_feature (1)..(25): SEQ ID NO: 2950; WAN024DLN_at; Start 52; Stop 76
gacaaagactgcgtagatatcgccg

SEQ ID NO: 162710 - DNA, 25 bp, Artificial
  probe
  misc_feature (1)..(25): SEQ ID NO: 2950; WAN024DLN_at; Start 326; Stop 350
tcatggatgaagtaaggatagtcaa

SEQ ID NO: 162711 - DNA, 25 bp, Artificial
  probe
  misc_feature (1)..(25): SEQ ID NO: 5759; WAN024DLO_at; Start 94; Stop 118
caacaacagaaaccttatcagcact

SEQ ID NO: 162712 - DNA, 25 bp, Artificial
  probe
  misc_feature (1)..(25): SEQ ID NO: 5759; WAN024DLO_at; Start 7; Stop 31
tgtctagagtttgtttccaagttcc

SEQ ID NO: 162713 - DNA, 25 bp, Artificial
  probe
  misc_feature (1)..(25): SEQ ID NO: 5759; WAN024DLO_at; Start 56; Stop 80
agttccaactactttgtcagggtca

SEQ ID NO: 162714 - DNA, 25 bp, Artificial
  probe
  misc_feature (1)..(25): SEQ ID NO: 5759; WAN024DLO_at; Start 60; Stop 84
ccaactactttgtcagggtcattct

SEQ ID NO: 162715 - DNA, 25 bp, Artificial
  probe
  misc_feature (1)..(25): SEQ ID NO: 5759; WAN024DLO_at; Start 106; Stop 130
ccttatcagcacttggtgaccaaag

SEQ ID NO: 162716 - DNA, 25 bp, Artificial
  probe
  misc_feature (1)..(25): SEQ ID NO: 5759; WAN024DLO_at; Start 185; Stop 209
atagctgtatgtctcatctttcagg

SEQ ID NO: 162717 - DNA, 25 bp, Artificial
  probe
  misc_feature (1)..(25): SEQ ID NO: 5759; WAN024DLO_at; Start 167; Stop 191
agctcccagtttgccatcatagctg

SEQ ID NO: 162718 - DNA, 25 bp, Artificial
  probe
  misc_feature (1)..(25): SEQ ID NO: 5759; WAN024DLO_at; Start 178; Stop 202
tgccatcatagctgtatgtctcatc

SEQ ID NO: 162719 - DNA, 25 bp, Artificial
  probe
  misc_feature (1)..(25): SEQ ID NO: 5759; WAN024DLO_at; Start 171; Stop 195
cccagtttgccatcatagctgtatg

SEQ ID NO: 162720 - DNA, 25 bp, Artificial
  probe
  misc_feature (1)..(25): SEQ ID NO: 5759; WAN024DLO_at; Start 53; Stop 77
gacagttccaactactttgtcaggg

SEQ ID NO: 162721 - DNA, 25 bp, Artificial
  probe
  misc_feature (1)..(25): SEQ ID NO: 5759; WAN024DLO_at; Start 156; Stop 180
tcttttaggtcagctcccagtttgc

SEQ ID NO: 162722 - DNA, 25 bp, Artificial
  probe
  misc_feature (1)..(25): SEQ ID NO: 5759; WAN024DLO_at; Start 122; Stop 146
tgaccaaagggtcaaatcaacttgt

SEQ ID NO: 162723 - DNA, 25 bp, Artificial
  probe
  misc_feature (1)..(25): SEQ ID NO: 5759; WAN024DLO_at; Start 158; Stop 182
ttttaggtcagctcccagtttgcca

SEQ ID NO: 162724 - DNA, 25 bp, Artificial
  probe
  misc_feature (1)..(25): SEQ ID NO: 5759; WAN024DLO_at; Start 87; Stop 111
tcgtagacaacaacagaaaccttat

SEQ ID NO: 162725 - DNA, 25 bp, Artificial
  probe
  misc_feature (1)..(25): SEQ ID NO: 5759; WAN024DLO_at; Start 161; Stop 185
taggtcagctcccagtttgccatca

SEQ ID NO: 162726 - DNA, 25 bp, Artificial
  probe
  misc_feature (1)..(25): SEQ ID NO: 5759; WAN024DLO_at; Start 90; Stop 114
tagacaacaacagaaaccttatcag

SEQ ID NO: 162727 - DNA, 25 bp, Artificial
  probe
  misc_feature (1)..(25): SEQ ID NO: 5759; WAN024DLO_at; Start 67; Stop 91
ctttgtcagggtcattcttgtcgta

SEQ ID NO: 162728 - DNA, 25 bp, Artificial
  probe
  misc_feature (1)..(25): SEQ ID NO: 5759; WAN024DLO_at; Start 109; Stop 133
tatcagcacttggtgaccaaagggt

SEQ ID NO: 162729 - DNA, 25 bp, Artificial
  probe
  misc_feature (1)..(25): SEQ ID NO: 5759; WAN024DLO_at; Start 48; Stop 72
agagcgacagttccaactactttgt

SEQ ID NO: 162730 - DNA, 25 bp, Artificial
  probe
  misc_feature (1)..(25): SEQ ID NO: 5759; WAN024DLO_at; Start 75; Stop 99
gggtcattcttgtcgtagacaacaa

SEQ ID NO: 162731 - DNA, 25 bp, Artificial
  probe
  misc_feature (1)..(25): SEQ ID NO: 5759; WAN024DLO_at; Start 173; Stop 197
cagtttgccatcatagctgtatgtc

SEQ ID NO: 162732 - DNA, 25 bp, Artificial
  probe
  misc_feature (1)..(25): SEQ ID NO: 5759; WAN024DLO_at; Start 65; Stop 89
tactttgtcagggtcattcttgtcg

SEQ ID NO: 162733 - DNA, 25 bp, Artificial
  probe
  misc_feature (1)..(25): SEQ ID NO: 5759; WAN024DLO_at; Start 9; Stop 33
tctagagtttgtttccaagttcctc

SEQ ID NO: 162734 - DNA, 25 bp, Artificial
  probe
  misc_feature (1)..(25): SEQ ID NO: 5759; WAN024DLO_at; Start 2; Stop 26
tgtgctgtctagagtttgtttccaa

SEQ ID NO: 162735 - DNA, 25 bp, Artificial
  probe
  misc_feature (1)..(25): SEQ ID NO: 5759; WAN024DLO_at; Start 73; Stop 97
cagggtcattcttgtcgtagacaac

SEQ ID NO: 162736 - DNA, 25 bp, Artificial
  probe
  misc_feature (1)..(25): SEQ ID NO: 5759; WAN024DLO_at; Start 112; Stop 136
cagcacttggtgaccaaagggtcaa

SEQ ID NO: 162737 - DNA, 25 bp, Artificial
  probe
  misc_feature (1)..(25): SEQ ID NO: 5759; WAN024DLO_at; Start 70; Stop 94
tgtcagggtcattcttgtcgtagac

SEQ ID NO: 162738 - DNA, 25 bp, Artificial
  probe
  misc_feature (1)..(25): SEQ ID NO: 5759; WAN024DLO_at; Start 153; Stop 177
tcttcttttaggtcagctcccagtt

SEQ ID NO: 162739 - DNA, 25 bp, Artificial
  probe
  misc_feature (1)..(25): SEQ ID NO: 5759; WAN024DLO_at; Start 115; Stop 139
cacttggtgaccaaagggtcaaatc

SEQ ID NO: 162740 - DNA, 25 bp, Artificial
  probe
  misc_feature (1)..(25): SEQ ID NO: 5759; WAN024DLO_at; Start 164; Stop 188
gtcagctcccagtttgccatcatag

SEQ ID NO: 162741 - DNA, 25 bp, Artificial
  probe
  misc_feature (1)..(25): SEQ ID NO: 5759; WAN024DLO_at; Start 134; Stop 158
caaatcaacttgttttccttcttct

SEQ ID NO: 162742 - DNA, 25 bp, Artificial
  probe
  misc_feature (1)..(25): SEQ ID NO: 5759; WAN024DLO_at; Start 85; Stop 109
tgtcgtagacaacaacagaaacctt

SEQ ID NO: 162743 - DNA, 25 bp, Artificial
  probe
  misc_feature (1)..(25): SEQ ID NO: 5759; WAN024DLO_at; Start 151; Stop 175
cttcttcttttaggtcagctcccag

SEQ ID NO: 162744 - DNA, 25 bp, Artificial
  probe
  misc_feature (1)..(25): SEQ ID NO: 5759; WAN024DLO_at; Start 79; Stop 103
cattcttgtcgtagacaacaacaga

SEQ ID NO: 162745 - DNA, 25 bp, Artificial
  probe
  misc_feature (1)..(25): SEQ ID NO: 1576; WAN024DLP_at; Start 137; Stop 161
tcgtcgctattccaagcagcaagag

SEQ ID NO: 162746 - DNA, 25 bp, Artificial
  probe
  misc_feature (1)..(25): SEQ ID NO: 1576; WAN024DLP_at; Start 165; Stop 189
tagcgtaaggatcgagtgcaagaac

SEQ ID NO: 162747 - DNA, 25 bp, Artificial
  probe
  misc_feature (1)..(25): SEQ ID NO: 1576; WAN024DLP_at; Start 239; Stop 263
tctgtgattccgagtttgtttgtgc

SEQ ID NO: 162748 - DNA, 25 bp, Artificial
  probe
  misc_feature (1)..(25): SEQ ID NO: 1576; WAN024DLP_at; Start 213; Stop 237
ggtattgataatagtagccagtgaa

SEQ ID NO: 162749 - DNA, 25 bp, Artificial
  probe
  misc_feature (1)..(25): SEQ ID NO: 1576; WAN024DLP_at; Start 21; Stop 45
cgtcttcacgagtcttgaaattgtg

SEQ ID NO: 162750 - DNA, 25 bp, Artificial
  probe
  misc_feature (1)..(25): SEQ ID NO: 1576; WAN024DLP_at; Start 196; Stop 220
accttgacgctcgatttggtattga

SEQ ID NO: 162751 - DNA, 25 bp, Artificial
  probe
  misc_feature (1)..(25): SEQ ID NO: 1576; WAN024DLP_at; Start 144; Stop 168
tattccaagcagcaagagatttagc

SEQ ID NO: 162752 - DNA, 25 bp, Artificial
  probe
  misc_feature (1)..(25): SEQ ID NO: 1576; WAN024DLP_at; Start 83; Stop 107
gctggatctacaaaggcggctttag

SEQ ID NO: 162753 - DNA, 25 bp, Artificial
  probe
  misc_feature (1)..(25): SEQ ID NO: 1576; WAN024DLP_at; Start 246; Stop 270
ttccgagtttgtttgtgctgtctag

SEQ ID NO: 162754 - DNA, 25 bp, Artificial
  probe
  misc_feature (1)..(25): SEQ ID NO: 1576; WAN024DLP_at; Start 161; Stop 185
gatttagcgtaaggatcgagtgcaa

SEQ ID NO: 162755 - DNA, 25 bp, Artificial
  probe
  misc_feature (1)..(25): SEQ ID NO: 1576; WAN024DLP_at; Start 79; Stop 103
tttagctggatctacaaaggcggct

SEQ ID NO: 162756 - DNA, 25 bp, Artificial
  probe
  misc_feature (1)..(25): SEQ ID NO: 1576; WAN024DLP_at; Start 190; Stop 214
agttttaccttgacgctcgatttgg

SEQ ID NO: 162757 - DNA, 25 bp, Artificial
  probe
  misc_feature (1)..(25): SEQ ID NO: 1576; WAN024DLP_at; Start 16; Stop 40
aacggcgtcttcacgagtcttgaaa

SEQ ID NO: 162758 - DNA, 25 bp, Artificial
  probe
  misc_feature (1)..(25): SEQ ID NO: 1576; WAN024DLP_at; Start 73; Stop 97
tccgagtttagctggatctacaaag

SEQ ID NO: 162759 - DNA, 25 bp, Artificial
  probe
  misc_feature (1)..(25): SEQ ID NO: 1576; WAN024DLP_at; Start 153; Stop 177
cagcaagagatttagcgtaaggatc

SEQ ID NO: 162760 - DNA, 25 bp, Artificial
  probe
  misc_feature (1)..(25): SEQ ID NO: 1576; WAN024DLP_at; Start 174; Stop 198
gatcgagtgcaagaacagttttacc

SEQ ID NO: 162761 - DNA, 25 bp, Artificial
  probe
  misc_feature (1)..(25): SEQ ID NO: 1576; WAN024DLP_at; Start 13; Stop 37
gataacggcgtcttcacgagtcttg

SEQ ID NO: 162762 - DNA, 25 bp, Artificial
  probe
  misc_feature (1)..(25): SEQ ID NO: 1576; WAN024DLP_at; Start 29; Stop 53
cgagtcttgaaattgtgaatcttac

SEQ ID NO: 162763 - DNA, 25 bp, Artificial
  probe
  misc_feature (1)..(25): SEQ ID NO: 1576; WAN024DLP_at; Start 227; Stop 251
tagccagtgaaatctgtgattccga

SEQ ID NO: 162764 - DNA, 25 bp, Artificial
  probe
  misc_feature (1)..(25): SEQ ID NO: 1576; WAN024DLP_at; Start 105; Stop 129
tagccactttatgggcatcgtcaat

SEQ ID NO: 162765 - DNA, 25 bp, Artificial
  probe
  misc_feature (1)..(25): SEQ ID NO: 1576; WAN024DLP_at; Start 2; Stop 26
tgagcttcgtagataacggcgtctt

SEQ ID NO: 162766 - DNA, 25 bp, Artificial
  probe
  misc_feature (1)..(25): SEQ ID NO: 1576; WAN024DLP_at; Start 91; Stop 115
tacaaaggcggctttagccacttta

SEQ ID NO: 162767 - DNA, 25 bp, Artificial
  probe
  misc_feature (1)..(25): SEQ ID NO: 1576; WAN024DLP_at; Start 65; Stop 89
tcttgaggtccgagtttagctggat

SEQ ID NO: 162768 - DNA, 25 bp, Artificial
  probe
  misc_feature (1)..(25): SEQ ID NO: 1576; WAN024DLP_at; Start 53; Stop 77
ccataagtcaagtcttgaggtccga

SEQ ID NO: 162769 - DNA, 25 bp, Artificial
  probe
  misc_feature (1)..(25): SEQ ID NO: 1576; WAN024DLP_at; Start 37; Stop 61
gaaattgtgaatcttaccataagtc

SEQ ID NO: 162770 - DNA, 25 bp, Artificial
  probe
  misc_feature (1)..(25): SEQ ID NO: 1576; WAN024DLP_at; Start 5; Stop 29
gcttcgtagataacggcgtcttcac

SEQ ID NO: 162771 - DNA, 25 bp, Artificial
  probe
  misc_feature (1)..(25): SEQ ID NO: 1576; WAN024DLP_at; Start 168; Stop 192
cgtaaggatcgagtgcaagaacagt

SEQ ID NO: 162772 - DNA, 25 bp, Artificial
  probe
  misc_feature (1)..(25): SEQ ID NO: 1576; WAN024DLP_at; Start 97; Stop 121
ggcggctttagccactttatgggca

SEQ ID NO: 162773 - DNA, 25 bp, Artificial
  probe
  misc_feature (1)..(25): SEQ ID NO: 1576; WAN024DLP_at; Start 221; Stop 245
taatagtagccagtgaaatctgtga

SEQ ID NO: 162774 - DNA, 25 bp, Artificial
  probe
  misc_feature (1)..(25): SEQ ID NO: 1576; WAN024DLP_at; Start 201; Stop 225
gacgctcgatttggtattgataata

SEQ ID NO: 162775 - DNA, 25 bp, Artificial
  probe
  misc_feature (1)..(25): SEQ ID NO: 1576; WAN024DLP_at; Start 186; Stop 210
gaacagttttaccttgacgctcgat

SEQ ID NO: 162776 - DNA, 25 bp, Artificial
  probe
  misc_feature (1)..(25): SEQ ID NO: 1576; WAN024DLP_at; Start 48; Stop 72
tcttaccataagtcaagtcttgagg

SEQ ID NO: 162777 - DNA, 25 bp, Artificial
  probe
  misc_feature (1)..(25): SEQ ID NO: 1576; WAN024DLP_at; Start 60; Stop 84
tcaagtcttgaggtccgagtttagc

SEQ ID NO: 162778 - DNA, 25 bp, Artificial
  probe
  misc_feature (1)..(25): SEQ ID NO: 1576; WAN024DLP_at; Start 148; Stop 172
ccaagcagcaagagatttagcgtaa

SEQ ID NO: 162779 - DNA, 25 bp, Artificial
  probe
  misc_feature (1)..(25): SEQ ID NO: 4152; WAN024DLQ_at; Start 4; Stop 28
gatttcagcatagttctcagccttg

SEQ ID NO: 162780 - DNA, 25 bp, Artificial
  probe
  misc_feature (1)..(25): SEQ ID NO: 4152; WAN024DLQ_at; Start 105; Stop 129
catctccagggctgtcagcttcaaa

SEQ ID NO: 162781 - DNA, 25 bp, Artificial
  probe
  misc_feature (1)..(25): SEQ ID NO: 4152; WAN024DLQ_at; Start 227; Stop 251
ttgaggttgttacggatgtcatctg

SEQ ID NO: 162782 - DNA, 25 bp, Artificial
  probe
  misc_feature (1)..(25): SEQ ID NO: 4152; WAN024DLQ_at; Start 14; Stop 38
tagttctcagccttgcttgggtctt

SEQ ID NO: 162783 - DNA, 25 bp, Artificial
  probe
  misc_feature (1)..(25): SEQ ID NO: 4152; WAN024DLQ_at; Start 115; Stop 139
gctgtcagcttcaaagttagttggt

SEQ ID NO: 162784 - DNA, 25 bp, Artificial
  probe
  misc_feature (1)..(25): SEQ ID NO: 4152; WAN024DLQ_at; Start 173; Stop 197
tcacgcttgccacctgtgataaagg

SEQ ID NO: 162785 - DNA, 25 bp, Artificial
  probe
  misc_feature (1)..(25): SEQ ID NO: 4152; WAN024DLQ_at; Start 197; Stop 221
gcaggttgaccttcgtttggataac

SEQ ID NO: 162786 - DNA, 25 bp, Artificial
  probe
  misc_feature (1)..(25): SEQ ID NO: 4152; WAN024DLQ_at; Start 140; Stop 164
tgagcaatgagatttttaaagatgg

SEQ ID NO: 162787 - DNA, 25 bp, Artificial
  probe
  misc_feature (1)..(25): SEQ ID NO: 4152; WAN024DLQ_at; Start 111; Stop 135
cagggctgtcagcttcaaagttagt

SEQ ID NO: 162788 - DNA, 25 bp, Artificial
  probe
  misc_feature (1)..(25): SEQ ID NO: 4152; WAN024DLQ_at; Start 201; Stop 225
gttgaccttcgtttggataaccaga

SEQ ID NO: 162789 - DNA, 25 bp, Artificial
  probe
  misc_feature (1)..(25): SEQ ID NO: 4152; WAN024DLQ_at; Start 221; Stop 245
ccagatttgaggttgttacggatgt

SEQ ID NO: 162790 - DNA, 25 bp, Artificial
  probe
  misc_feature (1)..(25): SEQ ID NO: 4152; WAN024DLQ_at; Start 66; Stop 90
agagggtcaagttatcatgggctgc

SEQ ID NO: 162791 - DNA, 25 bp, Artificial
  probe
  misc_feature (1)..(25): SEQ ID NO: 4152; WAN024DLQ_at; Start 160; Stop 184
gatggtgttgacatcacgcttgcca

SEQ ID NO: 162792 - DNA, 25 bp, Artificial
  probe
  misc_feature (1)..(25): SEQ ID NO: 4152; WAN024DLQ_at; Start 11; Stop 35
gcatagttctcagccttgcttgggt

SEQ ID NO: 162793 - DNA, 25 bp, Artificial
  probe
  misc_feature (1)..(25): SEQ ID NO: 4152; WAN024DLQ_at; Start 1; Stop 25
gtggatttcagcatagttctcagcc

SEQ ID NO: 162794 - DNA, 25 bp, Artificial
  probe
  misc_feature (1)..(25): SEQ ID NO: 4152; WAN024DLQ_at; Start 63; Stop 87
caaagagggtcaagttatcatgggc

SEQ ID NO: 162795 - DNA, 25 bp, Artificial
  probe
  misc_feature (1)..(25): SEQ ID NO: 4152; WAN024DLQ_at; Start 209; Stop 233
tcgtttggataaccagatttgaggt

SEQ ID NO: 162796 - DNA, 25 bp, Artificial
  probe
  misc_feature (1)..(25): SEQ ID NO: 4152; WAN024DLQ_at; Start 120; Stop 144
cagcttcaaagttagttggttgagc

SEQ ID NO: 162797 - DNA, 25 bp, Artificial
  probe
  misc_feature (1)..(25): SEQ ID NO: 4152; WAN024DLQ_at; Start 100; Stop 124
gatgacatctccagggctgtcagct

SEQ ID NO: 162798 - DNA, 25 bp, Artificial
  probe
  misc_feature (1)..(25): SEQ ID NO: 4152; WAN024DLQ_at; Start 53; Stop 77
gcaatgatgtcaaagagggtcaagt

SEQ ID NO: 162799 - DNA, 25 bp, Artificial
  probe
  misc_feature (1)..(25): SEQ ID NO: 4152; WAN024DLQ_at; Start 43; Stop 67
gatagactgggcaatgatgtcaaag

SEQ ID NO: 162800 - DNA, 25 bp, Artificial
  probe
  misc_feature (1)..(25): SEQ ID NO: 4152; WAN024DLQ_at; Start 49; Stop 73
ctgggcaatgatgtcaaagagggtc

SEQ ID NO: 162801 - DNA, 25 bp, Artificial
  probe
  misc_feature (1)..(25): SEQ ID NO: 4152; WAN024DLQ_at; Start 32; Stop 56
gggtcttttttgatagactgggcaa

SEQ ID NO: 162802 - DNA, 25 bp, Artificial
  probe
  misc_feature (1)..(25): SEQ ID NO: 4152; WAN024DLQ_at; Start 187; Stop 211
tgtgataaaggcaggttgaccttcg

SEQ ID NO: 162803 - DNA, 25 bp, Artificial
  probe
  misc_feature (1)..(25): SEQ ID NO: 4152; WAN024DLQ_at; Start 95; Stop 119
tattggatgacatctccagggctgt

SEQ ID NO: 162804 - DNA, 25 bp, Artificial
  probe
  misc_feature (1)..(25): SEQ ID NO: 4152; WAN024DLQ_at; Start 154; Stop 178
tttaaagatggtgttgacatcacgc

SEQ ID NO: 162805 - DNA, 25 bp, Artificial
  probe
  misc_feature (1)..(25): SEQ ID NO: 4152; WAN024DLQ_at; Start 126; Stop 150
caaagttagttggttgagcaatgag

SEQ ID NO: 162806 - DNA, 25 bp, Artificial
  probe
  misc_feature (1)..(25): SEQ ID NO: 4152; WAN024DLQ_at; Start 166; Stop 190
gttgacatcacgcttgccacctgtg

SEQ ID NO: 162807 - DNA, 25 bp, Artificial
  probe
  misc_feature (1)..(25): SEQ ID NO: 4152; WAN024DLQ_at; Start 92; Stop 116
atgtattggatgacatctccagggc

SEQ ID NO: 162808 - DNA, 25 bp, Artificial
  probe
  misc_feature (1)..(25): SEQ ID NO: 4152; WAN024DLQ_at; Start 183; Stop 207
cacctgtgataaaggcaggttgacc

SEQ ID NO: 162809 - DNA, 25 bp, Artificial
  probe
  misc_feature (1)..(25): SEQ ID NO: 4152; WAN024DLQ_at; Start 39; Stop 63
ttttgatagactgggcaatgatgtc

SEQ ID NO: 162810 - DNA, 25 bp, Artificial
  probe
  misc_feature (1)..(25): SEQ ID NO: 4152; WAN024DLQ_at; Start 206; Stop 230
ccttcgtttggataaccagatttga

SEQ ID NO: 162811 - DNA, 25 bp, Artificial
  probe
  misc_feature (1)..(25): SEQ ID NO: 4152; WAN024DLQ_at; Start 23; Stop 47
gccttgcttgggtcttttttgatag

SEQ ID NO: 162812 - DNA, 25 bp, Artificial
  probe
  misc_feature (1)..(25): SEQ ID NO: 4152; WAN024DLQ_at; Start 177; Stop 201
gcttgccacctgtgataaaggcagg

SEQ ID NO: 162813 - DNA, 25 bp, Artificial
  probe
  misc_feature (1)..(25): SEQ ID NO: 318; WAN024DLR-3_at; Start 714; Stop 738
ccatgattcttacgattctagcgac

SEQ ID NO: 162814 - DNA, 25 bp, Artificial
  probe
  misc_feature (1)..(25): SEQ ID NO: 318; WAN024DLR-3_at; Start 10; Stop 34
catatgaccaaacggctcctagttg

SEQ ID NO: 162815 - DNA, 25 bp, Artificial
  probe
  misc_feature (1)..(25): SEQ ID NO: 318; WAN024DLR-3_at; Start 560; Stop 584
gaactccatttatccactccggtca

SEQ ID NO: 162816 - DNA, 25 bp, Artificial
  probe
  misc_feature (1)..(25): SEQ ID NO: 318; WAN024DLR-3_at; Start 564; Stop 588
tccatttatccactccggtcaggaa

SEQ ID NO: 162817 - DNA, 25 bp, Artificial
  probe
  misc_feature (1)..(25): SEQ ID NO: 318; WAN024DLR-3_at; Start 616; Stop 640
ccagcctacaagactccagtagcag

SEQ ID NO: 162818 - DNA, 25 bp, Artificial
  probe
  misc_feature (1)..(25): SEQ ID NO: 318; WAN024DLR-3_at; Start 14; Stop 38
tgaccaaacggctcctagttgactc

SEQ ID NO: 162819 - DNA, 25 bp, Artificial
  probe
  misc_feature (1)..(25): SEQ ID NO: 318; WAN024DLR-3_at; Start 718; Stop 742
gattcttacgattctagcgacgcag

SEQ ID NO: 162820 - DNA, 25 bp, Artificial
  probe
  misc_feature (1)..(25): SEQ ID NO: 318; WAN024DLR-3_at; Start 559; Stop 583
ggaactccatttatccactccggtc

SEQ ID NO: 162821 - DNA, 25 bp, Artificial
  probe
  misc_feature (1)..(25): SEQ ID NO: 318; WAN024DLR-3_at; Start 9; Stop 33
ccatatgaccaaacggctcctagtt

SEQ ID NO: 162822 - DNA, 25 bp, Artificial
  probe
  misc_feature (1)..(25): SEQ ID NO: 318; WAN024DLR-3_at; Start 16; Stop 40
accaaacggctcctagttgactcta

SEQ ID NO: 162823 - DNA, 25 bp, Artificial
  probe
  misc_feature (1)..(25): SEQ ID NO: 318; WAN024DLR-3_at; Start 562; Stop 586
actccatttatccactccggtcagg

SEQ ID NO: 162824 - DNA, 25 bp, Artificial
  probe
  misc_feature (1)..(25): SEQ ID NO: 318; WAN024DLR-3_at; Start 720; Stop 744
ttcttacgattctagcgacgcagtc

SEQ ID NO: 162825 - DNA, 25 bp, Artificial
  probe
  misc_feature (1)..(25): SEQ ID NO: 318; WAN024DLR-3_at; Start 611; Stop 635
gtgacccagcctacaagactccagt

SEQ ID NO: 162826 - DNA, 25 bp, Artificial
  probe
  misc_feature (1)..(25): SEQ ID NO: 318; WAN024DLR-3_at; Start 619; Stop 643
gcctacaagactccagtagcagagg

SEQ ID NO: 162827 - DNA, 25 bp, Artificial
  probe
  misc_feature (1)..(25): SEQ ID NO: 318; WAN024DLR-3_at; Start 716; Stop 740
atgattcttacgattctagcgacgc

SEQ ID NO: 162828 - DNA, 25 bp, Artificial
  probe
  misc_feature (1)..(25): SEQ ID NO: 318; WAN024DLR-3_at; Start 624; Stop 648
caagactccagtagcagaggataag

SEQ ID NO: 162829 - DNA, 25 bp, Artificial
  probe
  misc_feature (1)..(25): SEQ ID NO: 318; WAN024DLR-3_at; Start 951; Stop 975
ccaaatcactgctccaaacggcgat

SEQ ID NO: 162830 - DNA, 25 bp, Artificial
  probe
  misc_feature (1)..(25): SEQ ID NO: 318; WAN024DLR-3_at; Start 942; Stop 966
gattggctaccaaatcactgctcca

SEQ ID NO: 162831 - DNA, 25 bp, Artificial
  probe
  misc_feature (1)..(25): SEQ ID NO: 318; WAN024DLR-3_at; Start 715; Stop 739
catgattcttacgattctagcgacg

SEQ ID NO: 162832 - DNA, 25 bp, Artificial
  probe
  misc_feature (1)..(25): SEQ ID NO: 318; WAN024DLR-3_at; Start 620; Stop 644
cctacaagactccagtagcagagga

SEQ ID NO: 162833 - DNA, 25 bp, Artificial
  probe
  misc_feature (1)..(25): SEQ ID NO: 318; WAN024DLR-3_at; Start 621; Stop 645
ctacaagactccagtagcagaggat

SEQ ID NO: 162834 - DNA, 25 bp, Artificial
  probe
  misc_feature (1)..(25): SEQ ID NO: 318; WAN024DLR-3_at; Start 612; Stop 636
tgacccagcctacaagactccagta

SEQ ID NO: 162835 - DNA, 25 bp, Artificial
  probe
  misc_feature (1)..(25): SEQ ID NO: 318; WAN024DLR-3_at; Start 944; Stop 968
ttggctaccaaatcactgctccaaa

SEQ ID NO: 162836 - DNA, 25 bp, Artificial
  probe
  misc_feature (1)..(25): SEQ ID NO: 318; WAN024DLR-3_at; Start 558; Stop 582
aggaactccatttatccactccggt

SEQ ID NO: 162837 - DNA, 25 bp, Artificial
  probe
  misc_feature (1)..(25): SEQ ID NO: 318; WAN024DLR-3_at; Start 606; Stop 630
attccgtgacccagcctacaagact

SEQ ID NO: 162838 - DNA, 25 bp, Artificial
  probe
  misc_feature (1)..(25): SEQ ID NO: 318; WAN024DLR-3_at; Start 613; Stop 637
gacccagcctacaagactccagtag

SEQ ID NO: 162839 - DNA, 25 bp, Artificial
  probe
  misc_feature (1)..(25): SEQ ID NO: 318; WAN024DLR-3_at; Start 618; Stop 642
agcctacaagactccagtagcagag

SEQ ID NO: 162840 - DNA, 25 bp, Artificial
  probe
  misc_feature (1)..(25): SEQ ID NO: 318; WAN024DLR-3_at; Start 15; Stop 39
gaccaaacggctcctagttgactct

SEQ ID NO: 162841 - DNA, 25 bp, Artificial
  probe
  misc_feature (1)..(25): SEQ ID NO: 318; WAN024DLR-3_at; Start 717; Stop 741
tgattcttacgattctagcgacgca

SEQ ID NO: 162842 - DNA, 25 bp, Artificial
  probe
  misc_feature (1)..(25): SEQ ID NO: 318; WAN024DLR-3_at; Start 7; Stop 31
caccatatgaccaaacggctcctag

SEQ ID NO: 162843 - DNA, 25 bp, Artificial
  probe
  misc_feature (1)..(25): SEQ ID NO: 318; WAN024DLR-3_at; Start 622; Stop 646
tacaagactccagtagcagaggata

SEQ ID NO: 162844 - DNA, 25 bp, Artificial
  probe
  misc_feature (1)..(25): SEQ ID NO: 318; WAN024DLR-3_at; Start 13; Stop 37
atgaccaaacggctcctagttgact

SEQ ID NO: 162845 - DNA, 25 bp, Artificial
  probe
  misc_feature (1)..(25): SEQ ID NO: 318; WAN024DLR-3_at; Start 950; Stop 974
accaaatcactgctccaaacggcga

SEQ ID NO: 162846 - DNA, 25 bp, Artificial
  probe
  misc_feature (1)..(25): SEQ ID NO: 318; WAN024DLR-3_at; Start 566; Stop 590
catttatccactccggtcaggaata

SEQ ID NO: 162847 - DNA, 25 bp, Artificial
  probe
  misc_feature (1)..(25): SEQ ID NO: 3714; WAN024DLR-5_at; Start 1484; Stop 1508
tctttgaagacctagagccaaacta

SEQ ID NO: 162848 - DNA, 25 bp, Artificial
  probe
  misc_feature (1)..(25): SEQ ID NO: 3714; WAN024DLR-5_at; Start 1478; Stop 1502
tcgatatctttgaagacctagagcc

SEQ ID NO: 162849 - DNA, 25 bp, Artificial
  probe
  misc_feature (1)..(25): SEQ ID NO: 3714; WAN024DLR-5_at; Start 1486; Stop 1510
tttgaagacctagagccaaactact

SEQ ID NO: 162850 - DNA, 25 bp, Artificial
  probe
  misc_feature (1)..(25): SEQ ID NO: 3714; WAN024DLR-5_at; Start 1472; Stop 1496
ccaaagtcgatatctttgaagacct

SEQ ID NO: 162851 - DNA, 25 bp, Artificial
  probe
  misc_feature (1)..(25): SEQ ID NO: 3714; WAN024DLR-5_at; Start 1482; Stop 1506
tatctttgaagacctagagccaaac

SEQ ID NO: 162852 - DNA, 25 bp, Artificial
  probe
  misc_feature (1)..(25): SEQ ID NO: 3714; WAN024DLR-5_at; Start 1483; Stop 1507
atctttgaagacctagagccaaact

SEQ ID NO: 162853 - DNA, 25 bp, Artificial
  probe
  misc_feature (1)..(25): SEQ ID NO: 3714; WAN024DLR-5_at; Start 1485; Stop 1509
ctttgaagacctagagccaaactac

SEQ ID NO: 162854 - DNA, 25 bp, Artificial
  probe
  misc_feature (1)..(25): SEQ ID NO: 3714; WAN024DLR-5_at; Start 1488; Stop 1512
tgaagacctagagccaaactactac

SEQ ID NO: 162855 - DNA, 25 bp, Artificial
  probe
  misc_feature (1)..(25): SEQ ID NO: 3714; WAN024DLR-5_at; Start 1491; Stop 1515
agacctagagccaaactactaccac

SEQ ID NO: 162856 - DNA, 25 bp, Artificial
  probe
  misc_feature (1)..(25): SEQ ID NO: 3714; WAN024DLR-5_at; Start 1487; Stop 1511
ttgaagacctagagccaaactacta

SEQ ID NO: 162857 - DNA, 25 bp, Artificial
  probe
  misc_feature (1)..(25): SEQ ID NO: 3714; WAN024DLR-5_at; Start 1474; Stop 1498
aaagtcgatatctttgaagacctag

SEQ ID NO: 162858 - DNA, 25 bp, Artificial
  probe
  misc_feature (1)..(25): SEQ ID NO: 3714; WAN024DLR-5_at; Start 1481; Stop 1505
atatctttgaagacctagagccaaa

SEQ ID NO: 162859 - DNA, 25 bp, Artificial
  probe
  misc_feature (1)..(25): SEQ ID NO: 3714; WAN024DLR-5_at; Start 1476; Stop 1500
agtcgatatctttgaagacctagag

SEQ ID NO: 162860 - DNA, 25 bp, Artificial
  probe
  misc_feature (1)..(25): SEQ ID NO: 3714; WAN024DLR-5_at; Start 1479; Stop 1503
cgatatctttgaagacctagagcca

SEQ ID NO: 162861 - DNA, 25 bp, Artificial
  probe
  misc_feature (1)..(25): SEQ ID NO: 3714; WAN024DLR-5_at; Start 1480; Stop 1504
gatatctttgaagacctagagccaa

SEQ ID NO: 162862 - DNA, 25 bp, Artificial
  probe
  misc_feature (1)..(25): SEQ ID NO: 3714; WAN024DLR-5_at; Start 1490; Stop 1514
aagacctagagccaaactactacca

SEQ ID NO: 162863 - DNA, 25 bp, Artificial
  probe
  misc_feature (1)..(25): SEQ ID NO: 3714; WAN024DLR-5_at; Start 1489; Stop 1513
gaagacctagagccaaactactacc

SEQ ID NO: 162864 - DNA, 25 bp, Artificial
  probe
  misc_feature (1)..(25): SEQ ID NO: 3714; WAN024DLR-5_at; Start 1473; Stop 1497
caaagtcgatatctttgaagaccta

SEQ ID NO: 162865 - DNA, 25 bp, Artificial
  probe
  misc_feature (1)..(25): SEQ ID NO: 3714; WAN024DLR-5_at; Start 1475; Stop 1499
aagtcgatatctttgaagacctaga

SEQ ID NO: 162866 - DNA, 25 bp, Artificial
  probe
  misc_feature (1)..(25): SEQ ID NO: 3714; WAN024DLR-5_at; Start 1477; Stop 1501
gtcgatatctttgaagacctagagc

SEQ ID NO: 162867 - DNA, 25 bp, Artificial
  probe
  misc_feature (1)..(25): SEQ ID NO: 3231; WAN024DLS-3_at; Start 1225; Stop 1249
aacatcaaaatgaagcttctcaccc

SEQ ID NO: 162868 - DNA, 25 bp, Artificial
  probe
  misc_feature (1)..(25): SEQ ID NO: 3231; WAN024DLS-3_at; Start 1227; Stop 1251
catcaaaatgaagcttctcaccctg

SEQ ID NO: 162869 - DNA, 25 bp, Artificial
  probe
  misc_feature (1)..(25): SEQ ID NO: 3231; WAN024DLS-3_at; Start 1221; Stop 1245
cctgaacatcaaaatgaagcttctc

SEQ ID NO: 162870 - DNA, 25 bp, Artificial
  probe
  misc_feature (1)..(25): SEQ ID NO: 3231; WAN024DLS-3_at; Start 1218; Stop 1242
aagcctgaacatcaaaatgaagctt

SEQ ID NO: 162871 - DNA, 25 bp, Artificial
  probe
  misc_feature (1)..(25): SEQ ID NO: 3231; WAN024DLS-3_at; Start 1224; Stop 1248
gaacatcaaaatgaagcttctcacc

SEQ ID NO: 162872 - DNA, 25 bp, Artificial
  probe
  misc_feature (1)..(25): SEQ ID NO: 3231; WAN024DLS-3_at; Start 1222; Stop 1246
ctgaacatcaaaatgaagcttctca

SEQ ID NO: 162873 - DNA, 25 bp, Artificial
  probe
  misc_feature (1)..(25): SEQ ID NO: 3231; WAN024DLS-3_at; Start 1226; Stop 1250
acatcaaaatgaagcttctcaccct

SEQ ID NO: 162874 - DNA, 25 bp, Artificial
  probe
  misc_feature (1)..(25): SEQ ID NO: 3231; WAN024DLS-3_at; Start 1223; Stop 1247
tgaacatcaaaatgaagcttctcac

SEQ ID NO: 162875 - DNA, 25 bp, Artificial
  probe
  misc_feature (1)..(25): SEQ ID NO: 3231; WAN024DLS-3_at; Start 1220; Stop 1244
gcctgaacatcaaaatgaagcttct

SEQ ID NO: 162876 - DNA, 25 bp, Artificial
  probe
  misc_feature (1)..(25): SEQ ID NO: 3231; WAN024DLS-3_at; Start 1219; Stop 1243
agcctgaacatcaaaatgaagcttc

SEQ ID NO: 162877 - DNA, 25 bp, Artificial
  probe
  misc_feature (1)..(25): SEQ ID NO: 3715; WAN024DLS-5_at; Start 1558; Stop 1582
ggacgcttggggacaacccaccata

SEQ ID NO: 162878 - DNA, 25 bp, Artificial
  probe
  misc_feature (1)..(25): SEQ ID NO: 3715; WAN024DLS-5_at; Start 1557; Stop 1581
tggacgcttggggacaacccaccat

SEQ ID NO: 162879 - DNA, 25 bp, Artificial
  probe
  misc_feature (1)..(25): SEQ ID NO: 3715; WAN024DLS-5_at; Start 1559; Stop 1583
gacgcttggggacaacccaccatat

SEQ ID NO: 162880 - DNA, 25 bp, Artificial
  probe
  misc_feature (1)..(25): SEQ ID NO: 3715; WAN024DLS-5_at; Start 1560; Stop 1584
acgcttggggacaacccaccatatg

SEQ ID NO: 162881 - DNA, 25 bp, Artificial
  probe
  misc_feature (1)..(25): SEQ ID NO: 3715; WAN024DLS-5_at; Start 1556; Stop 1580
gtggacgcttggggacaacccacca

SEQ ID NO: 162882 - DNA, 25 bp, Artificial
  probe
  misc_feature (1)..(25): SEQ ID NO: 3715; WAN024DLS-5_at; Start 1554; Stop 1578
tggtggacgcttggggacaacccac

SEQ ID NO: 162883 - DNA, 25 bp, Artificial
  probe
  misc_feature (1)..(25): SEQ ID NO: 2700; WAN024DLT_at; Start 192; Stop 216
ccttgggaaatatccgattgaagaa

SEQ ID NO: 162884 - DNA, 25 bp, Artificial
  probe
  misc_feature (1)..(25): SEQ ID NO: 2700; WAN024DLT_at; Start 336; Stop 360
tagtgaattaaaaaatgaggacaca

SEQ ID NO: 162885 - DNA, 25 bp, Artificial
  probe
  misc_feature (1)..(25): SEQ ID NO: 2700; WAN024DLT_at; Start 478; Stop 502
gcgcttgaatttatgcgttataaag

SEQ ID NO: 162886 - DNA, 25 bp, Artificial
  probe
  misc_feature (1)..(25): SEQ ID NO: 2700; WAN024DLT_at; Start 268; Stop 292
cacttatcgtactatgaatgtctct

SEQ ID NO: 162887 - DNA, 25 bp, Artificial
  probe
  misc_feature (1)..(25): SEQ ID NO: 2700; WAN024DLT_at; Start 320; Stop 344
tataccgtcatatctatagtgaatt

SEQ ID NO: 162888 - DNA, 25 bp, Artificial
  probe
  misc_feature (1)..(25): SEQ ID NO: 2700; WAN024DLT_at; Start 615; Stop 639
tgatagaatatcatcaatattgtgc

SEQ ID NO: 162889 - DNA, 25 bp, Artificial
  probe
  misc_feature (1)..(25): SEQ ID NO: 2700; WAN024DLT_at; Start 382; Stop 406
gagctgttaatgcatttagacgaca

SEQ ID NO: 162890 - DNA, 25 bp, Artificial
  probe
  misc_feature (1)..(25): SEQ ID NO: 2700; WAN024DLT_at; Start 629; Stop 653
caatattgtgctataaatctcagat

SEQ ID NO: 162891 - DNA, 25 bp, Artificial
  probe
  misc_feature (1)..(25): SEQ ID NO: 2700; WAN024DLT_at; Start 539; Stop 563
gtagtatggttagttatatgggaaa

SEQ ID NO: 162892 - DNA, 25 bp, Artificial
  probe
  misc_feature (1)..(25): SEQ ID NO: 2700; WAN024DLT_at; Start 459; Stop 483
tgtgaatagtattggaagggcgctt

SEQ ID NO: 162893 - DNA, 25 bp, Artificial
  probe
  misc_feature (1)..(25): SEQ ID NO: 2700; WAN024DLT_at; Start 80; Stop 104
tttcaaaattaacttcagaaggaga

SEQ ID NO: 162894 - DNA, 25 bp, Artificial
  probe
  misc_feature (1)..(25): SEQ ID NO: 2700; WAN024DLT_at; Start 20; Stop 44
ctaagtatatctttttatctccaca

SEQ ID NO: 162895 - DNA, 25 bp, Artificial
  probe
  misc_feature (1)..(25): SEQ ID NO: 2700; WAN024DLT_at; Start 216; Stop 240
aaggaagaaagaagacaggttagct

SEQ ID NO: 162896 - DNA, 25 bp, Artificial
  probe
  misc_feature (1)..(25): SEQ ID NO: 2700; WAN024DLT_at; Start 89; Stop 113
taacttcagaaggagaaattgtact

SEQ ID NO: 162897 - DNA, 25 bp, Artificial
  probe
  misc_feature (1)..(25): SEQ ID NO: 2700; WAN024DLT_at; Start 230; Stop 254
acaggttagcttgtgaacgtctaca

SEQ ID NO: 162898 - DNA, 25 bp, Artificial
  probe
  misc_feature (1)..(25): SEQ ID NO: 2700; WAN024DLT_at; Start 177; Stop 201
tcataagttgtgtaaccttgggaaa

SEQ ID NO: 162899 - DNA, 25 bp, Artificial
  probe
  misc_feature (1)..(25): SEQ ID NO: 2700; WAN024DLT_at; Start 391; Stop 415
atgcatttagacgacaaatgtgtcg

SEQ ID NO: 162900 - DNA, 25 bp, Artificial
  probe
  misc_feature (1)..(25): SEQ ID NO: 2700; WAN024DLT_at; Start 132; Stop 156
tggttaccctttgagccaacagcta

SEQ ID NO: 162901 - DNA, 25 bp, Artificial
  probe
  misc_feature (1)..(25): SEQ ID NO: 2700; WAN024DLT_at; Start 256; Stop 280
tgtgattttagacacttatcgtact

SEQ ID NO: 162902 - DNA, 25 bp, Artificial
  probe
  misc_feature (1)..(25): SEQ ID NO: 2700; WAN024DLT_at; Start 163; Stop 187
tctgctaagcaatttcataagttgt

SEQ ID NO: 162903 - DNA, 25 bp, Artificial
  probe
  misc_feature (1)..(25): SEQ ID NO: 2700; WAN024DLT_at; Start 366; Stop 390
gaatgatatcataaaagagctgtta

SEQ ID NO: 162904 - DNA, 25 bp, Artificial
  probe
  misc_feature (1)..(25): SEQ ID NO: 2700; WAN024DLT_at; Start 418; Stop 442
tattgtccgctttcacttggtgacc

SEQ ID NO: 162905 - DNA, 25 bp, Artificial
  probe
  misc_feature (1)..(25): SEQ ID NO: 2700; WAN024DLT_at; Start 405; Stop 429
caaatgtgtcgtatattgtccgctt

SEQ ID NO: 162906 - DNA, 25 bp, Artificial
  probe
  misc_feature (1)..(25): SEQ ID NO: 2700; WAN024DLT_at; Start 49; Stop 73
gatgacgcaattttttcctgtggtg

SEQ ID NO: 162907 - DNA, 25 bp, Artificial
  probe
  misc_feature (1)..(25): SEQ ID NO: 2700; WAN024DLT_at; Start 65; Stop 89
cctgtggtgattatatttcaaaatt

SEQ ID NO: 162908 - DNA, 25 bp, Artificial
  probe
  misc_feature (1)..(25): SEQ ID NO: 2700; WAN024DLT_at; Start 305; Stop 329
gaaatggcaattttctataccgtca

SEQ ID NO: 162909 - DNA, 25 bp, Artificial
  probe
  misc_feature (1)..(25): SEQ ID NO: 2700; WAN024DLT_at; Start 205; Stop 229
ccgattgaagaaaggaagaaagaag

SEQ ID NO: 162910 - DNA, 25 bp, Artificial
  probe
  misc_feature (1)..(25): SEQ ID NO: 2700; WAN024DLT_at; Start 351; Stop 375
tgaggacacattaaagaatgatatc

SEQ ID NO: 162911 - DNA, 25 bp, Artificial
  probe
  misc_feature (1)..(25): SEQ ID NO: 2700; WAN024DLT_at; Start 125; Stop 149
tattttctggttaccctttgagcca

SEQ ID NO: 162912 - DNA, 25 bp, Artificial
  probe
  misc_feature (1)..(25): SEQ ID NO: 2700; WAN024DLT_at; Start 521; Stop 545
tcccatatgtaagtgatagtagtat

SEQ ID NO: 162913 - DNA, 25 bp, Artificial
  probe
  misc_feature (1)..(25): SEQ ID NO: 2700; WAN024DLT_at; Start 288; Stop 312
tctctataggaaagatagaaatggc

SEQ ID NO: 162914 - DNA, 25 bp, Artificial
  probe
  misc_feature (1)..(25): SEQ ID NO: 2700; WAN024DLT_at; Start 35; Stop 59
tatctccacatttagatgacgcaat

SEQ ID NO: 162915 - DNA, 25 bp, Artificial
  probe
  misc_feature (1)..(25): SEQ ID NO: 2700; WAN024DLT_at; Start 653; Stop 677
ttttgataatctggaaatcagttga

SEQ ID NO: 162916 - DNA, 25 bp, Artificial
  probe
  misc_feature (1)..(25): SEQ ID NO: 2700; WAN024DLT_at; Start 470; Stop 494
ttggaagggcgcttgaatttatgcg

SEQ ID NO: 162917 - DNA, 25 bp, Artificial
  probe
  misc_feature (1)..(25): SEQ ID NO: 2331; WAN024DLU_at; Start 780; Stop 804
cataaagcggttactattaatagga

SEQ ID NO: 162918 - DNA, 25 bp, Artificial
  probe
  misc_feature (1)..(25): SEQ ID NO: 2331; WAN024DLU_at; Start 670; Stop 694
caaaaaacaattaatgcagatgaag

SEQ ID NO: 162919 - DNA, 25 bp, Artificial
  probe
  misc_feature (1)..(25): SEQ ID NO: 2331; WAN024DLU_at; Start 400; Stop 424
tatccaaatggtacacgagaagagg

SEQ ID NO: 162920 - DNA, 25 bp, Artificial
  probe
  misc_feature (1)..(25): SEQ ID NO: 2331; WAN024DLU_at; Start 494; Stop 518
ggttgtgtaaaaaagaggtgctaga

SEQ ID NO: 162921 - DNA, 25 bp, Artificial
  probe
  misc_feature (1)..(25): SEQ ID NO: 2331; WAN024DLU_at; Start 465; Stop 489
ggttcacaatatagcaggtacgtca

SEQ ID NO: 162922 - DNA, 25 bp, Artificial
  probe
  misc_feature (1)..(25): SEQ ID NO: 2331; WAN024DLU_at; Start 656; Stop 680
tcactggagtgacacaaaaaacaat

SEQ ID NO: 162923 - DNA, 25 bp, Artificial
  probe
  misc_feature (1)..(25): SEQ ID NO: 2331; WAN024DLU_at; Start 816; Stop 840
ggctttaaaagtaatcaagaaggca

SEQ ID NO: 162924 - DNA, 25 bp, Artificial
  probe
  misc_feature (1)..(25): SEQ ID NO: 2331; WAN024DLU_at; Start 794; Stop 818
tattaataggagacaaatgcaaggc

SEQ ID NO: 162925 - DNA, 25 bp, Artificial
  probe
  misc_feature (1)..(25): SEQ ID NO: 2331; WAN024DLU_at; Start 333; Stop 357
gatggcttgttttaaaaagagtaga

SEQ ID NO: 162926 - DNA, 25 bp, Artificial
  probe
  misc_feature (1)..(25): SEQ ID NO: 2331; WAN024DLU_at; Start 249; Stop 273
cataggtatcaaaaattctagaggt

SEQ ID NO: 162927 - DNA, 25 bp, Artificial
  probe
  misc_feature (1)..(25): SEQ ID NO: 2331; WAN024DLU_at; Start 212; Stop 236
taagtaatgaagatttaggtgcaac

SEQ ID NO: 162928 - DNA, 25 bp, Artificial
  probe
  misc_feature (1)..(25): SEQ ID NO: 2331; WAN024DLU_at; Start 441; Stop 465
tggaaatcccttgtttgttcaaatg

SEQ ID NO: 162929 - DNA, 25 bp, Artificial
  probe
  misc_feature (1)..(25): SEQ ID NO: 2331; WAN024DLU_at; Start 47; Stop 71
cacataataggtatgaatctctgat

SEQ ID NO: 162930 - DNA, 25 bp, Artificial
  probe
  misc_feature (1)..(25): SEQ ID NO: 2331; WAN024DLU_at; Start 61; Stop 85
gaatctctgattagagctgtgaaaa

SEQ ID NO: 162931 - DNA, 25 bp, Artificial
  probe
  misc_feature (1)..(25): SEQ ID NO: 2331; WAN024DLU_at; Start 550; Stop 574
catcaggacggtgttgttttattaa

SEQ ID NO: 162932 - DNA, 25 bp, Artificial
  probe
  misc_feature (1)..(25): SEQ ID NO: 2331; WAN024DLU_at; Start 800; Stop 824
taggagacaaatgcaaggctttaaa

SEQ ID NO: 162933 - DNA, 25 bp, Artificial
  probe
  misc_feature (1)..(25): SEQ ID NO: 2331; WAN024DLU_at; Start 458; Stop 482
ttcaaatggttcacaatatagcagg

SEQ ID NO: 162934 - DNA, 25 bp, Artificial
  probe
  misc_feature (1)..(25): SEQ ID NO: 2331; WAN024DLU_at; Start 180; Stop 204
tggctataccaatcatagaattaag

SEQ ID NO: 162935 - DNA, 25 bp, Artificial
  probe
  misc_feature (1)..(25): SEQ ID NO: 2331; WAN024DLU_at; Start 424; Stop 448
gagaagaccgattttgttggaaatc

SEQ ID NO: 162936 - DNA, 25 bp, Artificial
  probe
  misc_feature (1)..(25): SEQ ID NO: 2331; WAN024DLU_at; Start 76; Stop 100
gctgtgaaaagttgtttacatcaaa

SEQ ID NO: 162937 - DNA, 25 bp, Artificial
  probe
  misc_feature (1)..(25): SEQ ID NO: 2331; WAN024DLU_at; Start 738; Stop 762
caacgagagaatattggttacaaag

SEQ ID NO: 162938 - DNA, 25 bp, Artificial
  probe
  misc_feature (1)..(25): SEQ ID NO: 2331; WAN024DLU_at; Start 633; Stop 657
cgctcacagtaaagaaaacggtatc

SEQ ID NO: 162939 - DNA, 25 bp, Artificial
  probe
  misc_feature (1)..(25): SEQ ID NO: 2331; WAN024DLU_at; Start 642; Stop 666
taaagaaaacggtatcactggagtg

SEQ ID NO: 162940 - DNA, 25 bp, Artificial
  probe
  misc_feature (1)..(25): SEQ ID NO: 2331; WAN024DLU_at; Start 229; Stop 253
ggtgcaactaatgccagaaacatag

SEQ ID NO: 162941 - DNA, 25 bp, Artificial
  probe
  misc_feature (1)..(25): SEQ ID NO: 2331; WAN024DLU_at; Start 586; Stop 610
caaggataccaaattgatatagtgc

SEQ ID NO: 162942 - DNA, 25 bp, Artificial
  probe
  misc_feature (1)..(25): SEQ ID NO: 2331; WAN024DLU_at; Start 723; Stop 747
taatttattgagtttcaacgagaga

SEQ ID NO: 162943 - DNA, 25 bp, Artificial
  probe
  misc_feature (1)..(25): SEQ ID NO: 2331; WAN024DLU_at; Start 165; Stop 189
aattatccatcaatttggctatacc

SEQ ID NO: 162944 - DNA, 25 bp, Artificial
  probe
  misc_feature (1)..(25): SEQ ID NO: 2331; WAN024DLU_at; Start 830; Stop 854
tcaagaaggcaagagaagaaaaaat

SEQ ID NO: 162945 - DNA, 25 bp, Artificial
  probe
  misc_feature (1)..(25): SEQ ID NO: 2331; WAN024DLU_at; Start 537; Stop 561
gaaaatagattcacatcaggacggt

SEQ ID NO: 162946 - DNA, 25 bp, Artificial
  probe
  misc_feature (1)..(25): SEQ ID NO: 2331; WAN024DLU_at; Start 411; Stop 435
tacacgagaagaggagaagaccgat

SEQ ID NO: 162947 - DNA, 25 bp, Artificial
  probe
  misc_feature (1)..(25): SEQ ID NO: 2331; WAN024DLU_at; Start 617; Stop 641
tcttggtgaattactacgctcacag

SEQ ID NO: 162948 - DNA, 25 bp, Artificial
  probe
  misc_feature (1)..(25): SEQ ID NO: 2331; WAN024DLU_at; Start 4; Stop 28
gataggaatatagatcaagaattag

SEQ ID NO: 162949 - DNA, 25 bp, Artificial
  probe
  misc_feature (1)..(25): SEQ ID NO: 2331; WAN024DLU_at; Start 479; Stop 503
caggtacgtcattttggttgtgtaa

SEQ ID NO: 162950 - DNA, 25 bp, Artificial
  probe
  misc_feature (1)..(25): SEQ ID NO: 2331; WAN024DLU_at; Start 601; Stop 625
gatatagtgcgagaattcttggtga

SEQ ID NO: 162951 - DNA, 25 bp, Artificial
  probe
  misc_feature (1)..(25): SEQ ID NO: 2695; WAN024DLV_at; Start 124; Stop 148
ggtatagatccgcatataattggac

SEQ ID NO: 162952 - DNA, 25 bp, Artificial
  probe
  misc_feature (1)..(25): SEQ ID NO: 2695; WAN024DLV_at; Start 340; Stop 364
tgtcatggctactcaactaattatt

SEQ ID NO: 162953 - DNA, 25 bp, Artificial
  probe
  misc_feature (1)..(25): SEQ ID NO: 2695; WAN024DLV_at; Start 259; Stop 283
tgtactcaatgttcaaataattttg

SEQ ID NO: 162954 - DNA, 25 bp, Artificial
  probe
  misc_feature (1)..(25): SEQ ID NO: 2695; WAN024DLV_at; Start 397; Stop 421
ggatttggaaaggttaagacagtga

SEQ ID NO: 162955 - DNA, 25 bp, Artificial
  probe
  misc_feature (1)..(25): SEQ ID NO: 2695; WAN024DLV_at; Start 44; Stop 68
tccctgatggatatggagacattaa

SEQ ID NO: 162956 - DNA, 25 bp, Artificial
  probe
  misc_feature (1)..(25): SEQ ID NO: 2695; WAN024DLV_at; Start 323; Stop 347
aaatccaacttatacactgtcatgg

SEQ ID NO: 162957 - DNA, 25 bp, Artificial
  probe
  misc_feature (1)..(25): SEQ ID NO: 2695; WAN024DLV_at; Start 381; Stop 405
aaaacttgacaagaatggatttgga

SEQ ID NO: 162958 - DNA, 25 bp, Artificial
  probe
  misc_feature (1)..(25): SEQ ID NO: 2695; WAN024DLV_at; Start 165; Stop 189
cagaaggatgtctctatatcctatt

SEQ ID NO: 162959 - DNA, 25 bp, Artificial
  probe
  misc_feature (1)..(25): SEQ ID NO: 2695; WAN024DLV_at; Start 416; Stop 440
cagtgataacatgccatggatgggt

SEQ ID NO: 162960 - DNA, 25 bp, Artificial
  probe
  misc_feature (1)..(25): SEQ ID NO: 2695; WAN024DLV_at; Start 63; Stop 87
cattaaggatatagtgttttcggct

SEQ ID NO: 162961 - DNA, 25 bp, Artificial
  probe
  misc_feature (1)..(25): SEQ ID NO: 2695; WAN024DLV_at; Start 8; Stop 32
caatgcaatatagttgtggaaaaat

SEQ ID NO: 162962 - DNA, 25 bp, Artificial
  probe
  misc_feature (1)..(25): SEQ ID NO: 2695; WAN024DLV_at; Start 333; Stop 357
tatacactgtcatggctactcaact

SEQ ID NO: 162963 - DNA, 25 bp, Artificial
  probe
  misc_feature (1)..(25): SEQ ID NO: 2695; WAN024DLV_at; Start 49; Stop 73
gatggatatggagacattaaggata

SEQ ID NO: 162964 - DNA, 25 bp, Artificial
  probe
  misc_feature (1)..(25): SEQ ID NO: 2695; WAN024DLV_at; Start 144; Stop 168
tggactttgtaaaaagcagatcaga

SEQ ID NO: 162965 - DNA, 25 bp, Artificial
  probe
  misc_feature (1)..(25): SEQ ID NO: 2695; WAN024DLV_at; Start 241; Stop 265
gatattgcctatgttgattgtactc

SEQ ID NO: 162966 - DNA, 25 bp, Artificial
  probe
  misc_feature (1)..(25): SEQ ID NO: 2695; WAN024DLV_at; Start 465; Stop 489
cttgacttattttgatttttggaca

SEQ ID NO: 162967 - DNA, 25 bp, Artificial
  probe
  misc_feature (1)..(25): SEQ ID NO: 2695; WAN024DLV_at; Start 248; Stop 272
cctatgttgattgtactcaatgttc

SEQ ID NO: 162968 - DNA, 25 bp, Artificial
  probe
  misc_feature (1)..(25): SEQ ID NO: 2695; WAN024DLV_at; Start 274; Stop 298
aataattttgaaactgccttacacg

SEQ ID NO: 162969 - DNA, 25 bp, Artificial
  probe
  misc_feature (1)..(25): SEQ ID NO: 2695; WAN024DLV_at; Start 478; Stop 502
gatttttggacatattctatgggag

SEQ ID NO: 162970 - DNA, 25 bp, Artificial
  probe
  misc_feature (1)..(25): SEQ ID NO: 2695; WAN024DLV_at; Start 160; Stop 184
cagatcagaaggatgtctctatatc

SEQ ID NO: 162971 - DNA, 25 bp, Artificial
  probe
  misc_feature (1)..(25): SEQ ID NO: 2695; WAN024DLV_at; Start 486; Stop 510
gacatattctatgggagatgctttt

SEQ ID NO: 162972 - DNA, 25 bp, Artificial
  probe
  misc_feature (1)..(25): SEQ ID NO: 2695; WAN024DLV_at; Start 199; Stop 223
gtatctagagattcaaaggttattg

SEQ ID NO: 162973 - DNA, 25 bp, Artificial
  probe
  misc_feature (1)..(25): SEQ ID NO: 2695; WAN024DLV_at; Start 502; Stop 526
gatgcttttatttgtgtatctgaaa

SEQ ID NO: 162974 - DNA, 25 bp, Artificial
  probe
  misc_feature (1)..(25): SEQ ID NO: 2695; WAN024DLV_at; Start 133; Stop 157
ccgcatataattggactttgtaaaa

SEQ ID NO: 162975 - DNA, 25 bp, Artificial
  probe
  misc_feature (1)..(25): SEQ ID NO: 2695; WAN024DLV_at; Start 29; Stop 53
aaataaatattaatatccctgatgg

SEQ ID NO: 162976 - DNA, 25 bp, Artificial
  probe
  misc_feature (1)..(25): SEQ ID NO: 2695; WAN024DLV_at; Start 410; Stop 434
ttaagacagtgataacatgccatgg

SEQ ID NO: 162977 - DNA, 25 bp, Artificial
  probe
  misc_feature (1)..(25): SEQ ID NO: 2695; WAN024DLV_at; Start 513; Stop 537
ttgtgtatctgaaactatgaaaaaa

SEQ ID NO: 162978 - DNA, 25 bp, Artificial
  probe
  misc_feature (1)..(25): SEQ ID NO: 2695; WAN024DLV_at; Start 99; Stop 123
taggtataataatggacattgtgga

SEQ ID NO: 162979 - DNA, 25 bp, Artificial
  probe
  misc_feature (1)..(25): SEQ ID NO: 2695; WAN024DLV_at; Start 2; Stop 26
tggttacaatgcaatatagttgtgg

SEQ ID NO: 162980 - DNA, 25 bp, Artificial
  probe
  misc_feature (1)..(25): SEQ ID NO: 2695; WAN024DLV_at; Start 154; Stop 178
aaaaagcagatcagaaggatgtctc

SEQ ID NO: 162981 - DNA, 25 bp, Artificial
  probe
  misc_feature (1)..(25): SEQ ID NO: 2695; WAN024DLV_at; Start 83; Stop 107
cggctcatattatagttaggtataa

SEQ ID NO: 162982 - DNA, 25 bp, Artificial
  probe
  misc_feature (1)..(25): SEQ ID NO: 2695; WAN024DLV_at; Start 113; Stop 137
gacattgtggaggtatagatccgca

SEQ ID NO: 162983 - DNA, 25 bp, Artificial
  probe
  misc_feature (1)..(25): SEQ ID NO: 2695; WAN024DLV_at; Start 429; Stop 453
ccatggatgggttgaatataactta

SEQ ID NO: 162984 - DNA, 25 bp, Artificial
  probe
  misc_feature (1)..(25): SEQ ID NO: 2695; WAN024DLV_at; Start 74; Stop 98
tagtgttttcggctcatattatagt

SEQ ID NO: 162985 - DNA, 25 bp, Artificial
  probe
  misc_feature (1)..(25): SEQ ID NO: 5698; WAN024DLW_at; Start 13; Stop 37
tcaaaatttgtcattgaactttcct

SEQ ID NO: 162986 - DNA, 25 bp, Artificial
  probe
  misc_feature (1)..(25): SEQ ID NO: 5698; WAN024DLW_at; Start 43; Stop 67
tttcttgttcacttttatattcgga

SEQ ID NO: 162987 - DNA, 25 bp, Artificial
  probe
  misc_feature (1)..(25): SEQ ID NO: 5698; WAN024DLW_at; Start 12; Stop 36
gtcaaaatttgtcattgaactttcc

SEQ ID NO: 162988 - DNA, 25 bp, Artificial
  probe
  misc_feature (1)..(25): SEQ ID NO: 5698; WAN024DLW_at; Start 45; Stop 69
tcttgttcacttttatattcggaaa

SEQ ID NO: 162989 - DNA, 25 bp, Artificial
  probe
  misc_feature (1)..(25): SEQ ID NO: 5698; WAN024DLW_at; Start 7; Stop 31
agaatgtcaaaatttgtcattgaac

SEQ ID NO: 162990 - DNA, 25 bp, Artificial
  probe
  misc_feature (1)..(25): SEQ ID NO: 5698; WAN024DLW_at; Start 2; Stop 26
tgtcaagaatgtcaaaatttgtcat

SEQ ID NO: 162991 - DNA, 25 bp, Artificial
  probe
  misc_feature (1)..(25): SEQ ID NO: 5698; WAN024DLW_at; Start 4; Stop 28
tcaagaatgtcaaaatttgtcattg

SEQ ID NO: 162992 - DNA, 25 bp, Artificial
  probe
  misc_feature (1)..(25): SEQ ID NO: 5698; WAN024DLW_at; Start 14; Stop 38
caaaatttgtcattgaactttcctc

SEQ ID NO: 162993 - DNA, 25 bp, Artificial
  probe
  misc_feature (1)..(25): SEQ ID NO: 5698; WAN024DLW_at; Start 5; Stop 29
caagaatgtcaaaatttgtcattga

SEQ ID NO: 162994 - DNA, 25 bp, Artificial
  probe
  misc_feature (1)..(25): SEQ ID NO: 5698; WAN024DLW_at; Start 11; Stop 35
tgtcaaaatttgtcattgaactttc

SEQ ID NO: 162995 - DNA, 25 bp, Artificial
  probe
  misc_feature (1)..(25): SEQ ID NO: 5698; WAN024DLW_at; Start 6; Stop 30
aagaatgtcaaaatttgtcattgaa

SEQ ID NO: 162996 - DNA, 25 bp, Artificial
  probe
  misc_feature (1)..(25): SEQ ID NO: 5698; WAN024DLW_at; Start 3; Stop 27
gtcaagaatgtcaaaatttgtcatt

SEQ ID NO: 162997 - DNA, 25 bp, Artificial
  probe
  misc_feature (1)..(25): SEQ ID NO: 5698; WAN024DLW_at; Start 16; Stop 40
aaatttgtcattgaactttcctcct

SEQ ID NO: 162998 - DNA, 25 bp, Artificial
  probe
  misc_feature (1)..(25): SEQ ID NO: 5698; WAN024DLW_at; Start 10; Stop 34
atgtcaaaatttgtcattgaacttt

SEQ ID NO: 162999 - DNA, 25 bp, Artificial
  probe
  misc_feature (1)..(25): SEQ ID NO: 5698; WAN024DLW_at; Start 8; Stop 32
gaatgtcaaaatttgtcattgaact

SEQ ID NO: 163000 - DNA, 25 bp, Artificial
  probe
  misc_feature (1)..(25): SEQ ID NO: 5698; WAN024DLW_at; Start 44; Stop 68
ttcttgttcacttttatattcggaa

SEQ ID NO: 163001 - DNA, 25 bp, Artificial
  probe
  misc_feature (1)..(25): SEQ ID NO: 5698; WAN024DLW_at; Start 48; Stop 72
tgttcacttttatattcggaaaaga

SEQ ID NO: 163002 - DNA, 25 bp, Artificial
  probe
  misc_feature (1)..(25): SEQ ID NO: 5698; WAN024DLW_at; Start 1; Stop 25
ttgtcaagaatgtcaaaatttgtca

SEQ ID NO: 163003 - DNA, 25 bp, Artificial
  probe
  misc_feature (1)..(25): SEQ ID NO: 5698; WAN024DLW_at; Start 9; Stop 33
aatgtcaaaatttgtcattgaactt

SEQ ID NO: 163004 - DNA, 25 bp, Artificial
  probe
  misc_feature (1)..(25): SEQ ID NO: 5698; WAN024DLW_at; Start 17; Stop 41
aatttgtcattgaactttcctcctt

SEQ ID NO: 163005 - DNA, 25 bp, Artificial
  probe
  misc_feature (1)..(25): SEQ ID NO: 5698; WAN024DLW_at; Start 18; Stop 42
atttgtcattgaactttcctccttt

SEQ ID NO: 163006 - DNA, 25 bp, Artificial
  probe
  misc_feature (1)..(25): SEQ ID NO: 1341; WAN024DLX_at; Start 28; Stop 52
caatttttatccttatctgaaaatg

SEQ ID NO: 163007 - DNA, 25 bp, Artificial
  probe
  misc_feature (1)..(25): SEQ ID NO: 1341; WAN024DLX_at; Start 156; Stop 180
ggcagctggttattttttaggagga

SEQ ID NO: 163008 - DNA, 25 bp, Artificial
  probe
  misc_feature (1)..(25): SEQ ID NO: 1341; WAN024DLX_at; Start 140; Stop 164
ttataggttctggtttggcagctgg

SEQ ID NO: 163009 - DNA, 25 bp, Artificial
  probe
  misc_feature (1)..(25): SEQ ID NO: 1341; WAN024DLX_at; Start 143; Stop 167
taggttctggtttggcagctggtta

SEQ ID NO: 163010 - DNA, 25 bp, Artificial
  probe
  misc_feature (1)..(25): SEQ ID NO: 1341; WAN024DLX_at; Start 159; Stop 183
agctggttattttttaggaggagat

SEQ ID NO: 163011 - DNA, 25 bp, Artificial
  probe
  misc_feature (1)..(25): SEQ ID NO: 1341; WAN024DLX_at; Start 9; Stop 33
ttttgacattcttgacaatcaattt

SEQ ID NO: 163012 - DNA, 25 bp, Artificial
  probe
  misc_feature (1)..(25): SEQ ID NO: 1341; WAN024DLX_at; Start 141; Stop 165
tataggttctggtttggcagctggt

SEQ ID NO: 163013 - DNA, 25 bp, Artificial
  probe
  misc_feature (1)..(25): SEQ ID NO: 1341; WAN024DLX_at; Start 158; Stop 182
cagctggttattttttaggaggaga

SEQ ID NO: 163014 - DNA, 25 bp, Artificial
  probe
  misc_feature (1)..(25): SEQ ID NO: 1341; WAN024DLX_at; Start 129; Stop 153
tggaacagcacttataggttctggt

SEQ ID NO: 163015 - DNA, 25 bp, Artificial
  probe
  misc_feature (1)..(25): SEQ ID NO: 1341; WAN024DLX_at; Start 94; Stop 118
tttggagtagcagtatcttggaagg

SEQ ID NO: 163016 - DNA, 25 bp, Artificial
  probe
  misc_feature (1)..(25): SEQ ID NO: 1341; WAN024DLX_at; Start 122; Stop 146
ttgcaggtggaacagcacttatagg

SEQ ID NO: 163017 - DNA, 25 bp, Artificial
  probe
  misc_feature (1)..(25): SEQ ID NO: 1341; WAN024DLX_at; Start 135; Stop 159
agcacttataggttctggtttggca

SEQ ID NO: 163018 - DNA, 25 bp, Artificial
  probe
  misc_feature (1)..(25): SEQ ID NO: 1341; WAN024DLX_at; Start 134; Stop 158
cagcacttataggttctggtttggc

SEQ ID NO: 163019 - DNA, 25 bp, Artificial
  probe
  misc_feature (1)..(25): SEQ ID NO: 1341; WAN024DLX_at; Start 22; Stop 46
gacaatcaatttttatccttatctg

SEQ ID NO: 163020 - DNA, 25 bp, Artificial
  probe
  misc_feature (1)..(25): SEQ ID NO: 1341; WAN024DLX_at; Start 125; Stop 149
caggtggaacagcacttataggttc

SEQ ID NO: 163021 - DNA, 25 bp, Artificial
  probe
  misc_feature (1)..(25): SEQ ID NO: 1341; WAN024DLX_at; Start 58; Stop 82
tcagatattgatggcggtctcgctc

SEQ ID NO: 163022 - DNA, 25 bp, Artificial
  probe
  misc_feature (1)..(25): SEQ ID NO: 1341; WAN024DLX_at; Start 90; Stop 114
tatctttggagtagcagtatcttgg

SEQ ID NO: 163023 - DNA, 25 bp, Artificial
  probe
  misc_feature (1)..(25): SEQ ID NO: 1341; WAN024DLX_at; Start 138; Stop 162
acttataggttctggtttggcagct

SEQ ID NO: 163024 - DNA, 25 bp, Artificial
  probe
  misc_feature (1)..(25): SEQ ID NO: 1341; WAN024DLX_at; Start 146; Stop 170
gttctggtttggcagctggttattt

SEQ ID NO: 163025 - DNA, 25 bp, Artificial
  probe
  misc_feature (1)..(25): SEQ ID NO: 1341; WAN024DLX_at; Start 121; Stop 145
attgcaggtggaacagcacttatag

SEQ ID NO: 163026 - DNA, 25 bp, Artificial
  probe
  misc_feature (1)..(25): SEQ ID NO: 1341; WAN024DLX_at; Start 149; Stop 173
ctggtttggcagctggttatttttt

SEQ ID NO: 163027 - DNA, 25 bp, Artificial
  probe
  misc_feature (1)..(25): SEQ ID NO: 1341; WAN024DLX_at; Start 144; Stop 168
aggttctggtttggcagctggttat

SEQ ID NO: 163028 - DNA, 25 bp, Artificial
  probe
  misc_feature (1)..(25): SEQ ID NO: 1341; WAN024DLX_at; Start 123; Stop 147
tgcaggtggaacagcacttataggt

SEQ ID NO: 163029 - DNA, 25 bp, Artificial
  probe
  misc_feature (1)..(25): SEQ ID NO: 1341; WAN024DLX_at; Start 120; Stop 144
tattgcaggtggaacagcacttata

SEQ ID NO: 163030 - DNA, 25 bp, Artificial
  probe
  misc_feature (1)..(25): SEQ ID NO: 1341; WAN024DLX_at; Start 62; Stop 86
atattgatggcggtctcgctccctt

SEQ ID NO: 163031 - DNA, 25 bp, Artificial
  probe
  misc_feature (1)..(25): SEQ ID NO: 1341; WAN024DLX_at; Start 131; Stop 155
gaacagcacttataggttctggttt

SEQ ID NO: 163032 - DNA, 25 bp, Artificial
  probe
  misc_feature (1)..(25): SEQ ID NO: 1341; WAN024DLX_at; Start 92; Stop 116
tctttggagtagcagtatcttggaa

SEQ ID NO: 163033 - DNA, 25 bp, Artificial
  probe
  misc_feature (1)..(25): SEQ ID NO: 1341; WAN024DLX_at; Start 153; Stop 177
tttggcagctggttattttttagga

SEQ ID NO: 163034 - DNA, 25 bp, Artificial
  probe
  misc_feature (1)..(25): SEQ ID NO: 1341; WAN024DLX_at; Start 128; Stop 152
gtggaacagcacttataggttctgg

SEQ ID NO: 163035 - DNA, 25 bp, Artificial
  probe
  misc_feature (1)..(25): SEQ ID NO: 1341; WAN024DLX_at; Start 15; Stop 39
cattcttgacaatcaatttttatcc

SEQ ID NO: 163036 - DNA, 25 bp, Artificial
  probe
  misc_feature (1)..(25): SEQ ID NO: 1341; WAN024DLX_at; Start 127; Stop 151
ggtggaacagcacttataggttctg

SEQ ID NO: 163037 - DNA, 25 bp, Artificial
  probe
  misc_feature (1)..(25): SEQ ID NO: 1341; WAN024DLX_at; Start 124; Stop 148
gcaggtggaacagcacttataggtt

SEQ ID NO: 163038 - DNA, 25 bp, Artificial
  probe
  misc_feature (1)..(25): SEQ ID NO: 1341; WAN024DLX_at; Start 136; Stop 160
gcacttataggttctggtttggcag

SEQ ID NO: 163039 - DNA, 25 bp, Artificial
  probe
  misc_feature (1)..(25): SEQ ID NO: 1341; WAN024DLX_at; Start 137; Stop 161
cacttataggttctggtttggcagc

SEQ ID NO: 163040 - DNA, 25 bp, Artificial
  probe
  misc_feature (1)..(25): SEQ ID NO: 1737; WAN024DLY_at; Start 101; Stop 125
caggttataccattggaaaagacct

SEQ ID NO: 163041 - DNA, 25 bp, Artificial
  probe
  misc_feature (1)..(25): SEQ ID NO: 1737; WAN024DLY_at; Start 99; Stop 123
ggcaggttataccattggaaaagac

SEQ ID NO: 163042 - DNA, 25 bp, Artificial
  probe
  misc_feature (1)..(25): SEQ ID NO: 1737; WAN024DLY_at; Start 83; Stop 107
gtatcgctttatttatggcaggtta

SEQ ID NO: 163043 - DNA, 25 bp, Artificial
  probe
  misc_feature (1)..(25): SEQ ID NO: 1737; WAN024DLY_at; Start 91; Stop 115
ttatttatggcaggttataccattg

SEQ ID NO: 163044 - DNA, 25 bp, Artificial
  probe
  misc_feature (1)..(25): SEQ ID NO: 1737; WAN024DLY_at; Start 26; Stop 50
gtgaaatttctaataaggaattgca

SEQ ID NO: 163045 - DNA, 25 bp, Artificial
  probe
  misc_feature (1)..(25): SEQ ID NO: 1737; WAN024DLY_at; Start 30; Stop 54
aatttctaataaggaattgcaagaa

SEQ ID NO: 163046 - DNA, 25 bp, Artificial
  probe
  misc_feature (1)..(25): SEQ ID NO: 1737; WAN024DLY_at; Start 84; Stop 108
tatcgctttatttatggcaggttat

SEQ ID NO: 163047 - DNA, 25 bp, Artificial
  probe
  misc_feature (1)..(25): SEQ ID NO: 1737; WAN024DLY_at; Start 93; Stop 117
atttatggcaggttataccattgga

SEQ ID NO: 163048 - DNA, 25 bp, Artificial
  probe
  misc_feature (1)..(25): SEQ ID NO: 1737; WAN024DLY_at; Start 106; Stop 130
tataccattggaaaagaccttcgta

SEQ ID NO: 163049 - DNA, 25 bp, Artificial
  probe
  misc_feature (1)..(25): SEQ ID NO: 1737; WAN024DLY_at; Start 35; Stop 59
ctaataaggaattgcaagaaatcaa

SEQ ID NO: 163050 - DNA, 25 bp, Artificial
  probe
  misc_feature (1)..(25): SEQ ID NO: 1737; WAN024DLY_at; Start 97; Stop 121
atggcaggttataccattggaaaag

SEQ ID NO: 163051 - DNA, 25 bp, Artificial
  probe
  misc_feature (1)..(25): SEQ ID NO: 1737; WAN024DLY_at; Start 89; Stop 113
ctttatttatggcaggttataccat

SEQ ID NO: 163052 - DNA, 25 bp, Artificial
  probe
  misc_feature (1)..(25): SEQ ID NO: 1737; WAN024DLY_at; Start 40; Stop 64
aaggaattgcaagaaatcaagggtg

SEQ ID NO: 163053 - DNA, 25 bp, Artificial
  probe
  misc_feature (1)..(25): SEQ ID NO: 1737; WAN024DLY_at; Start 28; Stop 52
gaaatttctaataaggaattgcaag

SEQ ID NO: 163054 - DNA, 25 bp, Artificial
  probe
  misc_feature (1)..(25): SEQ ID NO: 1737; WAN024DLY_at; Start 98; Stop 122
tggcaggttataccattggaaaaga

SEQ ID NO: 163055 - DNA, 25 bp, Artificial
  probe
  misc_feature (1)..(25): SEQ ID NO: 1737; WAN024DLY_at; Start 95; Stop 119
ttatggcaggttataccattggaaa

SEQ ID NO: 163056 - DNA, 25 bp, Artificial
  probe
  misc_feature (1)..(25): SEQ ID NO: 1737; WAN024DLY_at; Start 85; Stop 109
atcgctttatttatggcaggttata

SEQ ID NO: 163057 - DNA, 25 bp, Artificial
  probe
  misc_feature (1)..(25): SEQ ID NO: 1737; WAN024DLY_at; Start 96; Stop 120
tatggcaggttataccattggaaaa

SEQ ID NO: 163058 - DNA, 25 bp, Artificial
  probe
  misc_feature (1)..(25): SEQ ID NO: 1737; WAN024DLY_at; Start 82; Stop 106
ggtatcgctttatttatggcaggtt

SEQ ID NO: 163059 - DNA, 25 bp, Artificial
  probe
  misc_feature (1)..(25): SEQ ID NO: 1737; WAN024DLY_at; Start 39; Stop 63
taaggaattgcaagaaatcaagggt

SEQ ID NO: 163060 - DNA, 25 bp, Artificial
  probe
  misc_feature (1)..(25): SEQ ID NO: 1737; WAN024DLY_at; Start 92; Stop 116
tatttatggcaggttataccattgg

SEQ ID NO: 163061 - DNA, 25 bp, Artificial
  probe
  misc_feature (1)..(25): SEQ ID NO: 1737; WAN024DLY_at; Start 42; Stop 66
ggaattgcaagaaatcaagggtggc

SEQ ID NO: 163062 - DNA, 25 bp, Artificial
  probe
  misc_feature (1)..(25): SEQ ID NO: 1737; WAN024DLY_at; Start 25; Stop 49
cgtgaaatttctaataaggaattgc

SEQ ID NO: 163063 - DNA, 25 bp, Artificial
  probe
  misc_feature (1)..(25): SEQ ID NO: 1737; WAN024DLY_at; Start 29; Stop 53
aaatttctaataaggaattgcaaga

SEQ ID NO: 163064 - DNA, 25 bp, Artificial
  probe
  misc_feature (1)..(25): SEQ ID NO: 1737; WAN024DLY_at; Start 87; Stop 111
cgctttatttatggcaggttatacc

SEQ ID NO: 163065 - DNA, 25 bp, Artificial
  probe
  misc_feature (1)..(25): SEQ ID NO: 1737; WAN024DLY_at; Start 22; Stop 46
tatcgtgaaatttctaataaggaat

SEQ ID NO: 163066 - DNA, 25 bp, Artificial
  probe
  misc_feature (1)..(25): SEQ ID NO: 1737; WAN024DLY_at; Start 38; Stop 62
ataaggaattgcaagaaatcaaggg

SEQ ID NO: 163067 - DNA, 25 bp, Artificial
  probe
  misc_feature (1)..(25): SEQ ID NO: 1737; WAN024DLY_at; Start 86; Stop 110
tcgctttatttatggcaggttatac

SEQ ID NO: 163068 - DNA, 25 bp, Artificial
  probe
  misc_feature (1)..(25): SEQ ID NO: 1737; WAN024DLY_at; Start 100; Stop 124
gcaggttataccattggaaaagacc

SEQ ID NO: 163069 - DNA, 25 bp, Artificial
  probe
  misc_feature (1)..(25): SEQ ID NO: 1737; WAN024DLY_at; Start 94; Stop 118
tttatggcaggttataccattggaa

SEQ ID NO: 163070 - DNA, 25 bp, Artificial
  probe
  misc_feature (1)..(25): SEQ ID NO: 1737; WAN024DLY_at; Start 36; Stop 60
taataaggaattgcaagaaatcaag

SEQ ID NO: 163071 - DNA, 25 bp, Artificial
  probe
  misc_feature (1)..(25): SEQ ID NO: 1737; WAN024DLY_at; Start 34; Stop 58
tctaataaggaattgcaagaaatca

SEQ ID NO: 163072 - DNA, 25 bp, Artificial
  probe
  misc_feature (1)..(25): SEQ ID NO: 1737; WAN024DLY_at; Start 41; Stop 65
aggaattgcaagaaatcaagggtgg

SEQ ID NO: 163073 - DNA, 25 bp, Artificial
  probe
  misc_feature (1)..(25): SEQ ID NO: 1737; WAN024DLY_at; Start 37; Stop 61
aataaggaattgcaagaaatcaagg

SEQ ID NO: 163074 - DNA, 25 bp, Artificial
  probe
  misc_feature (1)..(25): SEQ ID NO: 5563; WAN024DLZ_at; Start 41; Stop 65
gaaaatatggagtttgtcgttgaaa

SEQ ID NO: 163075 - DNA, 25 bp, Artificial
  probe
  misc_feature (1)..(25): SEQ ID NO: 5563; WAN024DLZ_at; Start 112; Stop 136
catgtcaagtatcaacgaattataa

SEQ ID NO: 163076 - DNA, 25 bp, Artificial
  probe
  misc_feature (1)..(25): SEQ ID NO: 5563; WAN024DLZ_at; Start 267; Stop 291
gattttagaaatatcctatgtacaa

SEQ ID NO: 163077 - DNA, 25 bp, Artificial
  probe
  misc_feature (1)..(25): SEQ ID NO: 5563; WAN024DLZ_at; Start 161; Stop 185
tttttgcttgactgatttacatcat

SEQ ID NO: 163078 - DNA, 25 bp, Artificial
  probe
  misc_feature (1)..(25): SEQ ID NO: 5563; WAN024DLZ_at; Start 200; Stop 224
caaaatcacacgagattatgctagt

SEQ ID NO: 163079 - DNA, 25 bp, Artificial
  probe
  misc_feature (1)..(25): SEQ ID NO: 5563; WAN024DLZ_at; Start 262; Stop 286
tagaagattttagaaatatcctatg

SEQ ID NO: 163080 - DNA, 25 bp, Artificial
  probe
  misc_feature (1)..(25): SEQ ID NO: 5563; WAN024DLZ_at; Start 275; Stop 299
aaatatcctatgtacaatgatgtaa

SEQ ID NO: 163081 - DNA, 25 bp, Artificial
  probe
  misc_feature (1)..(25): SEQ ID NO: 5563; WAN024DLZ_at; Start 152; Stop 176
caaagtgaatttttgcttgactgat

SEQ ID NO: 163082 - DNA, 25 bp, Artificial
  probe
  misc_feature (1)..(25): SEQ ID NO: 5563; WAN024DLZ_at; Start 114; Stop 138
tgtcaagtatcaacgaattataagt

SEQ ID NO: 163083 - DNA, 25 bp, Artificial
  probe
  misc_feature (1)..(25): SEQ ID NO: 5563; WAN024DLZ_at; Start 206; Stop 230
cacacgagattatgctagtcaaaca

SEQ ID NO: 163084 - DNA, 25 bp, Artificial
  probe
  misc_feature (1)..(25): SEQ ID NO: 5563; WAN024DLZ_at; Start 210; Stop 234
cgagattatgctagtcaaacaaaac

SEQ ID NO: 163085 - DNA, 25 bp, Artificial
  probe
  misc_feature (1)..(25): SEQ ID NO: 5563; WAN024DLZ_at; Start 211; Stop 235
gagattatgctagtcaaacaaaacc

SEQ ID NO: 163086 - DNA, 25 bp, Artificial
  probe
  misc_feature (1)..(25): SEQ ID NO: 5563; WAN024DLZ_at; Start 205; Stop 229
tcacacgagattatgctagtcaaac

SEQ ID NO: 163087 - DNA, 25 bp, Artificial
  probe
  misc_feature (1)..(25): SEQ ID NO: 5563; WAN024DLZ_at; Start 49; Stop 73
ggagtttgtcgttgaaattacttga

SEQ ID NO: 163088 - DNA, 25 bp, Artificial
  probe
  misc_feature (1)..(25): SEQ ID NO: 5563; WAN024DLZ_at; Start 216; Stop 240
tatgctagtcaaacaaaacctgcta

SEQ ID NO: 163089 - DNA, 25 bp, Artificial
  probe
  misc_feature (1)..(25): SEQ ID NO: 5563; WAN024DLZ_at; Start 213; Stop 237
gattatgctagtcaaacaaaacctg

SEQ ID NO: 163090 - DNA, 25 bp, Artificial
  probe
  misc_feature (1)..(25): SEQ ID NO: 5563; WAN024DLZ_at; Start 150; Stop 174
ttcaaagtgaatttttgcttgactg

SEQ ID NO: 163091 - DNA, 25 bp, Artificial
  probe
  misc_feature (1)..(25): SEQ ID NO: 5563; WAN024DLZ_at; Start 166; Stop 190
gcttgactgatttacatcatttatt

SEQ ID NO: 163092 - DNA, 25 bp, Artificial
  probe
  misc_feature (1)..(25): SEQ ID NO: 5563; WAN024DLZ_at; Start 158; Stop 182
gaatttttgcttgactgatttacat

SEQ ID NO: 163093 - DNA, 25 bp, Artificial
  probe
  misc_feature (1)..(25): SEQ ID NO: 5563; WAN024DLZ_at; Start 272; Stop 296
tagaaatatcctatgtacaatgatg

SEQ ID NO: 163094 - DNA, 25 bp, Artificial
  probe
  misc_feature (1)..(25): SEQ ID NO: 5563; WAN024DLZ_at; Start 39; Stop 63
gagaaaatatggagtttgtcgttga

SEQ ID NO: 163095 - DNA, 25 bp, Artificial
  probe
  misc_feature (1)..(25): SEQ ID NO: 5563; WAN024DLZ_at; Start 208; Stop 232
cacgagattatgctagtcaaacaaa

SEQ ID NO: 163096 - DNA, 25 bp, Artificial
  probe
  misc_feature (1)..(25): SEQ ID NO: 5563; WAN024DLZ_at; Start 218; Stop 242
tgctagtcaaacaaaacctgctatt

SEQ ID NO: 163097 - DNA, 25 bp, Artificial
  probe
  misc_feature (1)..(25): SEQ ID NO: 5563; WAN024DLZ_at; Start 123; Stop 147
tcaacgaattataagtatttagaga

SEQ ID NO: 163098 - DNA, 25 bp, Artificial
  probe
  misc_feature (1)..(25): SEQ ID NO: 5563; WAN024DLZ_at; Start 202; Stop 226
aaatcacacgagattatgctagtca

SEQ ID NO: 163099 - DNA, 25 bp, Artificial
  probe
  misc_feature (1)..(25): SEQ ID NO: 5563; WAN024DLZ_at; Start 55; Stop 79
tgtcgttgaaattacttgattgtat

SEQ ID NO: 163100 - DNA, 25 bp, Artificial
  probe
  misc_feature (1)..(25): SEQ ID NO: 5563; WAN024DLZ_at; Start 61; Stop 85
tgaaattacttgattgtattttgga

SEQ ID NO: 163101 - DNA, 25 bp, Artificial
  probe
  misc_feature (1)..(25): SEQ ID NO: 5563; WAN024DLZ_at; Start 215; Stop 239
ttatgctagtcaaacaaaacctgct

SEQ ID NO: 163102 - DNA, 25 bp, Artificial
  probe
  misc_feature (1)..(25): SEQ ID NO: 5563; WAN024DLZ_at; Start 52; Stop 76
gtttgtcgttgaaattacttgattg

SEQ ID NO: 163103 - DNA, 25 bp, Artificial
  probe
  misc_feature (1)..(25): SEQ ID NO: 5563; WAN024DLZ_at; Start 116; Stop 140
tcaagtatcaacgaattataagtat

SEQ ID NO: 163104 - DNA, 25 bp, Artificial
  probe
  misc_feature (1)..(25): SEQ ID NO: 5563; WAN024DLZ_at; Start 46; Stop 70
tatggagtttgtcgttgaaattact

SEQ ID NO: 163105 - DNA, 25 bp, Artificial
  probe
  misc_feature (1)..(25): SEQ ID NO: 5563; WAN024DLZ_at; Start 274; Stop 298
gaaatatcctatgtacaatgatgta

SEQ ID NO: 163106 - DNA, 25 bp, Artificial
  probe
  misc_feature (1)..(25): SEQ ID NO: 5563; WAN024DLZ_at; Start 219; Stop 243
gctagtcaaacaaaacctgctattc

SEQ ID NO: 163107 - DNA, 25 bp, Artificial
  probe
  misc_feature (1)..(25): SEQ ID NO: 5563; WAN024DLZ_at; Start 222; Stop 246
agtcaaacaaaacctgctattcaag

SEQ ID NO: 163108 - DNA, 25 bp, Artificial
  probe
  misc_feature (1)..(25): SEQ ID NO: 2153; WAN024DM2_at; Start 528; Stop 552
tctgttaaaatcaaaggtactaaca

SEQ ID NO: 163109 - DNA, 25 bp, Artificial
  probe
  misc_feature (1)..(25): SEQ ID NO: 2153; WAN024DM2_at; Start 153; Stop 177
ggcgataccgttattctatattttg

SEQ ID NO: 163110 - DNA, 25 bp, Artificial
  probe
  misc_feature (1)..(25): SEQ ID NO: 2153; WAN024DM2_at; Start 605; Stop 629
tttggaaattgcaatcaaaatctga

SEQ ID NO: 163111 - DNA, 25 bp, Artificial
  probe
  misc_feature (1)..(25): SEQ ID NO: 2153; WAN024DM2_at; Start 290; Stop 314
gaattctctttcaccaactaatggg

SEQ ID NO: 163112 - DNA, 25 bp, Artificial
  probe
  misc_feature (1)..(25): SEQ ID NO: 2153; WAN024DM2_at; Start 635; Stop 659
catgcgtggctttatcttatatcag

SEQ ID NO: 163113 - DNA, 25 bp, Artificial
  probe
  misc_feature (1)..(25): SEQ ID NO: 2153; WAN024DM2_at; Start 496; Stop 520
aaactttatagaattgagaatcaac

SEQ ID NO: 163114 - DNA, 25 bp, Artificial
  probe
  misc_feature (1)..(25): SEQ ID NO: 2153; WAN024DM2_at; Start 256; Stop 280
tttgtgatcattataggagctagga

SEQ ID NO: 163115 - DNA, 25 bp, Artificial
  probe
  misc_feature (1)..(25): SEQ ID NO: 2153; WAN024DM2_at; Start 925; Stop 949
gccatttcagaaatccaacttttgc

SEQ ID NO: 163116 - DNA, 25 bp, Artificial
  probe
  misc_feature (1)..(25): SEQ ID NO: 2153; WAN024DM2_at; Start 118; Stop 142
ggaactccctctcatgccatcttaa

SEQ ID NO: 163117 - DNA, 25 bp, Artificial
  probe
  misc_feature (1)..(25): SEQ ID NO: 2153; WAN024DM2_at; Start 743; Stop 767
caatatcactttatggtatgttgga

SEQ ID NO: 163118 - DNA, 25 bp, Artificial
  probe
  misc_feature (1)..(25): SEQ ID NO: 2153; WAN024DM2_at; Start 303; Stop 327
ccaactaatgggatttagtccagga

SEQ ID NO: 163119 - DNA, 25 bp, Artificial
  probe
  misc_feature (1)..(25): SEQ ID NO: 2153; WAN024DM2_at; Start 439; Stop 463
gacaaaccgttgcttttgcctctta

SEQ ID NO: 163120 - DNA, 25 bp, Artificial
  probe
  misc_feature (1)..(25): SEQ ID NO: 2153; WAN024DM2_at; Start 866; Stop 890
taatcgagcagaatattgatgatag

SEQ ID NO: 163121 - DNA, 25 bp, Artificial
  probe
  misc_feature (1)..(25): SEQ ID NO: 2153; WAN024DM2_at; Start 329; Stop 353
tagcagtgttttataaggagagtca

SEQ ID NO: 163122 - DNA, 25 bp, Artificial
  probe
  misc_feature (1)..(25): SEQ ID NO: 2153; WAN024DM2_at; Start 4; Stop 28
gaaagtagactaatgaaaaataagc

SEQ ID NO: 163123 - DNA, 25 bp, Artificial
  probe
  misc_feature (1)..(25): SEQ ID NO: 2153; WAN024DM2_at; Start 903; Stop 927
gcaaccattatctttatctttagcc

SEQ ID NO: 163124 - DNA, 25 bp, Artificial
  probe
  misc_feature (1)..(25): SEQ ID NO: 2153; WAN024DM2_at; Start 68; Stop 92
taagcacgatattttgtgtcagccc

SEQ ID NO: 163125 - DNA, 25 bp, Artificial
  probe
  misc_feature (1)..(25): SEQ ID NO: 2153; WAN024DM2_at; Start 51; Stop 75
aataattttactgcttataagcacg

SEQ ID NO: 163126 - DNA, 25 bp, Artificial
  probe
  misc_feature (1)..(25): SEQ ID NO: 2153; WAN024DM2_at; Start 543; Stop 567
ggtactaacaatactggaatctaag

SEQ ID NO: 163127 - DNA, 25 bp, Artificial
  probe
  misc_feature (1)..(25): SEQ ID NO: 2153; WAN024DM2_at; Start 177; Stop 201
gtctcaatgcttacatactttgcta

SEQ ID NO: 163128 - DNA, 25 bp, Artificial
  probe
  misc_feature (1)..(25): SEQ ID NO: 2153; WAN024DM2_at; Start 271; Stop 295
ggagctaggaaatactatcgaattc

SEQ ID NO: 163129 - DNA, 25 bp, Artificial
  probe
  misc_feature (1)..(25): SEQ ID NO: 2153; WAN024DM2_at; Start 585; Stop 609
tcttcaggattatcatgaaatttgg

SEQ ID NO: 163130 - DNA, 25 bp, Artificial
  probe
  misc_feature (1)..(25): SEQ ID NO: 2153; WAN024DM2_at; Start 82; Stop 106
tgtgtcagcccagtatttataaaat

SEQ ID NO: 163131 - DNA, 25 bp, Artificial
  probe
  misc_feature (1)..(25): SEQ ID NO: 2153; WAN024DM2_at; Start 138; Stop 162
cttaacctttgtattggcgataccg

SEQ ID NO: 163132 - DNA, 25 bp, Artificial
  probe
  misc_feature (1)..(25): SEQ ID NO: 2153; WAN024DM2_at; Start 213; Stop 237
ctcaatcttttgtaaattaagacca

SEQ ID NO: 163133 - DNA, 25 bp, Artificial
  probe
  misc_feature (1)..(25): SEQ ID NO: 2153; WAN024DM2_at; Start 101; Stop 125
taaaattggacatcttaggaactcc

SEQ ID NO: 163134 - DNA, 25 bp, Artificial
  probe
  misc_feature (1)..(25): SEQ ID NO: 2153; WAN024DM2_at; Start 886; Stop 910
gatagtttaaatagctcgcaaccat

SEQ ID NO: 163135 - DNA, 25 bp, Artificial
  probe
  misc_feature (1)..(25): SEQ ID NO: 2153; WAN024DM2_at; Start 345; Stop 369
ggagagtcaaacaactaagaatctg

SEQ ID NO: 163136 - DNA, 25 bp, Artificial
  probe
  misc_feature (1)..(25): SEQ ID NO: 2153; WAN024DM2_at; Start 853; Stop 877
ccagactttgttttaatcgagcaga

SEQ ID NO: 163137 - DNA, 25 bp, Artificial
  probe
  misc_feature (1)..(25): SEQ ID NO: 2153; WAN024DM2_at; Start 477; Stop 501
tatcatagcattagtacaaaaactt

SEQ ID NO: 163138 - DNA, 25 bp, Artificial
  probe
  misc_feature (1)..(25): SEQ ID NO: 2153; WAN024DM2_at; Start 940; Stop 964
caacttttgcttgaagtgtatatgg

SEQ ID NO: 163139 - DNA, 25 bp, Artificial
  probe
  misc_feature (1)..(25): SEQ ID NO: 2153; WAN024DM2_at; Start 192; Stop 216
tactttgctattactagtttcctca

SEQ ID NO: 163140 - DNA, 25 bp, Artificial
  probe
  misc_feature (1)..(25): SEQ ID NO: 2153; WAN024DM2_at; Start 838; Stop 862
attttagaggtaagaccagactttg

SEQ ID NO: 163141 - DNA, 25 bp, Artificial
  probe
  misc_feature (1)..(25): SEQ ID NO: 2153; WAN024DM2_at; Start 426; Stop 450
tacttttgtgtatgacaaaccgttg

SEQ ID NO: 163142 - DNA, 25 bp, Artificial
  probe
  misc_feature (1)..(25): SEQ ID NO: 887; WAN024DM3_at; Start 10; Stop 34
gatcagaaatatttattagcgggac

SEQ ID NO: 163143 - DNA, 25 bp, Artificial
  probe
  misc_feature (1)..(25): SEQ ID NO: 887; WAN024DM3_at; Start 615; Stop 639
tgaatacaaaaaccttacaccaatc

SEQ ID NO: 163144 - DNA, 25 bp, Artificial
  probe
  misc_feature (1)..(25): SEQ ID NO: 887; WAN024DM3_at; Start 142; Stop 166
gcaacagtcattcatattgtgataa

SEQ ID NO: 163145 - DNA, 25 bp, Artificial
  probe
  misc_feature (1)..(25): SEQ ID NO: 887; WAN024DM3_at; Start 751; Stop 775
tatactatgggattcaattactttg

SEQ ID NO: 163146 - DNA, 25 bp, Artificial
  probe
  misc_feature (1)..(25): SEQ ID NO: 887; WAN024DM3_at; Start 922; Stop 946
gttgcctctaaacaaatagtagtta

SEQ ID NO: 163147 - DNA, 25 bp, Artificial
  probe
  misc_feature (1)..(25): SEQ ID NO: 887; WAN024DM3_at; Start 313; Stop 337
tgccaaggacaaccttacggactgt

SEQ ID NO: 163148 - DNA, 25 bp, Artificial
  probe
  misc_feature (1)..(25): SEQ ID NO: 887; WAN024DM3_at; Start 498; Stop 522
taccgcttggattggaaatagaaga

SEQ ID NO: 163149 - DNA, 25 bp, Artificial
  probe
  misc_feature (1)..(25): SEQ ID NO: 887; WAN024DM3_at; Start 230; Stop 254
gctggagatttcaacctataaactt

SEQ ID NO: 163150 - DNA, 25 bp, Artificial
  probe
  misc_feature (1)..(25): SEQ ID NO: 887; WAN024DM3_at; Start 681; Stop 705
gcttcagaatcagagtgaggttgac

SEQ ID NO: 163151 - DNA, 25 bp, Artificial
  probe
  misc_feature (1)..(25): SEQ ID NO: 887; WAN024DM3_at; Start 911; Stop 935
tacaagatgctgttgcctctaaaca

SEQ ID NO: 163152 - DNA, 25 bp, Artificial
  probe
  misc_feature (1)..(25): SEQ ID NO: 887; WAN024DM3_at; Start 127; Stop 151
ttaatatacttcattgcaacagtca

SEQ ID NO: 163153 - DNA, 25 bp, Artificial
  probe
  misc_feature (1)..(25): SEQ ID NO: 887; WAN024DM3_at; Start 1013; Stop 1037
aagatagaccttatattttttccag

SEQ ID NO: 163154 - DNA, 25 bp, Artificial
  probe
  misc_feature (1)..(25): SEQ ID NO: 887; WAN024DM3_at; Start 223; Stop 247
gatgggagctggagatttcaaccta

SEQ ID NO: 163155 - DNA, 25 bp, Artificial
  probe
  misc_feature (1)..(25): SEQ ID NO: 887; WAN024DM3_at; Start 886; Stop 910
caagatggttctttcgagggcggta

SEQ ID NO: 163156 - DNA, 25 bp, Artificial
  probe
  misc_feature (1)..(25): SEQ ID NO: 887; WAN024DM3_at; Start 1024; Stop 1048
tatattttttccagaaagagtccta

SEQ ID NO: 163157 - DNA, 25 bp, Artificial
  probe
  misc_feature (1)..(25): SEQ ID NO: 887; WAN024DM3_at; Start 657; Stop 681
tgaaaatttgcttgactcctacttg

SEQ ID NO: 163158 - DNA, 25 bp, Artificial
  probe
  misc_feature (1)..(25): SEQ ID NO: 887; WAN024DM3_at; Start 254; Stop 278
tactctactttccagaaatggtgag

SEQ ID NO: 163159 - DNA, 25 bp, Artificial
  probe
  misc_feature (1)..(25): SEQ ID NO: 887; WAN024DM3_at; Start 338; Stop 362
taaaaaagatgctgaaaagaattcg

SEQ ID NO: 163160 - DNA, 25 bp, Artificial
  probe
  misc_feature (1)..(25): SEQ ID NO: 887; WAN024DM3_at; Start 691; Stop 715
cagagtgaggttgacttagatattt

SEQ ID NO: 163161 - DNA, 25 bp, Artificial
  probe
  misc_feature (1)..(25): SEQ ID NO: 887; WAN024DM3_at; Start 298; Stop 322
ttagttcaagaatattgccaaggac

SEQ ID NO: 163162 - DNA, 25 bp, Artificial
  probe
  misc_feature (1)..(25): SEQ ID NO: 887; WAN024DM3_at; Start 268; Stop 292
gaaatggtgagagatgtcattccga

SEQ ID NO: 163163 - DNA, 25 bp, Artificial
  probe
  misc_feature (1)..(25): SEQ ID NO: 887; WAN024DM3_at; Start 670; Stop 694
gactcctacttgcttcagaatcaga

SEQ ID NO: 163164 - DNA, 25 bp, Artificial
  probe
  misc_feature (1)..(25): SEQ ID NO: 887; WAN024DM3_at; Start 351; Stop 375
gaaaagaattcgattgtcacgagag

SEQ ID NO: 163165 - DNA, 25 bp, Artificial
  probe
  misc_feature (1)..(25): SEQ ID NO: 887; WAN024DM3_at; Start 572; Stop 596
taaaagaaatatcatctgcacgata

SEQ ID NO: 163166 - DNA, 25 bp, Artificial
  probe
  misc_feature (1)..(25): SEQ ID NO: 887; WAN024DM3_at; Start 31; Stop 55
ggactttattcgcttctagttgcaa

SEQ ID NO: 163167 - DNA, 25 bp, Artificial
  probe
  misc_feature (1)..(25): SEQ ID NO: 887; WAN024DM3_at; Start 832; Stop 856
gaagcattaagagatttgtcaaaac

SEQ ID NO: 163168 - DNA, 25 bp, Artificial
  probe
  misc_feature (1)..(25): SEQ ID NO: 887; WAN024DM3_at; Start 977; Stop 1001
gatgcgtgccatcccaatatgatag

SEQ ID NO: 163169 - DNA, 25 bp, Artificial
  probe
  misc_feature (1)..(25): SEQ ID NO: 887; WAN024DM3_at; Start 383; Stop 407
tactcctggctaccattatcgtcta

SEQ ID NO: 163170 - DNA, 25 bp, Artificial
  probe
  misc_feature (1)..(25): SEQ ID NO: 887; WAN024DM3_at; Start 812; Stop 836
tgggaatcatttacgataatgaagc

SEQ ID NO: 163171 - DNA, 25 bp, Artificial
  probe
  misc_feature (1)..(25): SEQ ID NO: 887; WAN024DM3_at; Start 873; Stop 897
tatttcggaattacaagatggttct

SEQ ID NO: 163172 - DNA, 25 bp, Artificial
  probe
  misc_feature (1)..(25): SEQ ID NO: 887; WAN024DM3_at; Start 897; Stop 921
tttcgagggcggtatacaagatgct

SEQ ID NO: 163173 - DNA, 25 bp, Artificial
  probe
  misc_feature (1)..(25): SEQ ID NO: 887; WAN024DM3_at; Start 87; Stop 111
gatttttgtaagtatattgatggcg

SEQ ID NO: 163174 - DNA, 25 bp, Artificial
  probe
  misc_feature (1)..(25): SEQ ID NO: 887; WAN024DM3_at; Start 283; Stop 307
gtcattccgattaatttagttcaag

SEQ ID NO: 163175 - DNA, 25 bp, Artificial
  probe
  misc_feature (1)..(25): SEQ ID NO: 887; WAN024DM3_at; Start 962; Stop 986
cttgtttaaattccagatgcgtgcc

SEQ ID NO: 163176 - DNA, 25 bp, Artificial
  probe
  misc_feature (1)..(25): SEQ ID NO: 5151; WAN024DM4_at; Start 206; Stop 230
aagctgttcgagtagcactggaaga

SEQ ID NO: 163177 - DNA, 25 bp, Artificial
  probe
  misc_feature (1)..(25): SEQ ID NO: 5151; WAN024DM4_at; Start 61; Stop 85
gctgcggcagttgtttcaacagttc

SEQ ID NO: 163178 - DNA, 25 bp, Artificial
  probe
  misc_feature (1)..(25): SEQ ID NO: 5151; WAN024DM4_at; Start 73; Stop 97
gtttcaacagttcttttatcttaca

SEQ ID NO: 163179 - DNA, 25 bp, Artificial
  probe
  misc_feature (1)..(25): SEQ ID NO: 5151; WAN024DM4_at; Start 49; Stop 73
cagtcagattgtgctgcggcagttg

SEQ ID NO: 163180 - DNA, 25 bp, Artificial
  probe
  misc_feature (1)..(25): SEQ ID NO: 5151; WAN024DM4_at; Start 300; Stop 324
ggtattacatagtataaaggagaaa

SEQ ID NO: 163181 - DNA, 25 bp, Artificial
  probe
  misc_feature (1)..(25): SEQ ID NO: 5151; WAN024DM4_at; Start 99; Stop 123
aaaggaactatcaatcatgaagatt

SEQ ID NO: 163182 - DNA, 25 bp, Artificial
  probe
  misc_feature (1)..(25): SEQ ID NO: 5151; WAN024DM4_at; Start 253; Stop 277
cctgcgattcttcaagttaagaatg

SEQ ID NO: 163183 - DNA, 25 bp, Artificial
  probe
  misc_feature (1)..(25): SEQ ID NO: 5151; WAN024DM4_at; Start 155; Stop 179
cgactgtcagtggtattgtttcagg

SEQ ID NO: 163184 - DNA, 25 bp, Artificial
  probe
  misc_feature (1)..(25): SEQ ID NO: 5151; WAN024DM4_at; Start 91; Stop 115
tcttacaaaaaggaactatcaatca

SEQ ID NO: 163185 - DNA, 25 bp, Artificial
  probe
  misc_feature (1)..(25): SEQ ID NO: 5151; WAN024DM4_at; Start 162; Stop 186
cagtggtattgtttcaggtctgaat

SEQ ID NO: 163186 - DNA, 25 bp, Artificial
  probe
  misc_feature (1)..(25): SEQ ID NO: 5151; WAN024DM4_at; Start 64; Stop 88
gcggcagttgtttcaacagttcttt

SEQ ID NO: 163187 - DNA, 25 bp, Artificial
  probe
  misc_feature (1)..(25): SEQ ID NO: 5151; WAN024DM4_at; Start 153; Stop 177
aacgactgtcagtggtattgtttca

SEQ ID NO: 163188 - DNA, 25 bp, Artificial
  probe
  misc_feature (1)..(25): SEQ ID NO: 5151; WAN024DM4_at; Start 138; Stop 162
tacagacatgtatggaacgactgtc

SEQ ID NO: 163189 - DNA, 25 bp, Artificial
  probe
  misc_feature (1)..(25): SEQ ID NO: 5151; WAN024DM4_at; Start 193; Stop 217
aattttacagtaaaagctgttcgag

SEQ ID NO: 163190 - DNA, 25 bp, Artificial
  probe
  misc_feature (1)..(25): SEQ ID NO: 5151; WAN024DM4_at; Start 307; Stop 331
catagtataaaggagaaaataaagg

SEQ ID NO: 163191 - DNA, 25 bp, Artificial
  probe
  misc_feature (1)..(25): SEQ ID NO: 5151; WAN024DM4_at; Start 132; Stop 156
tattggtacagacatgtatggaacg

SEQ ID NO: 163192 - DNA, 25 bp, Artificial
  probe
  misc_feature (1)..(25): SEQ ID NO: 5151; WAN024DM4_at; Start 140; Stop 164
cagacatgtatggaacgactgtcag

SEQ ID NO: 163193 - DNA, 25 bp, Artificial
  probe
  misc_feature (1)..(25): SEQ ID NO: 5151; WAN024DM4_at; Start 148; Stop 172
tatggaacgactgtcagtggtattg

SEQ ID NO: 163194 - DNA, 25 bp, Artificial
  probe
  misc_feature (1)..(25): SEQ ID NO: 5151; WAN024DM4_at; Start 244; Stop 268
ttaacatttcctgcgattcttcaag

SEQ ID NO: 163195 - DNA, 25 bp, Artificial
  probe
  misc_feature (1)..(25): SEQ ID NO: 5151; WAN024DM4_at; Start 144; Stop 168
catgtatggaacgactgtcagtggt

SEQ ID NO: 163196 - DNA, 25 bp, Artificial
  probe
  misc_feature (1)..(25): SEQ ID NO: 5151; WAN024DM4_at; Start 264; Stop 288
tcaagttaagaatgatttaggtcaa

SEQ ID NO: 163197 - DNA, 25 bp, Artificial
  probe
  misc_feature (1)..(25): SEQ ID NO: 5151; WAN024DM4_at; Start 248; Stop 272
catttcctgcgattcttcaagttaa

SEQ ID NO: 163198 - DNA, 25 bp, Artificial
  probe
  misc_feature (1)..(25): SEQ ID NO: 5151; WAN024DM4_at; Start 200; Stop 224
cagtaaaagctgttcgagtagcact

SEQ ID NO: 163199 - DNA, 25 bp, Artificial
  probe
  misc_feature (1)..(25): SEQ ID NO: 5151; WAN024DM4_at; Start 96; Stop 120
caaaaaggaactatcaatcatgaag

SEQ ID NO: 163200 - DNA, 25 bp, Artificial
  probe
  misc_feature (1)..(25): SEQ ID NO: 5151; WAN024DM4_at; Start 277; Stop 301
gatttaggtcaaaatcattttgtgg

SEQ ID NO: 163201 - DNA, 25 bp, Artificial
  probe
  misc_feature (1)..(25): SEQ ID NO: 5151; WAN024DM4_at; Start 10; Stop 34
tctatgttaaaaaaatatccttgta

SEQ ID NO: 163202 - DNA, 25 bp, Artificial
  probe
  misc_feature (1)..(25): SEQ ID NO: 5151; WAN024DM4_at; Start 208; Stop 232
gctgttcgagtagcactggaagatt

SEQ ID NO: 163203 - DNA, 25 bp, Artificial
  probe
  misc_feature (1)..(25): SEQ ID NO: 5151; WAN024DM4_at; Start 135; Stop 159
tggtacagacatgtatggaacgact

SEQ ID NO: 163204 - DNA, 25 bp, Artificial
  probe
  misc_feature (1)..(25): SEQ ID NO: 5151; WAN024DM4_at; Start 286; Stop 310
caaaatcattttgtggtattacata

SEQ ID NO: 163205 - DNA, 25 bp, Artificial
  probe
  misc_feature (1)..(25): SEQ ID NO: 5151; WAN024DM4_at; Start 176; Stop 200
caggtctgaataagttgaattttac

SEQ ID NO: 163206 - DNA, 25 bp, Artificial
  probe
  misc_feature (1)..(25): SEQ ID NO: 5151; WAN024DM4_at; Start 234; Stop 258
gactccaaaattaacatttcctgcg

SEQ ID NO: 163207 - DNA, 25 bp, Artificial
  probe
  misc_feature (1)..(25): SEQ ID NO: 5151; WAN024DM4_at; Start 203; Stop 227
taaaagctgttcgagtagcactgga

SEQ ID NO: 163208 - DNA, 25 bp, Artificial
  probe
  misc_feature (1)..(25): SEQ ID NO: 5151; WAN024DM4_at; Start 125; Stop 149
gggaaattattggtacagacatgta

SEQ ID NO: 163209 - DNA, 25 bp, Artificial
  probe
  misc_feature (1)..(25): SEQ ID NO: 5151; WAN024DM4_at; Start 58; Stop 82
tgtgctgcggcagttgtttcaacag

SEQ ID NO: 163210 - DNA, 25 bp, Artificial
  probe
  misc_feature (1)..(25): SEQ ID NO: 6918; WAN024DM5_at; Start 27; Stop 51
aagtgttttggcagtatgggttgat

SEQ ID NO: 163211 - DNA, 25 bp, Artificial
  probe
  misc_feature (1)..(25): SEQ ID NO: 6918; WAN024DM5_at; Start 200; Stop 224
caatcttcaaattcccaccaacggg

SEQ ID NO: 163212 - DNA, 25 bp, Artificial
  probe
  misc_feature (1)..(25): SEQ ID NO: 6918; WAN024DM5_at; Start 72; Stop 96
agtaggatggtcaggaaattttggt

SEQ ID NO: 163213 - DNA, 25 bp, Artificial
  probe
  misc_feature (1)..(25): SEQ ID NO: 6918; WAN024DM5_at; Start 24; Stop 48
tacaagtgttttggcagtatgggtt

SEQ ID NO: 163214 - DNA, 25 bp, Artificial
  probe
  misc_feature (1)..(25): SEQ ID NO: 6918; WAN024DM5_at; Start 22; Stop 46
tctacaagtgttttggcagtatggg

SEQ ID NO: 163215 - DNA, 25 bp, Artificial
  probe
  misc_feature (1)..(25): SEQ ID NO: 6918; WAN024DM5_at; Start 108; Stop 132
tttacattctactcgctctcataca

SEQ ID NO: 163216 - DNA, 25 bp, Artificial
  probe
  misc_feature (1)..(25): SEQ ID NO: 6918; WAN024DM5_at; Start 32; Stop 56
ttttggcagtatgggttgatggtgg

SEQ ID NO: 163217 - DNA, 25 bp, Artificial
  probe
  misc_feature (1)..(25): SEQ ID NO: 6918; WAN024DM5_at; Start 158; Stop 182
tctctaaggatcgtgcagaagctga

SEQ ID NO: 163218 - DNA, 25 bp, Artificial
  probe
  misc_feature (1)..(25): SEQ ID NO: 6918; WAN024DM5_at; Start 77; Stop 101
gatggtcaggaaattttggttattc

SEQ ID NO: 163219 - DNA, 25 bp, Artificial
  probe
  misc_feature (1)..(25): SEQ ID NO: 6918; WAN024DM5_at; Start 168; Stop 192
tcgtgcagaagctgaggcatgggct

SEQ ID NO: 163220 - DNA, 25 bp, Artificial
  probe
  misc_feature (1)..(25): SEQ ID NO: 6918; WAN024DM5_at; Start 190; Stop 214
gctcgggcttcaatcttcaaattcc

SEQ ID NO: 163221 - DNA, 25 bp, Artificial
  probe
  misc_feature (1)..(25): SEQ ID NO: 6918; WAN024DM5_at; Start 162; Stop 186
taaggatcgtgcagaagctgaggca

SEQ ID NO: 163222 - DNA, 25 bp, Artificial
  probe
  misc_feature (1)..(25): SEQ ID NO: 6918; WAN024DM5_at; Start 14; Stop 38
tacttgcttctacaagtgttttggc

SEQ ID NO: 163223 - DNA, 25 bp, Artificial
  probe
  misc_feature (1)..(25): SEQ ID NO: 6918; WAN024DM5_at; Start 153; Stop 177
taaattctctaaggatcgtgcagaa

SEQ ID NO: 163224 - DNA, 25 bp, Artificial
  probe
  misc_feature (1)..(25): SEQ ID NO: 6918; WAN024DM5_at; Start 131; Stop 155
cagcaactgttaaagatggaaataa

SEQ ID NO: 163225 - DNA, 25 bp, Artificial
  probe
  misc_feature (1)..(25): SEQ ID NO: 6918; WAN024DM5_at; Start 18; Stop 42
tgcttctacaagtgttttggcagta

SEQ ID NO: 163226 - DNA, 25 bp, Artificial
  probe
  misc_feature (1)..(25): SEQ ID NO: 6918; WAN024DM5_at; Start 65; Stop 89
actatggagtaggatggtcaggaaa

SEQ ID NO: 163227 - DNA, 25 bp, Artificial
  probe
  misc_feature (1)..(25): SEQ ID NO: 6918; WAN024DM5_at; Start 129; Stop 153
tacagcaactgttaaagatggaaat

SEQ ID NO: 163228 - DNA, 25 bp, Artificial
  probe
  misc_feature (1)..(25): SEQ ID NO: 6918; WAN024DM5_at; Start 148; Stop 172
ggaaataaattctctaaggatcgtg

SEQ ID NO: 163229 - DNA, 25 bp, Artificial
  probe
  misc_feature (1)..(25): SEQ ID NO: 6918; WAN024DM5_at; Start 194; Stop 218
gggcttcaatcttcaaattcccacc

SEQ ID NO: 163230 - DNA, 25 bp, Artificial
  probe
  misc_feature (1)..(25): SEQ ID NO: 6918; WAN024DM5_at; Start 80; Stop 104
ggtcaggaaattttggttattctga

SEQ ID NO: 163231 - DNA, 25 bp, Artificial
  probe
  misc_feature (1)..(25): SEQ ID NO: 6918; WAN024DM5_at; Start 186; Stop 210
atgggctcgggcttcaatcttcaaa

SEQ ID NO: 163232 - DNA, 25 bp, Artificial
  probe
  misc_feature (1)..(25): SEQ ID NO: 6918; WAN024DM5_at; Start 103; Stop 127
gattatttacattctactcgctctc

SEQ ID NO: 163233 - DNA, 25 bp, Artificial
  probe
  misc_feature (1)..(25): SEQ ID NO: 6918; WAN024DM5_at; Start 163; Stop 187
aaggatcgtgcagaagctgaggcat

SEQ ID NO: 163234 - DNA, 25 bp, Artificial
  probe
  misc_feature (1)..(25): SEQ ID NO: 6918; WAN024DM5_at; Start 188; Stop 212
gggctcgggcttcaatcttcaaatt

SEQ ID NO: 163235 - DNA, 25 bp, Artificial
  probe
  misc_feature (1)..(25): SEQ ID NO: 6918; WAN024DM5_at; Start 67; Stop 91
tatggagtaggatggtcaggaaatt

SEQ ID NO: 163236 - DNA, 25 bp, Artificial
  probe
  misc_feature (1)..(25): SEQ ID NO: 6918; WAN024DM5_at; Start 155; Stop 179
aattctctaaggatcgtgcagaagc

SEQ ID NO: 163237 - DNA, 25 bp, Artificial
  probe
  misc_feature (1)..(25): SEQ ID NO: 6918; WAN024DM5_at; Start 206; Stop 230
tcaaattcccaccaacgggaatgga

SEQ ID NO: 163238 - DNA, 25 bp, Artificial
  probe
  misc_feature (1)..(25): SEQ ID NO: 6918; WAN024DM5_at; Start 7; Stop 31
tgtagtatacttgcttctacaagtg

SEQ ID NO: 163239 - DNA, 25 bp, Artificial
  probe
  misc_feature (1)..(25): SEQ ID NO: 6918; WAN024DM5_at; Start 151; Stop 175
aataaattctctaaggatcgtgcag

SEQ ID NO: 163240 - DNA, 25 bp, Artificial
  probe
  misc_feature (1)..(25): SEQ ID NO: 6918; WAN024DM5_at; Start 180; Stop 204
tgaggcatgggctcgggcttcaatc

SEQ ID NO: 163241 - DNA, 25 bp, Artificial
  probe
  misc_feature (1)..(25): SEQ ID NO: 6918; WAN024DM5_at; Start 149; Stop 173
gaaataaattctctaaggatcgtgc

SEQ ID NO: 163242 - DNA, 25 bp, Artificial
  probe
  misc_feature (1)..(25): SEQ ID NO: 6918; WAN024DM5_at; Start 137; Stop 161
ctgttaaagatggaaataaattctc

SEQ ID NO: 163243 - DNA, 25 bp, Artificial
  probe
  misc_feature (1)..(25): SEQ ID NO: 6918; WAN024DM5_at; Start 160; Stop 184
tctaaggatcgtgcagaagctgagg

SEQ ID NO: 163244 - DNA, 25 bp, Artificial
  probe
  misc_feature (1)..(25): SEQ ID NO: 2646; WAN024DM6_at; Start 14; Stop 38
tacttgctactacaaatgctttagc

SEQ ID NO: 163245 - DNA, 25 bp, Artificial
  probe
  misc_feature (1)..(25): SEQ ID NO: 2646; WAN024DM6_at; Start 85; Stop 109
ggaacttttggatattctgattact

SEQ ID NO: 163246 - DNA, 25 bp, Artificial
  probe
  misc_feature (1)..(25): SEQ ID NO: 2646; WAN024DM6_at; Start 173; Stop 197
caaaacctgaggcatgggctagagc

SEQ ID NO: 163247 - DNA, 25 bp, Artificial
  probe
  misc_feature (1)..(25): SEQ ID NO: 2646; WAN024DM6_at; Start 162; Stop 186
taaggattatgcaaaacctgaggca

SEQ ID NO: 163248 - DNA, 25 bp, Artificial
  probe
  misc_feature (1)..(25): SEQ ID NO: 2646; WAN024DM6_at; Start 32; Stop 56
ctttagcagtatgggttgagggtgg

SEQ ID NO: 163249 - DNA, 25 bp, Artificial
  probe
  misc_feature (1)..(25): SEQ ID NO: 2646; WAN024DM6_at; Start 168; Stop 192
ttatgcaaaacctgaggcatgggct

SEQ ID NO: 163250 - DNA, 25 bp, Artificial
  probe
  misc_feature (1)..(25): SEQ ID NO: 2646; WAN024DM6_at; Start 202; Stop 226
ctcaccaagattccgccaacaggaa

SEQ ID NO: 163251 - DNA, 25 bp, Artificial
  probe
  misc_feature (1)..(25): SEQ ID NO: 2646; WAN024DM6_at; Start 192; Stop 216
tagagcttccctcaccaagattccg

SEQ ID NO: 163252 - DNA, 25 bp, Artificial
  probe
  misc_feature (1)..(25): SEQ ID NO: 2646; WAN024DM6_at; Start 101; Stop 125
ctgattacttacattctactcgata

SEQ ID NO: 163253 - DNA, 25 bp, Artificial
  probe
  misc_feature (1)..(25): SEQ ID NO: 2646; WAN024DM6_at; Start 5; Stop 29
tatgtggtatacttgctactacaaa

SEQ ID NO: 163254 - DNA, 25 bp, Artificial
  probe
  misc_feature (1)..(25): SEQ ID NO: 2646; WAN024DM6_at; Start 74; Stop 98
taggttggacaggaacttttggata

SEQ ID NO: 163255 - DNA, 25 bp, Artificial
  probe
  misc_feature (1)..(25): SEQ ID NO: 2646; WAN024DM6_at; Start 207; Stop 231
caagattccgccaacaggaatggaa

SEQ ID NO: 163256 - DNA, 25 bp, Artificial
  probe
  misc_feature (1)..(25): SEQ ID NO: 2646; WAN024DM6_at; Start 28; Stop 52
aatgctttagcagtatgggttgagg

SEQ ID NO: 163257 - DNA, 25 bp, Artificial
  probe
  misc_feature (1)..(25): SEQ ID NO: 2646; WAN024DM6_at; Start 187; Stop 211
tgggctagagcttccctcaccaaga

SEQ ID NO: 163258 - DNA, 25 bp, Artificial
  probe
  misc_feature (1)..(25): SEQ ID NO: 2646; WAN024DM6_at; Start 150; Stop 174
gggtagaacctctaaggattatgca

SEQ ID NO: 163259 - DNA, 25 bp, Artificial
  probe
  misc_feature (1)..(25): SEQ ID NO: 2646; WAN024DM6_at; Start 89; Stop 113
cttttggatattctgattacttaca

SEQ ID NO: 163260 - DNA, 25 bp, Artificial
  probe
  misc_feature (1)..(25): SEQ ID NO: 2646; WAN024DM6_at; Start 129; Stop 153
tacagcaactgttagacatgggggt

SEQ ID NO: 163261 - DNA, 25 bp, Artificial
  probe
  misc_feature (1)..(25): SEQ ID NO: 2646; WAN024DM6_at; Start 171; Stop 195
tgcaaaacctgaggcatgggctaga

SEQ ID NO: 163262 - DNA, 25 bp, Artificial
  probe
  misc_feature (1)..(25): SEQ ID NO: 2646; WAN024DM6_at; Start 176; Stop 200
aacctgaggcatgggctagagcttc

SEQ ID NO: 163263 - DNA, 25 bp, Artificial
  probe
  misc_feature (1)..(25): SEQ ID NO: 2646; WAN024DM6_at; Start 136; Stop 160
actgttagacatgggggtagaacct

SEQ ID NO: 163264 - DNA, 25 bp, Artificial
  probe
  misc_feature (1)..(25): SEQ ID NO: 2646; WAN024DM6_at; Start 183; Stop 207
ggcatgggctagagcttccctcacc

SEQ ID NO: 163265 - DNA, 25 bp, Artificial
  probe
  misc_feature (1)..(25): SEQ ID NO: 2646; WAN024DM6_at; Start 155; Stop 179
gaacctctaaggattatgcaaaacc

SEQ ID NO: 163266 - DNA, 25 bp, Artificial
  probe
  misc_feature (1)..(25): SEQ ID NO: 2646; WAN024DM6_at; Start 67; Stop 91
tatggagtaggttggacaggaactt

SEQ ID NO: 163267 - DNA, 25 bp, Artificial
  probe
  misc_feature (1)..(25): SEQ ID NO: 2646; WAN024DM6_at; Start 9; Stop 33
tggtatacttgctactacaaatgct

SEQ ID NO: 163268 - DNA, 25 bp, Artificial
  probe
  misc_feature (1)..(25): SEQ ID NO: 2646; WAN024DM6_at; Start 188; Stop 212
gggctagagcttccctcaccaagat

SEQ ID NO: 163269 - DNA, 25 bp, Artificial
  probe
  misc_feature (1)..(25): SEQ ID NO: 2646; WAN024DM6_at; Start 65; Stop 89
actatggagtaggttggacaggaac

SEQ ID NO: 163270 - DNA, 25 bp, Artificial
  probe
  misc_feature (1)..(25): SEQ ID NO: 2646; WAN024DM6_at; Start 174; Stop 198
aaaacctgaggcatgggctagagct

SEQ ID NO: 163271 - DNA, 25 bp, Artificial
  probe
  misc_feature (1)..(25): SEQ ID NO: 2646; WAN024DM6_at; Start 80; Stop 104
ggacaggaacttttggatattctga

SEQ ID NO: 163272 - DNA, 25 bp, Artificial
  probe
  misc_feature (1)..(25): SEQ ID NO: 2646; WAN024DM6_at; Start 210; Stop 234
gattccgccaacaggaatggaatat

SEQ ID NO: 163273 - DNA, 25 bp, Artificial
  probe
  misc_feature (1)..(25): SEQ ID NO: 2646; WAN024DM6_at; Start 21; Stop 45
tactacaaatgctttagcagtatgg

SEQ ID NO: 163274 - DNA, 25 bp, Artificial
  probe
  misc_feature (1)..(25): SEQ ID NO: 2646; WAN024DM6_at; Start 158; Stop 182
cctctaaggattatgcaaaacctga

SEQ ID NO: 163275 - DNA, 25 bp, Artificial
  probe
  misc_feature (1)..(25): SEQ ID NO: 2646; WAN024DM6_at; Start 180; Stop 204
tgaggcatgggctagagcttccctc

SEQ ID NO: 163276 - DNA, 25 bp, Artificial
  probe
  misc_feature (1)..(25): SEQ ID NO: 2646; WAN024DM6_at; Start 108; Stop 132
cttacattctactcgatatcataca

SEQ ID NO: 163277 - DNA, 25 bp, Artificial
  probe
  misc_feature (1)..(25): SEQ ID NO: 2646; WAN024DM6_at; Start 166; Stop 190
gattatgcaaaacctgaggcatggg

SEQ ID NO: 163278 - DNA, 25 bp, Artificial
  probe
  misc_feature (1)..(25): SEQ ID NO: 6407; WAN024DM7_s_at; Start 401; Stop 425
aagaatcaggtggtagctatacagc

SEQ ID NO: 163279 - DNA, 25 bp, Artificial
  probe
  misc_feature (1)..(25): SEQ ID NO: 6407; WAN024DM7_s_at; Start 95; Stop 119
catcaacttacactgttaaagaagg

SEQ ID NO: 163280 - DNA, 25 bp, Artificial
  probe
  misc_feature (1)..(25): SEQ ID NO: 6407; WAN024DM7_s_at; Start 240; Stop 264
tgtagcgcctgttgcaacaccagcg

SEQ ID NO: 163281 - DNA, 25 bp, Artificial
  probe
  misc_feature (1)..(25): SEQ ID NO: 6407; WAN024DM7_s_at; Start 469; Stop 493
gctaaaaacttctggcttaacaatg

SEQ ID NO: 163282 - DNA, 25 bp, Artificial
  probe
  misc_feature (1)..(25): SEQ ID NO: 6407; WAN024DM7_s_at; Start 255; Stop 279
aacaccagcgccagctacttatgcg

SEQ ID NO: 163283 - DNA, 25 bp, Artificial
  probe
  misc_feature (1)..(25): SEQ ID NO: 6407; WAN024DM7_s_at; Start 477; Stop 501
cttctggcttaacaatggctggtat

SEQ ID NO: 163284 - DNA, 25 bp, Artificial
  probe
  misc_feature (1)..(25): SEQ ID NO: 6407; WAN024DM7_s_at; Start 328; Stop 352
ccagtagtaagtgaaacagttgttt

SEQ ID NO: 163285 - DNA, 25 bp, Artificial
  probe
  misc_feature (1)..(25): SEQ ID NO: 6407; WAN024DM7_s_at; Start 217; Stop 241
caagagttggttatcgatggccctg

SEQ ID NO: 163286 - DNA, 25 bp, Artificial
  probe
  misc_feature (1)..(25): SEQ ID NO: 6407; WAN024DM7_s_at; Start 344; Stop 368
cagttgtttcaactgtaagcggatc

SEQ ID NO: 163287 - DNA, 25 bp, Artificial
  probe
  misc_feature (1)..(25): SEQ ID NO: 6407; WAN024DM7_s_at; Start 208; Stop 232
tatgttgatcaagagttggttatcg

SEQ ID NO: 163288 - DNA, 25 bp, Artificial
  probe
  misc_feature (1)..(25): SEQ ID NO: 6407; WAN024DM7_s_at; Start 78; Stop 102
tgtatctgctcaagaatcatcaact

SEQ ID NO: 163289 - DNA, 25 bp, Artificial
  probe
  misc_feature (1)..(25): SEQ ID NO: 6407; WAN024DM7_s_at; Start 292; Stop 316
caagatgaaactgtttcagctccag

SEQ ID NO: 163290 - DNA, 25 bp, Artificial
  probe
  misc_feature (1)..(25): SEQ ID NO: 6407; WAN024DM7_s_at; Start 262; Stop 286
gcgccagctacttatgcggcaccag

SEQ ID NO: 163291 - DNA, 25 bp, Artificial
  probe
  misc_feature (1)..(25): SEQ ID NO: 6407; WAN024DM7_s_at; Start 389; Stop 413
ggatcgctcaaaaagaatcaggtgg

SEQ ID NO: 163292 - DNA, 25 bp, Artificial
  probe
  misc_feature (1)..(25): SEQ ID NO: 6407; WAN024DM7_s_at; Start 29; Stop 53
caactcttgcaggagtagctgcctt

SEQ ID NO: 163293 - DNA, 25 bp, Artificial
  probe
  misc_feature (1)..(25): SEQ ID NO: 6407; WAN024DM7_s_at; Start 367; Stop 391
tctgaagcagaagccaaagaatgga

SEQ ID NO: 163294 - DNA, 25 bp, Artificial
  probe
  misc_feature (1)..(25): SEQ ID NO: 6407; WAN024DM7_s_at; Start 67; Stop 91
gctccatcatttgtatctgctcaag

SEQ ID NO: 163295 - DNA, 25 bp, Artificial
  probe
  misc_feature (1)..(25): SEQ ID NO: 6407; WAN024DM7_s_at; Start 180; Stop 204
caaccacattgataacattcatttg

SEQ ID NO: 163296 - DNA, 25 bp, Artificial
  probe
  misc_feature (1)..(25): SEQ ID NO: 6407; WAN024DM7_s_at; Start 115; Stop 139
gaaggtgatacactttcagaaatcg

SEQ ID NO: 163297 - DNA, 25 bp, Artificial
  probe
  misc_feature (1)..(25): SEQ ID NO: 6407; WAN024DM7_s_at; Start 137; Stop 161
tcgctgaaactcacaacacaacagt

SEQ ID NO: 163298 - DNA, 25 bp, Artificial
  probe
  misc_feature (1)..(25): SEQ ID NO: 6407; WAN024DM7_s_at; Start 17; Stop 41
aaaagattaaagcaactcttgcagg

SEQ ID NO: 163299 - DNA, 25 bp, Artificial
  probe
  misc_feature (1)..(25): SEQ ID NO: 6407; WAN024DM7_s_at; Start 286; Stop 310
gccgctcaagatgaaactgtttcag

SEQ ID NO: 163300 - DNA, 25 bp, Artificial
  probe
  misc_feature (1)..(25): SEQ ID NO: 6407; WAN024DM7_s_at; Start 163; Stop 187
gaaaaattggcagaaaacaaccaca

SEQ ID NO: 163301 - DNA, 25 bp, Artificial
  probe
  misc_feature (1)..(25): SEQ ID NO: 6407; WAN024DM7_s_at; Start 49; Stop 73
gccttgtttgcagtatttgctccat

SEQ ID NO: 163302 - DNA, 25 bp, Artificial
  probe
  misc_feature (1)..(25): SEQ ID NO: 6407; WAN024DM7_s_at; Start 171; Stop 195
ggcagaaaacaaccacattgataac

SEQ ID NO: 163303 - DNA, 25 bp, Artificial
  probe
  misc_feature (1)..(25): SEQ ID NO: 6407; WAN024DM7_s_at; Start 379; Stop 403
gccaaagaatggatcgctcaaaaag

SEQ ID NO: 163304 - DNA, 25 bp, Artificial
  probe
  misc_feature (1)..(25): SEQ ID NO: 6407; WAN024DM7_s_at; Start 319; Stop 343
gcagaaactccagtagtaagtgaaa

SEQ ID NO: 163305 - DNA, 25 bp, Artificial
  probe
  misc_feature (1)..(25): SEQ ID NO: 6407; WAN024DM7_s_at; Start 131; Stop 155
cagaaatcgctgaaactcacaacac

SEQ ID NO: 163306 - DNA, 25 bp, Artificial
  probe
  misc_feature (1)..(25): SEQ ID NO: 6407; WAN024DM7_s_at; Start 428; Stop 452
caaatggacgttatatcggacgtta

SEQ ID NO: 163307 - DNA, 25 bp, Artificial
  probe
  misc_feature (1)..(25): SEQ ID NO: 6407; WAN024DM7_s_at; Start 37; Stop 61
gcaggagtagctgccttgtttgcag

SEQ ID NO: 163308 - DNA, 25 bp, Artificial
  probe
  misc_feature (1)..(25): SEQ ID NO: 6407; WAN024DM7_s_at; Start 357; Stop 381
tgtaagcggatctgaagcagaagcc

SEQ ID NO: 163309 - DNA, 25 bp, Artificial
  probe
  misc_feature (1)..(25): SEQ ID NO: 6407; WAN024DM7_s_at; Start 416; Stop 440
gctatacagctacaaatggacgtta

SEQ ID NO: 163310 - DNA, 25 bp, Artificial
  probe
  misc_feature (1)..(25): SEQ ID NO: 6407; WAN024DM7_s_at; Start 232; Stop 256
gatggccctgtagcgcctgttgcaa

SEQ ID NO: 163311 - DNA, 25 bp, Artificial
  probe
  misc_feature (1)..(25): SEQ ID NO: 6407; WAN024DM7_s_at; Start 274; Stop 298
tatgcggcaccagccgctcaagatg

SEQ ID NO: 163312 - DNA, 25 bp, Artificial
  probe
  misc_feature (1)..(25): SEQ ID NO: 949; WAN024DM8_at; Start 516; Stop 540
tgcctacgttgcaggacgttacggt

SEQ ID NO: 163313 - DNA, 25 bp, Artificial
  probe
  misc_feature (1)..(25): SEQ ID NO: 949; WAN024DM8_at; Start 519; Stop 543
ctacgttgcaggacgttacggttca

SEQ ID NO: 163314 - DNA, 25 bp, Artificial
  probe
  misc_feature (1)..(25): SEQ ID NO: 949; WAN024DM8_at; Start 479; Stop 503
gtgactactcagctgaaaaccaaga

SEQ ID NO: 163315 - DNA, 25 bp, Artificial
  probe
  misc_feature (1)..(25): SEQ ID NO: 949; WAN024DM8_at; Start 495; Stop 519
aaaccaagaacgtgtagcagatgcc

SEQ ID NO: 163316 - DNA, 25 bp, Artificial
  probe
  misc_feature (1)..(25): SEQ ID NO: 949; WAN024DM8_at; Start 512; Stop 536
cagatgcctacgttgcaggacgtta

SEQ ID NO: 163317 - DNA, 25 bp, Artificial
  probe
  misc_feature (1)..(25): SEQ ID NO: 949; WAN024DM8_at; Start 469; Stop 493
tacctgaacggtgactactcagctg

SEQ ID NO: 163318 - DNA, 25 bp, Artificial
  probe
  misc_feature (1)..(25): SEQ ID NO: 949; WAN024DM8_at; Start 487; Stop 511
tcagctgaaaaccaagaacgtgtag

SEQ ID NO: 163319 - DNA, 25 bp, Artificial
  probe
  misc_feature (1)..(25): SEQ ID NO: 949; WAN024DM8_at; Start 473; Stop 497
tgaacggtgactactcagctgaaaa

SEQ ID NO: 163320 - DNA, 25 bp, Artificial
  probe
  misc_feature (1)..(25): SEQ ID NO: 949; WAN024DM8_at; Start 457; Stop 481
ttaacagattcatacctgaacggtg

SEQ ID NO: 163321 - DNA, 25 bp, Artificial
  probe
  misc_feature (1)..(25): SEQ ID NO: 949; WAN024DM8_at; Start 471; Stop 495
cctgaacggtgactactcagctgaa

SEQ ID NO: 163322 - DNA, 25 bp, Artificial
  probe
  misc_feature (1)..(25): SEQ ID NO: 949; WAN024DM8_at; Start 505; Stop 529
cgtgtagcagatgcctacgttgcag

SEQ ID NO: 163323 - DNA, 25 bp, Artificial
  probe
  misc_feature (1)..(25): SEQ ID NO: 949; WAN024DM8_at; Start 497; Stop 521
accaagaacgtgtagcagatgccta

SEQ ID NO: 163324 - DNA, 25 bp, Artificial
  probe
  misc_feature (1)..(25): SEQ ID NO: 949; WAN024DM8_at; Start 441; Stop 465
tatcggacgttaccaattaacagat

SEQ ID NO: 163325 - DNA, 25 bp, Artificial
  probe
  misc_feature (1)..(25): SEQ ID NO: 949; WAN024DM8_at; Start 492; Stop 516
tgaaaaccaagaacgtgtagcagat

SEQ ID NO: 163326 - DNA, 25 bp, Artificial
  probe
  misc_feature (1)..(25): SEQ ID NO: 949; WAN024DM8_at; Start 509; Stop 533
tagcagatgcctacgttgcaggacg

SEQ ID NO: 163327 - DNA, 25 bp, Artificial
  probe
  misc_feature (1)..(25): SEQ ID NO: 949; WAN024DM8_at; Start 474; Stop 498
gaacggtgactactcagctgaaaac

SEQ ID NO: 163328 - DNA, 25 bp, Artificial
  probe
  misc_feature (1)..(25): SEQ ID NO: 949; WAN024DM8_at; Start 439; Stop 463
tatatcggacgttaccaattaacag

SEQ ID NO: 163329 - DNA, 25 bp, Artificial
  probe
  misc_feature (1)..(25): SEQ ID NO: 949; WAN024DM8_at; Start 444; Stop 468
cggacgttaccaattaacagattca

SEQ ID NO: 163330 - DNA, 25 bp, Artificial
  probe
  misc_feature (1)..(25): SEQ ID NO: 949; WAN024DM8_at; Start 463; Stop 487
gattcatacctgaacggtgactact

SEQ ID NO: 163331 - DNA, 25 bp, Artificial
  probe
  misc_feature (1)..(25): SEQ ID NO: 949; WAN024DM8_at; Start 490; Stop 514
gctgaaaaccaagaacgtgtagcag

SEQ ID NO: 163332 - DNA, 25 bp, Artificial
  probe
  misc_feature (1)..(25): SEQ ID NO: 949; WAN024DM8_at; Start 459; Stop 483
aacagattcatacctgaacggtgac

SEQ ID NO: 163333 - DNA, 25 bp, Artificial
  probe
  misc_feature (1)..(25): SEQ ID NO: 949; WAN024DM8_at; Start 481; Stop 505
gactactcagctgaaaaccaagaac

SEQ ID NO: 163334 - DNA, 25 bp, Artificial
  probe
  misc_feature (1)..(25): SEQ ID NO: 949; WAN024DM8_at; Start 484; Stop 508
tactcagctgaaaaccaagaacgtg

SEQ ID NO: 163335 - DNA, 25 bp, Artificial
  probe
  misc_feature (1)..(25): SEQ ID NO: 949; WAN024DM8_at; Start 449; Stop 473
gttaccaattaacagattcatacct

SEQ ID NO: 163336 - DNA, 25 bp, Artificial
  probe
  misc_feature (1)..(25): SEQ ID NO: 949; WAN024DM8_at; Start 514; Stop 538
gatgcctacgttgcaggacgttacg

SEQ ID NO: 163337 - DNA, 25 bp, Artificial
  probe
  misc_feature (1)..(25): SEQ ID NO: 949; WAN024DM8_at; Start 499; Stop 523
caagaacgtgtagcagatgcctacg

SEQ ID NO: 163338 - DNA, 25 bp, Artificial
  probe
  misc_feature (1)..(25): SEQ ID NO: 949; WAN024DM8_at; Start 507; Stop 531
tgtagcagatgcctacgttgcagga

SEQ ID NO: 163339 - DNA, 25 bp, Artificial
  probe
  misc_feature (1)..(25): SEQ ID NO: 949; WAN024DM8_at; Start 461; Stop 485
cagattcatacctgaacggtgacta

SEQ ID NO: 163340 - DNA, 25 bp, Artificial
  probe
  misc_feature (1)..(25): SEQ ID NO: 949; WAN024DM8_at; Start 477; Stop 501
cggtgactactcagctgaaaaccaa

SEQ ID NO: 163341 - DNA, 25 bp, Artificial
  probe
  misc_feature (1)..(25): SEQ ID NO: 949; WAN024DM8_at; Start 455; Stop 479
aattaacagattcatacctgaacgg

SEQ ID NO: 163342 - DNA, 25 bp, Artificial
  probe
  misc_feature (1)..(25): SEQ ID NO: 949; WAN024DM8_at; Start 465; Stop 489
ttcatacctgaacggtgactactca

SEQ ID NO: 163343 - DNA, 25 bp, Artificial
  probe
  misc_feature (1)..(25): SEQ ID NO: 949; WAN024DM8_at; Start 467; Stop 491
catacctgaacggtgactactcagc

SEQ ID NO: 163344 - DNA, 25 bp, Artificial
  probe
  misc_feature (1)..(25): SEQ ID NO: 949; WAN024DM8_at; Start 502; Stop 526
gaacgtgtagcagatgcctacgttg

SEQ ID NO: 163345 - DNA, 25 bp, Artificial
  probe
  misc_feature (1)..(25): SEQ ID NO: 949; WAN024DM8_at; Start 496; Stop 520
aaccaagaacgtgtagcagatgcct

SEQ ID NO: 163346 - DNA, 25 bp, Artificial
  probe
  misc_feature (1)..(25): SEQ ID NO: 2834; WAN024DM9_at; Start 16; Stop 40
tctggctttcaagataaaaatggga

SEQ ID NO: 163347 - DNA, 25 bp, Artificial
  probe
  misc_feature (1)..(25): SEQ ID NO: 2834; WAN024DM9_at; Start 4; Stop 28
tcaagtaaggtttctggctttcaag

SEQ ID NO: 163348 - DNA, 25 bp, Artificial
  probe
  misc_feature (1)..(25): SEQ ID NO: 2834; WAN024DM9_at; Start 1079; Stop 1103
gatttaaatggaagaaggagtacaa

SEQ ID NO: 163349 - DNA, 25 bp, Artificial
  probe
  misc_feature (1)..(25): SEQ ID NO: 2834; WAN024DM9_at; Start 500; Stop 524
gaaaatgggcagagaccttgcatct

SEQ ID NO: 163350 - DNA, 25 bp, Artificial
  probe
  misc_feature (1)..(25): SEQ ID NO: 2834; WAN024DM9_at; Start 511; Stop 535
gagaccttgcatcttgttgaggaaa

SEQ ID NO: 163351 - DNA, 25 bp, Artificial
  probe
  misc_feature (1)..(25): SEQ ID NO: 2834; WAN024DM9_at; Start 129; Stop 153
tgtaatcagtgcatacaatgaagaa

SEQ ID NO: 163352 - DNA, 25 bp, Artificial
  probe
  misc_feature (1)..(25): SEQ ID NO: 2834; WAN024DM9_at; Start 444; Stop 468
tcaacaaggtgaatttgtctgtggg

SEQ ID NO: 163353 - DNA, 25 bp, Artificial
  probe
  misc_feature (1)..(25): SEQ ID NO: 2834; WAN024DM9_at; Start 936; Stop 960
aggtgcctattttctacttttgtca

SEQ ID NO: 163354 - DNA, 25 bp, Artificial
  probe
  misc_feature (1)..(25): SEQ ID NO: 2834; WAN024DM9_at; Start 148; Stop 172
gaagaaaaatatctgcctggtctaa

SEQ ID NO: 163355 - DNA, 25 bp, Artificial
  probe
  misc_feature (1)..(25): SEQ ID NO: 2834; WAN024DM9_at; Start 469; Stop 493
gggcctagaccgacgattgtcgaag

SEQ ID NO: 163356 - DNA, 25 bp, Artificial
  probe
  misc_feature (1)..(25): SEQ ID NO: 2834; WAN024DM9_at; Start 709; Stop 733
tataaaatccgctatagcccaagta

SEQ ID NO: 163357 - DNA, 25 bp, Artificial
  probe
  misc_feature (1)..(25): SEQ ID NO: 2834; WAN024DM9_at; Start 109; Stop 133
gaaagtcttctcgtatccattgtaa

SEQ ID NO: 163358 - DNA, 25 bp, Artificial
  probe
  misc_feature (1)..(25): SEQ ID NO: 2834; WAN024DM9_at; Start 611; Stop 635
tgtataaacgagaggttttccagaa

SEQ ID NO: 163359 - DNA, 25 bp, Artificial
  probe
  misc_feature (1)..(25): SEQ ID NO: 2834; WAN024DM9_at; Start 758; Stop 782
caacattcaagaaaatgctgcatca

SEQ ID NO: 163360 - DNA, 25 bp, Artificial
  probe
  misc_feature (1)..(25): SEQ ID NO: 2834; WAN024DM9_at; Start 244; Stop 268
gatgggaccacagctatcattcagc

SEQ ID NO: 163361 - DNA, 25 bp, Artificial
  probe
  misc_feature (1)..(25): SEQ ID NO: 2834; WAN024DM9_at; Start 641; Stop 665
gtttagtaaatgagcaacttggccg

SEQ ID NO: 163362 - DNA, 25 bp, Artificial
  probe
  misc_feature (1)..(25): SEQ ID NO: 2834; WAN024DM9_at; Start 655; Stop 679
caacttggccgaactgaagataatg

SEQ ID NO: 163363 - DNA, 25 bp, Artificial
  probe
  misc_feature (1)..(25): SEQ ID NO: 2834; WAN024DM9_at; Start 744; Stop 768
tcagtatattcgaccaacattcaag

SEQ ID NO: 163364 - DNA, 25 bp, Artificial
  probe
  misc_feature (1)..(25): SEQ ID NO: 2834; WAN024DM9_at; Start 389; Stop 413
ttgatgctcattcaaaagttactga

SEQ ID NO: 163365 - DNA, 25 bp, Artificial
  probe
  misc_feature (1)..(25): SEQ ID NO: 2834; WAN024DM9_at; Start 888; Stop 912
tagtctagcattgttaccgatcaca

SEQ ID NO: 163366 - DNA, 25 bp, Artificial
  probe
  misc_feature (1)..(25): SEQ ID NO: 2834; WAN024DM9_at; Start 920; Stop 944
tcataactttactattaggtgccta

SEQ ID NO: 163367 - DNA, 25 bp, Artificial
  probe
  misc_feature (1)..(25): SEQ ID NO: 2834; WAN024DM9_at; Start 159; Stop 183
tctgcctggtctaattgaagactta

SEQ ID NO: 163368 - DNA, 25 bp, Artificial
  probe
  misc_feature (1)..(25): SEQ ID NO: 2834; WAN024DM9_at; Start 76; Stop 100
aaattcaggagagtagtagtgactc

SEQ ID NO: 163369 - DNA, 25 bp, Artificial
  probe
  misc_feature (1)..(25): SEQ ID NO: 2834; WAN024DM9_at; Start 873; Stop 897
tttgagtcttgtgtttagtctagca

SEQ ID NO: 163370 - DNA, 25 bp, Artificial
  probe
  misc_feature (1)..(25): SEQ ID NO: 2834; WAN024DM9_at; Start 318; Stop 342
tcctaagaaaaatcaagctagtggt

SEQ ID NO: 163371 - DNA, 25 bp, Artificial
  probe
  misc_feature (1)..(25): SEQ ID NO: 2834; WAN024DM9_at; Start 346; Stop 370
aacctgggagttaaacattctgtag

SEQ ID NO: 163372 - DNA, 25 bp, Artificial
  probe
  misc_feature (1)..(25): SEQ ID NO: 2834; WAN024DM9_at; Start 331; Stop 355
caagctagtggttttaacctgggag

SEQ ID NO: 163373 - DNA, 25 bp, Artificial
  probe
  misc_feature (1)..(25): SEQ ID NO: 2834; WAN024DM9_at; Start 993; Stop 1017
aaatggatttctaattgtgatgccc

SEQ ID NO: 163374 - DNA, 25 bp, Artificial
  probe
  misc_feature (1)..(25): SEQ ID NO: 2834; WAN024DM9_at; Start 275; Stop 299
taaaggaagatacagagtttaactc

SEQ ID NO: 163375 - DNA, 25 bp, Artificial
  probe
  misc_feature (1)..(25): SEQ ID NO: 2834; WAN024DM9_at; Start 804; Stop 828
gattggcttgacaagtcatgttcag

SEQ ID NO: 163376 - DNA, 25 bp, Artificial
  probe
  misc_feature (1)..(25): SEQ ID NO: 2834; WAN024DM9_at; Start 486; Stop 510
tgtcgaaggaaaaggaaaatgggca

SEQ ID NO: 163377 - DNA, 25 bp, Artificial
  probe
  misc_feature (1)..(25): SEQ ID NO: 2834; WAN024DM9_at; Start 225; Stop 249
tataaatgctatgtccacagatggg

SEQ ID NO: 163378 - DNA, 25 bp, Artificial
  probe
  misc_feature (1)..(25): SEQ ID NO: 2834; WAN024DM9_at; Start 725; Stop 749
gcccaagtattctatcttatcagta

SEQ ID NO: 163379 - DNA, 25 bp, Artificial
  probe
  misc_feature (1)..(25): SEQ ID NO: 2834; WAN024DM9_at; Start 792; Stop 816
aaatggtttgtggattggcttgaca

SEQ ID NO: 163380 - DNA, 25 bp, Artificial
  probe
  misc_feature (1)..(25): SEQ ID NO: 2463; WAN024DMA_at; Start 323; Stop 347
ggctagatggttttgattttgaagc

SEQ ID NO: 163381 - DNA, 25 bp, Artificial
  probe
  misc_feature (1)..(25): SEQ ID NO: 2463; WAN024DMA_at; Start 283; Stop 307
ttagatgctttgcttgcttatacag

SEQ ID NO: 163382 - DNA, 25 bp, Artificial
  probe
  misc_feature (1)..(25): SEQ ID NO: 2463; WAN024DMA_at; Start 100; Stop 124
tcacatagctatgatgtagtctatc

SEQ ID NO: 163383 - DNA, 25 bp, Artificial
  probe
  misc_feature (1)..(25): SEQ ID NO: 2463; WAN024DMA_at; Start 228; Stop 252
tgtcgatcttcctgacctactaaca

SEQ ID NO: 163384 - DNA, 25 bp, Artificial
  probe
  misc_feature (1)..(25): SEQ ID NO: 2463; WAN024DMA_at; Start 475; Stop 499
ttggctcagtttgaagcgcgtgtgc

SEQ ID NO: 163385 - DNA, 25 bp, Artificial
  probe
  misc_feature (1)..(25): SEQ ID NO: 2463; WAN024DMA_at; Start 192; Stop 216
taaggtcagttatgctgatggtcaa

SEQ ID NO: 163386 - DNA, 25 bp, Artificial
  probe
  misc_feature (1)..(25): SEQ ID NO: 2463; WAN024DMA_at; Start 556; Stop 580
gaaggaaaagtgcatggcgtttacc

SEQ ID NO: 163387 - DNA, 25 bp, Artificial
  probe
  misc_feature (1)..(25): SEQ ID NO: 2463; WAN024DMA_at; Start 16; Stop 40
tttattccaaataaacagagcattt

SEQ ID NO: 163388 - DNA, 25 bp, Artificial
  probe
  misc_feature (1)..(25): SEQ ID NO: 2463; WAN024DMA_at; Start 91; Stop 115
ggtttggagtcacatagctatgatg

SEQ ID NO: 163389 - DNA, 25 bp, Artificial
  probe
  misc_feature (1)..(25): SEQ ID NO: 2463; WAN024DMA_at; Start 597; Stop 621
caagacagttttaccgagagaaccg

SEQ ID NO: 163390 - DNA, 25 bp, Artificial
  probe
  misc_feature (1)..(25): SEQ ID NO: 2463; WAN024DMA_at; Start 824; Stop 848
taggacaagattttaaaacattagc

SEQ ID NO: 163391 - DNA, 25 bp, Artificial
  probe
  misc_feature (1)..(25): SEQ ID NO: 2463; WAN024DMA_at; Start 360; Stop 384
aagtattcaagcctatctagcagac

SEQ ID NO: 163392 - DNA, 25 bp, Artificial
  probe
  misc_feature (1)..(25): SEQ ID NO: 2463; WAN024DMA_at; Start 646; Stop 670
caattggtggataaggaagtccagt

SEQ ID NO: 163393 - DNA, 25 bp, Artificial
  probe
  misc_feature (1)..(25): SEQ ID NO: 2463; WAN024DMA_at; Start 612; Stop 636
gagagaaccgtttgttcctgcagcc

SEQ ID NO: 163394 - DNA, 25 bp, Artificial
  probe
  misc_feature (1)..(25): SEQ ID NO: 2463; WAN024DMA_at; Start 584; Stop 608
tagctcaaggagtcaagacagtttt

SEQ ID NO: 163395 - DNA, 25 bp, Artificial
  probe
  misc_feature (1)..(25): SEQ ID NO: 2463; WAN024DMA_at; Start 309; Stop 333
gactgatattgaagggctagatggt

SEQ ID NO: 163396 - DNA, 25 bp, Artificial
  probe
  misc_feature (1)..(25): SEQ ID NO: 2463; WAN024DMA_at; Start 839; Stop 863
aaacattagcacaagaaaagtaact

SEQ ID NO: 163397 - DNA, 25 bp, Artificial
  probe
  misc_feature (1)..(25): SEQ ID NO: 2463; WAN024DMA_at; Start 267; Stop 291
gattatcaagtcatttttagatgct

SEQ ID NO: 163398 - DNA, 25 bp, Artificial
  probe
  misc_feature (1)..(25): SEQ ID NO: 2463; WAN024DMA_at; Start 450; Stop 474
gaaaagctttttagaggcagatggc

SEQ ID NO: 163399 - DNA, 25 bp, Artificial
  probe
  misc_feature (1)..(25): SEQ ID NO: 2463; WAN024DMA_at; Start 65; Stop 89
ccaagtcgatcttggccttgctaga

SEQ ID NO: 163400 - DNA, 25 bp, Artificial
  probe
  misc_feature (1)..(25): SEQ ID NO: 2463; WAN024DMA_at; Start 391; Stop 415
gctcgttttacgatttgccaaggaa

SEQ ID NO: 163401 - DNA, 25 bp, Artificial
  probe
  misc_feature (1)..(25): SEQ ID NO: 2463; WAN024DMA_at; Start 624; Stop 648
tgttcctgcagcctatattgagcaa

SEQ ID NO: 163402 - DNA, 25 bp, Artificial
  probe
  misc_feature (1)..(25): SEQ ID NO: 2463; WAN024DMA_at; Start 433; Stop 457
tttagtcgtgagaacttgaaaagct

SEQ ID NO: 163403 - DNA, 25 bp, Artificial
  probe
  misc_feature (1)..(25): SEQ ID NO: 2463; WAN024DMA_at; Start 420; Stop 444
taatcctattttctttagtcgtgag

SEQ ID NO: 163404 - DNA, 25 bp, Artificial
  probe
  misc_feature (1)..(25): SEQ ID NO: 2463; WAN024DMA_at; Start 465; Stop 489
ggcagatggcttggctcagtttgaa

SEQ ID NO: 163405 - DNA, 25 bp, Artificial
  probe
  misc_feature (1)..(25): SEQ ID NO: 2463; WAN024DMA_at; Start 204; Stop 228
tgctgatggtcaaaaggcttaccgt

SEQ ID NO: 163406 - DNA, 25 bp, Artificial
  probe
  misc_feature (1)..(25): SEQ ID NO: 2463; WAN024DMA_at; Start 349; Stop 373
tatttccaagcaagtattcaagcct

SEQ ID NO: 163407 - DNA, 25 bp, Artificial
  probe
  misc_feature (1)..(25): SEQ ID NO: 2463; WAN024DMA_at; Start 632; Stop 656
cagcctatattgagcaattggtgga

SEQ ID NO: 163408 - DNA, 25 bp, Artificial
  probe
  misc_feature (1)..(25): SEQ ID NO: 2463; WAN024DMA_at; Start 49; Stop 73
caagagattttgaatgccaagtcga

SEQ ID NO: 163409 - DNA, 25 bp, Artificial
  probe
  misc_feature (1)..(25): SEQ ID NO: 2463; WAN024DMA_at; Start 31; Stop 55
cagagcattttaggagaacaagaga

SEQ ID NO: 163410 - DNA, 25 bp, Artificial
  probe
  misc_feature (1)..(25): SEQ ID NO: 2463; WAN024DMA_at; Start 544; Stop 568
tatcaggatggagaaggaaaagtgc

SEQ ID NO: 163411 - DNA, 25 bp, Artificial
  probe
  misc_feature (1)..(25): SEQ ID NO: 2463; WAN024DMA_at; Start 499; Stop 523
cgtgcggttcaagagacagatgcct

SEQ ID NO: 163412 - DNA, 25 bp, Artificial
  probe
  misc_feature (1)..(25): SEQ ID NO: 2463; WAN024DMA_at; Start 337; Stop 361
gattttgaagcttatttccaagcaa

SEQ ID NO: 163413 - DNA, 25 bp, Artificial
  probe
  misc_feature (1)..(25): SEQ ID NO: 2463; WAN024DMA_at; Start 219; Stop 243
ggcttaccgtgtcgatcttcctgac

SEQ ID NO: 163414 - DNA, 25 bp, Artificial
  probe
  misc_feature (1)..(25): SEQ ID NO: 7418; WAN024DMB_at; Start 96; Stop 120
ggcctcactggcaccatcgatacga

SEQ ID NO: 163415 - DNA, 25 bp, Artificial
  probe
  misc_feature (1)..(25): SEQ ID NO: 7418; WAN024DMB_at; Start 129; Stop 153
tagaatggcttctggaatggtcttc

SEQ ID NO: 163416 - DNA, 25 bp, Artificial
  probe
  misc_feature (1)..(25): SEQ ID NO: 7418; WAN024DMB_at; Start 81; Stop 105
ttggaagaaaatccgggcctcactg

SEQ ID NO: 163417 - DNA, 25 bp, Artificial
  probe
  misc_feature (1)..(25): SEQ ID NO: 7418; WAN024DMB_at; Start 50; Stop 74
cgatacctggtagtgacaatggcaa

SEQ ID NO: 163418 - DNA, 25 bp, Artificial
  probe
  misc_feature (1)..(25): SEQ ID NO: 7418; WAN024DMB_at; Start 32; Stop 56
ttaagagcgtgatggttgcgatacc

SEQ ID NO: 163419 - DNA, 25 bp, Artificial
  probe
  misc_feature (1)..(25): SEQ ID NO: 7418; WAN024DMB_at; Start 63; Stop 87
tgacaatggcaaacagatttggaag

SEQ ID NO: 163420 - DNA, 25 bp, Artificial
  probe
  misc_feature (1)..(25): SEQ ID NO: 7418; WAN024DMB_at; Start 107; Stop 131
caccatcgatacgagccgattctag

SEQ ID NO: 163421 - DNA, 25 bp, Artificial
  probe
  misc_feature (1)..(25): SEQ ID NO: 7418; WAN024DMB_at; Start 156; Stop 180
gaagaaggaacgcatcaagatgatg

SEQ ID NO: 163422 - DNA, 25 bp, Artificial
  probe
  misc_feature (1)..(25): SEQ ID NO: 7418; WAN024DMB_at; Start 201; Stop 225
tggaacaatcaaggcccaaacagtg

SEQ ID NO: 163423 - DNA, 25 bp, Artificial
  probe
  misc_feature (1)..(25): SEQ ID NO: 7418; WAN024DMB_at; Start 9; Stop 33
gtcattccagaaaccaagagctgtt

SEQ ID NO: 163424 - DNA, 25 bp, Artificial
  probe
  misc_feature (1)..(25): SEQ ID NO: 7418; WAN024DMB_at; Start 194; Stop 218
gaagcattggaacaatcaaggccca

SEQ ID NO: 163425 - DNA, 25 bp, Artificial
  probe
  misc_feature (1)..(25): SEQ ID NO: 7418; WAN024DMB_at; Start 134; Stop 158
tggcttctggaatggtcttcttgaa

SEQ ID NO: 163426 - DNA, 25 bp, Artificial
  probe
  misc_feature (1)..(25): SEQ ID NO: 7418; WAN024DMB_at; Start 60; Stop 84
tagtgacaatggcaaacagatttgg

SEQ ID NO: 163427 - DNA, 25 bp, Artificial
  probe
  misc_feature (1)..(25): SEQ ID NO: 7418; WAN024DMB_at; Start 23; Stop 47
caagagctgttaagagcgtgatggt

SEQ ID NO: 163428 - DNA, 25 bp, Artificial
  probe
  misc_feature (1)..(25): SEQ ID NO: 7418; WAN024DMB_at; Start 171; Stop 195
caagatgatgttaaatggtgagaga

SEQ ID NO: 163429 - DNA, 25 bp, Artificial
  probe
  misc_feature (1)..(25): SEQ ID NO: 7418; WAN024DMB_at; Start 116; Stop 140
tacgagccgattctagaatggcttc

SEQ ID NO: 163430 - DNA, 25 bp, Artificial
  probe
  misc_feature (1)..(25): SEQ ID NO: 7418; WAN024DMB_at; Start 78; Stop 102
gatttggaagaaaatccgggcctca

SEQ ID NO: 163431 - DNA, 25 bp, Artificial
  probe
  misc_feature (1)..(25): SEQ ID NO: 7418; WAN024DMB_at; Start 37; Stop 61
agcgtgatggttgcgatacctggta

SEQ ID NO: 163432 - DNA, 25 bp, Artificial
  probe
  misc_feature (1)..(25): SEQ ID NO: 7418; WAN024DMB_at; Start 186; Stop 210
tggtgagagaagcattggaacaatc

SEQ ID NO: 163433 - DNA, 25 bp, Artificial
  probe
  misc_feature (1)..(25): SEQ ID NO: 7418; WAN024DMB_at; Start 213; Stop 237
ggcccaaacagtgtcaccaagctga

SEQ ID NO: 163434 - DNA, 25 bp, Artificial
  probe
  misc_feature (1)..(25): SEQ ID NO: 7418; WAN024DMB_at; Start 206; Stop 230
caatcaaggcccaaacagtgtcacc

SEQ ID NO: 163435 - DNA, 25 bp, Artificial
  probe
  misc_feature (1)..(25): SEQ ID NO: 7418; WAN024DMB_at; Start 2; Stop 26
tgaaccagtcattccagaaaccaag

SEQ ID NO: 163436 - DNA, 25 bp, Artificial
  probe
  misc_feature (1)..(25): SEQ ID NO: 7418; WAN024DMB_at; Start 100; Stop 124
tcactggcaccatcgatacgagccg

SEQ ID NO: 163437 - DNA, 25 bp, Artificial
  probe
  misc_feature (1)..(25): SEQ ID NO: 7418; WAN024DMB_at; Start 42; Stop 66
gatggttgcgatacctggtagtgac

SEQ ID NO: 163438 - DNA, 25 bp, Artificial
  probe
  misc_feature (1)..(25): SEQ ID NO: 7418; WAN024DMB_at; Start 149; Stop 173
tcttcttgaagaaggaacgcatcaa

SEQ ID NO: 163439 - DNA, 25 bp, Artificial
  probe
  misc_feature (1)..(25): SEQ ID NO: 7418; WAN024DMB_at; Start 76; Stop 100
cagatttggaagaaaatccgggcct

SEQ ID NO: 163440 - DNA, 25 bp, Artificial
  probe
  misc_feature (1)..(25): SEQ ID NO: 7418; WAN024DMB_at; Start 18; Stop 42
gaaaccaagagctgttaagagcgtg

SEQ ID NO: 163441 - DNA, 25 bp, Artificial
  probe
  misc_feature (1)..(25): SEQ ID NO: 7418; WAN024DMB_at; Start 121; Stop 145
gccgattctagaatggcttctggaa

SEQ ID NO: 163442 - DNA, 25 bp, Artificial
  probe
  misc_feature (1)..(25): SEQ ID NO: 7418; WAN024DMB_at; Start 112; Stop 136
tcgatacgagccgattctagaatgg

SEQ ID NO: 163443 - DNA, 25 bp, Artificial
  probe
  misc_feature (1)..(25): SEQ ID NO: 7418; WAN024DMB_at; Start 209; Stop 233
tcaaggcccaaacagtgtcaccaag

SEQ ID NO: 163444 - DNA, 25 bp, Artificial
  probe
  misc_feature (1)..(25): SEQ ID NO: 7418; WAN024DMB_at; Start 53; Stop 77
tacctggtagtgacaatggcaaaca

SEQ ID NO: 163445 - DNA, 25 bp, Artificial
  probe
  misc_feature (1)..(25): SEQ ID NO: 7418; WAN024DMB_at; Start 88; Stop 112
aaaatccgggcctcactggcaccat

SEQ ID NO: 163446 - DNA, 25 bp, Artificial
  probe
  misc_feature (1)..(25): SEQ ID NO: 7418; WAN024DMB_at; Start 104; Stop 128
tggcaccatcgatacgagccgattc

SEQ ID NO: 163447 - DNA, 25 bp, Artificial
  probe
  misc_feature (1)..(25): SEQ ID NO: 7418; WAN024DMB_at; Start 14; Stop 38
tccagaaaccaagagctgttaagag

SEQ ID NO: 163448 - DNA, 25 bp, Artificial
  probe
  misc_feature (1)..(25): SEQ ID NO: 2375; WAN024DMC_at; Start 322; Stop 346
tatgcctacgctatttcacggacaa

SEQ ID NO: 163449 - DNA, 25 bp, Artificial
  probe
  misc_feature (1)..(25): SEQ ID NO: 2375; WAN024DMC_at; Start 588; Stop 612
gattttcttccaaatctgtttgcca

SEQ ID NO: 163450 - DNA, 25 bp, Artificial
  probe
  misc_feature (1)..(25): SEQ ID NO: 2375; WAN024DMC_at; Start 748; Stop 772
aatatggactacattgccaaagcgg

SEQ ID NO: 163451 - DNA, 25 bp, Artificial
  probe
  misc_feature (1)..(25): SEQ ID NO: 2375; WAN024DMC_at; Start 178; Stop 202
ggctatagcttcttcccatcccaat

SEQ ID NO: 163452 - DNA, 25 bp, Artificial
  probe
  misc_feature (1)..(25): SEQ ID NO: 2375; WAN024DMC_at; Start 757; Stop 781
tacattgccaaagcggtcggcttga

SEQ ID NO: 163453 - DNA, 25 bp, Artificial
  probe
  misc_feature (1)..(25): SEQ ID NO: 2375; WAN024DMC_at; Start 822; Stop 846
tatggccatggttgtggttgcaacc

SEQ ID NO: 163454 - DNA, 25 bp, Artificial
  probe
  misc_feature (1)..(25): SEQ ID NO: 2375; WAN024DMC_at; Start 662; Stop 686
tctggaatgactggttcaacgccct

SEQ ID NO: 163455 - DNA, 25 bp, Artificial
  probe
  misc_feature (1)..(25): SEQ ID NO: 2375; WAN024DMC_at; Start 240; Stop 264
ggataaaatcctacaagccctcttc

SEQ ID NO: 163456 - DNA, 25 bp, Artificial
  probe
  misc_feature (1)..(25): SEQ ID NO: 2375; WAN024DMC_at; Start 786; Stop 810
tcaactgggagttgctctaccgaaa

SEQ ID NO: 163457 - DNA, 25 bp, Artificial
  probe
  misc_feature (1)..(25): SEQ ID NO: 2375; WAN024DMC_at; Start 338; Stop 362
cacggacaacctttaagtatcgcag

SEQ ID NO: 163458 - DNA, 25 bp, Artificial
  probe
  misc_feature (1)..(25): SEQ ID NO: 2375; WAN024DMC_at; Start 193; Stop 217
ccatcccaatttggcttagacggtt

SEQ ID NO: 163459 - DNA, 25 bp, Artificial
  probe
  misc_feature (1)..(25): SEQ ID NO: 2375; WAN024DMC_at; Start 712; Stop 736
tatccattgcaatatttgctcatgc

SEQ ID NO: 163460 - DNA, 25 bp, Artificial
  probe
  misc_feature (1)..(25): SEQ ID NO: 2375; WAN024DMC_at; Start 410; Stop 434
tggtaccaggttatatcatggtgac

SEQ ID NO: 163461 - DNA, 25 bp, Artificial
  probe
  misc_feature (1)..(25): SEQ ID NO: 2375; WAN024DMC_at; Start 393; Stop 417
gttgttcaacgctggtttggtacca

SEQ ID NO: 163462 - DNA, 25 bp, Artificial
  probe
  misc_feature (1)..(25): SEQ ID NO: 2375; WAN024DMC_at; Start 807; Stop 831
gaaagaaacaggtcgtatggccatg

SEQ ID NO: 163463 - DNA, 25 bp, Artificial
  probe
  misc_feature (1)..(25): SEQ ID NO: 2375; WAN024DMC_at; Start 892; Stop 916
aaaggtttgactatcggtggtgtga

SEQ ID NO: 163464 - DNA, 25 bp, Artificial
  probe
  misc_feature (1)..(25): SEQ ID NO: 2375; WAN024DMC_at; Start 798; Stop 822
tgctctaccgaaagaaacaggtcgt

SEQ ID NO: 163465 - DNA, 25 bp, Artificial
  probe
  misc_feature (1)..(25): SEQ ID NO: 2375; WAN024DMC_at; Start 604; Stop 628
tgtttgccattgtcactaccaggta

SEQ ID NO: 163466 - DNA, 25 bp, Artificial
  probe
  misc_feature (1)..(25): SEQ ID NO: 2375; WAN024DMC_at; Start 837; Stop 861
ggttgcaacccttccaatcgcgatt

SEQ ID NO: 163467 - DNA, 25 bp, Artificial
  probe
  misc_feature (1)..(25): SEQ ID NO: 2375; WAN024DMC_at; Start 620; Stop 644
taccaggtatcgcaaccatcacgct

SEQ ID NO: 163468 - DNA, 25 bp, Artificial
  probe
  misc_feature (1)..(25): SEQ ID NO: 2375; WAN024DMC_at; Start 135; Stop 159
tatcattatttcagtgacagacgag

SEQ ID NO: 163469 - DNA, 25 bp, Artificial
  probe
  misc_feature (1)..(25): SEQ ID NO: 2375; WAN024DMC_at; Start 509; Stop 533
tgatgcgttccttcttcaagaagac

SEQ ID NO: 163470 - DNA, 25 bp, Artificial
  probe
  misc_feature (1)..(25): SEQ ID NO: 2375; WAN024DMC_at; Start 145; Stop 169
tcagtgacagacgagaaaagcctcc

SEQ ID NO: 163471 - DNA, 25 bp, Artificial
  probe
  misc_feature (1)..(25): SEQ ID NO: 2375; WAN024DMC_at; Start 157; Stop 181
gagaaaagcctcctccaatacggct

SEQ ID NO: 163472 - DNA, 25 bp, Artificial
  probe
  misc_feature (1)..(25): SEQ ID NO: 2375; WAN024DMC_at; Start 36; Stop 60
taatgtcggcattcactccttcagt

SEQ ID NO: 163473 - DNA, 25 bp, Artificial
  probe
  misc_feature (1)..(25): SEQ ID NO: 2375; WAN024DMC_at; Start 84; Stop 108
tatcatttcgggtttgattgccctc

SEQ ID NO: 163474 - DNA, 25 bp, Artificial
  probe
  misc_feature (1)..(25): SEQ ID NO: 2375; WAN024DMC_at; Start 255; Stop 279
agccctcttcatctctgtctttgta

SEQ ID NO: 163475 - DNA, 25 bp, Artificial
  probe
  misc_feature (1)..(25): SEQ ID NO: 2375; WAN024DMC_at; Start 99; Stop 123
gattgccctctcttgtatcctacct

SEQ ID NO: 163476 - DNA, 25 bp, Artificial
  probe
  misc_feature (1)..(25): SEQ ID NO: 2375; WAN024DMC_at; Start 728; Stop 752
tgctcatgcaaatccaacaaaatat

SEQ ID NO: 163477 - DNA, 25 bp, Artificial
  probe
  misc_feature (1)..(25): SEQ ID NO: 2375; WAN024DMC_at; Start 307; Stop 331
tttatcacaacaacctatgcctacg

SEQ ID NO: 163478 - DNA, 25 bp, Artificial
  probe
  misc_feature (1)..(25): SEQ ID NO: 2375; WAN024DMC_at; Start 53; Stop 77
ccttcagtaagaaagcagatatctt

SEQ ID NO: 163479 - DNA, 25 bp, Artificial
  probe
  misc_feature (1)..(25): SEQ ID NO: 2375; WAN024DMC_at; Start 649; Stop 673
acagctcttggtttctggaatgact

SEQ ID NO: 163480 - DNA, 25 bp, Artificial
  probe
  misc_feature (1)..(25): SEQ ID NO: 2375; WAN024DMC_at; Start 553; Stop 577
gaatcggctcgtatcgatggtgcca

SEQ ID NO: 163481 - DNA, 25 bp, Artificial
  probe
  misc_feature (1)..(25): SEQ ID NO: 2375; WAN024DMC_at; Start 209; Stop 233
tagacggttttgagtttttggcaca

SEQ ID NO: 163482 - DNA, 25 bp, Artificial
  probe
  misc_feature (1)..(25): SEQ ID NO: 7697; WAN024DMD_s_at; Start 20; Stop 44
cattgactcgcttgccagaacgcga

SEQ ID NO: 163483 - DNA, 25 bp, Artificial
  probe
  misc_feature (1)..(25): SEQ ID NO: 7697; WAN024DMD_s_at; Start 16; Stop 40
ggttcattgactcgcttgccagaac

SEQ ID NO: 163484 - DNA, 25 bp, Artificial
  probe
  misc_feature (1)..(25): SEQ ID NO: 7697; WAN024DMD_s_at; Start 43; Stop 67
gacgaaatcaacccagaaatcaacg

SEQ ID NO: 163485 - DNA, 25 bp, Artificial
  probe
  misc_feature (1)..(25): SEQ ID NO: 7697; WAN024DMD_s_at; Start 18; Stop 42
ttcattgactcgcttgccagaacgc

SEQ ID NO: 163486 - DNA, 25 bp, Artificial
  probe
  misc_feature (1)..(25): SEQ ID NO: 7697; WAN024DMD_s_at; Start 48; Stop 72
aatcaacccagaaatcaacgaagca

SEQ ID NO: 163487 - DNA, 25 bp, Artificial
  probe
  misc_feature (1)..(25): SEQ ID NO: 7697; WAN024DMD_s_at; Start 42; Stop 66
cgacgaaatcaacccagaaatcaac

SEQ ID NO: 163488 - DNA, 25 bp, Artificial
  probe
  misc_feature (1)..(25): SEQ ID NO: 7697; WAN024DMD_s_at; Start 41; Stop 65
gcgacgaaatcaacccagaaatcaa

SEQ ID NO: 163489 - DNA, 25 bp, Artificial
  probe
  misc_feature (1)..(25): SEQ ID NO: 7697; WAN024DMD_s_at; Start 35; Stop 59
cagaacgcgacgaaatcaacccaga

SEQ ID NO: 163490 - DNA, 25 bp, Artificial
  probe
  misc_feature (1)..(25): SEQ ID NO: 7697; WAN024DMD_s_at; Start 31; Stop 55
ttgccagaacgcgacgaaatcaacc

SEQ ID NO: 163491 - DNA, 25 bp, Artificial
  probe
  misc_feature (1)..(25): SEQ ID NO: 7697; WAN024DMD_s_at; Start 45; Stop 69
cgaaatcaacccagaaatcaacgaa

SEQ ID NO: 163492 - DNA, 25 bp, Artificial
  probe
  misc_feature (1)..(25): SEQ ID NO: 7697; WAN024DMD_s_at; Start 30; Stop 54
cttgccagaacgcgacgaaatcaac

SEQ ID NO: 163493 - DNA, 25 bp, Artificial
  probe
  misc_feature (1)..(25): SEQ ID NO: 7697; WAN024DMD_s_at; Start 26; Stop 50
ctcgcttgccagaacgcgacgaaat

SEQ ID NO: 163494 - DNA, 25 bp, Artificial
  probe
  misc_feature (1)..(25): SEQ ID NO: 7697; WAN024DMD_s_at; Start 28; Stop 52
cgcttgccagaacgcgacgaaatca

SEQ ID NO: 163495 - DNA, 25 bp, Artificial
  probe
  misc_feature (1)..(25): SEQ ID NO: 7697; WAN024DMD_s_at; Start 24; Stop 48
gactcgcttgccagaacgcgacgaa

SEQ ID NO: 163496 - DNA, 25 bp, Artificial
  probe
  misc_feature (1)..(25): SEQ ID NO: 7697; WAN024DMD_s_at; Start 19; Stop 43
tcattgactcgcttgccagaacgcg

SEQ ID NO: 163497 - DNA, 25 bp, Artificial
  probe
  misc_feature (1)..(25): SEQ ID NO: 7697; WAN024DMD_s_at; Start 38; Stop 62
aacgcgacgaaatcaacccagaaat

SEQ ID NO: 163498 - DNA, 25 bp, Artificial
  probe
  misc_feature (1)..(25): SEQ ID NO: 7697; WAN024DMD_s_at; Start 21; Stop 45
attgactcgcttgccagaacgcgac

SEQ ID NO: 163499 - DNA, 25 bp, Artificial
  probe
  misc_feature (1)..(25): SEQ ID NO: 7697; WAN024DMD_s_at; Start 36; Stop 60
agaacgcgacgaaatcaacccagaa

SEQ ID NO: 163500 - DNA, 25 bp, Artificial
  probe
  misc_feature (1)..(25): SEQ ID NO: 7697; WAN024DMD_s_at; Start 46; Stop 70
gaaatcaacccagaaatcaacgaag

SEQ ID NO: 163501 - DNA, 25 bp, Artificial
  probe
  misc_feature (1)..(25): SEQ ID NO: 7697; WAN024DMD_s_at; Start 40; Stop 64
cgcgacgaaatcaacccagaaatca

SEQ ID NO: 163502 - DNA, 25 bp, Artificial
  probe
  misc_feature (1)..(25): SEQ ID NO: 7697; WAN024DMD_s_at; Start 27; Stop 51
tcgcttgccagaacgcgacgaaatc

SEQ ID NO: 163503 - DNA, 25 bp, Artificial
  probe
  misc_feature (1)..(25): SEQ ID NO: 7697; WAN024DMD_s_at; Start 37; Stop 61
gaacgcgacgaaatcaacccagaaa

SEQ ID NO: 163504 - DNA, 25 bp, Artificial
  probe
  misc_feature (1)..(25): SEQ ID NO: 7697; WAN024DMD_s_at; Start 23; Stop 47
tgactcgcttgccagaacgcgacga

SEQ ID NO: 163505 - DNA, 25 bp, Artificial
  probe
  misc_feature (1)..(25): SEQ ID NO: 7697; WAN024DMD_s_at; Start 29; Stop 53
gcttgccagaacgcgacgaaatcaa

SEQ ID NO: 163506 - DNA, 25 bp, Artificial
  probe
  misc_feature (1)..(25): SEQ ID NO: 7697; WAN024DMD_s_at; Start 47; Stop 71
aaatcaacccagaaatcaacgaagc

SEQ ID NO: 163507 - DNA, 25 bp, Artificial
  probe
  misc_feature (1)..(25): SEQ ID NO: 7697; WAN024DMD_s_at; Start 34; Stop 58
ccagaacgcgacgaaatcaacccag

SEQ ID NO: 163508 - DNA, 25 bp, Artificial
  probe
  misc_feature (1)..(25): SEQ ID NO: 7697; WAN024DMD_s_at; Start 33; Stop 57
gccagaacgcgacgaaatcaaccca

SEQ ID NO: 163509 - DNA, 25 bp, Artificial
  probe
  misc_feature (1)..(25): SEQ ID NO: 7697; WAN024DMD_s_at; Start 17; Stop 41
gttcattgactcgcttgccagaacg

SEQ ID NO: 163510 - DNA, 25 bp, Artificial
  probe
  misc_feature (1)..(25): SEQ ID NO: 7697; WAN024DMD_s_at; Start 39; Stop 63
acgcgacgaaatcaacccagaaatc

SEQ ID NO: 163511 - DNA, 25 bp, Artificial
  probe
  misc_feature (1)..(25): SEQ ID NO: 7697; WAN024DMD_s_at; Start 25; Stop 49
actcgcttgccagaacgcgacgaaa

SEQ ID NO: 163512 - DNA, 25 bp, Artificial
  probe
  misc_feature (1)..(25): SEQ ID NO: 7697; WAN024DMD_s_at; Start 32; Stop 56
tgccagaacgcgacgaaatcaaccc

SEQ ID NO: 163513 - DNA, 25 bp, Artificial
  probe
  misc_feature (1)..(25): SEQ ID NO: 7697; WAN024DMD_s_at; Start 22; Stop 46
ttgactcgcttgccagaacgcgacg

SEQ ID NO: 163514 - DNA, 25 bp, Artificial
  probe
  misc_feature (1)..(25): SEQ ID NO: 7697; WAN024DMD_s_at; Start 44; Stop 68
acgaaatcaacccagaaatcaacga

SEQ ID NO: 163515 - DNA, 25 bp, Artificial
  probe
  misc_feature (1)..(25): SEQ ID NO: 2854; WAN024DME_at; Start 124; Stop 148
tctaaattgtcagaatacggtttgc

SEQ ID NO: 163516 - DNA, 25 bp, Artificial
  probe
  misc_feature (1)..(25): SEQ ID NO: 2854; WAN024DME_at; Start 370; Stop 394
gggaaacgcgttgatatcccatcat

SEQ ID NO: 163517 - DNA, 25 bp, Artificial
  probe
  misc_feature (1)..(25): SEQ ID NO: 2854; WAN024DME_at; Start 176; Stop 200
tcacttacggtgtaggtgaaaaaca

SEQ ID NO: 163518 - DNA, 25 bp, Artificial
  probe
  misc_feature (1)..(25): SEQ ID NO: 2854; WAN024DME_at; Start 585; Stop 609
cgttgaattctacaacaaaatgttg

SEQ ID NO: 163519 - DNA, 25 bp, Artificial
  probe
  misc_feature (1)..(25): SEQ ID NO: 2854; WAN024DME_at; Start 490; Stop 514
gcattcgtatcattcgacgctgaaa

SEQ ID NO: 163520 - DNA, 25 bp, Artificial
  probe
  misc_feature (1)..(25): SEQ ID NO: 2854; WAN024DME_at; Start 343; Stop 367
gtaaaccacggtcacatccttgttg

SEQ ID NO: 163521 - DNA, 25 bp, Artificial
  probe
  misc_feature (1)..(25): SEQ ID NO: 2854; WAN024DME_at; Start 315; Stop 339
gactactcgtcgtcaagctcgtcaa

SEQ ID NO: 163522 - DNA, 25 bp, Artificial
  probe
  misc_feature (1)..(25): SEQ ID NO: 2854; WAN024DME_at; Start 17; Stop 41
gaccatcttggaaacaagctcgtcg

SEQ ID NO: 163523 - DNA, 25 bp, Artificial
  probe
  misc_feature (1)..(25): SEQ ID NO: 2854; WAN024DME_at; Start 59; Stop 83
caggtacaggtaaagaattggcacg

SEQ ID NO: 163524 - DNA, 25 bp, Artificial
  probe
  misc_feature (1)..(25): SEQ ID NO: 2854; WAN024DME_at; Start 113; Stop 137
caaacaaccgttctaaattgtcaga

SEQ ID NO: 163525 - DNA, 25 bp, Artificial
  probe
  misc_feature (1)..(25): SEQ ID NO: 2854; WAN024DME_at; Start 477; Stop 501
tcttggacgtccagcattcgtatca

SEQ ID NO: 163526 - DNA, 25 bp, Artificial
  probe
  misc_feature (1)..(25): SEQ ID NO: 2854; WAN024DME_at; Start 292; Stop 316
gttgtttaccgtcttggtctcgcga

SEQ ID NO: 163527 - DNA, 25 bp, Artificial
  probe
  misc_feature (1)..(25): SEQ ID NO: 2854; WAN024DME_at; Start 565; Stop 589
gaaatcaacgaagcacttgtcgttg

SEQ ID NO: 163528 - DNA, 25 bp, Artificial
  probe
  misc_feature (1)..(25): SEQ ID NO: 2854; WAN024DME_at; Start 303; Stop 327
tcttggtctcgcgactactcgtcgt

SEQ ID NO: 163529 - DNA, 25 bp, Artificial
  probe
  misc_feature (1)..(25): SEQ ID NO: 2854; WAN024DME_at; Start 233; Stop 257
tcaaaggcggaatcctaggtttcaa

SEQ ID NO: 163530 - DNA, 25 bp, Artificial
  probe
  misc_feature (1)..(25): SEQ ID NO: 2854; WAN024DME_at; Start 574; Stop 598
gaagcacttgtcgttgaattctaca

SEQ ID NO: 163531 - DNA, 25 bp, Artificial
  probe
  misc_feature (1)..(25): SEQ ID NO: 2854; WAN024DME_at; Start 396; Stop 420
ccgcgtaactccaggtcaagtgatc

SEQ ID NO: 163532 - DNA, 25 bp, Artificial
  probe
  misc_feature (1)..(25): SEQ ID NO: 2854; WAN024DME_at; Start 241; Stop 265
ggaatcctaggtttcaactttatgc

SEQ ID NO: 163533 - DNA, 25 bp, Artificial
  probe
  misc_feature (1)..(25): SEQ ID NO: 2854; WAN024DME_at; Start 73; Stop 97
gaattggcacgtcgtaactacgtac

SEQ ID NO: 163534 - DNA, 25 bp, Artificial
  probe
  misc_feature (1)..(25): SEQ ID NO: 2854; WAN024DME_at; Start 218; Stop 242
tacaagctacaaaaatcaaaggcgg

SEQ ID NO: 163535 - DNA, 25 bp, Artificial
  probe
  misc_feature (1)..(25): SEQ ID NO: 2854; WAN024DME_at; Start 146; Stop 170
tgcaattggctgaaaaacaaaaact

SEQ ID NO: 163536 - DNA, 25 bp, Artificial
  probe
  misc_feature (1)..(25): SEQ ID NO: 2854; WAN024DME_at; Start 254; Stop 278
tcaactttatgcttcttttggaacg

SEQ ID NO: 163537 - DNA, 25 bp, Artificial
  probe
  misc_feature (1)..(25): SEQ ID NO: 2854; WAN024DME_at; Start 263; Stop 287
tgcttcttttggaacgtcgtttgga

SEQ ID NO: 163538 - DNA, 25 bp, Artificial
  probe
  misc_feature (1)..(25): SEQ ID NO: 2854; WAN024DME_at; Start 169; Stop 193
cttcgtttcacttacggtgtaggtg

SEQ ID NO: 163539 - DNA, 25 bp, Artificial
  probe
  misc_feature (1)..(25): SEQ ID NO: 2854; WAN024DME_at; Start 2; Stop 26
tgtcacgttatacaggaccatcttg

SEQ ID NO: 163540 - DNA, 25 bp, Artificial
  probe
  misc_feature (1)..(25): SEQ ID NO: 2854; WAN024DME_at; Start 409; Stop 433
ggtcaagtgatctcagttcgtgaaa

SEQ ID NO: 163541 - DNA, 25 bp, Artificial
  probe
  misc_feature (1)..(25): SEQ ID NO: 2854; WAN024DME_at; Start 87; Stop 111
taactacgtaccaggacaacacgga

SEQ ID NO: 163542 - DNA, 25 bp, Artificial
  probe
  misc_feature (1)..(25): SEQ ID NO: 2854; WAN024DME_at; Start 134; Stop 158
cagaatacggtttgcaattggctga

SEQ ID NO: 163543 - DNA, 25 bp, Artificial
  probe
  misc_feature (1)..(25): SEQ ID NO: 2854; WAN024DME_at; Start 444; Stop 468
agttccagcaatccttgaagcagta

SEQ ID NO: 163544 - DNA, 25 bp, Artificial
  probe
  misc_feature (1)..(25): SEQ ID NO: 2854; WAN024DME_at; Start 436; Stop 460
tcattgaaagttccagcaatccttg

SEQ ID NO: 163545 - DNA, 25 bp, Artificial
  probe
  misc_feature (1)..(25): SEQ ID NO: 2854; WAN024DME_at; Start 355; Stop 379
cacatccttgttgacgggaaacgcg

SEQ ID NO: 163546 - DNA, 25 bp, Artificial
  probe
  misc_feature (1)..(25): SEQ ID NO: 2854; WAN024DME_at; Start 95; Stop 119
taccaggacaacacggaccaaacaa

SEQ ID NO: 163547 - DNA, 25 bp, Artificial
  probe
  misc_feature (1)..(25): SEQ ID NO: 2854; WAN024DME_at; Start 44; Stop 68
ttggcctttcacttacaggtacagg

SEQ ID NO: 163548 - DNA, 25 bp, Artificial
  probe
  misc_feature (1)..(25): SEQ ID NO: 2854; WAN024DME_at; Start 199; Stop 223
caattccgtaacttgttcgtacaag

SEQ ID NO: 163549 - DNA, 25 bp, Artificial
  probe
  misc_feature (1)..(25): SEQ ID NO: 4373; WAN024DMF_at; Start 97; Stop 121
attgtgacgcaactgacagcagtga

SEQ ID NO: 163550 - DNA, 25 bp, Artificial
  probe
  misc_feature (1)..(25): SEQ ID NO: 4373; WAN024DMF_at; Start 156; Stop 180
taccgaaaatcttactgaatgtatc

SEQ ID NO: 163551 - DNA, 25 bp, Artificial
  probe
  misc_feature (1)..(25): SEQ ID NO: 4373; WAN024DMF_at; Start 73; Stop 97
gaaggagatcgtgactgtgctgata

SEQ ID NO: 163552 - DNA, 25 bp, Artificial
  probe
  misc_feature (1)..(25): SEQ ID NO: 4373; WAN024DMF_at; Start 27; Stop 51
tttgaaacgttcagagggccagttg

SEQ ID NO: 163553 - DNA, 25 bp, Artificial
  probe
  misc_feature (1)..(25): SEQ ID NO: 4373; WAN024DMF_at; Start 68; Stop 92
tgattgaaggagatcgtgactgtgc

SEQ ID NO: 163554 - DNA, 25 bp, Artificial
  probe
  misc_feature (1)..(25): SEQ ID NO: 4373; WAN024DMF_at; Start 138; Stop 162
cgtgattgagatgataattaccgaa

SEQ ID NO: 163555 - DNA, 25 bp, Artificial
  probe
  misc_feature (1)..(25): SEQ ID NO: 4373; WAN024DMF_at; Start 2; Stop 26
tgacaaattcaaagtatattacttg

SEQ ID NO: 163556 - DNA, 25 bp, Artificial
  probe
  misc_feature (1)..(25): SEQ ID NO: 4373; WAN024DMF_at; Start 85; Stop 109
gactgtgctgatattgtgacgcaac

SEQ ID NO: 163557 - DNA, 25 bp, Artificial
  probe
  misc_feature (1)..(25): SEQ ID NO: 4373; WAN024DMF_at; Start 228; Stop 252
ggctatccgatacttgattaaacgg

SEQ ID NO: 163558 - DNA, 25 bp, Artificial
  probe
  misc_feature (1)..(25): SEQ ID NO: 4373; WAN024DMF_at; Start 90; Stop 114
tgctgatattgtgacgcaactgaca

SEQ ID NO: 163559 - DNA, 25 bp, Artificial
  probe
  misc_feature (1)..(25): SEQ ID NO: 4373; WAN024DMF_at; Start 71; Stop 95
ttgaaggagatcgtgactgtgctga

SEQ ID NO: 163560 - DNA, 25 bp, Artificial
  probe
  misc_feature (1)..(25): SEQ ID NO: 4373; WAN024DMF_at; Start 202; Stop 226
gaagctcaaaaggaacgcctagaaa

SEQ ID NO: 163561 - DNA, 25 bp, Artificial
  probe
  misc_feature (1)..(25): SEQ ID NO: 4373; WAN024DMF_at; Start 204; Stop 228
agctcaaaaggaacgcctagaaaag

SEQ ID NO: 163562 - DNA, 25 bp, Artificial
  probe
  misc_feature (1)..(25): SEQ ID NO: 4373; WAN024DMF_at; Start 135; Stop 159
gcgcgtgattgagatgataattacc

SEQ ID NO: 163563 - DNA, 25 bp, Artificial
  probe
  misc_feature (1)..(25): SEQ ID NO: 4373; WAN024DMF_at; Start 214; Stop 238
gaacgcctagaaaaggctatccgat

SEQ ID NO: 163564 - DNA, 25 bp, Artificial
  probe
  misc_feature (1)..(25): SEQ ID NO: 4373; WAN024DMF_at; Start 61; Stop 85
caaaagatgattgaaggagatcgtg

SEQ ID NO: 163565 - DNA, 25 bp, Artificial
  probe
  misc_feature (1)..(25): SEQ ID NO: 4373; WAN024DMF_at; Start 79; Stop 103
gatcgtgactgtgctgatattgtga

SEQ ID NO: 163566 - DNA, 25 bp, Artificial
  probe
  misc_feature (1)..(25): SEQ ID NO: 4373; WAN024DMF_at; Start 164; Stop 188
atcttactgaatgtatcaatcagcc

SEQ ID NO: 163567 - DNA, 25 bp, Artificial
  probe
  misc_feature (1)..(25): SEQ ID NO: 4373; WAN024DMF_at; Start 123; Stop 147
atctagtgtagagcgcgtgattgag

SEQ ID NO: 163568 - DNA, 25 bp, Artificial
  probe
  misc_feature (1)..(25): SEQ ID NO: 4373; WAN024DMF_at; Start 219; Stop 243
cctagaaaaggctatccgatacttg

SEQ ID NO: 163569 - DNA, 25 bp, Artificial
  probe
  misc_feature (1)..(25): SEQ ID NO: 4373; WAN024DMF_at; Start 221; Stop 245
tagaaaaggctatccgatacttgat

SEQ ID NO: 163570 - DNA, 25 bp, Artificial
  probe
  misc_feature (1)..(25): SEQ ID NO: 4373; WAN024DMF_at; Start 23; Stop 47
cttgtttgaaacgttcagagggcca

SEQ ID NO: 163571 - DNA, 25 bp, Artificial
  probe
  misc_feature (1)..(25): SEQ ID NO: 4373; WAN024DMF_at; Start 94; Stop 118
gatattgtgacgcaactgacagcag

SEQ ID NO: 163572 - DNA, 25 bp, Artificial
  probe
  misc_feature (1)..(25): SEQ ID NO: 4373; WAN024DMF_at; Start 199; Stop 223
tctgaagctcaaaaggaacgcctag

SEQ ID NO: 163573 - DNA, 25 bp, Artificial
  probe
  misc_feature (1)..(25): SEQ ID NO: 4373; WAN024DMF_at; Start 21; Stop 45
tacttgtttgaaacgttcagagggc

SEQ ID NO: 163574 - DNA, 25 bp, Artificial
  probe
  misc_feature (1)..(25): SEQ ID NO: 4373; WAN024DMF_at; Start 196; Stop 220
gattctgaagctcaaaaggaacgcc

SEQ ID NO: 163575 - DNA, 25 bp, Artificial
  probe
  misc_feature (1)..(25): SEQ ID NO: 4373; WAN024DMF_at; Start 193; Stop 217
gatgattctgaagctcaaaaggaac

SEQ ID NO: 163576 - DNA, 25 bp, Artificial
  probe
  misc_feature (1)..(25): SEQ ID NO: 4373; WAN024DMF_at; Start 190; Stop 214
ctagatgattctgaagctcaaaagg

SEQ ID NO: 163577 - DNA, 25 bp, Artificial
  probe
  misc_feature (1)..(25): SEQ ID NO: 4373; WAN024DMF_at; Start 96; Stop 120
tattgtgacgcaactgacagcagtg

SEQ ID NO: 163578 - DNA, 25 bp, Artificial
  probe
  misc_feature (1)..(25): SEQ ID NO: 4373; WAN024DMF_at; Start 53; Stop 77
gtgggattcaaaagatgattgaagg

SEQ ID NO: 163579 - DNA, 25 bp, Artificial
  probe
  misc_feature (1)..(25): SEQ ID NO: 4373; WAN024DMF_at; Start 129; Stop 153
tgtagagcgcgtgattgagatgata

SEQ ID NO: 163580 - DNA, 25 bp, Artificial
  probe
  misc_feature (1)..(25): SEQ ID NO: 4373; WAN024DMF_at; Start 233; Stop 257
tccgatacttgattaaacggaaata

SEQ ID NO: 163581 - DNA, 25 bp, Artificial
  probe
  misc_feature (1)..(25): SEQ ID NO: 4373; WAN024DMF_at; Start 150; Stop 174
gataattaccgaaaatcttactgaa

SEQ ID NO: 163582 - DNA, 25 bp, Artificial
  probe
  misc_feature (1)..(25): SEQ ID NO: 4373; WAN024DMF_at; Start 11; Stop 35
caaagtatattacttgtttgaaacg

SEQ ID NO: 163583 - DNA, 25 bp, Artificial
  probe
  misc_feature (1)..(25): SEQ ID NO: 1436; WAN024DMG_at; Start 335; Stop 359
gccgtgctgcagaaagcattgtgaa

SEQ ID NO: 163584 - DNA, 25 bp, Artificial
  probe
  misc_feature (1)..(25): SEQ ID NO: 1436; WAN024DMG_at; Start 289; Stop 313
gaatttatcaatgcgagccttacag

SEQ ID NO: 163585 - DNA, 25 bp, Artificial
  probe
  misc_feature (1)..(25): SEQ ID NO: 1436; WAN024DMG_at; Start 184; Stop 208
tttgcggatcttctcggtgggacac

SEQ ID NO: 163586 - DNA, 25 bp, Artificial
  probe
  misc_feature (1)..(25): SEQ ID NO: 1436; WAN024DMG_at; Start 190; Stop 214
gatcttctcggtgggacaccttgta

SEQ ID NO: 163587 - DNA, 25 bp, Artificial
  probe
  misc_feature (1)..(25): SEQ ID NO: 1436; WAN024DMG_at; Start 384; Stop 408
cgatgatgacgaagatgaataacta

SEQ ID NO: 163588 - DNA, 25 bp, Artificial
  probe
  misc_feature (1)..(25): SEQ ID NO: 1436; WAN024DMG_at; Start 362; Stop 386
ttaatgacctgttagcgggcttcga

SEQ ID NO: 163589 - DNA, 25 bp, Artificial
  probe
  misc_feature (1)..(25): SEQ ID NO: 1436; WAN024DMG_at; Start 293; Stop 317
ttatcaatgcgagccttacaggcgc

SEQ ID NO: 163590 - DNA, 25 bp, Artificial
  probe
  misc_feature (1)..(25): SEQ ID NO: 1436; WAN024DMG_at; Start 255; Stop 279
cctttacgcagggatgaatcttcca

SEQ ID NO: 163591 - DNA, 25 bp, Artificial
  probe
  misc_feature (1)..(25): SEQ ID NO: 1436; WAN024DMG_at; Start 116; Stop 140
aagatggcccagaagaatttactgc

SEQ ID NO: 163592 - DNA, 25 bp, Artificial
  probe
  misc_feature (1)..(25): SEQ ID NO: 1436; WAN024DMG_at; Start 328; Stop 352
tacaagagccgtgctgcagaaagca

SEQ ID NO: 163593 - DNA, 25 bp, Artificial
  probe
  misc_feature (1)..(25): SEQ ID NO: 1436; WAN024DMG_at; Start 140; Stop 164
ctaaatttgaagctgttattgaagg

SEQ ID NO: 163594 - DNA, 25 bp, Artificial
  probe
  misc_feature (1)..(25): SEQ ID NO: 1436; WAN024DMG_at; Start 43; Stop 67
gaggagcttagaggtagcacagaaa

SEQ ID NO: 163595 - DNA, 25 bp, Artificial
  probe
  misc_feature (1)..(25): SEQ ID NO: 1436; WAN024DMG_at; Start 317; Stop 341
cagatgcggactacaagagccgtgc

SEQ ID NO: 163596 - DNA, 25 bp, Artificial
  probe
  misc_feature (1)..(25): SEQ ID NO: 1436; WAN024DMG_at; Start 208; Stop 232
ccttgtaatgtggtgagtcgcttga

SEQ ID NO: 163597 - DNA, 25 bp, Artificial
  probe
  misc_feature (1)..(25): SEQ ID NO: 1436; WAN024DMG_at; Start 221; Stop 245
tgagtcgcttgatcatggaaggtcg

SEQ ID NO: 163598 - DNA, 25 bp, Artificial
  probe
  misc_feature (1)..(25): SEQ ID NO: 1436; WAN024DMG_at; Start 55; Stop 79
ggtagcacagaaatgattatgggcc

SEQ ID NO: 163599 - DNA, 25 bp, Artificial
  probe
  misc_feature (1)..(25): SEQ ID NO: 1436; WAN024DMG_at; Start 309; Stop 333
tacaggcgcagatgcggactacaag

SEQ ID NO: 163600 - DNA, 25 bp, Artificial
  probe
  misc_feature (1)..(25): SEQ ID NO: 1436; WAN024DMG_at; Start 38; Stop 62
tctgtgaggagcttagaggtagcac

SEQ ID NO: 163601 - DNA, 25 bp, Artificial
  probe
  misc_feature (1)..(25): SEQ ID NO: 1436; WAN024DMG_at; Start 28; Stop 52
catggtcgcttctgtgaggagctta

SEQ ID NO: 163602 - DNA, 25 bp, Artificial
  probe
  misc_feature (1)..(25): SEQ ID NO: 1436; WAN024DMG_at; Start 130; Stop 154
gaatttactgctaaatttgaagctg

SEQ ID NO: 163603 - DNA, 25 bp, Artificial
  probe
  misc_feature (1)..(25): SEQ ID NO: 1436; WAN024DMG_at; Start 300; Stop 324
tgcgagccttacaggcgcagatgcg

SEQ ID NO: 163604 - DNA, 25 bp, Artificial
  probe
  misc_feature (1)..(25): SEQ ID NO: 1436; WAN024DMG_at; Start 82; Stop 106
caagacaacatttacacagtagctc

SEQ ID NO: 163605 - DNA, 25 bp, Artificial
  probe
  misc_feature (1)..(25): SEQ ID NO: 1436; WAN024DMG_at; Start 105; Stop 129
tcttcttccagaagatggcccagaa

SEQ ID NO: 163606 - DNA, 25 bp, Artificial
  probe
  misc_feature (1)..(25): SEQ ID NO: 1436; WAN024DMG_at; Start 244; Stop 268
cgtgatattgacctttacgcaggga

SEQ ID NO: 163607 - DNA, 25 bp, Artificial
  probe
  misc_feature (1)..(25): SEQ ID NO: 1436; WAN024DMG_at; Start 371; Stop 395
tgttagcgggcttcgatgatgacga

SEQ ID NO: 163608 - DNA, 25 bp, Artificial
  probe
  misc_feature (1)..(25): SEQ ID NO: 1436; WAN024DMG_at; Start 263; Stop 287
cagggatgaatcttccaatggtgat

SEQ ID NO: 163609 - DNA, 25 bp, Artificial
  probe
  misc_feature (1)..(25): SEQ ID NO: 1436; WAN024DMG_at; Start 3; Stop 27
gactaaatcattaattttggtgagc

SEQ ID NO: 163610 - DNA, 25 bp, Artificial
  probe
  misc_feature (1)..(25): SEQ ID NO: 1436; WAN024DMG_at; Start 195; Stop 219
tctcggtgggacaccttgtaatgtg

SEQ ID NO: 163611 - DNA, 25 bp, Artificial
  probe
  misc_feature (1)..(25): SEQ ID NO: 1436; WAN024DMG_at; Start 274; Stop 298
cttccaatggtgattgaatttatca

SEQ ID NO: 163612 - DNA, 25 bp, Artificial
  probe
  misc_feature (1)..(25): SEQ ID NO: 1436; WAN024DMG_at; Start 94; Stop 118
tacacagtagctcttcttccagaag

SEQ ID NO: 163613 - DNA, 25 bp, Artificial
  probe
  misc_feature (1)..(25): SEQ ID NO: 1436; WAN024DMG_at; Start 13; Stop 37
ttaattttggtgagccatggtcgct

SEQ ID NO: 163614 - DNA, 25 bp, Artificial
  probe
  misc_feature (1)..(25): SEQ ID NO: 1436; WAN024DMG_at; Start 357; Stop 381
gaaagttaatgacctgttagcgggc

SEQ ID NO: 163615 - DNA, 25 bp, Artificial
  probe
  misc_feature (1)..(25): SEQ ID NO: 1436; WAN024DMG_at; Start 341; Stop 365
ctgcagaaagcattgtgaaagttaa

SEQ ID NO: 163616 - DNA, 25 bp, Artificial
  probe
  misc_feature (1)..(25): SEQ ID NO: 1436; WAN024DMG_at; Start 233; Stop 257
tcatggaaggtcgtgatattgacct

SEQ ID NO: 163617 - DNA, 25 bp, Artificial
  probe
  misc_feature (1)..(25): SEQ ID NO: 2412; WAN024DMH_at; Start 471; Stop 495
taatcgtttcaagttagactaccac

SEQ ID NO: 163618 - DNA, 25 bp, Artificial
  probe
  misc_feature (1)..(25): SEQ ID NO: 2412; WAN024DMH_at; Start 651; Stop 675
cagtgaaacttacaaacgatctgat

SEQ ID NO: 163619 - DNA, 25 bp, Artificial
  probe
  misc_feature (1)..(25): SEQ ID NO: 2412; WAN024DMH_at; Start 352; Stop 376
tacaagattgaacgtatccgcgaat

SEQ ID NO: 163620 - DNA, 25 bp, Artificial
  probe
  misc_feature (1)..(25): SEQ ID NO: 2412; WAN024DMH_at; Start 205; Stop 229
tcacgtgcacgcaaacacaagcttg

SEQ ID NO: 163621 - DNA, 25 bp, Artificial
  probe
  misc_feature (1)..(25): SEQ ID NO: 2412; WAN024DMH_at; Start 143; Stop 167
ccttaaacgaccttgccaaagatgg

SEQ ID NO: 163622 - DNA, 25 bp, Artificial
  probe
  misc_feature (1)..(25): SEQ ID NO: 2412; WAN024DMH_at; Start 508; Stop 532
gatgaacactttgaagaaatcaacg

SEQ ID NO: 163623 - DNA, 25 bp, Artificial
  probe
  misc_feature (1)..(25): SEQ ID NO: 2412; WAN024DMH_at; Start 661; Stop 685
tacaaacgatctgattactacaaga

SEQ ID NO: 163624 - DNA, 25 bp, Artificial
  probe
  misc_feature (1)..(25): SEQ ID NO: 2412; WAN024DMH_at; Start 255; Stop 279
caatgctaaagatgataaggtaact

SEQ ID NO: 163625 - DNA, 25 bp, Artificial
  probe
  misc_feature (1)..(25): SEQ ID NO: 2412; WAN024DMH_at; Start 409; Stop 433
tacatcccagaacaatatatcaacg

SEQ ID NO: 163626 - DNA, 25 bp, Artificial
  probe
  misc_feature (1)..(25): SEQ ID NO: 2412; WAN024DMH_at; Start 366; Stop 390
tatccgcgaatcaaacggtgtcgtt

SEQ ID NO: 163627 - DNA, 25 bp, Artificial
  probe
  misc_feature (1)..(25): SEQ ID NO: 2412; WAN024DMH_at; Start 381; Stop 405
cggtgtcgtttatatctaccataca

SEQ ID NO: 163628 - DNA, 25 bp, Artificial
  probe
  misc_feature (1)..(25): SEQ ID NO: 2412; WAN024DMH_at; Start 91; Stop 115
gaagcagaactcatttcaatgtacg

SEQ ID NO: 163629 - DNA, 25 bp, Artificial
  probe
  misc_feature (1)..(25): SEQ ID NO: 2412; WAN024DMH_at; Start 3; Stop 27
ggcaattcccaaatatcaatacata

SEQ ID NO: 163630 - DNA, 25 bp, Artificial
  probe
  misc_feature (1)..(25): SEQ ID NO: 2412; WAN024DMH_at; Start 112; Stop 136
tacgatgtcagctctatcacagttg

SEQ ID NO: 163631 - DNA, 25 bp, Artificial
  probe
  misc_feature (1)..(25): SEQ ID NO: 2412; WAN024DMH_at; Start 171; Stop 195
tattgtccgccaacaaggaaaagga

SEQ ID NO: 163632 - DNA, 25 bp, Artificial
  probe
  misc_feature (1)..(25): SEQ ID NO: 2412; WAN024DMH_at; Start 523; Stop 547
gaaatcaacgaaatagtctttccaa

SEQ ID NO: 163633 - DNA, 25 bp, Artificial
  probe
  misc_feature (1)..(25): SEQ ID NO: 2412; WAN024DMH_at; Start 625; Stop 649
gaatcaactggccaagttttagaat

SEQ ID NO: 163634 - DNA, 25 bp, Artificial
  probe
  misc_feature (1)..(25): SEQ ID NO: 2412; WAN024DMH_at; Start 51; Stop 75
catctctgggcagtttagcagtgga

SEQ ID NO: 163635 - DNA, 25 bp, Artificial
  probe
  misc_feature (1)..(25): SEQ ID NO: 2412; WAN024DMH_at; Start 697; Stop 721
tcatgtgaccgtgatcactaactaa

SEQ ID NO: 163636 - DNA, 25 bp, Artificial
  probe
  misc_feature (1)..(25): SEQ ID NO: 2412; WAN024DMH_at; Start 536; Stop 560
tagtctttccaactccagaacatgc

SEQ ID NO: 163637 - DNA, 25 bp, Artificial
  probe
  misc_feature (1)..(25): SEQ ID NO: 2412; WAN024DMH_at; Start 611; Stop 635
aaatcaccaaactcgaatcaactgg

SEQ ID NO: 163638 - DNA, 25 bp, Artificial
  probe
  misc_feature (1)..(25): SEQ ID NO: 2412; WAN024DMH_at; Start 37; Stop 61
ttaaaaaataaaatcatctctgggc

SEQ ID NO: 163639 - DNA, 25 bp, Artificial
  probe
  misc_feature (1)..(25): SEQ ID NO: 2412; WAN024DMH_at; Start 220; Stop 244
cacaagcttgtagagttttcagata

SEQ ID NO: 163640 - DNA, 25 bp, Artificial
  probe
  misc_feature (1)..(25): SEQ ID NO: 2412; WAN024DMH_at; Start 337; Stop 361
ggcgatcaattctactacaagattg

SEQ ID NO: 163641 - DNA, 25 bp, Artificial
  probe
  misc_feature (1)..(25): SEQ ID NO: 2412; WAN024DMH_at; Start 579; Stop 603
cgatgaacaattccctactgtccta

SEQ ID NO: 163642 - DNA, 25 bp, Artificial
  probe
  misc_feature (1)..(25): SEQ ID NO: 2412; WAN024DMH_at; Start 156; Stop 180
tgccaaagatggctatattgtccgc

SEQ ID NO: 163643 - DNA, 25 bp, Artificial
  probe
  misc_feature (1)..(25): SEQ ID NO: 2412; WAN024DMH_at; Start 481; Stop 505
aagttagactaccacattcacatga

SEQ ID NO: 163644 - DNA, 25 bp, Artificial
  probe
  misc_feature (1)..(25): SEQ ID NO: 2412; WAN024DMH_at; Start 275; Stop 299
taactgttctttcaattgaacgcgg

SEQ ID NO: 163645 - DNA, 25 bp, Artificial
  probe
  misc_feature (1)..(25): SEQ ID NO: 2412; WAN024DMH_at; Start 76; Stop 100
gataaattttacactgaagcagaac

SEQ ID NO: 163646 - DNA, 25 bp, Artificial
  probe
  misc_feature (1)..(25): SEQ ID NO: 2412; WAN024DMH_at; Start 102; Stop 126
catttcaatgtacgatgtcagctct

SEQ ID NO: 163647 - DNA, 25 bp, Artificial
  probe
  misc_feature (1)..(25): SEQ ID NO: 2412; WAN024DMH_at; Start 594; Stop 618
tactgtcctacaaactaaaatcacc

SEQ ID NO: 163648 - DNA, 25 bp, Artificial
  probe
  misc_feature (1)..(25): SEQ ID NO: 2412; WAN024DMH_at; Start 565; Stop 589
tcagtcctcggagtcgatgaacaat

SEQ ID NO: 163649 - DNA, 25 bp, Artificial
  probe
  misc_feature (1)..(25): SEQ ID NO: 2412; WAN024DMH_at; Start 287; Stop 311
caattgaacgcggaaacaagcttgt

SEQ ID NO: 163650 - DNA, 25 bp, Artificial
  probe
  misc_feature (1)..(25): SEQ ID NO: 2412; WAN024DMH_at; Start 127; Stop 151
atcacagttgttcgcgccttaaacg

SEQ ID NO: 163651 - DNA, 25 bp, Artificial
  probe
  misc_feature (1)..(25): SEQ ID NO: 3007; WAN024DMI_at; Start 470; Stop 494
cttatcttgttttactgttactgca

SEQ ID NO: 163652 - DNA, 25 bp, Artificial
  probe
  misc_feature (1)..(25): SEQ ID NO: 3007; WAN024DMI_at; Start 40; Stop 64
gtctatctgatgttattaacttggg

SEQ ID NO: 163653 - DNA, 25 bp, Artificial
  probe
  misc_feature (1)..(25): SEQ ID NO: 3007; WAN024DMI_at; Start 350; Stop 374
tgactttaaatacgctaggtgtctg

SEQ ID NO: 163654 - DNA, 25 bp, Artificial
  probe
  misc_feature (1)..(25): SEQ ID NO: 3007; WAN024DMI_at; Start 146; Stop 170
cagaaccactaatagtcgatggaaa

SEQ ID NO: 163655 - DNA, 25 bp, Artificial
  probe
  misc_feature (1)..(25): SEQ ID NO: 3007; WAN024DMI_at; Start 110; Stop 134
tcttagctccaaggtatatcaattg

SEQ ID NO: 163656 - DNA, 25 bp, Artificial
  probe
  misc_feature (1)..(25): SEQ ID NO: 3007; WAN024DMI_at; Start 151; Stop 175
ccactaatagtcgatggaaaaattg

SEQ ID NO: 163657 - DNA, 25 bp, Artificial
  probe
  misc_feature (1)..(25): SEQ ID NO: 3007; WAN024DMI_at; Start 305; Stop 329
gcttacagtatattttagcaatagg

SEQ ID NO: 163658 - DNA, 25 bp, Artificial
  probe
  misc_feature (1)..(25): SEQ ID NO: 3007; WAN024DMI_at; Start 373; Stop 397
tgtgtaggcttactgatttatcaaa

SEQ ID NO: 163659 - DNA, 25 bp, Artificial
  probe
  misc_feature (1)..(25): SEQ ID NO: 3007; WAN024DMI_at; Start 103; Stop 127
gcatttttcttagctccaaggtata

SEQ ID NO: 163660 - DNA, 25 bp, Artificial
  probe
  misc_feature (1)..(25): SEQ ID NO: 3007; WAN024DMI_at; Start 344; Stop 368
cggatttgactttaaatacgctagg

SEQ ID NO: 163661 - DNA, 25 bp, Artificial
  probe
  misc_feature (1)..(25): SEQ ID NO: 3007; WAN024DMI_at; Start 402; Stop 426
tataagagtgttcaaatcacagact

SEQ ID NO: 163662 - DNA, 25 bp, Artificial
  probe
  misc_feature (1)..(25): SEQ ID NO: 3007; WAN024DMI_at; Start 71; Stop 95
tatttaagtttgaaacaaatcctga

SEQ ID NO: 163663 - DNA, 25 bp, Artificial
  probe
  misc_feature (1)..(25): SEQ ID NO: 3007; WAN024DMI_at; Start 418; Stop 442
tcacagactagaaaatggatcaata

SEQ ID NO: 163664 - DNA, 25 bp, Artificial
  probe
  misc_feature (1)..(25): SEQ ID NO: 3007; WAN024DMI_at; Start 178; Stop 202
tttgctgaaatgttatttaatctga

SEQ ID NO: 163665 - DNA, 25 bp, Artificial
  probe
  misc_feature (1)..(25): SEQ ID NO: 3007; WAN024DMI_at; Start 357; Stop 381
aaatacgctaggtgtctgtgtaggc

SEQ ID NO: 163666 - DNA, 25 bp, Artificial
  probe
  misc_feature (1)..(25): SEQ ID NO: 3007; WAN024DMI_at; Start 456; Stop 480
tagccttggttttgcttatcttgtt

SEQ ID NO: 163667 - DNA, 25 bp, Artificial
  probe
  misc_feature (1)..(25): SEQ ID NO: 3007; WAN024DMI_at; Start 288; Stop 312
tagtttattgtttgagtgcttacag

SEQ ID NO: 163668 - DNA, 25 bp, Artificial
  probe
  misc_feature (1)..(25): SEQ ID NO: 3007; WAN024DMI_at; Start 330; Stop 354
tataacagatataacggatttgact

SEQ ID NO: 163669 - DNA, 25 bp, Artificial
  probe
  misc_feature (1)..(25): SEQ ID NO: 3007; WAN024DMI_at; Start 411; Stop 435
gttcaaatcacagactagaaaatgg

SEQ ID NO: 163670 - DNA, 25 bp, Artificial
  probe
  misc_feature (1)..(25): SEQ ID NO: 3007; WAN024DMI_at; Start 322; Stop 346
gcaataggtataacagatataacgg

SEQ ID NO: 163671 - DNA, 25 bp, Artificial
  probe
  misc_feature (1)..(25): SEQ ID NO: 3007; WAN024DMI_at; Start 266; Stop 290
tagtcgggacaggtttcttgattag

SEQ ID NO: 163672 - DNA, 25 bp, Artificial
  probe
  misc_feature (1)..(25): SEQ ID NO: 3007; WAN024DMI_at; Start 253; Stop 277
tctagtttaagaatagtcgggacag

SEQ ID NO: 163673 - DNA, 25 bp, Artificial
  probe
  misc_feature (1)..(25): SEQ ID NO: 3007; WAN024DMI_at; Start 118; Stop 142
ccaaggtatatcaattggattccat

SEQ ID NO: 163674 - DNA, 25 bp, Artificial
  probe
  misc_feature (1)..(25): SEQ ID NO: 3007; WAN024DMI_at; Start 82; Stop 106
gaaacaaatcctgaatttatagcat

SEQ ID NO: 163675 - DNA, 25 bp, Artificial
  probe
  misc_feature (1)..(25): SEQ ID NO: 3007; WAN024DMI_at; Start 362; Stop 386
cgctaggtgtctgtgtaggcttact

SEQ ID NO: 163676 - DNA, 25 bp, Artificial
  probe
  misc_feature (1)..(25): SEQ ID NO: 3007; WAN024DMI_at; Start 273; Stop 297
gacaggtttcttgattagtttattg

SEQ ID NO: 163677 - DNA, 25 bp, Artificial
  probe
  misc_feature (1)..(25): SEQ ID NO: 3007; WAN024DMI_at; Start 99; Stop 123
tatagcatttttcttagctccaagg

SEQ ID NO: 163678 - DNA, 25 bp, Artificial
  probe
  misc_feature (1)..(25): SEQ ID NO: 3007; WAN024DMI_at; Start 7; Stop 31
gaatctaaaaaaacaactcgatatg

SEQ ID NO: 163679 - DNA, 25 bp, Artificial
  probe
  misc_feature (1)..(25): SEQ ID NO: 3007; WAN024DMI_at; Start 430; Stop 454
aaatggatcaatatcttaggtatgc

SEQ ID NO: 163680 - DNA, 25 bp, Artificial
  probe
  misc_feature (1)..(25): SEQ ID NO: 3007; WAN024DMI_at; Start 20; Stop 44
caactcgatatgtattttatgtcta

SEQ ID NO: 163681 - DNA, 25 bp, Artificial
  probe
  misc_feature (1)..(25): SEQ ID NO: 3007; WAN024DMI_at; Start 162; Stop 186
cgatggaaaaattgtttttgctgaa

SEQ ID NO: 163682 - DNA, 25 bp, Artificial
  probe
  misc_feature (1)..(25): SEQ ID NO: 3007; WAN024DMI_at; Start 446; Stop 470
taggtatgcttagccttggttttgc

SEQ ID NO: 163683 - DNA, 25 bp, Artificial
  probe
  misc_feature (1)..(25): SEQ ID NO: 3007; WAN024DMI_at; Start 440; Stop 464
atatcttaggtatgcttagccttgg

SEQ ID NO: 163684 - DNA, 25 bp, Artificial
  probe
  misc_feature (1)..(25): SEQ ID NO: 3007; WAN024DMI_at; Start 263; Stop 287
gaatagtcgggacaggtttcttgat

SEQ ID NO: 163685 - DNA, 25 bp, Artificial
  probe
  misc_feature (1)..(25): SEQ ID NO: 1096; WAN024DMJ_at; Start 388; Stop 412
gaatgtatgtctaagtatcgagaac

SEQ ID NO: 163686 - DNA, 25 bp, Artificial
  probe
  misc_feature (1)..(25): SEQ ID NO: 1096; WAN024DMJ_at; Start 89; Stop 113
ccttgtctgagatgggacggcagca

SEQ ID NO: 163687 - DNA, 25 bp, Artificial
  probe
  misc_feature (1)..(25): SEQ ID NO: 1096; WAN024DMJ_at; Start 403; Stop 427
tatcgagaacatcagactgtggtag

SEQ ID NO: 163688 - DNA, 25 bp, Artificial
  probe
  misc_feature (1)..(25): SEQ ID NO: 1096; WAN024DMJ_at; Start 225; Stop 249
tcctttaagagtagagcctttatta

SEQ ID NO: 163689 - DNA, 25 bp, Artificial
  probe
  misc_feature (1)..(25): SEQ ID NO: 1096; WAN024DMJ_at; Start 154; Stop 178
gaaataatcgtatcttctgcagtca

SEQ ID NO: 163690 - DNA, 25 bp, Artificial
  probe
  misc_feature (1)..(25): SEQ ID NO: 1096; WAN024DMJ_at; Start 443; Stop 467
tgctcatgcgccagtttgtgccaaa

SEQ ID NO: 163691 - DNA, 25 bp, Artificial
  probe
  misc_feature (1)..(25): SEQ ID NO: 1096; WAN024DMJ_at; Start 52; Stop 76
gagcgttcttatataggatttggga

SEQ ID NO: 163692 - DNA, 25 bp, Artificial
  probe
  misc_feature (1)..(25): SEQ ID NO: 1096; WAN024DMJ_at; Start 272; Stop 296
caggaatagaaaactttgaaacagc

SEQ ID NO: 163693 - DNA, 25 bp, Artificial
  probe
  misc_feature (1)..(25): SEQ ID NO: 1096; WAN024DMJ_at; Start 238; Stop 262
gagcctttattacatgaatggcagg

SEQ ID NO: 163694 - DNA, 25 bp, Artificial
  probe
  misc_feature (1)..(25): SEQ ID NO: 1096; WAN024DMJ_at; Start 140; Stop 164
tactctcgtcagctgaaataatcgt

SEQ ID NO: 163695 - DNA, 25 bp, Artificial
  probe
  misc_feature (1)..(25): SEQ ID NO: 1096; WAN024DMJ_at; Start 197; Stop 221
cttcgtatgtggtctgtgctacggg

SEQ ID NO: 163696 - DNA, 25 bp, Artificial
  probe
  misc_feature (1)..(25): SEQ ID NO: 1096; WAN024DMJ_at; Start 469; Stop 493
gagaagattgatttttgccaagtga

SEQ ID NO: 163697 - DNA, 25 bp, Artificial
  probe
  misc_feature (1)..(25): SEQ ID NO: 1096; WAN024DMJ_at; Start 75; Stop 99
gatagatttggcacccttgtctgag

SEQ ID NO: 163698 - DNA, 25 bp, Artificial
  probe
  misc_feature (1)..(25): SEQ ID NO: 1096; WAN024DMJ_at; Start 166; Stop 190
tcttctgcagtcacaagagctttag

SEQ ID NO: 163699 - DNA, 25 bp, Artificial
  probe
  misc_feature (1)..(25): SEQ ID NO: 1096; WAN024DMJ_at; Start 177; Stop 201
cacaagagctttagaaacggcttcg

SEQ ID NO: 163700 - DNA, 25 bp, Artificial
  probe
  misc_feature (1)..(25): SEQ ID NO: 1096; WAN024DMJ_at; Start 452; Stop 476
gccagtttgtgccaaatgagaagat

SEQ ID NO: 163701 - DNA, 25 bp, Artificial
  probe
  misc_feature (1)..(25): SEQ ID NO: 1096; WAN024DMJ_at; Start 37; Stop 61
taccgtgagttagaggagcgttctt

SEQ ID NO: 163702 - DNA, 25 bp, Artificial
  probe
  misc_feature (1)..(25): SEQ ID NO: 1096; WAN024DMJ_at; Start 3; Stop 27
gaagattatctttgtacgtcatggg

SEQ ID NO: 163703 - DNA, 25 bp, Artificial
  probe
  misc_feature (1)..(25): SEQ ID NO: 1096; WAN024DMJ_at; Start 485; Stop 509
gccaagtgattgagtgtgagttaga

SEQ ID NO: 163704 - DNA, 25 bp, Artificial
  probe
  misc_feature (1)..(25): SEQ ID NO: 1096; WAN024DMJ_at; Start 357; Stop 381
gacagctacggaaatgaagtctcgg

SEQ ID NO: 163705 - DNA, 25 bp, Artificial
  probe
  misc_feature (1)..(25): SEQ ID NO: 1096; WAN024DMJ_at; Start 130; Stop 154
aaaaatcctttactctcgtcagctg

SEQ ID NO: 163706 - DNA, 25 bp, Artificial
  probe
  misc_feature (1)..(25): SEQ ID NO: 1096; WAN024DMJ_at; Start 293; Stop 317
cagctagaagactgtttttagaaaa

SEQ ID NO: 163707 - DNA, 25 bp, Artificial
  probe
  misc_feature (1)..(25): SEQ ID NO: 1096; WAN024DMJ_at; Start 115; Stop 139
gtccagaaattgagcaaaaatcctt

SEQ ID NO: 163708 - DNA, 25 bp, Artificial
  probe
  misc_feature (1)..(25): SEQ ID NO: 1096; WAN024DMJ_at; Start 253; Stop 277
gaatggcaggtctataaaacaggaa

SEQ ID NO: 163709 - DNA, 25 bp, Artificial
  probe
  misc_feature (1)..(25): SEQ ID NO: 1096; WAN024DMJ_at; Start 26; Stop 50
gggagccagattaccgtgagttaga

SEQ ID NO: 163710 - DNA, 25 bp, Artificial
  probe
  misc_feature (1)..(25): SEQ ID NO: 1096; WAN024DMJ_at; Start 342; Stop 366
tcctattcaatatgagacagctacg

SEQ ID NO: 163711 - DNA, 25 bp, Artificial
  probe
  misc_feature (1)..(25): SEQ ID NO: 1096; WAN024DMJ_at; Start 432; Stop 456
tgctcatcgaatgctcatgcgccag

SEQ ID NO: 163712 - DNA, 25 bp, Artificial
  probe
  misc_feature (1)..(25): SEQ ID NO: 1096; WAN024DMJ_at; Start 323; Stop 347
gggagttgcttcctaatagtcctat

SEQ ID NO: 163713 - DNA, 25 bp, Artificial
  probe
  misc_feature (1)..(25): SEQ ID NO: 1096; WAN024DMJ_at; Start 372; Stop 396
gaagtctcggtttctagaatgtatg

SEQ ID NO: 163714 - DNA, 25 bp, Artificial
  probe
  misc_feature (1)..(25): SEQ ID NO: 1096; WAN024DMJ_at; Start 191; Stop 215
aaacggcttcgtatgtggtctgtgc

SEQ ID NO: 163715 - DNA, 25 bp, Artificial
  probe
  misc_feature (1)..(25): SEQ ID NO: 1096; WAN024DMJ_at; Start 104; Stop 128
gacggcagcaagtccagaaattgag

SEQ ID NO: 163716 - DNA, 25 bp, Artificial
  probe
  misc_feature (1)..(25): SEQ ID NO: 1096; WAN024DMJ_at; Start 280; Stop 304
gaaaactttgaaacagctagaagac

SEQ ID NO: 163717 - DNA, 25 bp, Artificial
  probe
  misc_feature (1)..(25): SEQ ID NO: 1096; WAN024DMJ_at; Start 65; Stop 89
taggatttgggatagatttggcacc

SEQ ID NO: 163718 - DNA, 25 bp, Artificial
  probe
  misc_feature (1)..(25): SEQ ID NO: 1096; WAN024DMJ_at; Start 417; Stop 441
gactgtggtagttgttgctcatcga

SEQ ID NO: 163719 - DNA, 25 bp, Artificial
  probe
  misc_feature (1)..(25): SEQ ID NO: 7364; WAN024DMK_at; Start 91; Stop 115
ccgaataaataagatagaataatct

SEQ ID NO: 163720 - DNA, 25 bp, Artificial
  probe
  misc_feature (1)..(25): SEQ ID NO: 7364; WAN024DMK_at; Start 115; Stop 139
tagaataaatgataatagaaaagag

SEQ ID NO: 163721 - DNA, 25 bp, Artificial
  probe
  misc_feature (1)..(25): SEQ ID NO: 7364; WAN024DMK_at; Start 9; Stop 33
cagttctgcgtgaagcgggtcaggg

SEQ ID NO: 163722 - DNA, 25 bp, Artificial
  probe
  misc_feature (1)..(25): SEQ ID NO: 7364; WAN024DMK_at; Start 52; Stop 76
aagcgatttgaattgtgtgctcttt

SEQ ID NO: 163723 - DNA, 25 bp, Artificial
  probe
  misc_feature (1)..(25): SEQ ID NO: 7364; WAN024DMK_at; Start 40; Stop 64
tccagcagccctaagcgatttgaat

SEQ ID NO: 163724 - DNA, 25 bp, Artificial
  probe
  misc_feature (1)..(25): SEQ ID NO: 7364; WAN024DMK_at; Start 33; Stop 57
ggaggaatccagcagccctaagcga

SEQ ID NO: 163725 - DNA, 25 bp, Artificial
  probe
  misc_feature (1)..(25): SEQ ID NO: 7364; WAN024DMK_at; Start 35; Stop 59
aggaatccagcagccctaagcgatt

SEQ ID NO: 163726 - DNA, 25 bp, Artificial
  probe
  misc_feature (1)..(25): SEQ ID NO: 7364; WAN024DMK_at; Start 17; Stop 41
cgtgaagcgggtcaggggaggaatc

SEQ ID NO: 163727 - DNA, 25 bp, Artificial
  probe
  misc_feature (1)..(25): SEQ ID NO: 7364; WAN024DMK_at; Start 93; Stop 117
gaataaataagatagaataatctag

SEQ ID NO: 163728 - DNA, 25 bp, Artificial
  probe
  misc_feature (1)..(25): SEQ ID NO: 7364; WAN024DMK_at; Start 38; Stop 62
aatccagcagccctaagcgatttga

SEQ ID NO: 163729 - DNA, 25 bp, Artificial
  probe
  misc_feature (1)..(25): SEQ ID NO: 7364; WAN024DMK_at; Start 34; Stop 58
gaggaatccagcagccctaagcgat

SEQ ID NO: 163730 - DNA, 25 bp, Artificial
  probe
  misc_feature (1)..(25): SEQ ID NO: 7364; WAN024DMK_at; Start 50; Stop 74
ctaagcgatttgaattgtgtgctct

SEQ ID NO: 163731 - DNA, 25 bp, Artificial
  probe
  misc_feature (1)..(25): SEQ ID NO: 7364; WAN024DMK_at; Start 124; Stop 148
tgataatagaaaagagaaaattatg

SEQ ID NO: 163732 - DNA, 25 bp, Artificial
  probe
  misc_feature (1)..(25): SEQ ID NO: 7364; WAN024DMK_at; Start 48; Stop 72
ccctaagcgatttgaattgtgtgct

SEQ ID NO: 163733 - DNA, 25 bp, Artificial
  probe
  misc_feature (1)..(25): SEQ ID NO: 7364; WAN024DMK_at; Start 61; Stop 85
gaattgtgtgctctttttttcgtgc

SEQ ID NO: 163734 - DNA, 25 bp, Artificial
  probe
  misc_feature (1)..(25): SEQ ID NO: 7364; WAN024DMK_at; Start 54; Stop 78
gcgatttgaattgtgtgctcttttt

SEQ ID NO: 163735 - DNA, 25 bp, Artificial
  probe
  misc_feature (1)..(25): SEQ ID NO: 7364; WAN024DMK_at; Start 103; Stop 127
gatagaataatctagaataaatgat

SEQ ID NO: 163736 - DNA, 25 bp, Artificial
  probe
  misc_feature (1)..(25): SEQ ID NO: 7364; WAN024DMK_at; Start 4; Stop 28
agcaacagttctgcgtgaagcgggt

SEQ ID NO: 163737 - DNA, 25 bp, Artificial
  probe
  misc_feature (1)..(25): SEQ ID NO: 7364; WAN024DMK_at; Start 1; Stop 25
tggagcaacagttctgcgtgaagcg

SEQ ID NO: 163738 - DNA, 25 bp, Artificial
  probe
  misc_feature (1)..(25): SEQ ID NO: 7364; WAN024DMK_at; Start 39; Stop 63
atccagcagccctaagcgatttgaa

SEQ ID NO: 163739 - DNA, 25 bp, Artificial
  probe
  misc_feature (1)..(25): SEQ ID NO: 7364; WAN024DMK_at; Start 41; Stop 65
ccagcagccctaagcgatttgaatt

SEQ ID NO: 163740 - DNA, 25 bp, Artificial
  probe
  misc_feature (1)..(25): SEQ ID NO: 7364; WAN024DMK_at; Start 6; Stop 30
caacagttctgcgtgaagcgggtca

SEQ ID NO: 163741 - DNA, 25 bp, Artificial
  probe
  misc_feature (1)..(25): SEQ ID NO: 7364; WAN024DMK_at; Start 55; Stop 79
cgatttgaattgtgtgctctttttt

SEQ ID NO: 163742 - DNA, 25 bp, Artificial
  probe
  misc_feature (1)..(25): SEQ ID NO: 7364; WAN024DMK_at; Start 7; Stop 31
aacagttctgcgtgaagcgggtcag

SEQ ID NO: 163743 - DNA, 25 bp, Artificial
  probe
  misc_feature (1)..(25): SEQ ID NO: 7364; WAN024DMK_at; Start 51; Stop 75
taagcgatttgaattgtgtgctctt

SEQ ID NO: 163744 - DNA, 25 bp, Artificial
  probe
  misc_feature (1)..(25): SEQ ID NO: 7364; WAN024DMK_at; Start 42; Stop 66
cagcagccctaagcgatttgaattg

SEQ ID NO: 163745 - DNA, 25 bp, Artificial
  probe
  misc_feature (1)..(25): SEQ ID NO: 7364; WAN024DMK_at; Start 45; Stop 69
cagccctaagcgatttgaattgtgt

SEQ ID NO: 163746 - DNA, 25 bp, Artificial
  probe
  misc_feature (1)..(25): SEQ ID NO: 7364; WAN024DMK_at; Start 44; Stop 68
gcagccctaagcgatttgaattgtg

SEQ ID NO: 163747 - DNA, 25 bp, Artificial
  probe
  misc_feature (1)..(25): SEQ ID NO: 7364; WAN024DMK_at; Start 32; Stop 56
gggaggaatccagcagccctaagcg

SEQ ID NO: 163748 - DNA, 25 bp, Artificial
  probe
  misc_feature (1)..(25): SEQ ID NO: 7364; WAN024DMK_at; Start 46; Stop 70
agccctaagcgatttgaattgtgtg

SEQ ID NO: 163749 - DNA, 25 bp, Artificial
  probe
  misc_feature (1)..(25): SEQ ID NO: 7364; WAN024DMK_at; Start 47; Stop 71
gccctaagcgatttgaattgtgtgc

SEQ ID NO: 163750 - DNA, 25 bp, Artificial
  probe
  misc_feature (1)..(25): SEQ ID NO: 7364; WAN024DMK_at; Start 120; Stop 144
taaatgataatagaaaagagaaaat

SEQ ID NO: 163751 - DNA, 25 bp, Artificial
  probe
  misc_feature (1)..(25): SEQ ID NO: 7364; WAN024DMK_at; Start 49; Stop 73
cctaagcgatttgaattgtgtgctc

SEQ ID NO: 163752 - DNA, 25 bp, Artificial
  probe
  misc_feature (1)..(25): SEQ ID NO: 7364; WAN024DMK_at; Start 67; Stop 91
tgtgctctttttttcgtgctttttc

SEQ ID NO: 163753 - DNA, 25 bp, Artificial
  probe
  misc_feature (1)..(25): SEQ ID NO: 784; WAN024DML_at; Start 401; Stop 425
ctgatggcgttcgaactggtggatt

SEQ ID NO: 163754 - DNA, 25 bp, Artificial
  probe
  misc_feature (1)..(25): SEQ ID NO: 784; WAN024DML_at; Start 351; Stop 375
tattgtccaggctgtttttgctact

SEQ ID NO: 163755 - DNA, 25 bp, Artificial
  probe
  misc_feature (1)..(25): SEQ ID NO: 784; WAN024DML_at; Start 160; Stop 184
tatatgcagccgactgaggttctct

SEQ ID NO: 163756 - DNA, 25 bp, Artificial
  probe
  misc_feature (1)..(25): SEQ ID NO: 784; WAN024DML_at; Start 257; Stop 281
gggattattatggaaatcctggaaa

SEQ ID NO: 163757 - DNA, 25 bp, Artificial
  probe
  misc_feature (1)..(25): SEQ ID NO: 784; WAN024DML_at; Start 149; Stop 173
gggttaaggcttatatgcagccgac

SEQ ID NO: 163758 - DNA, 25 bp, Artificial
  probe
  misc_feature (1)..(25): SEQ ID NO: 784; WAN024DML_at; Start 269; Stop 293
gaaatcctggaaatgaagggcatat

SEQ ID NO: 163759 - DNA, 25 bp, Artificial
  probe
  misc_feature (1)..(25): SEQ ID NO: 784; WAN024DML_at; Start 92; Stop 116
taaaggttgctgtgcgtacagttgt

SEQ ID NO: 163760 - DNA, 25 bp, Artificial
  probe
  misc_feature (1)..(25): SEQ ID NO: 784; WAN024DML_at; Start 412; Stop 436
cgaactggtggatttggatcgacag

SEQ ID NO: 163761 - DNA, 25 bp, Artificial
  probe
  misc_feature (1)..(25): SEQ ID NO: 784; WAN024DML_at; Start 42; Stop 66
tgaaaatttattgcccaagcgtgag

SEQ ID NO: 163762 - DNA, 25 bp, Artificial
  probe
  misc_feature (1)..(25): SEQ ID NO: 784; WAN024DML_at; Start 407; Stop 431
gcgttcgaactggtggatttggatc

SEQ ID NO: 163763 - DNA, 25 bp, Artificial
  probe
  misc_feature (1)..(25): SEQ ID NO: 784; WAN024DML_at; Start 374; Stop 398
ctttcttaattgcagatggagatgc

SEQ ID NO: 163764 - DNA, 25 bp, Artificial
  probe
  misc_feature (1)..(25): SEQ ID NO: 784; WAN024DML_at; Start 106; Stop 130
cgtacagttgttgcgccaggagaga

SEQ ID NO: 163765 - DNA, 25 bp, Artificial
  probe
  misc_feature (1)..(25): SEQ ID NO: 784; WAN024DML_at; Start 358; Stop 382
caggctgtttttgctactttcttaa

SEQ ID NO: 163766 - DNA, 25 bp, Artificial
  probe
  misc_feature (1)..(25): SEQ ID NO: 784; WAN024DML_at; Start 119; Stop 143
cgccaggagagattgtcttggttcc

SEQ ID NO: 163767 - DNA, 25 bp, Artificial
  probe
  misc_feature (1)..(25): SEQ ID NO: 784; WAN024DML_at; Start 50; Stop 74
tattgcccaagcgtgagacagcgca

SEQ ID NO: 163768 - DNA, 25 bp, Artificial
  probe
  misc_feature (1)..(25): SEQ ID NO: 784; WAN024DML_at; Start 417; Stop 441
tggtggatttggatcgacagggcac

SEQ ID NO: 163769 - DNA, 25 bp, Artificial
  probe
  misc_feature (1)..(25): SEQ ID NO: 784; WAN024DML_at; Start 36; Stop 60
tacagatgaaaatttattgcccaag

SEQ ID NO: 163770 - DNA, 25 bp, Artificial
  probe
  misc_feature (1)..(25): SEQ ID NO: 784; WAN024DML_at; Start 192; Stop 216
tgatcgttcttcaaatcctcgtaag

SEQ ID NO: 163771 - DNA, 25 bp, Artificial
  probe
  misc_feature (1)..(25): SEQ ID NO: 784; WAN024DML_at; Start 80; Stop 104
ctggttacgacttaaaggttgctgt

SEQ ID NO: 163772 - DNA, 25 bp, Artificial
  probe
  misc_feature (1)..(25): SEQ ID NO: 784; WAN024DML_at; Start 265; Stop 289
tatggaaatcctggaaatgaagggc

SEQ ID NO: 163773 - DNA, 25 bp, Artificial
  probe
  misc_feature (1)..(25): SEQ ID NO: 784; WAN024DML_at; Start 274; Stop 298
cctggaaatgaagggcatatttttg

SEQ ID NO: 163774 - DNA, 25 bp, Artificial
  probe
  misc_feature (1)..(25): SEQ ID NO: 784; WAN024DML_at; Start 153; Stop 177
taaggcttatatgcagccgactgag

SEQ ID NO: 163775 - DNA, 25 bp, Artificial
  probe
  misc_feature (1)..(25): SEQ ID NO: 784; WAN024DML_at; Start 199; Stop 223
tcttcaaatcctcgtaagaagggct

SEQ ID NO: 163776 - DNA, 25 bp, Artificial
  probe
  misc_feature (1)..(25): SEQ ID NO: 784; WAN024DML_at; Start 370; Stop 394
gctactttcttaattgcagatggag

SEQ ID NO: 163777 - DNA, 25 bp, Artificial
  probe
  misc_feature (1)..(25): SEQ ID NO: 784; WAN024DML_at; Start 114; Stop 138
tgttgcgccaggagagattgtcttg

SEQ ID NO: 163778 - DNA, 25 bp, Artificial
  probe
  misc_feature (1)..(25): SEQ ID NO: 784; WAN024DML_at; Start 99; Stop 123
tgctgtgcgtacagttgttgcgcca

SEQ ID NO: 163779 - DNA, 25 bp, Artificial
  probe
  misc_feature (1)..(25): SEQ ID NO: 784; WAN024DML_at; Start 203; Stop 227
caaatcctcgtaagaagggcttggt

SEQ ID NO: 163780 - DNA, 25 bp, Artificial
  probe
  misc_feature (1)..(25): SEQ ID NO: 784; WAN024DML_at; Start 164; Stop 188
tgcagccgactgaggttctctacct

SEQ ID NO: 163781 - DNA, 25 bp, Artificial
  probe
  misc_feature (1)..(25): SEQ ID NO: 784; WAN024DML_at; Start 111; Stop 135
agttgttgcgccaggagagattgtc

SEQ ID NO: 163782 - DNA, 25 bp, Artificial
  probe
  misc_feature (1)..(25): SEQ ID NO: 784; WAN024DML_at; Start 170; Stop 194
cgactgaggttctctacctctatga

SEQ ID NO: 163783 - DNA, 25 bp, Artificial
  probe
  misc_feature (1)..(25): SEQ ID NO: 784; WAN024DML_at; Start 177; Stop 201
ggttctctacctctatgatcgttct

SEQ ID NO: 163784 - DNA, 25 bp, Artificial
  probe
  misc_feature (1)..(25): SEQ ID NO: 784; WAN024DML_at; Start 48; Stop 72
tttattgcccaagcgtgagacagcg

SEQ ID NO: 163785 - DNA, 25 bp, Artificial
  probe
  misc_feature (1)..(25): SEQ ID NO: 784; WAN024DML_at; Start 54; Stop 78
gcccaagcgtgagacagcgcatgcg

SEQ ID NO: 163786 - DNA, 25 bp, Artificial
  probe
  misc_feature (1)..(25): SEQ ID NO: 784; WAN024DML_at; Start 87; Stop 111
cgacttaaaggttgctgtgcgtaca

SEQ ID NO: 163787 - DNA, 25 bp, Artificial
  probe
  misc_feature (1)..(25): SEQ ID NO: 5243; WAN024DMM_at; Start 91; Stop 115
gactgggaacatgttcattttaaat

SEQ ID NO: 163788 - DNA, 25 bp, Artificial
  probe
  misc_feature (1)..(25): SEQ ID NO: 5243; WAN024DMM_at; Start 9; Stop 33
gttacaaaaaatttatgagcagatg

SEQ ID NO: 163789 - DNA, 25 bp, Artificial
  probe
  misc_feature (1)..(25): SEQ ID NO: 5243; WAN024DMM_at; Start 178; Stop 202
tatcgtgttgcttatcgtttgtatc

SEQ ID NO: 163790 - DNA, 25 bp, Artificial
  probe
  misc_feature (1)..(25): SEQ ID NO: 5243; WAN024DMM_at; Start 82; Stop 106
gataattttgactgggaacatgttc

SEQ ID NO: 163791 - DNA, 25 bp, Artificial
  probe
  misc_feature (1)..(25): SEQ ID NO: 5243; WAN024DMM_at; Start 190; Stop 214
tatcgtttgtatcttgaaaaattgg

SEQ ID NO: 163792 - DNA, 25 bp, Artificial
  probe
  misc_feature (1)..(25): SEQ ID NO: 5243; WAN024DMM_at; Start 181; Stop 205
cgtgttgcttatcgtttgtatcttg

SEQ ID NO: 163793 - DNA, 25 bp, Artificial
  probe
  misc_feature (1)..(25): SEQ ID NO: 5243; WAN024DMM_at; Start 58; Stop 82
gaagagtatggtcctacatttggtg

SEQ ID NO: 163794 - DNA, 25 bp, Artificial
  probe
  misc_feature (1)..(25): SEQ ID NO: 5243; WAN024DMM_at; Start 169; Stop 193
gtttaccattatcgtgttgcttatc

SEQ ID NO: 163795 - DNA, 25 bp, Artificial
  probe
  misc_feature (1)..(25): SEQ ID NO: 5243; WAN024DMM_at; Start 59; Stop 83
aagagtatggtcctacatttggtga

SEQ ID NO: 163796 - DNA, 25 bp, Artificial
  probe
  misc_feature (1)..(25): SEQ ID NO: 5243; WAN024DMM_at; Start 90; Stop 114
tgactgggaacatgttcattttaaa

SEQ ID NO: 163797 - DNA, 25 bp, Artificial
  probe
  misc_feature (1)..(25): SEQ ID NO: 5243; WAN024DMM_at; Start 133; Stop 157
gtgagatatggcattggttgtcgta

SEQ ID NO: 163798 - DNA, 25 bp, Artificial
  probe
  misc_feature (1)..(25): SEQ ID NO: 5243; WAN024DMM_at; Start 62; Stop 86
agtatggtcctacatttggtgataa

SEQ ID NO: 163799 - DNA, 25 bp, Artificial
  probe
  misc_feature (1)..(25): SEQ ID NO: 5243; WAN024DMM_at; Start 130; Stop 154
ttagtgagatatggcattggttgtc

SEQ ID NO: 163800 - DNA, 25 bp, Artificial
  probe
  misc_feature (1)..(25): SEQ ID NO: 5243; WAN024DMM_at; Start 83; Stop 107
ataattttgactgggaacatgttca

SEQ ID NO: 163801 - DNA, 25 bp, Artificial
  probe
  misc_feature (1)..(25): SEQ ID NO: 5243; WAN024DMM_at; Start 55; Stop 79
gaagaagagtatggtcctacatttg

SEQ ID NO: 163802 - DNA, 25 bp, Artificial
  probe
  misc_feature (1)..(25): SEQ ID NO: 5243; WAN024DMM_at; Start 192; Stop 216
tcgtttgtatcttgaaaaattggta

SEQ ID NO: 163803 - DNA, 25 bp, Artificial
  probe
  misc_feature (1)..(25): SEQ ID NO: 5243; WAN024DMM_at; Start 186; Stop 210
tgcttatcgtttgtatcttgaaaaa

SEQ ID NO: 163804 - DNA, 25 bp, Artificial
  probe
  misc_feature (1)..(25): SEQ ID NO: 5243; WAN024DMM_at; Start 120; Stop 144
aatttattatttagtgagatatggc

SEQ ID NO: 163805 - DNA, 25 bp, Artificial
  probe
  misc_feature (1)..(25): SEQ ID NO: 5243; WAN024DMM_at; Start 6; Stop 30
tatgttacaaaaaatttatgagcag

SEQ ID NO: 163806 - DNA, 25 bp, Artificial
  probe
  misc_feature (1)..(25): SEQ ID NO: 5243; WAN024DMM_at; Start 64; Stop 88
tatggtcctacatttggtgataatt

SEQ ID NO: 163807 - DNA, 25 bp, Artificial
  probe
  misc_feature (1)..(25): SEQ ID NO: 5243; WAN024DMM_at; Start 41; Stop 65
tctatgatagtattgaagaagagta

SEQ ID NO: 163808 - DNA, 25 bp, Artificial
  probe
  misc_feature (1)..(25): SEQ ID NO: 5243; WAN024DMM_at; Start 79; Stop 103
ggtgataattttgactgggaacatg

SEQ ID NO: 163809 - DNA, 25 bp, Artificial
  probe
  misc_feature (1)..(25): SEQ ID NO: 5243; WAN024DMM_at; Start 174; Stop 198
ccattatcgtgttgcttatcgtttg

SEQ ID NO: 163810 - DNA, 25 bp, Artificial
  probe
  misc_feature (1)..(25): SEQ ID NO: 5243; WAN024DMM_at; Start 76; Stop 100
tttggtgataattttgactgggaac

SEQ ID NO: 163811 - DNA, 25 bp, Artificial
  probe
  misc_feature (1)..(25): SEQ ID NO: 5243; WAN024DMM_at; Start 202; Stop 226
cttgaaaaattggtaatgaatcggg

SEQ ID NO: 163812 - DNA, 25 bp, Artificial
  probe
  misc_feature (1)..(25): SEQ ID NO: 5243; WAN024DMM_at; Start 184; Stop 208
gttgcttatcgtttgtatcttgaaa

SEQ ID NO: 163813 - DNA, 25 bp, Artificial
  probe
  misc_feature (1)..(25): SEQ ID NO: 5243; WAN024DMM_at; Start 61; Stop 85
gagtatggtcctacatttggtgata

SEQ ID NO: 163814 - DNA, 25 bp, Artificial
  probe
  misc_feature (1)..(25): SEQ ID NO: 5243; WAN024DMM_at; Start 127; Stop 151
tatttagtgagatatggcattggtt

SEQ ID NO: 163815 - DNA, 25 bp, Artificial
  probe
  misc_feature (1)..(25): SEQ ID NO: 5243; WAN024DMM_at; Start 56; Stop 80
aagaagagtatggtcctacatttgg

SEQ ID NO: 163816 - DNA, 25 bp, Artificial
  probe
  misc_feature (1)..(25): SEQ ID NO: 5243; WAN024DMM_at; Start 85; Stop 109
aattttgactgggaacatgttcatt

SEQ ID NO: 163817 - DNA, 25 bp, Artificial
  probe
  misc_feature (1)..(25): SEQ ID NO: 5243; WAN024DMM_at; Start 172; Stop 196
taccattatcgtgttgcttatcgtt

SEQ ID NO: 163818 - DNA, 25 bp, Artificial
  probe
  misc_feature (1)..(25): SEQ ID NO: 5243; WAN024DMM_at; Start 48; Stop 72
tagtattgaagaagagtatggtcct

SEQ ID NO: 163819 - DNA, 25 bp, Artificial
  probe
  misc_feature (1)..(25): SEQ ID NO: 5243; WAN024DMM_at; Start 51; Stop 75
tattgaagaagagtatggtcctaca

SEQ ID NO: 163820 - DNA, 25 bp, Artificial
  probe
  misc_feature (1)..(25): SEQ ID NO: 5243; WAN024DMM_at; Start 53; Stop 77
ttgaagaagagtatggtcctacatt

SEQ ID NO: 163821 - DNA, 25 bp, Artificial
  probe
  misc_feature (1)..(25): SEQ ID NO: 1778; WAN024DMN_at; Start 54; Stop 78
tgaatattaccttcatttatgggaa

SEQ ID NO: 163822 - DNA, 25 bp, Artificial
  probe
  misc_feature (1)..(25): SEQ ID NO: 1778; WAN024DMN_at; Start 234; Stop 258
gcgtagatacgataaagaaccctat

SEQ ID NO: 163823 - DNA, 25 bp, Artificial
  probe
  misc_feature (1)..(25): SEQ ID NO: 1778; WAN024DMN_at; Start 231; Stop 255
gaagcgtagatacgataaagaaccc

SEQ ID NO: 163824 - DNA, 25 bp, Artificial
  probe
  misc_feature (1)..(25): SEQ ID NO: 1778; WAN024DMN_at; Start 407; Stop 431
gatttcgagggcgtcaaagagtatt

SEQ ID NO: 163825 - DNA, 25 bp, Artificial
  probe
  misc_feature (1)..(25): SEQ ID NO: 1778; WAN024DMN_at; Start 335; Stop 359
cactaagagattatagaaacaaaca

SEQ ID NO: 163826 - DNA, 25 bp, Artificial
  probe
  misc_feature (1)..(25): SEQ ID NO: 1778; WAN024DMN_at; Start 191; Stop 215
gaaatcgaattttagactatatccg

SEQ ID NO: 163827 - DNA, 25 bp, Artificial
  probe
  misc_feature (1)..(25): SEQ ID NO: 1778; WAN024DMN_at; Start 369; Stop 393
gaaacaagaagaactagaacgcgtc

SEQ ID NO: 163828 - DNA, 25 bp, Artificial
  probe
  misc_feature (1)..(25): SEQ ID NO: 1778; WAN024DMN_at; Start 150; Stop 174
cgatattccacgtttaaggaaatat

SEQ ID NO: 163829 - DNA, 25 bp, Artificial
  probe
  misc_feature (1)..(25): SEQ ID NO: 1778; WAN024DMN_at; Start 425; Stop 449
gagtattaagagacttacgcattgt

SEQ ID NO: 163830 - DNA, 25 bp, Artificial
  probe
  misc_feature (1)..(25): SEQ ID NO: 1778; WAN024DMN_at; Start 403; Stop 427
gaacgatttcgagggcgtcaaagag

SEQ ID NO: 163831 - DNA, 25 bp, Artificial
  probe
  misc_feature (1)..(25): SEQ ID NO: 1778; WAN024DMN_at; Start 395; Stop 419
taagcaatgaacgatttcgagggcg

SEQ ID NO: 163832 - DNA, 25 bp, Artificial
  probe
  misc_feature (1)..(25): SEQ ID NO: 1778; WAN024DMN_at; Start 220; Stop 244
caggaaagtcagaagcgtagatacg

SEQ ID NO: 163833 - DNA, 25 bp, Artificial
  probe
  misc_feature (1)..(25): SEQ ID NO: 1778; WAN024DMN_at; Start 5; Stop 29
ttaaagaattgtatgaagaagtcca

SEQ ID NO: 163834 - DNA, 25 bp, Artificial
  probe
  misc_feature (1)..(25): SEQ ID NO: 1778; WAN024DMN_at; Start 362; Stop 386
gtaaagagaaacaagaagaactaga

SEQ ID NO: 163835 - DNA, 25 bp, Artificial
  probe
  misc_feature (1)..(25): SEQ ID NO: 1778; WAN024DMN_at; Start 420; Stop 444
tcaaagagtattaagagacttacgc

SEQ ID NO: 163836 - DNA, 25 bp, Artificial
  probe
  misc_feature (1)..(25): SEQ ID NO: 1778; WAN024DMN_at; Start 271; Stop 295
gagatcagtcatcgtataagtgagg

SEQ ID NO: 163837 - DNA, 25 bp, Artificial
  probe
  misc_feature (1)..(25): SEQ ID NO: 1778; WAN024DMN_at; Start 324; Stop 348
ctttcatgaaacactaagagattat

SEQ ID NO: 163838 - DNA, 25 bp, Artificial
  probe
  misc_feature (1)..(25): SEQ ID NO: 1778; WAN024DMN_at; Start 313; Stop 337
gattattatctctttcatgaaacac

SEQ ID NO: 163839 - DNA, 25 bp, Artificial
  probe
  misc_feature (1)..(25): SEQ ID NO: 1778; WAN024DMN_at; Start 440; Stop 464
tacgcattgtgtttaaggagtttac

SEQ ID NO: 163840 - DNA, 25 bp, Artificial
  probe
  misc_feature (1)..(25): SEQ ID NO: 1778; WAN024DMN_at; Start 434; Stop 458
gagacttacgcattgtgtttaagga

SEQ ID NO: 163841 - DNA, 25 bp, Artificial
  probe
  misc_feature (1)..(25): SEQ ID NO: 1778; WAN024DMN_at; Start 239; Stop 263
gatacgataaagaaccctatgaaga

SEQ ID NO: 163842 - DNA, 25 bp, Artificial
  probe
  misc_feature (1)..(25): SEQ ID NO: 1778; WAN024DMN_at; Start 346; Stop 370
tatagaaacaaacaaagtaaagaga

SEQ ID NO: 163843 - DNA, 25 bp, Artificial
  probe
  misc_feature (1)..(25): SEQ ID NO: 1778; WAN024DMN_at; Start 121; Stop 145
ttgattagtagagaagaaggactgg

SEQ ID NO: 163844 - DNA, 25 bp, Artificial
  probe
  misc_feature (1)..(25): SEQ ID NO: 1778; WAN024DMN_at; Start 11; Stop 35
aattgtatgaagaagtccaagggac

SEQ ID NO: 163845 - DNA, 25 bp, Artificial
  probe
  misc_feature (1)..(25): SEQ ID NO: 1778; WAN024DMN_at; Start 383; Stop 407
tagaacgcgtcttaagcaatgaacg

SEQ ID NO: 163846 - DNA, 25 bp, Artificial
  probe
  misc_feature (1)..(25): SEQ ID NO: 1778; WAN024DMN_at; Start 40; Stop 64
tataagtgtagaaatgaatattacc

SEQ ID NO: 163847 - DNA, 25 bp, Artificial
  probe
  misc_feature (1)..(25): SEQ ID NO: 1778; WAN024DMN_at; Start 118; Stop 142
gaattgattagtagagaagaaggac

SEQ ID NO: 163848 - DNA, 25 bp, Artificial
  probe
  misc_feature (1)..(25): SEQ ID NO: 1778; WAN024DMN_at; Start 14; Stop 38
tgtatgaagaagtccaagggactgt

SEQ ID NO: 163849 - DNA, 25 bp, Artificial
  probe
  misc_feature (1)..(25): SEQ ID NO: 1778; WAN024DMN_at; Start 399; Stop 423
caatgaacgatttcgagggcgtcaa

SEQ ID NO: 163850 - DNA, 25 bp, Artificial
  probe
  misc_feature (1)..(25): SEQ ID NO: 1778; WAN024DMN_at; Start 444; Stop 468
cattgtgtttaaggagtttactatc

SEQ ID NO: 163851 - DNA, 25 bp, Artificial
  probe
  misc_feature (1)..(25): SEQ ID NO: 1778; WAN024DMN_at; Start 376; Stop 400
gaagaactagaacgcgtcttaagca

SEQ ID NO: 163852 - DNA, 25 bp, Artificial
  probe
  misc_feature (1)..(25): SEQ ID NO: 1778; WAN024DMN_at; Start 244; Stop 268
gataaagaaccctatgaagaagtgg

SEQ ID NO: 163853 - DNA, 25 bp, Artificial
  probe
  misc_feature (1)..(25): SEQ ID NO: 1778; WAN024DMN_at; Start 411; Stop 435
tcgagggcgtcaaagagtattaaga

SEQ ID NO: 163854 - DNA, 25 bp, Artificial
  probe
  misc_feature (1)..(25): SEQ ID NO: 1778; WAN024DMN_at; Start 298; Stop 322
ggtctctggctagatgattattatc

SEQ ID NO: 163855 - DNA, 25 bp, Artificial
  probe
  misc_feature (1)..(25): SEQ ID NO: 1584; WAN024DMO_at; Start 272; Stop 296
cagaagcgcgtgcacgaaattttcg

SEQ ID NO: 163856 - DNA, 25 bp, Artificial
  probe
  misc_feature (1)..(25): SEQ ID NO: 1584; WAN024DMO_at; Start 327; Stop 351
gacaggtgcgacagctttagtcact

SEQ ID NO: 163857 - DNA, 25 bp, Artificial
  probe
  misc_feature (1)..(25): SEQ ID NO: 1584; WAN024DMO_at; Start 1143; Stop 1167
gagaaactctgctcttattattgag

SEQ ID NO: 163858 - DNA, 25 bp, Artificial
  probe
  misc_feature (1)..(25): SEQ ID NO: 1584; WAN024DMO_at; Start 257; Stop 281
tttcaggagaattttcagaagcgcg

SEQ ID NO: 163859 - DNA, 25 bp, Artificial
  probe
  misc_feature (1)..(25): SEQ ID NO: 1584; WAN024DMO_at; Start 480; Stop 504
gcattttcagaaaaaagactttcca

SEQ ID NO: 163860 - DNA, 25 bp, Artificial
  probe
  misc_feature (1)..(25): SEQ ID NO: 1584; WAN024DMO_at; Start 361; Stop 385
gctgatgatcaggtggaaacgattt

SEQ ID NO: 163861 - DNA, 25 bp, Artificial
  probe
  misc_feature (1)..(25): SEQ ID NO: 1584; WAN024DMO_at; Start 822; Stop 846
taaaagccagtatcgtcatccgatt

SEQ ID NO: 163862 - DNA, 25 bp, Artificial
  probe
  misc_feature (1)..(25): SEQ ID NO: 1584; WAN024DMO_at; Start 718; Stop 742
tctgagtctacacaaagagttttac

SEQ ID NO: 163863 - DNA, 25 bp, Artificial
  probe
  misc_feature (1)..(25): SEQ ID NO: 1584; WAN024DMO_at; Start 405; Stop 429
aactcgcttgcgctatctatcagga

SEQ ID NO: 163864 - DNA, 25 bp, Artificial
  probe
  misc_feature (1)..(25): SEQ ID NO: 1584; WAN024DMO_at; Start 1045; Stop 1069
cacattcgtcatcgaaaaacaggag

SEQ ID NO: 163865 - DNA, 25 bp, Artificial
  probe
  misc_feature (1)..(25): SEQ ID NO: 1584; WAN024DMO_at; Start 931; Stop 955
cttgtgttacactatcaaaatcagg

SEQ ID NO: 163866 - DNA, 25 bp, Artificial
  probe
  misc_feature (1)..(25): SEQ ID NO: 1584; WAN024DMO_at; Start 581; Stop 605
cagaattggaaaaagaaaatcctcg

SEQ ID NO: 163867 - DNA, 25 bp, Artificial
  probe
  misc_feature (1)..(25): SEQ ID NO: 1584; WAN024DMO_at; Start 171; Stop 195
taagcagagaattgaatcagattgg

SEQ ID NO: 163868 - DNA, 25 bp, Artificial
  probe
  misc_feature (1)..(25): SEQ ID NO: 1584; WAN024DMO_at; Start 157; Stop 181
gctcatgtgaatcataagcagagaa

SEQ ID NO: 163869 - DNA, 25 bp, Artificial
  probe
  misc_feature (1)..(25): SEQ ID NO: 1584; WAN024DMO_at; Start 888; Stop 912
gatttgtaaaatcagtccgcaggct

SEQ ID NO: 163870 - DNA, 25 bp, Artificial
  probe
  misc_feature (1)..(25): SEQ ID NO: 1584; WAN024DMO_at; Start 1184; Stop 1208
tctcaattttgggaattgcgaccaa

SEQ ID NO: 163871 - DNA, 25 bp, Artificial
  probe
  misc_feature (1)..(25): SEQ ID NO: 1584; WAN024DMO_at; Start 656; Stop 680
tggcaatagctgaattatctaacaa

SEQ ID NO: 163872 - DNA, 25 bp, Artificial
  probe
  misc_feature (1)..(25): SEQ ID NO: 1584; WAN024DMO_at; Start 206; Stop 230
aattaaggaagttggctgctgaagc

SEQ ID NO: 163873 - DNA, 25 bp, Artificial
  probe
  misc_feature (1)..(25): SEQ ID NO: 1584; WAN024DMO_at; Start 422; Stop 446
tatcaggaattaaggagaagcaagt

SEQ ID NO: 163874 - DNA, 25 bp, Artificial
  probe
  misc_feature (1)..(25): SEQ ID NO: 1584; WAN024DMO_at; Start 864; Stop 888
gataaaagagtaccaacagtttcag

SEQ ID NO: 163875 - DNA, 25 bp, Artificial
  probe
  misc_feature (1)..(25): SEQ ID NO: 1584; WAN024DMO_at; Start 835; Stop 859
cgtcatccgattaaaaatggctatg

SEQ ID NO: 163876 - DNA, 25 bp, Artificial
  probe
  misc_feature (1)..(25): SEQ ID NO: 1584; WAN024DMO_at; Start 604; Stop 628
cgatttagggatgcaatcttaggca

SEQ ID NO: 163877 - DNA, 25 bp, Artificial
  probe
  misc_feature (1)..(25): SEQ ID NO: 1584; WAN024DMO_at; Start 389; Stop 413
tgcgcttgattcgaggaactcgctt

SEQ ID NO: 163878 - DNA, 25 bp, Artificial
  probe
  misc_feature (1)..(25): SEQ ID NO: 1584; WAN024DMO_at; Start 784; Stop 808
aaagctcagtttgctgaagttcagc

SEQ ID NO: 163879 - DNA, 25 bp, Artificial
  probe
  misc_feature (1)..(25): SEQ ID NO: 1584; WAN024DMO_at; Start 1030; Stop 1054
cgtgaaacatccatacacattcgtc

SEQ ID NO: 163880 - DNA, 25 bp, Artificial
  probe
  misc_feature (1)..(25): SEQ ID NO: 1584; WAN024DMO_at; Start 946; Stop 970
caaaatcaggtagcttatcaaggat

SEQ ID NO: 163881 - DNA, 25 bp, Artificial
  probe
  misc_feature (1)..(25): SEQ ID NO: 1584; WAN024DMO_at; Start 1130; Stop 1154
tccctatggaaaagagaaactctgc

SEQ ID NO: 163882 - DNA, 25 bp, Artificial
  probe
  misc_feature (1)..(25): SEQ ID NO: 1584; WAN024DMO_at; Start 63; Stop 87
ggcggttctagctctttctggtgga

SEQ ID NO: 163883 - DNA, 25 bp, Artificial
  probe
  misc_feature (1)..(25): SEQ ID NO: 1584; WAN024DMO_at; Start 43; Stop 67
tatttcaaaaagcatgctaaggcgg

SEQ ID NO: 163884 - DNA, 25 bp, Artificial
  probe
  misc_feature (1)..(25): SEQ ID NO: 1584; WAN024DMO_at; Start 344; Stop 368
tagtcactgcccaccatgctgatga

SEQ ID NO: 163885 - DNA, 25 bp, Artificial
  probe
  misc_feature (1)..(25): SEQ ID NO: 1584; WAN024DMO_at; Start 769; Stop 793
gatttgaatcttacaaaagctcagt

SEQ ID NO: 163886 - DNA, 25 bp, Artificial
  probe
  misc_feature (1)..(25): SEQ ID NO: 1584; WAN024DMO_at; Start 442; Stop 466
caagtagtcggagagatagaaatca

SEQ ID NO: 163887 - DNA, 25 bp, Artificial
  probe
  misc_feature (1)..(25): SEQ ID NO: 1584; WAN024DMO_at; Start 1012; Stop 1036
caacaaatacctgtttcacgtgaaa

SEQ ID NO: 163888 - DNA, 25 bp, Artificial
  probe
  misc_feature (1)..(25): SEQ ID NO: 1584; WAN024DMO_at; Start 460; Stop 484
gaaatcattcgtcccttcttgcatt

SEQ ID NO: 163889 - DNA, 25 bp, Artificial
  probe
  misc_feature (1)..(25): SEQ ID NO: 2047; WAN024DMP_at; Start 793; Stop 817
ccagagggaagtggtagtcttccta

SEQ ID NO: 163890 - DNA, 25 bp, Artificial
  probe
  misc_feature (1)..(25): SEQ ID NO: 2047; WAN024DMP_at; Start 246; Stop 270
cgagtggcgcttaaataaacaagga

SEQ ID NO: 163891 - DNA, 25 bp, Artificial
  probe
  misc_feature (1)..(25): SEQ ID NO: 2047; WAN024DMP_at; Start 1120; Stop 1144
gctcataaaattggagatgcggatg

SEQ ID NO: 163892 - DNA, 25 bp, Artificial
  probe
  misc_feature (1)..(25): SEQ ID NO: 2047; WAN024DMP_at; Start 1222; Stop 1246
gatacgatttctaagatagccaagg

SEQ ID NO: 163893 - DNA, 25 bp, Artificial
  probe
  misc_feature (1)..(25): SEQ ID NO: 2047; WAN024DMP_at; Start 1081; Stop 1105
gatagtcagcgaattgccaaaggtg

SEQ ID NO: 163894 - DNA, 25 bp, Artificial
  probe
  misc_feature (1)..(25): SEQ ID NO: 2047; WAN024DMP_at; Start 1137; Stop 1161
tgcggatgaatttaagcatgatacg

SEQ ID NO: 163895 - DNA, 25 bp, Artificial
  probe
  misc_feature (1)..(25): SEQ ID NO: 2047; WAN024DMP_at; Start 1007; Stop 1031
tggccgggaagtttatggaagctat

SEQ ID NO: 163896 - DNA, 25 bp, Artificial
  probe
  misc_feature (1)..(25): SEQ ID NO: 2047; WAN024DMP_at; Start 197; Stop 221
tagtagtggaatctgggaaattgac

SEQ ID NO: 163897 - DNA, 25 bp, Artificial
  probe
  misc_feature (1)..(25): SEQ ID NO: 2047; WAN024DMP_at; Start 169; Stop 193
gaggttcctgtttatgcgaatgaag

SEQ ID NO: 163898 - DNA, 25 bp, Artificial
  probe
  misc_feature (1)..(25): SEQ ID NO: 2047; WAN024DMP_at; Start 1068; Stop 1092
taaaacagattttgatagtcagcga

SEQ ID NO: 163899 - DNA, 25 bp, Artificial
  probe
  misc_feature (1)..(25): SEQ ID NO: 2047; WAN024DMP_at; Start 42; Stop 66
gaccatttcaaaagtcgttagcaca

SEQ ID NO: 163900 - DNA, 25 bp, Artificial
  probe
  misc_feature (1)..(25): SEQ ID NO: 2047; WAN024DMP_at; Start 489; Stop 513
tctacatattgatcaggctggatgg

SEQ ID NO: 163901 - DNA, 25 bp, Artificial
  probe
  misc_feature (1)..(25): SEQ ID NO: 2047; WAN024DMP_at; Start 992; Stop 1016
tgatttcttctaagatggccgggaa

SEQ ID NO: 163902 - DNA, 25 bp, Artificial
  probe
  misc_feature (1)..(25): SEQ ID NO: 2047; WAN024DMP_at; Start 295; Stop 319
catcaatttatagctgcggacaaac

SEQ ID NO: 163903 - DNA, 25 bp, Artificial
  probe
  misc_feature (1)..(25): SEQ ID NO: 2047; WAN024DMP_at; Start 652; Stop 676
gatgaaaagatgtatgcagccagcg

SEQ ID NO: 163904 - DNA, 25 bp, Artificial
  probe
  misc_feature (1)..(25): SEQ ID NO: 2047; WAN024DMP_at; Start 869; Stop 893
caaaagaatctgataatgtagctca

SEQ ID NO: 163905 - DNA, 25 bp, Artificial
  probe
  misc_feature (1)..(25): SEQ ID NO: 2047; WAN024DMP_at; Start 424; Stop 448
tcatccttatcagcttattcgcaag

SEQ ID NO: 163906 - DNA, 25 bp, Artificial
  probe
  misc_feature (1)..(25): SEQ ID NO: 2047; WAN024DMP_at; Start 1240; Stop 1264
gccaaggatgtttatgaggttctaa

SEQ ID NO: 163907 - DNA, 25 bp, Artificial
  probe
  misc_feature (1)..(25): SEQ ID NO: 2047; WAN024DMP_at; Start 742; Stop 766
acgactgtaaaatacgtatctgcag

SEQ ID NO: 163908 - DNA, 25 bp, Artificial
  probe
  misc_feature (1)..(25): SEQ ID NO: 2047; WAN024DMP_at; Start 634; Stop 658
gaagctggtatcaatcaagatgaaa

SEQ ID NO: 163909 - DNA, 25 bp, Artificial
  probe
  misc_feature (1)..(25): SEQ ID NO: 2047; WAN024DMP_at; Start 462; Stop 486
gaccatgtttgtagaaggaagagaa

SEQ ID NO: 163910 - DNA, 25 bp, Artificial
  probe
  misc_feature (1)..(25): SEQ ID NO: 2047; WAN024DMP_at; Start 230; Stop 254
caagttttcaaataaccgagtggcg

SEQ ID NO: 163911 - DNA, 25 bp, Artificial
  probe
  misc_feature (1)..(25): SEQ ID NO: 2047; WAN024DMP_at; Start 509; Stop 533
gatgggtagctaaagaatcaacttc

SEQ ID NO: 163912 - DNA, 25 bp, Artificial
  probe
  misc_feature (1)..(25): SEQ ID NO: 2047; WAN024DMP_at; Start 57; Stop 81
cgttagcacagaaaaagaagtcgtc

SEQ ID NO: 163913 - DNA, 25 bp, Artificial
  probe
  misc_feature (1)..(25): SEQ ID NO: 2047; WAN024DMP_at; Start 326; Stop 350
tatatgatcaatcagaggtaactcc

SEQ ID NO: 163914 - DNA, 25 bp, Artificial
  probe
  misc_feature (1)..(25): SEQ ID NO: 2047; WAN024DMP_at; Start 1153; Stop 1177
catgatacgggtgttgtctatgcag

SEQ ID NO: 163915 - DNA, 25 bp, Artificial
  probe
  misc_feature (1)..(25): SEQ ID NO: 2047; WAN024DMP_at; Start 758; Stop 782
tatctgcagtcaatgattttccagg

SEQ ID NO: 163916 - DNA, 25 bp, Artificial
  probe
  misc_feature (1)..(25): SEQ ID NO: 2047; WAN024DMP_at; Start 912; Stop 936
catttcaaaccaatctgatgccaca

SEQ ID NO: 163917 - DNA, 25 bp, Artificial
  probe
  misc_feature (1)..(25): SEQ ID NO: 2047; WAN024DMP_at; Start 777; Stop 801
tccaggttcttataaaccagaggga

SEQ ID NO: 163918 - DNA, 25 bp, Artificial
  probe
  misc_feature (1)..(25): SEQ ID NO: 2047; WAN024DMP_at; Start 956; Stop 980
ccattatgggagatgattgggatcc

SEQ ID NO: 163919 - DNA, 25 bp, Artificial
  probe
  misc_feature (1)..(25): SEQ ID NO: 2047; WAN024DMP_at; Start 154; Stop 178
cccatggtttatggagaggttcctg

SEQ ID NO: 163920 - DNA, 25 bp, Artificial
  probe
  misc_feature (1)..(25): SEQ ID NO: 2047; WAN024DMP_at; Start 1098; Stop 1122
caaaggtgtttctgttaaagtagct

SEQ ID NO: 163921 - DNA, 25 bp, Artificial
  probe
  misc_feature (1)..(25): SEQ ID NO: 2047; WAN024DMP_at; Start 615; Stop 639
gcaactgactactggaaaagaagct

SEQ ID NO: 163922 - DNA, 25 bp, Artificial
  probe
  misc_feature (1)..(25): SEQ ID NO: 2047; WAN024DMP_at; Start 664; Stop 688
tatgcagccagcgttttgaaactct

SEQ ID NO: 163923 - DNA, 25 bp, Artificial
  probe
  misc_feature (1)..(25): SEQ ID NO: 3349; WAN024DMQ_at; Start 124; Stop 148
gaaaaggaaaggaagaatgcgctaa

SEQ ID NO: 163924 - DNA, 25 bp, Artificial
  probe
  misc_feature (1)..(25): SEQ ID NO: 3349; WAN024DMQ_at; Start 91; Stop 115
gctgataaaaatcaattattgcgtt

SEQ ID NO: 163925 - DNA, 25 bp, Artificial
  probe
  misc_feature (1)..(25): SEQ ID NO: 3349; WAN024DMQ_at; Start 122; Stop 146
aagaaaaggaaaggaagaatgcgct

SEQ ID NO: 163926 - DNA, 25 bp, Artificial
  probe
  misc_feature (1)..(25): SEQ ID NO: 3349; WAN024DMQ_at; Start 81; Stop 105
ggaagaattggctgataaaaatcaa

SEQ ID NO: 163927 - DNA, 25 bp, Artificial
  probe
  misc_feature (1)..(25): SEQ ID NO: 3349; WAN024DMQ_at; Start 68; Stop 92
cagatgaaaagctggaagaattggc

SEQ ID NO: 163928 - DNA, 25 bp, Artificial
  probe
  misc_feature (1)..(25): SEQ ID NO: 3349; WAN024DMQ_at; Start 121; Stop 145
gaagaaaaggaaaggaagaatgcgc

SEQ ID NO: 163929 - DNA, 25 bp, Artificial
  probe
  misc_feature (1)..(25): SEQ ID NO: 3349; WAN024DMQ_at; Start 55; Stop 79
tttttgagtttgtcagatgaaaagc

SEQ ID NO: 163930 - DNA, 25 bp, Artificial
  probe
  misc_feature (1)..(25): SEQ ID NO: 3349; WAN024DMQ_at; Start 47; Stop 71
tagagcaatttttgagtttgtcaga

SEQ ID NO: 163931 - DNA, 25 bp, Artificial
  probe
  misc_feature (1)..(25): SEQ ID NO: 3349; WAN024DMQ_at; Start 65; Stop 89
tgtcagatgaaaagctggaagaatt

SEQ ID NO: 163932 - DNA, 25 bp, Artificial
  probe
  misc_feature (1)..(25): SEQ ID NO: 3349; WAN024DMQ_at; Start 49; Stop 73
gagcaatttttgagtttgtcagatg

SEQ ID NO: 163933 - DNA, 25 bp, Artificial
  probe
  misc_feature (1)..(25): SEQ ID NO: 3349; WAN024DMQ_at; Start 127; Stop 151
aaggaaaggaagaatgcgctaacta

SEQ ID NO: 163934 - DNA, 25 bp, Artificial
  probe
  misc_feature (1)..(25): SEQ ID NO: 3349; WAN024DMQ_at; Start 75; Stop 99
aaagctggaagaattggctgataaa

SEQ ID NO: 163935 - DNA, 25 bp, Artificial
  probe
  misc_feature (1)..(25): SEQ ID NO: 3349; WAN024DMQ_at; Start 107; Stop 131
tattgcgtttacaagaagaaaagga

SEQ ID NO: 163936 - DNA, 25 bp, Artificial
  probe
  misc_feature (1)..(25): SEQ ID NO: 3349; WAN024DMQ_at; Start 7; Stop 31
tgcttcaaaggtgataaaatggaaa

SEQ ID NO: 163937 - DNA, 25 bp, Artificial
  probe
  misc_feature (1)..(25): SEQ ID NO: 3349; WAN024DMQ_at; Start 62; Stop 86
gtttgtcagatgaaaagctggaaga

SEQ ID NO: 163938 - DNA, 25 bp, Artificial
  probe
  misc_feature (1)..(25): SEQ ID NO: 3349; WAN024DMQ_at; Start 60; Stop 84
gagtttgtcagatgaaaagctggaa

SEQ ID NO: 163939 - DNA, 25 bp, Artificial
  probe
  misc_feature (1)..(25): SEQ ID NO: 3349; WAN024DMQ_at; Start 38; Stop 62
tagacgtaatagagcaatttttgag

SEQ ID NO: 163940 - DNA, 25 bp, Artificial
  probe
  misc_feature (1)..(25): SEQ ID NO: 3349; WAN024DMQ_at; Start 70; Stop 94
gatgaaaagctggaagaattggctg

SEQ ID NO: 163941 - DNA, 25 bp, Artificial
  probe
  misc_feature (1)..(25): SEQ ID NO: 3349; WAN024DMQ_at; Start 40; Stop 64
gacgtaatagagcaatttttgagtt

SEQ ID NO: 163942 - DNA, 25 bp, Artificial
  probe
  misc_feature (1)..(25): SEQ ID NO: 3349; WAN024DMQ_at; Start 126; Stop 150
aaaggaaaggaagaatgcgctaact

SEQ ID NO: 163943 - DNA, 25 bp, Artificial
  probe
  misc_feature (1)..(25): SEQ ID NO: 3349; WAN024DMQ_at; Start 129; Stop 153
ggaaaggaagaatgcgctaactaat

SEQ ID NO: 163944 - DNA, 25 bp, Artificial
  probe
  misc_feature (1)..(25): SEQ ID NO: 3349; WAN024DMQ_at; Start 51; Stop 75
gcaatttttgagtttgtcagatgaa

SEQ ID NO: 163945 - DNA, 25 bp, Artificial
  probe
  misc_feature (1)..(25): SEQ ID NO: 3349; WAN024DMQ_at; Start 99; Stop 123
aaatcaattattgcgtttacaagaa

SEQ ID NO: 163946 - DNA, 25 bp, Artificial
  probe
  misc_feature (1)..(25): SEQ ID NO: 3349; WAN024DMQ_at; Start 58; Stop 82
ttgagtttgtcagatgaaaagctgg

SEQ ID NO: 163947 - DNA, 25 bp, Artificial
  probe
  misc_feature (1)..(25): SEQ ID NO: 3349; WAN024DMQ_at; Start 78; Stop 102
gctggaagaattggctgataaaaat

SEQ ID NO: 163948 - DNA, 25 bp, Artificial
  probe
  misc_feature (1)..(25): SEQ ID NO: 3349; WAN024DMQ_at; Start 28; Stop 52
gaaaatttattagacgtaatagagc

SEQ ID NO: 163949 - DNA, 25 bp, Artificial
  probe
  misc_feature (1)..(25): SEQ ID NO: 3349; WAN024DMQ_at; Start 89; Stop 113
tggctgataaaaatcaattattgcg

SEQ ID NO: 163950 - DNA, 25 bp, Artificial
  probe
  misc_feature (1)..(25): SEQ ID NO: 3349; WAN024DMQ_at; Start 5; Stop 29
cttgcttcaaaggtgataaaatgga

SEQ ID NO: 163951 - DNA, 25 bp, Artificial
  probe
  misc_feature (1)..(25): SEQ ID NO: 3349; WAN024DMQ_at; Start 73; Stop 97
gaaaagctggaagaattggctgata

SEQ ID NO: 163952 - DNA, 25 bp, Artificial
  probe
  misc_feature (1)..(25): SEQ ID NO: 3349; WAN024DMQ_at; Start 9; Stop 33
cttcaaaggtgataaaatggaaaat

SEQ ID NO: 163953 - DNA, 25 bp, Artificial
  probe
  misc_feature (1)..(25): SEQ ID NO: 3349; WAN024DMQ_at; Start 72; Stop 96
tgaaaagctggaagaattggctgat

SEQ ID NO: 163954 - DNA, 25 bp, Artificial
  probe
  misc_feature (1)..(25): SEQ ID NO: 3349; WAN024DMQ_at; Start 103; Stop 127
caattattgcgtttacaagaagaaa

SEQ ID NO: 163955 - DNA, 25 bp, Artificial
  probe
  misc_feature (1)..(25): SEQ ID NO: 3349; WAN024DMQ_at; Start 3; Stop 27
gacttgcttcaaaggtgataaaatg

SEQ ID NO: 163956 - DNA, 25 bp, Artificial
  probe
  misc_feature (1)..(25): SEQ ID NO: 3349; WAN024DMQ_at; Start 44; Stop 68
taatagagcaatttttgagtttgtc

SEQ ID NO: 163957 - DNA, 25 bp, Artificial
  probe
  misc_feature (1)..(25): SEQ ID NO: 2902; WAN024DMR_at; Start 280; Stop 304
gattatgctgctaaatatacacgag

SEQ ID NO: 163958 - DNA, 25 bp, Artificial
  probe
  misc_feature (1)..(25): SEQ ID NO: 2902; WAN024DMR_at; Start 310; Stop 334
tactattattctaagtcgagggaaa

SEQ ID NO: 163959 - DNA, 25 bp, Artificial
  probe
  misc_feature (1)..(25): SEQ ID NO: 2902; WAN024DMR_at; Start 334; Stop 358
aaagtttatacgattcctgacttgc

SEQ ID NO: 163960 - DNA, 25 bp, Artificial
  probe
  misc_feature (1)..(25): SEQ ID NO: 2902; WAN024DMR_at; Start 123; Stop 147
tatgctattatttatcttgccaact

SEQ ID NO: 163961 - DNA, 25 bp, Artificial
  probe
  misc_feature (1)..(25): SEQ ID NO: 2902; WAN024DMR_at; Start 206; Stop 230
tgcaaactcagtatcaaactttgag

SEQ ID NO: 163962 - DNA, 25 bp, Artificial
  probe
  misc_feature (1)..(25): SEQ ID NO: 2902; WAN024DMR_at; Start 61; Stop 85
cgctacctgatgaaagaacgacaaa

SEQ ID NO: 163963 - DNA, 25 bp, Artificial
  probe
  misc_feature (1)..(25): SEQ ID NO: 2902; WAN024DMR_at; Start 306; Stop 330
gaagtactattattctaagtcgagg

SEQ ID NO: 163964 - DNA, 25 bp, Artificial
  probe
  misc_feature (1)..(25): SEQ ID NO: 2902; WAN024DMR_at; Start 150; Stop 174
taatttagcgcagagttatcagcaa

SEQ ID NO: 163965 - DNA, 25 bp, Artificial
  probe
  misc_feature (1)..(25): SEQ ID NO: 2902; WAN024DMR_at; Start 193; Stop 217
caattagcagacttgcaaactcagt

SEQ ID NO: 163966 - DNA, 25 bp, Artificial
  probe
  misc_feature (1)..(25): SEQ ID NO: 2902; WAN024DMR_at; Start 270; Stop 294
gaaagatgaagattatgctgctaaa

SEQ ID NO: 163967 - DNA, 25 bp, Artificial
  probe
  misc_feature (1)..(25): SEQ ID NO: 2902; WAN024DMR_at; Start 55; Stop 79
cgtcgtcgctacctgatgaaagaac

SEQ ID NO: 163968 - DNA, 25 bp, Artificial
  probe
  misc_feature (1)..(25): SEQ ID NO: 2902; WAN024DMR_at; Start 41; Stop 65
aaaatgaataccaacgtcgtcgcta

SEQ ID NO: 163969 - DNA, 25 bp, Artificial
  probe
  misc_feature (1)..(25): SEQ ID NO: 2902; WAN024DMR_at; Start 171; Stop 195
gcaattactccaaagacgtcagcaa

SEQ ID NO: 163970 - DNA, 25 bp, Artificial
  probe
  misc_feature (1)..(25): SEQ ID NO: 2902; WAN024DMR_at; Start 220; Stop 244
caaactttgagtgatgaaaaggata

SEQ ID NO: 163971 - DNA, 25 bp, Artificial
  probe
  misc_feature (1)..(25): SEQ ID NO: 2902; WAN024DMR_at; Start 263; Stop 287
ccaagttgaaagatgaagattatgc

SEQ ID NO: 163972 - DNA, 25 bp, Artificial
  probe
  misc_feature (1)..(25): SEQ ID NO: 2902; WAN024DMR_at; Start 185; Stop 209
gacgtcagcaattagcagacttgca

SEQ ID NO: 163973 - DNA, 25 bp, Artificial
  probe
  misc_feature (1)..(25): SEQ ID NO: 2902; WAN024DMR_at; Start 107; Stop 131
gggtattgattttgattatgctatt

SEQ ID NO: 163974 - DNA, 25 bp, Artificial
  probe
  misc_feature (1)..(25): SEQ ID NO: 2902; WAN024DMR_at; Start 286; Stop 310
gctgctaaatatacacgagcgaagt

SEQ ID NO: 163975 - DNA, 25 bp, Artificial
  probe
  misc_feature (1)..(25): SEQ ID NO: 2902; WAN024DMR_at; Start 155; Stop 179
tagcgcagagttatcagcaattact

SEQ ID NO: 163976 - DNA, 25 bp, Artificial
  probe
  misc_feature (1)..(25): SEQ ID NO: 2902; WAN024DMR_at; Start 46; Stop 70
gaataccaacgtcgtcgctacctga

SEQ ID NO: 163977 - DNA, 25 bp, Artificial
  probe
  misc_feature (1)..(25): SEQ ID NO: 2902; WAN024DMR_at; Start 289; Stop 313
gctaaatatacacgagcgaagtact

SEQ ID NO: 163978 - DNA, 25 bp, Artificial
  probe
  misc_feature (1)..(25): SEQ ID NO: 2902; WAN024DMR_at; Start 141; Stop 165
gccaacttttaatttagcgcagagt

SEQ ID NO: 163979 - DNA, 25 bp, Artificial
  probe
  misc_feature (1)..(25): SEQ ID NO: 2902; WAN024DMR_at; Start 68; Stop 92
tgatgaaagaacgacaaaaacggaa

SEQ ID NO: 163980 - DNA, 25 bp, Artificial
  probe
  misc_feature (1)..(25): SEQ ID NO: 2902; WAN024DMR_at; Start 297; Stop 321
tacacgagcgaagtactattattct

SEQ ID NO: 163981 - DNA, 25 bp, Artificial
  probe
  misc_feature (1)..(25): SEQ ID NO: 2902; WAN024DMR_at; Start 259; Stop 283
gctaccaagttgaaagatgaagatt

SEQ ID NO: 163982 - DNA, 25 bp, Artificial
  probe
  misc_feature (1)..(25): SEQ ID NO: 2902; WAN024DMR_at; Start 199; Stop 223
gcagacttgcaaactcagtatcaaa

SEQ ID NO: 163983 - DNA, 25 bp, Artificial
  probe
  misc_feature (1)..(25): SEQ ID NO: 2902; WAN024DMR_at; Start 251; Stop 275
cagcatttgctaccaagttgaaaga

SEQ ID NO: 163984 - DNA, 25 bp, Artificial
  probe
  misc_feature (1)..(25): SEQ ID NO: 2902; WAN024DMR_at; Start 52; Stop 76
caacgtcgtcgctacctgatgaaag

SEQ ID NO: 163985 - DNA, 25 bp, Artificial
  probe
  misc_feature (1)..(25): SEQ ID NO: 2902; WAN024DMR_at; Start 176; Stop 200
tactccaaagacgtcagcaattagc

SEQ ID NO: 163986 - DNA, 25 bp, Artificial
  probe
  misc_feature (1)..(25): SEQ ID NO: 2902; WAN024DMR_at; Start 168; Stop 192
tcagcaattactccaaagacgtcag

SEQ ID NO: 163987 - DNA, 25 bp, Artificial
  probe
  misc_feature (1)..(25): SEQ ID NO: 2902; WAN024DMR_at; Start 181; Stop 205
caaagacgtcagcaattagcagact

SEQ ID NO: 163988 - DNA, 25 bp, Artificial
  probe
  misc_feature (1)..(25): SEQ ID NO: 2902; WAN024DMR_at; Start 38; Stop 62
ttcaaaatgaataccaacgtcgtcg

SEQ ID NO: 163989 - DNA, 25 bp, Artificial
  probe
  misc_feature (1)..(25): SEQ ID NO: 2902; WAN024DMR_at; Start 164; Stop 188
gttatcagcaattactccaaagacg

SEQ ID NO: 163990 - DNA, 25 bp, Artificial
  probe
  misc_feature (1)..(25): SEQ ID NO: 2902; WAN024DMR_at; Start 340; Stop 364
tatacgattcctgacttgcttcaaa

SEQ ID NO: 163991 - DNA, 25 bp, Artificial
  probe
  misc_feature (1)..(25): SEQ ID NO: 1819; WAN024DMS_at; Start 970; Stop 994
gatttgaccattagtttcaacccaa

SEQ ID NO: 163992 - DNA, 25 bp, Artificial
  probe
  misc_feature (1)..(25): SEQ ID NO: 1819; WAN024DMS_at; Start 954; Stop 978
tcaggttactggtgaagatttgacc

SEQ ID NO: 163993 - DNA, 25 bp, Artificial
  probe
  misc_feature (1)..(25): SEQ ID NO: 1819; WAN024DMS_at; Start 215; Stop 239
taggttcgatccttcttgaagcttc

SEQ ID NO: 163994 - DNA, 25 bp, Artificial
  probe
  misc_feature (1)..(25): SEQ ID NO: 1819; WAN024DMS_at; Start 892; Stop 916
gttgttagcgcccatgttcactctc

SEQ ID NO: 163995 - DNA, 25 bp, Artificial
  probe
  misc_feature (1)..(25): SEQ ID NO: 1819; WAN024DMS_at; Start 721; Stop 745
tatactcgtctcctagaaggaaact

SEQ ID NO: 163996 - DNA, 25 bp, Artificial
  probe
  misc_feature (1)..(25): SEQ ID NO: 1819; WAN024DMS_at; Start 501; Stop 525
cgtattgagtcaacacaaagagtta

SEQ ID NO: 163997 - DNA, 25 bp, Artificial
  probe
  misc_feature (1)..(25): SEQ ID NO: 1819; WAN024DMS_at; Start 842; Stop 866
tatcaagtgcgactcaaaatggtac

SEQ ID NO: 163998 - DNA, 25 bp, Artificial
  probe
  misc_feature (1)..(25): SEQ ID NO: 1819; WAN024DMS_at; Start 736; Stop 760
gaaggaaactatcctgatacagatc

SEQ ID NO: 163999 - DNA, 25 bp, Artificial
  probe
  misc_feature (1)..(25): SEQ ID NO: 1819; WAN024DMS_at; Start 306; Stop 330
tcaaattgttttaaccagtggcaaa

SEQ ID NO: 164000 - DNA, 25 bp, Artificial
  probe
  misc_feature (1)..(25): SEQ ID NO: 1819; WAN024DMS_at; Start 635; Stop 659
cagcggtatttacagatgatatcga

SEQ ID NO: 164001 - DNA, 25 bp, Artificial
  probe
  misc_feature (1)..(25): SEQ ID NO: 1819; WAN024DMS_at; Start 904; Stop 928
catgttcactctccagaagttggta

SEQ ID NO: 164002 - DNA, 25 bp, Artificial
  probe
  misc_feature (1)..(25): SEQ ID NO: 1819; WAN024DMS_at; Start 612; Stop 636
tagccgttctctacgcgaattttca

SEQ ID NO: 164003 - DNA, 25 bp, Artificial
  probe
  misc_feature (1)..(25): SEQ ID NO: 1819; WAN024DMS_at; Start 825; Stop 849
ggagcgtgcccgtcttttatcaagt

SEQ ID NO: 164004 - DNA, 25 bp, Artificial
  probe
  misc_feature (1)..(25): SEQ ID NO: 1819; WAN024DMS_at; Start 541; Stop 565
gactctcatcgcctaagccagaaaa

SEQ ID NO: 164005 - DNA, 25 bp, Artificial
  probe
  misc_feature (1)..(25): SEQ ID NO: 1819; WAN024DMS_at; Start 524; Stop 548
taaaaacagttgcaacagactctca

SEQ ID NO: 164006 - DNA, 25 bp, Artificial
  probe
  misc_feature (1)..(25): SEQ ID NO: 1819; WAN024DMS_at; Start 473; Stop 497
gtcgtccgattttaacaggtgtcca

SEQ ID NO: 164007 - DNA, 25 bp, Artificial
  probe
  misc_feature (1)..(25): SEQ ID NO: 1819; WAN024DMS_at; Start 682; Stop 706
aataaccaaatcctctttagaagcg

SEQ ID NO: 164008 - DNA, 25 bp, Artificial
  probe
  misc_feature (1)..(25): SEQ ID NO: 1819; WAN024DMS_at; Start 442; Stop 466
gaaacagcctttgctgcaagtacac

SEQ ID NO: 164009 - DNA, 25 bp, Artificial
  probe
  misc_feature (1)..(25): SEQ ID NO: 1819; WAN024DMS_at; Start 457; Stop 481
gcaagtacacaagagagtcgtccga

SEQ ID NO: 164010 - DNA, 25 bp, Artificial
  probe
  misc_feature (1)..(25): SEQ ID NO: 1819; WAN024DMS_at; Start 1079; Stop 1103
tgccagcagatactgacgaagactt

SEQ ID NO: 164011 - DNA, 25 bp, Artificial
  probe
  misc_feature (1)..(25): SEQ ID NO: 1819; WAN024DMS_at; Start 367; Stop 391
tatccacgaatccaagaaatttcag

SEQ ID NO: 164012 - DNA, 25 bp, Artificial
  probe
  misc_feature (1)..(25): SEQ ID NO: 1819; WAN024DMS_at; Start 806; Stop 830
taaacttacgccagtcaatggagcg

SEQ ID NO: 164013 - DNA, 25 bp, Artificial
  probe
  misc_feature (1)..(25): SEQ ID NO: 1819; WAN024DMS_at; Start 1044; Stop 1068
tagctttatctcagctgttcgtcca

SEQ ID NO: 164014 - DNA, 25 bp, Artificial
  probe
  misc_feature (1)..(25): SEQ ID NO: 1819; WAN024DMS_at; Start 488; Stop 512
caggtgtccacttcgtattgagtca

SEQ ID NO: 164015 - DNA, 25 bp, Artificial
  probe
  misc_feature (1)..(25): SEQ ID NO: 1819; WAN024DMS_at; Start 1107; Stop 1131
gcagctcattacaccagttcgtaca

SEQ ID NO: 164016 - DNA, 25 bp, Artificial
  probe
  misc_feature (1)..(25): SEQ ID NO: 1819; WAN024DMS_at; Start 382; Stop 406
gaaatttcagcaagcactcctttaa

SEQ ID NO: 164017 - DNA, 25 bp, Artificial
  probe
  misc_feature (1)..(25): SEQ ID NO: 1819; WAN024DMS_at; Start 1064; Stop 1088
gtccatttactcttgtgccagcaga

SEQ ID NO: 164018 - DNA, 25 bp, Artificial
  probe
  misc_feature (1)..(25): SEQ ID NO: 1819; WAN024DMS_at; Start 1093; Stop 1117
gacgaagacttcatgcagctcatta

SEQ ID NO: 164019 - DNA, 25 bp, Artificial
  probe
  misc_feature (1)..(25): SEQ ID NO: 1819; WAN024DMS_at; Start 936; Stop 960
cgaagaaatcgatactgatcaggtt

SEQ ID NO: 164020 - DNA, 25 bp, Artificial
  probe
  misc_feature (1)..(25): SEQ ID NO: 1819; WAN024DMS_at; Start 592; Stop 616
gattttgatgtcgtaattcctagcc

SEQ ID NO: 164021 - DNA, 25 bp, Artificial
  probe
  misc_feature (1)..(25): SEQ ID NO: 1819; WAN024DMS_at; Start 321; Stop 345
cagtggcaaatcagaaattacccta

SEQ ID NO: 164022 - DNA, 25 bp, Artificial
  probe
  misc_feature (1)..(25): SEQ ID NO: 1819; WAN024DMS_at; Start 751; Stop 775
gatacagatcgcttgattccaacag

SEQ ID NO: 164023 - DNA, 25 bp, Artificial
  probe
  misc_feature (1)..(25): SEQ ID NO: 1819; WAN024DMS_at; Start 664; Stop 688
gtagagattttctttgccaataacc

SEQ ID NO: 164024 - DNA, 25 bp, Artificial
  probe
  misc_feature (1)..(25): SEQ ID NO: 1819; WAN024DMS_at; Start 350; Stop 374
gaaaagatagcgaacaatatccacg

SEQ ID NO: 164025 - DNA, 25 bp, Artificial
  probe
  misc_feature (1)..(25): SEQ ID NO: 5205; WAN024DMT_at; Start 19; Stop 43
gaattgtacctctttcttggtcgga

SEQ ID NO: 164026 - DNA, 25 bp, Artificial
  probe
  misc_feature (1)..(25): SEQ ID NO: 5205; WAN024DMT_at; Start 106; Stop 130
caaggaagctttatctataatgaat

SEQ ID NO: 164027 - DNA, 25 bp, Artificial
  probe
  misc_feature (1)..(25): SEQ ID NO: 5205; WAN024DMT_at; Start 93; Stop 117
tcttggtcagggtcaaggaagcttt

SEQ ID NO: 164028 - DNA, 25 bp, Artificial
  probe
  misc_feature (1)..(25): SEQ ID NO: 5205; WAN024DMT_at; Start 30; Stop 54
ctttcttggtcggacagccttgtat

SEQ ID NO: 164029 - DNA, 25 bp, Artificial
  probe
  misc_feature (1)..(25): SEQ ID NO: 5205; WAN024DMT_at; Start 25; Stop 49
tacctctttcttggtcggacagcct

SEQ ID NO: 164030 - DNA, 25 bp, Artificial
  probe
  misc_feature (1)..(25): SEQ ID NO: 5205; WAN024DMT_at; Start 94; Stop 118
cttggtcagggtcaaggaagcttta

SEQ ID NO: 164031 - DNA, 25 bp, Artificial
  probe
  misc_feature (1)..(25): SEQ ID NO: 5205; WAN024DMT_at; Start 83; Stop 107
tctttagctatcttggtcagggtca

SEQ ID NO: 164032 - DNA, 25 bp, Artificial
  probe
  misc_feature (1)..(25): SEQ ID NO: 5205; WAN024DMT_at; Start 84; Stop 108
ctttagctatcttggtcagggtcaa

SEQ ID NO: 164033 - DNA, 25 bp, Artificial
  probe
  misc_feature (1)..(25): SEQ ID NO: 5205; WAN024DMT_at; Start 57; Stop 81
tcttatctttctagggctgctttac

SEQ ID NO: 164034 - DNA, 25 bp, Artificial
  probe
  misc_feature (1)..(25): SEQ ID NO: 5205; WAN024DMT_at; Start 79; Stop 103
tacttctttagctatcttggtcagg

SEQ ID NO: 164035 - DNA, 25 bp, Artificial
  probe
  misc_feature (1)..(25): SEQ ID NO: 5205; WAN024DMT_at; Start 90; Stop 114
ctatcttggtcagggtcaaggaagc

SEQ ID NO: 164036 - DNA, 25 bp, Artificial
  probe
  misc_feature (1)..(25): SEQ ID NO: 5205; WAN024DMT_at; Start 27; Stop 51
cctctttcttggtcggacagccttg

SEQ ID NO: 164037 - DNA, 25 bp, Artificial
  probe
  misc_feature (1)..(25): SEQ ID NO: 5205; WAN024DMT_at; Start 66; Stop 90
tctagggctgctttacttctttagc

SEQ ID NO: 164038 - DNA, 25 bp, Artificial
  probe
  misc_feature (1)..(25): SEQ ID NO: 5205; WAN024DMT_at; Start 58; Stop 82
cttatctttctagggctgctttact

SEQ ID NO: 164039 - DNA, 25 bp, Artificial
  probe
  misc_feature (1)..(25): SEQ ID NO: 5205; WAN024DMT_at; Start 37; Stop 61
ggtcggacagccttgtattttctta

SEQ ID NO: 164040 - DNA, 25 bp, Artificial
  probe
  misc_feature (1)..(25): SEQ ID NO: 5205; WAN024DMT_at; Start 96; Stop 120
tggtcagggtcaaggaagctttatc

SEQ ID NO: 164041 - DNA, 25 bp, Artificial
  probe
  misc_feature (1)..(25): SEQ ID NO: 5205; WAN024DMT_at; Start 87; Stop 111
tagctatcttggtcagggtcaagga

SEQ ID NO: 164042 - DNA, 25 bp, Artificial
  probe
  misc_feature (1)..(25): SEQ ID NO: 5205; WAN024DMT_at; Start 34; Stop 58
cttggtcggacagccttgtattttc

SEQ ID NO: 164043 - DNA, 25 bp, Artificial
  probe
  misc_feature (1)..(25): SEQ ID NO: 5205; WAN024DMT_at; Start 113; Stop 137
gctttatctataatgaatttctaac

SEQ ID NO: 164044 - DNA, 25 bp, Artificial
  probe
  misc_feature (1)..(25): SEQ ID NO: 5205; WAN024DMT_at; Start 32; Stop 56
ttcttggtcggacagccttgtattt

SEQ ID NO: 164045 - DNA, 25 bp, Artificial
  probe
  misc_feature (1)..(25): SEQ ID NO: 5205; WAN024DMT_at; Start 23; Stop 47
tgtacctctttcttggtcggacagc

SEQ ID NO: 164046 - DNA, 25 bp, Artificial
  probe
  misc_feature (1)..(25): SEQ ID NO: 5205; WAN024DMT_at; Start 100; Stop 124
cagggtcaaggaagctttatctata

SEQ ID NO: 164047 - DNA, 25 bp, Artificial
  probe
  misc_feature (1)..(25): SEQ ID NO: 5205; WAN024DMT_at; Start 68; Stop 92
tagggctgctttacttctttagcta

SEQ ID NO: 164048 - DNA, 25 bp, Artificial
  probe
  misc_feature (1)..(25): SEQ ID NO: 5205; WAN024DMT_at; Start 28; Stop 52
ctctttcttggtcggacagccttgt

SEQ ID NO: 164049 - DNA, 25 bp, Artificial
  probe
  misc_feature (1)..(25): SEQ ID NO: 5205; WAN024DMT_at; Start 6; Stop 30
gaaacagagaaaagaattgtacctc

SEQ ID NO: 164050 - DNA, 25 bp, Artificial
  probe
  misc_feature (1)..(25): SEQ ID NO: 5205; WAN024DMT_at; Start 1; Stop 25
ttgatgaaacagagaaaagaattgt

SEQ ID NO: 164051 - DNA, 25 bp, Artificial
  probe
  misc_feature (1)..(25): SEQ ID NO: 5205; WAN024DMT_at; Start 10; Stop 34
cagagaaaagaattgtacctctttc

SEQ ID NO: 164052 - DNA, 25 bp, Artificial
  probe
  misc_feature (1)..(25): SEQ ID NO: 5205; WAN024DMT_at; Start 62; Stop 86
tctttctagggctgctttacttctt

SEQ ID NO: 164053 - DNA, 25 bp, Artificial
  probe
  misc_feature (1)..(25): SEQ ID NO: 5205; WAN024DMT_at; Start 70; Stop 94
gggctgctttacttctttagctatc

SEQ ID NO: 164054 - DNA, 25 bp, Artificial
  probe
  misc_feature (1)..(25): SEQ ID NO: 5205; WAN024DMT_at; Start 80; Stop 104
acttctttagctatcttggtcaggg

SEQ ID NO: 164055 - DNA, 25 bp, Artificial
  probe
  misc_feature (1)..(25): SEQ ID NO: 5205; WAN024DMT_at; Start 52; Stop 76
tattttcttatctttctagggctgc

SEQ ID NO: 164056 - DNA, 25 bp, Artificial
  probe
  misc_feature (1)..(25): SEQ ID NO: 5205; WAN024DMT_at; Start 40; Stop 64
cggacagccttgtattttcttatct

SEQ ID NO: 164057 - DNA, 25 bp, Artificial
  probe
  misc_feature (1)..(25): SEQ ID NO: 5205; WAN024DMT_at; Start 97; Stop 121
ggtcagggtcaaggaagctttatct

SEQ ID NO: 164058 - DNA, 25 bp, Artificial
  probe
  misc_feature (1)..(25): SEQ ID NO: 5205; WAN024DMT_at; Start 103; Stop 127
ggtcaaggaagctttatctataatg

SEQ ID NO: 164059 - DNA, 25 bp, Artificial
  probe
  misc_feature (1)..(25): SEQ ID NO: 1569; WAN024DMU_at; Start 3; Stop 27
gagccttataccagagcttgctctt

SEQ ID NO: 164060 - DNA, 25 bp, Artificial
  probe
  misc_feature (1)..(25): SEQ ID NO: 1569; WAN024DMU_at; Start 2; Stop 26
tgagccttataccagagcttgctct

SEQ ID NO: 164061 - DNA, 25 bp, Artificial
  probe
  misc_feature (1)..(25): SEQ ID NO: 1569; WAN024DMU_at; Start 72; Stop 96
ctgcaaatggctagatggtaagaag

SEQ ID NO: 164062 - DNA, 25 bp, Artificial
  probe
  misc_feature (1)..(25): SEQ ID NO: 1569; WAN024DMU_at; Start 11; Stop 35
taccagagcttgctcttactattat

SEQ ID NO: 164063 - DNA, 25 bp, Artificial
  probe
  misc_feature (1)..(25): SEQ ID NO: 1569; WAN024DMU_at; Start 10; Stop 34
ataccagagcttgctcttactatta

SEQ ID NO: 164064 - DNA, 25 bp, Artificial
  probe
  misc_feature (1)..(25): SEQ ID NO: 1569; WAN024DMU_at; Start 8; Stop 32
ttataccagagcttgctcttactat

SEQ ID NO: 164065 - DNA, 25 bp, Artificial
  probe
  misc_feature (1)..(25): SEQ ID NO: 1569; WAN024DMU_at; Start 71; Stop 95
tctgcaaatggctagatggtaagaa

SEQ ID NO: 164066 - DNA, 25 bp, Artificial
  probe
  misc_feature (1)..(25): SEQ ID NO: 1569; WAN024DMU_at; Start 5; Stop 29
gccttataccagagcttgctcttac

SEQ ID NO: 164067 - DNA, 25 bp, Artificial
  probe
  misc_feature (1)..(25): SEQ ID NO: 1569; WAN024DMU_at; Start 7; Stop 31
cttataccagagcttgctcttacta

SEQ ID NO: 164068 - DNA, 25 bp, Artificial
  probe
  misc_feature (1)..(25): SEQ ID NO: 1569; WAN024DMU_at; Start 12; Stop 36
accagagcttgctcttactattata

SEQ ID NO: 164069 - DNA, 25 bp, Artificial
  probe
  misc_feature (1)..(25): SEQ ID NO: 1569; WAN024DMU_at; Start 6; Stop 30
ccttataccagagcttgctcttact

SEQ ID NO: 164070 - DNA, 25 bp, Artificial
  probe
  misc_feature (1)..(25): SEQ ID NO: 1569; WAN024DMU_at; Start 70; Stop 94
gtctgcaaatggctagatggtaaga

SEQ ID NO: 164071 - DNA, 25 bp, Artificial
  probe
  misc_feature (1)..(25): SEQ ID NO: 1569; WAN024DMU_at; Start 4; Stop 28
agccttataccagagcttgctctta

SEQ ID NO: 164072 - DNA, 25 bp, Artificial
  probe
  misc_feature (1)..(25): SEQ ID NO: 1569; WAN024DMU_at; Start 9; Stop 33
tataccagagcttgctcttactatt

SEQ ID NO: 164073 - DNA, 25 bp, Artificial
  probe
  misc_feature (1)..(25): SEQ ID NO: 1569; WAN024DMU_at; Start 1; Stop 25
atgagccttataccagagcttgctc

SEQ ID NO: 164074 - DNA, 25 bp, Artificial
  probe
  misc_feature (1)..(25): SEQ ID NO: 1758; WAN024DMV_at; Start 228; Stop 252
tgaattagaaaacaagcttttgaac

SEQ ID NO: 164075 - DNA, 25 bp, Artificial
  probe
  misc_feature (1)..(25): SEQ ID NO: 1758; WAN024DMV_at; Start 126; Stop 150
tcagcctgtacaggatacagaaacg

SEQ ID NO: 164076 - DNA, 25 bp, Artificial
  probe
  misc_feature (1)..(25): SEQ ID NO: 1758; WAN024DMV_at; Start 36; Stop 60
gagaaagcagcgtttttctttgagg

SEQ ID NO: 164077 - DNA, 25 bp, Artificial
  probe
  misc_feature (1)..(25): SEQ ID NO: 1758; WAN024DMV_at; Start 175; Stop 199
tatttggatgagcaggatttatctg

SEQ ID NO: 164078 - DNA, 25 bp, Artificial
  probe
  misc_feature (1)..(25): SEQ ID NO: 1758; WAN024DMV_at; Start 192; Stop 216
tttatctgaaaagctgaaatctgag

SEQ ID NO: 164079 - DNA, 25 bp, Artificial
  probe
  misc_feature (1)..(25): SEQ ID NO: 1758; WAN024DMV_at; Start 79; Stop 103
tgttcggtcttgctaggaacgagtt

SEQ ID NO: 164080 - DNA, 25 bp, Artificial
  probe
  misc_feature (1)..(25): SEQ ID NO: 1758; WAN024DMV_at; Start 73; Stop 97
ggagcttgttcggtcttgctaggaa

SEQ ID NO: 164081 - DNA, 25 bp, Artificial
  probe
  misc_feature (1)..(25): SEQ ID NO: 1758; WAN024DMV_at; Start 134; Stop 158
tacaggatacagaaacgagttcagc

SEQ ID NO: 164082 - DNA, 25 bp, Artificial
  probe
  misc_feature (1)..(25): SEQ ID NO: 1758; WAN024DMV_at; Start 136; Stop 160
caggatacagaaacgagttcagcac

SEQ ID NO: 164083 - DNA, 25 bp, Artificial
  probe
  misc_feature (1)..(25): SEQ ID NO: 1758; WAN024DMV_at; Start 63; Stop 87
atatgcaataggagcttgttcggtc

SEQ ID NO: 164084 - DNA, 25 bp, Artificial
  probe
  misc_feature (1)..(25): SEQ ID NO: 1758; WAN024DMV_at; Start 149; Stop 173
cgagttcagcactaatttcaagtca

SEQ ID NO: 164085 - DNA, 25 bp, Artificial
  probe
  misc_feature (1)..(25): SEQ ID NO: 1758; WAN024DMV_at; Start 26; Stop 50
ttcaatttgagagaaagcagcgttt

SEQ ID NO: 164086 - DNA, 25 bp, Artificial
  probe
  misc_feature (1)..(25): SEQ ID NO: 1758; WAN024DMV_at; Start 181; Stop 205
gatgagcaggatttatctgaaaagc

SEQ ID NO: 164087 - DNA, 25 bp, Artificial
  probe
  misc_feature (1)..(25): SEQ ID NO: 1758; WAN024DMV_at; Start 130; Stop 154
cctgtacaggatacagaaacgagtt

SEQ ID NO: 164088 - DNA, 25 bp, Artificial
  probe
  misc_feature (1)..(25): SEQ ID NO: 1758; WAN024DMV_at; Start 167; Stop 191
caagtcattatttggatgagcagga

SEQ ID NO: 164089 - DNA, 25 bp, Artificial
  probe
  misc_feature (1)..(25): SEQ ID NO: 1758; WAN024DMV_at; Start 196; Stop 220
tctgaaaagctgaaatctgagttgc

SEQ ID NO: 164090 - DNA, 25 bp, Artificial
  probe
  misc_feature (1)..(25): SEQ ID NO: 1758; WAN024DMV_at; Start 141; Stop 165
tacagaaacgagttcagcactaatt

SEQ ID NO: 164091 - DNA, 25 bp, Artificial
  probe
  misc_feature (1)..(25): SEQ ID NO: 1758; WAN024DMV_at; Start 5; Stop 29
tgggagatgggatgaaagaatttca

SEQ ID NO: 164092 - DNA, 25 bp, Artificial
  probe
  misc_feature (1)..(25): SEQ ID NO: 1758; WAN024DMV_at; Start 152; Stop 176
gttcagcactaatttcaagtcatta

SEQ ID NO: 164093 - DNA, 25 bp, Artificial
  probe
  misc_feature (1)..(25): SEQ ID NO: 1758; WAN024DMV_at; Start 146; Stop 170
aaacgagttcagcactaatttcaag

SEQ ID NO: 164094 - DNA, 25 bp, Artificial
  probe
  misc_feature (1)..(25): SEQ ID NO: 1758; WAN024DMV_at; Start 22; Stop 46
gaatttcaatttgagagaaagcagc

SEQ ID NO: 164095 - DNA, 25 bp, Artificial
  probe
  misc_feature (1)..(25): SEQ ID NO: 1758; WAN024DMV_at; Start 83; Stop 107
cggtcttgctaggaacgagtttatt

SEQ ID NO: 164096 - DNA, 25 bp, Artificial
  probe
  misc_feature (1)..(25): SEQ ID NO: 1758; WAN024DMV_at; Start 240; Stop 264
caagcttttgaacttatgggagcat

SEQ ID NO: 164097 - DNA, 25 bp, Artificial
  probe
  misc_feature (1)..(25): SEQ ID NO: 1758; WAN024DMV_at; Start 98; Stop 122
cgagtttattttttgctggtatggg

SEQ ID NO: 164098 - DNA, 25 bp, Artificial
  probe
  misc_feature (1)..(25): SEQ ID NO: 1758; WAN024DMV_at; Start 138; Stop 162
ggatacagaaacgagttcagcacta

SEQ ID NO: 164099 - DNA, 25 bp, Artificial
  probe
  misc_feature (1)..(25): SEQ ID NO: 1758; WAN024DMV_at; Start 243; Stop 267
gcttttgaacttatgggagcatcta

SEQ ID NO: 164100 - DNA, 25 bp, Artificial
  probe
  misc_feature (1)..(25): SEQ ID NO: 1758; WAN024DMV_at; Start 199; Stop 223
gaaaagctgaaatctgagttgcaat

SEQ ID NO: 164101 - DNA, 25 bp, Artificial
  probe
  misc_feature (1)..(25): SEQ ID NO: 1758; WAN024DMV_at; Start 238; Stop 262
aacaagcttttgaacttatgggagc

SEQ ID NO: 164102 - DNA, 25 bp, Artificial
  probe
  misc_feature (1)..(25): SEQ ID NO: 1758; WAN024DMV_at; Start 201; Stop 225
aaagctgaaatctgagttgcaatgg

SEQ ID NO: 164103 - DNA, 25 bp, Artificial
  probe
  misc_feature (1)..(25): SEQ ID NO: 1758; WAN024DMV_at; Start 28; Stop 52
caatttgagagaaagcagcgttttt

SEQ ID NO: 164104 - DNA, 25 bp, Artificial
  probe
  misc_feature (1)..(25): SEQ ID NO: 1758; WAN024DMV_at; Start 89; Stop 113
tgctaggaacgagtttattttttgc

SEQ ID NO: 164105 - DNA, 25 bp, Artificial
  probe
  misc_feature (1)..(25): SEQ ID NO: 1758; WAN024DMV_at; Start 186; Stop 210
gcaggatttatctgaaaagctgaaa

SEQ ID NO: 164106 - DNA, 25 bp, Artificial
  probe
  misc_feature (1)..(25): SEQ ID NO: 1758; WAN024DMV_at; Start 68; Stop 92
caataggagcttgttcggtcttgct

SEQ ID NO: 164107 - DNA, 25 bp, Artificial
  probe
  misc_feature (1)..(25): SEQ ID NO: 1758; WAN024DMV_at; Start 76; Stop 100
gcttgttcggtcttgctaggaacga

SEQ ID NO: 164108 - DNA, 25 bp, Artificial
  probe
  misc_feature (1)..(25): SEQ ID NO: 2113; WAN024DMW_at; Start 17; Stop 41
tatcttcaaaagaatgttgcatctt

SEQ ID NO: 164109 - DNA, 25 bp, Artificial
  probe
  misc_feature (1)..(25): SEQ ID NO: 2113; WAN024DMW_at; Start 78; Stop 102
tccaagtgataaccagatgataatt

SEQ ID NO: 164110 - DNA, 25 bp, Artificial
  probe
  misc_feature (1)..(25): SEQ ID NO: 2113; WAN024DMW_at; Start 70; Stop 94
tatacagatccaagtgataaccaga

SEQ ID NO: 164111 - DNA, 25 bp, Artificial
  probe
  misc_feature (1)..(25): SEQ ID NO: 2113; WAN024DMW_at; Start 35; Stop 59
gcatctttttatcctttcacacaaa

SEQ ID NO: 164112 - DNA, 25 bp, Artificial
  probe
  misc_feature (1)..(25): SEQ ID NO: 2113; WAN024DMW_at; Start 8; Stop 32
tccaaaatctatcttcaaaagaatg

SEQ ID NO: 164113 - DNA, 25 bp, Artificial
  probe
  misc_feature (1)..(25): SEQ ID NO: 2113; WAN024DMW_at; Start 80; Stop 104
caagtgataaccagatgataattgg

SEQ ID NO: 164114 - DNA, 25 bp, Artificial
  probe
  misc_feature (1)..(25): SEQ ID NO: 2113; WAN024DMW_at; Start 3; Stop 27
gcttctccaaaatctatcttcaaaa

SEQ ID NO: 164115 - DNA, 25 bp, Artificial
  probe
  misc_feature (1)..(25): SEQ ID NO: 2113; WAN024DMW_at; Start 44; Stop 68
tatcctttcacacaaacatttctct

SEQ ID NO: 164116 - DNA, 25 bp, Artificial
  probe
  misc_feature (1)..(25): SEQ ID NO: 2113; WAN024DMW_at; Start 90; Stop 114
ccagatgataattggacactttttg

SEQ ID NO: 164117 - DNA, 25 bp, Artificial
  probe
  misc_feature (1)..(25): SEQ ID NO: 2113; WAN024DMW_at; Start 87; Stop 111
taaccagatgataattggacacttt

SEQ ID NO: 164118 - DNA, 25 bp, Artificial
  probe
  misc_feature (1)..(25): SEQ ID NO: 2113; WAN024DMW_at; Start 76; Stop 100
gatccaagtgataaccagatgataa

SEQ ID NO: 164119 - DNA, 25 bp, Artificial
  probe
  misc_feature (1)..(25): SEQ ID NO: 2113; WAN024DMW_at; Start 62; Stop 86
tttctctttatacagatccaagtga

SEQ ID NO: 164120 - DNA, 25 bp, Artificial
  probe
  misc_feature (1)..(25): SEQ ID NO: 2113; WAN024DMW_at; Start 66; Stop 90
tctttatacagatccaagtgataac

SEQ ID NO: 164121 - DNA, 25 bp, Artificial
  probe
  misc_feature (1)..(25): SEQ ID NO: 2113; WAN024DMW_at; Start 72; Stop 96
tacagatccaagtgataaccagatg

SEQ ID NO: 164122 - DNA, 25 bp, Artificial
  probe
  misc_feature (1)..(25): SEQ ID NO: 2113; WAN024DMW_at; Start 85; Stop 109
gataaccagatgataattggacact

SEQ ID NO: 164123 - DNA, 25 bp, Artificial
  probe
  misc_feature (1)..(25): SEQ ID NO: 2113; WAN024DMW_at; Start 69; Stop 93
ttatacagatccaagtgataaccag

SEQ ID NO: 164124 - DNA, 25 bp, Artificial
  probe
  misc_feature (1)..(25): SEQ ID NO: 2113; WAN024DMW_at; Start 28; Stop 52
gaatgttgcatctttttatcctttc

SEQ ID NO: 164125 - DNA, 25 bp, Artificial
  probe
  misc_feature (1)..(25): SEQ ID NO: 2113; WAN024DMW_at; Start 67; Stop 91
ctttatacagatccaagtgataacc

SEQ ID NO: 164126 - DNA, 25 bp, Artificial
  probe
  misc_feature (1)..(25): SEQ ID NO: 2113; WAN024DMW_at; Start 56; Stop 80
caaacatttctctttatacagatcc

SEQ ID NO: 164127 - DNA, 25 bp, Artificial
  probe
  misc_feature (1)..(25): SEQ ID NO: 2113; WAN024DMW_at; Start 34; Stop 58
tgcatctttttatcctttcacacaa

SEQ ID NO: 164128 - DNA, 25 bp, Artificial
  probe
  misc_feature (1)..(25): SEQ ID NO: 2113; WAN024DMW_at; Start 32; Stop 56
gttgcatctttttatcctttcacac

SEQ ID NO: 164129 - DNA, 25 bp, Artificial
  probe
  misc_feature (1)..(25): SEQ ID NO: 2113; WAN024DMW_at; Start 82; Stop 106
agtgataaccagatgataattggac

SEQ ID NO: 164130 - DNA, 25 bp, Artificial
  probe
  misc_feature (1)..(25): SEQ ID NO: 2113; WAN024DMW_at; Start 74; Stop 98
cagatccaagtgataaccagatgat

SEQ ID NO: 164131 - DNA, 25 bp, Artificial
  probe
  misc_feature (1)..(25): SEQ ID NO: 2113; WAN024DMW_at; Start 15; Stop 39
tctatcttcaaaagaatgttgcatc

SEQ ID NO: 164132 - DNA, 25 bp, Artificial
  probe
  misc_feature (1)..(25): SEQ ID NO: 2113; WAN024DMW_at; Start 75; Stop 99
agatccaagtgataaccagatgata

SEQ ID NO: 164133 - DNA, 25 bp, Artificial
  probe
  misc_feature (1)..(25): SEQ ID NO: 2113; WAN024DMW_at; Start 73; Stop 97
acagatccaagtgataaccagatga

SEQ ID NO: 164134 - DNA, 25 bp, Artificial
  probe
  misc_feature (1)..(25): SEQ ID NO: 2113; WAN024DMW_at; Start 84; Stop 108
tgataaccagatgataattggacac

SEQ ID NO: 164135 - DNA, 25 bp, Artificial
  probe
  misc_feature (1)..(25): SEQ ID NO: 2113; WAN024DMW_at; Start 13; Stop 37
aatctatcttcaaaagaatgttgca

SEQ ID NO: 164136 - DNA, 25 bp, Artificial
  probe
  misc_feature (1)..(25): SEQ ID NO: 2113; WAN024DMW_at; Start 64; Stop 88
tctctttatacagatccaagtgata

SEQ ID NO: 164137 - DNA, 25 bp, Artificial
  probe
  misc_feature (1)..(25): SEQ ID NO: 2113; WAN024DMW_at; Start 25; Stop 49
aaagaatgttgcatctttttatcct

SEQ ID NO: 164138 - DNA, 25 bp, Artificial
  probe
  misc_feature (1)..(25): SEQ ID NO: 2113; WAN024DMW_at; Start 59; Stop 83
acatttctctttatacagatccaag

SEQ ID NO: 164139 - DNA, 25 bp, Artificial
  probe
  misc_feature (1)..(25): SEQ ID NO: 2113; WAN024DMW_at; Start 6; Stop 30
tctccaaaatctatcttcaaaagaa

SEQ ID NO: 164140 - DNA, 25 bp, Artificial
  probe
  misc_feature (1)..(25): SEQ ID NO: 2113; WAN024DMW_at; Start 79; Stop 103
ccaagtgataaccagatgataattg

SEQ ID NO: 164141 - DNA, 25 bp, Artificial
  probe
  misc_feature (1)..(25): SEQ ID NO: 2113; WAN024DMW_at; Start 52; Stop 76
cacacaaacatttctctttatacag

SEQ ID NO: 164142 - DNA, 25 bp, Artificial
  probe
  misc_feature (1)..(25): SEQ ID NO: 3355; WAN024DMX_at; Start 35; Stop 59
ttatcactcaacttgaacaaatacc

SEQ ID NO: 164143 - DNA, 25 bp, Artificial
  probe
  misc_feature (1)..(25): SEQ ID NO: 3355; WAN024DMX_at; Start 59; Stop 83
cagaaccacaaaaaacagatgtaaa

SEQ ID NO: 164144 - DNA, 25 bp, Artificial
  probe
  misc_feature (1)..(25): SEQ ID NO: 3355; WAN024DMX_at; Start 26; Stop 50
ttcgctatattatcactcaacttga

SEQ ID NO: 164145 - DNA, 25 bp, Artificial
  probe
  misc_feature (1)..(25): SEQ ID NO: 3355; WAN024DMX_at; Start 52; Stop 76
caaataccagaaccacaaaaaacag

SEQ ID NO: 164146 - DNA, 25 bp, Artificial
  probe
  misc_feature (1)..(25): SEQ ID NO: 3355; WAN024DMX_at; Start 54; Stop 78
aataccagaaccacaaaaaacagat

SEQ ID NO: 164147 - DNA, 25 bp, Artificial
  probe
  misc_feature (1)..(25): SEQ ID NO: 3355; WAN024DMX_at; Start 48; Stop 72
tgaacaaataccagaaccacaaaaa

SEQ ID NO: 164148 - DNA, 25 bp, Artificial
  probe
  misc_feature (1)..(25): SEQ ID NO: 3355; WAN024DMX_at; Start 13; Stop 37
tctcgaaattcaattcgctatatta

SEQ ID NO: 164149 - DNA, 25 bp, Artificial
  probe
  misc_feature (1)..(25): SEQ ID NO: 3355; WAN024DMX_at; Start 10; Stop 34
aactctcgaaattcaattcgctata

SEQ ID NO: 164150 - DNA, 25 bp, Artificial
  probe
  misc_feature (1)..(25): SEQ ID NO: 3355; WAN024DMX_at; Start 40; Stop 64
actcaacttgaacaaataccagaac

SEQ ID NO: 164151 - DNA, 25 bp, Artificial
  probe
  misc_feature (1)..(25): SEQ ID NO: 3355; WAN024DMX_at; Start 73; Stop 97
acagatgtaaaggaaaaatatggac

SEQ ID NO: 164152 - DNA, 25 bp, Artificial
  probe
  misc_feature (1)..(25): SEQ ID NO: 3355; WAN024DMX_at; Start 46; Stop 70
cttgaacaaataccagaaccacaaa

SEQ ID NO: 164153 - DNA, 25 bp, Artificial
  probe
  misc_feature (1)..(25): SEQ ID NO: 3355; WAN024DMX_at; Start 76; Stop 100
gatgtaaaggaaaaatatggactta

SEQ ID NO: 164154 - DNA, 25 bp, Artificial
  probe
  misc_feature (1)..(25): SEQ ID NO: 3355; WAN024DMX_at; Start 60; Stop 84
agaaccacaaaaaacagatgtaaag

SEQ ID NO: 164155 - DNA, 25 bp, Artificial
  probe
  misc_feature (1)..(25): SEQ ID NO: 3355; WAN024DMX_at; Start 55; Stop 79
ataccagaaccacaaaaaacagatg

SEQ ID NO: 164156 - DNA, 25 bp, Artificial
  probe
  misc_feature (1)..(25): SEQ ID NO: 3355; WAN024DMX_at; Start 8; Stop 32
aaaactctcgaaattcaattcgcta

SEQ ID NO: 164157 - DNA, 25 bp, Artificial
  probe
  misc_feature (1)..(25): SEQ ID NO: 3355; WAN024DMX_at; Start 56; Stop 80
taccagaaccacaaaaaacagatgt

SEQ ID NO: 164158 - DNA, 25 bp, Artificial
  probe
  misc_feature (1)..(25): SEQ ID NO: 3355; WAN024DMX_at; Start 74; Stop 98
cagatgtaaaggaaaaatatggact

SEQ ID NO: 164159 - DNA, 25 bp, Artificial
  probe
  misc_feature (1)..(25): SEQ ID NO: 3355; WAN024DMX_at; Start 57; Stop 81
accagaaccacaaaaaacagatgta

SEQ ID NO: 164160 - DNA, 25 bp, Artificial
  probe
  misc_feature (1)..(25): SEQ ID NO: 3355; WAN024DMX_at; Start 2; Stop 26
tgagtaaaaactctcgaaattcaat

SEQ ID NO: 164161 - DNA, 25 bp, Artificial
  probe
  misc_feature (1)..(25): SEQ ID NO: 3355; WAN024DMX_at; Start 23; Stop 47
caattcgctatattatcactcaact

SEQ ID NO: 164162 - DNA, 25 bp, Artificial
  probe
  misc_feature (1)..(25): SEQ ID NO: 3355; WAN024DMX_at; Start 22; Stop 46
tcaattcgctatattatcactcaac

SEQ ID NO: 164163 - DNA, 25 bp, Artificial
  probe
  misc_feature (1)..(25): SEQ ID NO: 3355; WAN024DMX_at; Start 45; Stop 69
acttgaacaaataccagaaccacaa

SEQ ID NO: 164164 - DNA, 25 bp, Artificial
  probe
  misc_feature (1)..(25): SEQ ID NO: 3355; WAN024DMX_at; Start 42; Stop 66
tcaacttgaacaaataccagaacca

SEQ ID NO: 164165 - DNA, 25 bp, Artificial
  probe
  misc_feature (1)..(25): SEQ ID NO: 3355; WAN024DMX_at; Start 43; Stop 67
caacttgaacaaataccagaaccac

SEQ ID NO: 164166 - DNA, 25 bp, Artificial
  probe
  misc_feature (1)..(25): SEQ ID NO: 3355; WAN024DMX_at; Start 29; Stop 53
gctatattatcactcaacttgaaca

SEQ ID NO: 164167 - DNA, 25 bp, Artificial
  probe
  misc_feature (1)..(25): SEQ ID NO: 3355; WAN024DMX_at; Start 19; Stop 43
aattcaattcgctatattatcactc

SEQ ID NO: 164168 - DNA, 25 bp, Artificial
  probe
  misc_feature (1)..(25): SEQ ID NO: 3355; WAN024DMX_at; Start 6; Stop 30
taaaaactctcgaaattcaattcgc

SEQ ID NO: 164169 - DNA, 25 bp, Artificial
  probe
  misc_feature (1)..(25): SEQ ID NO: 3355; WAN024DMX_at; Start 31; Stop 55
tatattatcactcaacttgaacaaa

SEQ ID NO: 164170 - DNA, 25 bp, Artificial
  probe
  misc_feature (1)..(25): SEQ ID NO: 3355; WAN024DMX_at; Start 39; Stop 63
cactcaacttgaacaaataccagaa

SEQ ID NO: 164171 - DNA, 25 bp, Artificial
  probe
  misc_feature (1)..(25): SEQ ID NO: 3355; WAN024DMX_at; Start 44; Stop 68
aacttgaacaaataccagaaccaca

SEQ ID NO: 164172 - DNA, 25 bp, Artificial
  probe
  misc_feature (1)..(25): SEQ ID NO: 3355; WAN024DMX_at; Start 58; Stop 82
ccagaaccacaaaaaacagatgtaa

SEQ ID NO: 164173 - DNA, 25 bp, Artificial
  probe
  misc_feature (1)..(25): SEQ ID NO: 3355; WAN024DMX_at; Start 28; Stop 52
cgctatattatcactcaacttgaac

SEQ ID NO: 164174 - DNA, 25 bp, Artificial
  probe
  misc_feature (1)..(25): SEQ ID NO: 3355; WAN024DMX_at; Start 1; Stop 25
ctgagtaaaaactctcgaaattcaa

SEQ ID NO: 164175 - DNA, 25 bp, Artificial
  probe
  misc_feature (1)..(25): SEQ ID NO: 3355; WAN024DMX_at; Start 38; Stop 62
tcactcaacttgaacaaataccaga

SEQ ID NO: 164176 - DNA, 25 bp, Artificial
  probe
  misc_feature (1)..(25): SEQ ID NO: 7661; WAN024DMY_at; Start 104; Stop 128
tggccttccttgactctaccttgct

SEQ ID NO: 164177 - DNA, 25 bp, Artificial
  probe
  misc_feature (1)..(25): SEQ ID NO: 7661; WAN024DMY_at; Start 120; Stop 144
taccttgcttgctatcaaggagacc

SEQ ID NO: 164178 - DNA, 25 bp, Artificial
  probe
  misc_feature (1)..(25): SEQ ID NO: 7661; WAN024DMY_at; Start 137; Stop 161
aggagaccttctgcccacagataaa

SEQ ID NO: 164179 - DNA, 25 bp, Artificial
  probe
  misc_feature (1)..(25): SEQ ID NO: 7661; WAN024DMY_at; Start 193; Stop 217
gaaatgctcttcgataacacgttta

SEQ ID NO: 164180 - DNA, 25 bp, Artificial
  probe
  misc_feature (1)..(25): SEQ ID NO: 7661; WAN024DMY_at; Start 189; Stop 213
tgtagaaatgctcttcgataacacg

SEQ ID NO: 164181 - DNA, 25 bp, Artificial
  probe
  misc_feature (1)..(25): SEQ ID NO: 7661; WAN024DMY_at; Start 2; Stop 26
tggtttgcagatattcaagaatcgg

SEQ ID NO: 164182 - DNA, 25 bp, Artificial
  probe
  misc_feature (1)..(25): SEQ ID NO: 7661; WAN024DMY_at; Start 205; Stop 229
gataacacgtttaaaataataggca

SEQ ID NO: 164183 - DNA, 25 bp, Artificial
  probe
  misc_feature (1)..(25): SEQ ID NO: 7661; WAN024DMY_at; Start 57; Stop 81
tacagccaagcatctcaaaaatacg

SEQ ID NO: 164184 - DNA, 25 bp, Artificial
  probe
  misc_feature (1)..(25): SEQ ID NO: 7661; WAN024DMY_at; Start 11; Stop 35
gatattcaagaatcgggagtttttc

SEQ ID NO: 164185 - DNA, 25 bp, Artificial
  probe
  misc_feature (1)..(25): SEQ ID NO: 7661; WAN024DMY_at; Start 92; Stop 116
tccatctttttctggccttccttga

SEQ ID NO: 164186 - DNA, 25 bp, Artificial
  probe
  misc_feature (1)..(25): SEQ ID NO: 7661; WAN024DMY_at; Start 26; Stop 50
ggagtttttctatagtattcggcag

SEQ ID NO: 164187 - DNA, 25 bp, Artificial
  probe
  misc_feature (1)..(25): SEQ ID NO: 7661; WAN024DMY_at; Start 221; Stop 245
taataggcattggtaaattcttcac

SEQ ID NO: 164188 - DNA, 25 bp, Artificial
  probe
  misc_feature (1)..(25): SEQ ID NO: 7661; WAN024DMY_at; Start 115; Stop 139
gactctaccttgcttgctatcaagg

SEQ ID NO: 164189 - DNA, 25 bp, Artificial
  probe
  misc_feature (1)..(25): SEQ ID NO: 7661; WAN024DMY_at; Start 63; Stop 87
caagcatctcaaaaatacggacagc

SEQ ID NO: 164190 - DNA, 25 bp, Artificial
  probe
  misc_feature (1)..(25): SEQ ID NO: 7661; WAN024DMY_at; Start 82; Stop 106
gacagcatcctccatctttttctgg

SEQ ID NO: 164191 - DNA, 25 bp, Artificial
  probe
  misc_feature (1)..(25): SEQ ID NO: 7661; WAN024DMY_at; Start 158; Stop 182
taaacaattcggaaataggtctcat

SEQ ID NO: 164192 - DNA, 25 bp, Artificial
  probe
  misc_feature (1)..(25): SEQ ID NO: 7661; WAN024DMY_at; Start 236; Stop 260
aattcttcacactcaatactagcta

SEQ ID NO: 164193 - DNA, 25 bp, Artificial
  probe
  misc_feature (1)..(25): SEQ ID NO: 7661; WAN024DMY_at; Start 7; Stop 31
tgcagatattcaagaatcgggagtt

SEQ ID NO: 164194 - DNA, 25 bp, Artificial
  probe
  misc_feature (1)..(25): SEQ ID NO: 7661; WAN024DMY_at; Start 110; Stop 134
tccttgactctaccttgcttgctat

SEQ ID NO: 164195 - DNA, 25 bp, Artificial
  probe
  misc_feature (1)..(25): SEQ ID NO: 7661; WAN024DMY_at; Start 152; Stop 176
cacagataaacaattcggaaatagg

SEQ ID NO: 164196 - DNA, 25 bp, Artificial
  probe
  misc_feature (1)..(25): SEQ ID NO: 7661; WAN024DMY_at; Start 226; Stop 250
ggcattggtaaattcttcacactca

SEQ ID NO: 164197 - DNA, 25 bp, Artificial
  probe
  misc_feature (1)..(25): SEQ ID NO: 7661; WAN024DMY_at; Start 67; Stop 91
catctcaaaaatacggacagcatcc

SEQ ID NO: 164198 - DNA, 25 bp, Artificial
  probe
  misc_feature (1)..(25): SEQ ID NO: 7661; WAN024DMY_at; Start 125; Stop 149
tgcttgctatcaaggagaccttctg

SEQ ID NO: 164199 - DNA, 25 bp, Artificial
  probe
  misc_feature (1)..(25): SEQ ID NO: 7661; WAN024DMY_at; Start 145; Stop 169
ttctgcccacagataaacaattcgg

SEQ ID NO: 164200 - DNA, 25 bp, Artificial
  probe
  misc_feature (1)..(25): SEQ ID NO: 7661; WAN024DMY_at; Start 182; Stop 206
ttttccttgtagaaatgctcttcga

SEQ ID NO: 164201 - DNA, 25 bp, Artificial
  probe
  misc_feature (1)..(25): SEQ ID NO: 7661; WAN024DMY_at; Start 46; Stop 70
ggcagatttattacagccaagcatc

SEQ ID NO: 164202 - DNA, 25 bp, Artificial
  probe
  misc_feature (1)..(25): SEQ ID NO: 7661; WAN024DMY_at; Start 71; Stop 95
tcaaaaatacggacagcatcctcca

SEQ ID NO: 164203 - DNA, 25 bp, Artificial
  probe
  misc_feature (1)..(25): SEQ ID NO: 7661; WAN024DMY_at; Start 169; Stop 193
gaaataggtctcattttccttgtag

SEQ ID NO: 164204 - DNA, 25 bp, Artificial
  probe
  misc_feature (1)..(25): SEQ ID NO: 7661; WAN024DMY_at; Start 210; Stop 234
cacgtttaaaataataggcattggt

SEQ ID NO: 164205 - DNA, 25 bp, Artificial
  probe
  misc_feature (1)..(25): SEQ ID NO: 7661; WAN024DMY_at; Start 78; Stop 102
tacggacagcatcctccatcttttt

SEQ ID NO: 164206 - DNA, 25 bp, Artificial
  probe
  misc_feature (1)..(25): SEQ ID NO: 7661; WAN024DMY_at; Start 132; Stop 156
tatcaaggagaccttctgcccacag

SEQ ID NO: 164207 - DNA, 25 bp, Artificial
  probe
  misc_feature (1)..(25): SEQ ID NO: 7661; WAN024DMY_at; Start 39; Stop 63
agtattcggcagatttattacagcc

SEQ ID NO: 164208 - DNA, 25 bp, Artificial
  probe
  misc_feature (1)..(25): SEQ ID NO: 7661; WAN024DMY_at; Start 135; Stop 159
caaggagaccttctgcccacagata

SEQ ID NO: 164209 - DNA, 25 bp, Artificial
  probe
  misc_feature (1)..(25): SEQ ID NO: 7661; WAN024DMY_at; Start 149; Stop 173
gcccacagataaacaattcggaaat

SEQ ID NO: 164210 - DNA, 25 bp, Artificial
  probe
  misc_feature (1)..(25): SEQ ID NO: 7517; WAN024DMZ_at; Start 86; Stop 110
aggatatttatcacgtggagggact

SEQ ID NO: 164211 - DNA, 25 bp, Artificial
  probe
  misc_feature (1)..(25): SEQ ID NO: 7517; WAN024DMZ_at; Start 78; Stop 102
gaaaatagaggatatttatcacgtg

SEQ ID NO: 164212 - DNA, 25 bp, Artificial
  probe
  misc_feature (1)..(25): SEQ ID NO: 7517; WAN024DMZ_at; Start 53; Stop 77
acttgccaaattgtcagaattatga

SEQ ID NO: 164213 - DNA, 25 bp, Artificial
  probe
  misc_feature (1)..(25): SEQ ID NO: 7517; WAN024DMZ_at; Start 36; Stop 60
cagaaaattcatcaaaaacttgcca

SEQ ID NO: 164214 - DNA, 25 bp, Artificial
  probe
  misc_feature (1)..(25): SEQ ID NO: 7517; WAN024DMZ_at; Start 90; Stop 114
tatttatcacgtggagggactgcta

SEQ ID NO: 164215 - DNA, 25 bp, Artificial
  probe
  misc_feature (1)..(25): SEQ ID NO: 7517; WAN024DMZ_at; Start 50; Stop 74
aaaacttgccaaattgtcagaatta

SEQ ID NO: 164216 - DNA, 25 bp, Artificial
  probe
  misc_feature (1)..(25): SEQ ID NO: 7517; WAN024DMZ_at; Start 88; Stop 112
gatatttatcacgtggagggactgc

SEQ ID NO: 164217 - DNA, 25 bp, Artificial
  probe
  misc_feature (1)..(25): SEQ ID NO: 7517; WAN024DMZ_at; Start 41; Stop 65
aattcatcaaaaacttgccaaattg

SEQ ID NO: 164218 - DNA, 25 bp, Artificial
  probe
  misc_feature (1)..(25): SEQ ID NO: 7517; WAN024DMZ_at; Start 49; Stop 73
aaaaacttgccaaattgtcagaatt

SEQ ID NO: 164219 - DNA, 25 bp, Artificial
  probe
  misc_feature (1)..(25): SEQ ID NO: 7517; WAN024DMZ_at; Start 52; Stop 76
aacttgccaaattgtcagaattatg

SEQ ID NO: 164220 - DNA, 25 bp, Artificial
  probe
  misc_feature (1)..(25): SEQ ID NO: 7517; WAN024DMZ_at; Start 64; Stop 88
tgtcagaattatgagaaaatagagg

SEQ ID NO: 164221 - DNA, 25 bp, Artificial
  probe
  misc_feature (1)..(25): SEQ ID NO: 7517; WAN024DMZ_at; Start 3; Stop 27
gattccgtattttcttcattttatc

SEQ ID NO: 164222 - DNA, 25 bp, Artificial
  probe
  misc_feature (1)..(25): SEQ ID NO: 7517; WAN024DMZ_at; Start 44; Stop 68
tcatcaaaaacttgccaaattgtca

SEQ ID NO: 164223 - DNA, 25 bp, Artificial
  probe
  misc_feature (1)..(25): SEQ ID NO: 7517; WAN024DMZ_at; Start 67; Stop 91
cagaattatgagaaaatagaggata

SEQ ID NO: 164224 - DNA, 25 bp, Artificial
  probe
  misc_feature (1)..(25): SEQ ID NO: 7517; WAN024DMZ_at; Start 89; Stop 113
atatttatcacgtggagggactgct

SEQ ID NO: 164225 - DNA, 25 bp, Artificial
  probe
  misc_feature (1)..(25): SEQ ID NO: 7517; WAN024DMZ_at; Start 56; Stop 80
tgccaaattgtcagaattatgagaa

SEQ ID NO: 164226 - DNA, 25 bp, Artificial
  probe
  misc_feature (1)..(25): SEQ ID NO: 7517; WAN024DMZ_at; Start 47; Stop 71
tcaaaaacttgccaaattgtcagaa

SEQ ID NO: 164227 - DNA, 25 bp, Artificial
  probe
  misc_feature (1)..(25): SEQ ID NO: 7517; WAN024DMZ_at; Start 34; Stop 58
ttcagaaaattcatcaaaaacttgc

SEQ ID NO: 164228 - DNA, 25 bp, Artificial
  probe
  misc_feature (1)..(25): SEQ ID NO: 7517; WAN024DMZ_at; Start 43; Stop 67
ttcatcaaaaacttgccaaattgtc

SEQ ID NO: 164229 - DNA, 25 bp, Artificial
  probe
  misc_feature (1)..(25): SEQ ID NO: 7517; WAN024DMZ_at; Start 48; Stop 72
caaaaacttgccaaattgtcagaat

SEQ ID NO: 164230 - DNA, 25 bp, Artificial
  probe
  misc_feature (1)..(25): SEQ ID NO: 7517; WAN024DMZ_at; Start 81; Stop 105
aatagaggatatttatcacgtggag

SEQ ID NO: 164231 - DNA, 25 bp, Artificial
  probe
  misc_feature (1)..(25): SEQ ID NO: 7517; WAN024DMZ_at; Start 80; Stop 104
aaatagaggatatttatcacgtgga

SEQ ID NO: 164232 - DNA, 25 bp, Artificial
  probe
  misc_feature (1)..(25): SEQ ID NO: 7517; WAN024DMZ_at; Start 54; Stop 78
cttgccaaattgtcagaattatgag

SEQ ID NO: 164233 - DNA, 25 bp, Artificial
  probe
  misc_feature (1)..(25): SEQ ID NO: 7517; WAN024DMZ_at; Start 59; Stop 83
caaattgtcagaattatgagaaaat

SEQ ID NO: 164234 - DNA, 25 bp, Artificial
  probe
  misc_feature (1)..(25): SEQ ID NO: 7517; WAN024DMZ_at; Start 38; Stop 62
gaaaattcatcaaaaacttgccaaa

SEQ ID NO: 164235 - DNA, 25 bp, Artificial
  probe
  misc_feature (1)..(25): SEQ ID NO: 7517; WAN024DMZ_at; Start 84; Stop 108
agaggatatttatcacgtggaggga

SEQ ID NO: 164236 - DNA, 25 bp, Artificial
  probe
  misc_feature (1)..(25): SEQ ID NO: 7517; WAN024DMZ_at; Start 6; Stop 30
tccgtattttcttcattttatcata

SEQ ID NO: 164237 - DNA, 25 bp, Artificial
  probe
  misc_feature (1)..(25): SEQ ID NO: 7517; WAN024DMZ_at; Start 79; Stop 103
aaaatagaggatatttatcacgtgg

SEQ ID NO: 164238 - DNA, 25 bp, Artificial
  probe
  misc_feature (1)..(25): SEQ ID NO: 7517; WAN024DMZ_at; Start 35; Stop 59
tcagaaaattcatcaaaaacttgcc

SEQ ID NO: 164239 - DNA, 25 bp, Artificial
  probe
  misc_feature (1)..(25): SEQ ID NO: 7517; WAN024DMZ_at; Start 45; Stop 69
catcaaaaacttgccaaattgtcag

SEQ ID NO: 164240 - DNA, 25 bp, Artificial
  probe
  misc_feature (1)..(25): SEQ ID NO: 7517; WAN024DMZ_at; Start 58; Stop 82
ccaaattgtcagaattatgagaaaa

SEQ ID NO: 164241 - DNA, 25 bp, Artificial
  probe
  misc_feature (1)..(25): SEQ ID NO: 7517; WAN024DMZ_at; Start 57; Stop 81
gccaaattgtcagaattatgagaaa

SEQ ID NO: 164242 - DNA, 25 bp, Artificial
  probe
  misc_feature (1)..(25): SEQ ID NO: 7517; WAN024DMZ_at; Start 83; Stop 107
tagaggatatttatcacgtggaggg

SEQ ID NO: 164243 - DNA, 25 bp, Artificial
  probe
  misc_feature (1)..(25): SEQ ID NO: 7517; WAN024DMZ_at; Start 66; Stop 90
tcagaattatgagaaaatagaggat

SEQ ID NO: 164244 - DNA, 25 bp, Artificial
  probe
  misc_feature (1)..(25): SEQ ID NO: 7249; WAN024DN2_at; Start 78; Stop 102
aatgaagaaaattgaaagttctata

SEQ ID NO: 164245 - DNA, 25 bp, Artificial
  probe
  misc_feature (1)..(25): SEQ ID NO: 7249; WAN024DN2_at; Start 80; Stop 104
tgaagaaaattgaaagttctataat

SEQ ID NO: 164246 - DNA, 25 bp, Artificial
  probe
  misc_feature (1)..(25): SEQ ID NO: 7249; WAN024DN2_at; Start 77; Stop 101
aaatgaagaaaattgaaagttctat

SEQ ID NO: 164247 - DNA, 25 bp, Artificial
  probe
  misc_feature (1)..(25): SEQ ID NO: 7249; WAN024DN2_at; Start 79; Stop 103
atgaagaaaattgaaagttctataa

SEQ ID NO: 164248 - DNA, 25 bp, Artificial
  probe
  misc_feature (1)..(25): SEQ ID NO: 7634; WAN024DN3_s_at; Start 6; Stop 30
aaatgaagaaaatacggaatcaagg

SEQ ID NO: 164249 - DNA, 25 bp, Artificial
  probe
  misc_feature (1)..(25): SEQ ID NO: 7634; WAN024DN3_s_at; Start 16; Stop 40
aatacggaatcaaggggaagtctat

SEQ ID NO: 164250 - DNA, 25 bp, Artificial
  probe
  misc_feature (1)..(25): SEQ ID NO: 7634; WAN024DN3_s_at; Start 17; Stop 41
atacggaatcaaggggaagtctatg

SEQ ID NO: 164251 - DNA, 25 bp, Artificial
  probe
  misc_feature (1)..(25): SEQ ID NO: 7634; WAN024DN3_s_at; Start 29; Stop 53
ggggaagtctatggagcagattgga

SEQ ID NO: 164252 - DNA, 25 bp, Artificial
  probe
  misc_feature (1)..(25): SEQ ID NO: 7634; WAN024DN3_s_at; Start 7; Stop 31
aatgaagaaaatacggaatcaaggg

SEQ ID NO: 164253 - DNA, 25 bp, Artificial
  probe
  misc_feature (1)..(25): SEQ ID NO: 7634; WAN024DN3_s_at; Start 28; Stop 52
aggggaagtctatggagcagattgg

SEQ ID NO: 164254 - DNA, 25 bp, Artificial
  probe
  misc_feature (1)..(25): SEQ ID NO: 7634; WAN024DN3_s_at; Start 9; Stop 33
tgaagaaaatacggaatcaagggga

SEQ ID NO: 164255 - DNA, 25 bp, Artificial
  probe
  misc_feature (1)..(25): SEQ ID NO: 7634; WAN024DN3_s_at; Start 27; Stop 51
aaggggaagtctatggagcagattg

SEQ ID NO: 164256 - DNA, 25 bp, Artificial
  probe
  misc_feature (1)..(25): SEQ ID NO: 7634; WAN024DN3_s_at; Start 18; Stop 42
tacggaatcaaggggaagtctatgg

SEQ ID NO: 164257 - DNA, 25 bp, Artificial
  probe
  misc_feature (1)..(25): SEQ ID NO: 7634; WAN024DN3_s_at; Start 26; Stop 50
caaggggaagtctatggagcagatt

SEQ ID NO: 164258 - DNA, 25 bp, Artificial
  probe
  misc_feature (1)..(25): SEQ ID NO: 7634; WAN024DN3_s_at; Start 8; Stop 32
atgaagaaaatacggaatcaagggg

SEQ ID NO: 164259 - DNA, 25 bp, Artificial
  probe
  misc_feature (1)..(25): SEQ ID NO: 3988; WAN024DN4_s_at; Start 26; Stop 50
taattctgacaatttggcaagtttt

SEQ ID NO: 164260 - DNA, 25 bp, Artificial
  probe
  misc_feature (1)..(25): SEQ ID NO: 3988; WAN024DN4_s_at; Start 23; Stop 47
tcataattctgacaatttggcaagt

SEQ ID NO: 164261 - DNA, 25 bp, Artificial
  probe
  misc_feature (1)..(25): SEQ ID NO: 3988; WAN024DN4_s_at; Start 40; Stop 64
tggcaagtttttgatgaattttctg

SEQ ID NO: 164262 - DNA, 25 bp, Artificial
  probe
  misc_feature (1)..(25): SEQ ID NO: 3988; WAN024DN4_s_at; Start 10; Stop 34
atcctctattttctcataattctga

SEQ ID NO: 164263 - DNA, 25 bp, Artificial
  probe
  misc_feature (1)..(25): SEQ ID NO: 3988; WAN024DN4_s_at; Start 21; Stop 45
tctcataattctgacaatttggcaa

SEQ ID NO: 164264 - DNA, 25 bp, Artificial
  probe
  misc_feature (1)..(25): SEQ ID NO: 3988; WAN024DN4_s_at; Start 12; Stop 36
cctctattttctcataattctgaca

SEQ ID NO: 164265 - DNA, 25 bp, Artificial
  probe
  misc_feature (1)..(25): SEQ ID NO: 3988; WAN024DN4_s_at; Start 24; Stop 48
cataattctgacaatttggcaagtt

SEQ ID NO: 164266 - DNA, 25 bp, Artificial
  probe
  misc_feature (1)..(25): SEQ ID NO: 3988; WAN024DN4_s_at; Start 22; Stop 46
ctcataattctgacaatttggcaag

SEQ ID NO: 164267 - DNA, 25 bp, Artificial
  probe
  misc_feature (1)..(25): SEQ ID NO: 3988; WAN024DN4_s_at; Start 15; Stop 39
ctattttctcataattctgacaatt

SEQ ID NO: 164268 - DNA, 25 bp, Artificial
  probe
  misc_feature (1)..(25): SEQ ID NO: 3988; WAN024DN4_s_at; Start 14; Stop 38
tctattttctcataattctgacaat

SEQ ID NO: 164269 - DNA, 25 bp, Artificial
  probe
  misc_feature (1)..(25): SEQ ID NO: 3988; WAN024DN4_s_at; Start 29; Stop 53
ttctgacaatttggcaagtttttga

SEQ ID NO: 164270 - DNA, 25 bp, Artificial
  probe
  misc_feature (1)..(25): SEQ ID NO: 3988; WAN024DN4_s_at; Start 9; Stop 33
tatcctctattttctcataattctg

SEQ ID NO: 164271 - DNA, 25 bp, Artificial
  probe
  misc_feature (1)..(25): SEQ ID NO: 3988; WAN024DN4_s_at; Start 1; Stop 25
gtgataaatatcctctattttctca

SEQ ID NO: 164272 - DNA, 25 bp, Artificial
  probe
  misc_feature (1)..(25): SEQ ID NO: 3988; WAN024DN4_s_at; Start 35; Stop 59
caatttggcaagtttttgatgaatt

SEQ ID NO: 164273 - DNA, 25 bp, Artificial
  probe
  misc_feature (1)..(25): SEQ ID NO: 3988; WAN024DN4_s_at; Start 34; Stop 58
acaatttggcaagtttttgatgaat

SEQ ID NO: 164274 - DNA, 25 bp, Artificial
  probe
  misc_feature (1)..(25): SEQ ID NO: 3988; WAN024DN4_s_at; Start 11; Stop 35
tcctctattttctcataattctgac

SEQ ID NO: 164275 - DNA, 25 bp, Artificial
  probe
  misc_feature (1)..(25): SEQ ID NO: 3988; WAN024DN4_s_at; Start 20; Stop 44
ttctcataattctgacaatttggca

SEQ ID NO: 164276 - DNA, 25 bp, Artificial
  probe
  misc_feature (1)..(25): SEQ ID NO: 3988; WAN024DN4_s_at; Start 33; Stop 57
gacaatttggcaagtttttgatgaa

SEQ ID NO: 164277 - DNA, 25 bp, Artificial
  probe
  misc_feature (1)..(25): SEQ ID NO: 3988; WAN024DN4_s_at; Start 41; Stop 65
ggcaagtttttgatgaattttctga

SEQ ID NO: 164278 - DNA, 25 bp, Artificial
  probe
  misc_feature (1)..(25): SEQ ID NO: 3988; WAN024DN4_s_at; Start 31; Stop 55
ctgacaatttggcaagtttttgatg

SEQ ID NO: 164279 - DNA, 25 bp, Artificial
  probe
  misc_feature (1)..(25): SEQ ID NO: 3988; WAN024DN4_s_at; Start 19; Stop 43
tttctcataattctgacaatttggc

SEQ ID NO: 164280 - DNA, 25 bp, Artificial
  probe
  misc_feature (1)..(25): SEQ ID NO: 3988; WAN024DN4_s_at; Start 39; Stop 63
ttggcaagtttttgatgaattttct

SEQ ID NO: 164281 - DNA, 25 bp, Artificial
  probe
  misc_feature (1)..(25): SEQ ID NO: 3988; WAN024DN4_s_at; Start 27; Stop 51
aattctgacaatttggcaagttttt

SEQ ID NO: 164282 - DNA, 25 bp, Artificial
  probe
  misc_feature (1)..(25): SEQ ID NO: 3988; WAN024DN4_s_at; Start 13; Stop 37
ctctattttctcataattctgacaa

SEQ ID NO: 164283 - DNA, 25 bp, Artificial
  probe
  misc_feature (1)..(25): SEQ ID NO: 3988; WAN024DN4_s_at; Start 42; Stop 66
gcaagtttttgatgaattttctgaa

SEQ ID NO: 164284 - DNA, 25 bp, Artificial
  probe
  misc_feature (1)..(25): SEQ ID NO: 3988; WAN024DN4_s_at; Start 43; Stop 67
caagtttttgatgaattttctgaaa

SEQ ID NO: 164285 - DNA, 25 bp, Artificial
  probe
  misc_feature (1)..(25): SEQ ID NO: 3988; WAN024DN4_s_at; Start 18; Stop 42
ttttctcataattctgacaatttgg

SEQ ID NO: 164286 - DNA, 25 bp, Artificial
  probe
  misc_feature (1)..(25): SEQ ID NO: 3988; WAN024DN4_s_at; Start 5; Stop 29
taaatatcctctattttctcataat

SEQ ID NO: 164287 - DNA, 25 bp, Artificial
  probe
  misc_feature (1)..(25): SEQ ID NO: 3988; WAN024DN4_s_at; Start 3; Stop 27
gataaatatcctctattttctcata

SEQ ID NO: 164288 - DNA, 25 bp, Artificial
  probe
  misc_feature (1)..(25): SEQ ID NO: 3988; WAN024DN4_s_at; Start 32; Stop 56
tgacaatttggcaagtttttgatga

SEQ ID NO: 164289 - DNA, 25 bp, Artificial
  probe
  misc_feature (1)..(25): SEQ ID NO: 3988; WAN024DN4_s_at; Start 7; Stop 31
aatatcctctattttctcataattc

SEQ ID NO: 164290 - DNA, 25 bp, Artificial
  probe
  misc_feature (1)..(25): SEQ ID NO: 3988; WAN024DN4_s_at; Start 38; Stop 62
tttggcaagtttttgatgaattttc

SEQ ID NO: 164291 - DNA, 25 bp, Artificial
  probe
  misc_feature (1)..(25): SEQ ID NO: 3988; WAN024DN4_s_at; Start 28; Stop 52
attctgacaatttggcaagtttttg

SEQ ID NO: 164292 - DNA, 25 bp, Artificial
  probe
  misc_feature (1)..(25): SEQ ID NO: 3988; WAN024DN4_s_at; Start 25; Stop 49
ataattctgacaatttggcaagttt

SEQ ID NO: 164293 - DNA, 25 bp, Artificial
  probe
  misc_feature (1)..(25): SEQ ID NO: 2281; WAN024DN5_at; Start 409; Stop 433
ggaaaagtccttcatgattatttgt

SEQ ID NO: 164294 - DNA, 25 bp, Artificial
  probe
  misc_feature (1)..(25): SEQ ID NO: 2281; WAN024DN5_at; Start 324; Stop 348
caaacagaaacatattctaaatgcc

SEQ ID NO: 164295 - DNA, 25 bp, Artificial
  probe
  misc_feature (1)..(25): SEQ ID NO: 2281; WAN024DN5_at; Start 394; Stop 418
ttaacagcagaggaaggaaaagtcc

SEQ ID NO: 164296 - DNA, 25 bp, Artificial
  probe
  misc_feature (1)..(25): SEQ ID NO: 2281; WAN024DN5_at; Start 634; Stop 658
accaatgcctattattttaaacgtg

SEQ ID NO: 164297 - DNA, 25 bp, Artificial
  probe
  misc_feature (1)..(25): SEQ ID NO: 2281; WAN024DN5_at; Start 721; Stop 745
gaaggtctccttgatagcaagcaag

SEQ ID NO: 164298 - DNA, 25 bp, Artificial
  probe
  misc_feature (1)..(25): SEQ ID NO: 2281; WAN024DN5_at; Start 48; Stop 72
tatctcactgagacaagcaaccgga

SEQ ID NO: 164299 - DNA, 25 bp, Artificial
  probe
  misc_feature (1)..(25): SEQ ID NO: 2281; WAN024DN5_at; Start 92; Stop 116
tgttgtcccgttttgaaacaggtca

SEQ ID NO: 164300 - DNA, 25 bp, Artificial
  probe
  misc_feature (1)..(25): SEQ ID NO: 2281; WAN024DN5_at; Start 147; Stop 171
tgctctggaaaatatatctgccagt

SEQ ID NO: 164301 - DNA, 25 bp, Artificial
  probe
  misc_feature (1)..(25): SEQ ID NO: 2281; WAN024DN5_at; Start 199; Stop 223
ggtttccagtatgatacagattctg

SEQ ID NO: 164302 - DNA, 25 bp, Artificial
  probe
  misc_feature (1)..(25): SEQ ID NO: 2281; WAN024DN5_at; Start 783; Stop 807
tgtccgtatttttgagatgcttggc

SEQ ID NO: 164303 - DNA, 25 bp, Artificial
  probe
  misc_feature (1)..(25): SEQ ID NO: 2281; WAN024DN5_at; Start 294; Stop 318
ggagtatcaaaagcatgcccattct

SEQ ID NO: 164304 - DNA, 25 bp, Artificial
  probe
  misc_feature (1)..(25): SEQ ID NO: 2281; WAN024DN5_at; Start 269; Stop 293
cacctcttgaggacttatatcgcag

SEQ ID NO: 164305 - DNA, 25 bp, Artificial
  probe
  misc_feature (1)..(25): SEQ ID NO: 2281; WAN024DN5_at; Start 682; Stop 706
gaaaatgagacctatttccgaattg

SEQ ID NO: 164306 - DNA, 25 bp, Artificial
  probe
  misc_feature (1)..(25): SEQ ID NO: 2281; WAN024DN5_at; Start 651; Stop 675
taaacgtgttatcgaagagcatttc

SEQ ID NO: 164307 - DNA, 25 bp, Artificial
  probe
  misc_feature (1)..(25): SEQ ID NO: 2281; WAN024DN5_at; Start 669; Stop 693
gcatttctacaaggaaaatgagacc

SEQ ID NO: 164308 - DNA, 25 bp, Artificial
  probe
  misc_feature (1)..(25): SEQ ID NO: 2281; WAN024DN5_at; Start 709; Stop 733
tatctgtgggcagaaggtctccttg

SEQ ID NO: 164309 - DNA, 25 bp, Artificial
  probe
  misc_feature (1)..(25): SEQ ID NO: 2281; WAN024DN5_at; Start 220; Stop 244
tctgagttgagaaaagaaattacag

SEQ ID NO: 164310 - DNA, 25 bp, Artificial
  probe
  misc_feature (1)..(25): SEQ ID NO: 2281; WAN024DN5_at; Start 163; Stop 187
tctgccagtgtggaggagatcctct

SEQ ID NO: 164311 - DNA, 25 bp, Artificial
  probe
  misc_feature (1)..(25): SEQ ID NO: 2281; WAN024DN5_at; Start 602; Stop 626
gctttttagctagtattgagtgtga

SEQ ID NO: 164312 - DNA, 25 bp, Artificial
  probe
  misc_feature (1)..(25): SEQ ID NO: 2281; WAN024DN5_at; Start 77; Stop 101
aattttcgccgtctatgttgtcccg

SEQ ID NO: 164313 - DNA, 25 bp, Artificial
  probe
  misc_feature (1)..(25): SEQ ID NO: 2281; WAN024DN5_at; Start 805; Stop 829
ggctgtaataaatctgccgaatact

SEQ ID NO: 164314 - DNA, 25 bp, Artificial
  probe
  misc_feature (1)..(25): SEQ ID NO: 2281; WAN024DN5_at; Start 132; Stop 156
ggaaaagtttctatttgctctggaa

SEQ ID NO: 164315 - DNA, 25 bp, Artificial
  probe
  misc_feature (1)..(25): SEQ ID NO: 2281; WAN024DN5_at; Start 763; Stop 787
cagaaaaagatggaggatgctgtcc

SEQ ID NO: 164316 - DNA, 25 bp, Artificial
  probe
  misc_feature (1)..(25): SEQ ID NO: 2281; WAN024DN5_at; Start 465; Stop 489
caatttattttcagtcagttctcca

SEQ ID NO: 164317 - DNA, 25 bp, Artificial
  probe
  misc_feature (1)..(25): SEQ ID NO: 2281; WAN024DN5_at; Start 102; Stop 126
ttttgaaacaggtcagagtgagctt

SEQ ID NO: 164318 - DNA, 25 bp, Artificial
  probe
  misc_feature (1)..(25): SEQ ID NO: 2281; WAN024DN5_at; Start 735; Stop 759
tagcaagcaaggtagagtcaaggaa

SEQ ID NO: 164319 - DNA, 25 bp, Artificial
  probe
  misc_feature (1)..(25): SEQ ID NO: 2281; WAN024DN5_at; Start 427; Stop 451
tatttgttttctaccgagatctggg

SEQ ID NO: 164320 - DNA, 25 bp, Artificial
  probe
  misc_feature (1)..(25): SEQ ID NO: 2281; WAN024DN5_at; Start 502; Stop 526
tctctttttactagatatgtacgag

SEQ ID NO: 164321 - DNA, 25 bp, Artificial
  probe
  misc_feature (1)..(25): SEQ ID NO: 2281; WAN024DN5_at; Start 698; Stop 722
tccgaattgtttatctgtgggcaga

SEQ ID NO: 164322 - DNA, 25 bp, Artificial
  probe
  misc_feature (1)..(25): SEQ ID NO: 2281; WAN024DN5_at; Start 284; Stop 308
tatatcgcagggagtatcaaaagca

SEQ ID NO: 164323 - DNA, 25 bp, Artificial
  probe
  misc_feature (1)..(25): SEQ ID NO: 2281; WAN024DN5_at; Start 798; Stop 822
gatgcttggctgtaataaatctgcc

SEQ ID NO: 164324 - DNA, 25 bp, Artificial
  probe
  misc_feature (1)..(25): SEQ ID NO: 2281; WAN024DN5_at; Start 61; Stop 85
caagcaaccggaggacaattttcgc

SEQ ID NO: 164325 - DNA, 25 bp, Artificial
  probe
  misc_feature (1)..(25): SEQ ID NO: 2281; WAN024DN5_at; Start 515; Stop 539
gatatgtacgagaaatggtacgtaa

SEQ ID NO: 164326 - DNA, 25 bp, Artificial
  probe
  misc_feature (1)..(25): SEQ ID NO: 2281; WAN024DN5_at; Start 237; Stop 261
aattacagatgtcttggaaccaaag

SEQ ID NO: 164327 - DNA, 25 bp, Artificial
  probe
  misc_feature (1)..(25): SEQ ID NO: 2041; WAN024DN6_at; Start 18; Stop 42
tctaggagaaaaattgcttgctaca

SEQ ID NO: 164328 - DNA, 25 bp, Artificial
  probe
  misc_feature (1)..(25): SEQ ID NO: 2041; WAN024DN6_at; Start 24; Stop 48
agaaaaattgcttgctacaaggata

SEQ ID NO: 164329 - DNA, 25 bp, Artificial
  probe
  misc_feature (1)..(25): SEQ ID NO: 2041; WAN024DN6_at; Start 11; Stop 35
tttcaagtctaggagaaaaattgct

SEQ ID NO: 164330 - DNA, 25 bp, Artificial
  probe
  misc_feature (1)..(25): SEQ ID NO: 2041; WAN024DN6_at; Start 22; Stop 46
ggagaaaaattgcttgctacaagga

SEQ ID NO: 164331 - DNA, 25 bp, Artificial
  probe
  misc_feature (1)..(25): SEQ ID NO: 2041; WAN024DN6_at; Start 28; Stop 52
aaattgcttgctacaaggatattat

SEQ ID NO: 164332 - DNA, 25 bp, Artificial
  probe
  misc_feature (1)..(25): SEQ ID NO: 2041; WAN024DN6_at; Start 37; Stop 61
gctacaaggatattatttacagtga

SEQ ID NO: 164333 - DNA, 25 bp, Artificial
  probe
  misc_feature (1)..(25): SEQ ID NO: 2041; WAN024DN6_at; Start 38; Stop 62
ctacaaggatattatttacagtgac

SEQ ID NO: 164334 - DNA, 25 bp, Artificial
  probe
  misc_feature (1)..(25): SEQ ID NO: 2041; WAN024DN6_at; Start 34; Stop 58
cttgctacaaggatattatttacag

SEQ ID NO: 164335 - DNA, 25 bp, Artificial
  probe
  misc_feature (1)..(25): SEQ ID NO: 2041; WAN024DN6_at; Start 20; Stop 44
taggagaaaaattgcttgctacaag

SEQ ID NO: 164336 - DNA, 25 bp, Artificial
  probe
  misc_feature (1)..(25): SEQ ID NO: 2041; WAN024DN6_at; Start 27; Stop 51
aaaattgcttgctacaaggatatta

SEQ ID NO: 164337 - DNA, 25 bp, Artificial
  probe
  misc_feature (1)..(25): SEQ ID NO: 2041; WAN024DN6_at; Start 36; Stop 60
tgctacaaggatattatttacagtg

SEQ ID NO: 164338 - DNA, 25 bp, Artificial
  probe
  misc_feature (1)..(25): SEQ ID NO: 2041; WAN024DN6_at; Start 14; Stop 38
caagtctaggagaaaaattgcttgc

SEQ ID NO: 164339 - DNA, 25 bp, Artificial
  probe
  misc_feature (1)..(25): SEQ ID NO: 2041; WAN024DN6_at; Start 17; Stop 41
gtctaggagaaaaattgcttgctac

SEQ ID NO: 164340 - DNA, 25 bp, Artificial
  probe
  misc_feature (1)..(25): SEQ ID NO: 2041; WAN024DN6_at; Start 25; Stop 49
gaaaaattgcttgctacaaggatat

SEQ ID NO: 164341 - DNA, 25 bp, Artificial
  probe
  misc_feature (1)..(25): SEQ ID NO: 2041; WAN024DN6_at; Start 10; Stop 34
atttcaagtctaggagaaaaattgc

SEQ ID NO: 164342 - DNA, 25 bp, Artificial
  probe
  misc_feature (1)..(25): SEQ ID NO: 2041; WAN024DN6_at; Start 19; Stop 43
ctaggagaaaaattgcttgctacaa

SEQ ID NO: 164343 - DNA, 25 bp, Artificial
  probe
  misc_feature (1)..(25): SEQ ID NO: 2041; WAN024DN6_at; Start 41; Stop 65
caaggatattatttacagtgacaat

SEQ ID NO: 164344 - DNA, 25 bp, Artificial
  probe
  misc_feature (1)..(25): SEQ ID NO: 2041; WAN024DN6_at; Start 40; Stop 64
acaaggatattatttacagtgacaa

SEQ ID NO: 164345 - DNA, 25 bp, Artificial
  probe
  misc_feature (1)..(25): SEQ ID NO: 2041; WAN024DN6_at; Start 26; Stop 50
aaaaattgcttgctacaaggatatt

SEQ ID NO: 164346 - DNA, 25 bp, Artificial
  probe
  misc_feature (1)..(25): SEQ ID NO: 2041; WAN024DN6_at; Start 39; Stop 63
tacaaggatattatttacagtgaca

SEQ ID NO: 164347 - DNA, 25 bp, Artificial
  probe
  misc_feature (1)..(25): SEQ ID NO: 2041; WAN024DN6_at; Start 21; Stop 45
aggagaaaaattgcttgctacaagg

SEQ ID NO: 164348 - DNA, 25 bp, Artificial
  probe
  misc_feature (1)..(25): SEQ ID NO: 2041; WAN024DN6_at; Start 29; Stop 53
aattgcttgctacaaggatattatt

SEQ ID NO: 164349 - DNA, 25 bp, Artificial
  probe
  misc_feature (1)..(25): SEQ ID NO: 2041; WAN024DN6_at; Start 32; Stop 56
tgcttgctacaaggatattatttac

SEQ ID NO: 164350 - DNA, 25 bp, Artificial
  probe
  misc_feature (1)..(25): SEQ ID NO: 2041; WAN024DN6_at; Start 15; Stop 39
aagtctaggagaaaaattgcttgct

SEQ ID NO: 164351 - DNA, 25 bp, Artificial
  probe
  misc_feature (1)..(25): SEQ ID NO: 2041; WAN024DN6_at; Start 16; Stop 40
agtctaggagaaaaattgcttgcta

SEQ ID NO: 164352 - DNA, 25 bp, Artificial
  probe
  misc_feature (1)..(25): SEQ ID NO: 2041; WAN024DN6_at; Start 33; Stop 57
gcttgctacaaggatattatttaca

SEQ ID NO: 164353 - DNA, 25 bp, Artificial
  probe
  misc_feature (1)..(25): SEQ ID NO: 2041; WAN024DN6_at; Start 35; Stop 59
ttgctacaaggatattatttacagt

SEQ ID NO: 164354 - DNA, 25 bp, Artificial
  probe
  misc_feature (1)..(25): SEQ ID NO: 2041; WAN024DN6_at; Start 30; Stop 54
attgcttgctacaaggatattattt

SEQ ID NO: 164355 - DNA, 25 bp, Artificial
  probe
  misc_feature (1)..(25): SEQ ID NO: 2041; WAN024DN6_at; Start 12; Stop 36
ttcaagtctaggagaaaaattgctt

SEQ ID NO: 164356 - DNA, 25 bp, Artificial
  probe
  misc_feature (1)..(25): SEQ ID NO: 2041; WAN024DN6_at; Start 13; Stop 37
tcaagtctaggagaaaaattgcttg

SEQ ID NO: 164357 - DNA, 25 bp, Artificial
  probe
  misc_feature (1)..(25): SEQ ID NO: 2041; WAN024DN6_at; Start 23; Stop 47
gagaaaaattgcttgctacaaggat

SEQ ID NO: 164358 - DNA, 25 bp, Artificial
  probe
  misc_feature (1)..(25): SEQ ID NO: 2041; WAN024DN6_at; Start 31; Stop 55
ttgcttgctacaaggatattattta

SEQ ID NO: 164359 - DNA, 25 bp, Artificial
  probe
  misc_feature (1)..(25): SEQ ID NO: 3441; WAN024DN7_at; Start 78; Stop 102
tattaaaatgcaaaattatgctatc

SEQ ID NO: 164360 - DNA, 25 bp, Artificial
  probe
  misc_feature (1)..(25): SEQ ID NO: 3441; WAN024DN7_at; Start 98; Stop 122
ctatcaaatcaagcttaaaaatttt

SEQ ID NO: 164361 - DNA, 25 bp, Artificial
  probe
  misc_feature (1)..(25): SEQ ID NO: 3441; WAN024DN7_at; Start 79; Stop 103
attaaaatgcaaaattatgctatca

SEQ ID NO: 164362 - DNA, 25 bp, Artificial
  probe
  misc_feature (1)..(25): SEQ ID NO: 3441; WAN024DN7_at; Start 80; Stop 104
ttaaaatgcaaaattatgctatcaa

SEQ ID NO: 164363 - DNA, 25 bp, Artificial
  probe
  misc_feature (1)..(25): SEQ ID NO: 3441; WAN024DN7_at; Start 67; Stop 91
tacttttcttctattaaaatgcaaa

SEQ ID NO: 164364 - DNA, 25 bp, Artificial
  probe
  misc_feature (1)..(25): SEQ ID NO: 3441; WAN024DN7_at; Start 45; Stop 69
tactgtattcttatctatttcatac

SEQ ID NO: 164365 - DNA, 25 bp, Artificial
  probe
  misc_feature (1)..(25): SEQ ID NO: 3441; WAN024DN7_at; Start 75; Stop 99
ttctattaaaatgcaaaattatgct

SEQ ID NO: 164366 - DNA, 25 bp, Artificial
  probe
  misc_feature (1)..(25): SEQ ID NO: 3441; WAN024DN7_at; Start 82; Stop 106
aaaatgcaaaattatgctatcaaat

SEQ ID NO: 164367 - DNA, 25 bp, Artificial
  probe
  misc_feature (1)..(25): SEQ ID NO: 3441; WAN024DN7_at; Start 74; Stop 98
cttctattaaaatgcaaaattatgc

SEQ ID NO: 164368 - DNA, 25 bp, Artificial
  probe
  misc_feature (1)..(25): SEQ ID NO: 3441; WAN024DN7_at; Start 76; Stop 100
tctattaaaatgcaaaattatgcta

SEQ ID NO: 164369 - DNA, 25 bp, Artificial
  probe
  misc_feature (1)..(25): SEQ ID NO: 3441; WAN024DN7_at; Start 96; Stop 120
tgctatcaaatcaagcttaaaaatt

SEQ ID NO: 164370 - DNA, 25 bp, Artificial
  probe
  misc_feature (1)..(25): SEQ ID NO: 3441; WAN024DN7_at; Start 86; Stop 110
tgcaaaattatgctatcaaatcaag

SEQ ID NO: 164371 - DNA, 25 bp, Artificial
  probe
  misc_feature (1)..(25): SEQ ID NO: 3441; WAN024DN7_at; Start 89; Stop 113
aaaattatgctatcaaatcaagctt

SEQ ID NO: 164372 - DNA, 25 bp, Artificial
  probe
  misc_feature (1)..(25): SEQ ID NO: 3441; WAN024DN7_at; Start 77; Stop 101
ctattaaaatgcaaaattatgctat

SEQ ID NO: 164373 - DNA, 25 bp, Artificial
  probe
  misc_feature (1)..(25): SEQ ID NO: 3441; WAN024DN7_at; Start 97; Stop 121
gctatcaaatcaagcttaaaaattt

SEQ ID NO: 164374 - DNA, 25 bp, Artificial
  probe
  misc_feature (1)..(25): SEQ ID NO: 3441; WAN024DN7_at; Start 81; Stop 105
taaaatgcaaaattatgctatcaaa

SEQ ID NO: 164375 - DNA, 25 bp, Artificial
  probe
  misc_feature (1)..(25): SEQ ID NO: 3441; WAN024DN7_at; Start 92; Stop 116
attatgctatcaaatcaagcttaaa

SEQ ID NO: 164376 - DNA, 25 bp, Artificial
  probe
  misc_feature (1)..(25): SEQ ID NO: 3441; WAN024DN7_at; Start 93; Stop 117
ttatgctatcaaatcaagcttaaaa

SEQ ID NO: 164377 - DNA, 25 bp, Artificial
  probe
  misc_feature (1)..(25): SEQ ID NO: 3441; WAN024DN7_at; Start 84; Stop 108
aatgcaaaattatgctatcaaatca

SEQ ID NO: 164378 - DNA, 25 bp, Artificial
  probe
  misc_feature (1)..(25): SEQ ID NO: 3441; WAN024DN7_at; Start 90; Stop 114
aaattatgctatcaaatcaagctta

SEQ ID NO: 164379 - DNA, 25 bp, Artificial
  probe
  misc_feature (1)..(25): SEQ ID NO: 3441; WAN024DN7_at; Start 85; Stop 109
atgcaaaattatgctatcaaatcaa

SEQ ID NO: 164380 - DNA, 25 bp, Artificial
  probe
  misc_feature (1)..(25): SEQ ID NO: 3441; WAN024DN7_at; Start 73; Stop 97
tcttctattaaaatgcaaaattatg

SEQ ID NO: 164381 - DNA, 25 bp, Artificial
  probe
  misc_feature (1)..(25): SEQ ID NO: 3441; WAN024DN7_at; Start 50; Stop 74
tattcttatctatttcatacttttc

SEQ ID NO: 164382 - DNA, 25 bp, Artificial
  probe
  misc_feature (1)..(25): SEQ ID NO: 3441; WAN024DN7_at; Start 94; Stop 118
tatgctatcaaatcaagcttaaaaa

SEQ ID NO: 164383 - DNA, 25 bp, Artificial
  probe
  misc_feature (1)..(25): SEQ ID NO: 3441; WAN024DN7_at; Start 66; Stop 90
atacttttcttctattaaaatgcaa

SEQ ID NO: 164384 - DNA, 25 bp, Artificial
  probe
  misc_feature (1)..(25): SEQ ID NO: 3441; WAN024DN7_at; Start 83; Stop 107
aaatgcaaaattatgctatcaaatc

SEQ ID NO: 164385 - DNA, 25 bp, Artificial
  probe
  misc_feature (1)..(25): SEQ ID NO: 3441; WAN024DN7_at; Start 87; Stop 111
gcaaaattatgctatcaaatcaagc

SEQ ID NO: 164386 - DNA, 25 bp, Artificial
  probe
  misc_feature (1)..(25): SEQ ID NO: 3441; WAN024DN7_at; Start 91; Stop 115
aattatgctatcaaatcaagcttaa

SEQ ID NO: 164387 - DNA, 25 bp, Artificial
  probe
  misc_feature (1)..(25): SEQ ID NO: 3441; WAN024DN7_at; Start 69; Stop 93
cttttcttctattaaaatgcaaaat

SEQ ID NO: 164388 - DNA, 25 bp, Artificial
  probe
  misc_feature (1)..(25): SEQ ID NO: 3441; WAN024DN7_at; Start 53; Stop 77
tcttatctatttcatacttttcttc

SEQ ID NO: 164389 - DNA, 25 bp, Artificial
  probe
  misc_feature (1)..(25): SEQ ID NO: 3441; WAN024DN7_at; Start 95; Stop 119
atgctatcaaatcaagcttaaaaat

SEQ ID NO: 164390 - DNA, 25 bp, Artificial
  probe
  misc_feature (1)..(25): SEQ ID NO: 3441; WAN024DN7_at; Start 65; Stop 89
catacttttcttctattaaaatgca

SEQ ID NO: 164391 - DNA, 25 bp, Artificial
  probe
  misc_feature (1)..(25): SEQ ID NO: 3441; WAN024DN7_at; Start 46; Stop 70
actgtattcttatctatttcatact

SEQ ID NO: 164392 - DNA, 25 bp, Artificial
  probe
  misc_feature (1)..(25): SEQ ID NO: 3441; WAN024DN7_at; Start 88; Stop 112
caaaattatgctatcaaatcaagct

SEQ ID NO: 164393 - DNA, 25 bp, Artificial
  probe
  misc_feature (1)..(25): SEQ ID NO: 2742; WAN024DN8_at; Start 33; Stop 57
ggaggaagattttgtctctattatt

SEQ ID NO: 164394 - DNA, 25 bp, Artificial
  probe
  misc_feature (1)..(25): SEQ ID NO: 2742; WAN024DN8_at; Start 28; Stop 52
attttggaggaagattttgtctcta

SEQ ID NO: 164395 - DNA, 25 bp, Artificial
  probe
  misc_feature (1)..(25): SEQ ID NO: 2742; WAN024DN8_at; Start 34; Stop 58
gaggaagattttgtctctattattt

SEQ ID NO: 164396 - DNA, 25 bp, Artificial
  probe
  misc_feature (1)..(25): SEQ ID NO: 2742; WAN024DN8_at; Start 29; Stop 53
ttttggaggaagattttgtctctat

SEQ ID NO: 164397 - DNA, 25 bp, Artificial
  probe
  misc_feature (1)..(25): SEQ ID NO: 2742; WAN024DN8_at; Start 30; Stop 54
tttggaggaagattttgtctctatt

SEQ ID NO: 164398 - DNA, 25 bp, Artificial
  probe
  misc_feature (1)..(25): SEQ ID NO: 2742; WAN024DN8_at; Start 35; Stop 59
aggaagattttgtctctattattta

SEQ ID NO: 164399 - DNA, 25 bp, Artificial
  probe
  misc_feature (1)..(25): SEQ ID NO: 2742; WAN024DN8_at; Start 31; Stop 55
ttggaggaagattttgtctctatta

SEQ ID NO: 164400 - DNA, 25 bp, Artificial
  probe
  misc_feature (1)..(25): SEQ ID NO: 2742; WAN024DN8_at; Start 32; Stop 56
tggaggaagattttgtctctattat

SEQ ID NO: 164401 - DNA, 25 bp, Artificial
  probe
  misc_feature (1)..(25): SEQ ID NO: 3435; WAN024DN9_at; Start 8; Stop 32
gttataatgatacctattctaccaa

SEQ ID NO: 164402 - DNA, 25 bp, Artificial
  probe
  misc_feature (1)..(25): SEQ ID NO: 3435; WAN024DN9_at; Start 11; Stop 35
ataatgatacctattctaccaaaaa

SEQ ID NO: 164403 - DNA, 25 bp, Artificial
  probe
  misc_feature (1)..(25): SEQ ID NO: 3435; WAN024DN9_at; Start 54; Stop 78
ctttttgtctgtttttaggtatgat

SEQ ID NO: 164404 - DNA, 25 bp, Artificial
  probe
  misc_feature (1)..(25): SEQ ID NO: 3435; WAN024DN9_at; Start 14; Stop 38
atgatacctattctaccaaaaaagg

SEQ ID NO: 164405 - DNA, 25 bp, Artificial
  probe
  misc_feature (1)..(25): SEQ ID NO: 3435; WAN024DN9_at; Start 12; Stop 36
taatgatacctattctaccaaaaaa

SEQ ID NO: 164406 - DNA, 25 bp, Artificial
  probe
  misc_feature (1)..(25): SEQ ID NO: 3435; WAN024DN9_at; Start 1; Stop 25
ctggttcgttataatgatacctatt

SEQ ID NO: 164407 - DNA, 25 bp, Artificial
  probe
  misc_feature (1)..(25): SEQ ID NO: 3435; WAN024DN9_at; Start 6; Stop 30
tcgttataatgatacctattctacc

SEQ ID NO: 164408 - DNA, 25 bp, Artificial
  probe
  misc_feature (1)..(25): SEQ ID NO: 3435; WAN024DN9_at; Start 10; Stop 34
tataatgatacctattctaccaaaa

SEQ ID NO: 164409 - DNA, 25 bp, Artificial
  probe
  misc_feature (1)..(25): SEQ ID NO: 3435; WAN024DN9_at; Start 15; Stop 39
tgatacctattctaccaaaaaaggc

SEQ ID NO: 164410 - DNA, 25 bp, Artificial
  probe
  misc_feature (1)..(25): SEQ ID NO: 3435; WAN024DN9_at; Start 7; Stop 31
cgttataatgatacctattctacca

SEQ ID NO: 164411 - DNA, 25 bp, Artificial
  probe
  misc_feature (1)..(25): SEQ ID NO: 3435; WAN024DN9_at; Start 13; Stop 37
aatgatacctattctaccaaaaaag

SEQ ID NO: 164412 - DNA, 25 bp, Artificial
  probe
  misc_feature (1)..(25): SEQ ID NO: 3435; WAN024DN9_at; Start 2; Stop 26
tggttcgttataatgatacctattc

SEQ ID NO: 164413 - DNA, 25 bp, Artificial
  probe
  misc_feature (1)..(25): SEQ ID NO: 3435; WAN024DN9_at; Start 5; Stop 29
ttcgttataatgatacctattctac

SEQ ID NO: 164414 - DNA, 25 bp, Artificial
  probe
  misc_feature (1)..(25): SEQ ID NO: 3435; WAN024DN9_at; Start 4; Stop 28
gttcgttataatgatacctattcta

SEQ ID NO: 164415 - DNA, 25 bp, Artificial
  probe
  misc_feature (1)..(25): SEQ ID NO: 3435; WAN024DN9_at; Start 3; Stop 27
ggttcgttataatgatacctattct

SEQ ID NO: 164416 - DNA, 25 bp, Artificial
  probe
  misc_feature (1)..(25): SEQ ID NO: 3435; WAN024DN9_at; Start 9; Stop 33
ttataatgatacctattctaccaaa

SEQ ID NO: 164417 - DNA, 25 bp, Artificial
  probe
  misc_feature (1)..(25): SEQ ID NO: 3435; WAN024DN9_at; Start 40; Stop 64
ctcaaatttgaaacctttttgtctg

SEQ ID NO: 164418 - DNA, 25 bp, Artificial
  probe
  misc_feature (1)..(25): SEQ ID NO: 3854; WAN024DNA_at; Start 62; Stop 86
ctgatgaaattgtccaaaaccttgc

SEQ ID NO: 164419 - DNA, 25 bp, Artificial
  probe
  misc_feature (1)..(25): SEQ ID NO: 3854; WAN024DNA_at; Start 13; Stop 37
aaatattcaatacaaggagttggga

SEQ ID NO: 164420 - DNA, 25 bp, Artificial
  probe
  misc_feature (1)..(25): SEQ ID NO: 3854; WAN024DNA_at; Start 49; Stop 73
ccagcttctttttctgatgaaattg

SEQ ID NO: 164421 - DNA, 25 bp, Artificial
  probe
  misc_feature (1)..(25): SEQ ID NO: 3854; WAN024DNA_at; Start 80; Stop 104
accttgctatgattggcttttttga

SEQ ID NO: 164422 - DNA, 25 bp, Artificial
  probe
  misc_feature (1)..(25): SEQ ID NO: 3854; WAN024DNA_at; Start 45; Stop 69
ttttccagcttctttttctgatgaa

SEQ ID NO: 164423 - DNA, 25 bp, Artificial
  probe
  misc_feature (1)..(25): SEQ ID NO: 3854; WAN024DNA_at; Start 71; Stop 95
ttgtccaaaaccttgctatgattgg

SEQ ID NO: 164424 - DNA, 25 bp, Artificial
  probe
  misc_feature (1)..(25): SEQ ID NO: 3854; WAN024DNA_at; Start 16; Stop 40
tattcaatacaaggagttgggaaag

SEQ ID NO: 164425 - DNA, 25 bp, Artificial
  probe
  misc_feature (1)..(25): SEQ ID NO: 3854; WAN024DNA_at; Start 14; Stop 38
aatattcaatacaaggagttgggaa

SEQ ID NO: 164426 - DNA, 25 bp, Artificial
  probe
  misc_feature (1)..(25): SEQ ID NO: 3854; WAN024DNA_at; Start 64; Stop 88
gatgaaattgtccaaaaccttgcta

SEQ ID NO: 164427 - DNA, 25 bp, Artificial
  probe
  misc_feature (1)..(25): SEQ ID NO: 3854; WAN024DNA_at; Start 58; Stop 82
ttttctgatgaaattgtccaaaacc

SEQ ID NO: 164428 - DNA, 25 bp, Artificial
  probe
  misc_feature (1)..(25): SEQ ID NO: 3854; WAN024DNA_at; Start 61; Stop 85
tctgatgaaattgtccaaaaccttg

SEQ ID NO: 164429 - DNA, 25 bp, Artificial
  probe
  misc_feature (1)..(25): SEQ ID NO: 3854; WAN024DNA_at; Start 68; Stop 92
aaattgtccaaaaccttgctatgat

SEQ ID NO: 164430 - DNA, 25 bp, Artificial
  probe
  misc_feature (1)..(25): SEQ ID NO: 3854; WAN024DNA_at; Start 20; Stop 44
caatacaaggagttgggaaagttat

SEQ ID NO: 164431 - DNA, 25 bp, Artificial
  probe
  misc_feature (1)..(25): SEQ ID NO: 3854; WAN024DNA_at; Start 82; Stop 106
cttgctatgattggcttttttgaaa

SEQ ID NO: 164432 - DNA, 25 bp, Artificial
  probe
  misc_feature (1)..(25): SEQ ID NO: 3854; WAN024DNA_at; Start 85; Stop 109
gctatgattggcttttttgaaaaat

SEQ ID NO: 164433 - DNA, 25 bp, Artificial
  probe
  misc_feature (1)..(25): SEQ ID NO: 3854; WAN024DNA_at; Start 52; Stop 76
gcttctttttctgatgaaattgtcc

SEQ ID NO: 164434 - DNA, 25 bp, Artificial
  probe
  misc_feature (1)..(25): SEQ ID NO: 3854; WAN024DNA_at; Start 19; Stop 43
tcaatacaaggagttgggaaagtta

SEQ ID NO: 164435 - DNA, 25 bp, Artificial
  probe
  misc_feature (1)..(25): SEQ ID NO: 3854; WAN024DNA_at; Start 74; Stop 98
tccaaaaccttgctatgattggctt

SEQ ID NO: 164436 - DNA, 25 bp, Artificial
  probe
  misc_feature (1)..(25): SEQ ID NO: 3854; WAN024DNA_at; Start 55; Stop 79
tctttttctgatgaaattgtccaaa

SEQ ID NO: 164437 - DNA, 25 bp, Artificial
  probe
  misc_feature (1)..(25): SEQ ID NO: 3854; WAN024DNA_at; Start 47; Stop 71
ttccagcttctttttctgatgaaat

SEQ ID NO: 164438 - DNA, 25 bp, Artificial
  probe
  misc_feature (1)..(25): SEQ ID NO: 3854; WAN024DNA_at; Start 76; Stop 100
caaaaccttgctatgattggctttt

SEQ ID NO: 164439 - DNA, 25 bp, Artificial
  probe
  misc_feature (1)..(25): SEQ ID NO: 3854; WAN024DNA_at; Start 59; Stop 83
tttctgatgaaattgtccaaaacct

SEQ ID NO: 164440 - DNA, 25 bp, Artificial
  probe
  misc_feature (1)..(25): SEQ ID NO: 3854; WAN024DNA_at; Start 79; Stop 103
aaccttgctatgattggcttttttg

SEQ ID NO: 164441 - DNA, 25 bp, Artificial
  probe
  misc_feature (1)..(25): SEQ ID NO: 3854; WAN024DNA_at; Start 66; Stop 90
tgaaattgtccaaaaccttgctatg

SEQ ID NO: 164442 - DNA, 25 bp, Artificial
  probe
  misc_feature (1)..(25): SEQ ID NO: 3854; WAN024DNA_at; Start 75; Stop 99
ccaaaaccttgctatgattggcttt

SEQ ID NO: 164443 - DNA, 25 bp, Artificial
  probe
  misc_feature (1)..(25): SEQ ID NO: 3854; WAN024DNA_at; Start 12; Stop 36
aaaatattcaatacaaggagttggg

SEQ ID NO: 164444 - DNA, 25 bp, Artificial
  probe
  misc_feature (1)..(25): SEQ ID NO: 3854; WAN024DNA_at; Start 111; Stop 135
tggtataatagtagtaattctaact

SEQ ID NO: 164445 - DNA, 25 bp, Artificial
  probe
  misc_feature (1)..(25): SEQ ID NO: 3854; WAN024DNA_at; Start 72; Stop 96
tgtccaaaaccttgctatgattggc

SEQ ID NO: 164446 - DNA, 25 bp, Artificial
  probe
  misc_feature (1)..(25): SEQ ID NO: 3854; WAN024DNA_at; Start 70; Stop 94
attgtccaaaaccttgctatgattg

SEQ ID NO: 164447 - DNA, 25 bp, Artificial
  probe
  misc_feature (1)..(25): SEQ ID NO: 3854; WAN024DNA_at; Start 67; Stop 91
gaaattgtccaaaaccttgctatga

SEQ ID NO: 164448 - DNA, 25 bp, Artificial
  probe
  misc_feature (1)..(25): SEQ ID NO: 3854; WAN024DNA_at; Start 63; Stop 87
tgatgaaattgtccaaaaccttgct

SEQ ID NO: 164449 - DNA, 25 bp, Artificial
  probe
  misc_feature (1)..(25): SEQ ID NO: 3854; WAN024DNA_at; Start 81; Stop 105
ccttgctatgattggcttttttgaa

SEQ ID NO: 164450 - DNA, 25 bp, Artificial
  probe
  misc_feature (1)..(25): SEQ ID NO: 3854; WAN024DNA_at; Start 73; Stop 97
gtccaaaaccttgctatgattggct

SEQ ID NO: 164451 - DNA, 25 bp, Artificial
  probe
  misc_feature (1)..(25): SEQ ID NO: 3854; WAN024DNA_at; Start 89; Stop 113
tgattggcttttttgaaaaatatgg

SEQ ID NO: 164452 - DNA, 25 bp, Artificial
  probe
  misc_feature (1)..(25): SEQ ID NO: 5274; WAN024DNB_at; Start 58; Stop 82
atagcgcttgatatatatatggtaa

SEQ ID NO: 164453 - DNA, 25 bp, Artificial
  probe
  misc_feature (1)..(25): SEQ ID NO: 5274; WAN024DNB_at; Start 53; Stop 77
tagaaatagcgcttgatatatatat

SEQ ID NO: 164454 - DNA, 25 bp, Artificial
  probe
  misc_feature (1)..(25): SEQ ID NO: 5274; WAN024DNB_at; Start 50; Stop 74
ttttagaaatagcgcttgatatata

SEQ ID NO: 164455 - DNA, 25 bp, Artificial
  probe
  misc_feature (1)..(25): SEQ ID NO: 5274; WAN024DNB_at; Start 49; Stop 73
tttttagaaatagcgcttgatatat

SEQ ID NO: 164456 - DNA, 25 bp, Artificial
  probe
  misc_feature (1)..(25): SEQ ID NO: 5274; WAN024DNB_at; Start 51; Stop 75
tttagaaatagcgcttgatatatat

SEQ ID NO: 164457 - DNA, 25 bp, Artificial
  probe
  misc_feature (1)..(25): SEQ ID NO: 5274; WAN024DNB_at; Start 44; Stop 68
aagattttttagaaatagcgcttga

SEQ ID NO: 164458 - DNA, 25 bp, Artificial
  probe
  misc_feature (1)..(25): SEQ ID NO: 5274; WAN024DNB_at; Start 43; Stop 67
aaagattttttagaaatagcgcttg

SEQ ID NO: 164459 - DNA, 25 bp, Artificial
  probe
  misc_feature (1)..(25): SEQ ID NO: 5274; WAN024DNB_at; Start 46; Stop 70
gattttttagaaatagcgcttgata

SEQ ID NO: 164460 - DNA, 25 bp, Artificial
  probe
  misc_feature (1)..(25): SEQ ID NO: 5274; WAN024DNB_at; Start 48; Stop 72
ttttttagaaatagcgcttgatata

SEQ ID NO: 164461 - DNA, 25 bp, Artificial
  probe
  misc_feature (1)..(25): SEQ ID NO: 5274; WAN024DNB_at; Start 54; Stop 78
agaaatagcgcttgatatatatatg

SEQ ID NO: 164462 - DNA, 25 bp, Artificial
  probe
  misc_feature (1)..(25): SEQ ID NO: 5274; WAN024DNB_at; Start 1; Stop 25
ttgatttttattgagagtaaagttg

SEQ ID NO: 164463 - DNA, 25 bp, Artificial
  probe
  misc_feature (1)..(25): SEQ ID NO: 5274; WAN024DNB_at; Start 56; Stop 80
aaatagcgcttgatatatatatggt

SEQ ID NO: 164464 - DNA, 25 bp, Artificial
  probe
  misc_feature (1)..(25): SEQ ID NO: 5274; WAN024DNB_at; Start 3; Stop 27
gatttttattgagagtaaagttgga

SEQ ID NO: 164465 - DNA, 25 bp, Artificial
  probe
  misc_feature (1)..(25): SEQ ID NO: 5274; WAN024DNB_at; Start 55; Stop 79
gaaatagcgcttgatatatatatgg

SEQ ID NO: 164466 - DNA, 25 bp, Artificial
  probe
  misc_feature (1)..(25): SEQ ID NO: 5274; WAN024DNB_at; Start 2; Stop 26
tgatttttattgagagtaaagttgg

SEQ ID NO: 164467 - DNA, 25 bp, Artificial
  probe
  misc_feature (1)..(25): SEQ ID NO: 5274; WAN024DNB_at; Start 57; Stop 81
aatagcgcttgatatatatatggta

SEQ ID NO: 164468 - DNA, 25 bp, Artificial
  probe
  misc_feature (1)..(25): SEQ ID NO: 5274; WAN024DNB_at; Start 59; Stop 83
tagcgcttgatatatatatggtaaa

SEQ ID NO: 164469 - DNA, 25 bp, Artificial
  probe
  misc_feature (1)..(25): SEQ ID NO: 5274; WAN024DNB_at; Start 60; Stop 84
agcgcttgatatatatatggtaaaa

SEQ ID NO: 164470 - DNA, 25 bp, Artificial
  probe
  misc_feature (1)..(25): SEQ ID NO: 5274; WAN024DNB_at; Start 52; Stop 76
ttagaaatagcgcttgatatatata

SEQ ID NO: 164471 - DNA, 25 bp, Artificial
  probe
  misc_feature (1)..(25): SEQ ID NO: 5274; WAN024DNB_at; Start 45; Stop 69
agattttttagaaatagcgcttgat

SEQ ID NO: 164472 - DNA, 25 bp, Artificial
  probe
  misc_feature (1)..(25): SEQ ID NO: 5274; WAN024DNB_at; Start 47; Stop 71
attttttagaaatagcgcttgatat

SEQ ID NO: 164473 - DNA, 25 bp, Artificial
  probe
  misc_feature (1)..(25): SEQ ID NO: 4024; WAN024DNC_at; Start 35; Stop 59
cactaggattgatgacttctcaaaa

SEQ ID NO: 164474 - DNA, 25 bp, Artificial
  probe
  misc_feature (1)..(25): SEQ ID NO: 4024; WAN024DNC_at; Start 7; Stop 31
atcttgggttctcacttttctcacc

SEQ ID NO: 164475 - DNA, 25 bp, Artificial
  probe
  misc_feature (1)..(25): SEQ ID NO: 4024; WAN024DNC_at; Start 39; Stop 63
aggattgatgacttctcaaaatccc

SEQ ID NO: 164476 - DNA, 25 bp, Artificial
  probe
  misc_feature (1)..(25): SEQ ID NO: 4024; WAN024DNC_at; Start 24; Stop 48
ttctcacccatcactaggattgatg

SEQ ID NO: 164477 - DNA, 25 bp, Artificial
  probe
  misc_feature (1)..(25): SEQ ID NO: 4024; WAN024DNC_at; Start 18; Stop 42
tcacttttctcacccatcactagga

SEQ ID NO: 164478 - DNA, 25 bp, Artificial
  probe
  misc_feature (1)..(25): SEQ ID NO: 4024; WAN024DNC_at; Start 26; Stop 50
ctcacccatcactaggattgatgac

SEQ ID NO: 164479 - DNA, 25 bp, Artificial
  probe
  misc_feature (1)..(25): SEQ ID NO: 4024; WAN024DNC_at; Start 25; Stop 49
tctcacccatcactaggattgatga

SEQ ID NO: 164480 - DNA, 25 bp, Artificial
  probe
  misc_feature (1)..(25): SEQ ID NO: 4024; WAN024DNC_at; Start 33; Stop 57
atcactaggattgatgacttctcaa

SEQ ID NO: 164481 - DNA, 25 bp, Artificial
  probe
  misc_feature (1)..(25): SEQ ID NO: 4024; WAN024DNC_at; Start 23; Stop 47
tttctcacccatcactaggattgat

SEQ ID NO: 164482 - DNA, 25 bp, Artificial
  probe
  misc_feature (1)..(25): SEQ ID NO: 4024; WAN024DNC_at; Start 40; Stop 64
ggattgatgacttctcaaaatcccc

SEQ ID NO: 164483 - DNA, 25 bp, Artificial
  probe
  misc_feature (1)..(25): SEQ ID NO: 4024; WAN024DNC_at; Start 12; Stop 36
gggttctcacttttctcacccatca

SEQ ID NO: 164484 - DNA, 25 bp, Artificial
  probe
  misc_feature (1)..(25): SEQ ID NO: 4024; WAN024DNC_at; Start 44; Stop 68
tgatgacttctcaaaatccccctta

SEQ ID NO: 164485 - DNA, 25 bp, Artificial
  probe
  misc_feature (1)..(25): SEQ ID NO: 4024; WAN024DNC_at; Start 3; Stop 27
gattatcttgggttctcacttttct

SEQ ID NO: 164486 - DNA, 25 bp, Artificial
  probe
  misc_feature (1)..(25): SEQ ID NO: 4024; WAN024DNC_at; Start 31; Stop 55
ccatcactaggattgatgacttctc

SEQ ID NO: 164487 - DNA, 25 bp, Artificial
  probe
  misc_feature (1)..(25): SEQ ID NO: 4024; WAN024DNC_at; Start 5; Stop 29
ttatcttgggttctcacttttctca

SEQ ID NO: 164488 - DNA, 25 bp, Artificial
  probe
  misc_feature (1)..(25): SEQ ID NO: 4024; WAN024DNC_at; Start 9; Stop 33
cttgggttctcacttttctcaccca

SEQ ID NO: 164489 - DNA, 25 bp, Artificial
  probe
  misc_feature (1)..(25): SEQ ID NO: 4024; WAN024DNC_at; Start 47; Stop 71
tgacttctcaaaatcccccttataa

SEQ ID NO: 164490 - DNA, 25 bp, Artificial
  probe
  misc_feature (1)..(25): SEQ ID NO: 4024; WAN024DNC_at; Start 37; Stop 61
ctaggattgatgacttctcaaaatc

SEQ ID NO: 164491 - DNA, 25 bp, Artificial
  probe
  misc_feature (1)..(25): SEQ ID NO: 4024; WAN024DNC_at; Start 36; Stop 60
actaggattgatgacttctcaaaat

SEQ ID NO: 164492 - DNA, 25 bp, Artificial
  probe
  misc_feature (1)..(25): SEQ ID NO: 4024; WAN024DNC_at; Start 27; Stop 51
tcacccatcactaggattgatgact

SEQ ID NO: 164493 - DNA, 25 bp, Artificial
  probe
  misc_feature (1)..(25): SEQ ID NO: 4024; WAN024DNC_at; Start 30; Stop 54
cccatcactaggattgatgacttct

SEQ ID NO: 164494 - DNA, 25 bp, Artificial
  probe
  misc_feature (1)..(25): SEQ ID NO: 4024; WAN024DNC_at; Start 20; Stop 44
acttttctcacccatcactaggatt

SEQ ID NO: 164495 - DNA, 25 bp, Artificial
  probe
  misc_feature (1)..(25): SEQ ID NO: 4024; WAN024DNC_at; Start 21; Stop 45
cttttctcacccatcactaggattg

SEQ ID NO: 164496 - DNA, 25 bp, Artificial
  probe
  misc_feature (1)..(25): SEQ ID NO: 4024; WAN024DNC_at; Start 32; Stop 56
catcactaggattgatgacttctca

SEQ ID NO: 164497 - DNA, 25 bp, Artificial
  probe
  misc_feature (1)..(25): SEQ ID NO: 4024; WAN024DNC_at; Start 22; Stop 46
ttttctcacccatcactaggattga

SEQ ID NO: 164498 - DNA, 25 bp, Artificial
  probe
  misc_feature (1)..(25): SEQ ID NO: 4024; WAN024DNC_at; Start 8; Stop 32
tcttgggttctcacttttctcaccc

SEQ ID NO: 164499 - DNA, 25 bp, Artificial
  probe
  misc_feature (1)..(25): SEQ ID NO: 4024; WAN024DNC_at; Start 34; Stop 58
tcactaggattgatgacttctcaaa

SEQ ID NO: 164500 - DNA, 25 bp, Artificial
  probe
  misc_feature (1)..(25): SEQ ID NO: 4024; WAN024DNC_at; Start 64; Stop 88
ccttataatctaactttaagtagag

SEQ ID NO: 164501 - DNA, 25 bp, Artificial
  probe
  misc_feature (1)..(25): SEQ ID NO: 4024; WAN024DNC_at; Start 65; Stop 89
cttataatctaactttaagtagaga

SEQ ID NO: 164502 - DNA, 25 bp, Artificial
  probe
  misc_feature (1)..(25): SEQ ID NO: 4024; WAN024DNC_at; Start 29; Stop 53
acccatcactaggattgatgacttc

SEQ ID NO: 164503 - DNA, 25 bp, Artificial
  probe
  misc_feature (1)..(25): SEQ ID NO: 4024; WAN024DNC_at; Start 28; Stop 52
cacccatcactaggattgatgactt

SEQ ID NO: 164504 - DNA, 25 bp, Artificial
  probe
  misc_feature (1)..(25): SEQ ID NO: 4024; WAN024DNC_at; Start 38; Stop 62
taggattgatgacttctcaaaatcc

SEQ ID NO: 164505 - DNA, 25 bp, Artificial
  probe
  misc_feature (1)..(25): SEQ ID NO: 4024; WAN024DNC_at; Start 2; Stop 26
tgattatcttgggttctcacttttc

SEQ ID NO: 164506 - DNA, 25 bp, Artificial
  probe
  misc_feature (1)..(25): SEQ ID NO: 4024; WAN024DNC_at; Start 6; Stop 30
tatcttgggttctcacttttctcac

SEQ ID NO: 164507 - DNA, 25 bp, Artificial
  probe
  misc_feature (1)..(25): SEQ ID NO: 2103; WAN024DND_at; Start 53; Stop 77
gtggaagtattcatcaaaatagaca

SEQ ID NO: 164508 - DNA, 25 bp, Artificial
  probe
  misc_feature (1)..(25): SEQ ID NO: 2103; WAN024DND_at; Start 45; Stop 69
ctatcttcgtggaagtattcatcaa

SEQ ID NO: 164509 - DNA, 25 bp, Artificial
  probe
  misc_feature (1)..(25): SEQ ID NO: 2103; WAN024DND_at; Start 32; Stop 56
attcattttcagactatcttcgtgg

SEQ ID NO: 164510 - DNA, 25 bp, Artificial
  probe
  misc_feature (1)..(25): SEQ ID NO: 2103; WAN024DND_at; Start 37; Stop 61
ttttcagactatcttcgtggaagta

SEQ ID NO: 164511 - DNA, 25 bp, Artificial
  probe
  misc_feature (1)..(25): SEQ ID NO: 2103; WAN024DND_at; Start 48; Stop 72
tcttcgtggaagtattcatcaaaat

SEQ ID NO: 164512 - DNA, 25 bp, Artificial
  probe
  misc_feature (1)..(25): SEQ ID NO: 2103; WAN024DND_at; Start 31; Stop 55
aattcattttcagactatcttcgtg

SEQ ID NO: 164513 - DNA, 25 bp, Artificial
  probe
  misc_feature (1)..(25): SEQ ID NO: 2103; WAN024DND_at; Start 26; Stop 50
gtgcaaattcattttcagactatct

SEQ ID NO: 164514 - DNA, 25 bp, Artificial
  probe
  misc_feature (1)..(25): SEQ ID NO: 2103; WAN024DND_at; Start 52; Stop 76
cgtggaagtattcatcaaaatagac

SEQ ID NO: 164515 - DNA, 25 bp, Artificial
  probe
  misc_feature (1)..(25): SEQ ID NO: 2103; WAN024DND_at; Start 40; Stop 64
tcagactatcttcgtggaagtattc

SEQ ID NO: 164516 - DNA, 25 bp, Artificial
  probe
  misc_feature (1)..(25): SEQ ID NO: 2103; WAN024DND_at; Start 27; Stop 51
tgcaaattcattttcagactatctt

SEQ ID NO: 164517 - DNA, 25 bp, Artificial
  probe
  misc_feature (1)..(25): SEQ ID NO: 2103; WAN024DND_at; Start 35; Stop 59
cattttcagactatcttcgtggaag

SEQ ID NO: 164518 - DNA, 25 bp, Artificial
  probe
  misc_feature (1)..(25): SEQ ID NO: 2103; WAN024DND_at; Start 44; Stop 68
actatcttcgtggaagtattcatca

SEQ ID NO: 164519 - DNA, 25 bp, Artificial
  probe
  misc_feature (1)..(25): SEQ ID NO: 2103; WAN024DND_at; Start 43; Stop 67
gactatcttcgtggaagtattcatc

SEQ ID NO: 164520 - DNA, 25 bp, Artificial
  probe
  misc_feature (1)..(25): SEQ ID NO: 2103; WAN024DND_at; Start 56; Stop 80
gaagtattcatcaaaatagacaaaa

SEQ ID NO: 164521 - DNA, 25 bp, Artificial
  probe
  misc_feature (1)..(25): SEQ ID NO: 2103; WAN024DND_at; Start 46; Stop 70
tatcttcgtggaagtattcatcaaa

SEQ ID NO: 164522 - DNA, 25 bp, Artificial
  probe
  misc_feature (1)..(25): SEQ ID NO: 2103; WAN024DND_at; Start 47; Stop 71
atcttcgtggaagtattcatcaaaa

SEQ ID NO: 164523 - DNA, 25 bp, Artificial
  probe
  misc_feature (1)..(25): SEQ ID NO: 2103; WAN024DND_at; Start 9; Stop 33
aaagagaaggaaaattggtgcaaat

SEQ ID NO: 164524 - DNA, 25 bp, Artificial
  probe
  misc_feature (1)..(25): SEQ ID NO: 2103; WAN024DND_at; Start 24; Stop 48
tggtgcaaattcattttcagactat

SEQ ID NO: 164525 - DNA, 25 bp, Artificial
  probe
  misc_feature (1)..(25): SEQ ID NO: 2103; WAN024DND_at; Start 54; Stop 78
tggaagtattcatcaaaatagacaa

SEQ ID NO: 164526 - DNA, 25 bp, Artificial
  probe
  misc_feature (1)..(25): SEQ ID NO: 2103; WAN024DND_at; Start 28; Stop 52
gcaaattcattttcagactatcttc

SEQ ID NO: 164527 - DNA, 25 bp, Artificial
  probe
  misc_feature (1)..(25): SEQ ID NO: 2103; WAN024DND_at; Start 49; Stop 73
cttcgtggaagtattcatcaaaata

SEQ ID NO: 164528 - DNA, 25 bp, Artificial
  probe
  misc_feature (1)..(25): SEQ ID NO: 2103; WAN024DND_at; Start 21; Stop 45
aattggtgcaaattcattttcagac

SEQ ID NO: 164529 - DNA, 25 bp, Artificial
  probe
  misc_feature (1)..(25): SEQ ID NO: 2103; WAN024DND_at; Start 34; Stop 58
tcattttcagactatcttcgtggaa

SEQ ID NO: 164530 - DNA, 25 bp, Artificial
  probe
  misc_feature (1)..(25): SEQ ID NO: 2103; WAN024DND_at; Start 23; Stop 47
ttggtgcaaattcattttcagacta

SEQ ID NO: 164531 - DNA, 25 bp, Artificial
  probe
  misc_feature (1)..(25): SEQ ID NO: 2103; WAN024DND_at; Start 41; Stop 65
cagactatcttcgtggaagtattca

SEQ ID NO: 164532 - DNA, 25 bp, Artificial
  probe
  misc_feature (1)..(25): SEQ ID NO: 2103; WAN024DND_at; Start 51; Stop 75
tcgtggaagtattcatcaaaataga

SEQ ID NO: 164533 - DNA, 25 bp, Artificial
  probe
  misc_feature (1)..(25): SEQ ID NO: 2103; WAN024DND_at; Start 36; Stop 60
attttcagactatcttcgtggaagt

SEQ ID NO: 164534 - DNA, 25 bp, Artificial
  probe
  misc_feature (1)..(25): SEQ ID NO: 2103; WAN024DND_at; Start 25; Stop 49
ggtgcaaattcattttcagactatc

SEQ ID NO: 164535 - DNA, 25 bp, Artificial
  probe
  misc_feature (1)..(25): SEQ ID NO: 2103; WAN024DND_at; Start 55; Stop 79
ggaagtattcatcaaaatagacaaa

SEQ ID NO: 164536 - DNA, 25 bp, Artificial
  probe
  misc_feature (1)..(25): SEQ ID NO: 2103; WAN024DND_at; Start 50; Stop 74
ttcgtggaagtattcatcaaaatag

SEQ ID NO: 164537 - DNA, 25 bp, Artificial
  probe
  misc_feature (1)..(25): SEQ ID NO: 2103; WAN024DND_at; Start 39; Stop 63
ttcagactatcttcgtggaagtatt

SEQ ID NO: 164538 - DNA, 25 bp, Artificial
  probe
  misc_feature (1)..(25): SEQ ID NO: 2103; WAN024DND_at; Start 29; Stop 53
caaattcattttcagactatcttcg

SEQ ID NO: 164539 - DNA, 25 bp, Artificial
  probe
  misc_feature (1)..(25): SEQ ID NO: 2103; WAN024DND_at; Start 33; Stop 57
ttcattttcagactatcttcgtgga

SEQ ID NO: 164540 - DNA, 25 bp, Artificial
  probe
  misc_feature (1)..(25): SEQ ID NO: 2103; WAN024DND_at; Start 38; Stop 62
tttcagactatcttcgtggaagtat

SEQ ID NO: 164541 - DNA, 25 bp, Artificial
  probe
  misc_feature (1)..(25): SEQ ID NO: 4865; WAN024DNE_at; Start 52; Stop 76
tctcctgaaattgaagttttttcta

SEQ ID NO: 164542 - DNA, 25 bp, Artificial
  probe
  misc_feature (1)..(25): SEQ ID NO: 4865; WAN024DNE_at; Start 19; Stop 43
atacgtttgattgtgggaagattga

SEQ ID NO: 164543 - DNA, 25 bp, Artificial
  probe
  misc_feature (1)..(25): SEQ ID NO: 4865; WAN024DNE_at; Start 6; Stop 30
aaaccttgatactatacgtttgatt

SEQ ID NO: 164544 - DNA, 25 bp, Artificial
  probe
  misc_feature (1)..(25): SEQ ID NO: 4865; WAN024DNE_at; Start 18; Stop 42
tatacgtttgattgtgggaagattg

SEQ ID NO: 164545 - DNA, 25 bp, Artificial
  probe
  misc_feature (1)..(25): SEQ ID NO: 4865; WAN024DNE_at; Start 20; Stop 44
tacgtttgattgtgggaagattgac

SEQ ID NO: 164546 - DNA, 25 bp, Artificial
  probe
  misc_feature (1)..(25): SEQ ID NO: 1722; WAN024DNF_at; Start 57; Stop 81
tagaaatttaattattctccagaga

SEQ ID NO: 164547 - DNA, 25 bp, Artificial
  probe
  misc_feature (1)..(25): SEQ ID NO: 1722; WAN024DNF_at; Start 36; Stop 60
taatcaagaaaatagttctcataga

SEQ ID NO: 164548 - DNA, 25 bp, Artificial
  probe
  misc_feature (1)..(25): SEQ ID NO: 1722; WAN024DNF_at; Start 39; Stop 63
tcaagaaaatagttctcatagaaat

SEQ ID NO: 164549 - DNA, 25 bp, Artificial
  probe
  misc_feature (1)..(25): SEQ ID NO: 1722; WAN024DNF_at; Start 7; Stop 31
ctaagtgagaaaatcacttgggatt

SEQ ID NO: 164550 - DNA, 25 bp, Artificial
  probe
  misc_feature (1)..(25): SEQ ID NO: 1722; WAN024DNF_at; Start 4; Stop 28
atcctaagtgagaaaatcacttggg

SEQ ID NO: 164551 - DNA, 25 bp, Artificial
  probe
  misc_feature (1)..(25): SEQ ID NO: 1722; WAN024DNF_at; Start 10; Stop 34
agtgagaaaatcacttgggattttt

SEQ ID NO: 164552 - DNA, 25 bp, Artificial
  probe
  misc_feature (1)..(25): SEQ ID NO: 1722; WAN024DNF_at; Start 32; Stop 56
tttttaatcaagaaaatagttctca

SEQ ID NO: 164553 - DNA, 25 bp, Artificial
  probe
  misc_feature (1)..(25): SEQ ID NO: 1722; WAN024DNF_at; Start 52; Stop 76
tctcatagaaatttaattattctcc

SEQ ID NO: 164554 - DNA, 25 bp, Artificial
  probe
  misc_feature (1)..(25): SEQ ID NO: 1722; WAN024DNF_at; Start 62; Stop 86
atttaattattctccagagaactat

SEQ ID NO: 164555 - DNA, 25 bp, Artificial
  probe
  misc_feature (1)..(25): SEQ ID NO: 1722; WAN024DNF_at; Start 63; Stop 87
tttaattattctccagagaactatt

SEQ ID NO: 164556 - DNA, 25 bp, Artificial
  probe
  misc_feature (1)..(25): SEQ ID NO: 1722; WAN024DNF_at; Start 54; Stop 78
tcatagaaatttaattattctccag

SEQ ID NO: 164557 - DNA, 25 bp, Artificial
  probe
  misc_feature (1)..(25): SEQ ID NO: 1722; WAN024DNF_at; Start 55; Stop 79
catagaaatttaattattctccaga

SEQ ID NO: 164558 - DNA, 25 bp, Artificial
  probe
  misc_feature (1)..(25): SEQ ID NO: 1722; WAN024DNF_at; Start 61; Stop 85
aatttaattattctccagagaacta

SEQ ID NO: 164559 - DNA, 25 bp, Artificial
  probe
  misc_feature (1)..(25): SEQ ID NO: 1722; WAN024DNF_at; Start 37; Stop 61
aatcaagaaaatagttctcatagaa

SEQ ID NO: 164560 - DNA, 25 bp, Artificial
  probe
  misc_feature (1)..(25): SEQ ID NO: 1722; WAN024DNF_at; Start 49; Stop 73
agttctcatagaaatttaattattc

SEQ ID NO: 164561 - DNA, 25 bp, Artificial
  probe
  misc_feature (1)..(25): SEQ ID NO: 1722; WAN024DNF_at; Start 6; Stop 30
cctaagtgagaaaatcacttgggat

SEQ ID NO: 164562 - DNA, 25 bp, Artificial
  probe
  misc_feature (1)..(25): SEQ ID NO: 1722; WAN024DNF_at; Start 8; Stop 32
taagtgagaaaatcacttgggattt

SEQ ID NO: 164563 - DNA, 25 bp, Artificial
  probe
  misc_feature (1)..(25): SEQ ID NO: 1722; WAN024DNF_at; Start 3; Stop 27
gatcctaagtgagaaaatcacttgg

SEQ ID NO: 164564 - DNA, 25 bp, Artificial
  probe
  misc_feature (1)..(25): SEQ ID NO: 1722; WAN024DNF_at; Start 9; Stop 33
aagtgagaaaatcacttgggatttt

SEQ ID NO: 164565 - DNA, 25 bp, Artificial
  probe
  misc_feature (1)..(25): SEQ ID NO: 1722; WAN024DNF_at; Start 2; Stop 26
tgatcctaagtgagaaaatcacttg

SEQ ID NO: 164566 - DNA, 25 bp, Artificial
  probe
  misc_feature (1)..(25): SEQ ID NO: 1722; WAN024DNF_at; Start 59; Stop 83
gaaatttaattattctccagagaac

SEQ ID NO: 164567 - DNA, 25 bp, Artificial
  probe
  misc_feature (1)..(25): SEQ ID NO: 1722; WAN024DNF_at; Start 72; Stop 96
tctccagagaactatttttatttag

SEQ ID NO: 164568 - DNA, 25 bp, Artificial
  probe
  misc_feature (1)..(25): SEQ ID NO: 1722; WAN024DNF_at; Start 71; Stop 95
ttctccagagaactatttttattta

SEQ ID NO: 164569 - DNA, 25 bp, Artificial
  probe
  misc_feature (1)..(25): SEQ ID NO: 1722; WAN024DNF_at; Start 69; Stop 93
tattctccagagaactatttttatt

SEQ ID NO: 164570 - DNA, 25 bp, Artificial
  probe
  misc_feature (1)..(25): SEQ ID NO: 1722; WAN024DNF_at; Start 65; Stop 89
taattattctccagagaactatttt

SEQ ID NO: 164571 - DNA, 25 bp, Artificial
  probe
  misc_feature (1)..(25): SEQ ID NO: 1722; WAN024DNF_at; Start 60; Stop 84
aaatttaattattctccagagaact

SEQ ID NO: 164572 - DNA, 25 bp, Artificial
  probe
  misc_feature (1)..(25): SEQ ID NO: 1722; WAN024DNF_at; Start 56; Stop 80
atagaaatttaattattctccagag

SEQ ID NO: 164573 - DNA, 25 bp, Artificial
  probe
  misc_feature (1)..(25): SEQ ID NO: 1722; WAN024DNF_at; Start 43; Stop 67
gaaaatagttctcatagaaatttaa

SEQ ID NO: 164574 - DNA, 25 bp, Artificial
  probe
  misc_feature (1)..(25): SEQ ID NO: 1722; WAN024DNF_at; Start 5; Stop 29
tcctaagtgagaaaatcacttggga

SEQ ID NO: 164575 - DNA, 25 bp, Artificial
  probe
  misc_feature (1)..(25): SEQ ID NO: 1722; WAN024DNF_at; Start 40; Stop 64
caagaaaatagttctcatagaaatt

SEQ ID NO: 164576 - DNA, 25 bp, Artificial
  probe
  misc_feature (1)..(25): SEQ ID NO: 1722; WAN024DNF_at; Start 33; Stop 57
ttttaatcaagaaaatagttctcat

SEQ ID NO: 164577 - DNA, 25 bp, Artificial
  probe
  misc_feature (1)..(25): SEQ ID NO: 1722; WAN024DNF_at; Start 35; Stop 59
ttaatcaagaaaatagttctcatag

SEQ ID NO: 164578 - DNA, 25 bp, Artificial
  probe
  misc_feature (1)..(25): SEQ ID NO: 1722; WAN024DNF_at; Start 20; Stop 44
tcacttgggatttttttaatcaaga

SEQ ID NO: 164579 - DNA, 25 bp, Artificial
  probe
  misc_feature (1)..(25): SEQ ID NO: 1722; WAN024DNF_at; Start 58; Stop 82
agaaatttaattattctccagagaa

SEQ ID NO: 164580 - DNA, 25 bp, Artificial
  probe
  misc_feature (1)..(25): SEQ ID NO: 3422; WAN024DNG_at; Start 9; Stop 33
atcaggtaagatgcttcgcaatacc

SEQ ID NO: 164581 - DNA, 25 bp, Artificial
  probe
  misc_feature (1)..(25): SEQ ID NO: 3422; WAN024DNG_at; Start 14; Stop 38
gtaagatgcttcgcaatacctacac

SEQ ID NO: 164582 - DNA, 25 bp, Artificial
  probe
  misc_feature (1)..(25): SEQ ID NO: 3422; WAN024DNG_at; Start 20; Stop 44
tgcttcgcaatacctacacacctga

SEQ ID NO: 164583 - DNA, 25 bp, Artificial
  probe
  misc_feature (1)..(25): SEQ ID NO: 3422; WAN024DNG_at; Start 4; Stop 28
gcttcatcaggtaagatgcttcgca

SEQ ID NO: 164584 - DNA, 25 bp, Artificial
  probe
  misc_feature (1)..(25): SEQ ID NO: 3422; WAN024DNG_at; Start 15; Stop 39
taagatgcttcgcaatacctacaca

SEQ ID NO: 164585 - DNA, 25 bp, Artificial
  probe
  misc_feature (1)..(25): SEQ ID NO: 3422; WAN024DNG_at; Start 17; Stop 41
agatgcttcgcaatacctacacacc

SEQ ID NO: 164586 - DNA, 25 bp, Artificial
  probe
  misc_feature (1)..(25): SEQ ID NO: 3422; WAN024DNG_at; Start 19; Stop 43
atgcttcgcaatacctacacacctg

SEQ ID NO: 164587 - DNA, 25 bp, Artificial
  probe
  misc_feature (1)..(25): SEQ ID NO: 3422; WAN024DNG_at; Start 52; Stop 76
tacgttggcaacttaggtgcctggc

SEQ ID NO: 164588 - DNA, 25 bp, Artificial
  probe
  misc_feature (1)..(25): SEQ ID NO: 3422; WAN024DNG_at; Start 49; Stop 73
tactacgttggcaacttaggtgcct

SEQ ID NO: 164589 - DNA, 25 bp, Artificial
  probe
  misc_feature (1)..(25): SEQ ID NO: 3422; WAN024DNG_at; Start 6; Stop 30
ttcatcaggtaagatgcttcgcaat

SEQ ID NO: 164590 - DNA, 25 bp, Artificial
  probe
  misc_feature (1)..(25): SEQ ID NO: 3422; WAN024DNG_at; Start 12; Stop 36
aggtaagatgcttcgcaatacctac

SEQ ID NO: 164591 - DNA, 25 bp, Artificial
  probe
  misc_feature (1)..(25): SEQ ID NO: 3422; WAN024DNG_at; Start 54; Stop 78
cgttggcaacttaggtgcctggcaa

SEQ ID NO: 164592 - DNA, 25 bp, Artificial
  probe
  misc_feature (1)..(25): SEQ ID NO: 3422; WAN024DNG_at; Start 21; Stop 45
gcttcgcaatacctacacacctgat

SEQ ID NO: 164593 - DNA, 25 bp, Artificial
  probe
  misc_feature (1)..(25): SEQ ID NO: 3422; WAN024DNG_at; Start 7; Stop 31
tcatcaggtaagatgcttcgcaata

SEQ ID NO: 164594 - DNA, 25 bp, Artificial
  probe
  misc_feature (1)..(25): SEQ ID NO: 3422; WAN024DNG_at; Start 3; Stop 27
ggcttcatcaggtaagatgcttcgc

SEQ ID NO: 164595 - DNA, 25 bp, Artificial
  probe
  misc_feature (1)..(25): SEQ ID NO: 3422; WAN024DNG_at; Start 11; Stop 35
caggtaagatgcttcgcaataccta

SEQ ID NO: 164596 - DNA, 25 bp, Artificial
  probe
  misc_feature (1)..(25): SEQ ID NO: 3422; WAN024DNG_at; Start 16; Stop 40
aagatgcttcgcaatacctacacac

SEQ ID NO: 164597 - DNA, 25 bp, Artificial
  probe
  misc_feature (1)..(25): SEQ ID NO: 3422; WAN024DNG_at; Start 18; Stop 42
gatgcttcgcaatacctacacacct

SEQ ID NO: 164598 - DNA, 25 bp, Artificial
  probe
  misc_feature (1)..(25): SEQ ID NO: 3422; WAN024DNG_at; Start 8; Stop 32
catcaggtaagatgcttcgcaatac

SEQ ID NO: 164599 - DNA, 25 bp, Artificial
  probe
  misc_feature (1)..(25): SEQ ID NO: 3422; WAN024DNG_at; Start 5; Stop 29
cttcatcaggtaagatgcttcgcaa

SEQ ID NO: 164600 - DNA, 25 bp, Artificial
  probe
  misc_feature (1)..(25): SEQ ID NO: 3422; WAN024DNG_at; Start 51; Stop 75
ctacgttggcaacttaggtgcctgg

SEQ ID NO: 164601 - DNA, 25 bp, Artificial
  probe
  misc_feature (1)..(25): SEQ ID NO: 3422; WAN024DNG_at; Start 10; Stop 34
tcaggtaagatgcttcgcaatacct

SEQ ID NO: 164602 - DNA, 25 bp, Artificial
  probe
  misc_feature (1)..(25): SEQ ID NO: 3422; WAN024DNG_at; Start 50; Stop 74
actacgttggcaacttaggtgcctg

SEQ ID NO: 164603 - DNA, 25 bp, Artificial
  probe
  misc_feature (1)..(25): SEQ ID NO: 3422; WAN024DNG_at; Start 53; Stop 77
acgttggcaacttaggtgcctggca

SEQ ID NO: 164604 - DNA, 25 bp, Artificial
  probe
  misc_feature (1)..(25): SEQ ID NO: 3422; WAN024DNG_at; Start 1; Stop 25
ctggcttcatcaggtaagatgcttc

SEQ ID NO: 164605 - DNA, 25 bp, Artificial
  probe
  misc_feature (1)..(25): SEQ ID NO: 3422; WAN024DNG_at; Start 2; Stop 26
tggcttcatcaggtaagatgcttcg

SEQ ID NO: 164606 - DNA, 25 bp, Artificial
  probe
  misc_feature (1)..(25): SEQ ID NO: 3422; WAN024DNG_at; Start 13; Stop 37
ggtaagatgcttcgcaatacctaca

SEQ ID NO: 164607 - DNA, 25 bp, Artificial
  probe
  misc_feature (1)..(25): SEQ ID NO: 3422; WAN024DNG_at; Start 48; Stop 72
ttactacgttggcaacttaggtgcc

SEQ ID NO: 164608 - DNA, 25 bp, Artificial
  probe
  misc_feature (1)..(25): SEQ ID NO: 3422; WAN024DNG_at; Start 47; Stop 71
gttactacgttggcaacttaggtgc

SEQ ID NO: 164609 - DNA, 25 bp, Artificial
  probe
  misc_feature (1)..(25): SEQ ID NO: 1044; WAN024DNH_at; Start 4; Stop 28
aactacctatttcaagaagacagtt

SEQ ID NO: 164610 - DNA, 25 bp, Artificial
  probe
  misc_feature (1)..(25): SEQ ID NO: 1044; WAN024DNH_at; Start 27; Stop 51
ttcttctcaaatctttaacttagga

SEQ ID NO: 164611 - DNA, 25 bp, Artificial
  probe
  misc_feature (1)..(25): SEQ ID NO: 1044; WAN024DNH_at; Start 11; Stop 35
tatttcaagaagacagttcttctca

SEQ ID NO: 164612 - DNA, 25 bp, Artificial
  probe
  misc_feature (1)..(25): SEQ ID NO: 1044; WAN024DNH_at; Start 60; Stop 84
aggctatactatcaaagaaatcttt

SEQ ID NO: 164613 - DNA, 25 bp, Artificial
  probe
  misc_feature (1)..(25): SEQ ID NO: 1044; WAN024DNH_at; Start 61; Stop 85
ggctatactatcaaagaaatcttta

SEQ ID NO: 164614 - DNA, 25 bp, Artificial
  probe
  misc_feature (1)..(25): SEQ ID NO: 1044; WAN024DNH_at; Start 8; Stop 32
acctatttcaagaagacagttcttc

SEQ ID NO: 164615 - DNA, 25 bp, Artificial
  probe
  misc_feature (1)..(25): SEQ ID NO: 1044; WAN024DNH_at; Start 2; Stop 26
tgaactacctatttcaagaagacag

SEQ ID NO: 164616 - DNA, 25 bp, Artificial
  probe
  misc_feature (1)..(25): SEQ ID NO: 1044; WAN024DNH_at; Start 9; Stop 33
cctatttcaagaagacagttcttct

SEQ ID NO: 164617 - DNA, 25 bp, Artificial
  probe
  misc_feature (1)..(25): SEQ ID NO: 1044; WAN024DNH_at; Start 5; Stop 29
actacctatttcaagaagacagttc

SEQ ID NO: 164618 - DNA, 25 bp, Artificial
  probe
  misc_feature (1)..(25): SEQ ID NO: 1044; WAN024DNH_at; Start 28; Stop 52
tcttctcaaatctttaacttaggaa

SEQ ID NO: 164619 - DNA, 25 bp, Artificial
  probe
  misc_feature (1)..(25): SEQ ID NO: 1044; WAN024DNH_at; Start 87; Stop 111
aactgctgaagaattactaaatcta

SEQ ID NO: 164620 - DNA, 25 bp, Artificial
  probe
  misc_feature (1)..(25): SEQ ID NO: 1044; WAN024DNH_at; Start 3; Stop 27
gaactacctatttcaagaagacagt

SEQ ID NO: 164621 - DNA, 25 bp, Artificial
  probe
  misc_feature (1)..(25): SEQ ID NO: 1044; WAN024DNH_at; Start 7; Stop 31
tacctatttcaagaagacagttctt

SEQ ID NO: 164622 - DNA, 25 bp, Artificial
  probe
  misc_feature (1)..(25): SEQ ID NO: 1044; WAN024DNH_at; Start 6; Stop 30
ctacctatttcaagaagacagttct

SEQ ID NO: 164623 - DNA, 25 bp, Artificial
  probe
  misc_feature (1)..(25): SEQ ID NO: 1044; WAN024DNH_at; Start 93; Stop 117
tgaagaattactaaatctaactaat

SEQ ID NO: 164624 - DNA, 25 bp, Artificial
  probe
  misc_feature (1)..(25): SEQ ID NO: 1044; WAN024DNH_at; Start 88; Stop 112
actgctgaagaattactaaatctaa

SEQ ID NO: 164625 - DNA, 25 bp, Artificial
  probe
  misc_feature (1)..(25): SEQ ID NO: 1044; WAN024DNH_at; Start 62; Stop 86
gctatactatcaaagaaatctttaa

SEQ ID NO: 164626 - DNA, 25 bp, Artificial
  probe
  misc_feature (1)..(25): SEQ ID NO: 1044; WAN024DNH_at; Start 58; Stop 82
aaaggctatactatcaaagaaatct

SEQ ID NO: 164627 - DNA, 25 bp, Artificial
  probe
  misc_feature (1)..(25): SEQ ID NO: 1044; WAN024DNH_at; Start 31; Stop 55
tctcaaatctttaacttaggaacta

SEQ ID NO: 164628 - DNA, 25 bp, Artificial
  probe
  misc_feature (1)..(25): SEQ ID NO: 1044; WAN024DNH_at; Start 19; Stop 43
gaagacagttcttctcaaatcttta

SEQ ID NO: 164629 - DNA, 25 bp, Artificial
  probe
  misc_feature (1)..(25): SEQ ID NO: 1044; WAN024DNH_at; Start 20; Stop 44
aagacagttcttctcaaatctttaa

SEQ ID NO: 164630 - DNA, 25 bp, Artificial
  probe
  misc_feature (1)..(25): SEQ ID NO: 1044; WAN024DNH_at; Start 15; Stop 39
tcaagaagacagttcttctcaaatc

SEQ ID NO: 164631 - DNA, 25 bp, Artificial
  probe
  misc_feature (1)..(25): SEQ ID NO: 1044; WAN024DNH_at; Start 72; Stop 96
caaagaaatctttaaaactgctgaa

SEQ ID NO: 164632 - DNA, 25 bp, Artificial
  probe
  misc_feature (1)..(25): SEQ ID NO: 1044; WAN024DNH_at; Start 10; Stop 34
ctatttcaagaagacagttcttctc

SEQ ID NO: 164633 - DNA, 25 bp, Artificial
  probe
  misc_feature (1)..(25): SEQ ID NO: 1044; WAN024DNH_at; Start 90; Stop 114
tgctgaagaattactaaatctaact

SEQ ID NO: 164634 - DNA, 25 bp, Artificial
  probe
  misc_feature (1)..(25): SEQ ID NO: 1044; WAN024DNH_at; Start 89; Stop 113
ctgctgaagaattactaaatctaac

SEQ ID NO: 164635 - DNA, 25 bp, Artificial
  probe
  misc_feature (1)..(25): SEQ ID NO: 1044; WAN024DNH_at; Start 73; Stop 97
aaagaaatctttaaaactgctgaag

SEQ ID NO: 164636 - DNA, 25 bp, Artificial
  probe
  misc_feature (1)..(25): SEQ ID NO: 1044; WAN024DNH_at; Start 22; Stop 46
gacagttcttctcaaatctttaact

SEQ ID NO: 164637 - DNA, 25 bp, Artificial
  probe
  misc_feature (1)..(25): SEQ ID NO: 1044; WAN024DNH_at; Start 59; Stop 83
aaggctatactatcaaagaaatctt

SEQ ID NO: 164638 - DNA, 25 bp, Artificial
  probe
  misc_feature (1)..(25): SEQ ID NO: 1044; WAN024DNH_at; Start 57; Stop 81
aaaaggctatactatcaaagaaatc

SEQ ID NO: 164639 - DNA, 25 bp, Artificial
  probe
  misc_feature (1)..(25): SEQ ID NO: 1044; WAN024DNH_at; Start 25; Stop 49
agttcttctcaaatctttaacttag

SEQ ID NO: 164640 - DNA, 25 bp, Artificial
  probe
  misc_feature (1)..(25): SEQ ID NO: 1044; WAN024DNH_at; Start 21; Stop 45
agacagttcttctcaaatctttaac

SEQ ID NO: 164641 - DNA, 25 bp, Artificial
  probe
  misc_feature (1)..(25): SEQ ID NO: 1044; WAN024DNH_at; Start 16; Stop 40
caagaagacagttcttctcaaatct

SEQ ID NO: 164642 - DNA, 25 bp, Artificial
  probe
  misc_feature (1)..(25): SEQ ID NO: 1044; WAN024DNH_at; Start 91; Stop 115
gctgaagaattactaaatctaacta

SEQ ID NO: 164643 - DNA, 25 bp, Artificial
  probe
  misc_feature (1)..(25): SEQ ID NO: 4156; WAN024DNI_at; Start 22; Stop 46
cctcacacggaagtatattctgtgt

SEQ ID NO: 164644 - DNA, 25 bp, Artificial
  probe
  misc_feature (1)..(25): SEQ ID NO: 4156; WAN024DNI_at; Start 16; Stop 40
caacgccctcacacggaagtatatt

SEQ ID NO: 164645 - DNA, 25 bp, Artificial
  probe
  misc_feature (1)..(25): SEQ ID NO: 4156; WAN024DNI_at; Start 26; Stop 50
acacggaagtatattctgtgtgtgg

SEQ ID NO: 164646 - DNA, 25 bp, Artificial
  probe
  misc_feature (1)..(25): SEQ ID NO: 4156; WAN024DNI_at; Start 44; Stop 68
tgtgtgggcttttttctatccgtcg

SEQ ID NO: 164647 - DNA, 25 bp, Artificial
  probe
  misc_feature (1)..(25): SEQ ID NO: 4156; WAN024DNI_at; Start 24; Stop 48
tcacacggaagtatattctgtgtgt

SEQ ID NO: 164648 - DNA, 25 bp, Artificial
  probe
  misc_feature (1)..(25): SEQ ID NO: 4156; WAN024DNI_at; Start 76; Stop 100
tatcttttattagggcctctaacta

SEQ ID NO: 164649 - DNA, 25 bp, Artificial
  probe
  misc_feature (1)..(25): SEQ ID NO: 4156; WAN024DNI_at; Start 35; Stop 59
tatattctgtgtgtgggcttttttc

SEQ ID NO: 164650 - DNA, 25 bp, Artificial
  probe
  misc_feature (1)..(25): SEQ ID NO: 4156; WAN024DNI_at; Start 36; Stop 60
atattctgtgtgtgggcttttttct

SEQ ID NO: 164651 - DNA, 25 bp, Artificial
  probe
  misc_feature (1)..(25): SEQ ID NO: 4156; WAN024DNI_at; Start 3; Stop 27
ggcaccgcgttaccaacgccctcac

SEQ ID NO: 164652 - DNA, 25 bp, Artificial
  probe
  misc_feature (1)..(25): SEQ ID NO: 4156; WAN024DNI_at; Start 4; Stop 28
gcaccgcgttaccaacgccctcaca

SEQ ID NO: 164653 - DNA, 25 bp, Artificial
  probe
  misc_feature (1)..(25): SEQ ID NO: 4156; WAN024DNI_at; Start 2; Stop 26
tggcaccgcgttaccaacgccctca

SEQ ID NO: 164654 - DNA, 25 bp, Artificial
  probe
  misc_feature (1)..(25): SEQ ID NO: 4156; WAN024DNI_at; Start 28; Stop 52
acggaagtatattctgtgtgtgggc

SEQ ID NO: 164655 - DNA, 25 bp, Artificial
  probe
  misc_feature (1)..(25): SEQ ID NO: 4156; WAN024DNI_at; Start 25; Stop 49
cacacggaagtatattctgtgtgtg

SEQ ID NO: 164656 - DNA, 25 bp, Artificial
  probe
  misc_feature (1)..(25): SEQ ID NO: 4156; WAN024DNI_at; Start 20; Stop 44
gccctcacacggaagtatattctgt

SEQ ID NO: 164657 - DNA, 25 bp, Artificial
  probe
  misc_feature (1)..(25): SEQ ID NO: 4156; WAN024DNI_at; Start 31; Stop 55
gaagtatattctgtgtgtgggcttt

SEQ ID NO: 164658 - DNA, 25 bp, Artificial
  probe
  misc_feature (1)..(25): SEQ ID NO: 4156; WAN024DNI_at; Start 29; Stop 53
cggaagtatattctgtgtgtgggct

SEQ ID NO: 164659 - DNA, 25 bp, Artificial
  probe
  misc_feature (1)..(25): SEQ ID NO: 4156; WAN024DNI_at; Start 33; Stop 57
agtatattctgtgtgtgggcttttt

SEQ ID NO: 164660 - DNA, 25 bp, Artificial
  probe
  misc_feature (1)..(25): SEQ ID NO: 4156; WAN024DNI_at; Start 37; Stop 61
tattctgtgtgtgggcttttttcta

SEQ ID NO: 164661 - DNA, 25 bp, Artificial
  probe
  misc_feature (1)..(25): SEQ ID NO: 4156; WAN024DNI_at; Start 42; Stop 66
tgtgtgtgggcttttttctatccgt

SEQ ID NO: 164662 - DNA, 25 bp, Artificial
  probe
  misc_feature (1)..(25): SEQ ID NO: 4156; WAN024DNI_at; Start 17; Stop 41
aacgccctcacacggaagtatattc

SEQ ID NO: 164663 - DNA, 25 bp, Artificial
  probe
  misc_feature (1)..(25): SEQ ID NO: 4156; WAN024DNI_at; Start 15; Stop 39
ccaacgccctcacacggaagtatat

SEQ ID NO: 164664 - DNA, 25 bp, Artificial
  probe
  misc_feature (1)..(25): SEQ ID NO: 4156; WAN024DNI_at; Start 21; Stop 45
ccctcacacggaagtatattctgtg

SEQ ID NO: 164665 - DNA, 25 bp, Artificial
  probe
  misc_feature (1)..(25): SEQ ID NO: 4156; WAN024DNI_at; Start 23; Stop 47
ctcacacggaagtatattctgtgtg

SEQ ID NO: 164666 - DNA, 25 bp, Artificial
  probe
  misc_feature (1)..(25): SEQ ID NO: 4156; WAN024DNI_at; Start 30; Stop 54
ggaagtatattctgtgtgtgggctt

SEQ ID NO: 164667 - DNA, 25 bp, Artificial
  probe
  misc_feature (1)..(25): SEQ ID NO: 4156; WAN024DNI_at; Start 34; Stop 58
gtatattctgtgtgtgggctttttt

SEQ ID NO: 164668 - DNA, 25 bp, Artificial
  probe
  misc_feature (1)..(25): SEQ ID NO: 4156; WAN024DNI_at; Start 27; Stop 51
cacggaagtatattctgtgtgtggg

SEQ ID NO: 164669 - DNA, 25 bp, Artificial
  probe
  misc_feature (1)..(25): SEQ ID NO: 4156; WAN024DNI_at; Start 32; Stop 56
aagtatattctgtgtgtgggctttt

SEQ ID NO: 164670 - DNA, 25 bp, Artificial
  probe
  misc_feature (1)..(25): SEQ ID NO: 4156; WAN024DNI_at; Start 1; Stop 25
gtggcaccgcgttaccaacgccctc

SEQ ID NO: 164671 - DNA, 25 bp, Artificial
  probe
  misc_feature (1)..(25): SEQ ID NO: 4156; WAN024DNI_at; Start 19; Stop 43
cgccctcacacggaagtatattctg

SEQ ID NO: 164672 - DNA, 25 bp, Artificial
  probe
  misc_feature (1)..(25): SEQ ID NO: 4156; WAN024DNI_at; Start 13; Stop 37
taccaacgccctcacacggaagtat

SEQ ID NO: 164673 - DNA, 25 bp, Artificial
  probe
  misc_feature (1)..(25): SEQ ID NO: 4156; WAN024DNI_at; Start 12; Stop 36
ttaccaacgccctcacacggaagta

SEQ ID NO: 164674 - DNA, 25 bp, Artificial
  probe
  misc_feature (1)..(25): SEQ ID NO: 4156; WAN024DNI_at; Start 43; Stop 67
gtgtgtgggcttttttctatccgtc

SEQ ID NO: 164675 - DNA, 25 bp, Artificial
  probe
  misc_feature (1)..(25): SEQ ID NO: 4156; WAN024DNI_at; Start 14; Stop 38
accaacgccctcacacggaagtata

SEQ ID NO: 164676 - DNA, 25 bp, Artificial
  probe
  misc_feature (1)..(25): SEQ ID NO: 4156; WAN024DNI_at; Start 41; Stop 65
ctgtgtgtgggcttttttctatccg

SEQ ID NO: 164677 - DNA, 25 bp, Artificial
  probe
  misc_feature (1)..(25): SEQ ID NO: 785; WAN024DNJ_at; Start 34; Stop 58
agtgattttattcatgatgggataa

SEQ ID NO: 164678 - DNA, 25 bp, Artificial
  probe
  misc_feature (1)..(25): SEQ ID NO: 785; WAN024DNJ_at; Start 22; Stop 46
aaagctaattggagtgattttattc

SEQ ID NO: 164679 - DNA, 25 bp, Artificial
  probe
  misc_feature (1)..(25): SEQ ID NO: 785; WAN024DNJ_at; Start 16; Stop 40
ttttcaaaagctaattggagtgatt

SEQ ID NO: 164680 - DNA, 25 bp, Artificial
  probe
  misc_feature (1)..(25): SEQ ID NO: 785; WAN024DNJ_at; Start 23; Stop 47
aagctaattggagtgattttattca

SEQ ID NO: 164681 - DNA, 25 bp, Artificial
  probe
  misc_feature (1)..(25): SEQ ID NO: 785; WAN024DNJ_at; Start 14; Stop 38
tattttcaaaagctaattggagtga

SEQ ID NO: 164682 - DNA, 25 bp, Artificial
  probe
  misc_feature (1)..(25): SEQ ID NO: 785; WAN024DNJ_at; Start 33; Stop 57
gagtgattttattcatgatgggata

SEQ ID NO: 164683 - DNA, 25 bp, Artificial
  probe
  misc_feature (1)..(25): SEQ ID NO: 785; WAN024DNJ_at; Start 12; Stop 36
agtattttcaaaagctaattggagt

SEQ ID NO: 164684 - DNA, 25 bp, Artificial
  probe
  misc_feature (1)..(25): SEQ ID NO: 785; WAN024DNJ_at; Start 48; Stop 72
tgatgggataaatgatctggccaaa

SEQ ID NO: 164685 - DNA, 25 bp, Artificial
  probe
  misc_feature (1)..(25): SEQ ID NO: 785; WAN024DNJ_at; Start 44; Stop 68
ttcatgatgggataaatgatctggc

SEQ ID NO: 164686 - DNA, 25 bp, Artificial
  probe
  misc_feature (1)..(25): SEQ ID NO: 785; WAN024DNJ_at; Start 51; Stop 75
tgggataaatgatctggccaaaaat

SEQ ID NO: 164687 - DNA, 25 bp, Artificial
  probe
  misc_feature (1)..(25): SEQ ID NO: 785; WAN024DNJ_at; Start 19; Stop 43
tcaaaagctaattggagtgatttta

SEQ ID NO: 164688 - DNA, 25 bp, Artificial
  probe
  misc_feature (1)..(25): SEQ ID NO: 785; WAN024DNJ_at; Start 42; Stop 66
tattcatgatgggataaatgatctg

SEQ ID NO: 164689 - DNA, 25 bp, Artificial
  probe
  misc_feature (1)..(25): SEQ ID NO: 785; WAN024DNJ_at; Start 26; Stop 50
ctaattggagtgattttattcatga

SEQ ID NO: 164690 - DNA, 25 bp, Artificial
  probe
  misc_feature (1)..(25): SEQ ID NO: 785; WAN024DNJ_at; Start 52; Stop 76
gggataaatgatctggccaaaaatg

SEQ ID NO: 164691 - DNA, 25 bp, Artificial
  probe
  misc_feature (1)..(25): SEQ ID NO: 785; WAN024DNJ_at; Start 32; Stop 56
ggagtgattttattcatgatgggat

SEQ ID NO: 164692 - DNA, 25 bp, Artificial
  probe
  misc_feature (1)..(25): SEQ ID NO: 785; WAN024DNJ_at; Start 10; Stop 34
gaagtattttcaaaagctaattgga

SEQ ID NO: 164693 - DNA, 25 bp, Artificial
  probe
  misc_feature (1)..(25): SEQ ID NO: 785; WAN024DNJ_at; Start 18; Stop 42
ttcaaaagctaattggagtgatttt

SEQ ID NO: 164694 - DNA, 25 bp, Artificial
  probe
  misc_feature (1)..(25): SEQ ID NO: 785; WAN024DNJ_at; Start 43; Stop 67
attcatgatgggataaatgatctgg

SEQ ID NO: 164695 - DNA, 25 bp, Artificial
  probe
  misc_feature (1)..(25): SEQ ID NO: 785; WAN024DNJ_at; Start 11; Stop 35
aagtattttcaaaagctaattggag

SEQ ID NO: 164696 - DNA, 25 bp, Artificial
  probe
  misc_feature (1)..(25): SEQ ID NO: 785; WAN024DNJ_at; Start 46; Stop 70
catgatgggataaatgatctggcca

SEQ ID NO: 164697 - DNA, 25 bp, Artificial
  probe
  misc_feature (1)..(25): SEQ ID NO: 785; WAN024DNJ_at; Start 2; Stop 26
tgaaaattgaagtattttcaaaagc

SEQ ID NO: 164698 - DNA, 25 bp, Artificial
  probe
  misc_feature (1)..(25): SEQ ID NO: 785; WAN024DNJ_at; Start 49; Stop 73
gatgggataaatgatctggccaaaa

SEQ ID NO: 164699 - DNA, 25 bp, Artificial
  probe
  misc_feature (1)..(25): SEQ ID NO: 785; WAN024DNJ_at; Start 20; Stop 44
caaaagctaattggagtgattttat

SEQ ID NO: 164700 - DNA, 25 bp, Artificial
  probe
  misc_feature (1)..(25): SEQ ID NO: 785; WAN024DNJ_at; Start 54; Stop 78
gataaatgatctggccaaaaatgat

SEQ ID NO: 164701 - DNA, 25 bp, Artificial
  probe
  misc_feature (1)..(25): SEQ ID NO: 785; WAN024DNJ_at; Start 13; Stop 37
gtattttcaaaagctaattggagtg

SEQ ID NO: 164702 - DNA, 25 bp, Artificial
  probe
  misc_feature (1)..(25): SEQ ID NO: 785; WAN024DNJ_at; Start 45; Stop 69
tcatgatgggataaatgatctggcc

SEQ ID NO: 164703 - DNA, 25 bp, Artificial
  probe
  misc_feature (1)..(25): SEQ ID NO: 785; WAN024DNJ_at; Start 47; Stop 71
atgatgggataaatgatctggccaa

SEQ ID NO: 164704 - DNA, 25 bp, Artificial
  probe
  misc_feature (1)..(25): SEQ ID NO: 785; WAN024DNJ_at; Start 53; Stop 77
ggataaatgatctggccaaaaatga

SEQ ID NO: 164705 - DNA, 25 bp, Artificial
  probe
  misc_feature (1)..(25): SEQ ID NO: 785; WAN024DNJ_at; Start 9; Stop 33
tgaagtattttcaaaagctaattgg

SEQ ID NO: 164706 - DNA, 25 bp, Artificial
  probe
  misc_feature (1)..(25): SEQ ID NO: 785; WAN024DNJ_at; Start 25; Stop 49
gctaattggagtgattttattcatg

SEQ ID NO: 164707 - DNA, 25 bp, Artificial
  probe
  misc_feature (1)..(25): SEQ ID NO: 785; WAN024DNJ_at; Start 17; Stop 41
tttcaaaagctaattggagtgattt

SEQ ID NO: 164708 - DNA, 25 bp, Artificial
  probe
  misc_feature (1)..(25): SEQ ID NO: 785; WAN024DNJ_at; Start 15; Stop 39
attttcaaaagctaattggagtgat

SEQ ID NO: 164709 - DNA, 25 bp, Artificial
  probe
  misc_feature (1)..(25): SEQ ID NO: 785; WAN024DNJ_at; Start 30; Stop 54
ttggagtgattttattcatgatggg

SEQ ID NO: 164710 - DNA, 25 bp, Artificial
  probe
  misc_feature (1)..(25): SEQ ID NO: 785; WAN024DNJ_at; Start 50; Stop 74
atgggataaatgatctggccaaaaa

SEQ ID NO: 164711 - DNA, 25 bp, Artificial
  probe
  misc_feature (1)..(25): SEQ ID NO: 4870; WAN024DNK_at; Start 52; Stop 76
tctcgtttgattagctcaattcagc

SEQ ID NO: 164712 - DNA, 25 bp, Artificial
  probe
  misc_feature (1)..(25): SEQ ID NO: 4870; WAN024DNK_at; Start 53; Stop 77
ctcgtttgattagctcaattcagca

SEQ ID NO: 164713 - DNA, 25 bp, Artificial
  probe
  misc_feature (1)..(25): SEQ ID NO: 4870; WAN024DNK_at; Start 31; Stop 55
gaccaaagaaagtacttggtctctc

SEQ ID NO: 164714 - DNA, 25 bp, Artificial
  probe
  misc_feature (1)..(25): SEQ ID NO: 4870; WAN024DNK_at; Start 46; Stop 70
ttggtctctcgtttgattagctcaa

SEQ ID NO: 164715 - DNA, 25 bp, Artificial
  probe
  misc_feature (1)..(25): SEQ ID NO: 4870; WAN024DNK_at; Start 32; Stop 56
accaaagaaagtacttggtctctcg

SEQ ID NO: 164716 - DNA, 25 bp, Artificial
  probe
  misc_feature (1)..(25): SEQ ID NO: 4870; WAN024DNK_at; Start 28; Stop 52
agagaccaaagaaagtacttggtct

SEQ ID NO: 164717 - DNA, 25 bp, Artificial
  probe
  misc_feature (1)..(25): SEQ ID NO: 4870; WAN024DNK_at; Start 45; Stop 69
cttggtctctcgtttgattagctca

SEQ ID NO: 164718 - DNA, 25 bp, Artificial
  probe
  misc_feature (1)..(25): SEQ ID NO: 4870; WAN024DNK_at; Start 49; Stop 73
gtctctcgtttgattagctcaattc

SEQ ID NO: 164719 - DNA, 25 bp, Artificial
  probe
  misc_feature (1)..(25): SEQ ID NO: 4870; WAN024DNK_at; Start 34; Stop 58
caaagaaagtacttggtctctcgtt

SEQ ID NO: 164720 - DNA, 25 bp, Artificial
  probe
  misc_feature (1)..(25): SEQ ID NO: 4870; WAN024DNK_at; Start 36; Stop 60
aagaaagtacttggtctctcgtttg

SEQ ID NO: 164721 - DNA, 25 bp, Artificial
  probe
  misc_feature (1)..(25): SEQ ID NO: 4870; WAN024DNK_at; Start 38; Stop 62
gaaagtacttggtctctcgtttgat

SEQ ID NO: 164722 - DNA, 25 bp, Artificial
  probe
  misc_feature (1)..(25): SEQ ID NO: 4870; WAN024DNK_at; Start 39; Stop 63
aaagtacttggtctctcgtttgatt

SEQ ID NO: 164723 - DNA, 25 bp, Artificial
  probe
  misc_feature (1)..(25): SEQ ID NO: 4870; WAN024DNK_at; Start 40; Stop 64
aagtacttggtctctcgtttgatta

SEQ ID NO: 164724 - DNA, 25 bp, Artificial
  probe
  misc_feature (1)..(25): SEQ ID NO: 4870; WAN024DNK_at; Start 50; Stop 74
tctctcgtttgattagctcaattca

SEQ ID NO: 164725 - DNA, 25 bp, Artificial
  probe
  misc_feature (1)..(25): SEQ ID NO: 4870; WAN024DNK_at; Start 29; Stop 53
gagaccaaagaaagtacttggtctc

SEQ ID NO: 164726 - DNA, 25 bp, Artificial
  probe
  misc_feature (1)..(25): SEQ ID NO: 4870; WAN024DNK_at; Start 33; Stop 57
ccaaagaaagtacttggtctctcgt

SEQ ID NO: 164727 - DNA, 25 bp, Artificial
  probe
  misc_feature (1)..(25): SEQ ID NO: 4870; WAN024DNK_at; Start 42; Stop 66
gtacttggtctctcgtttgattagc

SEQ ID NO: 164728 - DNA, 25 bp, Artificial
  probe
  misc_feature (1)..(25): SEQ ID NO: 4870; WAN024DNK_at; Start 48; Stop 72
ggtctctcgtttgattagctcaatt

SEQ ID NO: 164729 - DNA, 25 bp, Artificial
  probe
  misc_feature (1)..(25): SEQ ID NO: 4870; WAN024DNK_at; Start 43; Stop 67
tacttggtctctcgtttgattagct

SEQ ID NO: 164730 - DNA, 25 bp, Artificial
  probe
  misc_feature (1)..(25): SEQ ID NO: 4870; WAN024DNK_at; Start 30; Stop 54
agaccaaagaaagtacttggtctct

SEQ ID NO: 164731 - DNA, 25 bp, Artificial
  probe
  misc_feature (1)..(25): SEQ ID NO: 4870; WAN024DNK_at; Start 44; Stop 68
acttggtctctcgtttgattagctc

SEQ ID NO: 164732 - DNA, 25 bp, Artificial
  probe
  misc_feature (1)..(25): SEQ ID NO: 4870; WAN024DNK_at; Start 54; Stop 78
tcgtttgattagctcaattcagcaa

SEQ ID NO: 164733 - DNA, 25 bp, Artificial
  probe
  misc_feature (1)..(25): SEQ ID NO: 4870; WAN024DNK_at; Start 47; Stop 71
tggtctctcgtttgattagctcaat

SEQ ID NO: 164734 - DNA, 25 bp, Artificial
  probe
  misc_feature (1)..(25): SEQ ID NO: 4870; WAN024DNK_at; Start 41; Stop 65
agtacttggtctctcgtttgattag

SEQ ID NO: 164735 - DNA, 25 bp, Artificial
  probe
  misc_feature (1)..(25): SEQ ID NO: 4870; WAN024DNK_at; Start 37; Stop 61
agaaagtacttggtctctcgtttga

SEQ ID NO: 164736 - DNA, 25 bp, Artificial
  probe
  misc_feature (1)..(25): SEQ ID NO: 4870; WAN024DNK_at; Start 51; Stop 75
ctctcgtttgattagctcaattcag

SEQ ID NO: 164737 - DNA, 25 bp, Artificial
  probe
  misc_feature (1)..(25): SEQ ID NO: 6675; WAN024DNL_at; Start 12; Stop 36
cataataatctcctttttgtgtagt

SEQ ID NO: 164738 - DNA, 25 bp, Artificial
  probe
  misc_feature (1)..(25): SEQ ID NO: 6675; WAN024DNL_at; Start 51; Stop 75
tataaatgatagacaaaatcaagaa

SEQ ID NO: 164739 - DNA, 25 bp, Artificial
  probe
  misc_feature (1)..(25): SEQ ID NO: 6675; WAN024DNL_at; Start 20; Stop 44
tctcctttttgtgtagtgattatga

SEQ ID NO: 164740 - DNA, 25 bp, Artificial
  probe
  misc_feature (1)..(25): SEQ ID NO: 6675; WAN024DNL_at; Start 19; Stop 43
atctcctttttgtgtagtgattatg

SEQ ID NO: 164741 - DNA, 25 bp, Artificial
  probe
  misc_feature (1)..(25): SEQ ID NO: 6675; WAN024DNL_at; Start 24; Stop 48
ctttttgtgtagtgattatgattat

SEQ ID NO: 164742 - DNA, 25 bp, Artificial
  probe
  misc_feature (1)..(25): SEQ ID NO: 6675; WAN024DNL_at; Start 18; Stop 42
aatctcctttttgtgtagtgattat

SEQ ID NO: 164743 - DNA, 25 bp, Artificial
  probe
  misc_feature (1)..(25): SEQ ID NO: 6675; WAN024DNL_at; Start 56; Stop 80
atgatagacaaaatcaagaattttc

SEQ ID NO: 164744 - DNA, 25 bp, Artificial
  probe
  misc_feature (1)..(25): SEQ ID NO: 6675; WAN024DNL_at; Start 73; Stop 97
gaattttctgtctattttttgaata

SEQ ID NO: 164745 - DNA, 25 bp, Artificial
  probe
  misc_feature (1)..(25): SEQ ID NO: 6675; WAN024DNL_at; Start 63; Stop 87
acaaaatcaagaattttctgtctat

SEQ ID NO: 164746 - DNA, 25 bp, Artificial
  probe
  misc_feature (1)..(25): SEQ ID NO: 6675; WAN024DNL_at; Start 23; Stop 47
cctttttgtgtagtgattatgatta

SEQ ID NO: 164747 - DNA, 25 bp, Artificial
  probe
  misc_feature (1)..(25): SEQ ID NO: 6675; WAN024DNL_at; Start 40; Stop 64
tatgattatagtataaatgatagac

SEQ ID NO: 164748 - DNA, 25 bp, Artificial
  probe
  misc_feature (1)..(25): SEQ ID NO: 6675; WAN024DNL_at; Start 13; Stop 37
ataataatctcctttttgtgtagtg

SEQ ID NO: 164749 - DNA, 25 bp, Artificial
  probe
  misc_feature (1)..(25): SEQ ID NO: 6675; WAN024DNL_at; Start 57; Stop 81
tgatagacaaaatcaagaattttct

SEQ ID NO: 164750 - DNA, 25 bp, Artificial
  probe
  misc_feature (1)..(25): SEQ ID NO: 6675; WAN024DNL_at; Start 26; Stop 50
ttttgtgtagtgattatgattatag

SEQ ID NO: 164751 - DNA, 25 bp, Artificial
  probe
  misc_feature (1)..(25): SEQ ID NO: 6675; WAN024DNL_at; Start 27; Stop 51
tttgtgtagtgattatgattatagt

SEQ ID NO: 164752 - DNA, 25 bp, Artificial
  probe
  misc_feature (1)..(25): SEQ ID NO: 6675; WAN024DNL_at; Start 50; Stop 74
gtataaatgatagacaaaatcaaga

SEQ ID NO: 164753 - DNA, 25 bp, Artificial
  probe
  misc_feature (1)..(25): SEQ ID NO: 6675; WAN024DNL_at; Start 49; Stop 73
agtataaatgatagacaaaatcaag

SEQ ID NO: 164754 - DNA, 25 bp, Artificial
  probe
  misc_feature (1)..(25): SEQ ID NO: 6675; WAN024DNL_at; Start 16; Stop 40
ataatctcctttttgtgtagtgatt

SEQ ID NO: 164755 - DNA, 25 bp, Artificial
  probe
  misc_feature (1)..(25): SEQ ID NO: 6675; WAN024DNL_at; Start 15; Stop 39
aataatctcctttttgtgtagtgat

SEQ ID NO: 164756 - DNA, 25 bp, Artificial
  probe
  misc_feature (1)..(25): SEQ ID NO: 6675; WAN024DNL_at; Start 58; Stop 82
gatagacaaaatcaagaattttctg

SEQ ID NO: 164757 - DNA, 25 bp, Artificial
  probe
  misc_feature (1)..(25): SEQ ID NO: 6675; WAN024DNL_at; Start 17; Stop 41
taatctcctttttgtgtagtgatta

SEQ ID NO: 164758 - DNA, 25 bp, Artificial
  probe
  misc_feature (1)..(25): SEQ ID NO: 6675; WAN024DNL_at; Start 29; Stop 53
tgtgtagtgattatgattatagtat

SEQ ID NO: 164759 - DNA, 25 bp, Artificial
  probe
  misc_feature (1)..(25): SEQ ID NO: 6675; WAN024DNL_at; Start 22; Stop 46
tcctttttgtgtagtgattatgatt

SEQ ID NO: 164760 - DNA, 25 bp, Artificial
  probe
  misc_feature (1)..(25): SEQ ID NO: 6675; WAN024DNL_at; Start 43; Stop 67
gattatagtataaatgatagacaaa

SEQ ID NO: 164761 - DNA, 25 bp, Artificial
  probe
  misc_feature (1)..(25): SEQ ID NO: 6675; WAN024DNL_at; Start 42; Stop 66
tgattatagtataaatgatagacaa

SEQ ID NO: 164762 - DNA, 25 bp, Artificial
  probe
  misc_feature (1)..(25): SEQ ID NO: 6675; WAN024DNL_at; Start 48; Stop 72
tagtataaatgatagacaaaatcaa

SEQ ID NO: 164763 - DNA, 25 bp, Artificial
  probe
  misc_feature (1)..(25): SEQ ID NO: 6675; WAN024DNL_at; Start 21; Stop 45
ctcctttttgtgtagtgattatgat

SEQ ID NO: 164764 - DNA, 25 bp, Artificial
  probe
  misc_feature (1)..(25): SEQ ID NO: 6675; WAN024DNL_at; Start 53; Stop 77
taaatgatagacaaaatcaagaatt

SEQ ID NO: 164765 - DNA, 25 bp, Artificial
  probe
  misc_feature (1)..(25): SEQ ID NO: 6675; WAN024DNL_at; Start 60; Stop 84
tagacaaaatcaagaattttctgtc

SEQ ID NO: 164766 - DNA, 25 bp, Artificial
  probe
  misc_feature (1)..(25): SEQ ID NO: 6675; WAN024DNL_at; Start 14; Stop 38
taataatctcctttttgtgtagtga

SEQ ID NO: 164767 - DNA, 25 bp, Artificial
  probe
  misc_feature (1)..(25): SEQ ID NO: 6675; WAN024DNL_at; Start 64; Stop 88
caaaatcaagaattttctgtctatt

SEQ ID NO: 164768 - DNA, 25 bp, Artificial
  probe
  misc_feature (1)..(25): SEQ ID NO: 6675; WAN024DNL_at; Start 55; Stop 79
aatgatagacaaaatcaagaatttt

SEQ ID NO: 164769 - DNA, 25 bp, Artificial
  probe
  misc_feature (1)..(25): SEQ ID NO: 6675; WAN024DNL_at; Start 62; Stop 86
gacaaaatcaagaattttctgtcta

SEQ ID NO: 164770 - DNA, 25 bp, Artificial
  probe
  misc_feature (1)..(25): SEQ ID NO: 6675; WAN024DNL_at; Start 46; Stop 70
tatagtataaatgatagacaaaatc

SEQ ID NO: 164771 - DNA, 25 bp, Artificial
  probe
  misc_feature (1)..(25): SEQ ID NO: 5272; WAN024DNM_at; Start 30; Stop 54
cataatcactacacaaaaaggagat

SEQ ID NO: 164772 - DNA, 25 bp, Artificial
  probe
  misc_feature (1)..(25): SEQ ID NO: 5272; WAN024DNM_at; Start 19; Stop 43
tatactataatcataatcactacac

SEQ ID NO: 164773 - DNA, 25 bp, Artificial
  probe
  misc_feature (1)..(25): SEQ ID NO: 5272; WAN024DNM_at; Start 29; Stop 53
tcataatcactacacaaaaaggaga

SEQ ID NO: 164774 - DNA, 25 bp, Artificial
  probe
  misc_feature (1)..(25): SEQ ID NO: 5272; WAN024DNM_at; Start 15; Stop 39
catttatactataatcataatcact

SEQ ID NO: 164775 - DNA, 25 bp, Artificial
  probe
  misc_feature (1)..(25): SEQ ID NO: 5272; WAN024DNM_at; Start 36; Stop 60
cactacacaaaaaggagattattat

SEQ ID NO: 164776 - DNA, 25 bp, Artificial
  probe
  misc_feature (1)..(25): SEQ ID NO: 5272; WAN024DNM_at; Start 14; Stop 38
tcatttatactataatcataatcac

SEQ ID NO: 164777 - DNA, 25 bp, Artificial
  probe
  misc_feature (1)..(25): SEQ ID NO: 5272; WAN024DNM_at; Start 18; Stop 42
ttatactataatcataatcactaca

SEQ ID NO: 164778 - DNA, 25 bp, Artificial
  probe
  misc_feature (1)..(25): SEQ ID NO: 5272; WAN024DNM_at; Start 28; Stop 52
atcataatcactacacaaaaaggag

SEQ ID NO: 164779 - DNA, 25 bp, Artificial
  probe
  misc_feature (1)..(25): SEQ ID NO: 5272; WAN024DNM_at; Start 2; Stop 26
tgattttgtctatcatttatactat

SEQ ID NO: 164780 - DNA, 25 bp, Artificial
  probe
  misc_feature (1)..(25): SEQ ID NO: 5272; WAN024DNM_at; Start 7; Stop 31
ttgtctatcatttatactataatca

SEQ ID NO: 164781 - DNA, 25 bp, Artificial
  probe
  misc_feature (1)..(25): SEQ ID NO: 5272; WAN024DNM_at; Start 32; Stop 56
taatcactacacaaaaaggagatta

SEQ ID NO: 164782 - DNA, 25 bp, Artificial
  probe
  misc_feature (1)..(25): SEQ ID NO: 5272; WAN024DNM_at; Start 24; Stop 48
tataatcataatcactacacaaaaa

SEQ ID NO: 164783 - DNA, 25 bp, Artificial
  probe
  misc_feature (1)..(25): SEQ ID NO: 5272; WAN024DNM_at; Start 17; Stop 41
tttatactataatcataatcactac

SEQ ID NO: 164784 - DNA, 25 bp, Artificial
  probe
  misc_feature (1)..(25): SEQ ID NO: 5272; WAN024DNM_at; Start 23; Stop 47
ctataatcataatcactacacaaaa

SEQ ID NO: 164785 - DNA, 25 bp, Artificial
  probe
  misc_feature (1)..(25): SEQ ID NO: 5272; WAN024DNM_at; Start 8; Stop 32
tgtctatcatttatactataatcat

SEQ ID NO: 164786 - DNA, 25 bp, Artificial
  probe
  misc_feature (1)..(25): SEQ ID NO: 5272; WAN024DNM_at; Start 20; Stop 44
atactataatcataatcactacaca

SEQ ID NO: 164787 - DNA, 25 bp, Artificial
  probe
  misc_feature (1)..(25): SEQ ID NO: 5272; WAN024DNM_at; Start 25; Stop 49
ataatcataatcactacacaaaaag

SEQ ID NO: 164788 - DNA, 25 bp, Artificial
  probe
  misc_feature (1)..(25): SEQ ID NO: 5272; WAN024DNM_at; Start 16; Stop 40
atttatactataatcataatcacta

SEQ ID NO: 164789 - DNA, 25 bp, Artificial
  probe
  misc_feature (1)..(25): SEQ ID NO: 5272; WAN024DNM_at; Start 12; Stop 36
tatcatttatactataatcataatc

SEQ ID NO: 164790 - DNA, 25 bp, Artificial
  probe
  misc_feature (1)..(25): SEQ ID NO: 5272; WAN024DNM_at; Start 9; Stop 33
gtctatcatttatactataatcata

SEQ ID NO: 164791 - DNA, 25 bp, Artificial
  probe
  misc_feature (1)..(25): SEQ ID NO: 5272; WAN024DNM_at; Start 3; Stop 27
gattttgtctatcatttatactata

SEQ ID NO: 164792 - DNA, 25 bp, Artificial
  probe
  misc_feature (1)..(25): SEQ ID NO: 5272; WAN024DNM_at; Start 22; Stop 46
actataatcataatcactacacaaa

SEQ ID NO: 164793 - DNA, 25 bp, Artificial
  probe
  misc_feature (1)..(25): SEQ ID NO: 5272; WAN024DNM_at; Start 35; Stop 59
tcactacacaaaaaggagattatta

SEQ ID NO: 164794 - DNA, 25 bp, Artificial
  probe
  misc_feature (1)..(25): SEQ ID NO: 5272; WAN024DNM_at; Start 1; Stop 25
ttgattttgtctatcatttatacta

SEQ ID NO: 164795 - DNA, 25 bp, Artificial
  probe
  misc_feature (1)..(25): SEQ ID NO: 5272; WAN024DNM_at; Start 21; Stop 45
tactataatcataatcactacacaa

SEQ ID NO: 164796 - DNA, 25 bp, Artificial
  probe
  misc_feature (1)..(25): SEQ ID NO: 5272; WAN024DNM_at; Start 33; Stop 57
aatcactacacaaaaaggagattat

SEQ ID NO: 164797 - DNA, 25 bp, Artificial
  probe
  misc_feature (1)..(25): SEQ ID NO: 5272; WAN024DNM_at; Start 4; Stop 28
attttgtctatcatttatactataa

SEQ ID NO: 164798 - DNA, 25 bp, Artificial
  probe
  misc_feature (1)..(25): SEQ ID NO: 5272; WAN024DNM_at; Start 26; Stop 50
taatcataatcactacacaaaaagg

SEQ ID NO: 164799 - DNA, 25 bp, Artificial
  probe
  misc_feature (1)..(25): SEQ ID NO: 5272; WAN024DNM_at; Start 27; Stop 51
aatcataatcactacacaaaaagga

SEQ ID NO: 164800 - DNA, 25 bp, Artificial
  probe
  misc_feature (1)..(25): SEQ ID NO: 5272; WAN024DNM_at; Start 37; Stop 61
actacacaaaaaggagattattatg

SEQ ID NO: 164801 - DNA, 25 bp, Artificial
  probe
  misc_feature (1)..(25): SEQ ID NO: 5272; WAN024DNM_at; Start 31; Stop 55
ataatcactacacaaaaaggagatt

SEQ ID NO: 164802 - DNA, 25 bp, Artificial
  probe
  misc_feature (1)..(25): SEQ ID NO: 5272; WAN024DNM_at; Start 34; Stop 58
atcactacacaaaaaggagattatt

SEQ ID NO: 164803 - DNA, 25 bp, Artificial
  probe
  misc_feature (1)..(25): SEQ ID NO: 5272; WAN024DNM_at; Start 6; Stop 30
tttgtctatcatttatactataatc

SEQ ID NO: 164804 - DNA, 25 bp, Artificial
  probe
  misc_feature (1)..(25): SEQ ID NO: 717; WAN024DNN_at; Start 22; Stop 46
tggaataaggcaagccttgtcaagc

SEQ ID NO: 164805 - DNA, 25 bp, Artificial
  probe
  misc_feature (1)..(25): SEQ ID NO: 717; WAN024DNN_at; Start 36; Stop 60
ccttgtcaagcgtatcttgattggt

SEQ ID NO: 164806 - DNA, 25 bp, Artificial
  probe
  misc_feature (1)..(25): SEQ ID NO: 717; WAN024DNN_at; Start 42; Stop 66
caagcgtatcttgattggtatgctt

SEQ ID NO: 164807 - DNA, 25 bp, Artificial
  probe
  misc_feature (1)..(25): SEQ ID NO: 717; WAN024DNN_at; Start 35; Stop 59
gccttgtcaagcgtatcttgattgg

SEQ ID NO: 164808 - DNA, 25 bp, Artificial
  probe
  misc_feature (1)..(25): SEQ ID NO: 717; WAN024DNN_at; Start 31; Stop 55
gcaagccttgtcaagcgtatcttga

SEQ ID NO: 164809 - DNA, 25 bp, Artificial
  probe
  misc_feature (1)..(25): SEQ ID NO: 717; WAN024DNN_at; Start 14; Stop 38
ttcatgcttggaataaggcaagcct

SEQ ID NO: 164810 - DNA, 25 bp, Artificial
  probe
  misc_feature (1)..(25): SEQ ID NO: 717; WAN024DNN_at; Start 17; Stop 41
atgcttggaataaggcaagccttgt

SEQ ID NO: 164811 - DNA, 25 bp, Artificial
  probe
  misc_feature (1)..(25): SEQ ID NO: 717; WAN024DNN_at; Start 37; Stop 61
cttgtcaagcgtatcttgattggta

SEQ ID NO: 164812 - DNA, 25 bp, Artificial
  probe
  misc_feature (1)..(25): SEQ ID NO: 717; WAN024DNN_at; Start 15; Stop 39
tcatgcttggaataaggcaagcctt

SEQ ID NO: 164813 - DNA, 25 bp, Artificial
  probe
  misc_feature (1)..(25): SEQ ID NO: 717; WAN024DNN_at; Start 25; Stop 49
aataaggcaagccttgtcaagcgta

SEQ ID NO: 164814 - DNA, 25 bp, Artificial
  probe
  misc_feature (1)..(25): SEQ ID NO: 717; WAN024DNN_at; Start 32; Stop 56
caagccttgtcaagcgtatcttgat

SEQ ID NO: 164815 - DNA, 25 bp, Artificial
  probe
  misc_feature (1)..(25): SEQ ID NO: 717; WAN024DNN_at; Start 40; Stop 64
gtcaagcgtatcttgattggtatgc

SEQ ID NO: 164816 - DNA, 25 bp, Artificial
  probe
  misc_feature (1)..(25): SEQ ID NO: 717; WAN024DNN_at; Start 38; Stop 62
ttgtcaagcgtatcttgattggtat

SEQ ID NO: 164817 - DNA, 25 bp, Artificial
  probe
  misc_feature (1)..(25): SEQ ID NO: 717; WAN024DNN_at; Start 20; Stop 44
cttggaataaggcaagccttgtcaa

SEQ ID NO: 164818 - DNA, 25 bp, Artificial
  probe
  misc_feature (1)..(25): SEQ ID NO: 717; WAN024DNN_at; Start 19; Stop 43
gcttggaataaggcaagccttgtca

SEQ ID NO: 164819 - DNA, 25 bp, Artificial
  probe
  misc_feature (1)..(25): SEQ ID NO: 717; WAN024DNN_at; Start 43; Stop 67
aagcgtatcttgattggtatgcttt

SEQ ID NO: 164820 - DNA, 25 bp, Artificial
  probe
  misc_feature (1)..(25): SEQ ID NO: 717; WAN024DNN_at; Start 21; Stop 45
ttggaataaggcaagccttgtcaag

SEQ ID NO: 164821 - DNA, 25 bp, Artificial
  probe
  misc_feature (1)..(25): SEQ ID NO: 717; WAN024DNN_at; Start 28; Stop 52
aaggcaagccttgtcaagcgtatct

SEQ ID NO: 164822 - DNA, 25 bp, Artificial
  probe
  misc_feature (1)..(25): SEQ ID NO: 717; WAN024DNN_at; Start 24; Stop 48
gaataaggcaagccttgtcaagcgt

SEQ ID NO: 164823 - DNA, 25 bp, Artificial
  probe
  misc_feature (1)..(25): SEQ ID NO: 717; WAN024DNN_at; Start 18; Stop 42
tgcttggaataaggcaagccttgtc

SEQ ID NO: 164824 - DNA, 25 bp, Artificial
  probe
  misc_feature (1)..(25): SEQ ID NO: 717; WAN024DNN_at; Start 30; Stop 54
ggcaagccttgtcaagcgtatcttg

SEQ ID NO: 164825 - DNA, 25 bp, Artificial
  probe
  misc_feature (1)..(25): SEQ ID NO: 717; WAN024DNN_at; Start 12; Stop 36
cattcatgcttggaataaggcaagc

SEQ ID NO: 164826 - DNA, 25 bp, Artificial
  probe
  misc_feature (1)..(25): SEQ ID NO: 717; WAN024DNN_at; Start 39; Stop 63
tgtcaagcgtatcttgattggtatg

SEQ ID NO: 164827 - DNA, 25 bp, Artificial
  probe
  misc_feature (1)..(25): SEQ ID NO: 717; WAN024DNN_at; Start 23; Stop 47
ggaataaggcaagccttgtcaagcg

SEQ ID NO: 164828 - DNA, 25 bp, Artificial
  probe
  misc_feature (1)..(25): SEQ ID NO: 717; WAN024DNN_at; Start 41; Stop 65
tcaagcgtatcttgattggtatgct

SEQ ID NO: 164829 - DNA, 25 bp, Artificial
  probe
  misc_feature (1)..(25): SEQ ID NO: 717; WAN024DNN_at; Start 29; Stop 53
aggcaagccttgtcaagcgtatctt

SEQ ID NO: 164830 - DNA, 25 bp, Artificial
  probe
  misc_feature (1)..(25): SEQ ID NO: 717; WAN024DNN_at; Start 34; Stop 58
agccttgtcaagcgtatcttgattg

SEQ ID NO: 164831 - DNA, 25 bp, Artificial
  probe
  misc_feature (1)..(25): SEQ ID NO: 717; WAN024DNN_at; Start 26; Stop 50
ataaggcaagccttgtcaagcgtat

SEQ ID NO: 164832 - DNA, 25 bp, Artificial
  probe
  misc_feature (1)..(25): SEQ ID NO: 717; WAN024DNN_at; Start 16; Stop 40
catgcttggaataaggcaagccttg

SEQ ID NO: 164833 - DNA, 25 bp, Artificial
  probe
  misc_feature (1)..(25): SEQ ID NO: 717; WAN024DNN_at; Start 33; Stop 57
aagccttgtcaagcgtatcttgatt

SEQ ID NO: 164834 - DNA, 25 bp, Artificial
  probe
  misc_feature (1)..(25): SEQ ID NO: 717; WAN024DNN_at; Start 27; Stop 51
taaggcaagccttgtcaagcgtatc

SEQ ID NO: 164835 - DNA, 25 bp, Artificial
  probe
  misc_feature (1)..(25): SEQ ID NO: 717; WAN024DNN_at; Start 13; Stop 37
attcatgcttggaataaggcaagcc

SEQ ID NO: 164836 - DNA, 25 bp, Artificial
  probe
  misc_feature (1)..(25): SEQ ID NO: 3447; WAN024DNO_at; Start 56; Stop 80
accgcttgtccgatatgttttctaa

SEQ ID NO: 164837 - DNA, 25 bp, Artificial
  probe
  misc_feature (1)..(25): SEQ ID NO: 3447; WAN024DNO_at; Start 58; Stop 82
cgcttgtccgatatgttttctaagg

SEQ ID NO: 164838 - DNA, 25 bp, Artificial
  probe
  misc_feature (1)..(25): SEQ ID NO: 3447; WAN024DNO_at; Start 7; Stop 31
tttcaagaaggagtaatcctttatc

SEQ ID NO: 164839 - DNA, 25 bp, Artificial
  probe
  misc_feature (1)..(25): SEQ ID NO: 3447; WAN024DNO_at; Start 4; Stop 28
tcatttcaagaaggagtaatccttt

SEQ ID NO: 164840 - DNA, 25 bp, Artificial
  probe
  misc_feature (1)..(25): SEQ ID NO: 3447; WAN024DNO_at; Start 71; Stop 95
tgttttctaaggattatatagtaaa

SEQ ID NO: 164841 - DNA, 25 bp, Artificial
  probe
  misc_feature (1)..(25): SEQ ID NO: 3447; WAN024DNO_at; Start 16; Stop 40
ggagtaatcctttatctactaatgg

SEQ ID NO: 164842 - DNA, 25 bp, Artificial
  probe
  misc_feature (1)..(25): SEQ ID NO: 3447; WAN024DNO_at; Start 2; Stop 26
tgtcatttcaagaaggagtaatcct

SEQ ID NO: 164843 - DNA, 25 bp, Artificial
  probe
  misc_feature (1)..(25): SEQ ID NO: 3447; WAN024DNO_at; Start 60; Stop 84
cttgtccgatatgttttctaaggat

SEQ ID NO: 164844 - DNA, 25 bp, Artificial
  probe
  misc_feature (1)..(25): SEQ ID NO: 3447; WAN024DNO_at; Start 50; Stop 74
aattcaaccgcttgtccgatatgtt

SEQ ID NO: 164845 - DNA, 25 bp, Artificial
  probe
  misc_feature (1)..(25): SEQ ID NO: 3447; WAN024DNO_at; Start 65; Stop 89
ccgatatgttttctaaggattatat

SEQ ID NO: 164846 - DNA, 25 bp, Artificial
  probe
  misc_feature (1)..(25): SEQ ID NO: 3447; WAN024DNO_at; Start 55; Stop 79
aaccgcttgtccgatatgttttcta

SEQ ID NO: 164847 - DNA, 25 bp, Artificial
  probe
  misc_feature (1)..(25): SEQ ID NO: 3447; WAN024DNO_at; Start 64; Stop 88
tccgatatgttttctaaggattata

SEQ ID NO: 164848 - DNA, 25 bp, Artificial
  probe
  misc_feature (1)..(25): SEQ ID NO: 3447; WAN024DNO_at; Start 53; Stop 77
tcaaccgcttgtccgatatgttttc

SEQ ID NO: 164849 - DNA, 25 bp, Artificial
  probe
  misc_feature (1)..(25): SEQ ID NO: 3447; WAN024DNO_at; Start 67; Stop 91
gatatgttttctaaggattatatag

SEQ ID NO: 164850 - DNA, 25 bp, Artificial
  probe
  misc_feature (1)..(25): SEQ ID NO: 3447; WAN024DNO_at; Start 10; Stop 34
caagaaggagtaatcctttatctac

SEQ ID NO: 164851 - DNA, 25 bp, Artificial
  probe
  misc_feature (1)..(25): SEQ ID NO: 3447; WAN024DNO_at; Start 52; Stop 76
ttcaaccgcttgtccgatatgtttt

SEQ ID NO: 164852 - DNA, 25 bp, Artificial
  probe
  misc_feature (1)..(25): SEQ ID NO: 3447; WAN024DNO_at; Start 19; Stop 43
gtaatcctttatctactaatggacg

SEQ ID NO: 164853 - DNA, 25 bp, Artificial
  probe
  misc_feature (1)..(25): SEQ ID NO: 3447; WAN024DNO_at; Start 59; Stop 83
gcttgtccgatatgttttctaagga

SEQ ID NO: 164854 - DNA, 25 bp, Artificial
  probe
  misc_feature (1)..(25): SEQ ID NO: 3447; WAN024DNO_at; Start 1; Stop 25
ctgtcatttcaagaaggagtaatcc

SEQ ID NO: 164855 - DNA, 25 bp, Artificial
  probe
  misc_feature (1)..(25): SEQ ID NO: 3447; WAN024DNO_at; Start 23; Stop 47
tcctttatctactaatggacggaac

SEQ ID NO: 164856 - DNA, 25 bp, Artificial
  probe
  misc_feature (1)..(25): SEQ ID NO: 3447; WAN024DNO_at; Start 49; Stop 73
gaattcaaccgcttgtccgatatgt

SEQ ID NO: 164857 - DNA, 25 bp, Artificial
  probe
  misc_feature (1)..(25): SEQ ID NO: 3447; WAN024DNO_at; Start 21; Stop 45
aatcctttatctactaatggacgga

SEQ ID NO: 164858 - DNA, 25 bp, Artificial
  probe
  misc_feature (1)..(25): SEQ ID NO: 3447; WAN024DNO_at; Start 3; Stop 27
gtcatttcaagaaggagtaatcctt

SEQ ID NO: 164859 - DNA, 25 bp, Artificial
  probe
  misc_feature (1)..(25): SEQ ID NO: 3447; WAN024DNO_at; Start 13; Stop 37
gaaggagtaatcctttatctactaa

SEQ ID NO: 164860 - DNA, 25 bp, Artificial
  probe
  misc_feature (1)..(25): SEQ ID NO: 3447; WAN024DNO_at; Start 17; Stop 41
gagtaatcctttatctactaatgga

SEQ ID NO: 164861 - DNA, 25 bp, Artificial
  probe
  misc_feature (1)..(25): SEQ ID NO: 3447; WAN024DNO_at; Start 18; Stop 42
agtaatcctttatctactaatggac

SEQ ID NO: 164862 - DNA, 25 bp, Artificial
  probe
  misc_feature (1)..(25): SEQ ID NO: 3447; WAN024DNO_at; Start 20; Stop 44
taatcctttatctactaatggacgg

SEQ ID NO: 164863 - DNA, 25 bp, Artificial
  probe
  misc_feature (1)..(25): SEQ ID NO: 3447; WAN024DNO_at; Start 8; Stop 32
ttcaagaaggagtaatcctttatct

SEQ ID NO: 164864 - DNA, 25 bp, Artificial
  probe
  misc_feature (1)..(25): SEQ ID NO: 3447; WAN024DNO_at; Start 62; Stop 86
tgtccgatatgttttctaaggatta

SEQ ID NO: 164865 - DNA, 25 bp, Artificial
  probe
  misc_feature (1)..(25): SEQ ID NO: 3447; WAN024DNO_at; Start 63; Stop 87
gtccgatatgttttctaaggattat

SEQ ID NO: 164866 - DNA, 25 bp, Artificial
  probe
  misc_feature (1)..(25): SEQ ID NO: 3447; WAN024DNO_at; Start 5; Stop 29
catttcaagaaggagtaatccttta

SEQ ID NO: 164867 - DNA, 25 bp, Artificial
  probe
  misc_feature (1)..(25): SEQ ID NO: 3447; WAN024DNO_at; Start 22; Stop 46
atcctttatctactaatggacggaa

SEQ ID NO: 164868 - DNA, 25 bp, Artificial
  probe
  misc_feature (1)..(25): SEQ ID NO: 3447; WAN024DNO_at; Start 51; Stop 75
attcaaccgcttgtccgatatgttt

SEQ ID NO: 164869 - DNA, 25 bp, Artificial
  probe
  misc_feature (1)..(25): SEQ ID NO: 3447; WAN024DNO_at; Start 57; Stop 81
ccgcttgtccgatatgttttctaag

SEQ ID NO: 164870 - DNA, 25 bp, Artificial
  probe
  misc_feature (1)..(25): SEQ ID NO: 3461; WAN024DNP_at; Start 29; Stop 53
tactccttcttgaaatgacagatga

SEQ ID NO: 164871 - DNA, 25 bp, Artificial
  probe
  misc_feature (1)..(25): SEQ ID NO: 3461; WAN024DNP_at; Start 25; Stop 49
ggattactccttcttgaaatgacag

SEQ ID NO: 164872 - DNA, 25 bp, Artificial
  probe
  misc_feature (1)..(25): SEQ ID NO: 3461; WAN024DNP_at; Start 32; Stop 56
tccttcttgaaatgacagatgaact

SEQ ID NO: 164873 - DNA, 25 bp, Artificial
  probe
  misc_feature (1)..(25): SEQ ID NO: 3461; WAN024DNP_at; Start 9; Stop 33
tccattagtagataaaggattactc

SEQ ID NO: 164874 - DNA, 25 bp, Artificial
  probe
  misc_feature (1)..(25): SEQ ID NO: 3461; WAN024DNP_at; Start 6; Stop 30
ccgtccattagtagataaaggatta

SEQ ID NO: 164875 - DNA, 25 bp, Artificial
  probe
  misc_feature (1)..(25): SEQ ID NO: 3461; WAN024DNP_at; Start 23; Stop 47
aaggattactccttcttgaaatgac

SEQ ID NO: 164876 - DNA, 25 bp, Artificial
  probe
  misc_feature (1)..(25): SEQ ID NO: 3461; WAN024DNP_at; Start 13; Stop 37
ttagtagataaaggattactccttc

SEQ ID NO: 164877 - DNA, 25 bp, Artificial
  probe
  misc_feature (1)..(25): SEQ ID NO: 3461; WAN024DNP_at; Start 39; Stop 63
tgaaatgacagatgaacttgtttct

SEQ ID NO: 164878 - DNA, 25 bp, Artificial
  probe
  misc_feature (1)..(25): SEQ ID NO: 3461; WAN024DNP_at; Start 4; Stop 28
ttccgtccattagtagataaaggat

SEQ ID NO: 164879 - DNA, 25 bp, Artificial
  probe
  misc_feature (1)..(25): SEQ ID NO: 3461; WAN024DNP_at; Start 40; Stop 64
gaaatgacagatgaacttgtttctt

SEQ ID NO: 164880 - DNA, 25 bp, Artificial
  probe
  misc_feature (1)..(25): SEQ ID NO: 3461; WAN024DNP_at; Start 36; Stop 60
tcttgaaatgacagatgaacttgtt

SEQ ID NO: 164881 - DNA, 25 bp, Artificial
  probe
  misc_feature (1)..(25): SEQ ID NO: 3461; WAN024DNP_at; Start 10; Stop 34
ccattagtagataaaggattactcc

SEQ ID NO: 164882 - DNA, 25 bp, Artificial
  probe
  misc_feature (1)..(25): SEQ ID NO: 3461; WAN024DNP_at; Start 37; Stop 61
cttgaaatgacagatgaacttgttt

SEQ ID NO: 164883 - DNA, 25 bp, Artificial
  probe
  misc_feature (1)..(25): SEQ ID NO: 3461; WAN024DNP_at; Start 26; Stop 50
gattactccttcttgaaatgacaga

SEQ ID NO: 164884 - DNA, 25 bp, Artificial
  probe
  misc_feature (1)..(25): SEQ ID NO: 3461; WAN024DNP_at; Start 34; Stop 58
cttcttgaaatgacagatgaacttg

SEQ ID NO: 164885 - DNA, 25 bp, Artificial
  probe
  misc_feature (1)..(25): SEQ ID NO: 3461; WAN024DNP_at; Start 22; Stop 46
aaaggattactccttcttgaaatga

SEQ ID NO: 164886 - DNA, 25 bp, Artificial
  probe
  misc_feature (1)..(25): SEQ ID NO: 3461; WAN024DNP_at; Start 38; Stop 62
ttgaaatgacagatgaacttgtttc

SEQ ID NO: 164887 - DNA, 25 bp, Artificial
  probe
  misc_feature (1)..(25): SEQ ID NO: 3461; WAN024DNP_at; Start 31; Stop 55
ctccttcttgaaatgacagatgaac

SEQ ID NO: 164888 - DNA, 25 bp, Artificial
  probe
  misc_feature (1)..(25): SEQ ID NO: 3461; WAN024DNP_at; Start 21; Stop 45
taaaggattactccttcttgaaatg

SEQ ID NO: 164889 - DNA, 25 bp, Artificial
  probe
  misc_feature (1)..(25): SEQ ID NO: 3461; WAN024DNP_at; Start 24; Stop 48
aggattactccttcttgaaatgaca

SEQ ID NO: 164890 - DNA, 25 bp, Artificial
  probe
  misc_feature (1)..(25): SEQ ID NO: 3461; WAN024DNP_at; Start 28; Stop 52
ttactccttcttgaaatgacagatg

SEQ ID NO: 164891 - DNA, 25 bp, Artificial
  probe
  misc_feature (1)..(25): SEQ ID NO: 3461; WAN024DNP_at; Start 16; Stop 40
gtagataaaggattactccttcttg

SEQ ID NO: 164892 - DNA, 25 bp, Artificial
  probe
  misc_feature (1)..(25): SEQ ID NO: 3461; WAN024DNP_at; Start 17; Stop 41
tagataaaggattactccttcttga

SEQ ID NO: 164893 - DNA, 25 bp, Artificial
  probe
  misc_feature (1)..(25): SEQ ID NO: 3461; WAN024DNP_at; Start 1; Stop 25
ctgttccgtccattagtagataaag

SEQ ID NO: 164894 - DNA, 25 bp, Artificial
  probe
  misc_feature (1)..(25): SEQ ID NO: 3461; WAN024DNP_at; Start 7; Stop 31
cgtccattagtagataaaggattac

SEQ ID NO: 164895 - DNA, 25 bp, Artificial
  probe
  misc_feature (1)..(25): SEQ ID NO: 3461; WAN024DNP_at; Start 3; Stop 27
gttccgtccattagtagataaagga

SEQ ID NO: 164896 - DNA, 25 bp, Artificial
  probe
  misc_feature (1)..(25): SEQ ID NO: 3461; WAN024DNP_at; Start 14; Stop 38
tagtagataaaggattactccttct

SEQ ID NO: 164897 - DNA, 25 bp, Artificial
  probe
  misc_feature (1)..(25): SEQ ID NO: 3461; WAN024DNP_at; Start 5; Stop 29
tccgtccattagtagataaaggatt

SEQ ID NO: 164898 - DNA, 25 bp, Artificial
  probe
  misc_feature (1)..(25): SEQ ID NO: 3461; WAN024DNP_at; Start 33; Stop 57
ccttcttgaaatgacagatgaactt

SEQ ID NO: 164899 - DNA, 25 bp, Artificial
  probe
  misc_feature (1)..(25): SEQ ID NO: 3461; WAN024DNP_at; Start 11; Stop 35
cattagtagataaaggattactcct

SEQ ID NO: 164900 - DNA, 25 bp, Artificial
  probe
  misc_feature (1)..(25): SEQ ID NO: 3461; WAN024DNP_at; Start 19; Stop 43
gataaaggattactccttcttgaaa

SEQ ID NO: 164901 - DNA, 25 bp, Artificial
  probe
  misc_feature (1)..(25): SEQ ID NO: 3461; WAN024DNP_at; Start 2; Stop 26
tgttccgtccattagtagataaagg

SEQ ID NO: 164902 - DNA, 25 bp, Artificial
  probe
  misc_feature (1)..(25): SEQ ID NO: 3461; WAN024DNP_at; Start 30; Stop 54
actccttcttgaaatgacagatgaa

SEQ ID NO: 164903 - DNA, 25 bp, Artificial
  probe
  misc_feature (1)..(25): SEQ ID NO: 3461; WAN024DNP_at; Start 35; Stop 59
ttcttgaaatgacagatgaacttgt

SEQ ID NO: 164904 - DNA, 25 bp, Artificial
  probe
  misc_feature (1)..(25): SEQ ID NO: 2581; WAN024DNQ_at; Start 38; Stop 62
actctggatttttgatttggagttg

SEQ ID NO: 164905 - DNA, 25 bp, Artificial
  probe
  misc_feature (1)..(25): SEQ ID NO: 2581; WAN024DNQ_at; Start 62; Stop 86
ggattcaacttatctggtttgaaac

SEQ ID NO: 164906 - DNA, 25 bp, Artificial
  probe
  misc_feature (1)..(25): SEQ ID NO: 2581; WAN024DNQ_at; Start 70; Stop 94
cttatctggtttgaaacatggtttt

SEQ ID NO: 164907 - DNA, 25 bp, Artificial
  probe
  misc_feature (1)..(25): SEQ ID NO: 2581; WAN024DNQ_at; Start 59; Stop 83
gttggattcaacttatctggtttga

SEQ ID NO: 164908 - DNA, 25 bp, Artificial
  probe
  misc_feature (1)..(25): SEQ ID NO: 2581; WAN024DNQ_at; Start 39; Stop 63
ctctggatttttgatttggagttgg

SEQ ID NO: 164909 - DNA, 25 bp, Artificial
  probe
  misc_feature (1)..(25): SEQ ID NO: 2581; WAN024DNQ_at; Start 60; Stop 84
ttggattcaacttatctggtttgaa

SEQ ID NO: 164910 - DNA, 25 bp, Artificial
  probe
  misc_feature (1)..(25): SEQ ID NO: 2581; WAN024DNQ_at; Start 63; Stop 87
gattcaacttatctggtttgaaaca

SEQ ID NO: 164911 - DNA, 25 bp, Artificial
  probe
  misc_feature (1)..(25): SEQ ID NO: 2581; WAN024DNQ_at; Start 51; Stop 75
gatttggagttggattcaacttatc

SEQ ID NO: 164912 - DNA, 25 bp, Artificial
  probe
  misc_feature (1)..(25): SEQ ID NO: 2581; WAN024DNQ_at; Start 47; Stop 71
ttttgatttggagttggattcaact

SEQ ID NO: 164913 - DNA, 25 bp, Artificial
  probe
  misc_feature (1)..(25): SEQ ID NO: 2581; WAN024DNQ_at; Start 54; Stop 78
ttggagttggattcaacttatctgg

SEQ ID NO: 164914 - DNA, 25 bp, Artificial
  probe
  misc_feature (1)..(25): SEQ ID NO: 2581; WAN024DNQ_at; Start 48; Stop 72
tttgatttggagttggattcaactt

SEQ ID NO: 164915 - DNA, 25 bp, Artificial
  probe
  misc_feature (1)..(25): SEQ ID NO: 2581; WAN024DNQ_at; Start 65; Stop 89
ttcaacttatctggtttgaaacatg

SEQ ID NO: 164916 - DNA, 25 bp, Artificial
  probe
  misc_feature (1)..(25): SEQ ID NO: 2581; WAN024DNQ_at; Start 72; Stop 96
tatctggtttgaaacatggttttgg

SEQ ID NO: 164917 - DNA, 25 bp, Artificial
  probe
  misc_feature (1)..(25): SEQ ID NO: 2581; WAN024DNQ_at; Start 61; Stop 85
tggattcaacttatctggtttgaaa

SEQ ID NO: 164918 - DNA, 25 bp, Artificial
  probe
  misc_feature (1)..(25): SEQ ID NO: 2581; WAN024DNQ_at; Start 56; Stop 80
ggagttggattcaacttatctggtt

SEQ ID NO: 164919 - DNA, 25 bp, Artificial
  probe
  misc_feature (1)..(25): SEQ ID NO: 2581; WAN024DNQ_at; Start 57; Stop 81
gagttggattcaacttatctggttt

SEQ ID NO: 164920 - DNA, 25 bp, Artificial
  probe
  misc_feature (1)..(25): SEQ ID NO: 2581; WAN024DNQ_at; Start 68; Stop 92
aacttatctggtttgaaacatggtt

SEQ ID NO: 164921 - DNA, 25 bp, Artificial
  probe
  misc_feature (1)..(25): SEQ ID NO: 2581; WAN024DNQ_at; Start 49; Stop 73
ttgatttggagttggattcaactta

SEQ ID NO: 164922 - DNA, 25 bp, Artificial
  probe
  misc_feature (1)..(25): SEQ ID NO: 2581; WAN024DNQ_at; Start 73; Stop 97
atctggtttgaaacatggttttggg

SEQ ID NO: 164923 - DNA, 25 bp, Artificial
  probe
  misc_feature (1)..(25): SEQ ID NO: 2581; WAN024DNQ_at; Start 36; Stop 60
aaactctggatttttgatttggagt

SEQ ID NO: 164924 - DNA, 25 bp, Artificial
  probe
  misc_feature (1)..(25): SEQ ID NO: 2581; WAN024DNQ_at; Start 44; Stop 68
gatttttgatttggagttggattca

SEQ ID NO: 164925 - DNA, 25 bp, Artificial
  probe
  misc_feature (1)..(25): SEQ ID NO: 2581; WAN024DNQ_at; Start 35; Stop 59
aaaactctggatttttgatttggag

SEQ ID NO: 164926 - DNA, 25 bp, Artificial
  probe
  misc_feature (1)..(25): SEQ ID NO: 2581; WAN024DNQ_at; Start 66; Stop 90
tcaacttatctggtttgaaacatgg

SEQ ID NO: 164927 - DNA, 25 bp, Artificial
  probe
  misc_feature (1)..(25): SEQ ID NO: 2581; WAN024DNQ_at; Start 41; Stop 65
ctggatttttgatttggagttggat

SEQ ID NO: 164928 - DNA, 25 bp, Artificial
  probe
  misc_feature (1)..(25): SEQ ID NO: 2581; WAN024DNQ_at; Start 53; Stop 77
tttggagttggattcaacttatctg

SEQ ID NO: 164929 - DNA, 25 bp, Artificial
  probe
  misc_feature (1)..(25): SEQ ID NO: 2581; WAN024DNQ_at; Start 32; Stop 56
cgaaaaactctggatttttgatttg

SEQ ID NO: 164930 - DNA, 25 bp, Artificial
  probe
  misc_feature (1)..(25): SEQ ID NO: 2581; WAN024DNQ_at; Start 69; Stop 93
acttatctggtttgaaacatggttt

SEQ ID NO: 164931 - DNA, 25 bp, Artificial
  probe
  misc_feature (1)..(25): SEQ ID NO: 2581; WAN024DNQ_at; Start 43; Stop 67
ggatttttgatttggagttggattc

SEQ ID NO: 164932 - DNA, 25 bp, Artificial
  probe
  misc_feature (1)..(25): SEQ ID NO: 2581; WAN024DNQ_at; Start 67; Stop 91
caacttatctggtttgaaacatggt

SEQ ID NO: 164933 - DNA, 25 bp, Artificial
  probe
  misc_feature (1)..(25): SEQ ID NO: 2581; WAN024DNQ_at; Start 55; Stop 79
tggagttggattcaacttatctggt

SEQ ID NO: 164934 - DNA, 25 bp, Artificial
  probe
  misc_feature (1)..(25): SEQ ID NO: 2581; WAN024DNQ_at; Start 71; Stop 95
ttatctggtttgaaacatggttttg

SEQ ID NO: 164935 - DNA, 25 bp, Artificial
  probe
  misc_feature (1)..(25): SEQ ID NO: 2581; WAN024DNQ_at; Start 58; Stop 82
agttggattcaacttatctggtttg

SEQ ID NO: 164936 - DNA, 25 bp, Artificial
  probe
  misc_feature (1)..(25): SEQ ID NO: 2581; WAN024DNQ_at; Start 40; Stop 64
tctggatttttgatttggagttgga

SEQ ID NO: 164937 - DNA, 25 bp, Artificial
  probe
  misc_feature (1)..(25): SEQ ID NO: 2581; WAN024DNQ_at; Start 46; Stop 70
tttttgatttggagttggattcaac

SEQ ID NO: 164938 - DNA, 25 bp, Artificial
  probe
  misc_feature (1)..(25): SEQ ID NO: 2649; WAN024DNR_at; Start 576; Stop 600
taatgggatttatgctgctcaaaac

SEQ ID NO: 164939 - DNA, 25 bp, Artificial
  probe
  misc_feature (1)..(25): SEQ ID NO: 2649; WAN024DNR_at; Start 164; Stop 188
catctgacaacgaagaagctgtcct

SEQ ID NO: 164940 - DNA, 25 bp, Artificial
  probe
  misc_feature (1)..(25): SEQ ID NO: 2649; WAN024DNR_at; Start 904; Stop 928
gagtcttatctggaagatggtcgac

SEQ ID NO: 164941 - DNA, 25 bp, Artificial
  probe
  misc_feature (1)..(25): SEQ ID NO: 2649; WAN024DNR_at; Start 149; Stop 173
taatcgggccatgctcatctgacaa

SEQ ID NO: 164942 - DNA, 25 bp, Artificial
  probe
  misc_feature (1)..(25): SEQ ID NO: 2649; WAN024DNR_at; Start 834; Stop 858
tgtccgccagaccttgattaaccgt

SEQ ID NO: 164943 - DNA, 25 bp, Artificial
  probe
  misc_feature (1)..(25): SEQ ID NO: 2649; WAN024DNR_at; Start 922; Stop 946
ggtcgacaaaatgagccagaagtat

SEQ ID NO: 164944 - DNA, 25 bp, Artificial
  probe
  misc_feature (1)..(25): SEQ ID NO: 2649; WAN024DNR_at; Start 35; Stop 59
tagaagaagttcgtgccttgtcaaa

SEQ ID NO: 164945 - DNA, 25 bp, Artificial
  probe
  misc_feature (1)..(25): SEQ ID NO: 2649; WAN024DNR_at; Start 807; Stop 831
taagcagtatattgaacagatccga

SEQ ID NO: 164946 - DNA, 25 bp, Artificial
  probe
  misc_feature (1)..(25): SEQ ID NO: 2649; WAN024DNR_at; Start 69; Stop 93
tcaggctttggagaggaaatcacag

SEQ ID NO: 164947 - DNA, 25 bp, Artificial
  probe
  misc_feature (1)..(25): SEQ ID NO: 2649; WAN024DNR_at; Start 373; Stop 397
tatcgtgtcatcacagaaacaggga

SEQ ID NO: 164948 - DNA, 25 bp, Artificial
  probe
  misc_feature (1)..(25): SEQ ID NO: 2649; WAN024DNR_at; Start 133; Stop 157
cagcgaattctcttggtaatcgggc

SEQ ID NO: 164949 - DNA, 25 bp, Artificial
  probe
  misc_feature (1)..(25): SEQ ID NO: 2649; WAN024DNR_at; Start 455; Stop 479
tttcttacatggcagttggtgcccg

SEQ ID NO: 164950 - DNA, 25 bp, Artificial
  probe
  misc_feature (1)..(25): SEQ ID NO: 2649; WAN024DNR_at; Start 251; Stop 275
tgcgtgtttatactgccaaaccccg

SEQ ID NO: 164951 - DNA, 25 bp, Artificial
  probe
  misc_feature (1)..(25): SEQ ID NO: 2649; WAN024DNR_at; Start 114; Stop 138
cattatacgtggagaagaccagcga

SEQ ID NO: 164952 - DNA, 25 bp, Artificial
  probe
  misc_feature (1)..(25): SEQ ID NO: 2649; WAN024DNR_at; Start 732; Stop 756
taccattgcccagtatgagaaaatg

SEQ ID NO: 164953 - DNA, 25 bp, Artificial
  probe
  misc_feature (1)..(25): SEQ ID NO: 2649; WAN024DNR_at; Start 388; Stop 412
gaaacagggatgacaactgctgatg

SEQ ID NO: 164954 - DNA, 25 bp, Artificial
  probe
  misc_feature (1)..(25): SEQ ID NO: 2649; WAN024DNR_at; Start 52; Stop 76
ttgtcaaaattagaaggtcaggctt

SEQ ID NO: 164955 - DNA, 25 bp, Artificial
  probe
  misc_feature (1)..(25): SEQ ID NO: 2649; WAN024DNR_at; Start 272; Stop 296
cccgtaccaacggagatggctataa

SEQ ID NO: 164956 - DNA, 25 bp, Artificial
  probe
  misc_feature (1)..(25): SEQ ID NO: 2649; WAN024DNR_at; Start 642; Stop 666
tgggaacccgctttcacacgctatt

SEQ ID NO: 164957 - DNA, 25 bp, Artificial
  probe
  misc_feature (1)..(25): SEQ ID NO: 2649; WAN024DNR_at; Start 849; Stop 873
gattaaccgtgcttggaatgaaaaa

SEQ ID NO: 164958 - DNA, 25 bp, Artificial
  probe
  misc_feature (1)..(25): SEQ ID NO: 2649; WAN024DNR_at; Start 212; Stop 236
tcctacaagaagaagtggcagatcg

SEQ ID NO: 164959 - DNA, 25 bp, Artificial
  probe
  misc_feature (1)..(25): SEQ ID NO: 2649; WAN024DNR_at; Start 312; Stop 336
gcctaacgcgacagaagcgcctagt

SEQ ID NO: 164960 - DNA, 25 bp, Artificial
  probe
  misc_feature (1)..(25): SEQ ID NO: 2649; WAN024DNR_at; Start 481; Stop 505
tcagttgaagaccagcaacaccgct

SEQ ID NO: 164961 - DNA, 25 bp, Artificial
  probe
  misc_feature (1)..(25): SEQ ID NO: 2649; WAN024DNR_at; Start 495; Stop 519
gcaacaccgctttgtggcaagtggg

SEQ ID NO: 164962 - DNA, 25 bp, Artificial
  probe
  misc_feature (1)..(25): SEQ ID NO: 2649; WAN024DNR_at; Start 663; Stop 687
tattcttcgtggtgctcttaatgag

SEQ ID NO: 164963 - DNA, 25 bp, Artificial
  probe
  misc_feature (1)..(25): SEQ ID NO: 2649; WAN024DNR_at; Start 789; Stop 813
caatcatgacaattctggtaagcag

SEQ ID NO: 164964 - DNA, 25 bp, Artificial
  probe
  misc_feature (1)..(25): SEQ ID NO: 2649; WAN024DNR_at; Start 820; Stop 844
gaacagatccgaattgtccgccaga

SEQ ID NO: 164965 - DNA, 25 bp, Artificial
  probe
  misc_feature (1)..(25): SEQ ID NO: 2649; WAN024DNR_at; Start 339; Stop 363
tatcaatggaatcaaagccgttcgc

SEQ ID NO: 164966 - DNA, 25 bp, Artificial
  probe
  misc_feature (1)..(25): SEQ ID NO: 2649; WAN024DNR_at; Start 91; Stop 115
cagcgagatcaagagctagaagcca

SEQ ID NO: 164967 - DNA, 25 bp, Artificial
  probe
  misc_feature (1)..(25): SEQ ID NO: 2649; WAN024DNR_at; Start 952; Stop 976
aagtctatcacagacccttgcctgg

SEQ ID NO: 164968 - DNA, 25 bp, Artificial
  probe
  misc_feature (1)..(25): SEQ ID NO: 2649; WAN024DNR_at; Start 967; Stop 991
ccttgcctgggttgggataacacag

SEQ ID NO: 164969 - DNA, 25 bp, Artificial
  probe
  misc_feature (1)..(25): SEQ ID NO: 2649; WAN024DNR_at; Start 325; Stop 349
gaagcgcctagtcttatcaatggaa

SEQ ID NO: 164970 - DNA, 25 bp, Artificial
  probe
  misc_feature (1)..(25): SEQ ID NO: 2649; WAN024DNR_at; Start 427; Stop 451
gaaaaccttccgcttgtagatgatt

SEQ ID NO: 164971 - DNA, 25 bp, Artificial
  probe
  misc_feature (1)..(25): SEQ ID NO: 2649; WAN024DNR_at; Start 982; Stop 1006
gataacacagaagctcttgtcagag

SEQ ID NO: 164972 - DNA, 25 bp, Artificial
  probe
  misc_feature (1)..(25): SEQ ID NO: 3845; WAN024DNS_at; Start 16; Stop 40
ttactgggtatccgtttgctttata

SEQ ID NO: 164973 - DNA, 25 bp, Artificial
  probe
  misc_feature (1)..(25): SEQ ID NO: 3845; WAN024DNS_at; Start 18; Stop 42
actgggtatccgtttgctttataag

SEQ ID NO: 164974 - DNA, 25 bp, Artificial
  probe
  misc_feature (1)..(25): SEQ ID NO: 3845; WAN024DNS_at; Start 29; Stop 53
gtttgctttataaggagatgagtta

SEQ ID NO: 164975 - DNA, 25 bp, Artificial
  probe
  misc_feature (1)..(25): SEQ ID NO: 3845; WAN024DNS_at; Start 35; Stop 59
tttataaggagatgagttatggtat

SEQ ID NO: 164976 - DNA, 25 bp, Artificial
  probe
  misc_feature (1)..(25): SEQ ID NO: 3845; WAN024DNS_at; Start 17; Stop 41
tactgggtatccgtttgctttataa

SEQ ID NO: 164977 - DNA, 25 bp, Artificial
  probe
  misc_feature (1)..(25): SEQ ID NO: 3845; WAN024DNS_at; Start 39; Stop 63
taaggagatgagttatggtatttac

SEQ ID NO: 164978 - DNA, 25 bp, Artificial
  probe
  misc_feature (1)..(25): SEQ ID NO: 3845; WAN024DNS_at; Start 30; Stop 54
tttgctttataaggagatgagttat

SEQ ID NO: 164979 - DNA, 25 bp, Artificial
  probe
  misc_feature (1)..(25): SEQ ID NO: 3845; WAN024DNS_at; Start 40; Stop 64
aaggagatgagttatggtatttaca

SEQ ID NO: 164980 - DNA, 25 bp, Artificial
  probe
  misc_feature (1)..(25): SEQ ID NO: 3845; WAN024DNS_at; Start 24; Stop 48
tatccgtttgctttataaggagatg

SEQ ID NO: 164981 - DNA, 25 bp, Artificial
  probe
  misc_feature (1)..(25): SEQ ID NO: 3845; WAN024DNS_at; Start 36; Stop 60
ttataaggagatgagttatggtatt

SEQ ID NO: 164982 - DNA, 25 bp, Artificial
  probe
  misc_feature (1)..(25): SEQ ID NO: 3845; WAN024DNS_at; Start 38; Stop 62
ataaggagatgagttatggtattta

SEQ ID NO: 164983 - DNA, 25 bp, Artificial
  probe
  misc_feature (1)..(25): SEQ ID NO: 3845; WAN024DNS_at; Start 28; Stop 52
cgtttgctttataaggagatgagtt

SEQ ID NO: 164984 - DNA, 25 bp, Artificial
  probe
  misc_feature (1)..(25): SEQ ID NO: 3845; WAN024DNS_at; Start 22; Stop 46
ggtatccgtttgctttataaggaga

SEQ ID NO: 164985 - DNA, 25 bp, Artificial
  probe
  misc_feature (1)..(25): SEQ ID NO: 3845; WAN024DNS_at; Start 31; Stop 55
ttgctttataaggagatgagttatg

SEQ ID NO: 164986 - DNA, 25 bp, Artificial
  probe
  misc_feature (1)..(25): SEQ ID NO: 3845; WAN024DNS_at; Start 23; Stop 47
gtatccgtttgctttataaggagat

SEQ ID NO: 164987 - DNA, 25 bp, Artificial
  probe
  misc_feature (1)..(25): SEQ ID NO: 3845; WAN024DNS_at; Start 32; Stop 56
tgctttataaggagatgagttatgg

SEQ ID NO: 164988 - DNA, 25 bp, Artificial
  probe
  misc_feature (1)..(25): SEQ ID NO: 3845; WAN024DNS_at; Start 19; Stop 43
ctgggtatccgtttgctttataagg

SEQ ID NO: 164989 - DNA, 25 bp, Artificial
  probe
  misc_feature (1)..(25): SEQ ID NO: 3845; WAN024DNS_at; Start 34; Stop 58
ctttataaggagatgagttatggta

SEQ ID NO: 164990 - DNA, 25 bp, Artificial
  probe
  misc_feature (1)..(25): SEQ ID NO: 3845; WAN024DNS_at; Start 37; Stop 61
tataaggagatgagttatggtattt

SEQ ID NO: 164991 - DNA, 25 bp, Artificial
  probe
  misc_feature (1)..(25): SEQ ID NO: 3845; WAN024DNS_at; Start 33; Stop 57
gctttataaggagatgagttatggt

SEQ ID NO: 164992 - DNA, 25 bp, Artificial
  probe
  misc_feature (1)..(25): SEQ ID NO: 3845; WAN024DNS_at; Start 27; Stop 51
ccgtttgctttataaggagatgagt

SEQ ID NO: 164993 - DNA, 25 bp, Artificial
  probe
  misc_feature (1)..(25): SEQ ID NO: 3845; WAN024DNS_at; Start 41; Stop 65
aggagatgagttatggtatttacag

SEQ ID NO: 164994 - DNA, 25 bp, Artificial
  probe
  misc_feature (1)..(25): SEQ ID NO: 3845; WAN024DNS_at; Start 42; Stop 66
ggagatgagttatggtatttacagc

SEQ ID NO: 164995 - DNA, 25 bp, Artificial
  probe
  misc_feature (1)..(25): SEQ ID NO: 3845; WAN024DNS_at; Start 20; Stop 44
tgggtatccgtttgctttataagga

SEQ ID NO: 164996 - DNA, 25 bp, Artificial
  probe
  misc_feature (1)..(25): SEQ ID NO: 3845; WAN024DNS_at; Start 25; Stop 49
atccgtttgctttataaggagatga

SEQ ID NO: 164997 - DNA, 25 bp, Artificial
  probe
  misc_feature (1)..(25): SEQ ID NO: 3845; WAN024DNS_at; Start 26; Stop 50
tccgtttgctttataaggagatgag

SEQ ID NO: 164998 - DNA, 25 bp, Artificial
  probe
  misc_feature (1)..(25): SEQ ID NO: 3845; WAN024DNS_at; Start 43; Stop 67
gagatgagttatggtatttacagca

SEQ ID NO: 164999 - DNA, 25 bp, Artificial
  probe
  misc_feature (1)..(25): SEQ ID NO: 5715; WAN024DNT_at; Start 3; Stop 27
gtccactcgaaacaagtattgtaag

SEQ ID NO: 165000 - DNA, 25 bp, Artificial
  probe
  misc_feature (1)..(25): SEQ ID NO: 5715; WAN024DNT_at; Start 8; Stop 32
ctcgaaacaagtattgtaagaattt

SEQ ID NO: 165001 - DNA, 25 bp, Artificial
  probe
  misc_feature (1)..(25): SEQ ID NO: 5715; WAN024DNT_at; Start 6; Stop 30
cactcgaaacaagtattgtaagaat

SEQ ID NO: 165002 - DNA, 25 bp, Artificial
  probe
  misc_feature (1)..(25): SEQ ID NO: 5715; WAN024DNT_at; Start 10; Stop 34
cgaaacaagtattgtaagaatttga

SEQ ID NO: 165003 - DNA, 25 bp, Artificial
  probe
  misc_feature (1)..(25): SEQ ID NO: 5715; WAN024DNT_at; Start 5; Stop 29
ccactcgaaacaagtattgtaagaa

SEQ ID NO: 165004 - DNA, 25 bp, Artificial
  probe
  misc_feature (1)..(25): SEQ ID NO: 5715; WAN024DNT_at; Start 7; Stop 31
actcgaaacaagtattgtaagaatt

SEQ ID NO: 165005 - DNA, 25 bp, Artificial
  probe
  misc_feature (1)..(25): SEQ ID NO: 5715; WAN024DNT_at; Start 1; Stop 25
ttgtccactcgaaacaagtattgta

SEQ ID NO: 165006 - DNA, 25 bp, Artificial
  probe
  misc_feature (1)..(25): SEQ ID NO: 5715; WAN024DNT_at; Start 22; Stop 46
tgtaagaatttgattatttttgaaa

SEQ ID NO: 165007 - DNA, 25 bp, Artificial
  probe
  misc_feature (1)..(25): SEQ ID NO: 5715; WAN024DNT_at; Start 11; Stop 35
gaaacaagtattgtaagaatttgat

SEQ ID NO: 165008 - DNA, 25 bp, Artificial
  probe
  misc_feature (1)..(25): SEQ ID NO: 5715; WAN024DNT_at; Start 12; Stop 36
aaacaagtattgtaagaatttgatt

SEQ ID NO: 165009 - DNA, 25 bp, Artificial
  probe
  misc_feature (1)..(25): SEQ ID NO: 5715; WAN024DNT_at; Start 15; Stop 39
caagtattgtaagaatttgattatt

SEQ ID NO: 165010 - DNA, 25 bp, Artificial
  probe
  misc_feature (1)..(25): SEQ ID NO: 5715; WAN024DNT_at; Start 14; Stop 38
acaagtattgtaagaatttgattat

SEQ ID NO: 165011 - DNA, 25 bp, Artificial
  probe
  misc_feature (1)..(25): SEQ ID NO: 5715; WAN024DNT_at; Start 2; Stop 26
tgtccactcgaaacaagtattgtaa

SEQ ID NO: 165012 - DNA, 25 bp, Artificial
  probe
  misc_feature (1)..(25): SEQ ID NO: 5715; WAN024DNT_at; Start 9; Stop 33
tcgaaacaagtattgtaagaatttg

SEQ ID NO: 165013 - DNA, 25 bp, Artificial
  probe
  misc_feature (1)..(25): SEQ ID NO: 5715; WAN024DNT_at; Start 13; Stop 37
aacaagtattgtaagaatttgatta

SEQ ID NO: 165014 - DNA, 25 bp, Artificial
  probe
  misc_feature (1)..(25): SEQ ID NO: 5715; WAN024DNT_at; Start 4; Stop 28
tccactcgaaacaagtattgtaaga

SEQ ID NO: 165015 - DNA, 25 bp, Artificial
  probe
  misc_feature (1)..(25): SEQ ID NO: 3380; WAN024DNU_at; Start 54; Stop 78
ccttatagatgaaattgatattcat

SEQ ID NO: 165016 - DNA, 25 bp, Artificial
  probe
  misc_feature (1)..(25): SEQ ID NO: 3380; WAN024DNU_at; Start 8; Stop 32
ttctagcgacaaacagaataaataa

SEQ ID NO: 165017 - DNA, 25 bp, Artificial
  probe
  misc_feature (1)..(25): SEQ ID NO: 3380; WAN024DNU_at; Start 103; Stop 127
gcaaaagatactagtatgaatctat

SEQ ID NO: 165018 - DNA, 25 bp, Artificial
  probe
  misc_feature (1)..(25): SEQ ID NO: 3380; WAN024DNU_at; Start 108; Stop 132
agatactagtatgaatctatttggg

SEQ ID NO: 165019 - DNA, 25 bp, Artificial
  probe
  misc_feature (1)..(25): SEQ ID NO: 3380; WAN024DNU_at; Start 104; Stop 128
caaaagatactagtatgaatctatt

SEQ ID NO: 165020 - DNA, 25 bp, Artificial
  probe
  misc_feature (1)..(25): SEQ ID NO: 3380; WAN024DNU_at; Start 14; Stop 38
cgacaaacagaataaataagttagt

SEQ ID NO: 165021 - DNA, 25 bp, Artificial
  probe
  misc_feature (1)..(25): SEQ ID NO: 3380; WAN024DNU_at; Start 17; Stop 41
caaacagaataaataagttagttca

SEQ ID NO: 165022 - DNA, 25 bp, Artificial
  probe
  misc_feature (1)..(25): SEQ ID NO: 3380; WAN024DNU_at; Start 9; Stop 33
tctagcgacaaacagaataaataag

SEQ ID NO: 165023 - DNA, 25 bp, Artificial
  probe
  misc_feature (1)..(25): SEQ ID NO: 3380; WAN024DNU_at; Start 24; Stop 48
aataaataagttagttcaattagct

SEQ ID NO: 165024 - DNA, 25 bp, Artificial
  probe
  misc_feature (1)..(25): SEQ ID NO: 3380; WAN024DNU_at; Start 10; Stop 34
ctagcgacaaacagaataaataagt

SEQ ID NO: 165025 - DNA, 25 bp, Artificial
  probe
  misc_feature (1)..(25): SEQ ID NO: 3380; WAN024DNU_at; Start 7; Stop 31
tttctagcgacaaacagaataaata

SEQ ID NO: 165026 - DNA, 25 bp, Artificial
  probe
  misc_feature (1)..(25): SEQ ID NO: 3380; WAN024DNU_at; Start 97; Stop 121
ttttttgcaaaagatactagtatga

SEQ ID NO: 165027 - DNA, 25 bp, Artificial
  probe
  misc_feature (1)..(25): SEQ ID NO: 3380; WAN024DNU_at; Start 101; Stop 125
ttgcaaaagatactagtatgaatct

SEQ ID NO: 165028 - DNA, 25 bp, Artificial
  probe
  misc_feature (1)..(25): SEQ ID NO: 3380; WAN024DNU_at; Start 23; Stop 47
gaataaataagttagttcaattagc

SEQ ID NO: 165029 - DNA, 25 bp, Artificial
  probe
  misc_feature (1)..(25): SEQ ID NO: 3380; WAN024DNU_at; Start 55; Stop 79
cttatagatgaaattgatattcatg

SEQ ID NO: 165030 - DNA, 25 bp, Artificial
  probe
  misc_feature (1)..(25): SEQ ID NO: 3380; WAN024DNU_at; Start 102; Stop 126
tgcaaaagatactagtatgaatcta

SEQ ID NO: 165031 - DNA, 25 bp, Artificial
  probe
  misc_feature (1)..(25): SEQ ID NO: 3380; WAN024DNU_at; Start 53; Stop 77
tccttatagatgaaattgatattca

SEQ ID NO: 165032 - DNA, 25 bp, Artificial
  probe
  misc_feature (1)..(25): SEQ ID NO: 3380; WAN024DNU_at; Start 107; Stop 131
aagatactagtatgaatctatttgg

SEQ ID NO: 165033 - DNA, 25 bp, Artificial
  probe
  misc_feature (1)..(25): SEQ ID NO: 3380; WAN024DNU_at; Start 111; Stop 135
tactagtatgaatctatttggggac

SEQ ID NO: 165034 - DNA, 25 bp, Artificial
  probe
  misc_feature (1)..(25): SEQ ID NO: 3380; WAN024DNU_at; Start 13; Stop 37
gcgacaaacagaataaataagttag

SEQ ID NO: 165035 - DNA, 25 bp, Artificial
  probe
  misc_feature (1)..(25): SEQ ID NO: 3380; WAN024DNU_at; Start 52; Stop 76
ttccttatagatgaaattgatattc

SEQ ID NO: 165036 - DNA, 25 bp, Artificial
  probe
  misc_feature (1)..(25): SEQ ID NO: 3380; WAN024DNU_at; Start 4; Stop 28
atttttctagcgacaaacagaataa

SEQ ID NO: 165037 - DNA, 25 bp, Artificial
  probe
  misc_feature (1)..(25): SEQ ID NO: 3380; WAN024DNU_at; Start 6; Stop 30
ttttctagcgacaaacagaataaat

SEQ ID NO: 165038 - DNA, 25 bp, Artificial
  probe
  misc_feature (1)..(25): SEQ ID NO: 3380; WAN024DNU_at; Start 1; Stop 25
ctgatttttctagcgacaaacagaa

SEQ ID NO: 165039 - DNA, 25 bp, Artificial
  probe
  misc_feature (1)..(25): SEQ ID NO: 3380; WAN024DNU_at; Start 5; Stop 29
tttttctagcgacaaacagaataaa

SEQ ID NO: 165040 - DNA, 25 bp, Artificial
  probe
  misc_feature (1)..(25): SEQ ID NO: 3380; WAN024DNU_at; Start 92; Stop 116
ctttattttttgcaaaagatactag

SEQ ID NO: 165041 - DNA, 25 bp, Artificial
  probe
  misc_feature (1)..(25): SEQ ID NO: 3380; WAN024DNU_at; Start 114; Stop 138
tagtatgaatctatttggggacttg

SEQ ID NO: 165042 - DNA, 25 bp, Artificial
  probe
  misc_feature (1)..(25): SEQ ID NO: 3380; WAN024DNU_at; Start 11; Stop 35
tagcgacaaacagaataaataagtt

SEQ ID NO: 165043 - DNA, 25 bp, Artificial
  probe
  misc_feature (1)..(25): SEQ ID NO: 3380; WAN024DNU_at; Start 117; Stop 141
tatgaatctatttggggacttgaat

SEQ ID NO: 165044 - DNA, 25 bp, Artificial
  probe
  misc_feature (1)..(25): SEQ ID NO: 3380; WAN024DNU_at; Start 51; Stop 75
cttccttatagatgaaattgatatt

SEQ ID NO: 165045 - DNA, 25 bp, Artificial
  probe
  misc_feature (1)..(25): SEQ ID NO: 3380; WAN024DNU_at; Start 100; Stop 124
tttgcaaaagatactagtatgaatc

SEQ ID NO: 165046 - DNA, 25 bp, Artificial
  probe
  misc_feature (1)..(25): SEQ ID NO: 3380; WAN024DNU_at; Start 3; Stop 27
gatttttctagcgacaaacagaata

SEQ ID NO: 165047 - DNA, 25 bp, Artificial
  probe
  misc_feature (1)..(25): SEQ ID NO: 3380; WAN024DNU_at; Start 98; Stop 122
tttttgcaaaagatactagtatgaa

SEQ ID NO: 165048 - DNA, 25 bp, Artificial
  probe
  misc_feature (1)..(25): SEQ ID NO: 3380; WAN024DNU_at; Start 50; Stop 74
ccttccttatagatgaaattgatat

SEQ ID NO: 165049 - DNA, 25 bp, Artificial
  probe
  misc_feature (1)..(25): SEQ ID NO: 5147; WAN024DNV_at; Start 8; Stop 32
taggaaaatcaatctatcaagatac

SEQ ID NO: 165050 - DNA, 25 bp, Artificial
  probe
  misc_feature (1)..(25): SEQ ID NO: 5147; WAN024DNV_at; Start 72; Stop 96
aagtgtctacaaaatggagggtatg

SEQ ID NO: 165051 - DNA, 25 bp, Artificial
  probe
  misc_feature (1)..(25): SEQ ID NO: 5147; WAN024DNV_at; Start 81; Stop 105
caaaatggagggtatgcagttactt

SEQ ID NO: 165052 - DNA, 25 bp, Artificial
  probe
  misc_feature (1)..(25): SEQ ID NO: 5147; WAN024DNV_at; Start 74; Stop 98
gtgtctacaaaatggagggtatgca

SEQ ID NO: 165053 - DNA, 25 bp, Artificial
  probe
  misc_feature (1)..(25): SEQ ID NO: 5147; WAN024DNV_at; Start 67; Stop 91
gttataagtgtctacaaaatggagg

SEQ ID NO: 165054 - DNA, 25 bp, Artificial
  probe
  misc_feature (1)..(25): SEQ ID NO: 5147; WAN024DNV_at; Start 73; Stop 97
agtgtctacaaaatggagggtatgc

SEQ ID NO: 165055 - DNA, 25 bp, Artificial
  probe
  misc_feature (1)..(25): SEQ ID NO: 5147; WAN024DNV_at; Start 25; Stop 49
caagatacagaagtatattttatag

SEQ ID NO: 165056 - DNA, 25 bp, Artificial
  probe
  misc_feature (1)..(25): SEQ ID NO: 5147; WAN024DNV_at; Start 77; Stop 101
tctacaaaatggagggtatgcagtt

SEQ ID NO: 165057 - DNA, 25 bp, Artificial
  probe
  misc_feature (1)..(25): SEQ ID NO: 5147; WAN024DNV_at; Start 16; Stop 40
tcaatctatcaagatacagaagtat

SEQ ID NO: 165058 - DNA, 25 bp, Artificial
  probe
  misc_feature (1)..(25): SEQ ID NO: 5147; WAN024DNV_at; Start 20; Stop 44
tctatcaagatacagaagtatattt

SEQ ID NO: 165059 - DNA, 25 bp, Artificial
  probe
  misc_feature (1)..(25): SEQ ID NO: 5147; WAN024DNV_at; Start 45; Stop 69
tatagatttagagaatatagaggtt

SEQ ID NO: 165060 - DNA, 25 bp, Artificial
  probe
  misc_feature (1)..(25): SEQ ID NO: 5147; WAN024DNV_at; Start 5; Stop 29
gtataggaaaatcaatctatcaaga

SEQ ID NO: 165061 - DNA, 25 bp, Artificial
  probe
  misc_feature (1)..(25): SEQ ID NO: 5147; WAN024DNV_at; Start 87; Stop 111
ggagggtatgcagttactttatgaa

SEQ ID NO: 165062 - DNA, 25 bp, Artificial
  probe
  misc_feature (1)..(25): SEQ ID NO: 5147; WAN024DNV_at; Start 11; Stop 35
gaaaatcaatctatcaagatacaga

SEQ ID NO: 165063 - DNA, 25 bp, Artificial
  probe
  misc_feature (1)..(25): SEQ ID NO: 5147; WAN024DNV_at; Start 34; Stop 58
gaagtatattttatagatttagaga

SEQ ID NO: 165064 - DNA, 25 bp, Artificial
  probe
  misc_feature (1)..(25): SEQ ID NO: 5147; WAN024DNV_at; Start 84; Stop 108
aatggagggtatgcagttactttat

SEQ ID NO: 165065 - DNA, 25 bp, Artificial
  probe
  misc_feature (1)..(25): SEQ ID NO: 5147; WAN024DNV_at; Start 83; Stop 107
aaatggagggtatgcagttacttta

SEQ ID NO: 165066 - DNA, 25 bp, Artificial
  probe
  misc_feature (1)..(25): SEQ ID NO: 5147; WAN024DNV_at; Start 1; Stop 25
ttgagtataggaaaatcaatctatc

SEQ ID NO: 165067 - DNA, 25 bp, Artificial
  probe
  misc_feature (1)..(25): SEQ ID NO: 5147; WAN024DNV_at; Start 86; Stop 110
tggagggtatgcagttactttatga

SEQ ID NO: 165068 - DNA, 25 bp, Artificial
  probe
  misc_feature (1)..(25): SEQ ID NO: 5147; WAN024DNV_at; Start 69; Stop 93
tataagtgtctacaaaatggagggt

SEQ ID NO: 165069 - DNA, 25 bp, Artificial
  probe
  misc_feature (1)..(25): SEQ ID NO: 5147; WAN024DNV_at; Start 17; Stop 41
caatctatcaagatacagaagtata

SEQ ID NO: 165070 - DNA, 25 bp, Artificial
  probe
  misc_feature (1)..(25): SEQ ID NO: 5147; WAN024DNV_at; Start 10; Stop 34
ggaaaatcaatctatcaagatacag

SEQ ID NO: 165071 - DNA, 25 bp, Artificial
  probe
  misc_feature (1)..(25): SEQ ID NO: 5147; WAN024DNV_at; Start 75; Stop 99
tgtctacaaaatggagggtatgcag

SEQ ID NO: 165072 - DNA, 25 bp, Artificial
  probe
  misc_feature (1)..(25): SEQ ID NO: 5147; WAN024DNV_at; Start 71; Stop 95
taagtgtctacaaaatggagggtat

SEQ ID NO: 165073 - DNA, 25 bp, Artificial
  probe
  misc_feature (1)..(25): SEQ ID NO: 5147; WAN024DNV_at; Start 78; Stop 102
ctacaaaatggagggtatgcagtta

SEQ ID NO: 165074 - DNA, 25 bp, Artificial
  probe
  misc_feature (1)..(25): SEQ ID NO: 5147; WAN024DNV_at; Start 13; Stop 37
aaatcaatctatcaagatacagaag

SEQ ID NO: 165075 - DNA, 25 bp, Artificial
  probe
  misc_feature (1)..(25): SEQ ID NO: 5147; WAN024DNV_at; Start 80; Stop 104
acaaaatggagggtatgcagttact

SEQ ID NO: 165076 - DNA, 25 bp, Artificial
  probe
  misc_feature (1)..(25): SEQ ID NO: 5147; WAN024DNV_at; Start 66; Stop 90
ggttataagtgtctacaaaatggag

SEQ ID NO: 165077 - DNA, 25 bp, Artificial
  probe
  misc_feature (1)..(25): SEQ ID NO: 5147; WAN024DNV_at; Start 64; Stop 88
gaggttataagtgtctacaaaatgg

SEQ ID NO: 165078 - DNA, 25 bp, Artificial
  probe
  misc_feature (1)..(25): SEQ ID NO: 5147; WAN024DNV_at; Start 3; Stop 27
gagtataggaaaatcaatctatcaa

SEQ ID NO: 165079 - DNA, 25 bp, Artificial
  probe
  misc_feature (1)..(25): SEQ ID NO: 5147; WAN024DNV_at; Start 60; Stop 84
tatagaggttataagtgtctacaaa

SEQ ID NO: 165080 - DNA, 25 bp, Artificial
  probe
  misc_feature (1)..(25): SEQ ID NO: 5147; WAN024DNV_at; Start 57; Stop 81
gaatatagaggttataagtgtctac

SEQ ID NO: 165081 - DNA, 25 bp, Artificial
  probe
  misc_feature (1)..(25): SEQ ID NO: 5147; WAN024DNV_at; Start 68; Stop 92
ttataagtgtctacaaaatggaggg

SEQ ID NO: 165082 - DNA, 25 bp, Artificial
  probe
  misc_feature (1)..(25): SEQ ID NO: 5147; WAN024DNV_at; Start 76; Stop 100
gtctacaaaatggagggtatgcagt

SEQ ID NO: 165083 - DNA, 25 bp, Artificial
  probe
  misc_feature (1)..(25): SEQ ID NO: 5809; WAN024DNW_at; Start 51; Stop 75
tttacaaagaaaaatgatggaggag

SEQ ID NO: 165084 - DNA, 25 bp, Artificial
  probe
  misc_feature (1)..(25): SEQ ID NO: 5809; WAN024DNW_at; Start 58; Stop 82
agaaaaatgatggaggagcaaacat

SEQ ID NO: 165085 - DNA, 25 bp, Artificial
  probe
  misc_feature (1)..(25): SEQ ID NO: 5809; WAN024DNW_at; Start 66; Stop 90
gatggaggagcaaacatggcacaaa

SEQ ID NO: 165086 - DNA, 25 bp, Artificial
  probe
  misc_feature (1)..(25): SEQ ID NO: 5809; WAN024DNW_at; Start 1; Stop 25
ttgttcatggtagggacttatgaaa

SEQ ID NO: 165087 - DNA, 25 bp, Artificial
  probe
  misc_feature (1)..(25): SEQ ID NO: 5809; WAN024DNW_at; Start 61; Stop 85
aaaatgatggaggagcaaacatggc

SEQ ID NO: 165088 - DNA, 25 bp, Artificial
  probe
  misc_feature (1)..(25): SEQ ID NO: 5809; WAN024DNW_at; Start 2; Stop 26
tgttcatggtagggacttatgaaag

SEQ ID NO: 165089 - DNA, 25 bp, Artificial
  probe
  misc_feature (1)..(25): SEQ ID NO: 5809; WAN024DNW_at; Start 6; Stop 30
catggtagggacttatgaaagcttt

SEQ ID NO: 165090 - DNA, 25 bp, Artificial
  probe
  misc_feature (1)..(25): SEQ ID NO: 5809; WAN024DNW_at; Start 3; Stop 27
gttcatggtagggacttatgaaagc

SEQ ID NO: 165091 - DNA, 25 bp, Artificial
  probe
  misc_feature (1)..(25): SEQ ID NO: 5809; WAN024DNW_at; Start 5; Stop 29
tcatggtagggacttatgaaagctt

SEQ ID NO: 165092 - DNA, 25 bp, Artificial
  probe
  misc_feature (1)..(25): SEQ ID NO: 5809; WAN024DNW_at; Start 64; Stop 88
atgatggaggagcaaacatggcaca

SEQ ID NO: 165093 - DNA, 25 bp, Artificial
  probe
  misc_feature (1)..(25): SEQ ID NO: 5809; WAN024DNW_at; Start 7; Stop 31
atggtagggacttatgaaagcttta

SEQ ID NO: 165094 - DNA, 25 bp, Artificial
  probe
  misc_feature (1)..(25): SEQ ID NO: 5809; WAN024DNW_at; Start 59; Stop 83
gaaaaatgatggaggagcaaacatg

SEQ ID NO: 165095 - DNA, 25 bp, Artificial
  probe
  misc_feature (1)..(25): SEQ ID NO: 5809; WAN024DNW_at; Start 47; Stop 71
acagtttacaaagaaaaatgatgga

SEQ ID NO: 165096 - DNA, 25 bp, Artificial
  probe
  misc_feature (1)..(25): SEQ ID NO: 5809; WAN024DNW_at; Start 50; Stop 74
gtttacaaagaaaaatgatggagga

SEQ ID NO: 165097 - DNA, 25 bp, Artificial
  probe
  misc_feature (1)..(25): SEQ ID NO: 5809; WAN024DNW_at; Start 46; Stop 70
aacagtttacaaagaaaaatgatgg

SEQ ID NO: 165098 - DNA, 25 bp, Artificial
  probe
  misc_feature (1)..(25): SEQ ID NO: 5809; WAN024DNW_at; Start 45; Stop 69
aaacagtttacaaagaaaaatgatg

SEQ ID NO: 165099 - DNA, 25 bp, Artificial
  probe
  misc_feature (1)..(25): SEQ ID NO: 5809; WAN024DNW_at; Start 69; Stop 93
ggaggagcaaacatggcacaaaaag

SEQ ID NO: 165100 - DNA, 25 bp, Artificial
  probe
  misc_feature (1)..(25): SEQ ID NO: 5809; WAN024DNW_at; Start 63; Stop 87
aatgatggaggagcaaacatggcac

SEQ ID NO: 165101 - DNA, 25 bp, Artificial
  probe
  misc_feature (1)..(25): SEQ ID NO: 5809; WAN024DNW_at; Start 70; Stop 94
gaggagcaaacatggcacaaaaagg

SEQ ID NO: 165102 - DNA, 25 bp, Artificial
  probe
  misc_feature (1)..(25): SEQ ID NO: 5809; WAN024DNW_at; Start 60; Stop 84
aaaaatgatggaggagcaaacatgg

SEQ ID NO: 165103 - DNA, 25 bp, Artificial
  probe
  misc_feature (1)..(25): SEQ ID NO: 5809; WAN024DNW_at; Start 4; Stop 28
ttcatggtagggacttatgaaagct

SEQ ID NO: 165104 - DNA, 25 bp, Artificial
  probe
  misc_feature (1)..(25): SEQ ID NO: 5809; WAN024DNW_at; Start 65; Stop 89
tgatggaggagcaaacatggcacaa

SEQ ID NO: 165105 - DNA, 25 bp, Artificial
  probe
  misc_feature (1)..(25): SEQ ID NO: 5809; WAN024DNW_at; Start 8; Stop 32
tggtagggacttatgaaagctttac

SEQ ID NO: 165106 - DNA, 25 bp, Artificial
  probe
  misc_feature (1)..(25): SEQ ID NO: 5809; WAN024DNW_at; Start 68; Stop 92
tggaggagcaaacatggcacaaaaa

SEQ ID NO: 165107 - DNA, 25 bp, Artificial
  probe
  misc_feature (1)..(25): SEQ ID NO: 5809; WAN024DNW_at; Start 62; Stop 86
aaatgatggaggagcaaacatggca

SEQ ID NO: 165108 - DNA, 25 bp, Artificial
  probe
  misc_feature (1)..(25): SEQ ID NO: 5809; WAN024DNW_at; Start 49; Stop 73
agtttacaaagaaaaatgatggagg

SEQ ID NO: 165109 - DNA, 25 bp, Artificial
  probe
  misc_feature (1)..(25): SEQ ID NO: 5809; WAN024DNW_at; Start 67; Stop 91
atggaggagcaaacatggcacaaaa

SEQ ID NO: 165110 - DNA, 25 bp, Artificial
  probe
  misc_feature (1)..(25): SEQ ID NO: 5809; WAN024DNW_at; Start 71; Stop 95
aggagcaaacatggcacaaaaagga

SEQ ID NO: 165111 - DNA, 25 bp, Artificial
  probe
  misc_feature (1)..(25): SEQ ID NO: 5809; WAN024DNW_at; Start 48; Stop 72
cagtttacaaagaaaaatgatggag

SEQ ID NO: 165112 - DNA, 25 bp, Artificial
  probe
  misc_feature (1)..(25): SEQ ID NO: 873; WAN024DNX_at; Start 28; Stop 52
aatcaaaatccagtcccaagtaagc

SEQ ID NO: 165113 - DNA, 25 bp, Artificial
  probe
  misc_feature (1)..(25): SEQ ID NO: 873; WAN024DNX_at; Start 64; Stop 88
tgtcaaaaatgccagcatgattcca

SEQ ID NO: 165114 - DNA, 25 bp, Artificial
  probe
  misc_feature (1)..(25): SEQ ID NO: 873; WAN024DNX_at; Start 2; Stop 26
tgaaagaaaatgagccaaccgctat

SEQ ID NO: 165115 - DNA, 25 bp, Artificial
  probe
  misc_feature (1)..(25): SEQ ID NO: 873; WAN024DNX_at; Start 27; Stop 51
aaatcaaaatccagtcccaagtaag

SEQ ID NO: 165116 - DNA, 25 bp, Artificial
  probe
  misc_feature (1)..(25): SEQ ID NO: 873; WAN024DNX_at; Start 5; Stop 29
aagaaaatgagccaaccgctataaa

SEQ ID NO: 165117 - DNA, 25 bp, Artificial
  probe
  misc_feature (1)..(25): SEQ ID NO: 873; WAN024DNX_at; Start 13; Stop 37
gagccaaccgctataaatcaaaatc

SEQ ID NO: 165118 - DNA, 25 bp, Artificial
  probe
  misc_feature (1)..(25): SEQ ID NO: 873; WAN024DNX_at; Start 81; Stop 105
tgattccatcaatgacaaggagttg

SEQ ID NO: 165119 - DNA, 25 bp, Artificial
  probe
  misc_feature (1)..(25): SEQ ID NO: 873; WAN024DNX_at; Start 73; Stop 97
tgccagcatgattccatcaatgaca

SEQ ID NO: 165120 - DNA, 25 bp, Artificial
  probe
  misc_feature (1)..(25): SEQ ID NO: 873; WAN024DNX_at; Start 144; Stop 168
ctccttttctttagagacactccca

SEQ ID NO: 165121 - DNA, 25 bp, Artificial
  probe
  misc_feature (1)..(25): SEQ ID NO: 873; WAN024DNX_at; Start 7; Stop 31
gaaaatgagccaaccgctataaatc

SEQ ID NO: 165122 - DNA, 25 bp, Artificial
  probe
  misc_feature (1)..(25): SEQ ID NO: 873; WAN024DNX_at; Start 21; Stop 45
cgctataaatcaaaatccagtccca

SEQ ID NO: 165123 - DNA, 25 bp, Artificial
  probe
  misc_feature (1)..(25): SEQ ID NO: 873; WAN024DNX_at; Start 82; Stop 106
gattccatcaatgacaaggagttga

SEQ ID NO: 165124 - DNA, 25 bp, Artificial
  probe
  misc_feature (1)..(25): SEQ ID NO: 873; WAN024DNX_at; Start 79; Stop 103
catgattccatcaatgacaaggagt

SEQ ID NO: 165125 - DNA, 25 bp, Artificial
  probe
  misc_feature (1)..(25): SEQ ID NO: 873; WAN024DNX_at; Start 87; Stop 111
catcaatgacaaggagttgaatggt

SEQ ID NO: 165126 - DNA, 25 bp, Artificial
  probe
  misc_feature (1)..(25): SEQ ID NO: 873; WAN024DNX_at; Start 15; Stop 39
gccaaccgctataaatcaaaatcca

SEQ ID NO: 165127 - DNA, 25 bp, Artificial
  probe
  misc_feature (1)..(25): SEQ ID NO: 873; WAN024DNX_at; Start 70; Stop 94
aaatgccagcatgattccatcaatg

SEQ ID NO: 165128 - DNA, 25 bp, Artificial
  probe
  misc_feature (1)..(25): SEQ ID NO: 873; WAN024DNX_at; Start 1; Stop 25
atgaaagaaaatgagccaaccgcta

SEQ ID NO: 165129 - DNA, 25 bp, Artificial
  probe
  misc_feature (1)..(25): SEQ ID NO: 873; WAN024DNX_at; Start 85; Stop 109
tccatcaatgacaaggagttgaatg

SEQ ID NO: 165130 - DNA, 25 bp, Artificial
  probe
  misc_feature (1)..(25): SEQ ID NO: 873; WAN024DNX_at; Start 78; Stop 102
gcatgattccatcaatgacaaggag

SEQ ID NO: 165131 - DNA, 25 bp, Artificial
  probe
  misc_feature (1)..(25): SEQ ID NO: 873; WAN024DNX_at; Start 118; Stop 142
gaagatgatttttttcatgctaaaa

SEQ ID NO: 165132 - DNA, 25 bp, Artificial
  probe
  misc_feature (1)..(25): SEQ ID NO: 873; WAN024DNX_at; Start 133; Stop 157
catgctaaaacctccttttctttag

SEQ ID NO: 165133 - DNA, 25 bp, Artificial
  probe
  misc_feature (1)..(25): SEQ ID NO: 873; WAN024DNX_at; Start 90; Stop 114
caatgacaaggagttgaatggtttt

SEQ ID NO: 165134 - DNA, 25 bp, Artificial
  probe
  misc_feature (1)..(25): SEQ ID NO: 873; WAN024DNX_at; Start 58; Stop 82
tttaaatgtcaaaaatgccagcatg

SEQ ID NO: 165135 - DNA, 25 bp, Artificial
  probe
  misc_feature (1)..(25): SEQ ID NO: 873; WAN024DNX_at; Start 30; Stop 54
tcaaaatccagtcccaagtaagccc

SEQ ID NO: 165136 - DNA, 25 bp, Artificial
  probe
  misc_feature (1)..(25): SEQ ID NO: 873; WAN024DNX_at; Start 24; Stop 48
tataaatcaaaatccagtcccaagt

SEQ ID NO: 165137 - DNA, 25 bp, Artificial
  probe
  misc_feature (1)..(25): SEQ ID NO: 873; WAN024DNX_at; Start 67; Stop 91
caaaaatgccagcatgattccatca

SEQ ID NO: 165138 - DNA, 25 bp, Artificial
  probe
  misc_feature (1)..(25): SEQ ID NO: 873; WAN024DNX_at; Start 96; Stop 120
caaggagttgaatggttttgatgaa

SEQ ID NO: 165139 - DNA, 25 bp, Artificial
  probe
  misc_feature (1)..(25): SEQ ID NO: 873; WAN024DNX_at; Start 54; Stop 78
cccttttaaatgtcaaaaatgccag

SEQ ID NO: 165140 - DNA, 25 bp, Artificial
  probe
  misc_feature (1)..(25): SEQ ID NO: 873; WAN024DNX_at; Start 102; Stop 126
gttgaatggttttgatgaagatgat

SEQ ID NO: 165141 - DNA, 25 bp, Artificial
  probe
  misc_feature (1)..(25): SEQ ID NO: 873; WAN024DNX_at; Start 17; Stop 41
caaccgctataaatcaaaatccagt

SEQ ID NO: 165142 - DNA, 25 bp, Artificial
  probe
  misc_feature (1)..(25): SEQ ID NO: 873; WAN024DNX_at; Start 3; Stop 27
gaaagaaaatgagccaaccgctata

SEQ ID NO: 165143 - DNA, 25 bp, Artificial
  probe
  misc_feature (1)..(25): SEQ ID NO: 873; WAN024DNX_at; Start 19; Stop 43
accgctataaatcaaaatccagtcc

SEQ ID NO: 165144 - DNA, 25 bp, Artificial
  probe
  misc_feature (1)..(25): SEQ ID NO: 873; WAN024DNX_at; Start 60; Stop 84
taaatgtcaaaaatgccagcatgat

SEQ ID NO: 165145 - DNA, 25 bp, Artificial
  probe
  misc_feature (1)..(25): SEQ ID NO: 873; WAN024DNX_at; Start 76; Stop 100
cagcatgattccatcaatgacaagg

SEQ ID NO: 165146 - DNA, 25 bp, Artificial
  probe
  misc_feature (1)..(25): SEQ ID NO: 619; WAN024DNY_at; Start 48; Stop 72
tggaatcatgctggcatttttgaca

SEQ ID NO: 165147 - DNA, 25 bp, Artificial
  probe
  misc_feature (1)..(25): SEQ ID NO: 619; WAN024DNY_at; Start 27; Stop 51
cattcaactccttgtcattgatgga

SEQ ID NO: 165148 - DNA, 25 bp, Artificial
  probe
  misc_feature (1)..(25): SEQ ID NO: 619; WAN024DNY_at; Start 168; Stop 192
ttgtgaccactttagtctaactaat

SEQ ID NO: 165149 - DNA, 25 bp, Artificial
  probe
  misc_feature (1)..(25): SEQ ID NO: 619; WAN024DNY_at; Start 87; Stop 111
tacttgggactggattttgatttat

SEQ ID NO: 165150 - DNA, 25 bp, Artificial
  probe
  misc_feature (1)..(25): SEQ ID NO: 619; WAN024DNY_at; Start 158; Stop 182
caaaccaactttgtgaccactttag

SEQ ID NO: 165151 - DNA, 25 bp, Artificial
  probe
  misc_feature (1)..(25): SEQ ID NO: 619; WAN024DNY_at; Start 31; Stop 55
caactccttgtcattgatggaatca

SEQ ID NO: 165152 - DNA, 25 bp, Artificial
  probe
  misc_feature (1)..(25): SEQ ID NO: 619; WAN024DNY_at; Start 118; Stop 142
tggctcattttctttcatcctgtgc

SEQ ID NO: 165153 - DNA, 25 bp, Artificial
  probe
  misc_feature (1)..(25): SEQ ID NO: 619; WAN024DNY_at; Start 14; Stop 38
tcttcatcaaaaccattcaactcct

SEQ ID NO: 165154 - DNA, 25 bp, Artificial
  probe
  misc_feature (1)..(25): SEQ ID NO: 619; WAN024DNY_at; Start 146; Stop 170
tgacctatctttcaaaccaactttg

SEQ ID NO: 165155 - DNA, 25 bp, Artificial
  probe
  misc_feature (1)..(25): SEQ ID NO: 619; WAN024DNY_at; Start 153; Stop 177
tctttcaaaccaactttgtgaccac

SEQ ID NO: 165156 - DNA, 25 bp, Artificial
  probe
  misc_feature (1)..(25): SEQ ID NO: 619; WAN024DNY_at; Start 84; Stop 108
gcttacttgggactggattttgatt

SEQ ID NO: 165157 - DNA, 25 bp, Artificial
  probe
  misc_feature (1)..(25): SEQ ID NO: 619; WAN024DNY_at; Start 34; Stop 58
ctccttgtcattgatggaatcatgc

SEQ ID NO: 165158 - DNA, 25 bp, Artificial
  probe
  misc_feature (1)..(25): SEQ ID NO: 619; WAN024DNY_at; Start 163; Stop 187
caactttgtgaccactttagtctaa

SEQ ID NO: 165159 - DNA, 25 bp, Artificial
  probe
  misc_feature (1)..(25): SEQ ID NO: 619; WAN024DNY_at; Start 39; Stop 63
tgtcattgatggaatcatgctggca

SEQ ID NO: 165160 - DNA, 25 bp, Artificial
  probe
  misc_feature (1)..(25): SEQ ID NO: 619; WAN024DNY_at; Start 42; Stop 66
cattgatggaatcatgctggcattt

SEQ ID NO: 165161 - DNA, 25 bp, Artificial
  probe
  misc_feature (1)..(25): SEQ ID NO: 619; WAN024DNY_at; Start 22; Stop 46
aaaaccattcaactccttgtcattg

SEQ ID NO: 165162 - DNA, 25 bp, Artificial
  probe
  misc_feature (1)..(25): SEQ ID NO: 619; WAN024DNY_at; Start 82; Stop 106
gggcttacttgggactggattttga

SEQ ID NO: 165163 - DNA, 25 bp, Artificial
  probe
  misc_feature (1)..(25): SEQ ID NO: 619; WAN024DNY_at; Start 5; Stop 29
aaaaaatcatcttcatcaaaaccat

SEQ ID NO: 165164 - DNA, 25 bp, Artificial
  probe
  misc_feature (1)..(25): SEQ ID NO: 619; WAN024DNY_at; Start 58; Stop 82
ctggcatttttgacatttaaaaggg

SEQ ID NO: 165165 - DNA, 25 bp, Artificial
  probe
  misc_feature (1)..(25): SEQ ID NO: 619; WAN024DNY_at; Start 89; Stop 113
cttgggactggattttgatttatag

SEQ ID NO: 165166 - DNA, 25 bp, Artificial
  probe
  misc_feature (1)..(25): SEQ ID NO: 619; WAN024DNY_at; Start 115; Stop 139
ggttggctcattttctttcatcctg

SEQ ID NO: 165167 - DNA, 25 bp, Artificial
  probe
  misc_feature (1)..(25): SEQ ID NO: 619; WAN024DNY_at; Start 151; Stop 175
tatctttcaaaccaactttgtgacc

SEQ ID NO: 165168 - DNA, 25 bp, Artificial
  probe
  misc_feature (1)..(25): SEQ ID NO: 619; WAN024DNY_at; Start 123; Stop 147
cattttctttcatcctgtgctattg

SEQ ID NO: 165169 - DNA, 25 bp, Artificial
  probe
  misc_feature (1)..(25): SEQ ID NO: 619; WAN024DNY_at; Start 36; Stop 60
ccttgtcattgatggaatcatgctg

SEQ ID NO: 165170 - DNA, 25 bp, Artificial
  probe
  misc_feature (1)..(25): SEQ ID NO: 619; WAN024DNY_at; Start 133; Stop 157
catcctgtgctattgacctatcttt

SEQ ID NO: 165171 - DNA, 25 bp, Artificial
  probe
  misc_feature (1)..(25): SEQ ID NO: 619; WAN024DNY_at; Start 136; Stop 160
cctgtgctattgacctatctttcaa

SEQ ID NO: 165172 - DNA, 25 bp, Artificial
  probe
  misc_feature (1)..(25): SEQ ID NO: 619; WAN024DNY_at; Start 141; Stop 165
gctattgacctatctttcaaaccaa

SEQ ID NO: 165173 - DNA, 25 bp, Artificial
  probe
  misc_feature (1)..(25): SEQ ID NO: 619; WAN024DNY_at; Start 166; Stop 190
ctttgtgaccactttagtctaacta

SEQ ID NO: 165174 - DNA, 25 bp, Artificial
  probe
  misc_feature (1)..(25): SEQ ID NO: 619; WAN024DNY_at; Start 120; Stop 144
gctcattttctttcatcctgtgcta

SEQ ID NO: 165175 - DNA, 25 bp, Artificial
  probe
  misc_feature (1)..(25): SEQ ID NO: 619; WAN024DNY_at; Start 128; Stop 152
tctttcatcctgtgctattgaccta

SEQ ID NO: 165176 - DNA, 25 bp, Artificial
  probe
  misc_feature (1)..(25): SEQ ID NO: 619; WAN024DNY_at; Start 17; Stop 41
tcatcaaaaccattcaactccttgt

SEQ ID NO: 165177 - DNA, 25 bp, Artificial
  probe
  misc_feature (1)..(25): SEQ ID NO: 619; WAN024DNY_at; Start 130; Stop 154
tttcatcctgtgctattgacctatc

SEQ ID NO: 165178 - DNA, 25 bp, Artificial
  probe
  misc_feature (1)..(25): SEQ ID NO: 619; WAN024DNY_at; Start 46; Stop 70
gatggaatcatgctggcatttttga

SEQ ID NO: 165179 - DNA, 25 bp, Artificial
  probe
  misc_feature (1)..(25): SEQ ID NO: 619; WAN024DNY_at; Start 54; Stop 78
catgctggcatttttgacatttaaa

SEQ ID NO: 165180 - DNA, 25 bp, Artificial
  probe
  misc_feature (1)..(25): SEQ ID NO: 6849; WAN024DNZ_at; Start 11; Stop 35
atagcatgattgtgagatttttcaa

SEQ ID NO: 165181 - DNA, 25 bp, Artificial
  probe
  misc_feature (1)..(25): SEQ ID NO: 6849; WAN024DNZ_at; Start 14; Stop 38
gcatgattgtgagatttttcaagga

SEQ ID NO: 165182 - DNA, 25 bp, Artificial
  probe
  misc_feature (1)..(25): SEQ ID NO: 6849; WAN024DNZ_at; Start 6; Stop 30
ttattatagcatgattgtgagattt

SEQ ID NO: 165183 - DNA, 25 bp, Artificial
  probe
  misc_feature (1)..(25): SEQ ID NO: 6849; WAN024DNZ_at; Start 7; Stop 31
tattatagcatgattgtgagatttt

SEQ ID NO: 165184 - DNA, 25 bp, Artificial
  probe
  misc_feature (1)..(25): SEQ ID NO: 6849; WAN024DNZ_at; Start 12; Stop 36
tagcatgattgtgagatttttcaag

SEQ ID NO: 165185 - DNA, 25 bp, Artificial
  probe
  misc_feature (1)..(25): SEQ ID NO: 6849; WAN024DNZ_at; Start 17; Stop 41
tgattgtgagatttttcaaggattt

SEQ ID NO: 165186 - DNA, 25 bp, Artificial
  probe
  misc_feature (1)..(25): SEQ ID NO: 6849; WAN024DNZ_at; Start 13; Stop 37
agcatgattgtgagatttttcaagg

SEQ ID NO: 165187 - DNA, 25 bp, Artificial
  probe
  misc_feature (1)..(25): SEQ ID NO: 6849; WAN024DNZ_at; Start 21; Stop 45
tgtgagatttttcaaggattttgtg

SEQ ID NO: 165188 - DNA, 25 bp, Artificial
  probe
  misc_feature (1)..(25): SEQ ID NO: 6849; WAN024DNZ_at; Start 23; Stop 47
tgagatttttcaaggattttgtgaa

SEQ ID NO: 165189 - DNA, 25 bp, Artificial
  probe
  misc_feature (1)..(25): SEQ ID NO: 6849; WAN024DNZ_at; Start 22; Stop 46
gtgagatttttcaaggattttgtga

SEQ ID NO: 165190 - DNA, 25 bp, Artificial
  probe
  misc_feature (1)..(25): SEQ ID NO: 6849; WAN024DNZ_at; Start 1; Stop 25
atggattattatagcatgattgtga

SEQ ID NO: 165191 - DNA, 25 bp, Artificial
  probe
  misc_feature (1)..(25): SEQ ID NO: 6849; WAN024DNZ_at; Start 24; Stop 48
gagatttttcaaggattttgtgaaa

SEQ ID NO: 165192 - DNA, 25 bp, Artificial
  probe
  misc_feature (1)..(25): SEQ ID NO: 6849; WAN024DNZ_at; Start 9; Stop 33
ttatagcatgattgtgagatttttc

SEQ ID NO: 165193 - DNA, 25 bp, Artificial
  probe
  misc_feature (1)..(25): SEQ ID NO: 6849; WAN024DNZ_at; Start 2; Stop 26
tggattattatagcatgattgtgag

SEQ ID NO: 165194 - DNA, 25 bp, Artificial
  probe
  misc_feature (1)..(25): SEQ ID NO: 6849; WAN024DNZ_at; Start 4; Stop 28
gattattatagcatgattgtgagat

SEQ ID NO: 165195 - DNA, 25 bp, Artificial
  probe
  misc_feature (1)..(25): SEQ ID NO: 6849; WAN024DNZ_at; Start 8; Stop 32
attatagcatgattgtgagattttt

SEQ ID NO: 165196 - DNA, 25 bp, Artificial
  probe
  misc_feature (1)..(25): SEQ ID NO: 6849; WAN024DNZ_at; Start 15; Stop 39
catgattgtgagatttttcaaggat

SEQ ID NO: 165197 - DNA, 25 bp, Artificial
  probe
  misc_feature (1)..(25): SEQ ID NO: 6849; WAN024DNZ_at; Start 5; Stop 29
attattatagcatgattgtgagatt

SEQ ID NO: 165198 - DNA, 25 bp, Artificial
  probe
  misc_feature (1)..(25): SEQ ID NO: 6849; WAN024DNZ_at; Start 20; Stop 44
ttgtgagatttttcaaggattttgt

SEQ ID NO: 165199 - DNA, 25 bp, Artificial
  probe
  misc_feature (1)..(25): SEQ ID NO: 6849; WAN024DNZ_at; Start 25; Stop 49
agatttttcaaggattttgtgaaag

SEQ ID NO: 165200 - DNA, 25 bp, Artificial
  probe
  misc_feature (1)..(25): SEQ ID NO: 6849; WAN024DNZ_at; Start 16; Stop 40
atgattgtgagatttttcaaggatt

SEQ ID NO: 165201 - DNA, 25 bp, Artificial
  probe
  misc_feature (1)..(25): SEQ ID NO: 6849; WAN024DNZ_at; Start 3; Stop 27
ggattattatagcatgattgtgaga

SEQ ID NO: 165202 - DNA, 25 bp, Artificial
  probe
  misc_feature (1)..(25): SEQ ID NO: 6849; WAN024DNZ_at; Start 19; Stop 43
attgtgagatttttcaaggattttg

SEQ ID NO: 165203 - DNA, 25 bp, Artificial
  probe
  misc_feature (1)..(25): SEQ ID NO: 6849; WAN024DNZ_at; Start 18; Stop 42
gattgtgagatttttcaaggatttt

SEQ ID NO: 165204 - DNA, 25 bp, Artificial
  probe
  misc_feature (1)..(25): SEQ ID NO: 6849; WAN024DNZ_at; Start 10; Stop 34
tatagcatgattgtgagatttttca

SEQ ID NO: 165205 - DNA, 25 bp, Artificial
  probe
  misc_feature (1)..(25): SEQ ID NO: 3401; WAN024DO2_at; Start 12; Stop 36
ctttactatcataacctttggtgag

SEQ ID NO: 165206 - DNA, 25 bp, Artificial
  probe
  misc_feature (1)..(25): SEQ ID NO: 3401; WAN024DO2_at; Start 96; Stop 120
tattagcatcaagcatattctacaa

SEQ ID NO: 165207 - DNA, 25 bp, Artificial
  probe
  misc_feature (1)..(25): SEQ ID NO: 3401; WAN024DO2_at; Start 56; Stop 80
taatctatgaaacagttgctctggt

SEQ ID NO: 165208 - DNA, 25 bp, Artificial
  probe
  misc_feature (1)..(25): SEQ ID NO: 3401; WAN024DO2_at; Start 46; Stop 70
atttacttgctaatctatgaaacag

SEQ ID NO: 165209 - DNA, 25 bp, Artificial
  probe
  misc_feature (1)..(25): SEQ ID NO: 3401; WAN024DO2_at; Start 92; Stop 116
ctggtattagcatcaagcatattct

SEQ ID NO: 165210 - DNA, 25 bp, Artificial
  probe
  misc_feature (1)..(25): SEQ ID NO: 3401; WAN024DO2_at; Start 17; Stop 41
ctatcataacctttggtgagtttat

SEQ ID NO: 165211 - DNA, 25 bp, Artificial
  probe
  misc_feature (1)..(25): SEQ ID NO: 3401; WAN024DO2_at; Start 83; Stop 107
gcatggattctggtattagcatcaa

SEQ ID NO: 165212 - DNA, 25 bp, Artificial
  probe
  misc_feature (1)..(25): SEQ ID NO: 3401; WAN024DO2_at; Start 13; Stop 37
tttactatcataacctttggtgagt

SEQ ID NO: 165213 - DNA, 25 bp, Artificial
  probe
  misc_feature (1)..(25): SEQ ID NO: 3401; WAN024DO2_at; Start 94; Stop 118
ggtattagcatcaagcatattctac

SEQ ID NO: 165214 - DNA, 25 bp, Artificial
  probe
  misc_feature (1)..(25): SEQ ID NO: 3401; WAN024DO2_at; Start 95; Stop 119
gtattagcatcaagcatattctaca

SEQ ID NO: 165215 - DNA, 25 bp, Artificial
  probe
  misc_feature (1)..(25): SEQ ID NO: 3401; WAN024DO2_at; Start 53; Stop 77
tgctaatctatgaaacagttgctct

SEQ ID NO: 165216 - DNA, 25 bp, Artificial
  probe
  misc_feature (1)..(25): SEQ ID NO: 3401; WAN024DO2_at; Start 15; Stop 39
tactatcataacctttggtgagttt

SEQ ID NO: 165217 - DNA, 25 bp, Artificial
  probe
  misc_feature (1)..(25): SEQ ID NO: 3401; WAN024DO2_at; Start 82; Stop 106
ggcatggattctggtattagcatca

SEQ ID NO: 165218 - DNA, 25 bp, Artificial
  probe
  misc_feature (1)..(25): SEQ ID NO: 3401; WAN024DO2_at; Start 84; Stop 108
catggattctggtattagcatcaag

SEQ ID NO: 165219 - DNA, 25 bp, Artificial
  probe
  misc_feature (1)..(25): SEQ ID NO: 3401; WAN024DO2_at; Start 99; Stop 123
tagcatcaagcatattctacaaaaa

SEQ ID NO: 165220 - DNA, 25 bp, Artificial
  probe
  misc_feature (1)..(25): SEQ ID NO: 3401; WAN024DO2_at; Start 100; Stop 124
agcatcaagcatattctacaaaaaa

SEQ ID NO: 165221 - DNA, 25 bp, Artificial
  probe
  misc_feature (1)..(25): SEQ ID NO: 3401; WAN024DO2_at; Start 19; Stop 43
atcataacctttggtgagtttatac

SEQ ID NO: 165222 - DNA, 25 bp, Artificial
  probe
  misc_feature (1)..(25): SEQ ID NO: 3401; WAN024DO2_at; Start 51; Stop 75
cttgctaatctatgaaacagttgct

SEQ ID NO: 165223 - DNA, 25 bp, Artificial
  probe
  misc_feature (1)..(25): SEQ ID NO: 3401; WAN024DO2_at; Start 49; Stop 73
tacttgctaatctatgaaacagttg

SEQ ID NO: 165224 - DNA, 25 bp, Artificial
  probe
  misc_feature (1)..(25): SEQ ID NO: 3401; WAN024DO2_at; Start 88; Stop 112
gattctggtattagcatcaagcata

SEQ ID NO: 165225 - DNA, 25 bp, Artificial
  probe
  misc_feature (1)..(25): SEQ ID NO: 3401; WAN024DO2_at; Start 34; Stop 58
gagtttatactaatttacttgctaa

SEQ ID NO: 165226 - DNA, 25 bp, Artificial
  probe
  misc_feature (1)..(25): SEQ ID NO: 3401; WAN024DO2_at; Start 54; Stop 78
gctaatctatgaaacagttgctctg

SEQ ID NO: 165227 - DNA, 25 bp, Artificial
  probe
  misc_feature (1)..(25): SEQ ID NO: 3401; WAN024DO2_at; Start 91; Stop 115
tctggtattagcatcaagcatattc

SEQ ID NO: 165228 - DNA, 25 bp, Artificial
  probe
  misc_feature (1)..(25): SEQ ID NO: 3401; WAN024DO2_at; Start 10; Stop 34
tactttactatcataacctttggtg

SEQ ID NO: 165229 - DNA, 25 bp, Artificial
  probe
  misc_feature (1)..(25): SEQ ID NO: 3401; WAN024DO2_at; Start 86; Stop 110
tggattctggtattagcatcaagca

SEQ ID NO: 165230 - DNA, 25 bp, Artificial
  probe
  misc_feature (1)..(25): SEQ ID NO: 3401; WAN024DO2_at; Start 85; Stop 109
atggattctggtattagcatcaagc

SEQ ID NO: 165231 - DNA, 25 bp, Artificial
  probe
  misc_feature (1)..(25): SEQ ID NO: 3401; WAN024DO2_at; Start 87; Stop 111
ggattctggtattagcatcaagcat

SEQ ID NO: 165232 - DNA, 25 bp, Artificial
  probe
  misc_feature (1)..(25): SEQ ID NO: 3401; WAN024DO2_at; Start 31; Stop 55
ggtgagtttatactaatttacttgc

SEQ ID NO: 165233 - DNA, 25 bp, Artificial
  probe
  misc_feature (1)..(25): SEQ ID NO: 3401; WAN024DO2_at; Start 55; Stop 79
ctaatctatgaaacagttgctctgg

SEQ ID NO: 165234 - DNA, 25 bp, Artificial
  probe
  misc_feature (1)..(25): SEQ ID NO: 3401; WAN024DO2_at; Start 44; Stop 68
taatttacttgctaatctatgaaac

SEQ ID NO: 165235 - DNA, 25 bp, Artificial
  probe
  misc_feature (1)..(25): SEQ ID NO: 3401; WAN024DO2_at; Start 52; Stop 76
ttgctaatctatgaaacagttgctc

SEQ ID NO: 165236 - DNA, 25 bp, Artificial
  probe
  misc_feature (1)..(25): SEQ ID NO: 3401; WAN024DO2_at; Start 3; Stop 27
gctcttttactttactatcataacc

SEQ ID NO: 165237 - DNA, 25 bp, Artificial
  probe
  misc_feature (1)..(25): SEQ ID NO: 3401; WAN024DO2_at; Start 50; Stop 74
acttgctaatctatgaaacagttgc

SEQ ID NO: 165238 - DNA, 25 bp, Artificial
  probe
  misc_feature (1)..(25): SEQ ID NO: 3401; WAN024DO2_at; Start 21; Stop 45
cataacctttggtgagtttatacta

SEQ ID NO: 165239 - DNA, 25 bp, Artificial
  probe
  misc_feature (1)..(25): SEQ ID NO: 5023; WAN024DO3_at; Start 63; Stop 87
ggttacaggcatgccaacctgtcac

SEQ ID NO: 165240 - DNA, 25 bp, Artificial
  probe
  misc_feature (1)..(25): SEQ ID NO: 5023; WAN024DO3_at; Start 74; Stop 98
tgccaacctgtcactcggatgaagc

SEQ ID NO: 165241 - DNA, 25 bp, Artificial
  probe
  misc_feature (1)..(25): SEQ ID NO: 5023; WAN024DO3_at; Start 71; Stop 95
gcatgccaacctgtcactcggatga

SEQ ID NO: 165242 - DNA, 25 bp, Artificial
  probe
  misc_feature (1)..(25): SEQ ID NO: 5023; WAN024DO3_at; Start 60; Stop 84
cttggttacaggcatgccaacctgt

SEQ ID NO: 165243 - DNA, 25 bp, Artificial
  probe
  misc_feature (1)..(25): SEQ ID NO: 5023; WAN024DO3_at; Start 70; Stop 94
ggcatgccaacctgtcactcggatg

SEQ ID NO: 165244 - DNA, 25 bp, Artificial
  probe
  misc_feature (1)..(25): SEQ ID NO: 5023; WAN024DO3_at; Start 68; Stop 92
caggcatgccaacctgtcactcgga

SEQ ID NO: 165245 - DNA, 25 bp, Artificial
  probe
  misc_feature (1)..(25): SEQ ID NO: 5023; WAN024DO3_at; Start 51; Stop 75
taacttcttcttggttacaggcatg

SEQ ID NO: 165246 - DNA, 25 bp, Artificial
  probe
  misc_feature (1)..(25): SEQ ID NO: 5023; WAN024DO3_at; Start 62; Stop 86
tggttacaggcatgccaacctgtca

SEQ ID NO: 165247 - DNA, 25 bp, Artificial
  probe
  misc_feature (1)..(25): SEQ ID NO: 5023; WAN024DO3_at; Start 53; Stop 77
acttcttcttggttacaggcatgcc

SEQ ID NO: 165248 - DNA, 25 bp, Artificial
  probe
  misc_feature (1)..(25): SEQ ID NO: 5023; WAN024DO3_at; Start 54; Stop 78
cttcttcttggttacaggcatgcca

SEQ ID NO: 165249 - DNA, 25 bp, Artificial
  probe
  misc_feature (1)..(25): SEQ ID NO: 5023; WAN024DO3_at; Start 56; Stop 80
tcttcttggttacaggcatgccaac

SEQ ID NO: 165250 - DNA, 25 bp, Artificial
  probe
  misc_feature (1)..(25): SEQ ID NO: 5023; WAN024DO3_at; Start 47; Stop 71
caaataacttcttcttggttacagg

SEQ ID NO: 165251 - DNA, 25 bp, Artificial
  probe
  misc_feature (1)..(25): SEQ ID NO: 5023; WAN024DO3_at; Start 66; Stop 90
tacaggcatgccaacctgtcactcg

SEQ ID NO: 165252 - DNA, 25 bp, Artificial
  probe
  misc_feature (1)..(25): SEQ ID NO: 5023; WAN024DO3_at; Start 78; Stop 102
aacctgtcactcggatgaagccaaa

SEQ ID NO: 165253 - DNA, 25 bp, Artificial
  probe
  misc_feature (1)..(25): SEQ ID NO: 5023; WAN024DO3_at; Start 75; Stop 99
gccaacctgtcactcggatgaagcc

SEQ ID NO: 165254 - DNA, 25 bp, Artificial
  probe
  misc_feature (1)..(25): SEQ ID NO: 5023; WAN024DO3_at; Start 52; Stop 76
aacttcttcttggttacaggcatgc

SEQ ID NO: 165255 - DNA, 25 bp, Artificial
  probe
  misc_feature (1)..(25): SEQ ID NO: 5023; WAN024DO3_at; Start 49; Stop 73
aataacttcttcttggttacaggca

SEQ ID NO: 165256 - DNA, 25 bp, Artificial
  probe
  misc_feature (1)..(25): SEQ ID NO: 5023; WAN024DO3_at; Start 18; Stop 42
tcttggtaaaatagggattgtcgta

SEQ ID NO: 165257 - DNA, 25 bp, Artificial
  probe
  misc_feature (1)..(25): SEQ ID NO: 5023; WAN024DO3_at; Start 61; Stop 85
ttggttacaggcatgccaacctgtc

SEQ ID NO: 165258 - DNA, 25 bp, Artificial
  probe
  misc_feature (1)..(25): SEQ ID NO: 5023; WAN024DO3_at; Start 57; Stop 81
cttcttggttacaggcatgccaacc

SEQ ID NO: 165259 - DNA, 25 bp, Artificial
  probe
  misc_feature (1)..(25): SEQ ID NO: 5023; WAN024DO3_at; Start 77; Stop 101
caacctgtcactcggatgaagccaa

SEQ ID NO: 165260 - DNA, 25 bp, Artificial
  probe
  misc_feature (1)..(25): SEQ ID NO: 5023; WAN024DO3_at; Start 39; Stop 63
cgtaaagacaaataacttcttcttg

SEQ ID NO: 165261 - DNA, 25 bp, Artificial
  probe
  misc_feature (1)..(25): SEQ ID NO: 5023; WAN024DO3_at; Start 72; Stop 96
catgccaacctgtcactcggatgaa

SEQ ID NO: 165262 - DNA, 25 bp, Artificial
  probe
  misc_feature (1)..(25): SEQ ID NO: 5023; WAN024DO3_at; Start 24; Stop 48
taaaatagggattgtcgtaaagaca

SEQ ID NO: 165263 - DNA, 25 bp, Artificial
  probe
  misc_feature (1)..(25): SEQ ID NO: 5023; WAN024DO3_at; Start 58; Stop 82
ttcttggttacaggcatgccaacct

SEQ ID NO: 165264 - DNA, 25 bp, Artificial
  probe
  misc_feature (1)..(25): SEQ ID NO: 5023; WAN024DO3_at; Start 16; Stop 40
aatcttggtaaaatagggattgtcg

SEQ ID NO: 165265 - DNA, 25 bp, Artificial
  probe
  misc_feature (1)..(25): SEQ ID NO: 5023; WAN024DO3_at; Start 73; Stop 97
atgccaacctgtcactcggatgaag

SEQ ID NO: 165266 - DNA, 25 bp, Artificial
  probe
  misc_feature (1)..(25): SEQ ID NO: 5023; WAN024DO3_at; Start 69; Stop 93
aggcatgccaacctgtcactcggat

SEQ ID NO: 165267 - DNA, 25 bp, Artificial
  probe
  misc_feature (1)..(25): SEQ ID NO: 5023; WAN024DO3_at; Start 36; Stop 60
tgtcgtaaagacaaataacttcttc

SEQ ID NO: 165268 - DNA, 25 bp, Artificial
  probe
  misc_feature (1)..(25): SEQ ID NO: 5023; WAN024DO3_at; Start 29; Stop 53
tagggattgtcgtaaagacaaataa

SEQ ID NO: 165269 - DNA, 25 bp, Artificial
  probe
  misc_feature (1)..(25): SEQ ID NO: 5023; WAN024DO3_at; Start 76; Stop 100
ccaacctgtcactcggatgaagcca

SEQ ID NO: 165270 - DNA, 25 bp, Artificial
  probe
  misc_feature (1)..(25): SEQ ID NO: 5023; WAN024DO3_at; Start 33; Stop 57
gattgtcgtaaagacaaataacttc

SEQ ID NO: 165271 - DNA, 25 bp, Artificial
  probe
  misc_feature (1)..(25): SEQ ID NO: 5023; WAN024DO3_at; Start 55; Stop 79
ttcttcttggttacaggcatgccaa

SEQ ID NO: 165272 - DNA, 25 bp, Artificial
  probe
  misc_feature (1)..(25): SEQ ID NO: 5023; WAN024DO3_at; Start 2; Stop 26
tgacagaaaatttaaatcttggtaa

SEQ ID NO: 165273 - DNA, 25 bp, Artificial
  probe
  misc_feature (1)..(25): SEQ ID NO: 3339; WAN024DO4_at; Start 28; Stop 52
cttctacgaaacaccaaatctgtct

SEQ ID NO: 165274 - DNA, 25 bp, Artificial
  probe
  misc_feature (1)..(25): SEQ ID NO: 3339; WAN024DO4_at; Start 49; Stop 73
gtcttttccctcttttgtgatataa

SEQ ID NO: 165275 - DNA, 25 bp, Artificial
  probe
  misc_feature (1)..(25): SEQ ID NO: 3339; WAN024DO4_at; Start 29; Stop 53
ttctacgaaacaccaaatctgtctt

SEQ ID NO: 165276 - DNA, 25 bp, Artificial
  probe
  misc_feature (1)..(25): SEQ ID NO: 3339; WAN024DO4_at; Start 38; Stop 62
acaccaaatctgtcttttccctctt

SEQ ID NO: 165277 - DNA, 25 bp, Artificial
  probe
  misc_feature (1)..(25): SEQ ID NO: 3339; WAN024DO4_at; Start 46; Stop 70
tctgtcttttccctcttttgtgata

SEQ ID NO: 165278 - DNA, 25 bp, Artificial
  probe
  misc_feature (1)..(25): SEQ ID NO: 3339; WAN024DO4_at; Start 25; Stop 49
ttacttctacgaaacaccaaatctg

SEQ ID NO: 165279 - DNA, 25 bp, Artificial
  probe
  misc_feature (1)..(25): SEQ ID NO: 3339; WAN024DO4_at; Start 45; Stop 69
atctgtcttttccctcttttgtgat

SEQ ID NO: 165280 - DNA, 25 bp, Artificial
  probe
  misc_feature (1)..(25): SEQ ID NO: 3339; WAN024DO4_at; Start 44; Stop 68
aatctgtcttttccctcttttgtga

SEQ ID NO: 165281 - DNA, 25 bp, Artificial
  probe
  misc_feature (1)..(25): SEQ ID NO: 3339; WAN024DO4_at; Start 30; Stop 54
tctacgaaacaccaaatctgtcttt

SEQ ID NO: 165282 - DNA, 25 bp, Artificial
  probe
  misc_feature (1)..(25): SEQ ID NO: 3339; WAN024DO4_at; Start 48; Stop 72
tgtcttttccctcttttgtgatata

SEQ ID NO: 165283 - DNA, 25 bp, Artificial
  probe
  misc_feature (1)..(25): SEQ ID NO: 3339; WAN024DO4_at; Start 37; Stop 61
aacaccaaatctgtcttttccctct

SEQ ID NO: 165284 - DNA, 25 bp, Artificial
  probe
  misc_feature (1)..(25): SEQ ID NO: 3339; WAN024DO4_at; Start 50; Stop 74
tcttttccctcttttgtgatataat

SEQ ID NO: 165285 - DNA, 25 bp, Artificial
  probe
  misc_feature (1)..(25): SEQ ID NO: 3339; WAN024DO4_at; Start 47; Stop 71
ctgtcttttccctcttttgtgatat

SEQ ID NO: 165286 - DNA, 25 bp, Artificial
  probe
  misc_feature (1)..(25): SEQ ID NO: 3339; WAN024DO4_at; Start 31; Stop 55
ctacgaaacaccaaatctgtctttt

SEQ ID NO: 165287 - DNA, 25 bp, Artificial
  probe
  misc_feature (1)..(25): SEQ ID NO: 3339; WAN024DO4_at; Start 26; Stop 50
tacttctacgaaacaccaaatctgt

SEQ ID NO: 165288 - DNA, 25 bp, Artificial
  probe
  misc_feature (1)..(25): SEQ ID NO: 3339; WAN024DO4_at; Start 51; Stop 75
cttttccctcttttgtgatataata

SEQ ID NO: 165289 - DNA, 25 bp, Artificial
  probe
  misc_feature (1)..(25): SEQ ID NO: 3339; WAN024DO4_at; Start 39; Stop 63
caccaaatctgtcttttccctcttt

SEQ ID NO: 165290 - DNA, 25 bp, Artificial
  probe
  misc_feature (1)..(25): SEQ ID NO: 3339; WAN024DO4_at; Start 32; Stop 56
tacgaaacaccaaatctgtcttttc

SEQ ID NO: 165291 - DNA, 25 bp, Artificial
  probe
  misc_feature (1)..(25): SEQ ID NO: 3339; WAN024DO4_at; Start 27; Stop 51
acttctacgaaacaccaaatctgtc

SEQ ID NO: 165292 - DNA, 25 bp, Artificial
  probe
  misc_feature (1)..(25): SEQ ID NO: 4919; WAN024DO5_at; Start 106; Stop 130
ttgataattgaacacgcctggaacc

SEQ ID NO: 165293 - DNA, 25 bp, Artificial
  probe
  misc_feature (1)..(25): SEQ ID NO: 4919; WAN024DO5_at; Start 23; Stop 47
ttgaaaaaagatgcctgtcttgcct

SEQ ID NO: 165294 - DNA, 25 bp, Artificial
  probe
  misc_feature (1)..(25): SEQ ID NO: 4919; WAN024DO5_at; Start 104; Stop 128
tcttgataattgaacacgcctggaa

SEQ ID NO: 165295 - DNA, 25 bp, Artificial
  probe
  misc_feature (1)..(25): SEQ ID NO: 4919; WAN024DO5_at; Start 15; Stop 39
cctgcctcttgaaaaaagatgcctg

SEQ ID NO: 165296 - DNA, 25 bp, Artificial
  probe
  misc_feature (1)..(25): SEQ ID NO: 4919; WAN024DO5_at; Start 27; Stop 51
aaaaagatgcctgtcttgcctttcg

SEQ ID NO: 165297 - DNA, 25 bp, Artificial
  probe
  misc_feature (1)..(25): SEQ ID NO: 4919; WAN024DO5_at; Start 47; Stop 71
tttcgtggaaagtcagtgccattcc

SEQ ID NO: 165298 - DNA, 25 bp, Artificial
  probe
  misc_feature (1)..(25): SEQ ID NO: 4919; WAN024DO5_at; Start 69; Stop 93
tccctatttttcagaggcagctaag

SEQ ID NO: 165299 - DNA, 25 bp, Artificial
  probe
  misc_feature (1)..(25): SEQ ID NO: 4919; WAN024DO5_at; Start 54; Stop 78
gaaagtcagtgccattccctatttt

SEQ ID NO: 165300 - DNA, 25 bp, Artificial
  probe
  misc_feature (1)..(25): SEQ ID NO: 4919; WAN024DO5_at; Start 17; Stop 41
tgcctcttgaaaaaagatgcctgtc

SEQ ID NO: 165301 - DNA, 25 bp, Artificial
  probe
  misc_feature (1)..(25): SEQ ID NO: 4919; WAN024DO5_at; Start 6; Stop 30
cacggactacctgcctcttgaaaaa

SEQ ID NO: 165302 - DNA, 25 bp, Artificial
  probe
  misc_feature (1)..(25): SEQ ID NO: 4919; WAN024DO5_at; Start 34; Stop 58
tgcctgtcttgcctttcgtggaaag

SEQ ID NO: 165303 - DNA, 25 bp, Artificial
  probe
  misc_feature (1)..(25): SEQ ID NO: 4919; WAN024DO5_at; Start 21; Stop 45
tcttgaaaaaagatgcctgtcttgc

SEQ ID NO: 165304 - DNA, 25 bp, Artificial
  probe
  misc_feature (1)..(25): SEQ ID NO: 4919; WAN024DO5_at; Start 66; Stop 90
cattccctatttttcagaggcagct

SEQ ID NO: 165305 - DNA, 25 bp, Artificial
  probe
  misc_feature (1)..(25): SEQ ID NO: 4919; WAN024DO5_at; Start 50; Stop 74
cgtggaaagtcagtgccattcccta

SEQ ID NO: 165306 - DNA, 25 bp, Artificial
  probe
  misc_feature (1)..(25): SEQ ID NO: 4919; WAN024DO5_at; Start 79; Stop 103
tcagaggcagctaaggtcctttgta

SEQ ID NO: 165307 - DNA, 25 bp, Artificial
  probe
  misc_feature (1)..(25): SEQ ID NO: 4919; WAN024DO5_at; Start 102; Stop 126
tatcttgataattgaacacgcctgg

SEQ ID NO: 165308 - DNA, 25 bp, Artificial
  probe
  misc_feature (1)..(25): SEQ ID NO: 4919; WAN024DO5_at; Start 4; Stop 28
aacacggactacctgcctcttgaaa

SEQ ID NO: 165309 - DNA, 25 bp, Artificial
  probe
  misc_feature (1)..(25): SEQ ID NO: 4919; WAN024DO5_at; Start 32; Stop 56
gatgcctgtcttgcctttcgtggaa

SEQ ID NO: 165310 - DNA, 25 bp, Artificial
  probe
  misc_feature (1)..(25): SEQ ID NO: 4919; WAN024DO5_at; Start 45; Stop 69
cctttcgtggaaagtcagtgccatt

SEQ ID NO: 165311 - DNA, 25 bp, Artificial
  probe
  misc_feature (1)..(25): SEQ ID NO: 4919; WAN024DO5_at; Start 1; Stop 25
ttgaacacggactacctgcctcttg

SEQ ID NO: 165312 - DNA, 25 bp, Artificial
  probe
  misc_feature (1)..(25): SEQ ID NO: 4919; WAN024DO5_at; Start 13; Stop 37
tacctgcctcttgaaaaaagatgcc

SEQ ID NO: 165313 - DNA, 25 bp, Artificial
  probe
  misc_feature (1)..(25): SEQ ID NO: 4919; WAN024DO5_at; Start 75; Stop 99
tttttcagaggcagctaaggtcctt

SEQ ID NO: 165314 - DNA, 25 bp, Artificial
  probe
  misc_feature (1)..(25): SEQ ID NO: 4919; WAN024DO5_at; Start 72; Stop 96
ctatttttcagaggcagctaaggtc

SEQ ID NO: 165315 - DNA, 25 bp, Artificial
  probe
  misc_feature (1)..(25): SEQ ID NO: 4919; WAN024DO5_at; Start 9; Stop 33
ggactacctgcctcttgaaaaaaga

SEQ ID NO: 165316 - DNA, 25 bp, Artificial
  probe
  misc_feature (1)..(25): SEQ ID NO: 4919; WAN024DO5_at; Start 38; Stop 62
tgtcttgcctttcgtggaaagtcag

SEQ ID NO: 165317 - DNA, 25 bp, Artificial
  probe
  misc_feature (1)..(25): SEQ ID NO: 4919; WAN024DO5_at; Start 114; Stop 138
tgaacacgcctggaaccctgtgtga

SEQ ID NO: 165318 - DNA, 25 bp, Artificial
  probe
  misc_feature (1)..(25): SEQ ID NO: 4919; WAN024DO5_at; Start 64; Stop 88
gccattccctatttttcagaggcag

SEQ ID NO: 165319 - DNA, 25 bp, Artificial
  probe
  misc_feature (1)..(25): SEQ ID NO: 4919; WAN024DO5_at; Start 42; Stop 66
ttgcctttcgtggaaagtcagtgcc

SEQ ID NO: 165320 - DNA, 25 bp, Artificial
  probe
  misc_feature (1)..(25): SEQ ID NO: 4919; WAN024DO5_at; Start 111; Stop 135
aattgaacacgcctggaaccctgtg

SEQ ID NO: 165321 - DNA, 25 bp, Artificial
  probe
  misc_feature (1)..(25): SEQ ID NO: 4919; WAN024DO5_at; Start 77; Stop 101
tttcagaggcagctaaggtcctttg

SEQ ID NO: 165322 - DNA, 25 bp, Artificial
  probe
  misc_feature (1)..(25): SEQ ID NO: 4919; WAN024DO5_at; Start 82; Stop 106
gaggcagctaaggtcctttgtatct

SEQ ID NO: 165323 - DNA, 25 bp, Artificial
  probe
  misc_feature (1)..(25): SEQ ID NO: 4919; WAN024DO5_at; Start 60; Stop 84
cagtgccattccctatttttcagag

SEQ ID NO: 165324 - DNA, 25 bp, Artificial
  probe
  misc_feature (1)..(25): SEQ ID NO: 4919; WAN024DO5_at; Start 108; Stop 132
gataattgaacacgcctggaaccct

SEQ ID NO: 165325 - DNA, 25 bp, Artificial
  probe
  misc_feature (1)..(25): SEQ ID NO: 4919; WAN024DO5_at; Start 88; Stop 112
gctaaggtcctttgtatcttgataa

SEQ ID NO: 165326 - DNA, 25 bp, Artificial
  probe
  misc_feature (1)..(25): SEQ ID NO: 4918; WAN024DO6_at; Start 6; Stop 30
caatcttttaggagaacttgaaact

SEQ ID NO: 165327 - DNA, 25 bp, Artificial
  probe
  misc_feature (1)..(25): SEQ ID NO: 4918; WAN024DO6_at; Start 1; Stop 25
ttgaacaatcttttaggagaacttg

SEQ ID NO: 165328 - DNA, 25 bp, Artificial
  probe
  misc_feature (1)..(25): SEQ ID NO: 4918; WAN024DO6_at; Start 2; Stop 26
tgaacaatcttttaggagaacttga

SEQ ID NO: 165329 - DNA, 25 bp, Artificial
  probe
  misc_feature (1)..(25): SEQ ID NO: 4918; WAN024DO6_at; Start 3; Stop 27
gaacaatcttttaggagaacttgaa

SEQ ID NO: 165330 - DNA, 25 bp, Artificial
  probe
  misc_feature (1)..(25): SEQ ID NO: 4168; WAN024DO7_at; Start 374; Stop 398
gacggcgttttgagcggactaatga

SEQ ID NO: 165331 - DNA, 25 bp, Artificial
  probe
  misc_feature (1)..(25): SEQ ID NO: 4168; WAN024DO7_at; Start 434; Stop 458
gatatattgattcacaaattagaga

SEQ ID NO: 165332 - DNA, 25 bp, Artificial
  probe
  misc_feature (1)..(25): SEQ ID NO: 4168; WAN024DO7_at; Start 280; Stop 304
gtcctatatattgacgaaacgggaa

SEQ ID NO: 165333 - DNA, 25 bp, Artificial
  probe
  misc_feature (1)..(25): SEQ ID NO: 4168; WAN024DO7_at; Start 27; Stop 51
gaacttagagcggaaaaagcgagtc

SEQ ID NO: 165334 - DNA, 25 bp, Artificial
  probe
  misc_feature (1)..(25): SEQ ID NO: 4168; WAN024DO7_at; Start 388; Stop 412
cggactaatgaggtggagcaaaaac

SEQ ID NO: 165335 - DNA, 25 bp, Artificial
  probe
  misc_feature (1)..(25): SEQ ID NO: 4168; WAN024DO7_at; Start 47; Stop 71
gagtcgtcaaaaagcgtaagatccc

SEQ ID NO: 165336 - DNA, 25 bp, Artificial
  probe
  misc_feature (1)..(25): SEQ ID NO: 4168; WAN024DO7_at; Start 397; Stop 421
gaggtggagcaaaaactcaatggta

SEQ ID NO: 165337 - DNA, 25 bp, Artificial
  probe
  misc_feature (1)..(25): SEQ ID NO: 4168; WAN024DO7_at; Start 275; Stop 299
taccagtcctatatattgacgaaac

SEQ ID NO: 165338 - DNA, 25 bp, Artificial
  probe
  misc_feature (1)..(25): SEQ ID NO: 4168; WAN024DO7_at; Start 61; Stop 85
cgtaagatccctttagaagaattga

SEQ ID NO: 165339 - DNA, 25 bp, Artificial
  probe
  misc_feature (1)..(25): SEQ ID NO: 4168; WAN024DO7_at; Start 391; Stop 415
actaatgaggtggagcaaaaactca

SEQ ID NO: 165340 - DNA, 25 bp, Artificial
  probe
  misc_feature (1)..(25): SEQ ID NO: 4168; WAN024DO7_at; Start 414; Stop 438
caatggtagttttctaatcagatat

SEQ ID NO: 165341 - DNA, 25 bp, Artificial
  probe
  misc_feature (1)..(25): SEQ ID NO: 4168; WAN024DO7_at; Start 28; Stop 52
aacttagagcggaaaaagcgagtcg

SEQ ID NO: 165342 - DNA, 25 bp, Artificial
  probe
  misc_feature (1)..(25): SEQ ID NO: 4168; WAN024DO7_at; Start 223; Stop 247
aagcctgagaaagtttctgagtttc

SEQ ID NO: 165343 - DNA, 25 bp, Artificial
  probe
  misc_feature (1)..(25): SEQ ID NO: 4168; WAN024DO7_at; Start 393; Stop 417
taatgaggtggagcaaaaactcaat

SEQ ID NO: 165344 - DNA, 25 bp, Artificial
  probe
  misc_feature (1)..(25): SEQ ID NO: 4168; WAN024DO7_at; Start 63; Stop 87
taagatccctttagaagaattgaaa

SEQ ID NO: 165345 - DNA, 25 bp, Artificial
  probe
  misc_feature (1)..(25): SEQ ID NO: 4168; WAN024DO7_at; Start 278; Stop 302
cagtcctatatattgacgaaacggg

SEQ ID NO: 165346 - DNA, 25 bp, Artificial
  probe
  misc_feature (1)..(25): SEQ ID NO: 4168; WAN024DO7_at; Start 59; Stop 83
agcgtaagatccctttagaagaatt

SEQ ID NO: 165347 - DNA, 25 bp, Artificial
  probe
  misc_feature (1)..(25): SEQ ID NO: 4168; WAN024DO7_at; Start 271; Stop 295
gatttaccagtcctatatattgacg

SEQ ID NO: 165348 - DNA, 25 bp, Artificial
  probe
  misc_feature (1)..(25): SEQ ID NO: 4168; WAN024DO7_at; Start 375; Stop 399
acggcgttttgagcggactaatgag

SEQ ID NO: 165349 - DNA, 25 bp, Artificial
  probe
  misc_feature (1)..(25): SEQ ID NO: 4168; WAN024DO7_at; Start 48; Stop 72
agtcgtcaaaaagcgtaagatccct

SEQ ID NO: 165350 - DNA, 25 bp, Artificial
  probe
  misc_feature (1)..(25): SEQ ID NO: 4168; WAN024DO7_at; Start 282; Stop 306
cctatatattgacgaaacgggaatc

SEQ ID NO: 165351 - DNA, 25 bp, Artificial
  probe
  misc_feature (1)..(25): SEQ ID NO: 4168; WAN024DO7_at; Start 386; Stop 410
agcggactaatgaggtggagcaaaa

SEQ ID NO: 165352 - DNA, 25 bp, Artificial
  probe
  misc_feature (1)..(25): SEQ ID NO: 4168; WAN024DO7_at; Start 400; Stop 424
gtggagcaaaaactcaatggtagtt

SEQ ID NO: 165353 - DNA, 25 bp, Artificial
  probe
  misc_feature (1)..(25): SEQ ID NO: 4168; WAN024DO7_at; Start 418; Stop 442
ggtagttttctaatcagatatattg

SEQ ID NO: 165354 - DNA, 25 bp, Artificial
  probe
  misc_feature (1)..(25): SEQ ID NO: 4168; WAN024DO7_at; Start 390; Stop 414
gactaatgaggtggagcaaaaactc

SEQ ID NO: 165355 - DNA, 25 bp, Artificial
  probe
  misc_feature (1)..(25): SEQ ID NO: 4168; WAN024DO7_at; Start 399; Stop 423
ggtggagcaaaaactcaatggtagt

SEQ ID NO: 165356 - DNA, 25 bp, Artificial
  probe
  misc_feature (1)..(25): SEQ ID NO: 4168; WAN024DO7_at; Start 53; Stop 77
tcaaaaagcgtaagatccctttaga

SEQ ID NO: 165357 - DNA, 25 bp, Artificial
  probe
  misc_feature (1)..(25): SEQ ID NO: 4168; WAN024DO7_at; Start 46; Stop 70
cgagtcgtcaaaaagcgtaagatcc

SEQ ID NO: 165358 - DNA, 25 bp, Artificial
  probe
  misc_feature (1)..(25): SEQ ID NO: 4168; WAN024DO7_at; Start 403; Stop 427
gagcaaaaactcaatggtagttttc

SEQ ID NO: 165359 - DNA, 25 bp, Artificial
  probe
  misc_feature (1)..(25): SEQ ID NO: 4168; WAN024DO7_at; Start 411; Stop 435
actcaatggtagttttctaatcaga

SEQ ID NO: 165360 - DNA, 25 bp, Artificial
  probe
  misc_feature (1)..(25): SEQ ID NO: 4168; WAN024DO7_at; Start 220; Stop 244
caaaagcctgagaaagtttctgagt

SEQ ID NO: 165361 - DNA, 25 bp, Artificial
  probe
  misc_feature (1)..(25): SEQ ID NO: 4168; WAN024DO7_at; Start 225; Stop 249
gcctgagaaagtttctgagtttctt

SEQ ID NO: 165362 - DNA, 25 bp, Artificial
  probe
  misc_feature (1)..(25): SEQ ID NO: 4168; WAN024DO7_at; Start 219; Stop 243
acaaaagcctgagaaagtttctgag

SEQ ID NO: 165363 - DNA, 25 bp, Artificial
  probe
  misc_feature (1)..(25): SEQ ID NO: 4168; WAN024DO7_at; Start 45; Stop 69
gcgagtcgtcaaaaagcgtaagatc

SEQ ID NO: 165364 - DNA, 25 bp, Artificial
  probe
  misc_feature (1)..(25): SEQ ID NO: 1422; WAN024DO8_at; Start 419; Stop 443
cggatttgaatcctattgagcaagc

SEQ ID NO: 165365 - DNA, 25 bp, Artificial
  probe
  misc_feature (1)..(25): SEQ ID NO: 1422; WAN024DO8_at; Start 364; Stop 388
gatgaactctgcatccaagataaac

SEQ ID NO: 165366 - DNA, 25 bp, Artificial
  probe
  misc_feature (1)..(25): SEQ ID NO: 1422; WAN024DO8_at; Start 241; Stop 265
tacaagaaaagcatgacaagcgatt

SEQ ID NO: 165367 - DNA, 25 bp, Artificial
  probe
  misc_feature (1)..(25): SEQ ID NO: 1422; WAN024DO8_at; Start 425; Stop 449
tgaatcctattgagcaagcttgggc

SEQ ID NO: 165368 - DNA, 25 bp, Artificial
  probe
  misc_feature (1)..(25): SEQ ID NO: 1422; WAN024DO8_at; Start 486; Stop 510
agttccaactatttttgaatgtttg

SEQ ID NO: 165369 - DNA, 25 bp, Artificial
  probe
  misc_feature (1)..(25): SEQ ID NO: 1422; WAN024DO8_at; Start 216; Stop 240
cggagagtttatagctcccatgatt

SEQ ID NO: 165370 - DNA, 25 bp, Artificial
  probe
  misc_feature (1)..(25): SEQ ID NO: 1422; WAN024DO8_at; Start 251; Stop 275
gcatgacaagcgatttctttgtgga

SEQ ID NO: 165371 - DNA, 25 bp, Artificial
  probe
  misc_feature (1)..(25): SEQ ID NO: 1422; WAN024DO8_at; Start 393; Stop 417
tttcttacctctaccaccttattca

SEQ ID NO: 165372 - DNA, 25 bp, Artificial
  probe
  misc_feature (1)..(25): SEQ ID NO: 1422; WAN024DO8_at; Start 341; Stop 365
gttttcatcccaagaacattttgga

SEQ ID NO: 165373 - DNA, 25 bp, Artificial
  probe
  misc_feature (1)..(25): SEQ ID NO: 1422; WAN024DO8_at; Start 311; Stop 335
cacctcatgttattgtcatgggcaa

SEQ ID NO: 165374 - DNA, 25 bp, Artificial
  probe
  misc_feature (1)..(25): SEQ ID NO: 1422; WAN024DO8_at; Start 270; Stop 294
tgtggagtggttcaaaacgcaactc

SEQ ID NO: 165375 - DNA, 25 bp, Artificial
  probe
  misc_feature (1)..(25): SEQ ID NO: 1422; WAN024DO8_at; Start 306; Stop 330
gaagacacctcatgttattgtcatg

SEQ ID NO: 165376 - DNA, 25 bp, Artificial
  probe
  misc_feature (1)..(25): SEQ ID NO: 1422; WAN024DO8_at; Start 169; Stop 193
agcggacgtcgttttgagcgaactt

SEQ ID NO: 165377 - DNA, 25 bp, Artificial
  probe
  misc_feature (1)..(25): SEQ ID NO: 1422; WAN024DO8_at; Start 277; Stop 301
tggttcaaaacgcaactcctacctg

SEQ ID NO: 165378 - DNA, 25 bp, Artificial
  probe
  misc_feature (1)..(25): SEQ ID NO: 1422; WAN024DO8_at; Start 237; Stop 261
gatttacaagaaaagcatgacaagc

SEQ ID NO: 165379 - DNA, 25 bp, Artificial
  probe
  misc_feature (1)..(25): SEQ ID NO: 1422; WAN024DO8_at; Start 315; Stop 339
tcatgttattgtcatgggcaatgct

SEQ ID NO: 165380 - DNA, 25 bp, Artificial
  probe
  misc_feature (1)..(25): SEQ ID NO: 1422; WAN024DO8_at; Start 296; Stop 320
tacctgctttgaagacacctcatgt

SEQ ID NO: 165381 - DNA, 25 bp, Artificial
  probe
  misc_feature (1)..(25): SEQ ID NO: 1422; WAN024DO8_at; Start 259; Stop 283
agcgatttctttgtggagtggttca

SEQ ID NO: 165382 - DNA, 25 bp, Artificial
  probe
  misc_feature (1)..(25): SEQ ID NO: 1422; WAN024DO8_at; Start 266; Stop 290
tctttgtggagtggttcaaaacgca

SEQ ID NO: 165383 - DNA, 25 bp, Artificial
  probe
  misc_feature (1)..(25): SEQ ID NO: 1422; WAN024DO8_at; Start 172; Stop 196
ggacgtcgttttgagcgaacttcaa

SEQ ID NO: 165384 - DNA, 25 bp, Artificial
  probe
  misc_feature (1)..(25): SEQ ID NO: 1422; WAN024DO8_at; Start 354; Stop 378
gaacattttggatgaactctgcatc

SEQ ID NO: 165385 - DNA, 25 bp, Artificial
  probe
  misc_feature (1)..(25): SEQ ID NO: 1422; WAN024DO8_at; Start 351; Stop 375
caagaacattttggatgaactctgc

SEQ ID NO: 165386 - DNA, 25 bp, Artificial
  probe
  misc_feature (1)..(25): SEQ ID NO: 1422; WAN024DO8_at; Start 404; Stop 428
taccaccttattcaccggatttgaa

SEQ ID NO: 165387 - DNA, 25 bp, Artificial
  probe
  misc_feature (1)..(25): SEQ ID NO: 1422; WAN024DO8_at; Start 373; Stop 397
tgcatccaagataaacactttttct

SEQ ID NO: 165388 - DNA, 25 bp, Artificial
  probe
  misc_feature (1)..(25): SEQ ID NO: 1422; WAN024DO8_at; Start 227; Stop 251
tagctcccatgatttacaagaaaag

SEQ ID NO: 165389 - DNA, 25 bp, Artificial
  probe
  misc_feature (1)..(25): SEQ ID NO: 1422; WAN024DO8_at; Start 439; Stop 463
caagcttgggctatcttgaaaaaga

SEQ ID NO: 165390 - DNA, 25 bp, Artificial
  probe
  misc_feature (1)..(25): SEQ ID NO: 1422; WAN024DO8_at; Start 285; Stop 309
aacgcaactcctacctgctttgaag

SEQ ID NO: 165391 - DNA, 25 bp, Artificial
  probe
  misc_feature (1)..(25): SEQ ID NO: 1422; WAN024DO8_at; Start 288; Stop 312
gcaactcctacctgctttgaagaca

SEQ ID NO: 165392 - DNA, 25 bp, Artificial
  probe
  misc_feature (1)..(25): SEQ ID NO: 1422; WAN024DO8_at; Start 220; Stop 244
gagtttatagctcccatgatttaca

SEQ ID NO: 165393 - DNA, 25 bp, Artificial
  probe
  misc_feature (1)..(25): SEQ ID NO: 1422; WAN024DO8_at; Start 301; Stop 325
gctttgaagacacctcatgttattg

SEQ ID NO: 165394 - DNA, 25 bp, Artificial
  probe
  misc_feature (1)..(25): SEQ ID NO: 1422; WAN024DO8_at; Start 176; Stop 200
gtcgttttgagcgaacttcaattgt

SEQ ID NO: 165395 - DNA, 25 bp, Artificial
  probe
  misc_feature (1)..(25): SEQ ID NO: 1422; WAN024DO8_at; Start 429; Stop 453
tcctattgagcaagcttgggctatc

SEQ ID NO: 165396 - DNA, 25 bp, Artificial
  probe
  misc_feature (1)..(25): SEQ ID NO: 1422; WAN024DO8_at; Start 432; Stop 456
tattgagcaagcttgggctatcttg

SEQ ID NO: 165397 - DNA, 25 bp, Artificial
  probe
  misc_feature (1)..(25): SEQ ID NO: 1422; WAN024DO8_at; Start 367; Stop 391
gaactctgcatccaagataaacact

SEQ ID NO: 165398 - DNA, 25 bp, Artificial
  probe
  misc_feature (1)..(25): SEQ ID NO: 5003; WAN024DO9_at; Start 45; Stop 69
ttctaaaggaacctatcgagtagtc

SEQ ID NO: 165399 - DNA, 25 bp, Artificial
  probe
  misc_feature (1)..(25): SEQ ID NO: 5003; WAN024DO9_at; Start 23; Stop 47
taaaactagatgactataacggttc

SEQ ID NO: 165400 - DNA, 25 bp, Artificial
  probe
  misc_feature (1)..(25): SEQ ID NO: 5003; WAN024DO9_at; Start 53; Stop 77
gaacctatcgagtagtcattaaaac

SEQ ID NO: 165401 - DNA, 25 bp, Artificial
  probe
  misc_feature (1)..(25): SEQ ID NO: 5003; WAN024DO9_at; Start 30; Stop 54
agatgactataacggttctaaagga

SEQ ID NO: 165402 - DNA, 25 bp, Artificial
  probe
  misc_feature (1)..(25): SEQ ID NO: 5003; WAN024DO9_at; Start 77; Stop 101
ctaaggatactgctggtctaactaa

SEQ ID NO: 165403 - DNA, 25 bp, Artificial
  probe
  misc_feature (1)..(25): SEQ ID NO: 5003; WAN024DO9_at; Start 26; Stop 50
aactagatgactataacggttctaa

SEQ ID NO: 165404 - DNA, 25 bp, Artificial
  probe
  misc_feature (1)..(25): SEQ ID NO: 5003; WAN024DO9_at; Start 46; Stop 70
tctaaaggaacctatcgagtagtca

SEQ ID NO: 165405 - DNA, 25 bp, Artificial
  probe
  misc_feature (1)..(25): SEQ ID NO: 5003; WAN024DO9_at; Start 69; Stop 93
cattaaaactaaggatactgctggt

SEQ ID NO: 165406 - DNA, 25 bp, Artificial
  probe
  misc_feature (1)..(25): SEQ ID NO: 5003; WAN024DO9_at; Start 50; Stop 74
aaggaacctatcgagtagtcattaa

SEQ ID NO: 165407 - DNA, 25 bp, Artificial
  probe
  misc_feature (1)..(25): SEQ ID NO: 5003; WAN024DO9_at; Start 68; Stop 92
tcattaaaactaaggatactgctgg

SEQ ID NO: 165408 - DNA, 25 bp, Artificial
  probe
  misc_feature (1)..(25): SEQ ID NO: 5003; WAN024DO9_at; Start 78; Stop 102
taaggatactgctggtctaactaat

SEQ ID NO: 165409 - DNA, 25 bp, Artificial
  probe
  misc_feature (1)..(25): SEQ ID NO: 5003; WAN024DO9_at; Start 62; Stop 86
gagtagtcattaaaactaaggatac

SEQ ID NO: 165410 - DNA, 25 bp, Artificial
  probe
  misc_feature (1)..(25): SEQ ID NO: 5003; WAN024DO9_at; Start 47; Stop 71
ctaaaggaacctatcgagtagtcat

SEQ ID NO: 165411 - DNA, 25 bp, Artificial
  probe
  misc_feature (1)..(25): SEQ ID NO: 5003; WAN024DO9_at; Start 71; Stop 95
ttaaaactaaggatactgctggtct

SEQ ID NO: 165412 - DNA, 25 bp, Artificial
  probe
  misc_feature (1)..(25): SEQ ID NO: 5003; WAN024DO9_at; Start 56; Stop 80
cctatcgagtagtcattaaaactaa

SEQ ID NO: 165413 - DNA, 25 bp, Artificial
  probe
  misc_feature (1)..(25): SEQ ID NO: 5003; WAN024DO9_at; Start 61; Stop 85
cgagtagtcattaaaactaaggata

SEQ ID NO: 165414 - DNA, 25 bp, Artificial
  probe
  misc_feature (1)..(25): SEQ ID NO: 5003; WAN024DO9_at; Start 76; Stop 100
actaaggatactgctggtctaacta

SEQ ID NO: 165415 - DNA, 25 bp, Artificial
  probe
  misc_feature (1)..(25): SEQ ID NO: 5003; WAN024DO9_at; Start 74; Stop 98
aaactaaggatactgctggtctaac

SEQ ID NO: 165416 - DNA, 25 bp, Artificial
  probe
  misc_feature (1)..(25): SEQ ID NO: 5003; WAN024DO9_at; Start 49; Stop 73
aaaggaacctatcgagtagtcatta

SEQ ID NO: 165417 - DNA, 25 bp, Artificial
  probe
  misc_feature (1)..(25): SEQ ID NO: 5003; WAN024DO9_at; Start 52; Stop 76
ggaacctatcgagtagtcattaaaa

SEQ ID NO: 165418 - DNA, 25 bp, Artificial
  probe
  misc_feature (1)..(25): SEQ ID NO: 5003; WAN024DO9_at; Start 72; Stop 96
taaaactaaggatactgctggtcta

SEQ ID NO: 165419 - DNA, 25 bp, Artificial
  probe
  misc_feature (1)..(25): SEQ ID NO: 5003; WAN024DO9_at; Start 70; Stop 94
attaaaactaaggatactgctggtc

SEQ ID NO: 165420 - DNA, 25 bp, Artificial
  probe
  misc_feature (1)..(25): SEQ ID NO: 5003; WAN024DO9_at; Start 75; Stop 99
aactaaggatactgctggtctaact

SEQ ID NO: 165421 - DNA, 25 bp, Artificial
  probe
  misc_feature (1)..(25): SEQ ID NO: 5003; WAN024DO9_at; Start 54; Stop 78
aacctatcgagtagtcattaaaact

SEQ ID NO: 165422 - DNA, 25 bp, Artificial
  probe
  misc_feature (1)..(25): SEQ ID NO: 5003; WAN024DO9_at; Start 67; Stop 91
gtcattaaaactaaggatactgctg

SEQ ID NO: 165423 - DNA, 25 bp, Artificial
  probe
  misc_feature (1)..(25): SEQ ID NO: 5003; WAN024DO9_at; Start 58; Stop 82
tatcgagtagtcattaaaactaagg

SEQ ID NO: 165424 - DNA, 25 bp, Artificial
  probe
  misc_feature (1)..(25): SEQ ID NO: 5003; WAN024DO9_at; Start 60; Stop 84
tcgagtagtcattaaaactaaggat

SEQ ID NO: 165425 - DNA, 25 bp, Artificial
  probe
  misc_feature (1)..(25): SEQ ID NO: 5003; WAN024DO9_at; Start 73; Stop 97
aaaactaaggatactgctggtctaa

SEQ ID NO: 165426 - DNA, 25 bp, Artificial
  probe
  misc_feature (1)..(25): SEQ ID NO: 5003; WAN024DO9_at; Start 24; Stop 48
aaaactagatgactataacggttct

SEQ ID NO: 165427 - DNA, 25 bp, Artificial
  probe
  misc_feature (1)..(25): SEQ ID NO: 5003; WAN024DO9_at; Start 27; Stop 51
actagatgactataacggttctaaa

SEQ ID NO: 165428 - DNA, 25 bp, Artificial
  probe
  misc_feature (1)..(25): SEQ ID NO: 5003; WAN024DO9_at; Start 48; Stop 72
taaaggaacctatcgagtagtcatt

SEQ ID NO: 165429 - DNA, 25 bp, Artificial
  probe
  misc_feature (1)..(25): SEQ ID NO: 5003; WAN024DO9_at; Start 29; Stop 53
tagatgactataacggttctaaagg

SEQ ID NO: 165430 - DNA, 25 bp, Artificial
  probe
  misc_feature (1)..(25): SEQ ID NO: 5003; WAN024DO9_at; Start 51; Stop 75
aggaacctatcgagtagtcattaaa

SEQ ID NO: 165431 - DNA, 25 bp, Artificial
  probe
  misc_feature (1)..(25): SEQ ID NO: 5003; WAN024DO9_at; Start 65; Stop 89
tagtcattaaaactaaggatactgc

SEQ ID NO: 165432 - DNA, 25 bp, Artificial
  probe
  misc_feature (1)..(25): SEQ ID NO: 5412; WAN024DOA_at; Start 41; Stop 65
catatagtactgattttaaacagcg

SEQ ID NO: 165433 - DNA, 25 bp, Artificial
  probe
  misc_feature (1)..(25): SEQ ID NO: 5412; WAN024DOA_at; Start 27; Stop 51
taataaagctatggcatatagtact

SEQ ID NO: 165434 - DNA, 25 bp, Artificial
  probe
  misc_feature (1)..(25): SEQ ID NO: 5412; WAN024DOA_at; Start 90; Stop 114
gcacagccatgtcgaggcagccaag

SEQ ID NO: 165435 - DNA, 25 bp, Artificial
  probe
  misc_feature (1)..(25): SEQ ID NO: 5412; WAN024DOA_at; Start 128; Stop 152
gcgtcagaactctcttcacgtggga

SEQ ID NO: 165436 - DNA, 25 bp, Artificial
  probe
  misc_feature (1)..(25): SEQ ID NO: 5412; WAN024DOA_at; Start 79; Stop 103
atcaaagaggggcacagccatgtcg

SEQ ID NO: 165437 - DNA, 25 bp, Artificial
  probe
  misc_feature (1)..(25): SEQ ID NO: 5412; WAN024DOA_at; Start 335; Stop 359
tcactttaaaaaaagatgacgagct

SEQ ID NO: 165438 - DNA, 25 bp, Artificial
  probe
  misc_feature (1)..(25): SEQ ID NO: 5412; WAN024DOA_at; Start 209; Stop 233
gaaagattcctttagaggaattgaa

SEQ ID NO: 165439 - DNA, 25 bp, Artificial
  probe
  misc_feature (1)..(25): SEQ ID NO: 5412; WAN024DOA_at; Start 39; Stop 63
ggcatatagtactgattttaaacag

SEQ ID NO: 165440 - DNA, 25 bp, Artificial
  probe
  misc_feature (1)..(25): SEQ ID NO: 5412; WAN024DOA_at; Start 16; Stop 40
caagcatattataataaagctatgg

SEQ ID NO: 165441 - DNA, 25 bp, Artificial
  probe
  misc_feature (1)..(25): SEQ ID NO: 5412; WAN024DOA_at; Start 43; Stop 67
tatagtactgattttaaacagcgag

SEQ ID NO: 165442 - DNA, 25 bp, Artificial
  probe
  misc_feature (1)..(25): SEQ ID NO: 5412; WAN024DOA_at; Start 121; Stop 145
ggtgttggcgtcagaactctcttca

SEQ ID NO: 165443 - DNA, 25 bp, Artificial
  probe
  misc_feature (1)..(25): SEQ ID NO: 5412; WAN024DOA_at; Start 127; Stop 151
ggcgtcagaactctcttcacgtggg

SEQ ID NO: 165444 - DNA, 25 bp, Artificial
  probe
  misc_feature (1)..(25): SEQ ID NO: 5412; WAN024DOA_at; Start 207; Stop 231
ccgaaagattcctttagaggaattg

SEQ ID NO: 165445 - DNA, 25 bp, Artificial
  probe
  misc_feature (1)..(25): SEQ ID NO: 5412; WAN024DOA_at; Start 345; Stop 369
aaaagatgacgagcttctaactaat

SEQ ID NO: 165446 - DNA, 25 bp, Artificial
  probe
  misc_feature (1)..(25): SEQ ID NO: 5412; WAN024DOA_at; Start 343; Stop 367
aaaaaagatgacgagcttctaacta

SEQ ID NO: 165447 - DNA, 25 bp, Artificial
  probe
  misc_feature (1)..(25): SEQ ID NO: 5412; WAN024DOA_at; Start 47; Stop 71
gtactgattttaaacagcgagcatt

SEQ ID NO: 165448 - DNA, 25 bp, Artificial
  probe
  misc_feature (1)..(25): SEQ ID NO: 5412; WAN024DOA_at; Start 88; Stop 112
gggcacagccatgtcgaggcagcca

SEQ ID NO: 165449 - DNA, 25 bp, Artificial
  probe
  misc_feature (1)..(25): SEQ ID NO: 5412; WAN024DOA_at; Start 51; Stop 75
tgattttaaacagcgagcattagat

SEQ ID NO: 165450 - DNA, 25 bp, Artificial
  probe
  misc_feature (1)..(25): SEQ ID NO: 5412; WAN024DOA_at; Start 134; Stop 158
gaactctcttcacgtgggaaaagaa

SEQ ID NO: 165451 - DNA, 25 bp, Artificial
  probe
  misc_feature (1)..(25): SEQ ID NO: 5412; WAN024DOA_at; Start 137; Stop 161
ctctcttcacgtgggaaaagaaaga

SEQ ID NO: 165452 - DNA, 25 bp, Artificial
  probe
  misc_feature (1)..(25): SEQ ID NO: 5412; WAN024DOA_at; Start 124; Stop 148
gttggcgtcagaactctcttcacgt

SEQ ID NO: 165453 - DNA, 25 bp, Artificial
  probe
  misc_feature (1)..(25): SEQ ID NO: 5412; WAN024DOA_at; Start 123; Stop 147
tgttggcgtcagaactctcttcacg

SEQ ID NO: 165454 - DNA, 25 bp, Artificial
  probe
  misc_feature (1)..(25): SEQ ID NO: 5412; WAN024DOA_at; Start 3; Stop 27
gcttagttttaaacaagcatattat

SEQ ID NO: 165455 - DNA, 25 bp, Artificial
  probe
  misc_feature (1)..(25): SEQ ID NO: 5412; WAN024DOA_at; Start 34; Stop 58
gctatggcatatagtactgatttta

SEQ ID NO: 165456 - DNA, 25 bp, Artificial
  probe
  misc_feature (1)..(25): SEQ ID NO: 5412; WAN024DOA_at; Start 131; Stop 155
tcagaactctcttcacgtgggaaaa

SEQ ID NO: 165457 - DNA, 25 bp, Artificial
  probe
  misc_feature (1)..(25): SEQ ID NO: 5412; WAN024DOA_at; Start 45; Stop 69
tagtactgattttaaacagcgagca

SEQ ID NO: 165458 - DNA, 25 bp, Artificial
  probe
  misc_feature (1)..(25): SEQ ID NO: 5412; WAN024DOA_at; Start 130; Stop 154
gtcagaactctcttcacgtgggaaa

SEQ ID NO: 165459 - DNA, 25 bp, Artificial
  probe
  misc_feature (1)..(25): SEQ ID NO: 5412; WAN024DOA_at; Start 132; Stop 156
cagaactctcttcacgtgggaaaag

SEQ ID NO: 165460 - DNA, 25 bp, Artificial
  probe
  misc_feature (1)..(25): SEQ ID NO: 5412; WAN024DOA_at; Start 30; Stop 54
taaagctatggcatatagtactgat

SEQ ID NO: 165461 - DNA, 25 bp, Artificial
  probe
  misc_feature (1)..(25): SEQ ID NO: 5412; WAN024DOA_at; Start 49; Stop 73
actgattttaaacagcgagcattag

SEQ ID NO: 165462 - DNA, 25 bp, Artificial
  probe
  misc_feature (1)..(25): SEQ ID NO: 5412; WAN024DOA_at; Start 129; Stop 153
cgtcagaactctcttcacgtgggaa

SEQ ID NO: 165463 - DNA, 25 bp, Artificial
  probe
  misc_feature (1)..(25): SEQ ID NO: 5412; WAN024DOA_at; Start 126; Stop 150
tggcgtcagaactctcttcacgtgg

SEQ ID NO: 165464 - DNA, 25 bp, Artificial
  probe
  misc_feature (1)..(25): SEQ ID NO: 5412; WAN024DOA_at; Start 120; Stop 144
tggtgttggcgtcagaactctcttc

SEQ ID NO: 165465 - DNA, 25 bp, Artificial
  probe
  misc_feature (1)..(25): SEQ ID NO: 5412; WAN024DOA_at; Start 118; Stop 142
tttggtgttggcgtcagaactctct

SEQ ID NO: 165466 - DNA, 25 bp, Artificial
  probe
  misc_feature (1)..(25): SEQ ID NO: 6873; WAN024DOB_at; Start 8; Stop 32
tcttcaagcgagcttgggatagtgg

SEQ ID NO: 165467 - DNA, 25 bp, Artificial
  probe
  misc_feature (1)..(25): SEQ ID NO: 6873; WAN024DOB_at; Start 1; Stop 25
atggcgttcttcaagcgagcttggg

SEQ ID NO: 165468 - DNA, 25 bp, Artificial
  probe
  misc_feature (1)..(25): SEQ ID NO: 6873; WAN024DOB_at; Start 29; Stop 53
gtgggagccaagtagggcaaaataa

SEQ ID NO: 165469 - DNA, 25 bp, Artificial
  probe
  misc_feature (1)..(25): SEQ ID NO: 6873; WAN024DOB_at; Start 47; Stop 71
aaaataaagggctggcgctttctgt

SEQ ID NO: 165470 - DNA, 25 bp, Artificial
  probe
  misc_feature (1)..(25): SEQ ID NO: 6873; WAN024DOB_at; Start 53; Stop 77
aagggctggcgctttctgtagtatt

SEQ ID NO: 165471 - DNA, 25 bp, Artificial
  probe
  misc_feature (1)..(25): SEQ ID NO: 6873; WAN024DOB_at; Start 56; Stop 80
ggctggcgctttctgtagtattttc

SEQ ID NO: 165472 - DNA, 25 bp, Artificial
  probe
  misc_feature (1)..(25): SEQ ID NO: 6873; WAN024DOB_at; Start 42; Stop 66
agggcaaaataaagggctggcgctt

SEQ ID NO: 165473 - DNA, 25 bp, Artificial
  probe
  misc_feature (1)..(25): SEQ ID NO: 6873; WAN024DOB_at; Start 3; Stop 27
ggcgttcttcaagcgagcttgggat

SEQ ID NO: 165474 - DNA, 25 bp, Artificial
  probe
  misc_feature (1)..(25): SEQ ID NO: 6873; WAN024DOB_at; Start 63; Stop 87
gctttctgtagtattttcaaaaaca

SEQ ID NO: 165475 - DNA, 25 bp, Artificial
  probe
  misc_feature (1)..(25): SEQ ID NO: 6873; WAN024DOB_at; Start 30; Stop 54
tgggagccaagtagggcaaaataaa

SEQ ID NO: 165476 - DNA, 25 bp, Artificial
  probe
  misc_feature (1)..(25): SEQ ID NO: 6873; WAN024DOB_at; Start 52; Stop 76
aaagggctggcgctttctgtagtat

SEQ ID NO: 165477 - DNA, 25 bp, Artificial
  probe
  misc_feature (1)..(25): SEQ ID NO: 6873; WAN024DOB_at; Start 69; Stop 93
tgtagtattttcaaaaacaatgaag

SEQ ID NO: 165478 - DNA, 25 bp, Artificial
  probe
  misc_feature (1)..(25): SEQ ID NO: 6873; WAN024DOB_at; Start 57; Stop 81
gctggcgctttctgtagtattttca

SEQ ID NO: 165479 - DNA, 25 bp, Artificial
  probe
  misc_feature (1)..(25): SEQ ID NO: 6873; WAN024DOB_at; Start 58; Stop 82
ctggcgctttctgtagtattttcaa

SEQ ID NO: 165480 - DNA, 25 bp, Artificial
  probe
  misc_feature (1)..(25): SEQ ID NO: 6873; WAN024DOB_at; Start 27; Stop 51
tagtgggagccaagtagggcaaaat

SEQ ID NO: 165481 - DNA, 25 bp, Artificial
  probe
  misc_feature (1)..(25): SEQ ID NO: 6873; WAN024DOB_at; Start 15; Stop 39
gcgagcttgggatagtgggagccaa

SEQ ID NO: 165482 - DNA, 25 bp, Artificial
  probe
  misc_feature (1)..(25): SEQ ID NO: 6873; WAN024DOB_at; Start 61; Stop 85
gcgctttctgtagtattttcaaaaa

SEQ ID NO: 165483 - DNA, 25 bp, Artificial
  probe
  misc_feature (1)..(25): SEQ ID NO: 6873; WAN024DOB_at; Start 67; Stop 91
tctgtagtattttcaaaaacaatga

SEQ ID NO: 165484 - DNA, 25 bp, Artificial
  probe
  misc_feature (1)..(25): SEQ ID NO: 6873; WAN024DOB_at; Start 54; Stop 78
agggctggcgctttctgtagtattt

SEQ ID NO: 165485 - DNA, 25 bp, Artificial
  probe
  misc_feature (1)..(25): SEQ ID NO: 6873; WAN024DOB_at; Start 36; Stop 60
ccaagtagggcaaaataaagggctg

SEQ ID NO: 165486 - DNA, 25 bp, Artificial
  probe
  misc_feature (1)..(25): SEQ ID NO: 6873; WAN024DOB_at; Start 5; Stop 29
cgttcttcaagcgagcttgggatag

SEQ ID NO: 165487 - DNA, 25 bp, Artificial
  probe
  misc_feature (1)..(25): SEQ ID NO: 6873; WAN024DOB_at; Start 41; Stop 65
tagggcaaaataaagggctggcgct

SEQ ID NO: 165488 - DNA, 25 bp, Artificial
  probe
  misc_feature (1)..(25): SEQ ID NO: 6873; WAN024DOB_at; Start 13; Stop 37
aagcgagcttgggatagtgggagcc

SEQ ID NO: 165489 - DNA, 25 bp, Artificial
  probe
  misc_feature (1)..(25): SEQ ID NO: 6873; WAN024DOB_at; Start 60; Stop 84
ggcgctttctgtagtattttcaaaa

SEQ ID NO: 165490 - DNA, 25 bp, Artificial
  probe
  misc_feature (1)..(25): SEQ ID NO: 6873; WAN024DOB_at; Start 59; Stop 83
tggcgctttctgtagtattttcaaa

SEQ ID NO: 165491 - DNA, 25 bp, Artificial
  probe
  misc_feature (1)..(25): SEQ ID NO: 6873; WAN024DOB_at; Start 55; Stop 79
gggctggcgctttctgtagtatttt

SEQ ID NO: 165492 - DNA, 25 bp, Artificial
  probe
  misc_feature (1)..(25): SEQ ID NO: 6873; WAN024DOB_at; Start 2; Stop 26
tggcgttcttcaagcgagcttggga

SEQ ID NO: 165493 - DNA, 25 bp, Artificial
  probe
  misc_feature (1)..(25): SEQ ID NO: 6873; WAN024DOB_at; Start 48; Stop 72
aaataaagggctggcgctttctgta

SEQ ID NO: 165494 - DNA, 25 bp, Artificial
  probe
  misc_feature (1)..(25): SEQ ID NO: 6873; WAN024DOB_at; Start 28; Stop 52
agtgggagccaagtagggcaaaata

SEQ ID NO: 165495 - DNA, 25 bp, Artificial
  probe
  misc_feature (1)..(25): SEQ ID NO: 6873; WAN024DOB_at; Start 7; Stop 31
ttcttcaagcgagcttgggatagtg

SEQ ID NO: 165496 - DNA, 25 bp, Artificial
  probe
  misc_feature (1)..(25): SEQ ID NO: 6873; WAN024DOB_at; Start 11; Stop 35
tcaagcgagcttgggatagtgggag

SEQ ID NO: 165497 - DNA, 25 bp, Artificial
  probe
  misc_feature (1)..(25): SEQ ID NO: 6873; WAN024DOB_at; Start 37; Stop 61
caagtagggcaaaataaagggctgg

SEQ ID NO: 165498 - DNA, 25 bp, Artificial
  probe
  misc_feature (1)..(25): SEQ ID NO: 6873; WAN024DOB_at; Start 26; Stop 50
atagtgggagccaagtagggcaaaa

SEQ ID NO: 165499 - DNA, 25 bp, Artificial
  probe
  misc_feature (1)..(25): SEQ ID NO: 6873; WAN024DOB_at; Start 6; Stop 30
gttcttcaagcgagcttgggatagt

SEQ ID NO: 165500 - DNA, 25 bp, Artificial
  probe
  misc_feature (1)..(25): SEQ ID NO: 5347; WAN024DOC_at; Start 47; Stop 71
ataagactttctttcctgctgacta

SEQ ID NO: 165501 - DNA, 25 bp, Artificial
  probe
  misc_feature (1)..(25): SEQ ID NO: 5347; WAN024DOC_at; Start 20; Stop 44
ctatcccaagctcgcttgaagaacg

SEQ ID NO: 165502 - DNA, 25 bp, Artificial
  probe
  misc_feature (1)..(25): SEQ ID NO: 5347; WAN024DOC_at; Start 2; Stop 26
tgccctacttggctcccactatccc

SEQ ID NO: 165503 - DNA, 25 bp, Artificial
  probe
  misc_feature (1)..(25): SEQ ID NO: 5347; WAN024DOC_at; Start 24; Stop 48
cccaagctcgcttgaagaacgccat

SEQ ID NO: 165504 - DNA, 25 bp, Artificial
  probe
  misc_feature (1)..(25): SEQ ID NO: 5347; WAN024DOC_at; Start 58; Stop 82
tttcctgctgactattatatcaaaa

SEQ ID NO: 165505 - DNA, 25 bp, Artificial
  probe
  misc_feature (1)..(25): SEQ ID NO: 5347; WAN024DOC_at; Start 30; Stop 54
ctcgcttgaagaacgccataagact

SEQ ID NO: 165506 - DNA, 25 bp, Artificial
  probe
  misc_feature (1)..(25): SEQ ID NO: 5347; WAN024DOC_at; Start 18; Stop 42
cactatcccaagctcgcttgaagaa

SEQ ID NO: 165507 - DNA, 25 bp, Artificial
  probe
  misc_feature (1)..(25): SEQ ID NO: 5347; WAN024DOC_at; Start 49; Stop 73
aagactttctttcctgctgactatt

SEQ ID NO: 165508 - DNA, 25 bp, Artificial
  probe
  misc_feature (1)..(25): SEQ ID NO: 5347; WAN024DOC_at; Start 22; Stop 46
atcccaagctcgcttgaagaacgcc

SEQ ID NO: 165509 - DNA, 25 bp, Artificial
  probe
  misc_feature (1)..(25): SEQ ID NO: 5347; WAN024DOC_at; Start 44; Stop 68
gccataagactttctttcctgctga

SEQ ID NO: 165510 - DNA, 25 bp, Artificial
  probe
  misc_feature (1)..(25): SEQ ID NO: 5347; WAN024DOC_at; Start 29; Stop 53
gctcgcttgaagaacgccataagac

SEQ ID NO: 165511 - DNA, 25 bp, Artificial
  probe
  misc_feature (1)..(25): SEQ ID NO: 5347; WAN024DOC_at; Start 54; Stop 78
tttctttcctgctgactattatatc

SEQ ID NO: 165512 - DNA, 25 bp, Artificial
  probe
  misc_feature (1)..(25): SEQ ID NO: 5347; WAN024DOC_at; Start 23; Stop 47
tcccaagctcgcttgaagaacgcca

SEQ ID NO: 165513 - DNA, 25 bp, Artificial
  probe
  misc_feature (1)..(25): SEQ ID NO: 5347; WAN024DOC_at; Start 46; Stop 70
cataagactttctttcctgctgact

SEQ ID NO: 165514 - DNA, 25 bp, Artificial
  probe
  misc_feature (1)..(25): SEQ ID NO: 5347; WAN024DOC_at; Start 27; Stop 51
aagctcgcttgaagaacgccataag

SEQ ID NO: 165515 - DNA, 25 bp, Artificial
  probe
  misc_feature (1)..(25): SEQ ID NO: 5347; WAN024DOC_at; Start 34; Stop 58
cttgaagaacgccataagactttct

SEQ ID NO: 165516 - DNA, 25 bp, Artificial
  probe
  misc_feature (1)..(25): SEQ ID NO: 5347; WAN024DOC_at; Start 19; Stop 43
actatcccaagctcgcttgaagaac

SEQ ID NO: 165517 - DNA, 25 bp, Artificial
  probe
  misc_feature (1)..(25): SEQ ID NO: 5347; WAN024DOC_at; Start 57; Stop 81
ctttcctgctgactattatatcaaa

SEQ ID NO: 165518 - DNA, 25 bp, Artificial
  probe
  misc_feature (1)..(25): SEQ ID NO: 5347; WAN024DOC_at; Start 50; Stop 74
agactttctttcctgctgactatta

SEQ ID NO: 165519 - DNA, 25 bp, Artificial
  probe
  misc_feature (1)..(25): SEQ ID NO: 5347; WAN024DOC_at; Start 43; Stop 67
cgccataagactttctttcctgctg

SEQ ID NO: 165520 - DNA, 25 bp, Artificial
  probe
  misc_feature (1)..(25): SEQ ID NO: 5347; WAN024DOC_at; Start 52; Stop 76
actttctttcctgctgactattata

SEQ ID NO: 165521 - DNA, 25 bp, Artificial
  probe
  misc_feature (1)..(25): SEQ ID NO: 5347; WAN024DOC_at; Start 25; Stop 49
ccaagctcgcttgaagaacgccata

SEQ ID NO: 165522 - DNA, 25 bp, Artificial
  probe
  misc_feature (1)..(25): SEQ ID NO: 5347; WAN024DOC_at; Start 41; Stop 65
aacgccataagactttctttcctgc

SEQ ID NO: 165523 - DNA, 25 bp, Artificial
  probe
  misc_feature (1)..(25): SEQ ID NO: 5347; WAN024DOC_at; Start 51; Stop 75
gactttctttcctgctgactattat

SEQ ID NO: 165524 - DNA, 25 bp, Artificial
  probe
  misc_feature (1)..(25): SEQ ID NO: 5347; WAN024DOC_at; Start 45; Stop 69
ccataagactttctttcctgctgac

SEQ ID NO: 165525 - DNA, 25 bp, Artificial
  probe
  misc_feature (1)..(25): SEQ ID NO: 5347; WAN024DOC_at; Start 31; Stop 55
tcgcttgaagaacgccataagactt

SEQ ID NO: 165526 - DNA, 25 bp, Artificial
  probe
  misc_feature (1)..(25): SEQ ID NO: 5347; WAN024DOC_at; Start 36; Stop 60
tgaagaacgccataagactttcttt

SEQ ID NO: 165527 - DNA, 25 bp, Artificial
  probe
  misc_feature (1)..(25): SEQ ID NO: 5347; WAN024DOC_at; Start 35; Stop 59
ttgaagaacgccataagactttctt

SEQ ID NO: 165528 - DNA, 25 bp, Artificial
  probe
  misc_feature (1)..(25): SEQ ID NO: 5347; WAN024DOC_at; Start 26; Stop 50
caagctcgcttgaagaacgccataa

SEQ ID NO: 165529 - DNA, 25 bp, Artificial
  probe
  misc_feature (1)..(25): SEQ ID NO: 5347; WAN024DOC_at; Start 28; Stop 52
agctcgcttgaagaacgccataaga

SEQ ID NO: 165530 - DNA, 25 bp, Artificial
  probe
  misc_feature (1)..(25): SEQ ID NO: 5347; WAN024DOC_at; Start 37; Stop 61
gaagaacgccataagactttctttc

SEQ ID NO: 165531 - DNA, 25 bp, Artificial
  probe
  misc_feature (1)..(25): SEQ ID NO: 5347; WAN024DOC_at; Start 56; Stop 80
tctttcctgctgactattatatcaa

SEQ ID NO: 165532 - DNA, 25 bp, Artificial
  probe
  misc_feature (1)..(25): SEQ ID NO: 5347; WAN024DOC_at; Start 48; Stop 72
taagactttctttcctgctgactat

SEQ ID NO: 165533 - DNA, 25 bp, Artificial
  probe
  misc_feature (1)..(25): SEQ ID NO: 5347; WAN024DOC_at; Start 40; Stop 64
gaacgccataagactttctttcctg

SEQ ID NO: 165534 - DNA, 25 bp, Artificial
  probe
  misc_feature (1)..(25): SEQ ID NO: 5382; WAN024DOD_at; Start 25; Stop 49
tactgttatgtggggatttttgaaa

SEQ ID NO: 165535 - DNA, 25 bp, Artificial
  probe
  misc_feature (1)..(25): SEQ ID NO: 5382; WAN024DOD_at; Start 55; Stop 79
ggttcaaaaatcagtcagctaaatc

SEQ ID NO: 165536 - DNA, 25 bp, Artificial
  probe
  misc_feature (1)..(25): SEQ ID NO: 5382; WAN024DOD_at; Start 54; Stop 78
aggttcaaaaatcagtcagctaaat

SEQ ID NO: 165537 - DNA, 25 bp, Artificial
  probe
  misc_feature (1)..(25): SEQ ID NO: 5382; WAN024DOD_at; Start 59; Stop 83
caaaaatcagtcagctaaatccact

SEQ ID NO: 165538 - DNA, 25 bp, Artificial
  probe
  misc_feature (1)..(25): SEQ ID NO: 5382; WAN024DOD_at; Start 53; Stop 77
taggttcaaaaatcagtcagctaaa

SEQ ID NO: 165539 - DNA, 25 bp, Artificial
  probe
  misc_feature (1)..(25): SEQ ID NO: 5382; WAN024DOD_at; Start 61; Stop 85
aaaatcagtcagctaaatccacttt

SEQ ID NO: 165540 - DNA, 25 bp, Artificial
  probe
  misc_feature (1)..(25): SEQ ID NO: 5382; WAN024DOD_at; Start 62; Stop 86
aaatcagtcagctaaatccactttt

SEQ ID NO: 165541 - DNA, 25 bp, Artificial
  probe
  misc_feature (1)..(25): SEQ ID NO: 5382; WAN024DOD_at; Start 52; Stop 76
ttaggttcaaaaatcagtcagctaa

SEQ ID NO: 165542 - DNA, 25 bp, Artificial
  probe
  misc_feature (1)..(25): SEQ ID NO: 5382; WAN024DOD_at; Start 48; Stop 72
aaccttaggttcaaaaatcagtcag

SEQ ID NO: 165543 - DNA, 25 bp, Artificial
  probe
  misc_feature (1)..(25): SEQ ID NO: 5382; WAN024DOD_at; Start 57; Stop 81
ttcaaaaatcagtcagctaaatcca

SEQ ID NO: 165544 - DNA, 25 bp, Artificial
  probe
  misc_feature (1)..(25): SEQ ID NO: 5382; WAN024DOD_at; Start 60; Stop 84
aaaaatcagtcagctaaatccactt

SEQ ID NO: 165545 - DNA, 25 bp, Artificial
  probe
  misc_feature (1)..(25): SEQ ID NO: 5382; WAN024DOD_at; Start 49; Stop 73
accttaggttcaaaaatcagtcagc

SEQ ID NO: 165546 - DNA, 25 bp, Artificial
  probe
  misc_feature (1)..(25): SEQ ID NO: 5382; WAN024DOD_at; Start 63; Stop 87
aatcagtcagctaaatccactttta

SEQ ID NO: 165547 - DNA, 25 bp, Artificial
  probe
  misc_feature (1)..(25): SEQ ID NO: 5382; WAN024DOD_at; Start 51; Stop 75
cttaggttcaaaaatcagtcagcta

SEQ ID NO: 165548 - DNA, 25 bp, Artificial
  probe
  misc_feature (1)..(25): SEQ ID NO: 5382; WAN024DOD_at; Start 58; Stop 82
tcaaaaatcagtcagctaaatccac

SEQ ID NO: 165549 - DNA, 25 bp, Artificial
  probe
  misc_feature (1)..(25): SEQ ID NO: 5382; WAN024DOD_at; Start 50; Stop 74
ccttaggttcaaaaatcagtcagct

SEQ ID NO: 165550 - DNA, 25 bp, Artificial
  probe
  misc_feature (1)..(25): SEQ ID NO: 5382; WAN024DOD_at; Start 56; Stop 80
gttcaaaaatcagtcagctaaatcc

SEQ ID NO: 165551 - DNA, 25 bp, Artificial
  probe
  misc_feature (1)..(25): SEQ ID NO: 3472; WAN024DOE_at; Start 8; Stop 32
caagcctgatgaattttatgagcat

SEQ ID NO: 165552 - DNA, 25 bp, Artificial
  probe
  misc_feature (1)..(25): SEQ ID NO: 3472; WAN024DOE_at; Start 5; Stop 29
tttcaagcctgatgaattttatgag

SEQ ID NO: 165553 - DNA, 25 bp, Artificial
  probe
  misc_feature (1)..(25): SEQ ID NO: 3472; WAN024DOE_at; Start 7; Stop 31
tcaagcctgatgaattttatgagca

SEQ ID NO: 165554 - DNA, 25 bp, Artificial
  probe
  misc_feature (1)..(25): SEQ ID NO: 3472; WAN024DOE_at; Start 93; Stop 117
catgaaaatgaaatgtaagggcttc

SEQ ID NO: 165555 - DNA, 25 bp, Artificial
  probe
  misc_feature (1)..(25): SEQ ID NO: 3472; WAN024DOE_at; Start 28; Stop 52
agcatatttcttgactttttccaaa

SEQ ID NO: 165556 - DNA, 25 bp, Artificial
  probe
  misc_feature (1)..(25): SEQ ID NO: 3472; WAN024DOE_at; Start 3; Stop 27
gttttcaagcctgatgaattttatg

SEQ ID NO: 165557 - DNA, 25 bp, Artificial
  probe
  misc_feature (1)..(25): SEQ ID NO: 3472; WAN024DOE_at; Start 96; Stop 120
gaaaatgaaatgtaagggcttcaat

SEQ ID NO: 165558 - DNA, 25 bp, Artificial
  probe
  misc_feature (1)..(25): SEQ ID NO: 3472; WAN024DOE_at; Start 80; Stop 104
ggtattataataacatgaaaatgaa

SEQ ID NO: 165559 - DNA, 25 bp, Artificial
  probe
  misc_feature (1)..(25): SEQ ID NO: 3472; WAN024DOE_at; Start 69; Stop 93
tctaactttatggtattataataac

SEQ ID NO: 165560 - DNA, 25 bp, Artificial
  probe
  misc_feature (1)..(25): SEQ ID NO: 3472; WAN024DOE_at; Start 26; Stop 50
tgagcatatttcttgactttttcca

SEQ ID NO: 165561 - DNA, 25 bp, Artificial
  probe
  misc_feature (1)..(25): SEQ ID NO: 3472; WAN024DOE_at; Start 6; Stop 30
ttcaagcctgatgaattttatgagc

SEQ ID NO: 165562 - DNA, 25 bp, Artificial
  probe
  misc_feature (1)..(25): SEQ ID NO: 3472; WAN024DOE_at; Start 142; Stop 166
caacttattttctataagagaaagg

SEQ ID NO: 165563 - DNA, 25 bp, Artificial
  probe
  misc_feature (1)..(25): SEQ ID NO: 3472; WAN024DOE_at; Start 9; Stop 33
aagcctgatgaattttatgagcata

SEQ ID NO: 165564 - DNA, 25 bp, Artificial
  probe
  misc_feature (1)..(25): SEQ ID NO: 3472; WAN024DOE_at; Start 144; Stop 168
acttattttctataagagaaaggag

SEQ ID NO: 165565 - DNA, 25 bp, Artificial
  probe
  misc_feature (1)..(25): SEQ ID NO: 3472; WAN024DOE_at; Start 122; Stop 146
tagatgattatttgatattacaact

SEQ ID NO: 165566 - DNA, 25 bp, Artificial
  probe
  misc_feature (1)..(25): SEQ ID NO: 3472; WAN024DOE_at; Start 56; Stop 80
tgtttgtgaaaattctaactttatg

SEQ ID NO: 165567 - DNA, 25 bp, Artificial
  probe
  misc_feature (1)..(25): SEQ ID NO: 3472; WAN024DOE_at; Start 29; Stop 53
gcatatttcttgactttttccaaat

SEQ ID NO: 165568 - DNA, 25 bp, Artificial
  probe
  misc_feature (1)..(25): SEQ ID NO: 3472; WAN024DOE_at; Start 11; Stop 35
gcctgatgaattttatgagcatatt

SEQ ID NO: 165569 - DNA, 25 bp, Artificial
  probe
  misc_feature (1)..(25): SEQ ID NO: 3472; WAN024DOE_at; Start 12; Stop 36
cctgatgaattttatgagcatattt

SEQ ID NO: 165570 - DNA, 25 bp, Artificial
  probe
  misc_feature (1)..(25): SEQ ID NO: 3472; WAN024DOE_at; Start 62; Stop 86
tgaaaattctaactttatggtatta

SEQ ID NO: 165571 - DNA, 25 bp, Artificial
  probe
  misc_feature (1)..(25): SEQ ID NO: 3472; WAN024DOE_at; Start 24; Stop 48
tatgagcatatttcttgactttttc

SEQ ID NO: 165572 - DNA, 25 bp, Artificial
  probe
  misc_feature (1)..(25): SEQ ID NO: 3472; WAN024DOE_at; Start 106; Stop 130
tgtaagggcttcaatttagatgatt

SEQ ID NO: 165573 - DNA, 25 bp, Artificial
  probe
  misc_feature (1)..(25): SEQ ID NO: 3472; WAN024DOE_at; Start 152; Stop 176
tctataagagaaaggagttggtagc

SEQ ID NO: 165574 - DNA, 25 bp, Artificial
  probe
  misc_feature (1)..(25): SEQ ID NO: 3472; WAN024DOE_at; Start 27; Stop 51
gagcatatttcttgactttttccaa

SEQ ID NO: 165575 - DNA, 25 bp, Artificial
  probe
  misc_feature (1)..(25): SEQ ID NO: 3472; WAN024DOE_at; Start 90; Stop 114
taacatgaaaatgaaatgtaagggc

SEQ ID NO: 165576 - DNA, 25 bp, Artificial
  probe
  misc_feature (1)..(25): SEQ ID NO: 3472; WAN024DOE_at; Start 124; Stop 148
gatgattatttgatattacaactta

SEQ ID NO: 165577 - DNA, 25 bp, Artificial
  probe
  misc_feature (1)..(25): SEQ ID NO: 3472; WAN024DOE_at; Start 60; Stop 84
tgtgaaaattctaactttatggtat

SEQ ID NO: 165578 - DNA, 25 bp, Artificial
  probe
  misc_feature (1)..(25): SEQ ID NO: 3472; WAN024DOE_at; Start 95; Stop 119
tgaaaatgaaatgtaagggcttcaa

SEQ ID NO: 165579 - DNA, 25 bp, Artificial
  probe
  misc_feature (1)..(25): SEQ ID NO: 3472; WAN024DOE_at; Start 99; Stop 123
aatgaaatgtaagggcttcaattta

SEQ ID NO: 165580 - DNA, 25 bp, Artificial
  probe
  misc_feature (1)..(25): SEQ ID NO: 3472; WAN024DOE_at; Start 104; Stop 128
aatgtaagggcttcaatttagatga

SEQ ID NO: 165581 - DNA, 25 bp, Artificial
  probe
  misc_feature (1)..(25): SEQ ID NO: 3472; WAN024DOE_at; Start 108; Stop 132
taagggcttcaatttagatgattat

SEQ ID NO: 165582 - DNA, 25 bp, Artificial
  probe
  misc_feature (1)..(25): SEQ ID NO: 3472; WAN024DOE_at; Start 18; Stop 42
gaattttatgagcatatttcttgac

SEQ ID NO: 165583 - DNA, 25 bp, Artificial
  probe
  misc_feature (1)..(25): SEQ ID NO: 3472; WAN024DOE_at; Start 111; Stop 135
gggcttcaatttagatgattatttg

SEQ ID NO: 165584 - DNA, 25 bp, Artificial
  probe
  misc_feature (1)..(25): SEQ ID NO: 3472; WAN024DOE_at; Start 153; Stop 177
ctataagagaaaggagttggtagct

SEQ ID NO: 165585 - DNA, 25 bp, Artificial
  probe
  misc_feature (1)..(25): SEQ ID NO: 7314; WAN024DOF_at; Start 138; Stop 162
caacaagaccaagcccattgataaa

SEQ ID NO: 165586 - DNA, 25 bp, Artificial
  probe
  misc_feature (1)..(25): SEQ ID NO: 7314; WAN024DOF_at; Start 177; Stop 201
gagtatcgccacaaatcccttattg

SEQ ID NO: 165587 - DNA, 25 bp, Artificial
  probe
  misc_feature (1)..(25): SEQ ID NO: 7314; WAN024DOF_at; Start 131; Stop 155
tttcaaacaacaagaccaagcccat

SEQ ID NO: 165588 - DNA, 25 bp, Artificial
  probe
  misc_feature (1)..(25): SEQ ID NO: 7314; WAN024DOF_at; Start 53; Stop 77
tactcctgagacttttgcttagtcc

SEQ ID NO: 165589 - DNA, 25 bp, Artificial
  probe
  misc_feature (1)..(25): SEQ ID NO: 7314; WAN024DOF_at; Start 31; Stop 55
tctggcagttttttcctcttcctac

SEQ ID NO: 165590 - DNA, 25 bp, Artificial
  probe
  misc_feature (1)..(25): SEQ ID NO: 7314; WAN024DOF_at; Start 189; Stop 213
aaatcccttattgctccacttgcga

SEQ ID NO: 165591 - DNA, 25 bp, Artificial
  probe
  misc_feature (1)..(25): SEQ ID NO: 7314; WAN024DOF_at; Start 1; Stop 25
gtggtagagcaaatccccgtgggcc

SEQ ID NO: 165592 - DNA, 25 bp, Artificial
  probe
  misc_feature (1)..(25): SEQ ID NO: 7314; WAN024DOF_at; Start 150; Stop 174
gcccattgataaaccaactgctagc

SEQ ID NO: 165593 - DNA, 25 bp, Artificial
  probe
  misc_feature (1)..(25): SEQ ID NO: 7314; WAN024DOF_at; Start 164; Stop 188
caactgctagcaagagtatcgccac

SEQ ID NO: 165594 - DNA, 25 bp, Artificial
  probe
  misc_feature (1)..(25): SEQ ID NO: 7314; WAN024DOF_at; Start 24; Stop 48
ccataattctggcagttttttcctc

SEQ ID NO: 165595 - DNA, 25 bp, Artificial
  probe
  misc_feature (1)..(25): SEQ ID NO: 7314; WAN024DOF_at; Start 14; Stop 38
tccccgtgggccataattctggcag

SEQ ID NO: 165596 - DNA, 25 bp, Artificial
  probe
  misc_feature (1)..(25): SEQ ID NO: 7314; WAN024DOF_at; Start 171; Stop 195
tagcaagagtatcgccacaaatccc

SEQ ID NO: 165597 - DNA, 25 bp, Artificial
  probe
  misc_feature (1)..(25): SEQ ID NO: 7314; WAN024DOF_at; Start 116; Stop 140
ggattccttggaagctttcaaacaa

SEQ ID NO: 165598 - DNA, 25 bp, Artificial
  probe
  misc_feature (1)..(25): SEQ ID NO: 7314; WAN024DOF_at; Start 144; Stop 168
gaccaagcccattgataaaccaact

SEQ ID NO: 165599 - DNA, 25 bp, Artificial
  probe
  misc_feature (1)..(25): SEQ ID NO: 7314; WAN024DOF_at; Start 161; Stop 185
aaccaactgctagcaagagtatcgc

SEQ ID NO: 165600 - DNA, 25 bp, Artificial
  probe
  misc_feature (1)..(25): SEQ ID NO: 7314; WAN024DOF_at; Start 62; Stop 86
gacttttgcttagtcccctcttgag

SEQ ID NO: 165601 - DNA, 25 bp, Artificial
  probe
  misc_feature (1)..(25): SEQ ID NO: 7314; WAN024DOF_at; Start 56; Stop 80
tcctgagacttttgcttagtcccct

SEQ ID NO: 165602 - DNA, 25 bp, Artificial
  probe
  misc_feature (1)..(25): SEQ ID NO: 7314; WAN024DOF_at; Start 156; Stop 180
tgataaaccaactgctagcaagagt

SEQ ID NO: 165603 - DNA, 25 bp, Artificial
  probe
  misc_feature (1)..(25): SEQ ID NO: 7314; WAN024DOF_at; Start 9; Stop 33
gcaaatccccgtgggccataattct

SEQ ID NO: 165604 - DNA, 25 bp, Artificial
  probe
  misc_feature (1)..(25): SEQ ID NO: 7314; WAN024DOF_at; Start 134; Stop 158
caaacaacaagaccaagcccattga

SEQ ID NO: 165605 - DNA, 25 bp, Artificial
  probe
  misc_feature (1)..(25): SEQ ID NO: 7314; WAN024DOF_at; Start 3; Stop 27
ggtagagcaaatccccgtgggccat

SEQ ID NO: 165606 - DNA, 25 bp, Artificial
  probe
  misc_feature (1)..(25): SEQ ID NO: 7314; WAN024DOF_at; Start 168; Stop 192
tgctagcaagagtatcgccacaaat

SEQ ID NO: 165607 - DNA, 25 bp, Artificial
  probe
  misc_feature (1)..(25): SEQ ID NO: 7314; WAN024DOF_at; Start 68; Stop 92
tgcttagtcccctcttgagaaatag

SEQ ID NO: 165608 - DNA, 25 bp, Artificial
  probe
  misc_feature (1)..(25): SEQ ID NO: 7314; WAN024DOF_at; Start 126; Stop 150
gaagctttcaaacaacaagaccaag

SEQ ID NO: 165609 - DNA, 25 bp, Artificial
  probe
  misc_feature (1)..(25): SEQ ID NO: 7314; WAN024DOF_at; Start 72; Stop 96
tagtcccctcttgagaaatagtatc

SEQ ID NO: 165610 - DNA, 25 bp, Artificial
  probe
  misc_feature (1)..(25): SEQ ID NO: 7314; WAN024DOF_at; Start 90; Stop 114
tagtatctcgtttttgactagtcaa

SEQ ID NO: 165611 - DNA, 25 bp, Artificial
  probe
  misc_feature (1)..(25): SEQ ID NO: 7314; WAN024DOF_at; Start 112; Stop 136
caagggattccttggaagctttcaa

SEQ ID NO: 165612 - DNA, 25 bp, Artificial
  probe
  misc_feature (1)..(25): SEQ ID NO: 7314; WAN024DOF_at; Start 123; Stop 147
ttggaagctttcaaacaacaagacc

SEQ ID NO: 165613 - DNA, 25 bp, Artificial
  probe
  misc_feature (1)..(25): SEQ ID NO: 7314; WAN024DOF_at; Start 101; Stop 125
ttttgactagtcaagggattccttg

SEQ ID NO: 165614 - DNA, 25 bp, Artificial
  probe
  misc_feature (1)..(25): SEQ ID NO: 7314; WAN024DOF_at; Start 64; Stop 88
cttttgcttagtcccctcttgagaa

SEQ ID NO: 165615 - DNA, 25 bp, Artificial
  probe
  misc_feature (1)..(25): SEQ ID NO: 7314; WAN024DOF_at; Start 41; Stop 65
ttttcctcttcctactcctgagact

SEQ ID NO: 165616 - DNA, 25 bp, Artificial
  probe
  misc_feature (1)..(25): SEQ ID NO: 7314; WAN024DOF_at; Start 17; Stop 41
ccgtgggccataattctggcagttt

SEQ ID NO: 165617 - DNA, 25 bp, Artificial
  probe
  misc_feature (1)..(25): SEQ ID NO: 7314; WAN024DOF_at; Start 192; Stop 216
tcccttattgctccacttgcgataa

SEQ ID NO: 165618 - DNA, 25 bp, Artificial
  probe
  misc_feature (1)..(25): SEQ ID NO: 7314; WAN024DOF_at; Start 76; Stop 100
cccctcttgagaaatagtatctcgt

SEQ ID NO: 165619 - DNA, 25 bp, Artificial
  probe
  misc_feature (1)..(25): SEQ ID NO: 3857; WAN024DOG_at; Start 35; Stop 59
gaaaaggcttgcataagaaagtagg

SEQ ID NO: 165620 - DNA, 25 bp, Artificial
  probe
  misc_feature (1)..(25): SEQ ID NO: 3857; WAN024DOG_at; Start 43; Stop 67
ttgcataagaaagtagggagaacga

SEQ ID NO: 165621 - DNA, 25 bp, Artificial
  probe
  misc_feature (1)..(25): SEQ ID NO: 3857; WAN024DOG_at; Start 152; Stop 176
caagtggagcaataagggatttgtg

SEQ ID NO: 165622 - DNA, 25 bp, Artificial
  probe
  misc_feature (1)..(25): SEQ ID NO: 3857; WAN024DOG_at; Start 143; Stop 167
gagttatcgcaagtggagcaataag

SEQ ID NO: 165623 - DNA, 25 bp, Artificial
  probe
  misc_feature (1)..(25): SEQ ID NO: 3857; WAN024DOG_at; Start 140; Stop 164
taggagttatcgcaagtggagcaat

SEQ ID NO: 165624 - DNA, 25 bp, Artificial
  probe
  misc_feature (1)..(25): SEQ ID NO: 3857; WAN024DOG_at; Start 161; Stop 185
caataagggatttgtggcgatactc

SEQ ID NO: 165625 - DNA, 25 bp, Artificial
  probe
  misc_feature (1)..(25): SEQ ID NO: 3857; WAN024DOG_at; Start 145; Stop 169
gttatcgcaagtggagcaataaggg

SEQ ID NO: 165626 - DNA, 25 bp, Artificial
  probe
  misc_feature (1)..(25): SEQ ID NO: 3857; WAN024DOG_at; Start 24; Stop 48
tataataaaaagaaaaggcttgcat

SEQ ID NO: 165627 - DNA, 25 bp, Artificial
  probe
  misc_feature (1)..(25): SEQ ID NO: 3857; WAN024DOG_at; Start 133; Stop 157
aactttttaggagttatcgcaagtg

SEQ ID NO: 165628 - DNA, 25 bp, Artificial
  probe
  misc_feature (1)..(25): SEQ ID NO: 3857; WAN024DOG_at; Start 164; Stop 188
taagggatttgtggcgatactcttg

SEQ ID NO: 165629 - DNA, 25 bp, Artificial
  probe
  misc_feature (1)..(25): SEQ ID NO: 3857; WAN024DOG_at; Start 37; Stop 61
aaaggcttgcataagaaagtaggga

SEQ ID NO: 165630 - DNA, 25 bp, Artificial
  probe
  misc_feature (1)..(25): SEQ ID NO: 3857; WAN024DOG_at; Start 105; Stop 129
agcttttcgttttatgaagggcttg

SEQ ID NO: 165631 - DNA, 25 bp, Artificial
  probe
  misc_feature (1)..(25): SEQ ID NO: 3857; WAN024DOG_at; Start 86; Stop 110
atcgaaatcagggtggtttagcttt

SEQ ID NO: 165632 - DNA, 25 bp, Artificial
  probe
  misc_feature (1)..(25): SEQ ID NO: 3857; WAN024DOG_at; Start 3; Stop 27
gaaagaaatacttatctgtgatata

SEQ ID NO: 165633 - DNA, 25 bp, Artificial
  probe
  misc_feature (1)..(25): SEQ ID NO: 3857; WAN024DOG_at; Start 51; Stop 75
gaaagtagggagaacgaagatacaa

SEQ ID NO: 165634 - DNA, 25 bp, Artificial
  probe
  misc_feature (1)..(25): SEQ ID NO: 3857; WAN024DOG_at; Start 65; Stop 89
cgaagatacaaagaagacaaaatcg

SEQ ID NO: 165635 - DNA, 25 bp, Artificial
  probe
  misc_feature (1)..(25): SEQ ID NO: 3857; WAN024DOG_at; Start 22; Stop 46
gatataataaaaagaaaaggcttgc

SEQ ID NO: 165636 - DNA, 25 bp, Artificial
  probe
  misc_feature (1)..(25): SEQ ID NO: 3857; WAN024DOG_at; Start 56; Stop 80
tagggagaacgaagatacaaagaag

SEQ ID NO: 165637 - DNA, 25 bp, Artificial
  probe
  misc_feature (1)..(25): SEQ ID NO: 3857; WAN024DOG_at; Start 79; Stop 103
agacaaaatcgaaatcagggtggtt

SEQ ID NO: 165638 - DNA, 25 bp, Artificial
  probe
  misc_feature (1)..(25): SEQ ID NO: 3857; WAN024DOG_at; Start 77; Stop 101
gaagacaaaatcgaaatcagggtgg

SEQ ID NO: 165639 - DNA, 25 bp, Artificial
  probe
  misc_feature (1)..(25): SEQ ID NO: 3857; WAN024DOG_at; Start 84; Stop 108
aaatcgaaatcagggtggtttagct

SEQ ID NO: 165640 - DNA, 25 bp, Artificial
  probe
  misc_feature (1)..(25): SEQ ID NO: 3857; WAN024DOG_at; Start 162; Stop 186
aataagggatttgtggcgatactct

SEQ ID NO: 165641 - DNA, 25 bp, Artificial
  probe
  misc_feature (1)..(25): SEQ ID NO: 3857; WAN024DOG_at; Start 19; Stop 43
tgtgatataataaaaagaaaaggct

SEQ ID NO: 165642 - DNA, 25 bp, Artificial
  probe
  misc_feature (1)..(25): SEQ ID NO: 3857; WAN024DOG_at; Start 149; Stop 173
tcgcaagtggagcaataagggattt

SEQ ID NO: 165643 - DNA, 25 bp, Artificial
  probe
  misc_feature (1)..(25): SEQ ID NO: 3857; WAN024DOG_at; Start 147; Stop 171
tatcgcaagtggagcaataagggat

SEQ ID NO: 165644 - DNA, 25 bp, Artificial
  probe
  misc_feature (1)..(25): SEQ ID NO: 3857; WAN024DOG_at; Start 73; Stop 97
caaagaagacaaaatcgaaatcagg

SEQ ID NO: 165645 - DNA, 25 bp, Artificial
  probe
  misc_feature (1)..(25): SEQ ID NO: 3857; WAN024DOG_at; Start 138; Stop 162
tttaggagttatcgcaagtggagca

SEQ ID NO: 165646 - DNA, 25 bp, Artificial
  probe
  misc_feature (1)..(25): SEQ ID NO: 3857; WAN024DOG_at; Start 58; Stop 82
gggagaacgaagatacaaagaagac

SEQ ID NO: 165647 - DNA, 25 bp, Artificial
  probe
  misc_feature (1)..(25): SEQ ID NO: 3857; WAN024DOG_at; Start 46; Stop 70
cataagaaagtagggagaacgaaga

SEQ ID NO: 165648 - DNA, 25 bp, Artificial
  probe
  misc_feature (1)..(25): SEQ ID NO: 3857; WAN024DOG_at; Start 82; Stop 106
caaaatcgaaatcagggtggtttag

SEQ ID NO: 165649 - DNA, 25 bp, Artificial
  probe
  misc_feature (1)..(25): SEQ ID NO: 3857; WAN024DOG_at; Start 48; Stop 72
taagaaagtagggagaacgaagata

SEQ ID NO: 165650 - DNA, 25 bp, Artificial
  probe
  misc_feature (1)..(25): SEQ ID NO: 3857; WAN024DOG_at; Start 137; Stop 161
ttttaggagttatcgcaagtggagc

SEQ ID NO: 165651 - DNA, 25 bp, Artificial
  probe
  misc_feature (1)..(25): SEQ ID NO: 3857; WAN024DOG_at; Start 60; Stop 84
gagaacgaagatacaaagaagacaa

SEQ ID NO: 165652 - DNA, 25 bp, Artificial
  probe
  misc_feature (1)..(25): SEQ ID NO: 3857; WAN024DOG_at; Start 41; Stop 65
gcttgcataagaaagtagggagaac

SEQ ID NO: 165653 - DNA, 25 bp, Artificial
  probe
  misc_feature (1)..(25): SEQ ID NO: 3376; WAN024DOH_at; Start 16; Stop 40
tcttctttgtatcttcgttctccct

SEQ ID NO: 165654 - DNA, 25 bp, Artificial
  probe
  misc_feature (1)..(25): SEQ ID NO: 3376; WAN024DOH_at; Start 67; Stop 91
tattatatcacagataagtatttct

SEQ ID NO: 165655 - DNA, 25 bp, Artificial
  probe
  misc_feature (1)..(25): SEQ ID NO: 3376; WAN024DOH_at; Start 40; Stop 64
tactttcttatgcaagccttttctt

SEQ ID NO: 165656 - DNA, 25 bp, Artificial
  probe
  misc_feature (1)..(25): SEQ ID NO: 3376; WAN024DOH_at; Start 17; Stop 41
cttctttgtatcttcgttctcccta

SEQ ID NO: 165657 - DNA, 25 bp, Artificial
  probe
  misc_feature (1)..(25): SEQ ID NO: 3376; WAN024DOH_at; Start 25; Stop 49
tatcttcgttctccctactttctta

SEQ ID NO: 165658 - DNA, 25 bp, Artificial
  probe
  misc_feature (1)..(25): SEQ ID NO: 3376; WAN024DOH_at; Start 32; Stop 56
gttctccctactttcttatgcaagc

SEQ ID NO: 165659 - DNA, 25 bp, Artificial
  probe
  misc_feature (1)..(25): SEQ ID NO: 3376; WAN024DOH_at; Start 20; Stop 44
ctttgtatcttcgttctccctactt

SEQ ID NO: 165660 - DNA, 25 bp, Artificial
  probe
  misc_feature (1)..(25): SEQ ID NO: 3376; WAN024DOH_at; Start 34; Stop 58
tctccctactttcttatgcaagcct

SEQ ID NO: 165661 - DNA, 25 bp, Artificial
  probe
  misc_feature (1)..(25): SEQ ID NO: 3376; WAN024DOH_at; Start 8; Stop 32
cgattttgtcttctttgtatcttcg

SEQ ID NO: 165662 - DNA, 25 bp, Artificial
  probe
  misc_feature (1)..(25): SEQ ID NO: 3376; WAN024DOH_at; Start 3; Stop 27
gatttcgattttgtcttctttgtat

SEQ ID NO: 165663 - DNA, 25 bp, Artificial
  probe
  misc_feature (1)..(25): SEQ ID NO: 3376; WAN024DOH_at; Start 36; Stop 60
tccctactttcttatgcaagccttt

SEQ ID NO: 165664 - DNA, 25 bp, Artificial
  probe
  misc_feature (1)..(25): SEQ ID NO: 3376; WAN024DOH_at; Start 51; Stop 75
gcaagccttttctttttattatatc

SEQ ID NO: 165665 - DNA, 25 bp, Artificial
  probe
  misc_feature (1)..(25): SEQ ID NO: 3376; WAN024DOH_at; Start 38; Stop 62
cctactttcttatgcaagccttttc

SEQ ID NO: 165666 - DNA, 25 bp, Artificial
  probe
  misc_feature (1)..(25): SEQ ID NO: 3376; WAN024DOH_at; Start 33; Stop 57
ttctccctactttcttatgcaagcc

SEQ ID NO: 165667 - DNA, 25 bp, Artificial
  probe
  misc_feature (1)..(25): SEQ ID NO: 3376; WAN024DOH_at; Start 30; Stop 54
tcgttctccctactttcttatgcaa

SEQ ID NO: 165668 - DNA, 25 bp, Artificial
  probe
  misc_feature (1)..(25): SEQ ID NO: 3376; WAN024DOH_at; Start 27; Stop 51
tcttcgttctccctactttcttatg

SEQ ID NO: 165669 - DNA, 25 bp, Artificial
  probe
  misc_feature (1)..(25): SEQ ID NO: 3376; WAN024DOH_at; Start 70; Stop 94
tatatcacagataagtatttctttc

SEQ ID NO: 165670 - DNA, 25 bp, Artificial
  probe
  misc_feature (1)..(25): SEQ ID NO: 3376; WAN024DOH_at; Start 45; Stop 69
tcttatgcaagccttttctttttat

SEQ ID NO: 165671 - DNA, 25 bp, Artificial
  probe
  misc_feature (1)..(25): SEQ ID NO: 3376; WAN024DOH_at; Start 14; Stop 38
tgtcttctttgtatcttcgttctcc

SEQ ID NO: 165672 - DNA, 25 bp, Artificial
  probe
  misc_feature (1)..(25): SEQ ID NO: 3376; WAN024DOH_at; Start 75; Stop 99
cacagataagtatttctttcacaat

SEQ ID NO: 165673 - DNA, 25 bp, Artificial
  probe
  misc_feature (1)..(25): SEQ ID NO: 3376; WAN024DOH_at; Start 29; Stop 53
ttcgttctccctactttcttatgca

SEQ ID NO: 165674 - DNA, 25 bp, Artificial
  probe
  misc_feature (1)..(25): SEQ ID NO: 3376; WAN024DOH_at; Start 19; Stop 43
tctttgtatcttcgttctccctact

SEQ ID NO: 165675 - DNA, 25 bp, Artificial
  probe
  misc_feature (1)..(25): SEQ ID NO: 3376; WAN024DOH_at; Start 18; Stop 42
ttctttgtatcttcgttctccctac

SEQ ID NO: 165676 - DNA, 25 bp, Artificial
  probe
  misc_feature (1)..(25): SEQ ID NO: 3376; WAN024DOH_at; Start 22; Stop 46
ttgtatcttcgttctccctactttc

SEQ ID NO: 165677 - DNA, 25 bp, Artificial
  probe
  misc_feature (1)..(25): SEQ ID NO: 3376; WAN024DOH_at; Start 72; Stop 96
tatcacagataagtatttctttcac

SEQ ID NO: 165678 - DNA, 25 bp, Artificial
  probe
  misc_feature (1)..(25): SEQ ID NO: 3376; WAN024DOH_at; Start 37; Stop 61
ccctactttcttatgcaagcctttt

SEQ ID NO: 165679 - DNA, 25 bp, Artificial
  probe
  misc_feature (1)..(25): SEQ ID NO: 3376; WAN024DOH_at; Start 35; Stop 59
ctccctactttcttatgcaagcctt

SEQ ID NO: 165680 - DNA, 25 bp, Artificial
  probe
  misc_feature (1)..(25): SEQ ID NO: 3376; WAN024DOH_at; Start 1; Stop 25
ctgatttcgattttgtcttctttgt

SEQ ID NO: 165681 - DNA, 25 bp, Artificial
  probe
  misc_feature (1)..(25): SEQ ID NO: 3376; WAN024DOH_at; Start 23; Stop 47
tgtatcttcgttctccctactttct

SEQ ID NO: 165682 - DNA, 25 bp, Artificial
  probe
  misc_feature (1)..(25): SEQ ID NO: 3376; WAN024DOH_at; Start 39; Stop 63
ctactttcttatgcaagccttttct

SEQ ID NO: 165683 - DNA, 25 bp, Artificial
  probe
  misc_feature (1)..(25): SEQ ID NO: 3376; WAN024DOH_at; Start 15; Stop 39
gtcttctttgtatcttcgttctccc

SEQ ID NO: 165684 - DNA, 25 bp, Artificial
  probe
  misc_feature (1)..(25): SEQ ID NO: 3376; WAN024DOH_at; Start 31; Stop 55
cgttctccctactttcttatgcaag

SEQ ID NO: 165685 - DNA, 25 bp, Artificial
  probe
  misc_feature (1)..(25): SEQ ID NO: 3376; WAN024DOH_at; Start 41; Stop 65
actttcttatgcaagccttttcttt

SEQ ID NO: 165686 - DNA, 25 bp, Artificial
  probe
  misc_feature (1)..(25): SEQ ID NO: 3376; WAN024DOH_at; Start 74; Stop 98
tcacagataagtatttctttcacaa

SEQ ID NO: 165687 - DNA, 25 bp, Artificial
  probe
  misc_feature (1)..(25): SEQ ID NO: 2455; WAN024DOI_at; Start 81; Stop 105
aaattttgagtatgtgactccttgg

SEQ ID NO: 165688 - DNA, 25 bp, Artificial
  probe
  misc_feature (1)..(25): SEQ ID NO: 2455; WAN024DOI_at; Start 18; Stop 42
gctctaccacgatggacttttcttt

SEQ ID NO: 165689 - DNA, 25 bp, Artificial
  probe
  misc_feature (1)..(25): SEQ ID NO: 2455; WAN024DOI_at; Start 11; Stop 35
gggatttgctctaccacgatggact

SEQ ID NO: 165690 - DNA, 25 bp, Artificial
  probe
  misc_feature (1)..(25): SEQ ID NO: 2455; WAN024DOI_at; Start 15; Stop 39
tttgctctaccacgatggacttttc

SEQ ID NO: 165691 - DNA, 25 bp, Artificial
  probe
  misc_feature (1)..(25): SEQ ID NO: 2455; WAN024DOI_at; Start 154; Stop 178
aaggatcattatttagcgggttatc

SEQ ID NO: 165692 - DNA, 25 bp, Artificial
  probe
  misc_feature (1)..(25): SEQ ID NO: 2455; WAN024DOI_at; Start 25; Stop 49
cacgatggacttttcttttcagcta

SEQ ID NO: 165693 - DNA, 25 bp, Artificial
  probe
  misc_feature (1)..(25): SEQ ID NO: 2455; WAN024DOI_at; Start 59; Stop 83
acggtacctatgactttcatgaaaa

SEQ ID NO: 165694 - DNA, 25 bp, Artificial
  probe
  misc_feature (1)..(25): SEQ ID NO: 2455; WAN024DOI_at; Start 28; Stop 52
gatggacttttcttttcagctaaaa

SEQ ID NO: 165695 - DNA, 25 bp, Artificial
  probe
  misc_feature (1)..(25): SEQ ID NO: 2455; WAN024DOI_at; Start 65; Stop 89
cctatgactttcatgaaaattttga

SEQ ID NO: 165696 - DNA, 25 bp, Artificial
  probe
  misc_feature (1)..(25): SEQ ID NO: 2455; WAN024DOI_at; Start 12; Stop 36
ggatttgctctaccacgatggactt

SEQ ID NO: 165697 - DNA, 25 bp, Artificial
  probe
  misc_feature (1)..(25): SEQ ID NO: 2455; WAN024DOI_at; Start 76; Stop 100
catgaaaattttgagtatgtgactc

SEQ ID NO: 165698 - DNA, 25 bp, Artificial
  probe
  misc_feature (1)..(25): SEQ ID NO: 2455; WAN024DOI_at; Start 78; Stop 102
tgaaaattttgagtatgtgactcct

SEQ ID NO: 165699 - DNA, 25 bp, Artificial
  probe
  misc_feature (1)..(25): SEQ ID NO: 2455; WAN024DOI_at; Start 53; Stop 77
aagaagacggtacctatgactttca

SEQ ID NO: 165700 - DNA, 25 bp, Artificial
  probe
  misc_feature (1)..(25): SEQ ID NO: 2455; WAN024DOI_at; Start 58; Stop 82
gacggtacctatgactttcatgaaa

SEQ ID NO: 165701 - DNA, 25 bp, Artificial
  probe
  misc_feature (1)..(25): SEQ ID NO: 2455; WAN024DOI_at; Start 60; Stop 84
cggtacctatgactttcatgaaaat

SEQ ID NO: 165702 - DNA, 25 bp, Artificial
  probe
  misc_feature (1)..(25): SEQ ID NO: 2455; WAN024DOI_at; Start 24; Stop 48
ccacgatggacttttcttttcagct

SEQ ID NO: 165703 - DNA, 25 bp, Artificial
  probe
  misc_feature (1)..(25): SEQ ID NO: 2455; WAN024DOI_at; Start 55; Stop 79
gaagacggtacctatgactttcatg

SEQ ID NO: 165704 - DNA, 25 bp, Artificial
  probe
  misc_feature (1)..(25): SEQ ID NO: 2455; WAN024DOI_at; Start 23; Stop 47
accacgatggacttttcttttcagc

SEQ ID NO: 165705 - DNA, 25 bp, Artificial
  probe
  misc_feature (1)..(25): SEQ ID NO: 2455; WAN024DOI_at; Start 70; Stop 94
gactttcatgaaaattttgagtatg

SEQ ID NO: 165706 - DNA, 25 bp, Artificial
  probe
  misc_feature (1)..(25): SEQ ID NO: 2455; WAN024DOI_at; Start 26; Stop 50
acgatggacttttcttttcagctaa

SEQ ID NO: 165707 - DNA, 25 bp, Artificial
  probe
  misc_feature (1)..(25): SEQ ID NO: 2455; WAN024DOI_at; Start 22; Stop 46
taccacgatggacttttcttttcag

SEQ ID NO: 165708 - DNA, 25 bp, Artificial
  probe
  misc_feature (1)..(25): SEQ ID NO: 2455; WAN024DOI_at; Start 150; Stop 174
taataaggatcattatttagcgggt

SEQ ID NO: 165709 - DNA, 25 bp, Artificial
  probe
  misc_feature (1)..(25): SEQ ID NO: 2455; WAN024DOI_at; Start 56; Stop 80
aagacggtacctatgactttcatga

SEQ ID NO: 165710 - DNA, 25 bp, Artificial
  probe
  misc_feature (1)..(25): SEQ ID NO: 2455; WAN024DOI_at; Start 27; Stop 51
cgatggacttttcttttcagctaaa

SEQ ID NO: 165711 - DNA, 25 bp, Artificial
  probe
  misc_feature (1)..(25): SEQ ID NO: 2455; WAN024DOI_at; Start 16; Stop 40
ttgctctaccacgatggacttttct

SEQ ID NO: 165712 - DNA, 25 bp, Artificial
  probe
  misc_feature (1)..(25): SEQ ID NO: 2455; WAN024DOI_at; Start 17; Stop 41
tgctctaccacgatggacttttctt

SEQ ID NO: 165713 - DNA, 25 bp, Artificial
  probe
  misc_feature (1)..(25): SEQ ID NO: 2455; WAN024DOI_at; Start 13; Stop 37
gatttgctctaccacgatggacttt

SEQ ID NO: 165714 - DNA, 25 bp, Artificial
  probe
  misc_feature (1)..(25): SEQ ID NO: 2455; WAN024DOI_at; Start 153; Stop 177
taaggatcattatttagcgggttat

SEQ ID NO: 165715 - DNA, 25 bp, Artificial
  probe
  misc_feature (1)..(25): SEQ ID NO: 2455; WAN024DOI_at; Start 20; Stop 44
tctaccacgatggacttttcttttc

SEQ ID NO: 165716 - DNA, 25 bp, Artificial
  probe
  misc_feature (1)..(25): SEQ ID NO: 2455; WAN024DOI_at; Start 57; Stop 81
agacggtacctatgactttcatgaa

SEQ ID NO: 165717 - DNA, 25 bp, Artificial
  probe
  misc_feature (1)..(25): SEQ ID NO: 2455; WAN024DOI_at; Start 79; Stop 103
gaaaattttgagtatgtgactcctt

SEQ ID NO: 165718 - DNA, 25 bp, Artificial
  probe
  misc_feature (1)..(25): SEQ ID NO: 2455; WAN024DOI_at; Start 2; Stop 26
tggcccacggggatttgctctacca

SEQ ID NO: 165719 - DNA, 25 bp, Artificial
  probe
  misc_feature (1)..(25): SEQ ID NO: 2455; WAN024DOI_at; Start 147; Stop 171
cattaataaggatcattatttagcg

SEQ ID NO: 165720 - DNA, 25 bp, Artificial
  probe
  misc_feature (1)..(25): SEQ ID NO: 2455; WAN024DOI_at; Start 61; Stop 85
ggtacctatgactttcatgaaaatt

SEQ ID NO: 165721 - DNA, 25 bp, Artificial
  probe
  misc_feature (1)..(25): SEQ ID NO: 5749; WAN024DOJ_at; Start 23; Stop 47
caaaagaacaagtaaagagtcaaga

SEQ ID NO: 165722 - DNA, 25 bp, Artificial
  probe
  misc_feature (1)..(25): SEQ ID NO: 5749; WAN024DOJ_at; Start 71; Stop 95
ggcaaataaaaagctttaagacaga

SEQ ID NO: 165723 - DNA, 25 bp, Artificial
  probe
  misc_feature (1)..(25): SEQ ID NO: 5749; WAN024DOJ_at; Start 97; Stop 121
gacaaatctaagtcaaataagaaag

SEQ ID NO: 165724 - DNA, 25 bp, Artificial
  probe
  misc_feature (1)..(25): SEQ ID NO: 5749; WAN024DOJ_at; Start 123; Stop 147
ccatagcaaaggtgcagagagacta

SEQ ID NO: 165725 - DNA, 25 bp, Artificial
  probe
  misc_feature (1)..(25): SEQ ID NO: 5749; WAN024DOJ_at; Start 7; Stop 31
tctaagctcttaaaagcaaaagaac

SEQ ID NO: 165726 - DNA, 25 bp, Artificial
  probe
  misc_feature (1)..(25): SEQ ID NO: 5749; WAN024DOJ_at; Start 41; Stop 65
gtcaagacaaggataaaaagtccat

SEQ ID NO: 165727 - DNA, 25 bp, Artificial
  probe
  misc_feature (1)..(25): SEQ ID NO: 5749; WAN024DOJ_at; Start 28; Stop 52
gaacaagtaaagagtcaagacaagg

SEQ ID NO: 165728 - DNA, 25 bp, Artificial
  probe
  misc_feature (1)..(25): SEQ ID NO: 5749; WAN024DOJ_at; Start 63; Stop 87
catattagggcaaataaaaagcttt

SEQ ID NO: 165729 - DNA, 25 bp, Artificial
  probe
  misc_feature (1)..(25): SEQ ID NO: 5749; WAN024DOJ_at; Start 121; Stop 145
gaccatagcaaaggtgcagagagac

SEQ ID NO: 165730 - DNA, 25 bp, Artificial
  probe
  misc_feature (1)..(25): SEQ ID NO: 5749; WAN024DOJ_at; Start 83; Stop 107
gctttaagacagatgacaaatctaa

SEQ ID NO: 165731 - DNA, 25 bp, Artificial
  probe
  misc_feature (1)..(25): SEQ ID NO: 5749; WAN024DOJ_at; Start 129; Stop 153
caaaggtgcagagagactaactaat

SEQ ID NO: 165732 - DNA, 25 bp, Artificial
  probe
  misc_feature (1)..(25): SEQ ID NO: 5749; WAN024DOJ_at; Start 48; Stop 72
caaggataaaaagtccatattaggg

SEQ ID NO: 165733 - DNA, 25 bp, Artificial
  probe
  misc_feature (1)..(25): SEQ ID NO: 5749; WAN024DOJ_at; Start 12; Stop 36
gctcttaaaagcaaaagaacaagta

SEQ ID NO: 165734 - DNA, 25 bp, Artificial
  probe
  misc_feature (1)..(25): SEQ ID NO: 5749; WAN024DOJ_at; Start 115; Stop 139
aagaaagaccatagcaaaggtgcag

SEQ ID NO: 165735 - DNA, 25 bp, Artificial
  probe
  misc_feature (1)..(25): SEQ ID NO: 5749; WAN024DOJ_at; Start 126; Stop 150
tagcaaaggtgcagagagactaact

SEQ ID NO: 165736 - DNA, 25 bp, Artificial
  probe
  misc_feature (1)..(25): SEQ ID NO: 5749; WAN024DOJ_at; Start 105; Stop 129
taagtcaaataagaaagaccatagc

SEQ ID NO: 165737 - DNA, 25 bp, Artificial
  probe
  misc_feature (1)..(25): SEQ ID NO: 5749; WAN024DOJ_at; Start 77; Stop 101
taaaaagctttaagacagatgacaa

SEQ ID NO: 165738 - DNA, 25 bp, Artificial
  probe
  misc_feature (1)..(25): SEQ ID NO: 5749; WAN024DOJ_at; Start 4; Stop 28
tcttctaagctcttaaaagcaaaag

SEQ ID NO: 165739 - DNA, 25 bp, Artificial
  probe
  misc_feature (1)..(25): SEQ ID NO: 5749; WAN024DOJ_at; Start 80; Stop 104
aaagctttaagacagatgacaaatc

SEQ ID NO: 165740 - DNA, 25 bp, Artificial
  probe
  misc_feature (1)..(25): SEQ ID NO: 5749; WAN024DOJ_at; Start 31; Stop 55
caagtaaagagtcaagacaaggata

SEQ ID NO: 165741 - DNA, 25 bp, Artificial
  probe
  misc_feature (1)..(25): SEQ ID NO: 5749; WAN024DOJ_at; Start 54; Stop 78
taaaaagtccatattagggcaaata

SEQ ID NO: 165742 - DNA, 25 bp, Artificial
  probe
  misc_feature (1)..(25): SEQ ID NO: 5749; WAN024DOJ_at; Start 52; Stop 76
gataaaaagtccatattagggcaaa

SEQ ID NO: 165743 - DNA, 25 bp, Artificial
  probe
  misc_feature (1)..(25): SEQ ID NO: 5749; WAN024DOJ_at; Start 86; Stop 110
ttaagacagatgacaaatctaagtc

SEQ ID NO: 165744 - DNA, 25 bp, Artificial
  probe
  misc_feature (1)..(25): SEQ ID NO: 5749; WAN024DOJ_at; Start 43; Stop 67
caagacaaggataaaaagtccatat

SEQ ID NO: 165745 - DNA, 25 bp, Artificial
  probe
  misc_feature (1)..(25): SEQ ID NO: 5749; WAN024DOJ_at; Start 90; Stop 114
gacagatgacaaatctaagtcaaat

SEQ ID NO: 165746 - DNA, 25 bp, Artificial
  probe
  misc_feature (1)..(25): SEQ ID NO: 5749; WAN024DOJ_at; Start 51; Stop 75
ggataaaaagtccatattagggcaa

SEQ ID NO: 165747 - DNA, 25 bp, Artificial
  probe
  misc_feature (1)..(25): SEQ ID NO: 5749; WAN024DOJ_at; Start 124; Stop 148
catagcaaaggtgcagagagactaa

SEQ ID NO: 165748 - DNA, 25 bp, Artificial
  probe
  misc_feature (1)..(25): SEQ ID NO: 5749; WAN024DOJ_at; Start 39; Stop 63
gagtcaagacaaggataaaaagtcc

SEQ ID NO: 165749 - DNA, 25 bp, Artificial
  probe
  misc_feature (1)..(25): SEQ ID NO: 5749; WAN024DOJ_at; Start 119; Stop 143
aagaccatagcaaaggtgcagagag

SEQ ID NO: 165750 - DNA, 25 bp, Artificial
  probe
  misc_feature (1)..(25): SEQ ID NO: 5749; WAN024DOJ_at; Start 128; Stop 152
gcaaaggtgcagagagactaactaa

SEQ ID NO: 165751 - DNA, 25 bp, Artificial
  probe
  misc_feature (1)..(25): SEQ ID NO: 5749; WAN024DOJ_at; Start 62; Stop 86
ccatattagggcaaataaaaagctt

SEQ ID NO: 165752 - DNA, 25 bp, Artificial
  probe
  misc_feature (1)..(25): SEQ ID NO: 5749; WAN024DOJ_at; Start 114; Stop 138
taagaaagaccatagcaaaggtgca

SEQ ID NO: 165753 - DNA, 25 bp, Artificial
  probe
  misc_feature (1)..(25): SEQ ID NO: 5749; WAN024DOJ_at; Start 110; Stop 134
caaataagaaagaccatagcaaagg

SEQ ID NO: 165754 - DNA, 25 bp, Artificial
  probe
  misc_feature (1)..(25): SEQ ID NO: 5749; WAN024DOJ_at; Start 117; Stop 141
gaaagaccatagcaaaggtgcagag

SEQ ID NO: 165755 - DNA, 25 bp, Artificial
  probe
  misc_feature (1)..(25): SEQ ID NO: 5847; WAN024DOK_at; Start 55; Stop 79
cctagtataagtcaaaaacgtgttg

SEQ ID NO: 165756 - DNA, 25 bp, Artificial
  probe
  misc_feature (1)..(25): SEQ ID NO: 5847; WAN024DOK_at; Start 50; Stop 74
atgagcctagtataagtcaaaaacg

SEQ ID NO: 165757 - DNA, 25 bp, Artificial
  probe
  misc_feature (1)..(25): SEQ ID NO: 5847; WAN024DOK_at; Start 48; Stop 72
aaatgagcctagtataagtcaaaaa

SEQ ID NO: 165758 - DNA, 25 bp, Artificial
  probe
  misc_feature (1)..(25): SEQ ID NO: 5847; WAN024DOK_at; Start 52; Stop 76
gagcctagtataagtcaaaaacgtg

SEQ ID NO: 165759 - DNA, 25 bp, Artificial
  probe
  misc_feature (1)..(25): SEQ ID NO: 5847; WAN024DOK_at; Start 57; Stop 81
tagtataagtcaaaaacgtgttgaa

SEQ ID NO: 165760 - DNA, 25 bp, Artificial
  probe
  misc_feature (1)..(25): SEQ ID NO: 5847; WAN024DOK_at; Start 51; Stop 75
tgagcctagtataagtcaaaaacgt

SEQ ID NO: 165761 - DNA, 25 bp, Artificial
  probe
  misc_feature (1)..(25): SEQ ID NO: 5847; WAN024DOK_at; Start 53; Stop 77
agcctagtataagtcaaaaacgtgt

SEQ ID NO: 165762 - DNA, 25 bp, Artificial
  probe
  misc_feature (1)..(25): SEQ ID NO: 5847; WAN024DOK_at; Start 4; Stop 28
tttagtttagttggtttcatatcac

SEQ ID NO: 165763 - DNA, 25 bp, Artificial
  probe
  misc_feature (1)..(25): SEQ ID NO: 5847; WAN024DOK_at; Start 2; Stop 26
tgtttagtttagttggtttcatatc

SEQ ID NO: 165764 - DNA, 25 bp, Artificial
  probe
  misc_feature (1)..(25): SEQ ID NO: 5847; WAN024DOK_at; Start 49; Stop 73
aatgagcctagtataagtcaaaaac

SEQ ID NO: 165765 - DNA, 25 bp, Artificial
  probe
  misc_feature (1)..(25): SEQ ID NO: 5847; WAN024DOK_at; Start 56; Stop 80
ctagtataagtcaaaaacgtgttga

SEQ ID NO: 165766 - DNA, 25 bp, Artificial
  probe
  misc_feature (1)..(25): SEQ ID NO: 5446; WAN024DOL_at; Start 26; Stop 50
attttcatgggtttctagctaagga

SEQ ID NO: 165767 - DNA, 25 bp, Artificial
  probe
  misc_feature (1)..(25): SEQ ID NO: 5446; WAN024DOL_at; Start 53; Stop 77
taggaaaagtatgtatccagatgat

SEQ ID NO: 165768 - DNA, 25 bp, Artificial
  probe
  misc_feature (1)..(25): SEQ ID NO: 5446; WAN024DOL_at; Start 29; Stop 53
ttcatgggtttctagctaaggaagt

SEQ ID NO: 165769 - DNA, 25 bp, Artificial
  probe
  misc_feature (1)..(25): SEQ ID NO: 5446; WAN024DOL_at; Start 45; Stop 69
taaggaagtaggaaaagtatgtatc

SEQ ID NO: 165770 - DNA, 25 bp, Artificial
  probe
  misc_feature (1)..(25): SEQ ID NO: 5446; WAN024DOL_at; Start 48; Stop 72
ggaagtaggaaaagtatgtatccag

SEQ ID NO: 165771 - DNA, 25 bp, Artificial
  probe
  misc_feature (1)..(25): SEQ ID NO: 5446; WAN024DOL_at; Start 3; Stop 27
ggaatacatgaaagttcttgaaaat

SEQ ID NO: 165772 - DNA, 25 bp, Artificial
  probe
  misc_feature (1)..(25): SEQ ID NO: 5446; WAN024DOL_at; Start 7; Stop 31
tacatgaaagttcttgaaaattttc

SEQ ID NO: 165773 - DNA, 25 bp, Artificial
  probe
  misc_feature (1)..(25): SEQ ID NO: 5446; WAN024DOL_at; Start 51; Stop 75
agtaggaaaagtatgtatccagatg

SEQ ID NO: 165774 - DNA, 25 bp, Artificial
  probe
  misc_feature (1)..(25): SEQ ID NO: 5446; WAN024DOL_at; Start 30; Stop 54
tcatgggtttctagctaaggaagta

SEQ ID NO: 165775 - DNA, 25 bp, Artificial
  probe
  misc_feature (1)..(25): SEQ ID NO: 5446; WAN024DOL_at; Start 41; Stop 65
tagctaaggaagtaggaaaagtatg

SEQ ID NO: 165776 - DNA, 25 bp, Artificial
  probe
  misc_feature (1)..(25): SEQ ID NO: 5446; WAN024DOL_at; Start 25; Stop 49
aattttcatgggtttctagctaagg

SEQ ID NO: 165777 - DNA, 25 bp, Artificial
  probe
  misc_feature (1)..(25): SEQ ID NO: 5446; WAN024DOL_at; Start 52; Stop 76
gtaggaaaagtatgtatccagatga

SEQ ID NO: 165778 - DNA, 25 bp, Artificial
  probe
  misc_feature (1)..(25): SEQ ID NO: 5446; WAN024DOL_at; Start 4; Stop 28
gaatacatgaaagttcttgaaaatt

SEQ ID NO: 165779 - DNA, 25 bp, Artificial
  probe
  misc_feature (1)..(25): SEQ ID NO: 5446; WAN024DOL_at; Start 20; Stop 44
ttgaaaattttcatgggtttctagc

SEQ ID NO: 165780 - DNA, 25 bp, Artificial
  probe
  misc_feature (1)..(25): SEQ ID NO: 5446; WAN024DOL_at; Start 11; Stop 35
tgaaagttcttgaaaattttcatgg

SEQ ID NO: 165781 - DNA, 25 bp, Artificial
  probe
  misc_feature (1)..(25): SEQ ID NO: 5446; WAN024DOL_at; Start 42; Stop 66
agctaaggaagtaggaaaagtatgt

SEQ ID NO: 165782 - DNA, 25 bp, Artificial
  probe
  misc_feature (1)..(25): SEQ ID NO: 5446; WAN024DOL_at; Start 31; Stop 55
catgggtttctagctaaggaagtag

SEQ ID NO: 165783 - DNA, 25 bp, Artificial
  probe
  misc_feature (1)..(25): SEQ ID NO: 5446; WAN024DOL_at; Start 50; Stop 74
aagtaggaaaagtatgtatccagat

SEQ ID NO: 165784 - DNA, 25 bp, Artificial
  probe
  misc_feature (1)..(25): SEQ ID NO: 5446; WAN024DOL_at; Start 44; Stop 68
ctaaggaagtaggaaaagtatgtat

SEQ ID NO: 165785 - DNA, 25 bp, Artificial
  probe
  misc_feature (1)..(25): SEQ ID NO: 5446; WAN024DOL_at; Start 24; Stop 48
aaattttcatgggtttctagctaag

SEQ ID NO: 165786 - DNA, 25 bp, Artificial
  probe
  misc_feature (1)..(25): SEQ ID NO: 5446; WAN024DOL_at; Start 39; Stop 63
tctagctaaggaagtaggaaaagta

SEQ ID NO: 165787 - DNA, 25 bp, Artificial
  probe
  misc_feature (1)..(25): SEQ ID NO: 5446; WAN024DOL_at; Start 21; Stop 45
tgaaaattttcatgggtttctagct

SEQ ID NO: 165788 - DNA, 25 bp, Artificial
  probe
  misc_feature (1)..(25): SEQ ID NO: 5446; WAN024DOL_at; Start 2; Stop 26
tggaatacatgaaagttcttgaaaa

SEQ ID NO: 165789 - DNA, 25 bp, Artificial
  probe
  misc_feature (1)..(25): SEQ ID NO: 5446; WAN024DOL_at; Start 18; Stop 42
tcttgaaaattttcatgggtttcta

SEQ ID NO: 165790 - DNA, 25 bp, Artificial
  probe
  misc_feature (1)..(25): SEQ ID NO: 5446; WAN024DOL_at; Start 49; Stop 73
gaagtaggaaaagtatgtatccaga

SEQ ID NO: 165791 - DNA, 25 bp, Artificial
  probe
  misc_feature (1)..(25): SEQ ID NO: 5446; WAN024DOL_at; Start 22; Stop 46
gaaaattttcatgggtttctagcta

SEQ ID NO: 165792 - DNA, 25 bp, Artificial
  probe
  misc_feature (1)..(25): SEQ ID NO: 5446; WAN024DOL_at; Start 1; Stop 25
ttggaatacatgaaagttcttgaaa

SEQ ID NO: 165793 - DNA, 25 bp, Artificial
  probe
  misc_feature (1)..(25): SEQ ID NO: 5446; WAN024DOL_at; Start 47; Stop 71
aggaagtaggaaaagtatgtatcca

SEQ ID NO: 165794 - DNA, 25 bp, Artificial
  probe
  misc_feature (1)..(25): SEQ ID NO: 5446; WAN024DOL_at; Start 40; Stop 64
ctagctaaggaagtaggaaaagtat

SEQ ID NO: 165795 - DNA, 25 bp, Artificial
  probe
  misc_feature (1)..(25): SEQ ID NO: 5446; WAN024DOL_at; Start 43; Stop 67
gctaaggaagtaggaaaagtatgta

SEQ ID NO: 165796 - DNA, 25 bp, Artificial
  probe
  misc_feature (1)..(25): SEQ ID NO: 5446; WAN024DOL_at; Start 27; Stop 51
ttttcatgggtttctagctaaggaa

SEQ ID NO: 165797 - DNA, 25 bp, Artificial
  probe
  misc_feature (1)..(25): SEQ ID NO: 5446; WAN024DOL_at; Start 28; Stop 52
tttcatgggtttctagctaaggaag

SEQ ID NO: 165798 - DNA, 25 bp, Artificial
  probe
  misc_feature (1)..(25): SEQ ID NO: 5446; WAN024DOL_at; Start 33; Stop 57
tgggtttctagctaaggaagtagga

SEQ ID NO: 165799 - DNA, 25 bp, Artificial
  probe
  misc_feature (1)..(25): SEQ ID NO: 5446; WAN024DOL_at; Start 19; Stop 43
cttgaaaattttcatgggtttctag

SEQ ID NO: 165800 - DNA, 25 bp, Artificial
  probe
  misc_feature (1)..(25): SEQ ID NO: 2382; WAN024DOM_at; Start 57; Stop 81
tggttctgcggtaatcgggctaact

SEQ ID NO: 165801 - DNA, 25 bp, Artificial
  probe
  misc_feature (1)..(25): SEQ ID NO: 2382; WAN024DOM_at; Start 54; Stop 78
ttttggttctgcggtaatcgggcta

SEQ ID NO: 165802 - DNA, 25 bp, Artificial
  probe
  misc_feature (1)..(25): SEQ ID NO: 2382; WAN024DOM_at; Start 56; Stop 80
ttggttctgcggtaatcgggctaac

SEQ ID NO: 165803 - DNA, 25 bp, Artificial
  probe
  misc_feature (1)..(25): SEQ ID NO: 2382; WAN024DOM_at; Start 61; Stop 85
tctgcggtaatcgggctaactttat

SEQ ID NO: 165804 - DNA, 25 bp, Artificial
  probe
  misc_feature (1)..(25): SEQ ID NO: 2382; WAN024DOM_at; Start 62; Stop 86
ctgcggtaatcgggctaactttatt

SEQ ID NO: 165805 - DNA, 25 bp, Artificial
  probe
  misc_feature (1)..(25): SEQ ID NO: 2382; WAN024DOM_at; Start 50; Stop 74
agatttttggttctgcggtaatcgg

SEQ ID NO: 165806 - DNA, 25 bp, Artificial
  probe
  misc_feature (1)..(25): SEQ ID NO: 2382; WAN024DOM_at; Start 43; Stop 67
ctcggaaagatttttggttctgcgg

SEQ ID NO: 165807 - DNA, 25 bp, Artificial
  probe
  misc_feature (1)..(25): SEQ ID NO: 2382; WAN024DOM_at; Start 49; Stop 73
aagatttttggttctgcggtaatcg

SEQ ID NO: 165808 - DNA, 25 bp, Artificial
  probe
  misc_feature (1)..(25): SEQ ID NO: 2382; WAN024DOM_at; Start 7; Stop 31
aaatctaatactaataagcgctatg

SEQ ID NO: 165809 - DNA, 25 bp, Artificial
  probe
  misc_feature (1)..(25): SEQ ID NO: 2382; WAN024DOM_at; Start 6; Stop 30
aaaatctaatactaataagcgctat

SEQ ID NO: 165810 - DNA, 25 bp, Artificial
  probe
  misc_feature (1)..(25): SEQ ID NO: 2382; WAN024DOM_at; Start 9; Stop 33
atctaatactaataagcgctatgca

SEQ ID NO: 165811 - DNA, 25 bp, Artificial
  probe
  misc_feature (1)..(25): SEQ ID NO: 2382; WAN024DOM_at; Start 42; Stop 66
actcggaaagatttttggttctgcg

SEQ ID NO: 165812 - DNA, 25 bp, Artificial
  probe
  misc_feature (1)..(25): SEQ ID NO: 2382; WAN024DOM_at; Start 8; Stop 32
aatctaatactaataagcgctatgc

SEQ ID NO: 165813 - DNA, 25 bp, Artificial
  probe
  misc_feature (1)..(25): SEQ ID NO: 2382; WAN024DOM_at; Start 2; Stop 26
tggcaaaatctaatactaataagcg

SEQ ID NO: 165814 - DNA, 25 bp, Artificial
  probe
  misc_feature (1)..(25): SEQ ID NO: 2382; WAN024DOM_at; Start 60; Stop 84
ttctgcggtaatcgggctaacttta

SEQ ID NO: 165815 - DNA, 25 bp, Artificial
  probe
  misc_feature (1)..(25): SEQ ID NO: 2382; WAN024DOM_at; Start 55; Stop 79
tttggttctgcggtaatcgggctaa

SEQ ID NO: 165816 - DNA, 25 bp, Artificial
  probe
  misc_feature (1)..(25): SEQ ID NO: 2382; WAN024DOM_at; Start 4; Stop 28
gcaaaatctaatactaataagcgct

SEQ ID NO: 165817 - DNA, 25 bp, Artificial
  probe
  misc_feature (1)..(25): SEQ ID NO: 2382; WAN024DOM_at; Start 1; Stop 25
atggcaaaatctaatactaataagc

SEQ ID NO: 165818 - DNA, 25 bp, Artificial
  probe
  misc_feature (1)..(25): SEQ ID NO: 2382; WAN024DOM_at; Start 3; Stop 27
ggcaaaatctaatactaataagcgc

SEQ ID NO: 165819 - DNA, 25 bp, Artificial
  probe
  misc_feature (1)..(25): SEQ ID NO: 2382; WAN024DOM_at; Start 5; Stop 29
caaaatctaatactaataagcgcta

SEQ ID NO: 165820 - DNA, 25 bp, Artificial
  probe
  misc_feature (1)..(25): SEQ ID NO: 7540; WAN024DON_at; Start 15; Stop 39
gaagggaggtgatcttgcatggact

SEQ ID NO: 165821 - DNA, 25 bp, Artificial
  probe
  misc_feature (1)..(25): SEQ ID NO: 7540; WAN024DON_at; Start 20; Stop 44
gaggtgatcttgcatggactttgaa

SEQ ID NO: 165822 - DNA, 25 bp, Artificial
  probe
  misc_feature (1)..(25): SEQ ID NO: 7540; WAN024DON_at; Start 12; Stop 36
taagaagggaggtgatcttgcatgg

SEQ ID NO: 165823 - DNA, 25 bp, Artificial
  probe
  misc_feature (1)..(25): SEQ ID NO: 7540; WAN024DON_at; Start 16; Stop 40
aagggaggtgatcttgcatggactt

SEQ ID NO: 165824 - DNA, 25 bp, Artificial
  probe
  misc_feature (1)..(25): SEQ ID NO: 7540; WAN024DON_at; Start 14; Stop 38
agaagggaggtgatcttgcatggac

SEQ ID NO: 165825 - DNA, 25 bp, Artificial
  probe
  misc_feature (1)..(25): SEQ ID NO: 7540; WAN024DON_at; Start 9; Stop 33
ttttaagaagggaggtgatcttgca

SEQ ID NO: 165826 - DNA, 25 bp, Artificial
  probe
  misc_feature (1)..(25): SEQ ID NO: 7540; WAN024DON_at; Start 18; Stop 42
gggaggtgatcttgcatggactttg

SEQ ID NO: 165827 - DNA, 25 bp, Artificial
  probe
  misc_feature (1)..(25): SEQ ID NO: 7540; WAN024DON_at; Start 21; Stop 45
aggtgatcttgcatggactttgaat

SEQ ID NO: 165828 - DNA, 25 bp, Artificial
  probe
  misc_feature (1)..(25): SEQ ID NO: 7540; WAN024DON_at; Start 10; Stop 34
tttaagaagggaggtgatcttgcat

SEQ ID NO: 165829 - DNA, 25 bp, Artificial
  probe
  misc_feature (1)..(25): SEQ ID NO: 7540; WAN024DON_at; Start 23; Stop 47
gtgatcttgcatggactttgaatat

SEQ ID NO: 165830 - DNA, 25 bp, Artificial
  probe
  misc_feature (1)..(25): SEQ ID NO: 7540; WAN024DON_at; Start 2; Stop 26
tgcaaatttttaagaagggaggtga

SEQ ID NO: 165831 - DNA, 25 bp, Artificial
  probe
  misc_feature (1)..(25): SEQ ID NO: 7540; WAN024DON_at; Start 19; Stop 43
ggaggtgatcttgcatggactttga

SEQ ID NO: 165832 - DNA, 25 bp, Artificial
  probe
  misc_feature (1)..(25): SEQ ID NO: 7540; WAN024DON_at; Start 8; Stop 32
tttttaagaagggaggtgatcttgc

SEQ ID NO: 165833 - DNA, 25 bp, Artificial
  probe
  misc_feature (1)..(25): SEQ ID NO: 7540; WAN024DON_at; Start 13; Stop 37
aagaagggaggtgatcttgcatgga

SEQ ID NO: 165834 - DNA, 25 bp, Artificial
  probe
  misc_feature (1)..(25): SEQ ID NO: 7540; WAN024DON_at; Start 11; Stop 35
ttaagaagggaggtgatcttgcatg

SEQ ID NO: 165835 - DNA, 25 bp, Artificial
  probe
  misc_feature (1)..(25): SEQ ID NO: 7540; WAN024DON_at; Start 22; Stop 46
ggtgatcttgcatggactttgaata

SEQ ID NO: 165836 - DNA, 25 bp, Artificial
  probe
  misc_feature (1)..(25): SEQ ID NO: 7540; WAN024DON_at; Start 7; Stop 31
atttttaagaagggaggtgatcttg

SEQ ID NO: 165837 - DNA, 25 bp, Artificial
  probe
  misc_feature (1)..(25): SEQ ID NO: 7540; WAN024DON_at; Start 17; Stop 41
agggaggtgatcttgcatggacttt

SEQ ID NO: 165838 - DNA, 25 bp, Artificial
  probe
  misc_feature (1)..(25): SEQ ID NO: 5424; WAN024DOO_at; Start 90; Stop 114
tcttccgtcttggaggagcatttct

SEQ ID NO: 165839 - DNA, 25 bp, Artificial
  probe
  misc_feature (1)..(25): SEQ ID NO: 5424; WAN024DOO_at; Start 72; Stop 96
aatcacagtaaaaaatgctcttccg

SEQ ID NO: 165840 - DNA, 25 bp, Artificial
  probe
  misc_feature (1)..(25): SEQ ID NO: 5424; WAN024DOO_at; Start 80; Stop 104
taaaaaatgctcttccgtcttggag

SEQ ID NO: 165841 - DNA, 25 bp, Artificial
  probe
  misc_feature (1)..(25): SEQ ID NO: 5424; WAN024DOO_at; Start 88; Stop 112
gctcttccgtcttggaggagcattt

SEQ ID NO: 165842 - DNA, 25 bp, Artificial
  probe
  misc_feature (1)..(25): SEQ ID NO: 5424; WAN024DOO_at; Start 79; Stop 103
gtaaaaaatgctcttccgtcttgga

SEQ ID NO: 165843 - DNA, 25 bp, Artificial
  probe
  misc_feature (1)..(25): SEQ ID NO: 5424; WAN024DOO_at; Start 82; Stop 106
aaaaatgctcttccgtcttggagga

SEQ ID NO: 165844 - DNA, 25 bp, Artificial
  probe
  misc_feature (1)..(25): SEQ ID NO: 5424; WAN024DOO_at; Start 71; Stop 95
gaatcacagtaaaaaatgctcttcc

SEQ ID NO: 165845 - DNA, 25 bp, Artificial
  probe
  misc_feature (1)..(25): SEQ ID NO: 5424; WAN024DOO_at; Start 100; Stop 124
tggaggagcatttctttttatcaac

SEQ ID NO: 165846 - DNA, 25 bp, Artificial
  probe
  misc_feature (1)..(25): SEQ ID NO: 5424; WAN024DOO_at; Start 85; Stop 109
aatgctcttccgtcttggaggagca

SEQ ID NO: 165847 - DNA, 25 bp, Artificial
  probe
  misc_feature (1)..(25): SEQ ID NO: 5424; WAN024DOO_at; Start 55; Stop 79
ggaagtaaatgtgtaagaatcacag

SEQ ID NO: 165848 - DNA, 25 bp, Artificial
  probe
  misc_feature (1)..(25): SEQ ID NO: 5424; WAN024DOO_at; Start 38; Stop 62
gacttcctgcaaaactaggaagtaa

SEQ ID NO: 165849 - DNA, 25 bp, Artificial
  probe
  misc_feature (1)..(25): SEQ ID NO: 5424; WAN024DOO_at; Start 25; Stop 49
aaatggtatactagacttcctgcaa

SEQ ID NO: 165850 - DNA, 25 bp, Artificial
  probe
  misc_feature (1)..(25): SEQ ID NO: 5424; WAN024DOO_at; Start 24; Stop 48
aaaatggtatactagacttcctgca

SEQ ID NO: 165851 - DNA, 25 bp, Artificial
  probe
  misc_feature (1)..(25): SEQ ID NO: 5424; WAN024DOO_at; Start 43; Stop 67
cctgcaaaactaggaagtaaatgtg

SEQ ID NO: 165852 - DNA, 25 bp, Artificial
  probe
  misc_feature (1)..(25): SEQ ID NO: 5424; WAN024DOO_at; Start 81; Stop 105
aaaaaatgctcttccgtcttggagg

SEQ ID NO: 165853 - DNA, 25 bp, Artificial
  probe
  misc_feature (1)..(25): SEQ ID NO: 5424; WAN024DOO_at; Start 91; Stop 115
cttccgtcttggaggagcatttctt

SEQ ID NO: 165854 - DNA, 25 bp, Artificial
  probe
  misc_feature (1)..(25): SEQ ID NO: 5424; WAN024DOO_at; Start 78; Stop 102
agtaaaaaatgctcttccgtcttgg

SEQ ID NO: 165855 - DNA, 25 bp, Artificial
  probe
  misc_feature (1)..(25): SEQ ID NO: 5424; WAN024DOO_at; Start 118; Stop 142
tatcaacgaaaatcaaatagcaaac

SEQ ID NO: 165856 - DNA, 25 bp, Artificial
  probe
  misc_feature (1)..(25): SEQ ID NO: 5424; WAN024DOO_at; Start 42; Stop 66
tcctgcaaaactaggaagtaaatgt

SEQ ID NO: 165857 - DNA, 25 bp, Artificial
  probe
  misc_feature (1)..(25): SEQ ID NO: 5424; WAN024DOO_at; Start 102; Stop 126
gaggagcatttctttttatcaacga

SEQ ID NO: 165858 - DNA, 25 bp, Artificial
  probe
  misc_feature (1)..(25): SEQ ID NO: 5424; WAN024DOO_at; Start 95; Stop 119
cgtcttggaggagcatttcttttta

SEQ ID NO: 165859 - DNA, 25 bp, Artificial
  probe
  misc_feature (1)..(25): SEQ ID NO: 5424; WAN024DOO_at; Start 44; Stop 68
ctgcaaaactaggaagtaaatgtgt

SEQ ID NO: 165860 - DNA, 25 bp, Artificial
  probe
  misc_feature (1)..(25): SEQ ID NO: 5424; WAN024DOO_at; Start 52; Stop 76
ctaggaagtaaatgtgtaagaatca

SEQ ID NO: 165861 - DNA, 25 bp, Artificial
  probe
  misc_feature (1)..(25): SEQ ID NO: 5424; WAN024DOO_at; Start 94; Stop 118
ccgtcttggaggagcatttcttttt

SEQ ID NO: 165862 - DNA, 25 bp, Artificial
  probe
  misc_feature (1)..(25): SEQ ID NO: 5424; WAN024DOO_at; Start 84; Stop 108
aaatgctcttccgtcttggaggagc

SEQ ID NO: 165863 - DNA, 25 bp, Artificial
  probe
  misc_feature (1)..(25): SEQ ID NO: 5424; WAN024DOO_at; Start 67; Stop 91
gtaagaatcacagtaaaaaatgctc

SEQ ID NO: 165864 - DNA, 25 bp, Artificial
  probe
  misc_feature (1)..(25): SEQ ID NO: 5424; WAN024DOO_at; Start 77; Stop 101
cagtaaaaaatgctcttccgtcttg

SEQ ID NO: 165865 - DNA, 25 bp, Artificial
  probe
  misc_feature (1)..(25): SEQ ID NO: 5424; WAN024DOO_at; Start 97; Stop 121
tcttggaggagcatttctttttatc

SEQ ID NO: 165866 - DNA, 25 bp, Artificial
  probe
  misc_feature (1)..(25): SEQ ID NO: 5424; WAN024DOO_at; Start 104; Stop 128
ggagcatttctttttatcaacgaaa

SEQ ID NO: 165867 - DNA, 25 bp, Artificial
  probe
  misc_feature (1)..(25): SEQ ID NO: 5424; WAN024DOO_at; Start 26; Stop 50
aatggtatactagacttcctgcaaa

SEQ ID NO: 165868 - DNA, 25 bp, Artificial
  probe
  misc_feature (1)..(25): SEQ ID NO: 5424; WAN024DOO_at; Start 65; Stop 89
gtgtaagaatcacagtaaaaaatgc

SEQ ID NO: 165869 - DNA, 25 bp, Artificial
  probe
  misc_feature (1)..(25): SEQ ID NO: 5424; WAN024DOO_at; Start 47; Stop 71
caaaactaggaagtaaatgtgtaag

SEQ ID NO: 165870 - DNA, 25 bp, Artificial
  probe
  misc_feature (1)..(25): SEQ ID NO: 5424; WAN024DOO_at; Start 74; Stop 98
tcacagtaaaaaatgctcttccgtc

SEQ ID NO: 165871 - DNA, 25 bp, Artificial
  probe
  misc_feature (1)..(25): SEQ ID NO: 5424; WAN024DOO_at; Start 23; Stop 47
aaaaatggtatactagacttcctgc

SEQ ID NO: 165872 - DNA, 25 bp, Artificial
  probe
  misc_feature (1)..(25): SEQ ID NO: 5168; WAN024DOP_at; Start 12; Stop 36
aatgctcctccaagacggaagagca

SEQ ID NO: 165873 - DNA, 25 bp, Artificial
  probe
  misc_feature (1)..(25): SEQ ID NO: 5168; WAN024DOP_at; Start 15; Stop 39
gctcctccaagacggaagagcattt

SEQ ID NO: 165874 - DNA, 25 bp, Artificial
  probe
  misc_feature (1)..(25): SEQ ID NO: 5168; WAN024DOP_at; Start 9; Stop 33
aaaaatgctcctccaagacggaaga

SEQ ID NO: 165875 - DNA, 25 bp, Artificial
  probe
  misc_feature (1)..(25): SEQ ID NO: 5168; WAN024DOP_at; Start 1; Stop 25
ttgataaaaaaaatgctcctccaag

SEQ ID NO: 165876 - DNA, 25 bp, Artificial
  probe
  misc_feature (1)..(25): SEQ ID NO: 5168; WAN024DOP_at; Start 22; Stop 46
caagacggaagagcattttttattg

SEQ ID NO: 165877 - DNA, 25 bp, Artificial
  probe
  misc_feature (1)..(25): SEQ ID NO: 5168; WAN024DOP_at; Start 18; Stop 42
cctccaagacggaagagcatttttt

SEQ ID NO: 165878 - DNA, 25 bp, Artificial
  probe
  misc_feature (1)..(25): SEQ ID NO: 5168; WAN024DOP_at; Start 4; Stop 28
ataaaaaaaatgctcctccaagacg

SEQ ID NO: 165879 - DNA, 25 bp, Artificial
  probe
  misc_feature (1)..(25): SEQ ID NO: 5168; WAN024DOP_at; Start 8; Stop 32
aaaaaatgctcctccaagacggaag

SEQ ID NO: 165880 - DNA, 25 bp, Artificial
  probe
  misc_feature (1)..(25): SEQ ID NO: 5168; WAN024DOP_at; Start 13; Stop 37
atgctcctccaagacggaagagcat

SEQ ID NO: 165881 - DNA, 25 bp, Artificial
  probe
  misc_feature (1)..(25): SEQ ID NO: 5168; WAN024DOP_at; Start 33; Stop 57
agcattttttattgtgattcttaca

SEQ ID NO: 165882 - DNA, 25 bp, Artificial
  probe
  misc_feature (1)..(25): SEQ ID NO: 5168; WAN024DOP_at; Start 75; Stop 99
tgcaggaagtctagtataccatttt

SEQ ID NO: 165883 - DNA, 25 bp, Artificial
  probe
  misc_feature (1)..(25): SEQ ID NO: 5168; WAN024DOP_at; Start 34; Stop 58
gcattttttattgtgattcttacac

SEQ ID NO: 165884 - DNA, 25 bp, Artificial
  probe
  misc_feature (1)..(25): SEQ ID NO: 5168; WAN024DOP_at; Start 25; Stop 49
gacggaagagcattttttattgtga

SEQ ID NO: 165885 - DNA, 25 bp, Artificial
  probe
  misc_feature (1)..(25): SEQ ID NO: 5168; WAN024DOP_at; Start 14; Stop 38
tgctcctccaagacggaagagcatt

SEQ ID NO: 165886 - DNA, 25 bp, Artificial
  probe
  misc_feature (1)..(25): SEQ ID NO: 5168; WAN024DOP_at; Start 21; Stop 45
ccaagacggaagagcattttttatt

SEQ ID NO: 165887 - DNA, 25 bp, Artificial
  probe
  misc_feature (1)..(25): SEQ ID NO: 5168; WAN024DOP_at; Start 2; Stop 26
tgataaaaaaaatgctcctccaaga

SEQ ID NO: 165888 - DNA, 25 bp, Artificial
  probe
  misc_feature (1)..(25): SEQ ID NO: 5168; WAN024DOP_at; Start 76; Stop 100
gcaggaagtctagtataccattttt

SEQ ID NO: 165889 - DNA, 25 bp, Artificial
  probe
  misc_feature (1)..(25): SEQ ID NO: 5168; WAN024DOP_at; Start 35; Stop 59
cattttttattgtgattcttacaca

SEQ ID NO: 165890 - DNA, 25 bp, Artificial
  probe
  misc_feature (1)..(25): SEQ ID NO: 5168; WAN024DOP_at; Start 11; Stop 35
aaatgctcctccaagacggaagagc

SEQ ID NO: 165891 - DNA, 25 bp, Artificial
  probe
  misc_feature (1)..(25): SEQ ID NO: 5168; WAN024DOP_at; Start 29; Stop 53
gaagagcattttttattgtgattct

SEQ ID NO: 165892 - DNA, 25 bp, Artificial
  probe
  misc_feature (1)..(25): SEQ ID NO: 5168; WAN024DOP_at; Start 3; Stop 27
gataaaaaaaatgctcctccaagac

SEQ ID NO: 165893 - DNA, 25 bp, Artificial
  probe
  misc_feature (1)..(25): SEQ ID NO: 5168; WAN024DOP_at; Start 26; Stop 50
acggaagagcattttttattgtgat

SEQ ID NO: 165894 - DNA, 25 bp, Artificial
  probe
  misc_feature (1)..(25): SEQ ID NO: 5168; WAN024DOP_at; Start 39; Stop 63
ttttattgtgattcttacacattta

SEQ ID NO: 165895 - DNA, 25 bp, Artificial
  probe
  misc_feature (1)..(25): SEQ ID NO: 5168; WAN024DOP_at; Start 28; Stop 52
ggaagagcattttttattgtgattc

SEQ ID NO: 165896 - DNA, 25 bp, Artificial
  probe
  misc_feature (1)..(25): SEQ ID NO: 5168; WAN024DOP_at; Start 23; Stop 47
aagacggaagagcattttttattgt

SEQ ID NO: 165897 - DNA, 25 bp, Artificial
  probe
  misc_feature (1)..(25): SEQ ID NO: 5168; WAN024DOP_at; Start 74; Stop 98
ttgcaggaagtctagtataccattt

SEQ ID NO: 165898 - DNA, 25 bp, Artificial
  probe
  misc_feature (1)..(25): SEQ ID NO: 5168; WAN024DOP_at; Start 32; Stop 56
gagcattttttattgtgattcttac

SEQ ID NO: 165899 - DNA, 25 bp, Artificial
  probe
  misc_feature (1)..(25): SEQ ID NO: 5168; WAN024DOP_at; Start 10; Stop 34
aaaatgctcctccaagacggaagag

SEQ ID NO: 165900 - DNA, 25 bp, Artificial
  probe
  misc_feature (1)..(25): SEQ ID NO: 5168; WAN024DOP_at; Start 20; Stop 44
tccaagacggaagagcattttttat

SEQ ID NO: 165901 - DNA, 25 bp, Artificial
  probe
  misc_feature (1)..(25): SEQ ID NO: 5168; WAN024DOP_at; Start 73; Stop 97
tttgcaggaagtctagtataccatt

SEQ ID NO: 165902 - DNA, 25 bp, Artificial
  probe
  misc_feature (1)..(25): SEQ ID NO: 5168; WAN024DOP_at; Start 19; Stop 43
ctccaagacggaagagcatttttta

SEQ ID NO: 165903 - DNA, 25 bp, Artificial
  probe
  misc_feature (1)..(25): SEQ ID NO: 5168; WAN024DOP_at; Start 77; Stop 101
caggaagtctagtataccatttttt

SEQ ID NO: 165904 - DNA, 25 bp, Artificial
  probe
  misc_feature (1)..(25): SEQ ID NO: 5168; WAN024DOP_at; Start 27; Stop 51
cggaagagcattttttattgtgatt

SEQ ID NO: 165905 - DNA, 25 bp, Artificial
  probe
  misc_feature (1)..(25): SEQ ID NO: 5168; WAN024DOP_at; Start 17; Stop 41
tcctccaagacggaagagcattttt

SEQ ID NO: 165906 - DNA, 25 bp, Artificial
  probe
  misc_feature (1)..(25): SEQ ID NO: 2269; WAN024DOQ_at; Start 184; Stop 208
gtatttatctattttactgtcgaag

SEQ ID NO: 165907 - DNA, 25 bp, Artificial
  probe
  misc_feature (1)..(25): SEQ ID NO: 2269; WAN024DOQ_at; Start 489; Stop 513
taagagtaagtatagtaagagagaa

SEQ ID NO: 165908 - DNA, 25 bp, Artificial
  probe
  misc_feature (1)..(25): SEQ ID NO: 2269; WAN024DOQ_at; Start 103; Stop 127
gaagcaattatcctttattccatac

SEQ ID NO: 165909 - DNA, 25 bp, Artificial
  probe
  misc_feature (1)..(25): SEQ ID NO: 2269; WAN024DOQ_at; Start 507; Stop 531
gagagaatatagttttggtgaaaac

SEQ ID NO: 165910 - DNA, 25 bp, Artificial
  probe
  misc_feature (1)..(25): SEQ ID NO: 2269; WAN024DOQ_at; Start 602; Stop 626
cacagcttgagaattacattagact

SEQ ID NO: 165911 - DNA, 25 bp, Artificial
  probe
  misc_feature (1)..(25): SEQ ID NO: 2269; WAN024DOQ_at; Start 58; Stop 82
ccggagatattagttgatagagaag

SEQ ID NO: 165912 - DNA, 25 bp, Artificial
  probe
  misc_feature (1)..(25): SEQ ID NO: 2269; WAN024DOQ_at; Start 171; Stop 195
caaggaaggcagagtatttatctat

SEQ ID NO: 165913 - DNA, 25 bp, Artificial
  probe
  misc_feature (1)..(25): SEQ ID NO: 2269; WAN024DOQ_at; Start 578; Stop 602
cggatttacaaatcataatgaactc

SEQ ID NO: 165914 - DNA, 25 bp, Artificial
  probe
  misc_feature (1)..(25): SEQ ID NO: 2269; WAN024DOQ_at; Start 382; Stop 406
cagaagtcaaaaaacttaacttcag

SEQ ID NO: 165915 - DNA, 25 bp, Artificial
  probe
  misc_feature (1)..(25): SEQ ID NO: 2269; WAN024DOQ_at; Start 321; Stop 345
gccgaacatcatttatgttaaagac

SEQ ID NO: 165916 - DNA, 25 bp, Artificial
  probe
  misc_feature (1)..(25): SEQ ID NO: 2269; WAN024DOQ_at; Start 215; Stop 239
tgaaaagaagaaatatctcaaagcc

SEQ ID NO: 165917 - DNA, 25 bp, Artificial
  probe
  misc_feature (1)..(25): SEQ ID NO: 2269; WAN024DOQ_at; Start 307; Stop 331
cttggacttggtaagccgaacatca

SEQ ID NO: 165918 - DNA, 25 bp, Artificial
  probe
  misc_feature (1)..(25): SEQ ID NO: 2269; WAN024DOQ_at; Start 360; Stop 384
tcaggtaaaagaaaatgacttacag

SEQ ID NO: 165919 - DNA, 25 bp, Artificial
  probe
  misc_feature (1)..(25): SEQ ID NO: 2269; WAN024DOQ_at; Start 50; Stop 74
taaaagtaccggagatattagttga

SEQ ID NO: 165920 - DNA, 25 bp, Artificial
  probe
  misc_feature (1)..(25): SEQ ID NO: 2269; WAN024DOQ_at; Start 142; Stop 166
ggaatgtcatttaagaataactgga

SEQ ID NO: 165921 - DNA, 25 bp, Artificial
  probe
  misc_feature (1)..(25): SEQ ID NO: 2269; WAN024DOQ_at; Start 447; Stop 471
tcaagaggttaagaaccttgactct

SEQ ID NO: 165922 - DNA, 25 bp, Artificial
  probe
  misc_feature (1)..(25): SEQ ID NO: 2269; WAN024DOQ_at; Start 404; Stop 428
cagaagtaaaagattttaacctcag

SEQ ID NO: 165923 - DNA, 25 bp, Artificial
  probe
  misc_feature (1)..(25): SEQ ID NO: 2269; WAN024DOQ_at; Start 293; Stop 317
tcgaaagagtaaggcttggacttgg

SEQ ID NO: 165924 - DNA, 25 bp, Artificial
  probe
  misc_feature (1)..(25): SEQ ID NO: 2269; WAN024DOQ_at; Start 90; Stop 114
gggcttatcagcagaagcaattatc

SEQ ID NO: 165925 - DNA, 25 bp, Artificial
  probe
  misc_feature (1)..(25): SEQ ID NO: 2269; WAN024DOQ_at; Start 419; Stop 443
ttaacctcagaagtaaagaaaatga

SEQ ID NO: 165926 - DNA, 25 bp, Artificial
  probe
  misc_feature (1)..(25): SEQ ID NO: 2269; WAN024DOQ_at; Start 436; Stop 460
gaaaatgaacttcaagaggttaaga

SEQ ID NO: 165927 - DNA, 25 bp, Artificial
  probe
  misc_feature (1)..(25): SEQ ID NO: 2269; WAN024DOQ_at; Start 459; Stop 483
gaaccttgactctaactatatagag

SEQ ID NO: 165928 - DNA, 25 bp, Artificial
  probe
  misc_feature (1)..(25): SEQ ID NO: 2269; WAN024DOQ_at; Start 562; Stop 586
gctgctgaagatatatcggatttac

SEQ ID NO: 165929 - DNA, 25 bp, Artificial
  probe
  misc_feature (1)..(25): SEQ ID NO: 2269; WAN024DOQ_at; Start 200; Stop 224
ctgtcgaagaaattatgaaaagaag

SEQ ID NO: 165930 - DNA, 25 bp, Artificial
  probe
  misc_feature (1)..(25): SEQ ID NO: 2269; WAN024DOQ_at; Start 525; Stop 549
tgaaaacggacttggaacatttcaa

SEQ ID NO: 165931 - DNA, 25 bp, Artificial
  probe
  misc_feature (1)..(25): SEQ ID NO: 2269; WAN024DOQ_at; Start 365; Stop 389
taaaagaaaatgacttacagaagtc

SEQ ID NO: 165932 - DNA, 25 bp, Artificial
  probe
  misc_feature (1)..(25): SEQ ID NO: 2269; WAN024DOQ_at; Start 156; Stop 180
gaataactggatagacaaggaaggc

SEQ ID NO: 165933 - DNA, 25 bp, Artificial
  probe
  misc_feature (1)..(25): SEQ ID NO: 2269; WAN024DOQ_at; Start 67; Stop 91
ttagttgatagagaagaatttcggg

SEQ ID NO: 165934 - DNA, 25 bp, Artificial
  probe
  misc_feature (1)..(25): SEQ ID NO: 2269; WAN024DOQ_at; Start 557; Stop 581
ttttagctgctgaagatatatcgga

SEQ ID NO: 165935 - DNA, 25 bp, Artificial
  probe
  misc_feature (1)..(25): SEQ ID NO: 2269; WAN024DOQ_at; Start 547; Stop 571
caaaatgtgtttttagctgctgaag

SEQ ID NO: 165936 - DNA, 25 bp, Artificial
  probe
  misc_feature (1)..(25): SEQ ID NO: 2269; WAN024DOQ_at; Start 474; Stop 498
ctatatagagaataataagagtaag

SEQ ID NO: 165937 - DNA, 25 bp, Artificial
  probe
  misc_feature (1)..(25): SEQ ID NO: 2269; WAN024DOQ_at; Start 588; Stop 612
aatcataatgaactcacagcttgag

SEQ ID NO: 165938 - DNA, 25 bp, Artificial
  probe
  misc_feature (1)..(25): SEQ ID NO: 2269; WAN024DOQ_at; Start 313; Stop 337
cttggtaagccgaacatcatttatg

SEQ ID NO: 165939 - DNA, 25 bp, Artificial
  probe
  misc_feature (1)..(25): SEQ ID NO: 2269; WAN024DOQ_at; Start 165; Stop 189
gatagacaaggaaggcagagtattt

SEQ ID NO: 165940 - DNA, 25 bp, Artificial
  probe
  misc_feature (1)..(25): SEQ ID NO: 2520; WAN024DOR_at; Start 157; Stop 181
cgaatgcctcaaagtccatgggtag

SEQ ID NO: 165941 - DNA, 25 bp, Artificial
  probe
  misc_feature (1)..(25): SEQ ID NO: 2520; WAN024DOR_at; Start 161; Stop 185
tgcctcaaagtccatgggtagaaag

SEQ ID NO: 165942 - DNA, 25 bp, Artificial
  probe
  misc_feature (1)..(25): SEQ ID NO: 2520; WAN024DOR_at; Start 166; Stop 190
caaagtccatgggtagaaaggattg

SEQ ID NO: 165943 - DNA, 25 bp, Artificial
  probe
  misc_feature (1)..(25): SEQ ID NO: 2520; WAN024DOR_at; Start 8; Stop 32
aacgattttgggagaacttgtccat

SEQ ID NO: 165944 - DNA, 25 bp, Artificial
  probe
  misc_feature (1)..(25): SEQ ID NO: 2520; WAN024DOR_at; Start 147; Stop 171
gatggaacaacgaatgcctcaaagt

SEQ ID NO: 165945 - DNA, 25 bp, Artificial
  probe
  misc_feature (1)..(25): SEQ ID NO: 2520; WAN024DOR_at; Start 58; Stop 82
tggattgagttaaccagaaaaatgt

SEQ ID NO: 165946 - DNA, 25 bp, Artificial
  probe
  misc_feature (1)..(25): SEQ ID NO: 2520; WAN024DOR_at; Start 163; Stop 187
cctcaaagtccatgggtagaaagga

SEQ ID NO: 165947 - DNA, 25 bp, Artificial
  probe
  misc_feature (1)..(25): SEQ ID NO: 2520; WAN024DOR_at; Start 68; Stop 92
taaccagaaaaatgtttgcgggaga

SEQ ID NO: 165948 - DNA, 25 bp, Artificial
  probe
  misc_feature (1)..(25): SEQ ID NO: 2520; WAN024DOR_at; Start 11; Stop 35
gattttgggagaacttgtccattat

SEQ ID NO: 165949 - DNA, 25 bp, Artificial
  probe
  misc_feature (1)..(25): SEQ ID NO: 2520; WAN024DOR_at; Start 164; Stop 188
ctcaaagtccatgggtagaaaggat

SEQ ID NO: 165950 - DNA, 25 bp, Artificial
  probe
  misc_feature (1)..(25): SEQ ID NO: 2520; WAN024DOR_at; Start 63; Stop 87
tgagttaaccagaaaaatgtttgcg

SEQ ID NO: 165951 - DNA, 25 bp, Artificial
  probe
  misc_feature (1)..(25): SEQ ID NO: 2520; WAN024DOR_at; Start 54; Stop 78
cagctggattgagttaaccagaaaa

SEQ ID NO: 165952 - DNA, 25 bp, Artificial
  probe
  misc_feature (1)..(25): SEQ ID NO: 2520; WAN024DOR_at; Start 10; Stop 34
cgattttgggagaacttgtccatta

SEQ ID NO: 165953 - DNA, 25 bp, Artificial
  probe
  misc_feature (1)..(25): SEQ ID NO: 2520; WAN024DOR_at; Start 79; Stop 103
atgtttgcgggagagtttcactatc

SEQ ID NO: 165954 - DNA, 25 bp, Artificial
  probe
  misc_feature (1)..(25): SEQ ID NO: 2520; WAN024DOR_at; Start 208; Stop 232
gattatgaagatttatttcggaggt

SEQ ID NO: 165955 - DNA, 25 bp, Artificial
  probe
  misc_feature (1)..(25): SEQ ID NO: 2520; WAN024DOR_at; Start 146; Stop 170
agatggaacaacgaatgcctcaaag

SEQ ID NO: 165956 - DNA, 25 bp, Artificial
  probe
  misc_feature (1)..(25): SEQ ID NO: 2520; WAN024DOR_at; Start 211; Stop 235
tatgaagatttatttcggaggtaac

SEQ ID NO: 165957 - DNA, 25 bp, Artificial
  probe
  misc_feature (1)..(25): SEQ ID NO: 2520; WAN024DOR_at; Start 51; Stop 75
tatcagctggattgagttaaccaga

SEQ ID NO: 165958 - DNA, 25 bp, Artificial
  probe
  misc_feature (1)..(25): SEQ ID NO: 2520; WAN024DOR_at; Start 158; Stop 182
gaatgcctcaaagtccatgggtaga

SEQ ID NO: 165959 - DNA, 25 bp, Artificial
  probe
  misc_feature (1)..(25): SEQ ID NO: 2520; WAN024DOR_at; Start 217; Stop 241
gatttatttcggaggtaactaatga

SEQ ID NO: 165960 - DNA, 25 bp, Artificial
  probe
  misc_feature (1)..(25): SEQ ID NO: 2520; WAN024DOR_at; Start 159; Stop 183
aatgcctcaaagtccatgggtagaa

SEQ ID NO: 165961 - DNA, 25 bp, Artificial
  probe
  misc_feature (1)..(25): SEQ ID NO: 2520; WAN024DOR_at; Start 7; Stop 31
gaacgattttgggagaacttgtcca

SEQ ID NO: 165962 - DNA, 25 bp, Artificial
  probe
  misc_feature (1)..(25): SEQ ID NO: 2520; WAN024DOR_at; Start 213; Stop 237
tgaagatttatttcggaggtaacta

SEQ ID NO: 165963 - DNA, 25 bp, Artificial
  probe
  misc_feature (1)..(25): SEQ ID NO: 2520; WAN024DOR_at; Start 49; Stop 73
aatatcagctggattgagttaacca

SEQ ID NO: 165964 - DNA, 25 bp, Artificial
  probe
  misc_feature (1)..(25): SEQ ID NO: 2520; WAN024DOR_at; Start 150; Stop 174
ggaacaacgaatgcctcaaagtcca

SEQ ID NO: 165965 - DNA, 25 bp, Artificial
  probe
  misc_feature (1)..(25): SEQ ID NO: 2520; WAN024DOR_at; Start 171; Stop 195
tccatgggtagaaaggattgtgcag

SEQ ID NO: 165966 - DNA, 25 bp, Artificial
  probe
  misc_feature (1)..(25): SEQ ID NO: 2520; WAN024DOR_at; Start 169; Stop 193
agtccatgggtagaaaggattgtgc

SEQ ID NO: 165967 - DNA, 25 bp, Artificial
  probe
  misc_feature (1)..(25): SEQ ID NO: 2520; WAN024DOR_at; Start 152; Stop 176
aacaacgaatgcctcaaagtccatg

SEQ ID NO: 165968 - DNA, 25 bp, Artificial
  probe
  misc_feature (1)..(25): SEQ ID NO: 2520; WAN024DOR_at; Start 71; Stop 95
ccagaaaaatgtttgcgggagagtt

SEQ ID NO: 165969 - DNA, 25 bp, Artificial
  probe
  misc_feature (1)..(25): SEQ ID NO: 2520; WAN024DOR_at; Start 77; Stop 101
aaatgtttgcgggagagtttcacta

SEQ ID NO: 165970 - DNA, 25 bp, Artificial
  probe
  misc_feature (1)..(25): SEQ ID NO: 2520; WAN024DOR_at; Start 149; Stop 173
tggaacaacgaatgcctcaaagtcc

SEQ ID NO: 165971 - DNA, 25 bp, Artificial
  probe
  misc_feature (1)..(25): SEQ ID NO: 2520; WAN024DOR_at; Start 155; Stop 179
aacgaatgcctcaaagtccatgggt

SEQ ID NO: 165972 - DNA, 25 bp, Artificial
  probe
  misc_feature (1)..(25): SEQ ID NO: 2520; WAN024DOR_at; Start 72; Stop 96
cagaaaaatgtttgcgggagagttt

SEQ ID NO: 165973 - DNA, 25 bp, Artificial
  probe
  misc_feature (1)..(25): SEQ ID NO: 2520; WAN024DOR_at; Start 154; Stop 178
caacgaatgcctcaaagtccatggg

SEQ ID NO: 165974 - DNA, 25 bp, Artificial
  probe
  misc_feature (1)..(25): SEQ ID NO: 2431; WAN024DOS_at; Start 97; Stop 121
cgttgcggtaactggagtgctttta

SEQ ID NO: 165975 - DNA, 25 bp, Artificial
  probe
  misc_feature (1)..(25): SEQ ID NO: 2431; WAN024DOS_at; Start 44; Stop 68
ttgacgaaacagatgaagttgatgg

SEQ ID NO: 165976 - DNA, 25 bp, Artificial
  probe
  misc_feature (1)..(25): SEQ ID NO: 2431; WAN024DOS_at; Start 46; Stop 70
gacgaaacagatgaagttgatggaa

SEQ ID NO: 165977 - DNA, 25 bp, Artificial
  probe
  misc_feature (1)..(25): SEQ ID NO: 2431; WAN024DOS_at; Start 43; Stop 67
gttgacgaaacagatgaagttgatg

SEQ ID NO: 165978 - DNA, 25 bp, Artificial
  probe
  misc_feature (1)..(25): SEQ ID NO: 2431; WAN024DOS_at; Start 51; Stop 75
aacagatgaagttgatggaatgcga

SEQ ID NO: 165979 - DNA, 25 bp, Artificial
  probe
  misc_feature (1)..(25): SEQ ID NO: 2431; WAN024DOS_at; Start 98; Stop 122
gttgcggtaactggagtgcttttag

SEQ ID NO: 165980 - DNA, 25 bp, Artificial
  probe
  misc_feature (1)..(25): SEQ ID NO: 2431; WAN024DOS_at; Start 102; Stop 126
cggtaactggagtgcttttagttgg

SEQ ID NO: 165981 - DNA, 25 bp, Artificial
  probe
  misc_feature (1)..(25): SEQ ID NO: 2431; WAN024DOS_at; Start 108; Stop 132
ctggagtgcttttagttgggaaaat

SEQ ID NO: 165982 - DNA, 25 bp, Artificial
  probe
  misc_feature (1)..(25): SEQ ID NO: 2431; WAN024DOS_at; Start 37; Stop 61
gttcaagttgacgaaacagatgaag

SEQ ID NO: 165983 - DNA, 25 bp, Artificial
  probe
  misc_feature (1)..(25): SEQ ID NO: 2431; WAN024DOS_at; Start 13; Stop 37
gtattaaatcttcaattagtatctg

SEQ ID NO: 165984 - DNA, 25 bp, Artificial
  probe
  misc_feature (1)..(25): SEQ ID NO: 2431; WAN024DOS_at; Start 60; Stop 84
agttgatggaatgcgatttagtaca

SEQ ID NO: 165985 - DNA, 25 bp, Artificial
  probe
  misc_feature (1)..(25): SEQ ID NO: 2431; WAN024DOS_at; Start 39; Stop 63
tcaagttgacgaaacagatgaagtt

SEQ ID NO: 165986 - DNA, 25 bp, Artificial
  probe
  misc_feature (1)..(25): SEQ ID NO: 2431; WAN024DOS_at; Start 32; Stop 56
tatctgttcaagttgacgaaacaga

SEQ ID NO: 165987 - DNA, 25 bp, Artificial
  probe
  misc_feature (1)..(25): SEQ ID NO: 2431; WAN024DOS_at; Start 36; Stop 60
tgttcaagttgacgaaacagatgaa

SEQ ID NO: 165988 - DNA, 25 bp, Artificial
  probe
  misc_feature (1)..(25): SEQ ID NO: 2431; WAN024DOS_at; Start 29; Stop 53
tagtatctgttcaagttgacgaaac

SEQ ID NO: 165989 - DNA, 25 bp, Artificial
  probe
  misc_feature (1)..(25): SEQ ID NO: 2431; WAN024DOS_at; Start 67; Stop 91
ggaatgcgatttagtacattcagta

SEQ ID NO: 165990 - DNA, 25 bp, Artificial
  probe
  misc_feature (1)..(25): SEQ ID NO: 2431; WAN024DOS_at; Start 34; Stop 58
tctgttcaagttgacgaaacagatg

SEQ ID NO: 165991 - DNA, 25 bp, Artificial
  probe
  misc_feature (1)..(25): SEQ ID NO: 2431; WAN024DOS_at; Start 30; Stop 54
agtatctgttcaagttgacgaaaca

SEQ ID NO: 165992 - DNA, 25 bp, Artificial
  probe
  misc_feature (1)..(25): SEQ ID NO: 2431; WAN024DOS_at; Start 58; Stop 82
gaagttgatggaatgcgatttagta

SEQ ID NO: 165993 - DNA, 25 bp, Artificial
  probe
  misc_feature (1)..(25): SEQ ID NO: 2431; WAN024DOS_at; Start 69; Stop 93
aatgcgatttagtacattcagtaca

SEQ ID NO: 165994 - DNA, 25 bp, Artificial
  probe
  misc_feature (1)..(25): SEQ ID NO: 2431; WAN024DOS_at; Start 18; Stop 42
aaatcttcaattagtatctgttcaa

SEQ ID NO: 165995 - DNA, 25 bp, Artificial
  probe
  misc_feature (1)..(25): SEQ ID NO: 2431; WAN024DOS_at; Start 26; Stop 50
aattagtatctgttcaagttgacga

SEQ ID NO: 165996 - DNA, 25 bp, Artificial
  probe
  misc_feature (1)..(25): SEQ ID NO: 2431; WAN024DOS_at; Start 40; Stop 64
caagttgacgaaacagatgaagttg

SEQ ID NO: 165997 - DNA, 25 bp, Artificial
  probe
  misc_feature (1)..(25): SEQ ID NO: 2431; WAN024DOS_at; Start 53; Stop 77
cagatgaagttgatggaatgcgatt

SEQ ID NO: 165998 - DNA, 25 bp, Artificial
  probe
  misc_feature (1)..(25): SEQ ID NO: 2431; WAN024DOS_at; Start 55; Stop 79
gatgaagttgatggaatgcgattta

SEQ ID NO: 165999 - DNA, 25 bp, Artificial
  probe
  misc_feature (1)..(25): SEQ ID NO: 2431; WAN024DOS_at; Start 49; Stop 73
gaaacagatgaagttgatggaatgc

SEQ ID NO: 166000 - DNA, 25 bp, Artificial
  probe
  misc_feature (1)..(25): SEQ ID NO: 2431; WAN024DOS_at; Start 52; Stop 76
acagatgaagttgatggaatgcgat

SEQ ID NO: 166001 - DNA, 25 bp, Artificial
  probe
  misc_feature (1)..(25): SEQ ID NO: 2431; WAN024DOS_at; Start 100; Stop 124
tgcggtaactggagtgcttttagtt

SEQ ID NO: 166002 - DNA, 25 bp, Artificial
  probe
  misc_feature (1)..(25): SEQ ID NO: 2431; WAN024DOS_at; Start 99; Stop 123
ttgcggtaactggagtgcttttagt

SEQ ID NO: 166003 - DNA, 25 bp, Artificial
  probe
  misc_feature (1)..(25): SEQ ID NO: 2431; WAN024DOS_at; Start 64; Stop 88
gatggaatgcgatttagtacattca

SEQ ID NO: 166004 - DNA, 25 bp, Artificial
  probe
  misc_feature (1)..(25): SEQ ID NO: 2431; WAN024DOS_at; Start 71; Stop 95
tgcgatttagtacattcagtacaaa

SEQ ID NO: 166005 - DNA, 25 bp, Artificial
  probe
  misc_feature (1)..(25): SEQ ID NO: 2431; WAN024DOS_at; Start 50; Stop 74
aaacagatgaagttgatggaatgcg

SEQ ID NO: 166006 - DNA, 25 bp, Artificial
  probe
  misc_feature (1)..(25): SEQ ID NO: 2431; WAN024DOS_at; Start 25; Stop 49
caattagtatctgttcaagttgacg

SEQ ID NO: 166007 - DNA, 25 bp, Artificial
  probe
  misc_feature (1)..(25): SEQ ID NO: 2431; WAN024DOS_at; Start 105; Stop 129
taactggagtgcttttagttgggaa

SEQ ID NO: 166008 - DNA, 25 bp, Artificial
  probe
  misc_feature (1)..(25): SEQ ID NO: 3439; WAN024DOT_at; Start 29; Stop 53
aagaatatcttcatcccaatgtttt

SEQ ID NO: 166009 - DNA, 25 bp, Artificial
  probe
  misc_feature (1)..(25): SEQ ID NO: 3439; WAN024DOT_at; Start 19; Stop 43
tacaaccaagaagaatatcttcatc

SEQ ID NO: 166010 - DNA, 25 bp, Artificial
  probe
  misc_feature (1)..(25): SEQ ID NO: 3439; WAN024DOT_at; Start 49; Stop 73
gtttttagtagaatgcttcaatttc

SEQ ID NO: 166011 - DNA, 25 bp, Artificial
  probe
  misc_feature (1)..(25): SEQ ID NO: 3439; WAN024DOT_at; Start 44; Stop 68
ccaatgtttttagtagaatgcttca

SEQ ID NO: 166012 - DNA, 25 bp, Artificial
  probe
  misc_feature (1)..(25): SEQ ID NO: 3439; WAN024DOT_at; Start 43; Stop 67
cccaatgtttttagtagaatgcttc

SEQ ID NO: 166013 - DNA, 25 bp, Artificial
  probe
  misc_feature (1)..(25): SEQ ID NO: 3439; WAN024DOT_at; Start 25; Stop 49
caagaagaatatcttcatcccaatg

SEQ ID NO: 166014 - DNA, 25 bp, Artificial
  probe
  misc_feature (1)..(25): SEQ ID NO: 3439; WAN024DOT_at; Start 10; Stop 34
aaggaaggatacaaccaagaagaat

SEQ ID NO: 166015 - DNA, 25 bp, Artificial
  probe
  misc_feature (1)..(25): SEQ ID NO: 3439; WAN024DOT_at; Start 54; Stop 78
tagtagaatgcttcaatttctgggt

SEQ ID NO: 166016 - DNA, 25 bp, Artificial
  probe
  misc_feature (1)..(25): SEQ ID NO: 3439; WAN024DOT_at; Start 42; Stop 66
tcccaatgtttttagtagaatgctt

SEQ ID NO: 166017 - DNA, 25 bp, Artificial
  probe
  misc_feature (1)..(25): SEQ ID NO: 3439; WAN024DOT_at; Start 9; Stop 33
caaggaaggatacaaccaagaagaa

SEQ ID NO: 166018 - DNA, 25 bp, Artificial
  probe
  misc_feature (1)..(25): SEQ ID NO: 3439; WAN024DOT_at; Start 52; Stop 76
tttagtagaatgcttcaatttctgg

SEQ ID NO: 166019 - DNA, 25 bp, Artificial
  probe
  misc_feature (1)..(25): SEQ ID NO: 3439; WAN024DOT_at; Start 45; Stop 69
caatgtttttagtagaatgcttcaa

SEQ ID NO: 166020 - DNA, 25 bp, Artificial
  probe
  misc_feature (1)..(25): SEQ ID NO: 3439; WAN024DOT_at; Start 11; Stop 35
aggaaggatacaaccaagaagaata

SEQ ID NO: 166021 - DNA, 25 bp, Artificial
  probe
  misc_feature (1)..(25): SEQ ID NO: 3439; WAN024DOT_at; Start 6; Stop 30
ttccaaggaaggatacaaccaagaa

SEQ ID NO: 166022 - DNA, 25 bp, Artificial
  probe
  misc_feature (1)..(25): SEQ ID NO: 3439; WAN024DOT_at; Start 40; Stop 64
catcccaatgtttttagtagaatgc

SEQ ID NO: 166023 - DNA, 25 bp, Artificial
  probe
  misc_feature (1)..(25): SEQ ID NO: 3439; WAN024DOT_at; Start 27; Stop 51
agaagaatatcttcatcccaatgtt

SEQ ID NO: 166024 - DNA, 25 bp, Artificial
  probe
  misc_feature (1)..(25): SEQ ID NO: 3439; WAN024DOT_at; Start 53; Stop 77
ttagtagaatgcttcaatttctggg

SEQ ID NO: 166025 - DNA, 25 bp, Artificial
  probe
  misc_feature (1)..(25): SEQ ID NO: 3439; WAN024DOT_at; Start 5; Stop 29
tttccaaggaaggatacaaccaaga

SEQ ID NO: 166026 - DNA, 25 bp, Artificial
  probe
  misc_feature (1)..(25): SEQ ID NO: 3439; WAN024DOT_at; Start 22; Stop 46
aaccaagaagaatatcttcatccca

SEQ ID NO: 166027 - DNA, 25 bp, Artificial
  probe
  misc_feature (1)..(25): SEQ ID NO: 3439; WAN024DOT_at; Start 24; Stop 48
ccaagaagaatatcttcatcccaat

SEQ ID NO: 166028 - DNA, 25 bp, Artificial
  probe
  misc_feature (1)..(25): SEQ ID NO: 3439; WAN024DOT_at; Start 7; Stop 31
tccaaggaaggatacaaccaagaag

SEQ ID NO: 166029 - DNA, 25 bp, Artificial
  probe
  misc_feature (1)..(25): SEQ ID NO: 3439; WAN024DOT_at; Start 46; Stop 70
aatgtttttagtagaatgcttcaat

SEQ ID NO: 166030 - DNA, 25 bp, Artificial
  probe
  misc_feature (1)..(25): SEQ ID NO: 3439; WAN024DOT_at; Start 8; Stop 32
ccaaggaaggatacaaccaagaaga

SEQ ID NO: 166031 - DNA, 25 bp, Artificial
  probe
  misc_feature (1)..(25): SEQ ID NO: 3439; WAN024DOT_at; Start 41; Stop 65
atcccaatgtttttagtagaatgct

SEQ ID NO: 166032 - DNA, 25 bp, Artificial
  probe
  misc_feature (1)..(25): SEQ ID NO: 3439; WAN024DOT_at; Start 2; Stop 26
tggtttccaaggaaggatacaacca

SEQ ID NO: 166033 - DNA, 25 bp, Artificial
  probe
  misc_feature (1)..(25): SEQ ID NO: 3439; WAN024DOT_at; Start 39; Stop 63
tcatcccaatgtttttagtagaatg

SEQ ID NO: 166034 - DNA, 25 bp, Artificial
  probe
  misc_feature (1)..(25): SEQ ID NO: 3439; WAN024DOT_at; Start 28; Stop 52
gaagaatatcttcatcccaatgttt

SEQ ID NO: 166035 - DNA, 25 bp, Artificial
  probe
  misc_feature (1)..(25): SEQ ID NO: 3439; WAN024DOT_at; Start 31; Stop 55
gaatatcttcatcccaatgttttta

SEQ ID NO: 166036 - DNA, 25 bp, Artificial
  probe
  misc_feature (1)..(25): SEQ ID NO: 3439; WAN024DOT_at; Start 36; Stop 60
tcttcatcccaatgtttttagtaga

SEQ ID NO: 166037 - DNA, 25 bp, Artificial
  probe
  misc_feature (1)..(25): SEQ ID NO: 3439; WAN024DOT_at; Start 21; Stop 45
caaccaagaagaatatcttcatccc

SEQ ID NO: 166038 - DNA, 25 bp, Artificial
  probe
  misc_feature (1)..(25): SEQ ID NO: 3439; WAN024DOT_at; Start 26; Stop 50
aagaagaatatcttcatcccaatgt

SEQ ID NO: 166039 - DNA, 25 bp, Artificial
  probe
  misc_feature (1)..(25): SEQ ID NO: 3439; WAN024DOT_at; Start 23; Stop 47
accaagaagaatatcttcatcccaa

SEQ ID NO: 166040 - DNA, 25 bp, Artificial
  probe
  misc_feature (1)..(25): SEQ ID NO: 3439; WAN024DOT_at; Start 35; Stop 59
atcttcatcccaatgtttttagtag

SEQ ID NO: 166041 - DNA, 25 bp, Artificial
  probe
  misc_feature (1)..(25): SEQ ID NO: 3439; WAN024DOT_at; Start 37; Stop 61
cttcatcccaatgtttttagtagaa

SEQ ID NO: 166042 - DNA, 25 bp, Artificial
  probe
  misc_feature (1)..(25): SEQ ID NO: 1400; WAN024DOU_at; Start 60; Stop 84
caaaccaggtgttgttctctgcggt

SEQ ID NO: 166043 - DNA, 25 bp, Artificial
  probe
  misc_feature (1)..(25): SEQ ID NO: 1400; WAN024DOU_at; Start 27; Stop 51
gcgtaagttcgcagccaaagaacgt

SEQ ID NO: 166044 - DNA, 25 bp, Artificial
  probe
  misc_feature (1)..(25): SEQ ID NO: 1400; WAN024DOU_at; Start 111; Stop 135
gcaactcaacccagaaattgaagca

SEQ ID NO: 166045 - DNA, 25 bp, Artificial
  probe
  misc_feature (1)..(25): SEQ ID NO: 1400; WAN024DOU_at; Start 24; Stop 48
tgagcgtaagttcgcagccaaagaa

SEQ ID NO: 166046 - DNA, 25 bp, Artificial
  probe
  misc_feature (1)..(25): SEQ ID NO: 1400; WAN024DOU_at; Start 68; Stop 92
gtgttgttctctgcggtagcatgga

SEQ ID NO: 166047 - DNA, 25 bp, Artificial
  probe
  misc_feature (1)..(25): SEQ ID NO: 1400; WAN024DOU_at; Start 118; Stop 142
aacccagaaattgaagcattctacc

SEQ ID NO: 166048 - DNA, 25 bp, Artificial
  probe
  misc_feature (1)..(25): SEQ ID NO: 1400; WAN024DOU_at; Start 13; Stop 37
aaggcaggacttgagcgtaagttcg

SEQ ID NO: 166049 - DNA, 25 bp, Artificial
  probe
  misc_feature (1)..(25): SEQ ID NO: 1400; WAN024DOU_at; Start 101; Stop 125
gcgctttagcgcaactcaacccaga

SEQ ID NO: 166050 - DNA, 25 bp, Artificial
  probe
  misc_feature (1)..(25): SEQ ID NO: 1400; WAN024DOU_at; Start 20; Stop 44
gacttgagcgtaagttcgcagccaa

SEQ ID NO: 166051 - DNA, 25 bp, Artificial
  probe
  misc_feature (1)..(25): SEQ ID NO: 1400; WAN024DOU_at; Start 19; Stop 43
ggacttgagcgtaagttcgcagcca

SEQ ID NO: 166052 - DNA, 25 bp, Artificial
  probe
  misc_feature (1)..(25): SEQ ID NO: 1400; WAN024DOU_at; Start 103; Stop 127
gctttagcgcaactcaacccagaaa

SEQ ID NO: 166053 - DNA, 25 bp, Artificial
  probe
  misc_feature (1)..(25): SEQ ID NO: 1400; WAN024DOU_at; Start 30; Stop 54
taagttcgcagccaaagaacgtaag

SEQ ID NO: 166054 - DNA, 25 bp, Artificial
  probe
  misc_feature (1)..(25): SEQ ID NO: 1400; WAN024DOU_at; Start 75; Stop 99
tctctgcggtagcatggatgaactt

SEQ ID NO: 166055 - DNA, 25 bp, Artificial
  probe
  misc_feature (1)..(25): SEQ ID NO: 1400; WAN024DOU_at; Start 34; Stop 58
ttcgcagccaaagaacgtaagcgta

SEQ ID NO: 166056 - DNA, 25 bp, Artificial
  probe
  misc_feature (1)..(25): SEQ ID NO: 1400; WAN024DOU_at; Start 36; Stop 60
cgcagccaaagaacgtaagcgtaac

SEQ ID NO: 166057 - DNA, 25 bp, Artificial
  probe
  misc_feature (1)..(25): SEQ ID NO: 1400; WAN024DOU_at; Start 22; Stop 46
cttgagcgtaagttcgcagccaaag

SEQ ID NO: 166058 - DNA, 25 bp, Artificial
  probe
  misc_feature (1)..(25): SEQ ID NO: 1400; WAN024DOU_at; Start 64; Stop 88
ccaggtgttgttctctgcggtagca

SEQ ID NO: 166059 - DNA, 25 bp, Artificial
  probe
  misc_feature (1)..(25): SEQ ID NO: 1400; WAN024DOU_at; Start 121; Stop 145
ccagaaattgaagcattctacctaa

SEQ ID NO: 166060 - DNA, 25 bp, Artificial
  probe
  misc_feature (1)..(25): SEQ ID NO: 1400; WAN024DOU_at; Start 54; Stop 78
gcgtaacaaaccaggtgttgttctc

SEQ ID NO: 166061 - DNA, 25 bp, Artificial
  probe
  misc_feature (1)..(25): SEQ ID NO: 1400; WAN024DOU_at; Start 17; Stop 41
caggacttgagcgtaagttcgcagc

SEQ ID NO: 166062 - DNA, 25 bp, Artificial
  probe
  misc_feature (1)..(25): SEQ ID NO: 1400; WAN024DOU_at; Start 126; Stop 150
aattgaagcattctacctaactaat

SEQ ID NO: 166063 - DNA, 25 bp, Artificial
  probe
  misc_feature (1)..(25): SEQ ID NO: 1400; WAN024DOU_at; Start 62; Stop 86
aaccaggtgttgttctctgcggtag

SEQ ID NO: 166064 - DNA, 25 bp, Artificial
  probe
  misc_feature (1)..(25): SEQ ID NO: 1400; WAN024DOU_at; Start 33; Stop 57
gttcgcagccaaagaacgtaagcgt

SEQ ID NO: 166065 - DNA, 25 bp, Artificial
  probe
  misc_feature (1)..(25): SEQ ID NO: 1400; WAN024DOU_at; Start 124; Stop 148
gaaattgaagcattctacctaacta

SEQ ID NO: 166066 - DNA, 25 bp, Artificial
  probe
  misc_feature (1)..(25): SEQ ID NO: 1400; WAN024DOU_at; Start 28; Stop 52
cgtaagttcgcagccaaagaacgta

SEQ ID NO: 166067 - DNA, 25 bp, Artificial
  probe
  misc_feature (1)..(25): SEQ ID NO: 1400; WAN024DOU_at; Start 72; Stop 96
tgttctctgcggtagcatggatgaa

SEQ ID NO: 166068 - DNA, 25 bp, Artificial
  probe
  misc_feature (1)..(25): SEQ ID NO: 1400; WAN024DOU_at; Start 38; Stop 62
cagccaaagaacgtaagcgtaacaa

SEQ ID NO: 166069 - DNA, 25 bp, Artificial
  probe
  misc_feature (1)..(25): SEQ ID NO: 1400; WAN024DOU_at; Start 49; Stop 73
cgtaagcgtaacaaaccaggtgttg

SEQ ID NO: 166070 - DNA, 25 bp, Artificial
  probe
  misc_feature (1)..(25): SEQ ID NO: 1400; WAN024DOU_at; Start 15; Stop 39
ggcaggacttgagcgtaagttcgca

SEQ ID NO: 166071 - DNA, 25 bp, Artificial
  probe
  misc_feature (1)..(25): SEQ ID NO: 1400; WAN024DOU_at; Start 65; Stop 89
caggtgttgttctctgcggtagcat

SEQ ID NO: 166072 - DNA, 25 bp, Artificial
  probe
  misc_feature (1)..(25): SEQ ID NO: 1400; WAN024DOU_at; Start 108; Stop 132
agcgcaactcaacccagaaattgaa

SEQ ID NO: 166073 - DNA, 25 bp, Artificial
  probe
  misc_feature (1)..(25): SEQ ID NO: 1400; WAN024DOU_at; Start 106; Stop 130
ttagcgcaactcaacccagaaattg

SEQ ID NO: 166074 - DNA, 25 bp, Artificial
  probe
  misc_feature (1)..(25): SEQ ID NO: 1400; WAN024DOU_at; Start 32; Stop 56
agttcgcagccaaagaacgtaagcg

SEQ ID NO: 166075 - DNA, 25 bp, Artificial
  probe
  misc_feature (1)..(25): SEQ ID NO: 1400; WAN024DOU_at; Start 58; Stop 82
aacaaaccaggtgttgttctctgcg

SEQ ID NO: 166076 - DNA, 25 bp, Artificial
  probe
  misc_feature (1)..(25): SEQ ID NO: 5050; WAN024DOV_at; Start 96; Stop 120
tcaacaatcgtaaccaatttctcaa

SEQ ID NO: 166077 - DNA, 25 bp, Artificial
  probe
  misc_feature (1)..(25): SEQ ID NO: 5050; WAN024DOV_at; Start 97; Stop 121
caacaatcgtaaccaatttctcaaa

SEQ ID NO: 166078 - DNA, 25 bp, Artificial
  probe
  misc_feature (1)..(25): SEQ ID NO: 5050; WAN024DOV_at; Start 94; Stop 118
tttcaacaatcgtaaccaatttctc

SEQ ID NO: 166079 - DNA, 25 bp, Artificial
  probe
  misc_feature (1)..(25): SEQ ID NO: 5050; WAN024DOV_at; Start 95; Stop 119
ttcaacaatcgtaaccaatttctca

SEQ ID NO: 166080 - DNA, 25 bp, Artificial
  probe
  misc_feature (1)..(25): SEQ ID NO: 3023; WAN024DOW_at; Start 122; Stop 146
cgactggtaaagaatggatttgtca

SEQ ID NO: 166081 - DNA, 25 bp, Artificial
  probe
  misc_feature (1)..(25): SEQ ID NO: 3023; WAN024DOW_at; Start 65; Stop 89
ctcaaataccgtgtttgacgagtga

SEQ ID NO: 166082 - DNA, 25 bp, Artificial
  probe
  misc_feature (1)..(25): SEQ ID NO: 3023; WAN024DOW_at; Start 67; Stop 91
caaataccgtgtttgacgagtgaag

SEQ ID NO: 166083 - DNA, 25 bp, Artificial
  probe
  misc_feature (1)..(25): SEQ ID NO: 3023; WAN024DOW_at; Start 125; Stop 149
ctggtaaagaatggatttgtcattc

SEQ ID NO: 166084 - DNA, 25 bp, Artificial
  probe
  misc_feature (1)..(25): SEQ ID NO: 3023; WAN024DOW_at; Start 117; Stop 141
tgtctcgactggtaaagaatggatt

SEQ ID NO: 166085 - DNA, 25 bp, Artificial
  probe
  misc_feature (1)..(25): SEQ ID NO: 3023; WAN024DOW_at; Start 119; Stop 143
tctcgactggtaaagaatggatttg

SEQ ID NO: 166086 - DNA, 25 bp, Artificial
  probe
  misc_feature (1)..(25): SEQ ID NO: 3023; WAN024DOW_at; Start 192; Stop 216
tatcaatcctgaagaatgggatact

SEQ ID NO: 166087 - DNA, 25 bp, Artificial
  probe
  misc_feature (1)..(25): SEQ ID NO: 3023; WAN024DOW_at; Start 54; Stop 78
cgaaaaatgctctcaaataccgtgt

SEQ ID NO: 166088 - DNA, 25 bp, Artificial
  probe
  misc_feature (1)..(25): SEQ ID NO: 3023; WAN024DOW_at; Start 120; Stop 144
ctcgactggtaaagaatggatttgt

SEQ ID NO: 166089 - DNA, 25 bp, Artificial
  probe
  misc_feature (1)..(25): SEQ ID NO: 3023; WAN024DOW_at; Start 189; Stop 213
ttttatcaatcctgaagaatgggat

SEQ ID NO: 166090 - DNA, 25 bp, Artificial
  probe
  misc_feature (1)..(25): SEQ ID NO: 3023; WAN024DOW_at; Start 127; Stop 151
ggtaaagaatggatttgtcattcag

SEQ ID NO: 166091 - DNA, 25 bp, Artificial
  probe
  misc_feature (1)..(25): SEQ ID NO: 3023; WAN024DOW_at; Start 68; Stop 92
aaataccgtgtttgacgagtgaaga

SEQ ID NO: 166092 - DNA, 25 bp, Artificial
  probe
  misc_feature (1)..(25): SEQ ID NO: 3023; WAN024DOW_at; Start 121; Stop 145
tcgactggtaaagaatggatttgtc

SEQ ID NO: 166093 - DNA, 25 bp, Artificial
  probe
  misc_feature (1)..(25): SEQ ID NO: 3023; WAN024DOW_at; Start 134; Stop 158
aatggatttgtcattcagatgatga

SEQ ID NO: 166094 - DNA, 25 bp, Artificial
  probe
  misc_feature (1)..(25): SEQ ID NO: 3023; WAN024DOW_at; Start 187; Stop 211
aattttatcaatcctgaagaatggg

SEQ ID NO: 166095 - DNA, 25 bp, Artificial
  probe
  misc_feature (1)..(25): SEQ ID NO: 3023; WAN024DOW_at; Start 61; Stop 85
tgctctcaaataccgtgtttgacga

SEQ ID NO: 166096 - DNA, 25 bp, Artificial
  probe
  misc_feature (1)..(25): SEQ ID NO: 3023; WAN024DOW_at; Start 58; Stop 82
aaatgctctcaaataccgtgtttga

SEQ ID NO: 166097 - DNA, 25 bp, Artificial
  probe
  misc_feature (1)..(25): SEQ ID NO: 3023; WAN024DOW_at; Start 53; Stop 77
tcgaaaaatgctctcaaataccgtg

SEQ ID NO: 166098 - DNA, 25 bp, Artificial
  probe
  misc_feature (1)..(25): SEQ ID NO: 3023; WAN024DOW_at; Start 69; Stop 93
aataccgtgtttgacgagtgaagaa

SEQ ID NO: 166099 - DNA, 25 bp, Artificial
  probe
  misc_feature (1)..(25): SEQ ID NO: 3023; WAN024DOW_at; Start 64; Stop 88
tctcaaataccgtgtttgacgagtg

SEQ ID NO: 166100 - DNA, 25 bp, Artificial
  probe
  misc_feature (1)..(25): SEQ ID NO: 3023; WAN024DOW_at; Start 52; Stop 76
ttcgaaaaatgctctcaaataccgt

SEQ ID NO: 166101 - DNA, 25 bp, Artificial
  probe
  misc_feature (1)..(25): SEQ ID NO: 3023; WAN024DOW_at; Start 130; Stop 154
aaagaatggatttgtcattcagatg

SEQ ID NO: 166102 - DNA, 25 bp, Artificial
  probe
  misc_feature (1)..(25): SEQ ID NO: 3023; WAN024DOW_at; Start 59; Stop 83
aatgctctcaaataccgtgtttgac

SEQ ID NO: 166103 - DNA, 25 bp, Artificial
  probe
  misc_feature (1)..(25): SEQ ID NO: 3023; WAN024DOW_at; Start 51; Stop 75
tttcgaaaaatgctctcaaataccg

SEQ ID NO: 166104 - DNA, 25 bp, Artificial
  probe
  misc_feature (1)..(25): SEQ ID NO: 3023; WAN024DOW_at; Start 55; Stop 79
gaaaaatgctctcaaataccgtgtt

SEQ ID NO: 166105 - DNA, 25 bp, Artificial
  probe
  misc_feature (1)..(25): SEQ ID NO: 3023; WAN024DOW_at; Start 191; Stop 215
ttatcaatcctgaagaatgggatac

SEQ ID NO: 166106 - DNA, 25 bp, Artificial
  probe
  misc_feature (1)..(25): SEQ ID NO: 3023; WAN024DOW_at; Start 57; Stop 81
aaaatgctctcaaataccgtgtttg

SEQ ID NO: 166107 - DNA, 25 bp, Artificial
  probe
  misc_feature (1)..(25): SEQ ID NO: 3023; WAN024DOW_at; Start 42; Stop 66
tattataaatttcgaaaaatgctct

SEQ ID NO: 166108 - DNA, 25 bp, Artificial
  probe
  misc_feature (1)..(25): SEQ ID NO: 3023; WAN024DOW_at; Start 45; Stop 69
tataaatttcgaaaaatgctctcaa

SEQ ID NO: 166109 - DNA, 25 bp, Artificial
  probe
  misc_feature (1)..(25): SEQ ID NO: 3023; WAN024DOW_at; Start 66; Stop 90
tcaaataccgtgtttgacgagtgaa

SEQ ID NO: 166110 - DNA, 25 bp, Artificial
  probe
  misc_feature (1)..(25): SEQ ID NO: 3023; WAN024DOW_at; Start 193; Stop 217
atcaatcctgaagaatgggatacta

SEQ ID NO: 166111 - DNA, 25 bp, Artificial
  probe
  misc_feature (1)..(25): SEQ ID NO: 3023; WAN024DOW_at; Start 18; Stop 42
ccaatctatttatgaaaaagtttat

SEQ ID NO: 166112 - DNA, 25 bp, Artificial
  probe
  misc_feature (1)..(25): SEQ ID NO: 3023; WAN024DOW_at; Start 2; Stop 26
tgttcaaagattttatccaatctat

SEQ ID NO: 166113 - DNA, 25 bp, Artificial
  probe
  misc_feature (1)..(25): SEQ ID NO: 3023; WAN024DOW_at; Start 15; Stop 39
tatccaatctatttatgaaaaagtt

SEQ ID NO: 166114 - DNA, 25 bp, Artificial
  probe
  misc_feature (1)..(25): SEQ ID NO: 7154; WAN024DOY_at; Start 15; Stop 39
actcctaaatctccaacttgtcaag

SEQ ID NO: 166115 - DNA, 25 bp, Artificial
  probe
  misc_feature (1)..(25): SEQ ID NO: 7154; WAN024DOY_at; Start 21; Stop 45
aaatctccaacttgtcaagaatttt

SEQ ID NO: 166116 - DNA, 25 bp, Artificial
  probe
  misc_feature (1)..(25): SEQ ID NO: 7154; WAN024DOY_at; Start 14; Stop 38
tactcctaaatctccaacttgtcaa

SEQ ID NO: 166117 - DNA, 25 bp, Artificial
  probe
  misc_feature (1)..(25): SEQ ID NO: 7154; WAN024DOY_at; Start 151; Stop 175
cctgtaactgagttgcagggacttt

SEQ ID NO: 166118 - DNA, 25 bp, Artificial
  probe
  misc_feature (1)..(25): SEQ ID NO: 7154; WAN024DOY_at; Start 58; Stop 82
agtattttttgttctgaccactact

SEQ ID NO: 166119 - DNA, 25 bp, Artificial
  probe
  misc_feature (1)..(25): SEQ ID NO: 7154; WAN024DOY_at; Start 18; Stop 42
cctaaatctccaacttgtcaagaat

SEQ ID NO: 166120 - DNA, 25 bp, Artificial
  probe
  misc_feature (1)..(25): SEQ ID NO: 7154; WAN024DOY_at; Start 145; Stop 169
aaagtccctgtaactgagttgcagg

SEQ ID NO: 166121 - DNA, 25 bp, Artificial
  probe
  misc_feature (1)..(25): SEQ ID NO: 7154; WAN024DOY_at; Start 17; Stop 41
tcctaaatctccaacttgtcaagaa

SEQ ID NO: 166122 - DNA, 25 bp, Artificial
  probe
  misc_feature (1)..(25): SEQ ID NO: 7154; WAN024DOY_at; Start 16; Stop 40
ctcctaaatctccaacttgtcaaga

SEQ ID NO: 166123 - DNA, 25 bp, Artificial
  probe
  misc_feature (1)..(25): SEQ ID NO: 7154; WAN024DOY_at; Start 150; Stop 174
ccctgtaactgagttgcagggactt

SEQ ID NO: 166124 - DNA, 25 bp, Artificial
  probe
  misc_feature (1)..(25): SEQ ID NO: 7154; WAN024DOY_at; Start 143; Stop 167
aaaaagtccctgtaactgagttgca

SEQ ID NO: 166125 - DNA, 25 bp, Artificial
  probe
  misc_feature (1)..(25): SEQ ID NO: 7154; WAN024DOY_at; Start 147; Stop 171
agtccctgtaactgagttgcaggga

SEQ ID NO: 166126 - DNA, 25 bp, Artificial
  probe
  misc_feature (1)..(25): SEQ ID NO: 7154; WAN024DOY_at; Start 152; Stop 176
ctgtaactgagttgcagggactttt

SEQ ID NO: 166127 - DNA, 25 bp, Artificial
  probe
  misc_feature (1)..(25): SEQ ID NO: 7154; WAN024DOY_at; Start 34; Stop 58
gtcaagaattttatgaaccatttaa

SEQ ID NO: 166128 - DNA, 25 bp, Artificial
  probe
  misc_feature (1)..(25): SEQ ID NO: 7154; WAN024DOY_at; Start 5; Stop 29
ttaatagtttactcctaaatctcca

SEQ ID NO: 166129 - DNA, 25 bp, Artificial
  probe
  misc_feature (1)..(25): SEQ ID NO: 7154; WAN024DOY_at; Start 72; Stop 96
tgaccactactttttcaaggttgga

SEQ ID NO: 166130 - DNA, 25 bp, Artificial
  probe
  misc_feature (1)..(25): SEQ ID NO: 7154; WAN024DOY_at; Start 33; Stop 57
tgtcaagaattttatgaaccattta

SEQ ID NO: 166131 - DNA, 25 bp, Artificial
  probe
  misc_feature (1)..(25): SEQ ID NO: 7154; WAN024DOY_at; Start 146; Stop 170
aagtccctgtaactgagttgcaggg

SEQ ID NO: 166132 - DNA, 25 bp, Artificial
  probe
  misc_feature (1)..(25): SEQ ID NO: 7154; WAN024DOY_at; Start 153; Stop 177
tgtaactgagttgcagggacttttc

SEQ ID NO: 166133 - DNA, 25 bp, Artificial
  probe
  misc_feature (1)..(25): SEQ ID NO: 7154; WAN024DOY_at; Start 155; Stop 179
taactgagttgcagggacttttcga

SEQ ID NO: 166134 - DNA, 25 bp, Artificial
  probe
  misc_feature (1)..(25): SEQ ID NO: 7154; WAN024DOY_at; Start 154; Stop 178
gtaactgagttgcagggacttttcg

SEQ ID NO: 166135 - DNA, 25 bp, Artificial
  probe
  misc_feature (1)..(25): SEQ ID NO: 7154; WAN024DOY_at; Start 6; Stop 30
taatagtttactcctaaatctccaa

SEQ ID NO: 166136 - DNA, 25 bp, Artificial
  probe
  misc_feature (1)..(25): SEQ ID NO: 7154; WAN024DOY_at; Start 156; Stop 180
aactgagttgcagggacttttcgat

SEQ ID NO: 166137 - DNA, 25 bp, Artificial
  probe
  misc_feature (1)..(25): SEQ ID NO: 7154; WAN024DOY_at; Start 67; Stop 91
tgttctgaccactactttttcaagg

SEQ ID NO: 166138 - DNA, 25 bp, Artificial
  probe
  misc_feature (1)..(25): SEQ ID NO: 7154; WAN024DOY_at; Start 149; Stop 173
tccctgtaactgagttgcagggact

SEQ ID NO: 166139 - DNA, 25 bp, Artificial
  probe
  misc_feature (1)..(25): SEQ ID NO: 7154; WAN024DOY_at; Start 12; Stop 36
tttactcctaaatctccaacttgtc

SEQ ID NO: 166140 - DNA, 25 bp, Artificial
  probe
  misc_feature (1)..(25): SEQ ID NO: 7154; WAN024DOY_at; Start 71; Stop 95
ctgaccactactttttcaaggttgg

SEQ ID NO: 166141 - DNA, 25 bp, Artificial
  probe
  misc_feature (1)..(25): SEQ ID NO: 7154; WAN024DOY_at; Start 70; Stop 94
tctgaccactactttttcaaggttg

SEQ ID NO: 166142 - DNA, 25 bp, Artificial
  probe
  misc_feature (1)..(25): SEQ ID NO: 7154; WAN024DOY_at; Start 56; Stop 80
taagtattttttgttctgaccacta

SEQ ID NO: 166143 - DNA, 25 bp, Artificial
  probe
  misc_feature (1)..(25): SEQ ID NO: 7154; WAN024DOY_at; Start 144; Stop 168
aaaagtccctgtaactgagttgcag

SEQ ID NO: 166144 - DNA, 25 bp, Artificial
  probe
  misc_feature (1)..(25): SEQ ID NO: 7154; WAN024DOY_at; Start 10; Stop 34
agtttactcctaaatctccaacttg

SEQ ID NO: 166145 - DNA, 25 bp, Artificial
  probe
  misc_feature (1)..(25): SEQ ID NO: 7154; WAN024DOY_at; Start 19; Stop 43
ctaaatctccaacttgtcaagaatt

SEQ ID NO: 166146 - DNA, 25 bp, Artificial
  probe
  misc_feature (1)..(25): SEQ ID NO: 7154; WAN024DOY_at; Start 13; Stop 37
ttactcctaaatctccaacttgtca

SEQ ID NO: 166147 - DNA, 25 bp, Artificial
  probe
  misc_feature (1)..(25): SEQ ID NO: 7154; WAN024DOY_at; Start 20; Stop 44
taaatctccaacttgtcaagaattt

SEQ ID NO: 166148 - DNA, 25 bp, Artificial
  probe
  misc_feature (1)..(25): SEQ ID NO: 3382; WAN024DOZ_at; Start 7; Stop 31
ctcagttacagggatttttttgata

SEQ ID NO: 166149 - DNA, 25 bp, Artificial
  probe
  misc_feature (1)..(25): SEQ ID NO: 3382; WAN024DOZ_at; Start 1; Stop 25
ctgcaactcagttacagggattttt

SEQ ID NO: 166150 - DNA, 25 bp, Artificial
  probe
  misc_feature (1)..(25): SEQ ID NO: 3382; WAN024DOZ_at; Start 4; Stop 28
caactcagttacagggatttttttg

SEQ ID NO: 166151 - DNA, 25 bp, Artificial
  probe
  misc_feature (1)..(25): SEQ ID NO: 3382; WAN024DOZ_at; Start 2; Stop 26
tgcaactcagttacagggatttttt

SEQ ID NO: 166152 - DNA, 25 bp, Artificial
  probe
  misc_feature (1)..(25): SEQ ID NO: 3382; WAN024DOZ_at; Start 9; Stop 33
cagttacagggatttttttgatatt

SEQ ID NO: 166153 - DNA, 25 bp, Artificial
  probe
  misc_feature (1)..(25): SEQ ID NO: 3382; WAN024DOZ_at; Start 6; Stop 30
actcagttacagggatttttttgat

SEQ ID NO: 166154 - DNA, 25 bp, Artificial
  probe
  misc_feature (1)..(25): SEQ ID NO: 3382; WAN024DOZ_at; Start 8; Stop 32
tcagttacagggatttttttgatat

SEQ ID NO: 166155 - DNA, 25 bp, Artificial
  probe
  misc_feature (1)..(25): SEQ ID NO: 5422; WAN024DP2_at; Start 50; Stop 74
ttctaaattgtgaatcaatcaaaac

SEQ ID NO: 166156 - DNA, 25 bp, Artificial
  probe
  misc_feature (1)..(25): SEQ ID NO: 5422; WAN024DP2_at; Start 30; Stop 54
caggagtgaaactatagtgtttcta

SEQ ID NO: 166157 - DNA, 25 bp, Artificial
  probe
  misc_feature (1)..(25): SEQ ID NO: 5422; WAN024DP2_at; Start 27; Stop 51
taacaggagtgaaactatagtgttt

SEQ ID NO: 166158 - DNA, 25 bp, Artificial
  probe
  misc_feature (1)..(25): SEQ ID NO: 5422; WAN024DP2_at; Start 37; Stop 61
gaaactatagtgtttctaaattgtg

SEQ ID NO: 166159 - DNA, 25 bp, Artificial
  probe
  misc_feature (1)..(25): SEQ ID NO: 5422; WAN024DP2_at; Start 32; Stop 56
ggagtgaaactatagtgtttctaaa

SEQ ID NO: 166160 - DNA, 25 bp, Artificial
  probe
  misc_feature (1)..(25): SEQ ID NO: 5422; WAN024DP2_at; Start 26; Stop 50
ttaacaggagtgaaactatagtgtt

SEQ ID NO: 166161 - DNA, 25 bp, Artificial
  probe
  misc_feature (1)..(25): SEQ ID NO: 5422; WAN024DP2_at; Start 63; Stop 87
atcaatcaaaactgattgtgatggg

SEQ ID NO: 166162 - DNA, 25 bp, Artificial
  probe
  misc_feature (1)..(25): SEQ ID NO: 5422; WAN024DP2_at; Start 81; Stop 105
tgatggggctattctagctttagaa

SEQ ID NO: 166163 - DNA, 25 bp, Artificial
  probe
  misc_feature (1)..(25): SEQ ID NO: 5422; WAN024DP2_at; Start 58; Stop 82
tgtgaatcaatcaaaactgattgtg

SEQ ID NO: 166164 - DNA, 25 bp, Artificial
  probe
  misc_feature (1)..(25): SEQ ID NO: 5422; WAN024DP2_at; Start 8; Stop 32
atgcagttcctttttattttaacag

SEQ ID NO: 166165 - DNA, 25 bp, Artificial
  probe
  misc_feature (1)..(25): SEQ ID NO: 5422; WAN024DP2_at; Start 70; Stop 94
aaaactgattgtgatggggctattc

SEQ ID NO: 166166 - DNA, 25 bp, Artificial
  probe
  misc_feature (1)..(25): SEQ ID NO: 5422; WAN024DP2_at; Start 72; Stop 96
aactgattgtgatggggctattcta

SEQ ID NO: 166167 - DNA, 25 bp, Artificial
  probe
  misc_feature (1)..(25): SEQ ID NO: 5422; WAN024DP2_at; Start 33; Stop 57
gagtgaaactatagtgtttctaaat

SEQ ID NO: 166168 - DNA, 25 bp, Artificial
  probe
  misc_feature (1)..(25): SEQ ID NO: 5422; WAN024DP2_at; Start 59; Stop 83
gtgaatcaatcaaaactgattgtga

SEQ ID NO: 166169 - DNA, 25 bp, Artificial
  probe
  misc_feature (1)..(25): SEQ ID NO: 5422; WAN024DP2_at; Start 22; Stop 46
tattttaacaggagtgaaactatag

SEQ ID NO: 166170 - DNA, 25 bp, Artificial
  probe
  misc_feature (1)..(25): SEQ ID NO: 5422; WAN024DP2_at; Start 46; Stop 70
gtgtttctaaattgtgaatcaatca

SEQ ID NO: 166171 - DNA, 25 bp, Artificial
  probe
  misc_feature (1)..(25): SEQ ID NO: 5422; WAN024DP2_at; Start 54; Stop 78
aaattgtgaatcaatcaaaactgat

SEQ ID NO: 166172 - DNA, 25 bp, Artificial
  probe
  misc_feature (1)..(25): SEQ ID NO: 5422; WAN024DP2_at; Start 52; Stop 76
ctaaattgtgaatcaatcaaaactg

SEQ ID NO: 166173 - DNA, 25 bp, Artificial
  probe
  misc_feature (1)..(25): SEQ ID NO: 5422; WAN024DP2_at; Start 44; Stop 68
tagtgtttctaaattgtgaatcaat

SEQ ID NO: 166174 - DNA, 25 bp, Artificial
  probe
  misc_feature (1)..(25): SEQ ID NO: 5422; WAN024DP2_at; Start 24; Stop 48
ttttaacaggagtgaaactatagtg

SEQ ID NO: 166175 - DNA, 25 bp, Artificial
  probe
  misc_feature (1)..(25): SEQ ID NO: 5422; WAN024DP2_at; Start 7; Stop 31
tatgcagttcctttttattttaaca

SEQ ID NO: 166176 - DNA, 25 bp, Artificial
  probe
  misc_feature (1)..(25): SEQ ID NO: 5422; WAN024DP2_at; Start 39; Stop 63
aactatagtgtttctaaattgtgaa

SEQ ID NO: 166177 - DNA, 25 bp, Artificial
  probe
  misc_feature (1)..(25): SEQ ID NO: 5422; WAN024DP2_at; Start 29; Stop 53
acaggagtgaaactatagtgtttct

SEQ ID NO: 166178 - DNA, 25 bp, Artificial
  probe
  misc_feature (1)..(25): SEQ ID NO: 5422; WAN024DP2_at; Start 25; Stop 49
tttaacaggagtgaaactatagtgt

SEQ ID NO: 166179 - DNA, 25 bp, Artificial
  probe
  misc_feature (1)..(25): SEQ ID NO: 5422; WAN024DP2_at; Start 2; Stop 26
tgctttatgcagttcctttttattt

SEQ ID NO: 166180 - DNA, 25 bp, Artificial
  probe
  misc_feature (1)..(25): SEQ ID NO: 5422; WAN024DP2_at; Start 28; Stop 52
aacaggagtgaaactatagtgtttc

SEQ ID NO: 166181 - DNA, 25 bp, Artificial
  probe
  misc_feature (1)..(25): SEQ ID NO: 5422; WAN024DP2_at; Start 41; Stop 65
ctatagtgtttctaaattgtgaatc

SEQ ID NO: 166182 - DNA, 25 bp, Artificial
  probe
  misc_feature (1)..(25): SEQ ID NO: 5422; WAN024DP2_at; Start 68; Stop 92
tcaaaactgattgtgatggggctat

SEQ ID NO: 166183 - DNA, 25 bp, Artificial
  probe
  misc_feature (1)..(25): SEQ ID NO: 5422; WAN024DP2_at; Start 47; Stop 71
tgtttctaaattgtgaatcaatcaa

SEQ ID NO: 166184 - DNA, 25 bp, Artificial
  probe
  misc_feature (1)..(25): SEQ ID NO: 5422; WAN024DP2_at; Start 42; Stop 66
tatagtgtttctaaattgtgaatca

SEQ ID NO: 166185 - DNA, 25 bp, Artificial
  probe
  misc_feature (1)..(25): SEQ ID NO: 5422; WAN024DP2_at; Start 53; Stop 77
taaattgtgaatcaatcaaaactga

SEQ ID NO: 166186 - DNA, 25 bp, Artificial
  probe
  misc_feature (1)..(25): SEQ ID NO: 5422; WAN024DP2_at; Start 62; Stop 86
aatcaatcaaaactgattgtgatgg

SEQ ID NO: 166187 - DNA, 25 bp, Artificial
  probe
  misc_feature (1)..(25): SEQ ID NO: 5422; WAN024DP2_at; Start 48; Stop 72
gtttctaaattgtgaatcaatcaaa

SEQ ID NO: 166188 - DNA, 25 bp, Artificial
  probe
  misc_feature (1)..(25): SEQ ID NO: 5422; WAN024DP2_at; Start 61; Stop 85
gaatcaatcaaaactgattgtgatg

SEQ ID NO: 166189 - DNA, 25 bp, Artificial
  probe
  misc_feature (1)..(25): SEQ ID NO: 5505; WAN024DP3_at; Start 69; Stop 93
aagggattttcttgtcaagaatatt

SEQ ID NO: 166190 - DNA, 25 bp, Artificial
  probe
  misc_feature (1)..(25): SEQ ID NO: 5505; WAN024DP3_at; Start 3; Stop 27
ggcaaatactgtcaaagtttttcta

SEQ ID NO: 166191 - DNA, 25 bp, Artificial
  probe
  misc_feature (1)..(25): SEQ ID NO: 5505; WAN024DP3_at; Start 81; Stop 105
tgtcaagaatattttttcacaaact

SEQ ID NO: 166192 - DNA, 25 bp, Artificial
  probe
  misc_feature (1)..(25): SEQ ID NO: 5505; WAN024DP3_at; Start 1; Stop 25
ttggcaaatactgtcaaagtttttc

SEQ ID NO: 166193 - DNA, 25 bp, Artificial
  probe
  misc_feature (1)..(25): SEQ ID NO: 5505; WAN024DP3_at; Start 78; Stop 102
tcttgtcaagaatattttttcacaa

SEQ ID NO: 166194 - DNA, 25 bp, Artificial
  probe
  misc_feature (1)..(25): SEQ ID NO: 5505; WAN024DP3_at; Start 80; Stop 104
ttgtcaagaatattttttcacaaac

SEQ ID NO: 166195 - DNA, 25 bp, Artificial
  probe
  misc_feature (1)..(25): SEQ ID NO: 5505; WAN024DP3_at; Start 76; Stop 100
tttcttgtcaagaatattttttcac

SEQ ID NO: 166196 - DNA, 25 bp, Artificial
  probe
  misc_feature (1)..(25): SEQ ID NO: 5505; WAN024DP3_at; Start 2; Stop 26
tggcaaatactgtcaaagtttttct

SEQ ID NO: 166197 - DNA, 25 bp, Artificial
  probe
  misc_feature (1)..(25): SEQ ID NO: 5505; WAN024DP3_at; Start 70; Stop 94
agggattttcttgtcaagaatattt

SEQ ID NO: 166198 - DNA, 25 bp, Artificial
  probe
  misc_feature (1)..(25): SEQ ID NO: 5505; WAN024DP3_at; Start 77; Stop 101
ttcttgtcaagaatattttttcaca

SEQ ID NO: 166199 - DNA, 25 bp, Artificial
  probe
  misc_feature (1)..(25): SEQ ID NO: 5505; WAN024DP3_at; Start 67; Stop 91
acaagggattttcttgtcaagaata

SEQ ID NO: 166200 - DNA, 25 bp, Artificial
  probe
  misc_feature (1)..(25): SEQ ID NO: 5505; WAN024DP3_at; Start 62; Stop 86
tgaaaacaagggattttcttgtcaa

SEQ ID NO: 166201 - DNA, 25 bp, Artificial
  probe
  misc_feature (1)..(25): SEQ ID NO: 5505; WAN024DP3_at; Start 68; Stop 92
caagggattttcttgtcaagaatat

SEQ ID NO: 166202 - DNA, 25 bp, Artificial
  probe
  misc_feature (1)..(25): SEQ ID NO: 5505; WAN024DP3_at; Start 66; Stop 90
aacaagggattttcttgtcaagaat

SEQ ID NO: 166203 - DNA, 25 bp, Artificial
  probe
  misc_feature (1)..(25): SEQ ID NO: 5505; WAN024DP3_at; Start 4; Stop 28
gcaaatactgtcaaagtttttctaa

SEQ ID NO: 166204 - DNA, 25 bp, Artificial
  probe
  misc_feature (1)..(25): SEQ ID NO: 5505; WAN024DP3_at; Start 61; Stop 85
gtgaaaacaagggattttcttgtca

SEQ ID NO: 166205 - DNA, 25 bp, Artificial
  probe
  misc_feature (1)..(25): SEQ ID NO: 5505; WAN024DP3_at; Start 75; Stop 99
ttttcttgtcaagaatattttttca

SEQ ID NO: 166206 - DNA, 25 bp, Artificial
  probe
  misc_feature (1)..(25): SEQ ID NO: 5505; WAN024DP3_at; Start 79; Stop 103
cttgtcaagaatattttttcacaaa

SEQ ID NO: 166207 - DNA, 25 bp, Artificial
  probe
  misc_feature (1)..(25): SEQ ID NO: 5450; WAN024DP4_at; Start 26; Stop 50
ataccatgattagcctcgtaaatct

SEQ ID NO: 166208 - DNA, 25 bp, Artificial
  probe
  misc_feature (1)..(25): SEQ ID NO: 5450; WAN024DP4_at; Start 20; Stop 44
tatattataccatgattagcctcgt

SEQ ID NO: 166209 - DNA, 25 bp, Artificial
  probe
  misc_feature (1)..(25): SEQ ID NO: 5450; WAN024DP4_at; Start 49; Stop 73
ctgttaaaatatttaggccatcctt

SEQ ID NO: 166210 - DNA, 25 bp, Artificial
  probe
  misc_feature (1)..(25): SEQ ID NO: 5450; WAN024DP4_at; Start 15; Stop 39
caccctatattataccatgattagc

SEQ ID NO: 166211 - DNA, 25 bp, Artificial
  probe
  misc_feature (1)..(25): SEQ ID NO: 5450; WAN024DP4_at; Start 32; Stop 56
tgattagcctcgtaaatctgttaaa

SEQ ID NO: 166212 - DNA, 25 bp, Artificial
  probe
  misc_feature (1)..(25): SEQ ID NO: 5450; WAN024DP4_at; Start 63; Stop 87
aggccatcctttcttttcttcatca

SEQ ID NO: 166213 - DNA, 25 bp, Artificial
  probe
  misc_feature (1)..(25): SEQ ID NO: 5450; WAN024DP4_at; Start 30; Stop 54
catgattagcctcgtaaatctgtta

SEQ ID NO: 166214 - DNA, 25 bp, Artificial
  probe
  misc_feature (1)..(25): SEQ ID NO: 5450; WAN024DP4_at; Start 35; Stop 59
ttagcctcgtaaatctgttaaaata

SEQ ID NO: 166215 - DNA, 25 bp, Artificial
  probe
  misc_feature (1)..(25): SEQ ID NO: 5450; WAN024DP4_at; Start 28; Stop 52
accatgattagcctcgtaaatctgt

SEQ ID NO: 166216 - DNA, 25 bp, Artificial
  probe
  misc_feature (1)..(25): SEQ ID NO: 5450; WAN024DP4_at; Start 19; Stop 43
ctatattataccatgattagcctcg

SEQ ID NO: 166217 - DNA, 25 bp, Artificial
  probe
  misc_feature (1)..(25): SEQ ID NO: 5450; WAN024DP4_at; Start 33; Stop 57
gattagcctcgtaaatctgttaaaa

SEQ ID NO: 166218 - DNA, 25 bp, Artificial
  probe
  misc_feature (1)..(25): SEQ ID NO: 5450; WAN024DP4_at; Start 9; Stop 33
tttcatcaccctatattataccatg

SEQ ID NO: 166219 - DNA, 25 bp, Artificial
  probe
  misc_feature (1)..(25): SEQ ID NO: 5450; WAN024DP4_at; Start 67; Stop 91
catcctttcttttcttcatcatctg

SEQ ID NO: 166220 - DNA, 25 bp, Artificial
  probe
  misc_feature (1)..(25): SEQ ID NO: 5450; WAN024DP4_at; Start 29; Stop 53
ccatgattagcctcgtaaatctgtt

SEQ ID NO: 166221 - DNA, 25 bp, Artificial
  probe
  misc_feature (1)..(25): SEQ ID NO: 5450; WAN024DP4_at; Start 3; Stop 27
ggaatttttcatcaccctatattat

SEQ ID NO: 166222 - DNA, 25 bp, Artificial
  probe
  misc_feature (1)..(25): SEQ ID NO: 5450; WAN024DP4_at; Start 14; Stop 38
tcaccctatattataccatgattag

SEQ ID NO: 166223 - DNA, 25 bp, Artificial
  probe
  misc_feature (1)..(25): SEQ ID NO: 5450; WAN024DP4_at; Start 70; Stop 94
cctttcttttcttcatcatctgcta

SEQ ID NO: 166224 - DNA, 25 bp, Artificial
  probe
  misc_feature (1)..(25): SEQ ID NO: 5450; WAN024DP4_at; Start 25; Stop 49
tataccatgattagcctcgtaaatc

SEQ ID NO: 166225 - DNA, 25 bp, Artificial
  probe
  misc_feature (1)..(25): SEQ ID NO: 5450; WAN024DP4_at; Start 4; Stop 28
gaatttttcatcaccctatattata

SEQ ID NO: 166226 - DNA, 25 bp, Artificial
  probe
  misc_feature (1)..(25): SEQ ID NO: 5450; WAN024DP4_at; Start 83; Stop 107
catcatctgctaaatctctaactaa

SEQ ID NO: 166227 - DNA, 25 bp, Artificial
  probe
  misc_feature (1)..(25): SEQ ID NO: 5450; WAN024DP4_at; Start 36; Stop 60
tagcctcgtaaatctgttaaaatat

SEQ ID NO: 166228 - DNA, 25 bp, Artificial
  probe
  misc_feature (1)..(25): SEQ ID NO: 5450; WAN024DP4_at; Start 79; Stop 103
tcttcatcatctgctaaatctctaa

SEQ ID NO: 166229 - DNA, 25 bp, Artificial
  probe
  misc_feature (1)..(25): SEQ ID NO: 5450; WAN024DP4_at; Start 62; Stop 86
taggccatcctttcttttcttcatc

SEQ ID NO: 166230 - DNA, 25 bp, Artificial
  probe
  misc_feature (1)..(25): SEQ ID NO: 5450; WAN024DP4_at; Start 64; Stop 88
ggccatcctttcttttcttcatcat

SEQ ID NO: 166231 - DNA, 25 bp, Artificial
  probe
  misc_feature (1)..(25): SEQ ID NO: 5450; WAN024DP4_at; Start 17; Stop 41
ccctatattataccatgattagcct

SEQ ID NO: 166232 - DNA, 25 bp, Artificial
  probe
  misc_feature (1)..(25): SEQ ID NO: 5450; WAN024DP4_at; Start 1; Stop 25
ttggaatttttcatcaccctatatt

SEQ ID NO: 166233 - DNA, 25 bp, Artificial
  probe
  misc_feature (1)..(25): SEQ ID NO: 5450; WAN024DP4_at; Start 37; Stop 61
agcctcgtaaatctgttaaaatatt

SEQ ID NO: 166234 - DNA, 25 bp, Artificial
  probe
  misc_feature (1)..(25): SEQ ID NO: 5450; WAN024DP4_at; Start 84; Stop 108
atcatctgctaaatctctaactaat

SEQ ID NO: 166235 - DNA, 25 bp, Artificial
  probe
  misc_feature (1)..(25): SEQ ID NO: 5450; WAN024DP4_at; Start 48; Stop 72
tctgttaaaatatttaggccatcct

SEQ ID NO: 166236 - DNA, 25 bp, Artificial
  probe
  misc_feature (1)..(25): SEQ ID NO: 5450; WAN024DP4_at; Start 23; Stop 47
attataccatgattagcctcgtaaa

SEQ ID NO: 166237 - DNA, 25 bp, Artificial
  probe
  misc_feature (1)..(25): SEQ ID NO: 5450; WAN024DP4_at; Start 46; Stop 70
aatctgttaaaatatttaggccatc

SEQ ID NO: 166238 - DNA, 25 bp, Artificial
  probe
  misc_feature (1)..(25): SEQ ID NO: 5450; WAN024DP4_at; Start 74; Stop 98
tcttttcttcatcatctgctaaatc

SEQ ID NO: 166239 - DNA, 25 bp, Artificial
  probe
  misc_feature (1)..(25): SEQ ID NO: 5450; WAN024DP4_at; Start 81; Stop 105
ttcatcatctgctaaatctctaact

SEQ ID NO: 166240 - DNA, 25 bp, Artificial
  probe
  misc_feature (1)..(25): SEQ ID NO: 5450; WAN024DP4_at; Start 22; Stop 46
tattataccatgattagcctcgtaa

SEQ ID NO: 166241 - DNA, 25 bp, Artificial
  probe
  misc_feature (1)..(25): SEQ ID NO: 7389; WAN024DP5_at; Start 33; Stop 57
caattgtaaatcaatattttttcaa

SEQ ID NO: 166242 - DNA, 25 bp, Artificial
  probe
  misc_feature (1)..(25): SEQ ID NO: 7389; WAN024DP5_at; Start 42; Stop 66
atcaatattttttcaaaaaattgcg

SEQ ID NO: 166243 - DNA, 25 bp, Artificial
  probe
  misc_feature (1)..(25): SEQ ID NO: 7389; WAN024DP5_at; Start 43; Stop 67
tcaatattttttcaaaaaattgcga

SEQ ID NO: 166244 - DNA, 25 bp, Artificial
  probe
  misc_feature (1)..(25): SEQ ID NO: 7389; WAN024DP5_at; Start 29; Stop 53
cgttcaattgtaaatcaatattttt

SEQ ID NO: 166245 - DNA, 25 bp, Artificial
  probe
  misc_feature (1)..(25): SEQ ID NO: 7389; WAN024DP5_at; Start 28; Stop 52
tcgttcaattgtaaatcaatatttt

SEQ ID NO: 166246 - DNA, 25 bp, Artificial
  probe
  misc_feature (1)..(25): SEQ ID NO: 7389; WAN024DP5_at; Start 27; Stop 51
ctcgttcaattgtaaatcaatattt

SEQ ID NO: 166247 - DNA, 25 bp, Artificial
  probe
  misc_feature (1)..(25): SEQ ID NO: 7389; WAN024DP5_at; Start 32; Stop 56
tcaattgtaaatcaatattttttca

SEQ ID NO: 166248 - DNA, 25 bp, Artificial
  probe
  misc_feature (1)..(25): SEQ ID NO: 7389; WAN024DP5_at; Start 75; Stop 99
tttctttttctactatagtgaaatg

SEQ ID NO: 166249 - DNA, 25 bp, Artificial
  probe
  misc_feature (1)..(25): SEQ ID NO: 3109; WAN024DP6_at; Start 16; Stop 40
tacctttttagagaagattcaagta

SEQ ID NO: 166250 - DNA, 25 bp, Artificial
  probe
  misc_feature (1)..(25): SEQ ID NO: 3109; WAN024DP6_at; Start 14; Stop 38
actacctttttagagaagattcaag

SEQ ID NO: 166251 - DNA, 25 bp, Artificial
  probe
  misc_feature (1)..(25): SEQ ID NO: 3109; WAN024DP6_at; Start 12; Stop 36
atactacctttttagagaagattca

SEQ ID NO: 166252 - DNA, 25 bp, Artificial
  probe
  misc_feature (1)..(25): SEQ ID NO: 3109; WAN024DP6_at; Start 8; Stop 32
tattatactacctttttagagaaga

SEQ ID NO: 166253 - DNA, 25 bp, Artificial
  probe
  misc_feature (1)..(25): SEQ ID NO: 3109; WAN024DP6_at; Start 15; Stop 39
ctacctttttagagaagattcaagt

SEQ ID NO: 166254 - DNA, 25 bp, Artificial
  probe
  misc_feature (1)..(25): SEQ ID NO: 3109; WAN024DP6_at; Start 9; Stop 33
attatactacctttttagagaagat

SEQ ID NO: 166255 - DNA, 25 bp, Artificial
  probe
  misc_feature (1)..(25): SEQ ID NO: 3109; WAN024DP6_at; Start 22; Stop 46
tttagagaagattcaagtaaattac

SEQ ID NO: 166256 - DNA, 25 bp, Artificial
  probe
  misc_feature (1)..(25): SEQ ID NO: 3109; WAN024DP6_at; Start 23; Stop 47
ttagagaagattcaagtaaattact

SEQ ID NO: 166257 - DNA, 25 bp, Artificial
  probe
  misc_feature (1)..(25): SEQ ID NO: 3109; WAN024DP6_at; Start 11; Stop 35
tatactacctttttagagaagattc

SEQ ID NO: 166258 - DNA, 25 bp, Artificial
  probe
  misc_feature (1)..(25): SEQ ID NO: 3109; WAN024DP6_at; Start 21; Stop 45
ttttagagaagattcaagtaaatta

SEQ ID NO: 166259 - DNA, 25 bp, Artificial
  probe
  misc_feature (1)..(25): SEQ ID NO: 3109; WAN024DP6_at; Start 53; Stop 77
tctttaattattttgaaaatctaca

SEQ ID NO: 166260 - DNA, 25 bp, Artificial
  probe
  misc_feature (1)..(25): SEQ ID NO: 3109; WAN024DP6_at; Start 13; Stop 37
tactacctttttagagaagattcaa

SEQ ID NO: 166261 - DNA, 25 bp, Artificial
  probe
  misc_feature (1)..(25): SEQ ID NO: 3109; WAN024DP6_at; Start 19; Stop 43
ctttttagagaagattcaagtaaat

SEQ ID NO: 166262 - DNA, 25 bp, Artificial
  probe
  misc_feature (1)..(25): SEQ ID NO: 3109; WAN024DP6_at; Start 24; Stop 48
tagagaagattcaagtaaattacta

SEQ ID NO: 166263 - DNA, 25 bp, Artificial
  probe
  misc_feature (1)..(25): SEQ ID NO: 4332; WAN024DP7_at; Start 32; Stop 56
tttacacagacaaattcccagttat

SEQ ID NO: 166264 - DNA, 25 bp, Artificial
  probe
  misc_feature (1)..(25): SEQ ID NO: 4332; WAN024DP7_at; Start 20; Stop 44
tatctcgctatttttacacagacaa

SEQ ID NO: 166265 - DNA, 25 bp, Artificial
  probe
  misc_feature (1)..(25): SEQ ID NO: 4332; WAN024DP7_at; Start 25; Stop 49
cgctatttttacacagacaaattcc

SEQ ID NO: 166266 - DNA, 25 bp, Artificial
  probe
  misc_feature (1)..(25): SEQ ID NO: 4332; WAN024DP7_at; Start 13; Stop 37
taccatctatctcgctatttttaca

SEQ ID NO: 166267 - DNA, 25 bp, Artificial
  probe
  misc_feature (1)..(25): SEQ ID NO: 4332; WAN024DP7_at; Start 16; Stop 40
catctatctcgctatttttacacag

SEQ ID NO: 166268 - DNA, 25 bp, Artificial
  probe
  misc_feature (1)..(25): SEQ ID NO: 4332; WAN024DP7_at; Start 39; Stop 63
agacaaattcccagttatgagtatt

SEQ ID NO: 166269 - DNA, 25 bp, Artificial
  probe
  misc_feature (1)..(25): SEQ ID NO: 4332; WAN024DP7_at; Start 12; Stop 36
ataccatctatctcgctatttttac

SEQ ID NO: 166270 - DNA, 25 bp, Artificial
  probe
  misc_feature (1)..(25): SEQ ID NO: 4332; WAN024DP7_at; Start 31; Stop 55
ttttacacagacaaattcccagtta

SEQ ID NO: 166271 - DNA, 25 bp, Artificial
  probe
  misc_feature (1)..(25): SEQ ID NO: 4332; WAN024DP7_at; Start 11; Stop 35
aataccatctatctcgctattttta

SEQ ID NO: 166272 - DNA, 25 bp, Artificial
  probe
  misc_feature (1)..(25): SEQ ID NO: 4332; WAN024DP7_at; Start 10; Stop 34
aaataccatctatctcgctattttt

SEQ ID NO: 166273 - DNA, 25 bp, Artificial
  probe
  misc_feature (1)..(25): SEQ ID NO: 4332; WAN024DP7_at; Start 19; Stop 43
ctatctcgctatttttacacagaca

SEQ ID NO: 166274 - DNA, 25 bp, Artificial
  probe
  misc_feature (1)..(25): SEQ ID NO: 4332; WAN024DP7_at; Start 18; Stop 42
tctatctcgctatttttacacagac

SEQ ID NO: 166275 - DNA, 25 bp, Artificial
  probe
  misc_feature (1)..(25): SEQ ID NO: 4332; WAN024DP7_at; Start 23; Stop 47
ctcgctatttttacacagacaaatt

SEQ ID NO: 166276 - DNA, 25 bp, Artificial
  probe
  misc_feature (1)..(25): SEQ ID NO: 4332; WAN024DP7_at; Start 26; Stop 50
gctatttttacacagacaaattccc

SEQ ID NO: 166277 - DNA, 25 bp, Artificial
  probe
  misc_feature (1)..(25): SEQ ID NO: 4332; WAN024DP7_at; Start 36; Stop 60
cacagacaaattcccagttatgagt

SEQ ID NO: 166278 - DNA, 25 bp, Artificial
  probe
  misc_feature (1)..(25): SEQ ID NO: 4332; WAN024DP7_at; Start 9; Stop 33
taaataccatctatctcgctatttt

SEQ ID NO: 166279 - DNA, 25 bp, Artificial
  probe
  misc_feature (1)..(25): SEQ ID NO: 4332; WAN024DP7_at; Start 28; Stop 52
tatttttacacagacaaattcccag

SEQ ID NO: 166280 - DNA, 25 bp, Artificial
  probe
  misc_feature (1)..(25): SEQ ID NO: 4332; WAN024DP7_at; Start 22; Stop 46
tctcgctatttttacacagacaaat

SEQ ID NO: 166281 - DNA, 25 bp, Artificial
  probe
  misc_feature (1)..(25): SEQ ID NO: 4332; WAN024DP7_at; Start 35; Stop 59
acacagacaaattcccagttatgag

SEQ ID NO: 166282 - DNA, 25 bp, Artificial
  probe
  misc_feature (1)..(25): SEQ ID NO: 4332; WAN024DP7_at; Start 38; Stop 62
cagacaaattcccagttatgagtat

SEQ ID NO: 166283 - DNA, 25 bp, Artificial
  probe
  misc_feature (1)..(25): SEQ ID NO: 4332; WAN024DP7_at; Start 15; Stop 39
ccatctatctcgctatttttacaca

SEQ ID NO: 166284 - DNA, 25 bp, Artificial
  probe
  misc_feature (1)..(25): SEQ ID NO: 4332; WAN024DP7_at; Start 4; Stop 28
ttttataaataccatctatctcgct

SEQ ID NO: 166285 - DNA, 25 bp, Artificial
  probe
  misc_feature (1)..(25): SEQ ID NO: 4332; WAN024DP7_at; Start 34; Stop 58
tacacagacaaattcccagttatga

SEQ ID NO: 166286 - DNA, 25 bp, Artificial
  probe
  misc_feature (1)..(25): SEQ ID NO: 4332; WAN024DP7_at; Start 29; Stop 53
atttttacacagacaaattcccagt

SEQ ID NO: 166287 - DNA, 25 bp, Artificial
  probe
  misc_feature (1)..(25): SEQ ID NO: 4332; WAN024DP7_at; Start 7; Stop 31
tataaataccatctatctcgctatt

SEQ ID NO: 166288 - DNA, 25 bp, Artificial
  probe
  misc_feature (1)..(25): SEQ ID NO: 4332; WAN024DP7_at; Start 21; Stop 45
atctcgctatttttacacagacaaa

SEQ ID NO: 166289 - DNA, 25 bp, Artificial
  probe
  misc_feature (1)..(25): SEQ ID NO: 4332; WAN024DP7_at; Start 3; Stop 27
gttttataaataccatctatctcgc

SEQ ID NO: 166290 - DNA, 25 bp, Artificial
  probe
  misc_feature (1)..(25): SEQ ID NO: 4332; WAN024DP7_at; Start 8; Stop 32
ataaataccatctatctcgctattt

SEQ ID NO: 166291 - DNA, 25 bp, Artificial
  probe
  misc_feature (1)..(25): SEQ ID NO: 4332; WAN024DP7_at; Start 33; Stop 57
ttacacagacaaattcccagttatg

SEQ ID NO: 166292 - DNA, 25 bp, Artificial
  probe
  misc_feature (1)..(25): SEQ ID NO: 4332; WAN024DP7_at; Start 24; Stop 48
tcgctatttttacacagacaaattc

SEQ ID NO: 166293 - DNA, 25 bp, Artificial
  probe
  misc_feature (1)..(25): SEQ ID NO: 4332; WAN024DP7_at; Start 5; Stop 29
tttataaataccatctatctcgcta

SEQ ID NO: 166294 - DNA, 25 bp, Artificial
  probe
  misc_feature (1)..(25): SEQ ID NO: 4332; WAN024DP7_at; Start 6; Stop 30
ttataaataccatctatctcgctat

SEQ ID NO: 166295 - DNA, 25 bp, Artificial
  probe
  misc_feature (1)..(25): SEQ ID NO: 4332; WAN024DP7_at; Start 27; Stop 51
ctatttttacacagacaaattccca

SEQ ID NO: 166296 - DNA, 25 bp, Artificial
  probe
  misc_feature (1)..(25): SEQ ID NO: 4332; WAN024DP7_at; Start 2; Stop 26
tgttttataaataccatctatctcg

SEQ ID NO: 166297 - DNA, 25 bp, Artificial
  probe
  misc_feature (1)..(25): SEQ ID NO: 4872; WAN024DP8_at; Start 40; Stop 64
cagattttctgttccagaaatagct

SEQ ID NO: 166298 - DNA, 25 bp, Artificial
  probe
  misc_feature (1)..(25): SEQ ID NO: 4872; WAN024DP8_at; Start 46; Stop 70
ttctgttccagaaatagctatcgct

SEQ ID NO: 166299 - DNA, 25 bp, Artificial
  probe
  misc_feature (1)..(25): SEQ ID NO: 4872; WAN024DP8_at; Start 60; Stop 84
tagctatcgctatgatataattatt

SEQ ID NO: 166300 - DNA, 25 bp, Artificial
  probe
  misc_feature (1)..(25): SEQ ID NO: 4872; WAN024DP8_at; Start 3; Stop 27
gaaaacaggtacacttcatgtgaaa

SEQ ID NO: 166301 - DNA, 25 bp, Artificial
  probe
  misc_feature (1)..(25): SEQ ID NO: 4872; WAN024DP8_at; Start 48; Stop 72
ctgttccagaaatagctatcgctat

SEQ ID NO: 166302 - DNA, 25 bp, Artificial
  probe
  misc_feature (1)..(25): SEQ ID NO: 4872; WAN024DP8_at; Start 62; Stop 86
gctatcgctatgatataattatttt

SEQ ID NO: 166303 - DNA, 25 bp, Artificial
  probe
  misc_feature (1)..(25): SEQ ID NO: 4872; WAN024DP8_at; Start 52; Stop 76
tccagaaatagctatcgctatgata

SEQ ID NO: 166304 - DNA, 25 bp, Artificial
  probe
  misc_feature (1)..(25): SEQ ID NO: 4872; WAN024DP8_at; Start 8; Stop 32
caggtacacttcatgtgaaaaaaac

SEQ ID NO: 166305 - DNA, 25 bp, Artificial
  probe
  misc_feature (1)..(25): SEQ ID NO: 4872; WAN024DP8_at; Start 51; Stop 75
ttccagaaatagctatcgctatgat

SEQ ID NO: 166306 - DNA, 25 bp, Artificial
  probe
  misc_feature (1)..(25): SEQ ID NO: 4872; WAN024DP8_at; Start 39; Stop 63
tcagattttctgttccagaaatagc

SEQ ID NO: 166307 - DNA, 25 bp, Artificial
  probe
  misc_feature (1)..(25): SEQ ID NO: 4872; WAN024DP8_at; Start 54; Stop 78
cagaaatagctatcgctatgatata

SEQ ID NO: 166308 - DNA, 25 bp, Artificial
  probe
  misc_feature (1)..(25): SEQ ID NO: 4872; WAN024DP8_at; Start 27; Stop 51
aaaaacaacatttcagattttctgt

SEQ ID NO: 166309 - DNA, 25 bp, Artificial
  probe
  misc_feature (1)..(25): SEQ ID NO: 4872; WAN024DP8_at; Start 16; Stop 40
cttcatgtgaaaaaaacaacatttc

SEQ ID NO: 166310 - DNA, 25 bp, Artificial
  probe
  misc_feature (1)..(25): SEQ ID NO: 4872; WAN024DP8_at; Start 26; Stop 50
aaaaaacaacatttcagattttctg

SEQ ID NO: 166311 - DNA, 25 bp, Artificial
  probe
  misc_feature (1)..(25): SEQ ID NO: 4872; WAN024DP8_at; Start 34; Stop 58
acatttcagattttctgttccagaa

SEQ ID NO: 166312 - DNA, 25 bp, Artificial
  probe
  misc_feature (1)..(25): SEQ ID NO: 4872; WAN024DP8_at; Start 35; Stop 59
catttcagattttctgttccagaaa

SEQ ID NO: 166313 - DNA, 25 bp, Artificial
  probe
  misc_feature (1)..(25): SEQ ID NO: 4872; WAN024DP8_at; Start 33; Stop 57
aacatttcagattttctgttccaga

SEQ ID NO: 166314 - DNA, 25 bp, Artificial
  probe
  misc_feature (1)..(25): SEQ ID NO: 4872; WAN024DP8_at; Start 10; Stop 34
ggtacacttcatgtgaaaaaaacaa

SEQ ID NO: 166315 - DNA, 25 bp, Artificial
  probe
  misc_feature (1)..(25): SEQ ID NO: 4872; WAN024DP8_at; Start 45; Stop 69
tttctgttccagaaatagctatcgc

SEQ ID NO: 166316 - DNA, 25 bp, Artificial
  probe
  misc_feature (1)..(25): SEQ ID NO: 4872; WAN024DP8_at; Start 55; Stop 79
agaaatagctatcgctatgatataa

SEQ ID NO: 166317 - DNA, 25 bp, Artificial
  probe
  misc_feature (1)..(25): SEQ ID NO: 4872; WAN024DP8_at; Start 12; Stop 36
tacacttcatgtgaaaaaaacaaca

SEQ ID NO: 166318 - DNA, 25 bp, Artificial
  probe
  misc_feature (1)..(25): SEQ ID NO: 4872; WAN024DP8_at; Start 1; Stop 25
ttgaaaacaggtacacttcatgtga

SEQ ID NO: 166319 - DNA, 25 bp, Artificial
  probe
  misc_feature (1)..(25): SEQ ID NO: 4872; WAN024DP8_at; Start 47; Stop 71
tctgttccagaaatagctatcgcta

SEQ ID NO: 166320 - DNA, 25 bp, Artificial
  probe
  misc_feature (1)..(25): SEQ ID NO: 4872; WAN024DP8_at; Start 53; Stop 77
ccagaaatagctatcgctatgatat

SEQ ID NO: 166321 - DNA, 25 bp, Artificial
  probe
  misc_feature (1)..(25): SEQ ID NO: 4872; WAN024DP8_at; Start 50; Stop 74
gttccagaaatagctatcgctatga

SEQ ID NO: 166322 - DNA, 25 bp, Artificial
  probe
  misc_feature (1)..(25): SEQ ID NO: 4872; WAN024DP8_at; Start 6; Stop 30
aacaggtacacttcatgtgaaaaaa

SEQ ID NO: 166323 - DNA, 25 bp, Artificial
  probe
  misc_feature (1)..(25): SEQ ID NO: 4872; WAN024DP8_at; Start 18; Stop 42
tcatgtgaaaaaaacaacatttcag

SEQ ID NO: 166324 - DNA, 25 bp, Artificial
  probe
  misc_feature (1)..(25): SEQ ID NO: 4872; WAN024DP8_at; Start 42; Stop 66
gattttctgttccagaaatagctat

SEQ ID NO: 166325 - DNA, 25 bp, Artificial
  probe
  misc_feature (1)..(25): SEQ ID NO: 4872; WAN024DP8_at; Start 5; Stop 29
aaacaggtacacttcatgtgaaaaa

SEQ ID NO: 166326 - DNA, 25 bp, Artificial
  probe
  misc_feature (1)..(25): SEQ ID NO: 4872; WAN024DP8_at; Start 44; Stop 68
ttttctgttccagaaatagctatcg

SEQ ID NO: 166327 - DNA, 25 bp, Artificial
  probe
  misc_feature (1)..(25): SEQ ID NO: 4872; WAN024DP8_at; Start 32; Stop 56
caacatttcagattttctgttccag

SEQ ID NO: 166328 - DNA, 25 bp, Artificial
  probe
  misc_feature (1)..(25): SEQ ID NO: 4872; WAN024DP8_at; Start 4; Stop 28
aaaacaggtacacttcatgtgaaaa

SEQ ID NO: 166329 - DNA, 25 bp, Artificial
  probe
  misc_feature (1)..(25): SEQ ID NO: 4872; WAN024DP8_at; Start 2; Stop 26
tgaaaacaggtacacttcatgtgaa

SEQ ID NO: 166330 - DNA, 25 bp, Artificial
  probe
  misc_feature (1)..(25): SEQ ID NO: 4872; WAN024DP8_at; Start 49; Stop 73
tgttccagaaatagctatcgctatg

SEQ ID NO: 166331 - DNA, 25 bp, Artificial
  probe
  misc_feature (1)..(25): SEQ ID NO: 5571; WAN024DP9_at; Start 6; Stop 30
cttgatggctatgctactaataaca

SEQ ID NO: 166332 - DNA, 25 bp, Artificial
  probe
  misc_feature (1)..(25): SEQ ID NO: 5571; WAN024DP9_at; Start 17; Stop 41
tgctactaataacaattaggagaga

SEQ ID NO: 166333 - DNA, 25 bp, Artificial
  probe
  misc_feature (1)..(25): SEQ ID NO: 5571; WAN024DP9_at; Start 57; Stop 81
taacaacaaggattatccccttgag

SEQ ID NO: 166334 - DNA, 25 bp, Artificial
  probe
  misc_feature (1)..(25): SEQ ID NO: 5571; WAN024DP9_at; Start 72; Stop 96
tccccttgagatgaaaggaacttta

SEQ ID NO: 166335 - DNA, 25 bp, Artificial
  probe
  misc_feature (1)..(25): SEQ ID NO: 5571; WAN024DP9_at; Start 9; Stop 33
gatggctatgctactaataacaatt

SEQ ID NO: 166336 - DNA, 25 bp, Artificial
  probe
  misc_feature (1)..(25): SEQ ID NO: 5571; WAN024DP9_at; Start 50; Stop 74
cacttgttaacaacaaggattatcc

SEQ ID NO: 166337 - DNA, 25 bp, Artificial
  probe
  misc_feature (1)..(25): SEQ ID NO: 5571; WAN024DP9_at; Start 5; Stop 29
gcttgatggctatgctactaataac

SEQ ID NO: 166338 - DNA, 25 bp, Artificial
  probe
  misc_feature (1)..(25): SEQ ID NO: 5571; WAN024DP9_at; Start 43; Stop 67
aatcaggcacttgttaacaacaagg

SEQ ID NO: 166339 - DNA, 25 bp, Artificial
  probe
  misc_feature (1)..(25): SEQ ID NO: 5571; WAN024DP9_at; Start 12; Stop 36
ggctatgctactaataacaattagg

SEQ ID NO: 166340 - DNA, 25 bp, Artificial
  probe
  misc_feature (1)..(25): SEQ ID NO: 5571; WAN024DP9_at; Start 60; Stop 84
caacaaggattatccccttgagatg

SEQ ID NO: 166341 - DNA, 25 bp, Artificial
  probe
  misc_feature (1)..(25): SEQ ID NO: 5571; WAN024DP9_at; Start 32; Stop 56
ttaggagagaaaatcaggcacttgt

SEQ ID NO: 166342 - DNA, 25 bp, Artificial
  probe
  misc_feature (1)..(25): SEQ ID NO: 5571; WAN024DP9_at; Start 64; Stop 88
aaggattatccccttgagatgaaag

SEQ ID NO: 166343 - DNA, 25 bp, Artificial
  probe
  misc_feature (1)..(25): SEQ ID NO: 5571; WAN024DP9_at; Start 3; Stop 27
gggcttgatggctatgctactaata

SEQ ID NO: 166344 - DNA, 25 bp, Artificial
  probe
  misc_feature (1)..(25): SEQ ID NO: 5571; WAN024DP9_at; Start 48; Stop 72
ggcacttgttaacaacaaggattat

SEQ ID NO: 166345 - DNA, 25 bp, Artificial
  probe
  misc_feature (1)..(25): SEQ ID NO: 5571; WAN024DP9_at; Start 36; Stop 60
gagagaaaatcaggcacttgttaac

SEQ ID NO: 166346 - DNA, 25 bp, Artificial
  probe
  misc_feature (1)..(25): SEQ ID NO: 5571; WAN024DP9_at; Start 81; Stop 105
gatgaaaggaactttagaaatctta

SEQ ID NO: 166347 - DNA, 25 bp, Artificial
  probe
  misc_feature (1)..(25): SEQ ID NO: 5571; WAN024DP9_at; Start 78; Stop 102
tgagatgaaaggaactttagaaatc

SEQ ID NO: 166348 - DNA, 25 bp, Artificial
  probe
  misc_feature (1)..(25): SEQ ID NO: 5571; WAN024DP9_at; Start 2; Stop 26
tgggcttgatggctatgctactaat

SEQ ID NO: 166349 - DNA, 25 bp, Artificial
  probe
  misc_feature (1)..(25): SEQ ID NO: 5571; WAN024DP9_at; Start 29; Stop 53
caattaggagagaaaatcaggcact

SEQ ID NO: 166350 - DNA, 25 bp, Artificial
  probe
  misc_feature (1)..(25): SEQ ID NO: 5571; WAN024DP9_at; Start 73; Stop 97
ccccttgagatgaaaggaactttag

SEQ ID NO: 166351 - DNA, 25 bp, Artificial
  probe
  misc_feature (1)..(25): SEQ ID NO: 5571; WAN024DP9_at; Start 70; Stop 94
tatccccttgagatgaaaggaactt

SEQ ID NO: 166352 - DNA, 25 bp, Artificial
  probe
  misc_feature (1)..(25): SEQ ID NO: 5571; WAN024DP9_at; Start 69; Stop 93
ttatccccttgagatgaaaggaact

SEQ ID NO: 166353 - DNA, 25 bp, Artificial
  probe
  misc_feature (1)..(25): SEQ ID NO: 5571; WAN024DP9_at; Start 66; Stop 90
ggattatccccttgagatgaaagga

SEQ ID NO: 166354 - DNA, 25 bp, Artificial
  probe
  misc_feature (1)..(25): SEQ ID NO: 5571; WAN024DP9_at; Start 33; Stop 57
taggagagaaaatcaggcacttgtt

SEQ ID NO: 166355 - DNA, 25 bp, Artificial
  probe
  misc_feature (1)..(25): SEQ ID NO: 5571; WAN024DP9_at; Start 45; Stop 69
tcaggcacttgttaacaacaaggat

SEQ ID NO: 166356 - DNA, 25 bp, Artificial
  probe
  misc_feature (1)..(25): SEQ ID NO: 5571; WAN024DP9_at; Start 26; Stop 50
taacaattaggagagaaaatcaggc

SEQ ID NO: 166357 - DNA, 25 bp, Artificial
  probe
  misc_feature (1)..(25): SEQ ID NO: 5571; WAN024DP9_at; Start 40; Stop 64
gaaaatcaggcacttgttaacaaca

SEQ ID NO: 166358 - DNA, 25 bp, Artificial
  probe
  misc_feature (1)..(25): SEQ ID NO: 5571; WAN024DP9_at; Start 74; Stop 98
cccttgagatgaaaggaactttaga

SEQ ID NO: 166359 - DNA, 25 bp, Artificial
  probe
  misc_feature (1)..(25): SEQ ID NO: 5571; WAN024DP9_at; Start 67; Stop 91
gattatccccttgagatgaaaggaa

SEQ ID NO: 166360 - DNA, 25 bp, Artificial
  probe
  misc_feature (1)..(25): SEQ ID NO: 5571; WAN024DP9_at; Start 41; Stop 65
aaaatcaggcacttgttaacaacaa

SEQ ID NO: 166361 - DNA, 25 bp, Artificial
  probe
  misc_feature (1)..(25): SEQ ID NO: 5571; WAN024DP9_at; Start 30; Stop 54
aattaggagagaaaatcaggcactt

SEQ ID NO: 166362 - DNA, 25 bp, Artificial
  probe
  misc_feature (1)..(25): SEQ ID NO: 5571; WAN024DP9_at; Start 38; Stop 62
gagaaaatcaggcacttgttaacaa

SEQ ID NO: 166363 - DNA, 25 bp, Artificial
  probe
  misc_feature (1)..(25): SEQ ID NO: 5571; WAN024DP9_at; Start 28; Stop 52
acaattaggagagaaaatcaggcac

SEQ ID NO: 166364 - DNA, 25 bp, Artificial
  probe
  misc_feature (1)..(25): SEQ ID NO: 5571; WAN024DP9_at; Start 35; Stop 59
ggagagaaaatcaggcacttgttaa

SEQ ID NO: 166365 - DNA, 25 bp, Artificial
  probe
  misc_feature (1)..(25): SEQ ID NO: 1951; WAN024DPA_at; Start 61; Stop 85
ttttcacaatgtttctataaaatag

SEQ ID NO: 166366 - DNA, 25 bp, Artificial
  probe
  misc_feature (1)..(25): SEQ ID NO: 1951; WAN024DPA_at; Start 57; Stop 81
gattttttcacaatgtttctataaa

SEQ ID NO: 166367 - DNA, 25 bp, Artificial
  probe
  misc_feature (1)..(25): SEQ ID NO: 1951; WAN024DPA_at; Start 53; Stop 77
tgttgattttttcacaatgtttcta

SEQ ID NO: 166368 - DNA, 25 bp, Artificial
  probe
  misc_feature (1)..(25): SEQ ID NO: 1951; WAN024DPA_at; Start 54; Stop 78
gttgattttttcacaatgtttctat

SEQ ID NO: 166369 - DNA, 25 bp, Artificial
  probe
  misc_feature (1)..(25): SEQ ID NO: 1951; WAN024DPA_at; Start 67; Stop 91
caatgtttctataaaatagaagaat

SEQ ID NO: 166370 - DNA, 25 bp, Artificial
  probe
  misc_feature (1)..(25): SEQ ID NO: 1951; WAN024DPA_at; Start 15; Stop 39
catcaaaactaagatttttcttagt

SEQ ID NO: 166371 - DNA, 25 bp, Artificial
  probe
  misc_feature (1)..(25): SEQ ID NO: 1951; WAN024DPA_at; Start 47; Stop 71
tatttttgttgattttttcacaatg

SEQ ID NO: 166372 - DNA, 25 bp, Artificial
  probe
  misc_feature (1)..(25): SEQ ID NO: 1951; WAN024DPA_at; Start 64; Stop 88
tcacaatgtttctataaaatagaag

SEQ ID NO: 166373 - DNA, 25 bp, Artificial
  probe
  misc_feature (1)..(25): SEQ ID NO: 1951; WAN024DPA_at; Start 55; Stop 79
ttgattttttcacaatgtttctata

SEQ ID NO: 166374 - DNA, 25 bp, Artificial
  probe
  misc_feature (1)..(25): SEQ ID NO: 1951; WAN024DPA_at; Start 14; Stop 38
acatcaaaactaagatttttcttag

SEQ ID NO: 166375 - DNA, 25 bp, Artificial
  probe
  misc_feature (1)..(25): SEQ ID NO: 1951; WAN024DPA_at; Start 66; Stop 90
acaatgtttctataaaatagaagaa

SEQ ID NO: 166376 - DNA, 25 bp, Artificial
  probe
  misc_feature (1)..(25): SEQ ID NO: 1951; WAN024DPA_at; Start 65; Stop 89
cacaatgtttctataaaatagaaga

SEQ ID NO: 166377 - DNA, 25 bp, Artificial
  probe
  misc_feature (1)..(25): SEQ ID NO: 1951; WAN024DPA_at; Start 44; Stop 68
tcttatttttgttgattttttcaca

SEQ ID NO: 166378 - DNA, 25 bp, Artificial
  probe
  misc_feature (1)..(25): SEQ ID NO: 1951; WAN024DPA_at; Start 13; Stop 37
tacatcaaaactaagatttttctta

SEQ ID NO: 166379 - DNA, 25 bp, Artificial
  probe
  misc_feature (1)..(25): SEQ ID NO: 1951; WAN024DPA_at; Start 60; Stop 84
tttttcacaatgtttctataaaata

SEQ ID NO: 166380 - DNA, 25 bp, Artificial
  probe
  misc_feature (1)..(25): SEQ ID NO: 1951; WAN024DPA_at; Start 63; Stop 87
ttcacaatgtttctataaaatagaa

SEQ ID NO: 166381 - DNA, 25 bp, Artificial
  probe
  misc_feature (1)..(25): SEQ ID NO: 1951; WAN024DPA_at; Start 56; Stop 80
tgattttttcacaatgtttctataa

SEQ ID NO: 166382 - DNA, 25 bp, Artificial
  probe
  misc_feature (1)..(25): SEQ ID NO: 1951; WAN024DPA_at; Start 51; Stop 75
tttgttgattttttcacaatgtttc

SEQ ID NO: 166383 - DNA, 25 bp, Artificial
  probe
  misc_feature (1)..(25): SEQ ID NO: 1951; WAN024DPA_at; Start 62; Stop 86
tttcacaatgtttctataaaataga

SEQ ID NO: 166384 - DNA, 25 bp, Artificial
  probe
  misc_feature (1)..(25): SEQ ID NO: 1951; WAN024DPA_at; Start 52; Stop 76
ttgttgattttttcacaatgtttct

SEQ ID NO: 166385 - DNA, 25 bp, Artificial
  probe
  misc_feature (1)..(25): SEQ ID NO: 4222; WAN024DPB_at; Start 74; Stop 98
agcgtactctcaagtatgaggatca

SEQ ID NO: 166386 - DNA, 25 bp, Artificial
  probe
  misc_feature (1)..(25): SEQ ID NO: 4222; WAN024DPB_at; Start 151; Stop 175
tatgtgacttctctgacttttaggg

SEQ ID NO: 166387 - DNA, 25 bp, Artificial
  probe
  misc_feature (1)..(25): SEQ ID NO: 4222; WAN024DPB_at; Start 15; Stop 39
aaatcggaaagatagagccaaaatg

SEQ ID NO: 166388 - DNA, 25 bp, Artificial
  probe
  misc_feature (1)..(25): SEQ ID NO: 4222; WAN024DPB_at; Start 114; Stop 138
gactttgtcaggatgtgtaacctta

SEQ ID NO: 166389 - DNA, 25 bp, Artificial
  probe
  misc_feature (1)..(25): SEQ ID NO: 4222; WAN024DPB_at; Start 87; Stop 111
gtatgaggatcatgaggctctcatg

SEQ ID NO: 166390 - DNA, 25 bp, Artificial
  probe
  misc_feature (1)..(25): SEQ ID NO: 4222; WAN024DPB_at; Start 43; Stop 67
gaactgacctataaggactgctatc

SEQ ID NO: 166391 - DNA, 25 bp, Artificial
  probe
  misc_feature (1)..(25): SEQ ID NO: 4222; WAN024DPB_at; Start 48; Stop 72
gacctataaggactgctatcatgta

SEQ ID NO: 166392 - DNA, 25 bp, Artificial
  probe
  misc_feature (1)..(25): SEQ ID NO: 4222; WAN024DPB_at; Start 122; Stop 146
caggatgtgtaaccttaccagatac

SEQ ID NO: 166393 - DNA, 25 bp, Artificial
  probe
  misc_feature (1)..(25): SEQ ID NO: 4222; WAN024DPB_at; Start 134; Stop 158
ccttaccagatacactttatgtgac

SEQ ID NO: 166394 - DNA, 25 bp, Artificial
  probe
  misc_feature (1)..(25): SEQ ID NO: 4222; WAN024DPB_at; Start 211; Stop 235
taccgttttctatctcatgcagatt

SEQ ID NO: 166395 - DNA, 25 bp, Artificial
  probe
  misc_feature (1)..(25): SEQ ID NO: 4222; WAN024DPB_at; Start 125; Stop 149
gatgtgtaaccttaccagatacact

SEQ ID NO: 166396 - DNA, 25 bp, Artificial
  probe
  misc_feature (1)..(25): SEQ ID NO: 4222; WAN024DPB_at; Start 209; Stop 233
tctaccgttttctatctcatgcaga

SEQ ID NO: 166397 - DNA, 25 bp, Artificial
  probe
  misc_feature (1)..(25): SEQ ID NO: 4222; WAN024DPB_at; Start 100; Stop 124
gaggctctcatgttgactttgtcag

SEQ ID NO: 166398 - DNA, 25 bp, Artificial
  probe
  misc_feature (1)..(25): SEQ ID NO: 4222; WAN024DPB_at; Start 205; Stop 229
gacctctaccgttttctatctcatg

SEQ ID NO: 166399 - DNA, 25 bp, Artificial
  probe
  misc_feature (1)..(25): SEQ ID NO: 4222; WAN024DPB_at; Start 67; Stop 91
catgtagagcgtactctcaagtatg

SEQ ID NO: 166400 - DNA, 25 bp, Artificial
  probe
  misc_feature (1)..(25): SEQ ID NO: 4222; WAN024DPB_at; Start 142; Stop 166
gatacactttatgtgacttctctga

SEQ ID NO: 166401 - DNA, 25 bp, Artificial
  probe
  misc_feature (1)..(25): SEQ ID NO: 4222; WAN024DPB_at; Start 84; Stop 108
caagtatgaggatcatgaggctctc

SEQ ID NO: 166402 - DNA, 25 bp, Artificial
  probe
  misc_feature (1)..(25): SEQ ID NO: 4222; WAN024DPB_at; Start 200; Stop 224
tcggagacctctaccgttttctatc

SEQ ID NO: 166403 - DNA, 25 bp, Artificial
  probe
  misc_feature (1)..(25): SEQ ID NO: 4222; WAN024DPB_at; Start 40; Stop 64
tttgaactgacctataaggactgct

SEQ ID NO: 166404 - DNA, 25 bp, Artificial
  probe
  misc_feature (1)..(25): SEQ ID NO: 4222; WAN024DPB_at; Start 52; Stop 76
tataaggactgctatcatgtagagc

SEQ ID NO: 166405 - DNA, 25 bp, Artificial
  probe
  misc_feature (1)..(25): SEQ ID NO: 4222; WAN024DPB_at; Start 31; Stop 55
gccaaaatgtttgaactgacctata

SEQ ID NO: 166406 - DNA, 25 bp, Artificial
  probe
  misc_feature (1)..(25): SEQ ID NO: 4222; WAN024DPB_at; Start 93; Stop 117
ggatcatgaggctctcatgttgact

SEQ ID NO: 166407 - DNA, 25 bp, Artificial
  probe
  misc_feature (1)..(25): SEQ ID NO: 4222; WAN024DPB_at; Start 27; Stop 51
tagagccaaaatgtttgaactgacc

SEQ ID NO: 166408 - DNA, 25 bp, Artificial
  probe
  misc_feature (1)..(25): SEQ ID NO: 4222; WAN024DPB_at; Start 18; Stop 42
tcggaaagatagagccaaaatgttt

SEQ ID NO: 166409 - DNA, 25 bp, Artificial
  probe
  misc_feature (1)..(25): SEQ ID NO: 4222; WAN024DPB_at; Start 54; Stop 78
taaggactgctatcatgtagagcgt

SEQ ID NO: 166410 - DNA, 25 bp, Artificial
  probe
  misc_feature (1)..(25): SEQ ID NO: 4222; WAN024DPB_at; Start 58; Stop 82
gactgctatcatgtagagcgtactc

SEQ ID NO: 166411 - DNA, 25 bp, Artificial
  probe
  misc_feature (1)..(25): SEQ ID NO: 4222; WAN024DPB_at; Start 130; Stop 154
gtaaccttaccagatacactttatg

SEQ ID NO: 166412 - DNA, 25 bp, Artificial
  probe
  misc_feature (1)..(25): SEQ ID NO: 4222; WAN024DPB_at; Start 81; Stop 105
tctcaagtatgaggatcatgaggct

SEQ ID NO: 166413 - DNA, 25 bp, Artificial
  probe
  misc_feature (1)..(25): SEQ ID NO: 4222; WAN024DPB_at; Start 71; Stop 95
tagagcgtactctcaagtatgagga

SEQ ID NO: 166414 - DNA, 25 bp, Artificial
  probe
  misc_feature (1)..(25): SEQ ID NO: 4222; WAN024DPB_at; Start 102; Stop 126
ggctctcatgttgactttgtcagga

SEQ ID NO: 166415 - DNA, 25 bp, Artificial
  probe
  misc_feature (1)..(25): SEQ ID NO: 4222; WAN024DPB_at; Start 62; Stop 86
gctatcatgtagagcgtactctcaa

SEQ ID NO: 166416 - DNA, 25 bp, Artificial
  probe
  misc_feature (1)..(25): SEQ ID NO: 4222; WAN024DPB_at; Start 78; Stop 102
tactctcaagtatgaggatcatgag

SEQ ID NO: 166417 - DNA, 25 bp, Artificial
  probe
  misc_feature (1)..(25): SEQ ID NO: 4222; WAN024DPB_at; Start 36; Stop 60
aatgtttgaactgacctataaggac

SEQ ID NO: 166418 - DNA, 25 bp, Artificial
  probe
  misc_feature (1)..(25): SEQ ID NO: 4222; WAN024DPB_at; Start 119; Stop 143
tgtcaggatgtgtaaccttaccaga

SEQ ID NO: 166419 - DNA, 25 bp, Artificial
  probe
  misc_feature (1)..(25): SEQ ID NO: 2448; WAN024DPC_at; Start 70; Stop 94
aaattcaccctcaaagataacacct

SEQ ID NO: 166420 - DNA, 25 bp, Artificial
  probe
  misc_feature (1)..(25): SEQ ID NO: 2448; WAN024DPC_at; Start 300; Stop 324
catggatagcttggtagaacgtggt

SEQ ID NO: 166421 - DNA, 25 bp, Artificial
  probe
  misc_feature (1)..(25): SEQ ID NO: 2448; WAN024DPC_at; Start 108; Stop 132
ggttggtaactatgaactgactcgc

SEQ ID NO: 166422 - DNA, 25 bp, Artificial
  probe
  misc_feature (1)..(25): SEQ ID NO: 2448; WAN024DPC_at; Start 225; Stop 249
caagtttggccttcgtctagttgat

SEQ ID NO: 166423 - DNA, 25 bp, Artificial
  probe
  misc_feature (1)..(25): SEQ ID NO: 2448; WAN024DPC_at; Start 173; Stop 197
tcaaaatcatcattaacaaggaact

SEQ ID NO: 166424 - DNA, 25 bp, Artificial
  probe
  misc_feature (1)..(25): SEQ ID NO: 2448; WAN024DPC_at; Start 309; Stop 333
cttggtagaacgtggtgtctttaca

SEQ ID NO: 166425 - DNA, 25 bp, Artificial
  probe
  misc_feature (1)..(25): SEQ ID NO: 2448; WAN024DPC_at; Start 216; Stop 240
tatcactgacaagtttggccttcgt

SEQ ID NO: 166426 - DNA, 25 bp, Artificial
  probe
  misc_feature (1)..(25): SEQ ID NO: 2448; WAN024DPC_at; Start 118; Stop 142
tatgaactgactcgccttttggaaa

SEQ ID NO: 166427 - DNA, 25 bp, Artificial
  probe
  misc_feature (1)..(25): SEQ ID NO: 2448; WAN024DPC_at; Start 98; Stop 122
ttgaaactaaggttggtaactatga

SEQ ID NO: 166428 - DNA, 25 bp, Artificial
  probe
  misc_feature (1)..(25): SEQ ID NO: 2448; WAN024DPC_at; Start 304; Stop 328
gatagcttggtagaacgtggtgtct

SEQ ID NO: 166429 - DNA, 25 bp, Artificial
  probe
  misc_feature (1)..(25): SEQ ID NO: 2448; WAN024DPC_at; Start 262; Stop 286
gaagaccaccatattcatcaggaaa

SEQ ID NO: 166430 - DNA, 25 bp, Artificial
  probe
  misc_feature (1)..(25): SEQ ID NO: 2448; WAN024DPC_at; Start 126; Stop 150
gactcgccttttggaaaaagtgcca

SEQ ID NO: 166431 - DNA, 25 bp, Artificial
  probe
  misc_feature (1)..(25): SEQ ID NO: 2448; WAN024DPC_at; Start 283; Stop 307
gaaaaattctacttcctcatggata

SEQ ID NO: 166432 - DNA, 25 bp, Artificial
  probe
  misc_feature (1)..(25): SEQ ID NO: 2448; WAN024DPC_at; Start 140; Stop 164
aaaaagtgccaaacagcggtgaagg

SEQ ID NO: 166433 - DNA, 25 bp, Artificial
  probe
  misc_feature (1)..(25): SEQ ID NO: 2448; WAN024DPC_at; Start 232; Stop 256
ggccttcgtctagttgatattttca

SEQ ID NO: 166434 - DNA, 25 bp, Artificial
  probe
  misc_feature (1)..(25): SEQ ID NO: 2448; WAN024DPC_at; Start 247; Stop 271
gatattttcaaatcagaagaccacc

SEQ ID NO: 166435 - DNA, 25 bp, Artificial
  probe
  misc_feature (1)..(25): SEQ ID NO: 2448; WAN024DPC_at; Start 148; Stop 172
ccaaacagcggtgaaggcttccaac

SEQ ID NO: 166436 - DNA, 25 bp, Artificial
  probe
  misc_feature (1)..(25): SEQ ID NO: 2448; WAN024DPC_at; Start 112; Stop 136
ggtaactatgaactgactcgccttt

SEQ ID NO: 166437 - DNA, 25 bp, Artificial
  probe
  misc_feature (1)..(25): SEQ ID NO: 2448; WAN024DPC_at; Start 212; Stop 236
tcaatatcactgacaagtttggcct

SEQ ID NO: 166438 - DNA, 25 bp, Artificial
  probe
  misc_feature (1)..(25): SEQ ID NO: 2448; WAN024DPC_at; Start 157; Stop 181
ggtgaaggcttccaactcaaaatca

SEQ ID NO: 166439 - DNA, 25 bp, Artificial
  probe
  misc_feature (1)..(25): SEQ ID NO: 2448; WAN024DPC_at; Start 270; Stop 294
ccatattcatcaggaaaaattctac

SEQ ID NO: 166440 - DNA, 25 bp, Artificial
  probe
  misc_feature (1)..(25): SEQ ID NO: 2448; WAN024DPC_at; Start 180; Stop 204
catcattaacaaggaacttacaggg

SEQ ID NO: 166441 - DNA, 25 bp, Artificial
  probe
  misc_feature (1)..(25): SEQ ID NO: 2448; WAN024DPC_at; Start 3; Stop 27
ggcatttgaaaaaatcattcagtta

SEQ ID NO: 166442 - DNA, 25 bp, Artificial
  probe
  misc_feature (1)..(25): SEQ ID NO: 2448; WAN024DPC_at; Start 203; Stop 227
gggctaaaatcaatatcactgacaa

SEQ ID NO: 166443 - DNA, 25 bp, Artificial
  probe
  misc_feature (1)..(25): SEQ ID NO: 2448; WAN024DPC_at; Start 219; Stop 243
cactgacaagtttggccttcgtcta

SEQ ID NO: 166444 - DNA, 25 bp, Artificial
  probe
  misc_feature (1)..(25): SEQ ID NO: 2448; WAN024DPC_at; Start 137; Stop 161
tggaaaaagtgccaaacagcggtga

SEQ ID NO: 166445 - DNA, 25 bp, Artificial
  probe
  misc_feature (1)..(25): SEQ ID NO: 2448; WAN024DPC_at; Start 146; Stop 170
tgccaaacagcggtgaaggcttcca

SEQ ID NO: 166446 - DNA, 25 bp, Artificial
  probe
  misc_feature (1)..(25): SEQ ID NO: 2448; WAN024DPC_at; Start 153; Stop 177
cagcggtgaaggcttccaactcaaa

SEQ ID NO: 166447 - DNA, 25 bp, Artificial
  probe
  misc_feature (1)..(25): SEQ ID NO: 2448; WAN024DPC_at; Start 32; Stop 56
attgtcgttacgattacactcttag

SEQ ID NO: 166448 - DNA, 25 bp, Artificial
  probe
  misc_feature (1)..(25): SEQ ID NO: 2448; WAN024DPC_at; Start 17; Stop 41
tcattcagttaaaaaattgtcgtta

SEQ ID NO: 166449 - DNA, 25 bp, Artificial
  probe
  misc_feature (1)..(25): SEQ ID NO: 2448; WAN024DPC_at; Start 163; Stop 187
ggcttccaactcaaaatcatcatta

SEQ ID NO: 166450 - DNA, 25 bp, Artificial
  probe
  misc_feature (1)..(25): SEQ ID NO: 2448; WAN024DPC_at; Start 296; Stop 320
tcctcatggatagcttggtagaacg

SEQ ID NO: 166451 - DNA, 25 bp, Artificial
  probe
  misc_feature (1)..(25): SEQ ID NO: 2448; WAN024DPC_at; Start 259; Stop 283
tcagaagaccaccatattcatcagg

SEQ ID NO: 166452 - DNA, 25 bp, Artificial
  probe
  misc_feature (1)..(25): SEQ ID NO: 2448; WAN024DPC_at; Start 160; Stop 184
gaaggcttccaactcaaaatcatca

SEQ ID NO: 166453 - DNA, 25 bp, Artificial
  probe
  misc_feature (1)..(25): SEQ ID NO: 2450; WAN024DPD_at; Start 89; Stop 113
tattgggaatttttgcaactgcaat

SEQ ID NO: 166454 - DNA, 25 bp, Artificial
  probe
  misc_feature (1)..(25): SEQ ID NO: 2450; WAN024DPD_at; Start 111; Stop 135
aattggtgccctcagtaatctacta

SEQ ID NO: 166455 - DNA, 25 bp, Artificial
  probe
  misc_feature (1)..(25): SEQ ID NO: 2450; WAN024DPD_at; Start 110; Stop 134
caattggtgccctcagtaatctact

SEQ ID NO: 166456 - DNA, 25 bp, Artificial
  probe
  misc_feature (1)..(25): SEQ ID NO: 2450; WAN024DPD_at; Start 115; Stop 139
ggtgccctcagtaatctactaacta

SEQ ID NO: 166457 - DNA, 25 bp, Artificial
  probe
  misc_feature (1)..(25): SEQ ID NO: 2450; WAN024DPD_at; Start 106; Stop 130
actgcaattggtgccctcagtaatc

SEQ ID NO: 166458 - DNA, 25 bp, Artificial
  probe
  misc_feature (1)..(25): SEQ ID NO: 2450; WAN024DPD_at; Start 87; Stop 111
tttattgggaatttttgcaactgca

SEQ ID NO: 166459 - DNA, 25 bp, Artificial
  probe
  misc_feature (1)..(25): SEQ ID NO: 2450; WAN024DPD_at; Start 102; Stop 126
tgcaactgcaattggtgccctcagt

SEQ ID NO: 166460 - DNA, 25 bp, Artificial
  probe
  misc_feature (1)..(25): SEQ ID NO: 2450; WAN024DPD_at; Start 99; Stop 123
ttttgcaactgcaattggtgccctc

SEQ ID NO: 166461 - DNA, 25 bp, Artificial
  probe
  misc_feature (1)..(25): SEQ ID NO: 2450; WAN024DPD_at; Start 35; Stop 59
ctatgtttgagaaaataaccttgtt

SEQ ID NO: 166462 - DNA, 25 bp, Artificial
  probe
  misc_feature (1)..(25): SEQ ID NO: 2450; WAN024DPD_at; Start 5; Stop 29
catttggagataatggaaatcgtaa

SEQ ID NO: 166463 - DNA, 25 bp, Artificial
  probe
  misc_feature (1)..(25): SEQ ID NO: 2450; WAN024DPD_at; Start 114; Stop 138
tggtgccctcagtaatctactaact

SEQ ID NO: 166464 - DNA, 25 bp, Artificial
  probe
  misc_feature (1)..(25): SEQ ID NO: 2450; WAN024DPD_at; Start 72; Stop 96
catgctagtagcaagtttattggga

SEQ ID NO: 166465 - DNA, 25 bp, Artificial
  probe
  misc_feature (1)..(25): SEQ ID NO: 2450; WAN024DPD_at; Start 112; Stop 136
attggtgccctcagtaatctactaa

SEQ ID NO: 166466 - DNA, 25 bp, Artificial
  probe
  misc_feature (1)..(25): SEQ ID NO: 2450; WAN024DPD_at; Start 60; Stop 84
tatcgtgattatcatgctagtagca

SEQ ID NO: 166467 - DNA, 25 bp, Artificial
  probe
  misc_feature (1)..(25): SEQ ID NO: 2450; WAN024DPD_at; Start 92; Stop 116
tgggaatttttgcaactgcaattgg

SEQ ID NO: 166468 - DNA, 25 bp, Artificial
  probe
  misc_feature (1)..(25): SEQ ID NO: 2450; WAN024DPD_at; Start 117; Stop 141
tgccctcagtaatctactaactaat

SEQ ID NO: 166469 - DNA, 25 bp, Artificial
  probe
  misc_feature (1)..(25): SEQ ID NO: 2450; WAN024DPD_at; Start 80; Stop 104
tagcaagtttattgggaatttttgc

SEQ ID NO: 166470 - DNA, 25 bp, Artificial
  probe
  misc_feature (1)..(25): SEQ ID NO: 2450; WAN024DPD_at; Start 63; Stop 87
cgtgattatcatgctagtagcaagt

SEQ ID NO: 166471 - DNA, 25 bp, Artificial
  probe
  misc_feature (1)..(25): SEQ ID NO: 2450; WAN024DPD_at; Start 43; Stop 67
gagaaaataaccttgtttatcgtga

SEQ ID NO: 166472 - DNA, 25 bp, Artificial
  probe
  misc_feature (1)..(25): SEQ ID NO: 2450; WAN024DPD_at; Start 97; Stop 121
atttttgcaactgcaattggtgccc

SEQ ID NO: 166473 - DNA, 25 bp, Artificial
  probe
  misc_feature (1)..(25): SEQ ID NO: 2450; WAN024DPD_at; Start 51; Stop 75
aaccttgtttatcgtgattatcatg

SEQ ID NO: 166474 - DNA, 25 bp, Artificial
  probe
  misc_feature (1)..(25): SEQ ID NO: 2450; WAN024DPD_at; Start 100; Stop 124
tttgcaactgcaattggtgccctca

SEQ ID NO: 166475 - DNA, 25 bp, Artificial
  probe
  misc_feature (1)..(25): SEQ ID NO: 2450; WAN024DPD_at; Start 66; Stop 90
gattatcatgctagtagcaagttta

SEQ ID NO: 166476 - DNA, 25 bp, Artificial
  probe
  misc_feature (1)..(25): SEQ ID NO: 2450; WAN024DPD_at; Start 103; Stop 127
gcaactgcaattggtgccctcagta

SEQ ID NO: 166477 - DNA, 25 bp, Artificial
  probe
  misc_feature (1)..(25): SEQ ID NO: 2450; WAN024DPD_at; Start 104; Stop 128
caactgcaattggtgccctcagtaa

SEQ ID NO: 166478 - DNA, 25 bp, Artificial
  probe
  misc_feature (1)..(25): SEQ ID NO: 2450; WAN024DPD_at; Start 101; Stop 125
ttgcaactgcaattggtgccctcag

SEQ ID NO: 166479 - DNA, 25 bp, Artificial
  probe
  misc_feature (1)..(25): SEQ ID NO: 2450; WAN024DPD_at; Start 109; Stop 133
gcaattggtgccctcagtaatctac

SEQ ID NO: 166480 - DNA, 25 bp, Artificial
  probe
  misc_feature (1)..(25): SEQ ID NO: 2450; WAN024DPD_at; Start 75; Stop 99
gctagtagcaagtttattgggaatt

SEQ ID NO: 166481 - DNA, 25 bp, Artificial
  probe
  misc_feature (1)..(25): SEQ ID NO: 2450; WAN024DPD_at; Start 33; Stop 57
aactatgtttgagaaaataaccttg

SEQ ID NO: 166482 - DNA, 25 bp, Artificial
  probe
  misc_feature (1)..(25): SEQ ID NO: 2450; WAN024DPD_at; Start 2; Stop 26
tggcatttggagataatggaaatcg

SEQ ID NO: 166483 - DNA, 25 bp, Artificial
  probe
  misc_feature (1)..(25): SEQ ID NO: 2450; WAN024DPD_at; Start 53; Stop 77
ccttgtttatcgtgattatcatgct

SEQ ID NO: 166484 - DNA, 25 bp, Artificial
  probe
  misc_feature (1)..(25): SEQ ID NO: 2450; WAN024DPD_at; Start 95; Stop 119
gaatttttgcaactgcaattggtgc

SEQ ID NO: 166485 - DNA, 25 bp, Artificial
  probe
  misc_feature (1)..(25): SEQ ID NO: 2450; WAN024DPD_at; Start 9; Stop 33
tggagataatggaaatcgtaaaaaa

SEQ ID NO: 166486 - DNA, 25 bp, Artificial
  probe
  misc_feature (1)..(25): SEQ ID NO: 2450; WAN024DPD_at; Start 62; Stop 86
tcgtgattatcatgctagtagcaag

SEQ ID NO: 166487 - DNA, 25 bp, Artificial
  probe
  misc_feature (1)..(25): SEQ ID NO: 5659; WAN024DPE_at; Start 12; Stop 36
tgcagcaaatatccacagaggactt

SEQ ID NO: 166488 - DNA, 25 bp, Artificial
  probe
  misc_feature (1)..(25): SEQ ID NO: 5659; WAN024DPE_at; Start 10; Stop 34
tctgcagcaaatatccacagaggac

SEQ ID NO: 166489 - DNA, 25 bp, Artificial
  probe
  misc_feature (1)..(25): SEQ ID NO: 5659; WAN024DPE_at; Start 17; Stop 41
caaatatccacagaggacttggacc

SEQ ID NO: 166490 - DNA, 25 bp, Artificial
  probe
  misc_feature (1)..(25): SEQ ID NO: 5659; WAN024DPE_at; Start 37; Stop 61
ggacctcagatgtacactatgcctg

SEQ ID NO: 166491 - DNA, 25 bp, Artificial
  probe
  misc_feature (1)..(25): SEQ ID NO: 5659; WAN024DPE_at; Start 43; Stop 67
cagatgtacactatgcctgtcggac

SEQ ID NO: 166492 - DNA, 25 bp, Artificial
  probe
  misc_feature (1)..(25): SEQ ID NO: 5659; WAN024DPE_at; Start 23; Stop 47
tccacagaggacttggacctcagat

SEQ ID NO: 166493 - DNA, 25 bp, Artificial
  probe
  misc_feature (1)..(25): SEQ ID NO: 5659; WAN024DPE_at; Start 32; Stop 56
gacttggacctcagatgtacactat

SEQ ID NO: 166494 - DNA, 25 bp, Artificial
  probe
  misc_feature (1)..(25): SEQ ID NO: 5659; WAN024DPE_at; Start 44; Stop 68
agatgtacactatgcctgtcggaca

SEQ ID NO: 166495 - DNA, 25 bp, Artificial
  probe
  misc_feature (1)..(25): SEQ ID NO: 5659; WAN024DPE_at; Start 8; Stop 32
catctgcagcaaatatccacagagg

SEQ ID NO: 166496 - DNA, 25 bp, Artificial
  probe
  misc_feature (1)..(25): SEQ ID NO: 5659; WAN024DPE_at; Start 42; Stop 66
tcagatgtacactatgcctgtcgga

SEQ ID NO: 166497 - DNA, 25 bp, Artificial
  probe
  misc_feature (1)..(25): SEQ ID NO: 5659; WAN024DPE_at; Start 19; Stop 43
aatatccacagaggacttggacctc

SEQ ID NO: 166498 - DNA, 25 bp, Artificial
  probe
  misc_feature (1)..(25): SEQ ID NO: 5659; WAN024DPE_at; Start 3; Stop 27
ggtttcatctgcagcaaatatccac

SEQ ID NO: 166499 - DNA, 25 bp, Artificial
  probe
  misc_feature (1)..(25): SEQ ID NO: 5659; WAN024DPE_at; Start 31; Stop 55
ggacttggacctcagatgtacacta

SEQ ID NO: 166500 - DNA, 25 bp, Artificial
  probe
  misc_feature (1)..(25): SEQ ID NO: 5659; WAN024DPE_at; Start 40; Stop 64
cctcagatgtacactatgcctgtcg

SEQ ID NO: 166501 - DNA, 25 bp, Artificial
  probe
  misc_feature (1)..(25): SEQ ID NO: 5659; WAN024DPE_at; Start 34; Stop 58
cttggacctcagatgtacactatgc

SEQ ID NO: 166502 - DNA, 25 bp, Artificial
  probe
  misc_feature (1)..(25): SEQ ID NO: 5659; WAN024DPE_at; Start 29; Stop 53
gaggacttggacctcagatgtacac

SEQ ID NO: 166503 - DNA, 25 bp, Artificial
  probe
  misc_feature (1)..(25): SEQ ID NO: 5659; WAN024DPE_at; Start 54; Stop 78
tatgcctgtcggacaaagaaaaaag

SEQ ID NO: 166504 - DNA, 25 bp, Artificial
  probe
  misc_feature (1)..(25): SEQ ID NO: 5659; WAN024DPE_at; Start 35; Stop 59
ttggacctcagatgtacactatgcc

SEQ ID NO: 166505 - DNA, 25 bp, Artificial
  probe
  misc_feature (1)..(25): SEQ ID NO: 5659; WAN024DPE_at; Start 45; Stop 69
gatgtacactatgcctgtcggacaa

SEQ ID NO: 166506 - DNA, 25 bp, Artificial
  probe
  misc_feature (1)..(25): SEQ ID NO: 5659; WAN024DPE_at; Start 25; Stop 49
cacagaggacttggacctcagatgt

SEQ ID NO: 166507 - DNA, 25 bp, Artificial
  probe
  misc_feature (1)..(25): SEQ ID NO: 5659; WAN024DPE_at; Start 14; Stop 38
cagcaaatatccacagaggacttgg

SEQ ID NO: 166508 - DNA, 25 bp, Artificial
  probe
  misc_feature (1)..(25): SEQ ID NO: 5659; WAN024DPE_at; Start 36; Stop 60
tggacctcagatgtacactatgcct

SEQ ID NO: 166509 - DNA, 25 bp, Artificial
  probe
  misc_feature (1)..(25): SEQ ID NO: 5659; WAN024DPE_at; Start 47; Stop 71
tgtacactatgcctgtcggacaaag

SEQ ID NO: 166510 - DNA, 25 bp, Artificial
  probe
  misc_feature (1)..(25): SEQ ID NO: 5659; WAN024DPE_at; Start 51; Stop 75
cactatgcctgtcggacaaagaaaa

SEQ ID NO: 166511 - DNA, 25 bp, Artificial
  probe
  misc_feature (1)..(25): SEQ ID NO: 5659; WAN024DPE_at; Start 49; Stop 73
tacactatgcctgtcggacaaagaa

SEQ ID NO: 166512 - DNA, 25 bp, Artificial
  probe
  misc_feature (1)..(25): SEQ ID NO: 5659; WAN024DPE_at; Start 27; Stop 51
cagaggacttggacctcagatgtac

SEQ ID NO: 166513 - DNA, 25 bp, Artificial
  probe
  misc_feature (1)..(25): SEQ ID NO: 5659; WAN024DPE_at; Start 13; Stop 37
gcagcaaatatccacagaggacttg

SEQ ID NO: 166514 - DNA, 25 bp, Artificial
  probe
  misc_feature (1)..(25): SEQ ID NO: 5659; WAN024DPE_at; Start 16; Stop 40
gcaaatatccacagaggacttggac

SEQ ID NO: 166515 - DNA, 25 bp, Artificial
  probe
  misc_feature (1)..(25): SEQ ID NO: 5659; WAN024DPE_at; Start 21; Stop 45
tatccacagaggacttggacctcag

SEQ ID NO: 166516 - DNA, 25 bp, Artificial
  probe
  misc_feature (1)..(25): SEQ ID NO: 5659; WAN024DPE_at; Start 5; Stop 29
tttcatctgcagcaaatatccacag

SEQ ID NO: 166517 - DNA, 25 bp, Artificial
  probe
  misc_feature (1)..(25): SEQ ID NO: 5659; WAN024DPE_at; Start 1; Stop 25
ttggtttcatctgcagcaaatatcc

SEQ ID NO: 166518 - DNA, 25 bp, Artificial
  probe
  misc_feature (1)..(25): SEQ ID NO: 5659; WAN024DPE_at; Start 48; Stop 72
gtacactatgcctgtcggacaaaga

SEQ ID NO: 166519 - DNA, 25 bp, Artificial
  probe
  misc_feature (1)..(25): SEQ ID NO: 5659; WAN024DPE_at; Start 38; Stop 62
gacctcagatgtacactatgcctgt

SEQ ID NO: 166520 - DNA, 25 bp, Artificial
  probe
  misc_feature (1)..(25): SEQ ID NO: 5659; WAN024DPE_at; Start 18; Stop 42
aaatatccacagaggacttggacct

SEQ ID NO: 166521 - DNA, 25 bp, Artificial
  probe
  misc_feature (1)..(25): SEQ ID NO: 2955; WAN024DPF_at; Start 73; Stop 97
gtagataaaggcaattttgacaata

SEQ ID NO: 166522 - DNA, 25 bp, Artificial
  probe
  misc_feature (1)..(25): SEQ ID NO: 2955; WAN024DPF_at; Start 52; Stop 76
ttttataagcattttgtctttgtag

SEQ ID NO: 166523 - DNA, 25 bp, Artificial
  probe
  misc_feature (1)..(25): SEQ ID NO: 2955; WAN024DPF_at; Start 1; Stop 25
atgtggagtgttgctacaacgaaaa

SEQ ID NO: 166524 - DNA, 25 bp, Artificial
  probe
  misc_feature (1)..(25): SEQ ID NO: 2955; WAN024DPF_at; Start 4; Stop 28
tggagtgttgctacaacgaaaaagg

SEQ ID NO: 166525 - DNA, 25 bp, Artificial
  probe
  misc_feature (1)..(25): SEQ ID NO: 2955; WAN024DPF_at; Start 76; Stop 100
gataaaggcaattttgacaataaaa

SEQ ID NO: 166526 - DNA, 25 bp, Artificial
  probe
  misc_feature (1)..(25): SEQ ID NO: 2955; WAN024DPF_at; Start 54; Stop 78
ttataagcattttgtctttgtagat

SEQ ID NO: 166527 - DNA, 25 bp, Artificial
  probe
  misc_feature (1)..(25): SEQ ID NO: 2955; WAN024DPF_at; Start 64; Stop 88
tttgtctttgtagataaaggcaatt

SEQ ID NO: 166528 - DNA, 25 bp, Artificial
  probe
  misc_feature (1)..(25): SEQ ID NO: 2955; WAN024DPF_at; Start 69; Stop 93
ctttgtagataaaggcaattttgac

SEQ ID NO: 166529 - DNA, 25 bp, Artificial
  probe
  misc_feature (1)..(25): SEQ ID NO: 2955; WAN024DPF_at; Start 58; Stop 82
aagcattttgtctttgtagataaag

SEQ ID NO: 166530 - DNA, 25 bp, Artificial
  probe
  misc_feature (1)..(25): SEQ ID NO: 2955; WAN024DPF_at; Start 53; Stop 77
tttataagcattttgtctttgtaga

SEQ ID NO: 166531 - DNA, 25 bp, Artificial
  probe
  misc_feature (1)..(25): SEQ ID NO: 2955; WAN024DPF_at; Start 68; Stop 92
tctttgtagataaaggcaattttga

SEQ ID NO: 166532 - DNA, 25 bp, Artificial
  probe
  misc_feature (1)..(25): SEQ ID NO: 2955; WAN024DPF_at; Start 56; Stop 80
ataagcattttgtctttgtagataa

SEQ ID NO: 166533 - DNA, 25 bp, Artificial
  probe
  misc_feature (1)..(25): SEQ ID NO: 2955; WAN024DPF_at; Start 63; Stop 87
ttttgtctttgtagataaaggcaat

SEQ ID NO: 166534 - DNA, 25 bp, Artificial
  probe
  misc_feature (1)..(25): SEQ ID NO: 2955; WAN024DPF_at; Start 74; Stop 98
tagataaaggcaattttgacaataa

SEQ ID NO: 166535 - DNA, 25 bp, Artificial
  probe
  misc_feature (1)..(25): SEQ ID NO: 2955; WAN024DPF_at; Start 75; Stop 99
agataaaggcaattttgacaataaa

SEQ ID NO: 166536 - DNA, 25 bp, Artificial
  probe
  misc_feature (1)..(25): SEQ ID NO: 2955; WAN024DPF_at; Start 55; Stop 79
tataagcattttgtctttgtagata

SEQ ID NO: 166537 - DNA, 25 bp, Artificial
  probe
  misc_feature (1)..(25): SEQ ID NO: 2955; WAN024DPF_at; Start 81; Stop 105
aggcaattttgacaataaaaatcct

SEQ ID NO: 166538 - DNA, 25 bp, Artificial
  probe
  misc_feature (1)..(25): SEQ ID NO: 2955; WAN024DPF_at; Start 90; Stop 114
tgacaataaaaatcctaaaaggtga

SEQ ID NO: 166539 - DNA, 25 bp, Artificial
  probe
  misc_feature (1)..(25): SEQ ID NO: 2955; WAN024DPF_at; Start 62; Stop 86
attttgtctttgtagataaaggcaa

SEQ ID NO: 166540 - DNA, 25 bp, Artificial
  probe
  misc_feature (1)..(25): SEQ ID NO: 2955; WAN024DPF_at; Start 83; Stop 107
gcaattttgacaataaaaatcctaa

SEQ ID NO: 166541 - DNA, 25 bp, Artificial
  probe
  misc_feature (1)..(25): SEQ ID NO: 2955; WAN024DPF_at; Start 82; Stop 106
ggcaattttgacaataaaaatccta

SEQ ID NO: 166542 - DNA, 25 bp, Artificial
  probe
  misc_feature (1)..(25): SEQ ID NO: 2955; WAN024DPF_at; Start 49; Stop 73
ctattttataagcattttgtctttg

SEQ ID NO: 166543 - DNA, 25 bp, Artificial
  probe
  misc_feature (1)..(25): SEQ ID NO: 2955; WAN024DPF_at; Start 66; Stop 90
tgtctttgtagataaaggcaatttt

SEQ ID NO: 166544 - DNA, 25 bp, Artificial
  probe
  misc_feature (1)..(25): SEQ ID NO: 2955; WAN024DPF_at; Start 72; Stop 96
tgtagataaaggcaattttgacaat

SEQ ID NO: 166545 - DNA, 25 bp, Artificial
  probe
  misc_feature (1)..(25): SEQ ID NO: 2955; WAN024DPF_at; Start 67; Stop 91
gtctttgtagataaaggcaattttg

SEQ ID NO: 166546 - DNA, 25 bp, Artificial
  probe
  misc_feature (1)..(25): SEQ ID NO: 2955; WAN024DPF_at; Start 65; Stop 89
ttgtctttgtagataaaggcaattt

SEQ ID NO: 166547 - DNA, 25 bp, Artificial
  probe
  misc_feature (1)..(25): SEQ ID NO: 2955; WAN024DPF_at; Start 57; Stop 81
taagcattttgtctttgtagataaa

SEQ ID NO: 166548 - DNA, 25 bp, Artificial
  probe
  misc_feature (1)..(25): SEQ ID NO: 2955; WAN024DPF_at; Start 3; Stop 27
gtggagtgttgctacaacgaaaaag

SEQ ID NO: 166549 - DNA, 25 bp, Artificial
  probe
  misc_feature (1)..(25): SEQ ID NO: 2955; WAN024DPF_at; Start 59; Stop 83
agcattttgtctttgtagataaagg

SEQ ID NO: 166550 - DNA, 25 bp, Artificial
  probe
  misc_feature (1)..(25): SEQ ID NO: 2955; WAN024DPF_at; Start 61; Stop 85
cattttgtctttgtagataaaggca

SEQ ID NO: 166551 - DNA, 25 bp, Artificial
  probe
  misc_feature (1)..(25): SEQ ID NO: 2955; WAN024DPF_at; Start 50; Stop 74
tattttataagcattttgtctttgt

SEQ ID NO: 166552 - DNA, 25 bp, Artificial
  probe
  misc_feature (1)..(25): SEQ ID NO: 2955; WAN024DPF_at; Start 70; Stop 94
tttgtagataaaggcaattttgaca

SEQ ID NO: 166553 - DNA, 25 bp, Artificial
  probe
  misc_feature (1)..(25): SEQ ID NO: 2955; WAN024DPF_at; Start 60; Stop 84
gcattttgtctttgtagataaaggc

SEQ ID NO: 166554 - DNA, 25 bp, Artificial
  probe
  misc_feature (1)..(25): SEQ ID NO: 2955; WAN024DPF_at; Start 2; Stop 26
tgtggagtgttgctacaacgaaaaa

SEQ ID NO: 166555 - DNA, 25 bp, Artificial
  probe
  misc_feature (1)..(25): SEQ ID NO: 5339; WAN024DPG_at; Start 34; Stop 58
acaggtgtaacacttgtgtcaactg

SEQ ID NO: 166556 - DNA, 25 bp, Artificial
  probe
  misc_feature (1)..(25): SEQ ID NO: 5339; WAN024DPG_at; Start 13; Stop 37
tcacctcaagttaattctatcacag

SEQ ID NO: 166557 - DNA, 25 bp, Artificial
  probe
  misc_feature (1)..(25): SEQ ID NO: 5339; WAN024DPG_at; Start 25; Stop 49
aattctatcacaggtgtaacacttg

SEQ ID NO: 166558 - DNA, 25 bp, Artificial
  probe
  misc_feature (1)..(25): SEQ ID NO: 5339; WAN024DPG_at; Start 42; Stop 66
aacacttgtgtcaactggcttttat

SEQ ID NO: 166559 - DNA, 25 bp, Artificial
  probe
  misc_feature (1)..(25): SEQ ID NO: 5339; WAN024DPG_at; Start 11; Stop 35
catcacctcaagttaattctatcac

SEQ ID NO: 166560 - DNA, 25 bp, Artificial
  probe
  misc_feature (1)..(25): SEQ ID NO: 5339; WAN024DPG_at; Start 19; Stop 43
caagttaattctatcacaggtgtaa

SEQ ID NO: 166561 - DNA, 25 bp, Artificial
  probe
  misc_feature (1)..(25): SEQ ID NO: 5339; WAN024DPG_at; Start 28; Stop 52
tctatcacaggtgtaacacttgtgt

SEQ ID NO: 166562 - DNA, 25 bp, Artificial
  probe
  misc_feature (1)..(25): SEQ ID NO: 5339; WAN024DPG_at; Start 22; Stop 46
gttaattctatcacaggtgtaacac

SEQ ID NO: 166563 - DNA, 25 bp, Artificial
  probe
  misc_feature (1)..(25): SEQ ID NO: 5339; WAN024DPG_at; Start 17; Stop 41
ctcaagttaattctatcacaggtgt

SEQ ID NO: 166564 - DNA, 25 bp, Artificial
  probe
  misc_feature (1)..(25): SEQ ID NO: 5339; WAN024DPG_at; Start 30; Stop 54
tatcacaggtgtaacacttgtgtca

SEQ ID NO: 166565 - DNA, 25 bp, Artificial
  probe
  misc_feature (1)..(25): SEQ ID NO: 5339; WAN024DPG_at; Start 14; Stop 38
cacctcaagttaattctatcacagg

SEQ ID NO: 166566 - DNA, 25 bp, Artificial
  probe
  misc_feature (1)..(25): SEQ ID NO: 5339; WAN024DPG_at; Start 52; Stop 76
tcaactggcttttataatacattag

SEQ ID NO: 166567 - DNA, 25 bp, Artificial
  probe
  misc_feature (1)..(25): SEQ ID NO: 5339; WAN024DPG_at; Start 16; Stop 40
cctcaagttaattctatcacaggtg

SEQ ID NO: 166568 - DNA, 25 bp, Artificial
  probe
  misc_feature (1)..(25): SEQ ID NO: 5339; WAN024DPG_at; Start 9; Stop 33
ttcatcacctcaagttaattctatc

SEQ ID NO: 166569 - DNA, 25 bp, Artificial
  probe
  misc_feature (1)..(25): SEQ ID NO: 5339; WAN024DPG_at; Start 43; Stop 67
acacttgtgtcaactggcttttata

SEQ ID NO: 166570 - DNA, 25 bp, Artificial
  probe
  misc_feature (1)..(25): SEQ ID NO: 5339; WAN024DPG_at; Start 35; Stop 59
caggtgtaacacttgtgtcaactgg

SEQ ID NO: 166571 - DNA, 25 bp, Artificial
  probe
  misc_feature (1)..(25): SEQ ID NO: 5339; WAN024DPG_at; Start 41; Stop 65
taacacttgtgtcaactggctttta

SEQ ID NO: 166572 - DNA, 25 bp, Artificial
  probe
  misc_feature (1)..(25): SEQ ID NO: 5339; WAN024DPG_at; Start 46; Stop 70
cttgtgtcaactggcttttataata

SEQ ID NO: 166573 - DNA, 25 bp, Artificial
  probe
  misc_feature (1)..(25): SEQ ID NO: 5339; WAN024DPG_at; Start 39; Stop 63
tgtaacacttgtgtcaactggcttt

SEQ ID NO: 166574 - DNA, 25 bp, Artificial
  probe
  misc_feature (1)..(25): SEQ ID NO: 5339; WAN024DPG_at; Start 36; Stop 60
aggtgtaacacttgtgtcaactggc

SEQ ID NO: 166575 - DNA, 25 bp, Artificial
  probe
  misc_feature (1)..(25): SEQ ID NO: 5339; WAN024DPG_at; Start 40; Stop 64
gtaacacttgtgtcaactggctttt

SEQ ID NO: 166576 - DNA, 25 bp, Artificial
  probe
  misc_feature (1)..(25): SEQ ID NO: 5339; WAN024DPG_at; Start 33; Stop 57
cacaggtgtaacacttgtgtcaact

SEQ ID NO: 166577 - DNA, 25 bp, Artificial
  probe
  misc_feature (1)..(25): SEQ ID NO: 5339; WAN024DPG_at; Start 44; Stop 68
cacttgtgtcaactggcttttataa

SEQ ID NO: 166578 - DNA, 25 bp, Artificial
  probe
  misc_feature (1)..(25): SEQ ID NO: 5339; WAN024DPG_at; Start 32; Stop 56
tcacaggtgtaacacttgtgtcaac

SEQ ID NO: 166579 - DNA, 25 bp, Artificial
  probe
  misc_feature (1)..(25): SEQ ID NO: 5339; WAN024DPG_at; Start 20; Stop 44
aagttaattctatcacaggtgtaac

SEQ ID NO: 166580 - DNA, 25 bp, Artificial
  probe
  misc_feature (1)..(25): SEQ ID NO: 5339; WAN024DPG_at; Start 18; Stop 42
tcaagttaattctatcacaggtgta

SEQ ID NO: 166581 - DNA, 25 bp, Artificial
  probe
  misc_feature (1)..(25): SEQ ID NO: 5339; WAN024DPG_at; Start 37; Stop 61
ggtgtaacacttgtgtcaactggct

SEQ ID NO: 166582 - DNA, 25 bp, Artificial
  probe
  misc_feature (1)..(25): SEQ ID NO: 5339; WAN024DPG_at; Start 38; Stop 62
gtgtaacacttgtgtcaactggctt

SEQ ID NO: 166583 - DNA, 25 bp, Artificial
  probe
  misc_feature (1)..(25): SEQ ID NO: 5339; WAN024DPG_at; Start 23; Stop 47
ttaattctatcacaggtgtaacact

SEQ ID NO: 166584 - DNA, 25 bp, Artificial
  probe
  misc_feature (1)..(25): SEQ ID NO: 5339; WAN024DPG_at; Start 29; Stop 53
ctatcacaggtgtaacacttgtgtc

SEQ ID NO: 166585 - DNA, 25 bp, Artificial
  probe
  misc_feature (1)..(25): SEQ ID NO: 5339; WAN024DPG_at; Start 48; Stop 72
tgtgtcaactggcttttataataca

SEQ ID NO: 166586 - DNA, 25 bp, Artificial
  probe
  misc_feature (1)..(25): SEQ ID NO: 5339; WAN024DPG_at; Start 53; Stop 77
caactggcttttataatacattagt

SEQ ID NO: 166587 - DNA, 25 bp, Artificial
  probe
  misc_feature (1)..(25): SEQ ID NO: 5339; WAN024DPG_at; Start 49; Stop 73
gtgtcaactggcttttataatacat

SEQ ID NO: 166588 - DNA, 25 bp, Artificial
  probe
  misc_feature (1)..(25): SEQ ID NO: 5339; WAN024DPG_at; Start 27; Stop 51
ttctatcacaggtgtaacacttgtg

SEQ ID NO: 166589 - DNA, 25 bp, Artificial
  probe
  misc_feature (1)..(25): SEQ ID NO: 5068; WAN024DPH_at; Start 21; Stop 45
ggtatatactcacaaggaactttgg

SEQ ID NO: 166590 - DNA, 25 bp, Artificial
  probe
  misc_feature (1)..(25): SEQ ID NO: 5068; WAN024DPH_at; Start 30; Stop 54
tcacaaggaactttggttgactatt

SEQ ID NO: 166591 - DNA, 25 bp, Artificial
  probe
  misc_feature (1)..(25): SEQ ID NO: 5068; WAN024DPH_at; Start 36; Stop 60
ggaactttggttgactattgaatct

SEQ ID NO: 166592 - DNA, 25 bp, Artificial
  probe
  misc_feature (1)..(25): SEQ ID NO: 5068; WAN024DPH_at; Start 16; Stop 40
gcaaaggtatatactcacaaggaac

SEQ ID NO: 166593 - DNA, 25 bp, Artificial
  probe
  misc_feature (1)..(25): SEQ ID NO: 5068; WAN024DPH_at; Start 27; Stop 51
tactcacaaggaactttggttgact

SEQ ID NO: 166594 - DNA, 25 bp, Artificial
  probe
  misc_feature (1)..(25): SEQ ID NO: 5068; WAN024DPH_at; Start 44; Stop 68
ggttgactattgaatctctccaact

SEQ ID NO: 166595 - DNA, 25 bp, Artificial
  probe
  misc_feature (1)..(25): SEQ ID NO: 5068; WAN024DPH_at; Start 20; Stop 44
aggtatatactcacaaggaactttg

SEQ ID NO: 166596 - DNA, 25 bp, Artificial
  probe
  misc_feature (1)..(25): SEQ ID NO: 5068; WAN024DPH_at; Start 13; Stop 37
ctagcaaaggtatatactcacaagg

SEQ ID NO: 166597 - DNA, 25 bp, Artificial
  probe
  misc_feature (1)..(25): SEQ ID NO: 5068; WAN024DPH_at; Start 23; Stop 47
tatatactcacaaggaactttggtt

SEQ ID NO: 166598 - DNA, 25 bp, Artificial
  probe
  misc_feature (1)..(25): SEQ ID NO: 5068; WAN024DPH_at; Start 17; Stop 41
caaaggtatatactcacaaggaact

SEQ ID NO: 166599 - DNA, 25 bp, Artificial
  probe
  misc_feature (1)..(25): SEQ ID NO: 5068; WAN024DPH_at; Start 1; Stop 25
ttgactcttttactagcaaaggtat

SEQ ID NO: 166600 - DNA, 25 bp, Artificial
  probe
  misc_feature (1)..(25): SEQ ID NO: 5068; WAN024DPH_at; Start 15; Stop 39
agcaaaggtatatactcacaaggaa

SEQ ID NO: 166601 - DNA, 25 bp, Artificial
  probe
  misc_feature (1)..(25): SEQ ID NO: 5068; WAN024DPH_at; Start 9; Stop 33
tttactagcaaaggtatatactcac

SEQ ID NO: 166602 - DNA, 25 bp, Artificial
  probe
  misc_feature (1)..(25): SEQ ID NO: 5068; WAN024DPH_at; Start 31; Stop 55
cacaaggaactttggttgactattg

SEQ ID NO: 166603 - DNA, 25 bp, Artificial
  probe
  misc_feature (1)..(25): SEQ ID NO: 5068; WAN024DPH_at; Start 40; Stop 64
ctttggttgactattgaatctctcc

SEQ ID NO: 166604 - DNA, 25 bp, Artificial
  probe
  misc_feature (1)..(25): SEQ ID NO: 5068; WAN024DPH_at; Start 22; Stop 46
gtatatactcacaaggaactttggt

SEQ ID NO: 166605 - DNA, 25 bp, Artificial
  probe
  misc_feature (1)..(25): SEQ ID NO: 5068; WAN024DPH_at; Start 33; Stop 57
caaggaactttggttgactattgaa

SEQ ID NO: 166606 - DNA, 25 bp, Artificial
  probe
  misc_feature (1)..(25): SEQ ID NO: 5068; WAN024DPH_at; Start 29; Stop 53
ctcacaaggaactttggttgactat

SEQ ID NO: 166607 - DNA, 25 bp, Artificial
  probe
  misc_feature (1)..(25): SEQ ID NO: 5068; WAN024DPH_at; Start 28; Stop 52
actcacaaggaactttggttgacta

SEQ ID NO: 166608 - DNA, 25 bp, Artificial
  probe
  misc_feature (1)..(25): SEQ ID NO: 5068; WAN024DPH_at; Start 39; Stop 63
actttggttgactattgaatctctc

SEQ ID NO: 166609 - DNA, 25 bp, Artificial
  probe
  misc_feature (1)..(25): SEQ ID NO: 5068; WAN024DPH_at; Start 48; Stop 72
gactattgaatctctccaacttctt

SEQ ID NO: 166610 - DNA, 25 bp, Artificial
  probe
  misc_feature (1)..(25): SEQ ID NO: 5068; WAN024DPH_at; Start 51; Stop 75
tattgaatctctccaacttcttctt

SEQ ID NO: 166611 - DNA, 25 bp, Artificial
  probe
  misc_feature (1)..(25): SEQ ID NO: 5068; WAN024DPH_at; Start 14; Stop 38
tagcaaaggtatatactcacaagga

SEQ ID NO: 166612 - DNA, 25 bp, Artificial
  probe
  misc_feature (1)..(25): SEQ ID NO: 5068; WAN024DPH_at; Start 37; Stop 61
gaactttggttgactattgaatctc

SEQ ID NO: 166613 - DNA, 25 bp, Artificial
  probe
  misc_feature (1)..(25): SEQ ID NO: 5068; WAN024DPH_at; Start 47; Stop 71
tgactattgaatctctccaacttct

SEQ ID NO: 166614 - DNA, 25 bp, Artificial
  probe
  misc_feature (1)..(25): SEQ ID NO: 5068; WAN024DPH_at; Start 18; Stop 42
aaaggtatatactcacaaggaactt

SEQ ID NO: 166615 - DNA, 25 bp, Artificial
  probe
  misc_feature (1)..(25): SEQ ID NO: 5068; WAN024DPH_at; Start 3; Stop 27
gactcttttactagcaaaggtatat

SEQ ID NO: 166616 - DNA, 25 bp, Artificial
  probe
  misc_feature (1)..(25): SEQ ID NO: 5068; WAN024DPH_at; Start 41; Stop 65
tttggttgactattgaatctctcca

SEQ ID NO: 166617 - DNA, 25 bp, Artificial
  probe
  misc_feature (1)..(25): SEQ ID NO: 5068; WAN024DPH_at; Start 43; Stop 67
tggttgactattgaatctctccaac

SEQ ID NO: 166618 - DNA, 25 bp, Artificial
  probe
  misc_feature (1)..(25): SEQ ID NO: 5068; WAN024DPH_at; Start 10; Stop 34
ttactagcaaaggtatatactcaca

SEQ ID NO: 166619 - DNA, 25 bp, Artificial
  probe
  misc_feature (1)..(25): SEQ ID NO: 5068; WAN024DPH_at; Start 7; Stop 31
cttttactagcaaaggtatatactc

SEQ ID NO: 166620 - DNA, 25 bp, Artificial
  probe
  misc_feature (1)..(25): SEQ ID NO: 5068; WAN024DPH_at; Start 25; Stop 49
tatactcacaaggaactttggttga

SEQ ID NO: 166621 - DNA, 25 bp, Artificial
  probe
  misc_feature (1)..(25): SEQ ID NO: 5068; WAN024DPH_at; Start 11; Stop 35
tactagcaaaggtatatactcacaa

SEQ ID NO: 166622 - DNA, 25 bp, Artificial
  probe
  misc_feature (1)..(25): SEQ ID NO: 5068; WAN024DPH_at; Start 5; Stop 29
ctcttttactagcaaaggtatatac

SEQ ID NO: 166623 - DNA, 25 bp, Artificial
  probe
  misc_feature (1)..(25): SEQ ID NO: 3335; WAN024DPI_at; Start 460; Stop 484
cgcggatatgaaatcgacagaagct

SEQ ID NO: 166624 - DNA, 25 bp, Artificial
  probe
  misc_feature (1)..(25): SEQ ID NO: 3335; WAN024DPI_at; Start 61; Stop 85
tcgatggttatattggaattgtacc

SEQ ID NO: 166625 - DNA, 25 bp, Artificial
  probe
  misc_feature (1)..(25): SEQ ID NO: 3335; WAN024DPI_at; Start 151; Stop 175
caaatcccgggatacactctggaaa

SEQ ID NO: 166626 - DNA, 25 bp, Artificial
  probe
  misc_feature (1)..(25): SEQ ID NO: 3335; WAN024DPI_at; Start 296; Stop 320
taaacattatttggaaagagatttc

SEQ ID NO: 166627 - DNA, 25 bp, Artificial
  probe
  misc_feature (1)..(25): SEQ ID NO: 3335; WAN024DPI_at; Start 47; Stop 71
aaatggagagattatcgatggttat

SEQ ID NO: 166628 - DNA, 25 bp, Artificial
  probe
  misc_feature (1)..(25): SEQ ID NO: 3335; WAN024DPI_at; Start 445; Stop 469
gacttcttagaaagccgcggatatg

SEQ ID NO: 166629 - DNA, 25 bp, Artificial
  probe
  misc_feature (1)..(25): SEQ ID NO: 3335; WAN024DPI_at; Start 328; Stop 352
tccctcaaaaatgatagagtgatcg

SEQ ID NO: 166630 - DNA, 25 bp, Artificial
  probe
  misc_feature (1)..(25): SEQ ID NO: 3335; WAN024DPI_at; Start 556; Stop 580
cacttagacccaatgtttgtagaga

SEQ ID NO: 166631 - DNA, 25 bp, Artificial
  probe
  misc_feature (1)..(25): SEQ ID NO: 3335; WAN024DPI_at; Start 313; Stop 337
gagatttcaaatttatccctcaaaa

SEQ ID NO: 166632 - DNA, 25 bp, Artificial
  probe
  misc_feature (1)..(25): SEQ ID NO: 3335; WAN024DPI_at; Start 16; Stop 40
gacgtgcttatttacattagcctga

SEQ ID NO: 166633 - DNA, 25 bp, Artificial
  probe
  misc_feature (1)..(25): SEQ ID NO: 3335; WAN024DPI_at; Start 499; Stop 523
gacggtgaagcgattctttacagaa

SEQ ID NO: 166634 - DNA, 25 bp, Artificial
  probe
  misc_feature (1)..(25): SEQ ID NO: 3335; WAN024DPI_at; Start 75; Stop 99
ggaattgtaccaaaatgattattct

SEQ ID NO: 166635 - DNA, 25 bp, Artificial
  probe
  misc_feature (1)..(25): SEQ ID NO: 3335; WAN024DPI_at; Start 430; Stop 454
tatcgtaaagcaaaagacttcttag

SEQ ID NO: 166636 - DNA, 25 bp, Artificial
  probe
  misc_feature (1)..(25): SEQ ID NO: 3335; WAN024DPI_at; Start 416; Stop 440
caagagaaacgaactatcgtaaagc

SEQ ID NO: 166637 - DNA, 25 bp, Artificial
  probe
  misc_feature (1)..(25): SEQ ID NO: 3335; WAN024DPI_at; Start 588; Stop 612
tgtagaaggatatgttaaagaagaa

SEQ ID NO: 166638 - DNA, 25 bp, Artificial
  probe
  misc_feature (1)..(25): SEQ ID NO: 3335; WAN024DPI_at; Start 526; Stop 550
aaagggatcgaagtttggcatttct

SEQ ID NO: 166639 - DNA, 25 bp, Artificial
  probe
  misc_feature (1)..(25): SEQ ID NO: 3335; WAN024DPI_at; Start 543; Stop 567
gcatttcttgtgtcacttagaccca

SEQ ID NO: 166640 - DNA, 25 bp, Artificial
  probe
  misc_feature (1)..(25): SEQ ID NO: 3335; WAN024DPI_at; Start 388; Stop 412
aaccatgaagttaaagcctatgtcg

SEQ ID NO: 166641 - DNA, 25 bp, Artificial
  probe
  misc_feature (1)..(25): SEQ ID NO: 3335; WAN024DPI_at; Start 573; Stop 597
tgtagagattgaagatgtagaagga

SEQ ID NO: 166642 - DNA, 25 bp, Artificial
  probe
  misc_feature (1)..(25): SEQ ID NO: 3335; WAN024DPI_at; Start 136; Stop 160
aaagcctttgtagctcaaatcccgg

SEQ ID NO: 166643 - DNA, 25 bp, Artificial
  probe
  misc_feature (1)..(25): SEQ ID NO: 3335; WAN024DPI_at; Start 208; Stop 232
cctaaaaacataccggattatatgg

SEQ ID NO: 166644 - DNA, 25 bp, Artificial
  probe
  misc_feature (1)..(25): SEQ ID NO: 3335; WAN024DPI_at; Start 373; Stop 397
gcatatgtcgttaacaaccatgaag

SEQ ID NO: 166645 - DNA, 25 bp, Artificial
  probe
  misc_feature (1)..(25): SEQ ID NO: 3335; WAN024DPI_at; Start 103; Stop 127
gatttagtagcatttgattccatag

SEQ ID NO: 166646 - DNA, 25 bp, Artificial
  probe
  misc_feature (1)..(25): SEQ ID NO: 3335; WAN024DPI_at; Start 485; Stop 509
ttttcggaagtgaagacggtgaagc

SEQ ID NO: 166647 - DNA, 25 bp, Artificial
  probe
  misc_feature (1)..(25): SEQ ID NO: 3335; WAN024DPI_at; Start 7; Stop 31
tggtcaggtgacgtgcttatttaca

SEQ ID NO: 166648 - DNA, 25 bp, Artificial
  probe
  misc_feature (1)..(25): SEQ ID NO: 3335; WAN024DPI_at; Start 340; Stop 364
gatagagtgatcgaaggatattcaa

SEQ ID NO: 166649 - DNA, 25 bp, Artificial
  probe
  misc_feature (1)..(25): SEQ ID NO: 3335; WAN024DPI_at; Start 474; Stop 498
cgacagaagctttttcggaagtgaa

SEQ ID NO: 166650 - DNA, 25 bp, Artificial
  probe
  misc_feature (1)..(25): SEQ ID NO: 3335; WAN024DPI_at; Start 603; Stop 627
taaagaagaagttggagagattcaa

SEQ ID NO: 166651 - DNA, 25 bp, Artificial
  probe
  misc_feature (1)..(25): SEQ ID NO: 3335; WAN024DPI_at; Start 161; Stop 185
gatacactctggaaacagaagatgg

SEQ ID NO: 166652 - DNA, 25 bp, Artificial
  probe
  misc_feature (1)..(25): SEQ ID NO: 3335; WAN024DPI_at; Start 33; Stop 57
tagcctgataatgaaaatggagaga

SEQ ID NO: 166653 - DNA, 25 bp, Artificial
  probe
  misc_feature (1)..(25): SEQ ID NO: 3335; WAN024DPI_at; Start 189; Stop 213
tgaagtggagtattttaatcctaaa

SEQ ID NO: 166654 - DNA, 25 bp, Artificial
  probe
  misc_feature (1)..(25): SEQ ID NO: 3335; WAN024DPI_at; Start 358; Stop 382
tattcaaaaattgatgcatatgtcg

SEQ ID NO: 166655 - DNA, 25 bp, Artificial
  probe
  misc_feature (1)..(25): SEQ ID NO: 3335; WAN024DPI_at; Start 121; Stop 145
tccatagaagatgggaaagcctttg

SEQ ID NO: 166656 - DNA, 25 bp, Artificial
  probe
  misc_feature (1)..(25): SEQ ID NO: 3335; WAN024DPI_at; Start 403; Stop 427
gcctatgtcgaaacaagagaaacga

SEQ ID NO: 166657 - DNA, 25 bp, Artificial
  probe
  misc_feature (1)..(25): SEQ ID NO: 5850; WAN024DPJ_at; Start 29; Stop 53
atattgctgttattctctatatcct

SEQ ID NO: 166658 - DNA, 25 bp, Artificial
  probe
  misc_feature (1)..(25): SEQ ID NO: 5850; WAN024DPJ_at; Start 45; Stop 69
ctatatcctatttttcattcatgat

SEQ ID NO: 166659 - DNA, 25 bp, Artificial
  probe
  misc_feature (1)..(25): SEQ ID NO: 5850; WAN024DPJ_at; Start 25; Stop 49
tttaatattgctgttattctctata

SEQ ID NO: 166660 - DNA, 25 bp, Artificial
  probe
  misc_feature (1)..(25): SEQ ID NO: 5850; WAN024DPJ_at; Start 28; Stop 52
aatattgctgttattctctatatcc

SEQ ID NO: 166661 - DNA, 25 bp, Artificial
  probe
  misc_feature (1)..(25): SEQ ID NO: 5850; WAN024DPJ_at; Start 31; Stop 55
attgctgttattctctatatcctat

SEQ ID NO: 166662 - DNA, 25 bp, Artificial
  probe
  misc_feature (1)..(25): SEQ ID NO: 5850; WAN024DPJ_at; Start 27; Stop 51
taatattgctgttattctctatatc

SEQ ID NO: 166663 - DNA, 25 bp, Artificial
  probe
  misc_feature (1)..(25): SEQ ID NO: 5850; WAN024DPJ_at; Start 10; Stop 34
atcagtcctgatctttttaatattg

SEQ ID NO: 166664 - DNA, 25 bp, Artificial
  probe
  misc_feature (1)..(25): SEQ ID NO: 5850; WAN024DPJ_at; Start 49; Stop 73
atcctatttttcattcatgatattc

SEQ ID NO: 166665 - DNA, 25 bp, Artificial
  probe
  misc_feature (1)..(25): SEQ ID NO: 5850; WAN024DPJ_at; Start 8; Stop 32
ttatcagtcctgatctttttaatat

SEQ ID NO: 166666 - DNA, 25 bp, Artificial
  probe
  misc_feature (1)..(25): SEQ ID NO: 5850; WAN024DPJ_at; Start 51; Stop 75
cctatttttcattcatgatattctt

SEQ ID NO: 166667 - DNA, 25 bp, Artificial
  probe
  misc_feature (1)..(25): SEQ ID NO: 5850; WAN024DPJ_at; Start 22; Stop 46
ctttttaatattgctgttattctct

SEQ ID NO: 166668 - DNA, 25 bp, Artificial
  probe
  misc_feature (1)..(25): SEQ ID NO: 5850; WAN024DPJ_at; Start 46; Stop 70
tatatcctatttttcattcatgata

SEQ ID NO: 166669 - DNA, 25 bp, Artificial
  probe
  misc_feature (1)..(25): SEQ ID NO: 5850; WAN024DPJ_at; Start 55; Stop 79
tttttcattcatgatattcttttac

SEQ ID NO: 166670 - DNA, 25 bp, Artificial
  probe
  misc_feature (1)..(25): SEQ ID NO: 5850; WAN024DPJ_at; Start 4; Stop 28
tttattatcagtcctgatcttttta

SEQ ID NO: 166671 - DNA, 25 bp, Artificial
  probe
  misc_feature (1)..(25): SEQ ID NO: 5850; WAN024DPJ_at; Start 24; Stop 48
ttttaatattgctgttattctctat

SEQ ID NO: 166672 - DNA, 25 bp, Artificial
  probe
  misc_feature (1)..(25): SEQ ID NO: 5850; WAN024DPJ_at; Start 1; Stop 25
ttgtttattatcagtcctgatcttt

SEQ ID NO: 166673 - DNA, 25 bp, Artificial
  probe
  misc_feature (1)..(25): SEQ ID NO: 5850; WAN024DPJ_at; Start 9; Stop 33
tatcagtcctgatctttttaatatt

SEQ ID NO: 166674 - DNA, 25 bp, Artificial
  probe
  misc_feature (1)..(25): SEQ ID NO: 5850; WAN024DPJ_at; Start 6; Stop 30
tattatcagtcctgatctttttaat

SEQ ID NO: 166675 - DNA, 25 bp, Artificial
  probe
  misc_feature (1)..(25): SEQ ID NO: 5850; WAN024DPJ_at; Start 26; Stop 50
ttaatattgctgttattctctatat

SEQ ID NO: 166676 - DNA, 25 bp, Artificial
  probe
  misc_feature (1)..(25): SEQ ID NO: 5850; WAN024DPJ_at; Start 50; Stop 74
tcctatttttcattcatgatattct

SEQ ID NO: 166677 - DNA, 25 bp, Artificial
  probe
  misc_feature (1)..(25): SEQ ID NO: 5850; WAN024DPJ_at; Start 32; Stop 56
ttgctgttattctctatatcctatt

SEQ ID NO: 166678 - DNA, 25 bp, Artificial
  probe
  misc_feature (1)..(25): SEQ ID NO: 5850; WAN024DPJ_at; Start 5; Stop 29
ttattatcagtcctgatctttttaa

SEQ ID NO: 166679 - DNA, 25 bp, Artificial
  probe
  misc_feature (1)..(25): SEQ ID NO: 5850; WAN024DPJ_at; Start 3; Stop 27
gtttattatcagtcctgatcttttt

SEQ ID NO: 166680 - DNA, 25 bp, Artificial
  probe
  misc_feature (1)..(25): SEQ ID NO: 5850; WAN024DPJ_at; Start 11; Stop 35
tcagtcctgatctttttaatattgc

SEQ ID NO: 166681 - DNA, 25 bp, Artificial
  probe
  misc_feature (1)..(25): SEQ ID NO: 5850; WAN024DPJ_at; Start 23; Stop 47
tttttaatattgctgttattctcta

SEQ ID NO: 166682 - DNA, 25 bp, Artificial
  probe
  misc_feature (1)..(25): SEQ ID NO: 5850; WAN024DPJ_at; Start 48; Stop 72
tatcctatttttcattcatgatatt

SEQ ID NO: 166683 - DNA, 25 bp, Artificial
  probe
  misc_feature (1)..(25): SEQ ID NO: 5850; WAN024DPJ_at; Start 7; Stop 31
attatcagtcctgatctttttaata

SEQ ID NO: 166684 - DNA, 25 bp, Artificial
  probe
  misc_feature (1)..(25): SEQ ID NO: 5850; WAN024DPJ_at; Start 2; Stop 26
tgtttattatcagtcctgatctttt

SEQ ID NO: 166685 - DNA, 25 bp, Artificial
  probe
  misc_feature (1)..(25): SEQ ID NO: 5850; WAN024DPJ_at; Start 44; Stop 68
tctatatcctatttttcattcatga

SEQ ID NO: 166686 - DNA, 25 bp, Artificial
  probe
  misc_feature (1)..(25): SEQ ID NO: 5850; WAN024DPJ_at; Start 30; Stop 54
tattgctgttattctctatatccta

SEQ ID NO: 166687 - DNA, 25 bp, Artificial
  probe
  misc_feature (1)..(25): SEQ ID NO: 1251; WAN024DPK_at; Start 40; Stop 64
gaaagagatattagcaaacaaattt

SEQ ID NO: 166688 - DNA, 25 bp, Artificial
  probe
  misc_feature (1)..(25): SEQ ID NO: 1251; WAN024DPK_at; Start 58; Stop 82
caaatttttattgatgagttaatga

SEQ ID NO: 166689 - DNA, 25 bp, Artificial
  probe
  misc_feature (1)..(25): SEQ ID NO: 1251; WAN024DPK_at; Start 20; Stop 44
tccttgaaacaaaatcagaagaaag

SEQ ID NO: 166690 - DNA, 25 bp, Artificial
  probe
  misc_feature (1)..(25): SEQ ID NO: 1251; WAN024DPK_at; Start 46; Stop 70
gatattagcaaacaaatttttattg

SEQ ID NO: 166691 - DNA, 25 bp, Artificial
  probe
  misc_feature (1)..(25): SEQ ID NO: 1251; WAN024DPK_at; Start 2; Stop 26
tgaatgatgtagcaataatccttga

SEQ ID NO: 166692 - DNA, 25 bp, Artificial
  probe
  misc_feature (1)..(25): SEQ ID NO: 1251; WAN024DPK_at; Start 21; Stop 45
ccttgaaacaaaatcagaagaaaga

SEQ ID NO: 166693 - DNA, 25 bp, Artificial
  probe
  misc_feature (1)..(25): SEQ ID NO: 1251; WAN024DPK_at; Start 16; Stop 40
ataatccttgaaacaaaatcagaag

SEQ ID NO: 166694 - DNA, 25 bp, Artificial
  probe
  misc_feature (1)..(25): SEQ ID NO: 1251; WAN024DPK_at; Start 54; Stop 78
caaacaaatttttattgatgagtta

SEQ ID NO: 166695 - DNA, 25 bp, Artificial
  probe
  misc_feature (1)..(25): SEQ ID NO: 1251; WAN024DPK_at; Start 13; Stop 37
gcaataatccttgaaacaaaatcag

SEQ ID NO: 166696 - DNA, 25 bp, Artificial
  probe
  misc_feature (1)..(25): SEQ ID NO: 1251; WAN024DPK_at; Start 36; Stop 60
agaagaaagagatattagcaaacaa

SEQ ID NO: 166697 - DNA, 25 bp, Artificial
  probe
  misc_feature (1)..(25): SEQ ID NO: 1251; WAN024DPK_at; Start 5; Stop 29
atgatgtagcaataatccttgaaac

SEQ ID NO: 166698 - DNA, 25 bp, Artificial
  probe
  misc_feature (1)..(25): SEQ ID NO: 1251; WAN024DPK_at; Start 6; Stop 30
tgatgtagcaataatccttgaaaca

SEQ ID NO: 166699 - DNA, 25 bp, Artificial
  probe
  misc_feature (1)..(25): SEQ ID NO: 1251; WAN024DPK_at; Start 73; Stop 97
gagttaatgaaaaatatagacataa

SEQ ID NO: 166700 - DNA, 25 bp, Artificial
  probe
  misc_feature (1)..(25): SEQ ID NO: 1251; WAN024DPK_at; Start 9; Stop 33
tgtagcaataatccttgaaacaaaa

SEQ ID NO: 166701 - DNA, 25 bp, Artificial
  probe
  misc_feature (1)..(25): SEQ ID NO: 1251; WAN024DPK_at; Start 37; Stop 61
gaagaaagagatattagcaaacaaa

SEQ ID NO: 166702 - DNA, 25 bp, Artificial
  probe
  misc_feature (1)..(25): SEQ ID NO: 1251; WAN024DPK_at; Start 53; Stop 77
gcaaacaaatttttattgatgagtt

SEQ ID NO: 166703 - DNA, 25 bp, Artificial
  probe
  misc_feature (1)..(25): SEQ ID NO: 1251; WAN024DPK_at; Start 34; Stop 58
tcagaagaaagagatattagcaaac

SEQ ID NO: 166704 - DNA, 25 bp, Artificial
  probe
  misc_feature (1)..(25): SEQ ID NO: 1251; WAN024DPK_at; Start 7; Stop 31
gatgtagcaataatccttgaaacaa

SEQ ID NO: 166705 - DNA, 25 bp, Artificial
  probe
  misc_feature (1)..(25): SEQ ID NO: 1251; WAN024DPK_at; Start 44; Stop 68
gagatattagcaaacaaatttttat

SEQ ID NO: 166706 - DNA, 25 bp, Artificial
  probe
  misc_feature (1)..(25): SEQ ID NO: 1251; WAN024DPK_at; Start 4; Stop 28
aatgatgtagcaataatccttgaaa

SEQ ID NO: 166707 - DNA, 25 bp, Artificial
  probe
  misc_feature (1)..(25): SEQ ID NO: 1251; WAN024DPK_at; Start 15; Stop 39
aataatccttgaaacaaaatcagaa

SEQ ID NO: 166708 - DNA, 25 bp, Artificial
  probe
  misc_feature (1)..(25): SEQ ID NO: 1251; WAN024DPK_at; Start 1; Stop 25
atgaatgatgtagcaataatccttg

SEQ ID NO: 166709 - DNA, 25 bp, Artificial
  probe
  misc_feature (1)..(25): SEQ ID NO: 1251; WAN024DPK_at; Start 8; Stop 32
atgtagcaataatccttgaaacaaa

SEQ ID NO: 166710 - DNA, 25 bp, Artificial
  probe
  misc_feature (1)..(25): SEQ ID NO: 1251; WAN024DPK_at; Start 3; Stop 27
gaatgatgtagcaataatccttgaa

SEQ ID NO: 166711 - DNA, 25 bp, Artificial
  probe
  misc_feature (1)..(25): SEQ ID NO: 1251; WAN024DPK_at; Start 14; Stop 38
caataatccttgaaacaaaatcaga

SEQ ID NO: 166712 - DNA, 25 bp, Artificial
  probe
  misc_feature (1)..(25): SEQ ID NO: 1251; WAN024DPK_at; Start 51; Stop 75
tagcaaacaaatttttattgatgag

SEQ ID NO: 166713 - DNA, 25 bp, Artificial
  probe
  misc_feature (1)..(25): SEQ ID NO: 1251; WAN024DPK_at; Start 38; Stop 62
aagaaagagatattagcaaacaaat

SEQ ID NO: 166714 - DNA, 25 bp, Artificial
  probe
  misc_feature (1)..(25): SEQ ID NO: 1251; WAN024DPK_at; Start 17; Stop 41
taatccttgaaacaaaatcagaaga

SEQ ID NO: 166715 - DNA, 25 bp, Artificial
  probe
  misc_feature (1)..(25): SEQ ID NO: 1251; WAN024DPK_at; Start 35; Stop 59
cagaagaaagagatattagcaaaca

SEQ ID NO: 166716 - DNA, 25 bp, Artificial
  probe
  misc_feature (1)..(25): SEQ ID NO: 1251; WAN024DPK_at; Start 81; Stop 105
gaaaaatatagacataattctaact

SEQ ID NO: 166717 - DNA, 25 bp, Artificial
  probe
  misc_feature (1)..(25): SEQ ID NO: 1251; WAN024DPK_at; Start 70; Stop 94
gatgagttaatgaaaaatatagaca

SEQ ID NO: 166718 - DNA, 25 bp, Artificial
  probe
  misc_feature (1)..(25): SEQ ID NO: 1251; WAN024DPK_at; Start 18; Stop 42
aatccttgaaacaaaatcagaagaa

SEQ ID NO: 166719 - DNA, 25 bp, Artificial
  probe
  misc_feature (1)..(25): SEQ ID NO: 1251; WAN024DPK_at; Start 10; Stop 34
gtagcaataatccttgaaacaaaat

SEQ ID NO: 166720 - DNA, 25 bp, Artificial
  probe
  misc_feature (1)..(25): SEQ ID NO: 1251; WAN024DPK_at; Start 11; Stop 35
tagcaataatccttgaaacaaaatc

SEQ ID NO: 166721 - DNA, 25 bp, Artificial
  probe
  misc_feature (1)..(25): SEQ ID NO: 5235; WAN024DPL_at; Start 23; Stop 47
ccagtaccttgattgatgttttctt

SEQ ID NO: 166722 - DNA, 25 bp, Artificial
  probe
  misc_feature (1)..(25): SEQ ID NO: 5235; WAN024DPL_at; Start 30; Stop 54
cttgattgatgttttcttcaacttc

SEQ ID NO: 166723 - DNA, 25 bp, Artificial
  probe
  misc_feature (1)..(25): SEQ ID NO: 5235; WAN024DPL_at; Start 42; Stop 66
tttcttcaacttcattaaagcctat

SEQ ID NO: 166724 - DNA, 25 bp, Artificial
  probe
  misc_feature (1)..(25): SEQ ID NO: 5235; WAN024DPL_at; Start 12; Stop 36
tagttatttgaccagtaccttgatt

SEQ ID NO: 166725 - DNA, 25 bp, Artificial
  probe
  misc_feature (1)..(25): SEQ ID NO: 5235; WAN024DPL_at; Start 45; Stop 69
cttcaacttcattaaagcctatact

SEQ ID NO: 166726 - DNA, 25 bp, Artificial
  probe
  misc_feature (1)..(25): SEQ ID NO: 5235; WAN024DPL_at; Start 37; Stop 61
gatgttttcttcaacttcattaaag

SEQ ID NO: 166727 - DNA, 25 bp, Artificial
  probe
  misc_feature (1)..(25): SEQ ID NO: 5235; WAN024DPL_at; Start 26; Stop 50
gtaccttgattgatgttttcttcaa

SEQ ID NO: 166728 - DNA, 25 bp, Artificial
  probe
  misc_feature (1)..(25): SEQ ID NO: 5235; WAN024DPL_at; Start 21; Stop 45
gaccagtaccttgattgatgttttc

SEQ ID NO: 166729 - DNA, 25 bp, Artificial
  probe
  misc_feature (1)..(25): SEQ ID NO: 5235; WAN024DPL_at; Start 14; Stop 38
gttatttgaccagtaccttgattga

SEQ ID NO: 166730 - DNA, 25 bp, Artificial
  probe
  misc_feature (1)..(25): SEQ ID NO: 5235; WAN024DPL_at; Start 22; Stop 46
accagtaccttgattgatgttttct

SEQ ID NO: 166731 - DNA, 25 bp, Artificial
  probe
  misc_feature (1)..(25): SEQ ID NO: 5235; WAN024DPL_at; Start 29; Stop 53
ccttgattgatgttttcttcaactt

SEQ ID NO: 166732 - DNA, 25 bp, Artificial
  probe
  misc_feature (1)..(25): SEQ ID NO: 5235; WAN024DPL_at; Start 33; Stop 57
gattgatgttttcttcaacttcatt

SEQ ID NO: 166733 - DNA, 25 bp, Artificial
  probe
  misc_feature (1)..(25): SEQ ID NO: 5235; WAN024DPL_at; Start 47; Stop 71
tcaacttcattaaagcctatacttc

SEQ ID NO: 166734 - DNA, 25 bp, Artificial
  probe
  misc_feature (1)..(25): SEQ ID NO: 5235; WAN024DPL_at; Start 53; Stop 77
tcattaaagcctatacttctcttgc

SEQ ID NO: 166735 - DNA, 25 bp, Artificial
  probe
  misc_feature (1)..(25): SEQ ID NO: 5235; WAN024DPL_at; Start 9; Stop 33
aagtagttatttgaccagtaccttg

SEQ ID NO: 166736 - DNA, 25 bp, Artificial
  probe
  misc_feature (1)..(25): SEQ ID NO: 5235; WAN024DPL_at; Start 48; Stop 72
caacttcattaaagcctatacttct

SEQ ID NO: 166737 - DNA, 25 bp, Artificial
  probe
  misc_feature (1)..(25): SEQ ID NO: 5235; WAN024DPL_at; Start 44; Stop 68
tcttcaacttcattaaagcctatac

SEQ ID NO: 166738 - DNA, 25 bp, Artificial
  probe
  misc_feature (1)..(25): SEQ ID NO: 5235; WAN024DPL_at; Start 15; Stop 39
ttatttgaccagtaccttgattgat

SEQ ID NO: 166739 - DNA, 25 bp, Artificial
  probe
  misc_feature (1)..(25): SEQ ID NO: 5235; WAN024DPL_at; Start 54; Stop 78
cattaaagcctatacttctcttgca

SEQ ID NO: 166740 - DNA, 25 bp, Artificial
  probe
  misc_feature (1)..(25): SEQ ID NO: 5235; WAN024DPL_at; Start 24; Stop 48
cagtaccttgattgatgttttcttc

SEQ ID NO: 166741 - DNA, 25 bp, Artificial
  probe
  misc_feature (1)..(25): SEQ ID NO: 5235; WAN024DPL_at; Start 39; Stop 63
tgttttcttcaacttcattaaagcc

SEQ ID NO: 166742 - DNA, 25 bp, Artificial
  probe
  misc_feature (1)..(25): SEQ ID NO: 5235; WAN024DPL_at; Start 41; Stop 65
ttttcttcaacttcattaaagccta

SEQ ID NO: 166743 - DNA, 25 bp, Artificial
  probe
  misc_feature (1)..(25): SEQ ID NO: 5235; WAN024DPL_at; Start 25; Stop 49
agtaccttgattgatgttttcttca

SEQ ID NO: 166744 - DNA, 25 bp, Artificial
  probe
  misc_feature (1)..(25): SEQ ID NO: 5235; WAN024DPL_at; Start 16; Stop 40
tatttgaccagtaccttgattgatg

SEQ ID NO: 166745 - DNA, 25 bp, Artificial
  probe
  misc_feature (1)..(25): SEQ ID NO: 5235; WAN024DPL_at; Start 49; Stop 73
aacttcattaaagcctatacttctc

SEQ ID NO: 166746 - DNA, 25 bp, Artificial
  probe
  misc_feature (1)..(25): SEQ ID NO: 5235; WAN024DPL_at; Start 52; Stop 76
ttcattaaagcctatacttctcttg

SEQ ID NO: 166747 - DNA, 25 bp, Artificial
  probe
  misc_feature (1)..(25): SEQ ID NO: 5235; WAN024DPL_at; Start 11; Stop 35
gtagttatttgaccagtaccttgat

SEQ ID NO: 166748 - DNA, 25 bp, Artificial
  probe
  misc_feature (1)..(25): SEQ ID NO: 5235; WAN024DPL_at; Start 20; Stop 44
tgaccagtaccttgattgatgtttt

SEQ ID NO: 166749 - DNA, 25 bp, Artificial
  probe
  misc_feature (1)..(25): SEQ ID NO: 5235; WAN024DPL_at; Start 18; Stop 42
tttgaccagtaccttgattgatgtt

SEQ ID NO: 166750 - DNA, 25 bp, Artificial
  probe
  misc_feature (1)..(25): SEQ ID NO: 5235; WAN024DPL_at; Start 13; Stop 37
agttatttgaccagtaccttgattg

SEQ ID NO: 166751 - DNA, 25 bp, Artificial
  probe
  misc_feature (1)..(25): SEQ ID NO: 5235; WAN024DPL_at; Start 17; Stop 41
atttgaccagtaccttgattgatgt

SEQ ID NO: 166752 - DNA, 25 bp, Artificial
  probe
  misc_feature (1)..(25): SEQ ID NO: 5235; WAN024DPL_at; Start 27; Stop 51
taccttgattgatgttttcttcaac

SEQ ID NO: 166753 - DNA, 25 bp, Artificial
  probe
  misc_feature (1)..(25): SEQ ID NO: 5235; WAN024DPL_at; Start 19; Stop 43
ttgaccagtaccttgattgatgttt

SEQ ID NO: 166754 - DNA, 25 bp, Artificial
  probe
  misc_feature (1)..(25): SEQ ID NO: 5235; WAN024DPL_at; Start 10; Stop 34
agtagttatttgaccagtaccttga

SEQ ID NO: 166755 - DNA, 25 bp, Artificial
  probe
  misc_feature (1)..(25): SEQ ID NO: 2598; WAN024DPM_at; Start 82; Stop 106
gaagagagaggttcactggcactga

SEQ ID NO: 166756 - DNA, 25 bp, Artificial
  probe
  misc_feature (1)..(25): SEQ ID NO: 2598; WAN024DPM_at; Start 94; Stop 118
tcactggcactgataacggcaacca

SEQ ID NO: 166757 - DNA, 25 bp, Artificial
  probe
  misc_feature (1)..(25): SEQ ID NO: 2598; WAN024DPM_at; Start 37; Stop 61
gaccaatccactactaatcctaaga

SEQ ID NO: 166758 - DNA, 25 bp, Artificial
  probe
  misc_feature (1)..(25): SEQ ID NO: 2598; WAN024DPM_at; Start 117; Stop 141
caccaaaggagaaaccaaggacaca

SEQ ID NO: 166759 - DNA, 25 bp, Artificial
  probe
  misc_feature (1)..(25): SEQ ID NO: 2598; WAN024DPM_at; Start 124; Stop 148
ggagaaaccaaggacacagccttca

SEQ ID NO: 166760 - DNA, 25 bp, Artificial
  probe
  misc_feature (1)..(25): SEQ ID NO: 2598; WAN024DPM_at; Start 127; Stop 151
gaaaccaaggacacagccttcatgg

SEQ ID NO: 166761 - DNA, 25 bp, Artificial
  probe
  misc_feature (1)..(25): SEQ ID NO: 2598; WAN024DPM_at; Start 188; Stop 212
taatgaggcaaatcaagatactcca

SEQ ID NO: 166762 - DNA, 25 bp, Artificial
  probe
  misc_feature (1)..(25): SEQ ID NO: 2598; WAN024DPM_at; Start 2; Stop 26
tgggtaaaataatcaaggctatagc

SEQ ID NO: 166763 - DNA, 25 bp, Artificial
  probe
  misc_feature (1)..(25): SEQ ID NO: 2598; WAN024DPM_at; Start 55; Stop 79
cctaagaacaaaacactcaagagag

SEQ ID NO: 166764 - DNA, 25 bp, Artificial
  probe
  misc_feature (1)..(25): SEQ ID NO: 2598; WAN024DPM_at; Start 27; Stop 51
tagaaggagggaccaatccactact

SEQ ID NO: 166765 - DNA, 25 bp, Artificial
  probe
  misc_feature (1)..(25): SEQ ID NO: 2598; WAN024DPM_at; Start 191; Stop 215
tgaggcaaatcaagatactccaaat

SEQ ID NO: 166766 - DNA, 25 bp, Artificial
  probe
  misc_feature (1)..(25): SEQ ID NO: 2598; WAN024DPM_at; Start 132; Stop 156
caaggacacagccttcatggaaatg

SEQ ID NO: 166767 - DNA, 25 bp, Artificial
  probe
  misc_feature (1)..(25): SEQ ID NO: 2598; WAN024DPM_at; Start 200; Stop 224
tcaagatactccaaatatcaagagt

SEQ ID NO: 166768 - DNA, 25 bp, Artificial
  probe
  misc_feature (1)..(25): SEQ ID NO: 2598; WAN024DPM_at; Start 32; Stop 56
ggagggaccaatccactactaatcc

SEQ ID NO: 166769 - DNA, 25 bp, Artificial
  probe
  misc_feature (1)..(25): SEQ ID NO: 2598; WAN024DPM_at; Start 23; Stop 47
tagctagaaggagggaccaatccac

SEQ ID NO: 166770 - DNA, 25 bp, Artificial
  probe
  misc_feature (1)..(25): SEQ ID NO: 2598; WAN024DPM_at; Start 21; Stop 45
tatagctagaaggagggaccaatcc

SEQ ID NO: 166771 - DNA, 25 bp, Artificial
  probe
  misc_feature (1)..(25): SEQ ID NO: 2598; WAN024DPM_at; Start 136; Stop 160
gacacagccttcatggaaatgaaaa

SEQ ID NO: 166772 - DNA, 25 bp, Artificial
  probe
  misc_feature (1)..(25): SEQ ID NO: 2598; WAN024DPM_at; Start 174; Stop 198
tccaaagaaagcgataatgaggcaa

SEQ ID NO: 166773 - DNA, 25 bp, Artificial
  probe
  misc_feature (1)..(25): SEQ ID NO: 2598; WAN024DPM_at; Start 18; Stop 42
ggctatagctagaaggagggaccaa

SEQ ID NO: 166774 - DNA, 25 bp, Artificial
  probe
  misc_feature (1)..(25): SEQ ID NO: 2598; WAN024DPM_at; Start 163; Stop 187
gcaaaagccgttccaaagaaagcga

SEQ ID NO: 166775 - DNA, 25 bp, Artificial
  probe
  misc_feature (1)..(25): SEQ ID NO: 2598; WAN024DPM_at; Start 147; Stop 171
catggaaatgaaaaaagcaaaagcc

SEQ ID NO: 166776 - DNA, 25 bp, Artificial
  probe
  misc_feature (1)..(25): SEQ ID NO: 2598; WAN024DPM_at; Start 98; Stop 122
tggcactgataacggcaaccaccaa

SEQ ID NO: 166777 - DNA, 25 bp, Artificial
  probe
  misc_feature (1)..(25): SEQ ID NO: 2598; WAN024DPM_at; Start 91; Stop 115
ggttcactggcactgataacggcaa

SEQ ID NO: 166778 - DNA, 25 bp, Artificial
  probe
  misc_feature (1)..(25): SEQ ID NO: 2598; WAN024DPM_at; Start 79; Stop 103
gcagaagagagaggttcactggcac

SEQ ID NO: 166779 - DNA, 25 bp, Artificial
  probe
  misc_feature (1)..(25): SEQ ID NO: 2598; WAN024DPM_at; Start 63; Stop 87
caaaacactcaagagagcagaagag

SEQ ID NO: 166780 - DNA, 25 bp, Artificial
  probe
  misc_feature (1)..(25): SEQ ID NO: 2598; WAN024DPM_at; Start 120; Stop 144
caaaggagaaaccaaggacacagcc

SEQ ID NO: 166781 - DNA, 25 bp, Artificial
  probe
  misc_feature (1)..(25): SEQ ID NO: 2598; WAN024DPM_at; Start 180; Stop 204
gaaagcgataatgaggcaaatcaag

SEQ ID NO: 166782 - DNA, 25 bp, Artificial
  probe
  misc_feature (1)..(25): SEQ ID NO: 2598; WAN024DPM_at; Start 15; Stop 39
caaggctatagctagaaggagggac

SEQ ID NO: 166783 - DNA, 25 bp, Artificial
  probe
  misc_feature (1)..(25): SEQ ID NO: 2598; WAN024DPM_at; Start 169; Stop 193
gccgttccaaagaaagcgataatga

SEQ ID NO: 166784 - DNA, 25 bp, Artificial
  probe
  misc_feature (1)..(25): SEQ ID NO: 2598; WAN024DPM_at; Start 206; Stop 230
tactccaaatatcaagagtaaagga

SEQ ID NO: 166785 - DNA, 25 bp, Artificial
  probe
  misc_feature (1)..(25): SEQ ID NO: 2598; WAN024DPM_at; Start 51; Stop 75
taatcctaagaacaaaacactcaag

SEQ ID NO: 166786 - DNA, 25 bp, Artificial
  probe
  misc_feature (1)..(25): SEQ ID NO: 2598; WAN024DPM_at; Start 104; Stop 128
tgataacggcaaccaccaaaggaga

SEQ ID NO: 166787 - DNA, 25 bp, Artificial
  probe
  misc_feature (1)..(25): SEQ ID NO: 2598; WAN024DPM_at; Start 87; Stop 111
gagaggttcactggcactgataacg

SEQ ID NO: 166788 - DNA, 25 bp, Artificial
  probe
  misc_feature (1)..(25): SEQ ID NO: 2598; WAN024DPM_at; Start 71; Stop 95
tcaagagagcagaagagagaggttc

SEQ ID NO: 166789 - DNA, 25 bp, Artificial
  probe
  misc_feature (1)..(25): SEQ ID NO: 3579; WAN024DPN_at; Start 617; Stop 641
tgtttaatgttatcttgccccaacc

SEQ ID NO: 166790 - DNA, 25 bp, Artificial
  probe
  misc_feature (1)..(25): SEQ ID NO: 3579; WAN024DPN_at; Start 192; Stop 216
tactcattatcaggtgtcttcgggc

SEQ ID NO: 166791 - DNA, 25 bp, Artificial
  probe
  misc_feature (1)..(25): SEQ ID NO: 3579; WAN024DPN_at; Start 774; Stop 798
cattatcgctttctttggaacggct

SEQ ID NO: 166792 - DNA, 25 bp, Artificial
  probe
  misc_feature (1)..(25): SEQ ID NO: 3579; WAN024DPN_at; Start 82; Stop 106
tacaataagggtatgaatcagtatc

SEQ ID NO: 166793 - DNA, 25 bp, Artificial
  probe
  misc_feature (1)..(25): SEQ ID NO: 3579; WAN024DPN_at; Start 525; Stop 549
tgtttgcttgatggcgacaaaggga

SEQ ID NO: 166794 - DNA, 25 bp, Artificial
  probe
  misc_feature (1)..(25): SEQ ID NO: 3579; WAN024DPN_at; Start 838; Stop 862
tctcctttggtggttgccgttatca

SEQ ID NO: 166795 - DNA, 25 bp, Artificial
  probe
  misc_feature (1)..(25): SEQ ID NO: 3579; WAN024DPN_at; Start 871; Stop 895
gaacctctctcttctgctctcttga

SEQ ID NO: 166796 - DNA, 25 bp, Artificial
  probe
  misc_feature (1)..(25): SEQ ID NO: 3579; WAN024DPN_at; Start 127; Stop 151
aaaatttattcgctcctatccggct

SEQ ID NO: 166797 - DNA, 25 bp, Artificial
  probe
  misc_feature (1)..(25): SEQ ID NO: 3579; WAN024DPN_at; Start 265; Stop 289
tggtctgcaatacaattaaaatcgc

SEQ ID NO: 166798 - DNA, 25 bp, Artificial
  probe
  misc_feature (1)..(25): SEQ ID NO: 3579; WAN024DPN_at; Start 289; Stop 313
caagtgctagatatttggcgagaca

SEQ ID NO: 166799 - DNA, 25 bp, Artificial
  probe
  misc_feature (1)..(25): SEQ ID NO: 3579; WAN024DPN_at; Start 304; Stop 328
tggcgagacaagaaaaattacctgc

SEQ ID NO: 166800 - DNA, 25 bp, Artificial
  probe
  misc_feature (1)..(25): SEQ ID NO: 3579; WAN024DPN_at; Start 701; Stop 725
tgtttagcaatgtcctctcgccggt

SEQ ID NO: 166801 - DNA, 25 bp, Artificial
  probe
  misc_feature (1)..(25): SEQ ID NO: 3579; WAN024DPN_at; Start 632; Stop 656
tgccccaaccttttgctaagcgtta

SEQ ID NO: 166802 - DNA, 25 bp, Artificial
  probe
  misc_feature (1)..(25): SEQ ID NO: 3579; WAN024DPN_at; Start 855; Stop 879
cgttatcagtgccagtgaacctctc

SEQ ID NO: 166803 - DNA, 25 bp, Artificial
  probe
  misc_feature (1)..(25): SEQ ID NO: 3579; WAN024DPN_at; Start 500; Stop 524
tctatgttttggttgccatgctggg

SEQ ID NO: 166804 - DNA, 25 bp, Artificial
  probe
  misc_feature (1)..(25): SEQ ID NO: 3579; WAN024DPN_at; Start 403; Stop 427
gctacgacagcaactattttacagt

SEQ ID NO: 166805 - DNA, 25 bp, Artificial
  probe
  misc_feature (1)..(25): SEQ ID NO: 3579; WAN024DPN_at; Start 823; Stop 847
gctgtgtccttggtttctcctttgg

SEQ ID NO: 166806 - DNA, 25 bp, Artificial
  probe
  misc_feature (1)..(25): SEQ ID NO: 3579; WAN024DPN_at; Start 716; Stop 740
tctcgccggtttatcagctttcctt

SEQ ID NO: 166807 - DNA, 25 bp, Artificial
  probe
  misc_feature (1)..(25): SEQ ID NO: 3579; WAN024DPN_at; Start 39; Stop 63
tgaagtggccaatcaatggattgcc

SEQ ID NO: 166808 - DNA, 25 bp, Artificial
  probe
  misc_feature (1)..(25): SEQ ID NO: 3579; WAN024DPN_at; Start 910; Stop 934
ggattagtagtggattggtccctcc

SEQ ID NO: 166809 - DNA, 25 bp, Artificial
  probe
  misc_feature (1)..(25): SEQ ID NO: 3579; WAN024DPN_at; Start 319; Stop 343
aattacctgccctttttagcctatg

SEQ ID NO: 166810 - DNA, 25 bp, Artificial
  probe
  misc_feature (1)..(25): SEQ ID NO: 3579; WAN024DPN_at; Start 454; Stop 478
tacaatcgcttggtttatcaaaaac

SEQ ID NO: 166811 - DNA, 25 bp, Artificial
  probe
  misc_feature (1)..(25): SEQ ID NO: 3579; WAN024DPN_at; Start 222; Stop 246
tacctctatgcgtttgacactggca

SEQ ID NO: 166812 - DNA, 25 bp, Artificial
  probe
  misc_feature (1)..(25): SEQ ID NO: 3579; WAN024DPN_at; Start 237; Stop 261
gacactggcagggagtcttgtactc

SEQ ID NO: 166813 - DNA, 25 bp, Artificial
  probe
  misc_feature (1)..(25): SEQ ID NO: 3579; WAN024DPN_at; Start 570; Stop 594
gacgccgctagctcttataacaggt

SEQ ID NO: 166814 - DNA, 25 bp, Artificial
  probe
  misc_feature (1)..(25): SEQ ID NO: 3579; WAN024DPN_at; Start 587; Stop 611
taacaggtttgctgagtgccatggg

SEQ ID NO: 166815 - DNA, 25 bp, Artificial
  probe
  misc_feature (1)..(25): SEQ ID NO: 3579; WAN024DPN_at; Start 556; Stop 580
tctcagttatccatgacgccgctag

SEQ ID NO: 166816 - DNA, 25 bp, Artificial
  probe
  misc_feature (1)..(25): SEQ ID NO: 3579; WAN024DPN_at; Start 940; Stop 964
gctatagccttgattattttaccca

SEQ ID NO: 166817 - DNA, 25 bp, Artificial
  probe
  misc_feature (1)..(25): SEQ ID NO: 3579; WAN024DPN_at; Start 922; Stop 946
gattggtccctccttctagctatag

SEQ ID NO: 166818 - DNA, 25 bp, Artificial
  probe
  misc_feature (1)..(25): SEQ ID NO: 3579; WAN024DPN_at; Start 208; Stop 232
tcttcgggctggattacctctatgc

SEQ ID NO: 166819 - DNA, 25 bp, Artificial
  probe
  misc_feature (1)..(25): SEQ ID NO: 3579; WAN024DPN_at; Start 808; Stop 832
ttcatttccatgaaggctgtgtcct

SEQ ID NO: 166820 - DNA, 25 bp, Artificial
  probe
  misc_feature (1)..(25): SEQ ID NO: 3579; WAN024DPN_at; Start 471; Stop 495
tcaaaaacgagcgtcaaaaagcgct

SEQ ID NO: 166821 - DNA, 25 bp, Artificial
  probe
  misc_feature (1)..(25): SEQ ID NO: 3579; WAN024DPN_at; Start 389; Stop 413
tagaatactcaaatgctacgacagc

SEQ ID NO: 166822 - DNA, 25 bp, Artificial
  probe
  misc_feature (1)..(25): SEQ ID NO: 3579; WAN024DPN_at; Start 24; Stop 48
cgataattctctaaatgaagtggcc

SEQ ID NO: 166823 - DNA, 25 bp, Artificial
  probe
  misc_feature (1)..(25): SEQ ID NO: 3950; WAN024DPO_at; Start 248; Stop 272
taagtgggatggactaccttcgtct

SEQ ID NO: 166824 - DNA, 25 bp, Artificial
  probe
  misc_feature (1)..(25): SEQ ID NO: 3950; WAN024DPO_at; Start 245; Stop 269
acttaagtgggatggactaccttcg

SEQ ID NO: 166825 - DNA, 25 bp, Artificial
  probe
  misc_feature (1)..(25): SEQ ID NO: 3950; WAN024DPO_at; Start 470; Stop 494
gacagaagttttttgataggctagc

SEQ ID NO: 166826 - DNA, 25 bp, Artificial
  probe
  misc_feature (1)..(25): SEQ ID NO: 3950; WAN024DPO_at; Start 431; Stop 455
tcatggatgagattacaaatggctt

SEQ ID NO: 166827 - DNA, 25 bp, Artificial
  probe
  misc_feature (1)..(25): SEQ ID NO: 3950; WAN024DPO_at; Start 422; Stop 446
aatgctggctcatggatgagattac

SEQ ID NO: 166828 - DNA, 25 bp, Artificial
  probe
  misc_feature (1)..(25): SEQ ID NO: 3950; WAN024DPO_at; Start 566; Stop 590
atagagtagtaaccattcatcaggg

SEQ ID NO: 166829 - DNA, 25 bp, Artificial
  probe
  misc_feature (1)..(25): SEQ ID NO: 3950; WAN024DPO_at; Start 1; Stop 25
gtgagaaaaggagggctggatatgt

SEQ ID NO: 166830 - DNA, 25 bp, Artificial
  probe
  misc_feature (1)..(25): SEQ ID NO: 3950; WAN024DPO_at; Start 572; Stop 596
tagtaaccattcatcaggggcagat

SEQ ID NO: 166831 - DNA, 25 bp, Artificial
  probe
  misc_feature (1)..(25): SEQ ID NO: 3950; WAN024DPO_at; Start 532; Stop 556
tcccactataaggaagagttggttg

SEQ ID NO: 166832 - DNA, 25 bp, Artificial
  probe
  misc_feature (1)..(25): SEQ ID NO: 3950; WAN024DPO_at; Start 238; Stop 262
gatggaaacttaagtgggatggact

SEQ ID NO: 166833 - DNA, 25 bp, Artificial
  probe
  misc_feature (1)..(25): SEQ ID NO: 3950; WAN024DPO_at; Start 46; Stop 70
ttaaaaacgcgacaagtcatcttgc

SEQ ID NO: 166834 - DNA, 25 bp, Artificial
  probe
  misc_feature (1)..(25): SEQ ID NO: 3950; WAN024DPO_at; Start 247; Stop 271
ttaagtgggatggactaccttcgtc

SEQ ID NO: 166835 - DNA, 25 bp, Artificial
  probe
  misc_feature (1)..(25): SEQ ID NO: 3950; WAN024DPO_at; Start 506; Stop 530
gacaagaacagctggttcttttaag

SEQ ID NO: 166836 - DNA, 25 bp, Artificial
  probe
  misc_feature (1)..(25): SEQ ID NO: 3950; WAN024DPO_at; Start 497; Stop 521
aaatcgatagacaagaacagctggt

SEQ ID NO: 166837 - DNA, 25 bp, Artificial
  probe
  misc_feature (1)..(25): SEQ ID NO: 3950; WAN024DPO_at; Start 429; Stop 453
gctcatggatgagattacaaatggc

SEQ ID NO: 166838 - DNA, 25 bp, Artificial
  probe
  misc_feature (1)..(25): SEQ ID NO: 3950; WAN024DPO_at; Start 425; Stop 449
gctggctcatggatgagattacaaa

SEQ ID NO: 166839 - DNA, 25 bp, Artificial
  probe
  misc_feature (1)..(25): SEQ ID NO: 3950; WAN024DPO_at; Start 460; Stop 484
gagtattatcgacagaagttttttg

SEQ ID NO: 166840 - DNA, 25 bp, Artificial
  probe
  misc_feature (1)..(25): SEQ ID NO: 3950; WAN024DPO_at; Start 49; Stop 73
aaaacgcgacaagtcatcttgcaag

SEQ ID NO: 166841 - DNA, 25 bp, Artificial
  probe
  misc_feature (1)..(25): SEQ ID NO: 3950; WAN024DPO_at; Start 52; Stop 76
acgcgacaagtcatcttgcaagatg

SEQ ID NO: 166842 - DNA, 25 bp, Artificial
  probe
  misc_feature (1)..(25): SEQ ID NO: 3950; WAN024DPO_at; Start 560; Stop 584
tctgcgatagagtagtaaccattca

SEQ ID NO: 166843 - DNA, 25 bp, Artificial
  probe
  misc_feature (1)..(25): SEQ ID NO: 3950; WAN024DPO_at; Start 514; Stop 538
cagctggttcttttaagttcccact

SEQ ID NO: 166844 - DNA, 25 bp, Artificial
  probe
  misc_feature (1)..(25): SEQ ID NO: 3950; WAN024DPO_at; Start 44; Stop 68
ccttaaaaacgcgacaagtcatctt

SEQ ID NO: 166845 - DNA, 25 bp, Artificial
  probe
  misc_feature (1)..(25): SEQ ID NO: 3950; WAN024DPO_at; Start 563; Stop 587
gcgatagagtagtaaccattcatca

SEQ ID NO: 166846 - DNA, 25 bp, Artificial
  probe
  misc_feature (1)..(25): SEQ ID NO: 3950; WAN024DPO_at; Start 227; Stop 251
ttgaatggctggatggaaacttaag

SEQ ID NO: 166847 - DNA, 25 bp, Artificial
  probe
  misc_feature (1)..(25): SEQ ID NO: 3950; WAN024DPO_at; Start 534; Stop 558
ccactataaggaagagttggttgat

SEQ ID NO: 166848 - DNA, 25 bp, Artificial
  probe
  misc_feature (1)..(25): SEQ ID NO: 3950; WAN024DPO_at; Start 434; Stop 458
tggatgagattacaaatggcttaga

SEQ ID NO: 166849 - DNA, 25 bp, Artificial
  probe
  misc_feature (1)..(25): SEQ ID NO: 3950; WAN024DPO_at; Start 229; Stop 253
gaatggctggatggaaacttaagtg

SEQ ID NO: 166850 - DNA, 25 bp, Artificial
  probe
  misc_feature (1)..(25): SEQ ID NO: 3950; WAN024DPO_at; Start 471; Stop 495
acagaagttttttgataggctagca

SEQ ID NO: 166851 - DNA, 25 bp, Artificial
  probe
  misc_feature (1)..(25): SEQ ID NO: 3950; WAN024DPO_at; Start 529; Stop 553
agttcccactataaggaagagttgg

SEQ ID NO: 166852 - DNA, 25 bp, Artificial
  probe
  misc_feature (1)..(25): SEQ ID NO: 3950; WAN024DPO_at; Start 240; Stop 264
tggaaacttaagtgggatggactac

SEQ ID NO: 166853 - DNA, 25 bp, Artificial
  probe
  misc_feature (1)..(25): SEQ ID NO: 3950; WAN024DPO_at; Start 499; Stop 523
atcgatagacaagaacagctggttc

SEQ ID NO: 166854 - DNA, 25 bp, Artificial
  probe
  misc_feature (1)..(25): SEQ ID NO: 3950; WAN024DPO_at; Start 583; Stop 607
catcaggggcagatagaagaggttc

SEQ ID NO: 166855 - DNA, 25 bp, Artificial
  probe
  misc_feature (1)..(25): SEQ ID NO: 3950; WAN024DPO_at; Start 502; Stop 526
gatagacaagaacagctggttcttt

SEQ ID NO: 166856 - DNA, 25 bp, Artificial
  probe
  misc_feature (1)..(25): SEQ ID NO: 3950; WAN024DPO_at; Start 230; Stop 254
aatggctggatggaaacttaagtgg

SEQ ID NO: 166857 - DNA, 25 bp, Artificial
  probe
  misc_feature (1)..(25): SEQ ID NO: 3038; WAN024DPP_at; Start 59; Stop 83
ggatggagaaattactagcccaaac

SEQ ID NO: 166858 - DNA, 25 bp, Artificial
  probe
  misc_feature (1)..(25): SEQ ID NO: 3038; WAN024DPP_at; Start 5; Stop 29
tccttcaaataaagaacctctctaa

SEQ ID NO: 166859 - DNA, 25 bp, Artificial
  probe
  misc_feature (1)..(25): SEQ ID NO: 3038; WAN024DPP_at; Start 42; Stop 66
tttttattatagcagagggatggag

SEQ ID NO: 166860 - DNA, 25 bp, Artificial
  probe
  misc_feature (1)..(25): SEQ ID NO: 3038; WAN024DPP_at; Start 10; Stop 34
caaataaagaacctctctaatcctt

SEQ ID NO: 166861 - DNA, 25 bp, Artificial
  probe
  misc_feature (1)..(25): SEQ ID NO: 3038; WAN024DPP_at; Start 2; Stop 26
tgttccttcaaataaagaacctctc

SEQ ID NO: 166862 - DNA, 25 bp, Artificial
  probe
  misc_feature (1)..(25): SEQ ID NO: 3038; WAN024DPP_at; Start 49; Stop 73
tatagcagagggatggagaaattac

SEQ ID NO: 166863 - DNA, 25 bp, Artificial
  probe
  misc_feature (1)..(25): SEQ ID NO: 3038; WAN024DPP_at; Start 51; Stop 75
tagcagagggatggagaaattacta

SEQ ID NO: 166864 - DNA, 25 bp, Artificial
  probe
  misc_feature (1)..(25): SEQ ID NO: 3038; WAN024DPP_at; Start 43; Stop 67
ttttattatagcagagggatggaga

SEQ ID NO: 166865 - DNA, 25 bp, Artificial
  probe
  misc_feature (1)..(25): SEQ ID NO: 3038; WAN024DPP_at; Start 39; Stop 63
ttctttttattatagcagagggatg

SEQ ID NO: 166866 - DNA, 25 bp, Artificial
  probe
  misc_feature (1)..(25): SEQ ID NO: 3038; WAN024DPP_at; Start 57; Stop 81
agggatggagaaattactagcccaa

SEQ ID NO: 166867 - DNA, 25 bp, Artificial
  probe
  misc_feature (1)..(25): SEQ ID NO: 3038; WAN024DPP_at; Start 52; Stop 76
agcagagggatggagaaattactag

SEQ ID NO: 166868 - DNA, 25 bp, Artificial
  probe
  misc_feature (1)..(25): SEQ ID NO: 3038; WAN024DPP_at; Start 60; Stop 84
gatggagaaattactagcccaaacc

SEQ ID NO: 166869 - DNA, 25 bp, Artificial
  probe
  misc_feature (1)..(25): SEQ ID NO: 3038; WAN024DPP_at; Start 54; Stop 78
cagagggatggagaaattactagcc

SEQ ID NO: 166870 - DNA, 25 bp, Artificial
  probe
  misc_feature (1)..(25): SEQ ID NO: 3038; WAN024DPP_at; Start 53; Stop 77
gcagagggatggagaaattactagc

SEQ ID NO: 166871 - DNA, 25 bp, Artificial
  probe
  misc_feature (1)..(25): SEQ ID NO: 3038; WAN024DPP_at; Start 55; Stop 79
agagggatggagaaattactagccc

SEQ ID NO: 166872 - DNA, 25 bp, Artificial
  probe
  misc_feature (1)..(25): SEQ ID NO: 3038; WAN024DPP_at; Start 40; Stop 64
tctttttattatagcagagggatgg

SEQ ID NO: 166873 - DNA, 25 bp, Artificial
  probe
  misc_feature (1)..(25): SEQ ID NO: 3038; WAN024DPP_at; Start 1; Stop 25
atgttccttcaaataaagaacctct

SEQ ID NO: 166874 - DNA, 25 bp, Artificial
  probe
  misc_feature (1)..(25): SEQ ID NO: 3038; WAN024DPP_at; Start 6; Stop 30
ccttcaaataaagaacctctctaat

SEQ ID NO: 166875 - DNA, 25 bp, Artificial
  probe
  misc_feature (1)..(25): SEQ ID NO: 3038; WAN024DPP_at; Start 58; Stop 82
gggatggagaaattactagcccaaa

SEQ ID NO: 166876 - DNA, 25 bp, Artificial
  probe
  misc_feature (1)..(25): SEQ ID NO: 3038; WAN024DPP_at; Start 50; Stop 74
atagcagagggatggagaaattact

SEQ ID NO: 166877 - DNA, 25 bp, Artificial
  probe
  misc_feature (1)..(25): SEQ ID NO: 3038; WAN024DPP_at; Start 47; Stop 71
attatagcagagggatggagaaatt

SEQ ID NO: 166878 - DNA, 25 bp, Artificial
  probe
  misc_feature (1)..(25): SEQ ID NO: 3038; WAN024DPP_at; Start 62; Stop 86
tggagaaattactagcccaaaccca

SEQ ID NO: 166879 - DNA, 25 bp, Artificial
  probe
  misc_feature (1)..(25): SEQ ID NO: 3038; WAN024DPP_at; Start 56; Stop 80
gagggatggagaaattactagccca

SEQ ID NO: 166880 - DNA, 25 bp, Artificial
  probe
  misc_feature (1)..(25): SEQ ID NO: 3038; WAN024DPP_at; Start 4; Stop 28
ttccttcaaataaagaacctctcta

SEQ ID NO: 166881 - DNA, 25 bp, Artificial
  probe
  misc_feature (1)..(25): SEQ ID NO: 3038; WAN024DPP_at; Start 8; Stop 32
ttcaaataaagaacctctctaatcc

SEQ ID NO: 166882 - DNA, 25 bp, Artificial
  probe
  misc_feature (1)..(25): SEQ ID NO: 3038; WAN024DPP_at; Start 9; Stop 33
tcaaataaagaacctctctaatcct

SEQ ID NO: 166883 - DNA, 25 bp, Artificial
  probe
  misc_feature (1)..(25): SEQ ID NO: 3038; WAN024DPP_at; Start 46; Stop 70
tattatagcagagggatggagaaat

SEQ ID NO: 166884 - DNA, 25 bp, Artificial
  probe
  misc_feature (1)..(25): SEQ ID NO: 3038; WAN024DPP_at; Start 48; Stop 72
ttatagcagagggatggagaaatta

SEQ ID NO: 166885 - DNA, 25 bp, Artificial
  probe
  misc_feature (1)..(25): SEQ ID NO: 3038; WAN024DPP_at; Start 41; Stop 65
ctttttattatagcagagggatgga

SEQ ID NO: 166886 - DNA, 25 bp, Artificial
  probe
  misc_feature (1)..(25): SEQ ID NO: 3038; WAN024DPP_at; Start 7; Stop 31
cttcaaataaagaacctctctaatc

SEQ ID NO: 166887 - DNA, 25 bp, Artificial
  probe
  misc_feature (1)..(25): SEQ ID NO: 3038; WAN024DPP_at; Start 45; Stop 69
ttattatagcagagggatggagaaa

SEQ ID NO: 166888 - DNA, 25 bp, Artificial
  probe
  misc_feature (1)..(25): SEQ ID NO: 3038; WAN024DPP_at; Start 44; Stop 68
tttattatagcagagggatggagaa

SEQ ID NO: 166889 - DNA, 25 bp, Artificial
  probe
  misc_feature (1)..(25): SEQ ID NO: 4072; WAN024DPQ_at; Start 49; Stop 73
ttagtatttgccttttgcaaagtga

SEQ ID NO: 166890 - DNA, 25 bp, Artificial
  probe
  misc_feature (1)..(25): SEQ ID NO: 4072; WAN024DPQ_at; Start 46; Stop 70
agtttagtatttgccttttgcaaag

SEQ ID NO: 166891 - DNA, 25 bp, Artificial
  probe
  misc_feature (1)..(25): SEQ ID NO: 4072; WAN024DPQ_at; Start 12; Stop 36
tatgggaactaagggctggtttatc

SEQ ID NO: 166892 - DNA, 25 bp, Artificial
  probe
  misc_feature (1)..(25): SEQ ID NO: 4072; WAN024DPQ_at; Start 41; Stop 65
tctctagtttagtatttgccttttg

SEQ ID NO: 166893 - DNA, 25 bp, Artificial
  probe
  misc_feature (1)..(25): SEQ ID NO: 4072; WAN024DPQ_at; Start 65; Stop 89
gcaaagtgatcttaaatgcctttct

SEQ ID NO: 166894 - DNA, 25 bp, Artificial
  probe
  misc_feature (1)..(25): SEQ ID NO: 4072; WAN024DPQ_at; Start 66; Stop 90
caaagtgatcttaaatgcctttctc

SEQ ID NO: 166895 - DNA, 25 bp, Artificial
  probe
  misc_feature (1)..(25): SEQ ID NO: 4072; WAN024DPQ_at; Start 57; Stop 81
tgccttttgcaaagtgatcttaaat

SEQ ID NO: 166896 - DNA, 25 bp, Artificial
  probe
  misc_feature (1)..(25): SEQ ID NO: 4072; WAN024DPQ_at; Start 61; Stop 85
ttttgcaaagtgatcttaaatgcct

SEQ ID NO: 166897 - DNA, 25 bp, Artificial
  probe
  misc_feature (1)..(25): SEQ ID NO: 4072; WAN024DPQ_at; Start 58; Stop 82
gccttttgcaaagtgatcttaaatg

SEQ ID NO: 166898 - DNA, 25 bp, Artificial
  probe
  misc_feature (1)..(25): SEQ ID NO: 4072; WAN024DPQ_at; Start 51; Stop 75
agtatttgccttttgcaaagtgatc

SEQ ID NO: 166899 - DNA, 25 bp, Artificial
  probe
  misc_feature (1)..(25): SEQ ID NO: 4072; WAN024DPQ_at; Start 64; Stop 88
tgcaaagtgatcttaaatgcctttc

SEQ ID NO: 166900 - DNA, 25 bp, Artificial
  probe
  misc_feature (1)..(25): SEQ ID NO: 4072; WAN024DPQ_at; Start 5; Stop 29
ctgaaaatatgggaactaagggctg

SEQ ID NO: 166901 - DNA, 25 bp, Artificial
  probe
  misc_feature (1)..(25): SEQ ID NO: 4072; WAN024DPQ_at; Start 13; Stop 37
atgggaactaagggctggtttatcg

SEQ ID NO: 166902 - DNA, 25 bp, Artificial
  probe
  misc_feature (1)..(25): SEQ ID NO: 4072; WAN024DPQ_at; Start 60; Stop 84
cttttgcaaagtgatcttaaatgcc

SEQ ID NO: 166903 - DNA, 25 bp, Artificial
  probe
  misc_feature (1)..(25): SEQ ID NO: 4072; WAN024DPQ_at; Start 55; Stop 79
tttgccttttgcaaagtgatcttaa

SEQ ID NO: 166904 - DNA, 25 bp, Artificial
  probe
  misc_feature (1)..(25): SEQ ID NO: 4072; WAN024DPQ_at; Start 6; Stop 30
tgaaaatatgggaactaagggctgg

SEQ ID NO: 166905 - DNA, 25 bp, Artificial
  probe
  misc_feature (1)..(25): SEQ ID NO: 4072; WAN024DPQ_at; Start 45; Stop 69
tagtttagtatttgccttttgcaaa

SEQ ID NO: 166906 - DNA, 25 bp, Artificial
  probe
  misc_feature (1)..(25): SEQ ID NO: 4072; WAN024DPQ_at; Start 43; Stop 67
tctagtttagtatttgccttttgca

SEQ ID NO: 166907 - DNA, 25 bp, Artificial
  probe
  misc_feature (1)..(25): SEQ ID NO: 4072; WAN024DPQ_at; Start 56; Stop 80
ttgccttttgcaaagtgatcttaaa

SEQ ID NO: 166908 - DNA, 25 bp, Artificial
  probe
  misc_feature (1)..(25): SEQ ID NO: 4072; WAN024DPQ_at; Start 1; Stop 25
gtgcctgaaaatatgggaactaagg

SEQ ID NO: 166909 - DNA, 25 bp, Artificial
  probe
  misc_feature (1)..(25): SEQ ID NO: 4072; WAN024DPQ_at; Start 62; Stop 86
tttgcaaagtgatcttaaatgcctt

SEQ ID NO: 166910 - DNA, 25 bp, Artificial
  probe
  misc_feature (1)..(25): SEQ ID NO: 4072; WAN024DPQ_at; Start 42; Stop 66
ctctagtttagtatttgccttttgc

SEQ ID NO: 166911 - DNA, 25 bp, Artificial
  probe
  misc_feature (1)..(25): SEQ ID NO: 4072; WAN024DPQ_at; Start 3; Stop 27
gcctgaaaatatgggaactaagggc

SEQ ID NO: 166912 - DNA, 25 bp, Artificial
  probe
  misc_feature (1)..(25): SEQ ID NO: 4072; WAN024DPQ_at; Start 59; Stop 83
ccttttgcaaagtgatcttaaatgc

SEQ ID NO: 166913 - DNA, 25 bp, Artificial
  probe
  misc_feature (1)..(25): SEQ ID NO: 4072; WAN024DPQ_at; Start 53; Stop 77
tatttgccttttgcaaagtgatctt

SEQ ID NO: 166914 - DNA, 25 bp, Artificial
  probe
  misc_feature (1)..(25): SEQ ID NO: 4072; WAN024DPQ_at; Start 54; Stop 78
atttgccttttgcaaagtgatctta

SEQ ID NO: 166915 - DNA, 25 bp, Artificial
  probe
  misc_feature (1)..(25): SEQ ID NO: 4072; WAN024DPQ_at; Start 44; Stop 68
ctagtttagtatttgccttttgcaa

SEQ ID NO: 166916 - DNA, 25 bp, Artificial
  probe
  misc_feature (1)..(25): SEQ ID NO: 4072; WAN024DPQ_at; Start 50; Stop 74
tagtatttgccttttgcaaagtgat

SEQ ID NO: 166917 - DNA, 25 bp, Artificial
  probe
  misc_feature (1)..(25): SEQ ID NO: 4072; WAN024DPQ_at; Start 63; Stop 87
ttgcaaagtgatcttaaatgccttt

SEQ ID NO: 166918 - DNA, 25 bp, Artificial
  probe
  misc_feature (1)..(25): SEQ ID NO: 4072; WAN024DPQ_at; Start 52; Stop 76
gtatttgccttttgcaaagtgatct

SEQ ID NO: 166919 - DNA, 25 bp, Artificial
  probe
  misc_feature (1)..(25): SEQ ID NO: 4072; WAN024DPQ_at; Start 23; Stop 47
agggctggtttatcggtttctctag

SEQ ID NO: 166920 - DNA, 25 bp, Artificial
  probe
  misc_feature (1)..(25): SEQ ID NO: 4072; WAN024DPQ_at; Start 35; Stop 59
tcggtttctctagtttagtatttgc

SEQ ID NO: 166921 - DNA, 25 bp, Artificial
  probe
  misc_feature (1)..(25): SEQ ID NO: 4072; WAN024DPQ_at; Start 2; Stop 26
tgcctgaaaatatgggaactaaggg

SEQ ID NO: 166922 - DNA, 25 bp, Artificial
  probe
  misc_feature (1)..(25): SEQ ID NO: 4072; WAN024DPQ_at; Start 48; Stop 72
tttagtatttgccttttgcaaagtg

SEQ ID NO: 166923 - DNA, 25 bp, Artificial
  probe
  misc_feature (1)..(25): SEQ ID NO: 1349; WAN024DPR_at; Start 83; Stop 107
agtcacgaagccattttcttcaatc

SEQ ID NO: 166924 - DNA, 25 bp, Artificial
  probe
  misc_feature (1)..(25): SEQ ID NO: 1349; WAN024DPR_at; Start 138; Stop 162
tagaactataaatatcacagtccag

SEQ ID NO: 166925 - DNA, 25 bp, Artificial
  probe
  misc_feature (1)..(25): SEQ ID NO: 1349; WAN024DPR_at; Start 181; Stop 205
tcatctataatcaggcagattatta

SEQ ID NO: 166926 - DNA, 25 bp, Artificial
  probe
  misc_feature (1)..(25): SEQ ID NO: 1349; WAN024DPR_at; Start 89; Stop 113
gaagccattttcttcaatctctttc

SEQ ID NO: 166927 - DNA, 25 bp, Artificial
  probe
  misc_feature (1)..(25): SEQ ID NO: 1349; WAN024DPR_at; Start 133; Stop 157
ccatttagaactataaatatcacag

SEQ ID NO: 166928 - DNA, 25 bp, Artificial
  probe
  misc_feature (1)..(25): SEQ ID NO: 1349; WAN024DPR_at; Start 3; Stop 27
gacactattttaccataatttgact

SEQ ID NO: 166929 - DNA, 25 bp, Artificial
  probe
  misc_feature (1)..(25): SEQ ID NO: 1349; WAN024DPR_at; Start 153; Stop 177
cacagtccagataaaaacaaaaagt

SEQ ID NO: 166930 - DNA, 25 bp, Artificial
  probe
  misc_feature (1)..(25): SEQ ID NO: 1349; WAN024DPR_at; Start 2; Stop 26
tgacactattttaccataatttgac

SEQ ID NO: 166931 - DNA, 25 bp, Artificial
  probe
  misc_feature (1)..(25): SEQ ID NO: 1349; WAN024DPR_at; Start 103; Stop 127
caatctctttcaacacttataaata

SEQ ID NO: 166932 - DNA, 25 bp, Artificial
  probe
  misc_feature (1)..(25): SEQ ID NO: 1349; WAN024DPR_at; Start 140; Stop 164
gaactataaatatcacagtccagat

SEQ ID NO: 166933 - DNA, 25 bp, Artificial
  probe
  misc_feature (1)..(25): SEQ ID NO: 1349; WAN024DPR_at; Start 174; Stop 198
aagtttatcatctataatcaggcag

SEQ ID NO: 166934 - DNA, 25 bp, Artificial
  probe
  misc_feature (1)..(25): SEQ ID NO: 1349; WAN024DPR_at; Start 176; Stop 200
gtttatcatctataatcaggcagat

SEQ ID NO: 166935 - DNA, 25 bp, Artificial
  probe
  misc_feature (1)..(25): SEQ ID NO: 1349; WAN024DPR_at; Start 7; Stop 31
ctattttaccataatttgactcaaa

SEQ ID NO: 166936 - DNA, 25 bp, Artificial
  probe
  misc_feature (1)..(25): SEQ ID NO: 1349; WAN024DPR_at; Start 142; Stop 166
actataaatatcacagtccagataa

SEQ ID NO: 166937 - DNA, 25 bp, Artificial
  probe
  misc_feature (1)..(25): SEQ ID NO: 1349; WAN024DPR_at; Start 112; Stop 136
tcaacacttataaataataaaccat

SEQ ID NO: 166938 - DNA, 25 bp, Artificial
  probe
  misc_feature (1)..(25): SEQ ID NO: 1349; WAN024DPR_at; Start 94; Stop 118
cattttcttcaatctctttcaacac

SEQ ID NO: 166939 - DNA, 25 bp, Artificial
  probe
  misc_feature (1)..(25): SEQ ID NO: 1349; WAN024DPR_at; Start 146; Stop 170
taaatatcacagtccagataaaaac

SEQ ID NO: 166940 - DNA, 25 bp, Artificial
  probe
  misc_feature (1)..(25): SEQ ID NO: 1349; WAN024DPR_at; Start 99; Stop 123
tcttcaatctctttcaacacttata

SEQ ID NO: 166941 - DNA, 25 bp, Artificial
  probe
  misc_feature (1)..(25): SEQ ID NO: 1349; WAN024DPR_at; Start 86; Stop 110
cacgaagccattttcttcaatctct

SEQ ID NO: 166942 - DNA, 25 bp, Artificial
  probe
  misc_feature (1)..(25): SEQ ID NO: 1349; WAN024DPR_at; Start 136; Stop 160
tttagaactataaatatcacagtcc

SEQ ID NO: 166943 - DNA, 25 bp, Artificial
  probe
  misc_feature (1)..(25): SEQ ID NO: 1349; WAN024DPR_at; Start 150; Stop 174
tatcacagtccagataaaaacaaaa

SEQ ID NO: 166944 - DNA, 25 bp, Artificial
  probe
  misc_feature (1)..(25): SEQ ID NO: 1349; WAN024DPR_at; Start 172; Stop 196
aaaagtttatcatctataatcaggc

SEQ ID NO: 166945 - DNA, 25 bp, Artificial
  probe
  misc_feature (1)..(25): SEQ ID NO: 1349; WAN024DPR_at; Start 24; Stop 48
gactcaaattgtaaatcgtttacaa

SEQ ID NO: 166946 - DNA, 25 bp, Artificial
  probe
  misc_feature (1)..(25): SEQ ID NO: 1349; WAN024DPR_at; Start 192; Stop 216
caggcagattattatttctattgct

SEQ ID NO: 166947 - DNA, 25 bp, Artificial
  probe
  misc_feature (1)..(25): SEQ ID NO: 1349; WAN024DPR_at; Start 116; Stop 140
cacttataaataataaaccatttag

SEQ ID NO: 166948 - DNA, 25 bp, Artificial
  probe
  misc_feature (1)..(25): SEQ ID NO: 1349; WAN024DPR_at; Start 175; Stop 199
agtttatcatctataatcaggcaga

SEQ ID NO: 166949 - DNA, 25 bp, Artificial
  probe
  misc_feature (1)..(25): SEQ ID NO: 1349; WAN024DPR_at; Start 5; Stop 29
cactattttaccataatttgactca

SEQ ID NO: 166950 - DNA, 25 bp, Artificial
  probe
  misc_feature (1)..(25): SEQ ID NO: 1349; WAN024DPR_at; Start 34; Stop 58
gtaaatcgtttacaaattgataata

SEQ ID NO: 166951 - DNA, 25 bp, Artificial
  probe
  misc_feature (1)..(25): SEQ ID NO: 1349; WAN024DPR_at; Start 92; Stop 116
gccattttcttcaatctctttcaac

SEQ ID NO: 166952 - DNA, 25 bp, Artificial
  probe
  misc_feature (1)..(25): SEQ ID NO: 1349; WAN024DPR_at; Start 22; Stop 46
ttgactcaaattgtaaatcgtttac

SEQ ID NO: 166953 - DNA, 25 bp, Artificial
  probe
  misc_feature (1)..(25): SEQ ID NO: 1349; WAN024DPR_at; Start 178; Stop 202
ttatcatctataatcaggcagatta

SEQ ID NO: 166954 - DNA, 25 bp, Artificial
  probe
  misc_feature (1)..(25): SEQ ID NO: 1349; WAN024DPR_at; Start 85; Stop 109
tcacgaagccattttcttcaatctc

SEQ ID NO: 166955 - DNA, 25 bp, Artificial
  probe
  misc_feature (1)..(25): SEQ ID NO: 1349; WAN024DPR_at; Start 191; Stop 215
tcaggcagattattatttctattgc

SEQ ID NO: 166956 - DNA, 25 bp, Artificial
  probe
  misc_feature (1)..(25): SEQ ID NO: 1349; WAN024DPR_at; Start 148; Stop 172
aatatcacagtccagataaaaacaa

SEQ ID NO: 166957 - DNA, 25 bp, Artificial
  probe
  misc_feature (1)..(25): SEQ ID NO: 3374; WAN024DPS_at; Start 65; Stop 89
tattatttataagtgttgaaagaga

SEQ ID NO: 166958 - DNA, 25 bp, Artificial
  probe
  misc_feature (1)..(25): SEQ ID NO: 3374; WAN024DPS_at; Start 19; Stop 43
ctttttgtttttatctggactgtga

SEQ ID NO: 166959 - DNA, 25 bp, Artificial
  probe
  misc_feature (1)..(25): SEQ ID NO: 3374; WAN024DPS_at; Start 22; Stop 46
tttgtttttatctggactgtgatat

SEQ ID NO: 166960 - DNA, 25 bp, Artificial
  probe
  misc_feature (1)..(25): SEQ ID NO: 3374; WAN024DPS_at; Start 36; Stop 60
gactgtgatatttatagttctaaat

SEQ ID NO: 166961 - DNA, 25 bp, Artificial
  probe
  misc_feature (1)..(25): SEQ ID NO: 3374; WAN024DPS_at; Start 66; Stop 90
attatttataagtgttgaaagagat

SEQ ID NO: 166962 - DNA, 25 bp, Artificial
  probe
  misc_feature (1)..(25): SEQ ID NO: 3374; WAN024DPS_at; Start 58; Stop 82
aatggtttattatttataagtgttg

SEQ ID NO: 166963 - DNA, 25 bp, Artificial
  probe
  misc_feature (1)..(25): SEQ ID NO: 3374; WAN024DPS_at; Start 26; Stop 50
tttttatctggactgtgatatttat

SEQ ID NO: 166964 - DNA, 25 bp, Artificial
  probe
  misc_feature (1)..(25): SEQ ID NO: 3374; WAN024DPS_at; Start 42; Stop 66
gatatttatagttctaaatggttta

SEQ ID NO: 166965 - DNA, 25 bp, Artificial
  probe
  misc_feature (1)..(25): SEQ ID NO: 3374; WAN024DPS_at; Start 60; Stop 84
tggtttattatttataagtgttgaa

SEQ ID NO: 166966 - DNA, 25 bp, Artificial
  probe
  misc_feature (1)..(25): SEQ ID NO: 3374; WAN024DPS_at; Start 35; Stop 59
ggactgtgatatttatagttctaaa

SEQ ID NO: 166967 - DNA, 25 bp, Artificial
  probe
  misc_feature (1)..(25): SEQ ID NO: 3374; WAN024DPS_at; Start 30; Stop 54
tatctggactgtgatatttatagtt

SEQ ID NO: 166968 - DNA, 25 bp, Artificial
  probe
  misc_feature (1)..(25): SEQ ID NO: 3374; WAN024DPS_at; Start 20; Stop 44
tttttgtttttatctggactgtgat

SEQ ID NO: 166969 - DNA, 25 bp, Artificial
  probe
  misc_feature (1)..(25): SEQ ID NO: 3374; WAN024DPS_at; Start 40; Stop 64
gtgatatttatagttctaaatggtt

SEQ ID NO: 166970 - DNA, 25 bp, Artificial
  probe
  misc_feature (1)..(25): SEQ ID NO: 3374; WAN024DPS_at; Start 64; Stop 88
ttattatttataagtgttgaaagag

SEQ ID NO: 166971 - DNA, 25 bp, Artificial
  probe
  misc_feature (1)..(25): SEQ ID NO: 3374; WAN024DPS_at; Start 29; Stop 53
ttatctggactgtgatatttatagt

SEQ ID NO: 166972 - DNA, 25 bp, Artificial
  probe
  misc_feature (1)..(25): SEQ ID NO: 3374; WAN024DPS_at; Start 2; Stop 26
tgattatagatgataaactttttgt

SEQ ID NO: 166973 - DNA, 25 bp, Artificial
  probe
  misc_feature (1)..(25): SEQ ID NO: 3374; WAN024DPS_at; Start 27; Stop 51
ttttatctggactgtgatatttata

SEQ ID NO: 166974 - DNA, 25 bp, Artificial
  probe
  misc_feature (1)..(25): SEQ ID NO: 3374; WAN024DPS_at; Start 23; Stop 47
ttgtttttatctggactgtgatatt

SEQ ID NO: 166975 - DNA, 25 bp, Artificial
  probe
  misc_feature (1)..(25): SEQ ID NO: 3374; WAN024DPS_at; Start 28; Stop 52
tttatctggactgtgatatttatag

SEQ ID NO: 166976 - DNA, 25 bp, Artificial
  probe
  misc_feature (1)..(25): SEQ ID NO: 3374; WAN024DPS_at; Start 38; Stop 62
ctgtgatatttatagttctaaatgg

SEQ ID NO: 166977 - DNA, 25 bp, Artificial
  probe
  misc_feature (1)..(25): SEQ ID NO: 3374; WAN024DPS_at; Start 39; Stop 63
tgtgatatttatagttctaaatggt

SEQ ID NO: 166978 - DNA, 25 bp, Artificial
  probe
  misc_feature (1)..(25): SEQ ID NO: 3374; WAN024DPS_at; Start 55; Stop 79
ctaaatggtttattatttataagtg

SEQ ID NO: 166979 - DNA, 25 bp, Artificial
  probe
  misc_feature (1)..(25): SEQ ID NO: 3374; WAN024DPS_at; Start 25; Stop 49
gtttttatctggactgtgatattta

SEQ ID NO: 166980 - DNA, 25 bp, Artificial
  probe
  misc_feature (1)..(25): SEQ ID NO: 3374; WAN024DPS_at; Start 34; Stop 58
tggactgtgatatttatagttctaa

SEQ ID NO: 166981 - DNA, 25 bp, Artificial
  probe
  misc_feature (1)..(25): SEQ ID NO: 3374; WAN024DPS_at; Start 32; Stop 56
tctggactgtgatatttatagttct

SEQ ID NO: 166982 - DNA, 25 bp, Artificial
  probe
  misc_feature (1)..(25): SEQ ID NO: 3374; WAN024DPS_at; Start 3; Stop 27
gattatagatgataaactttttgtt

SEQ ID NO: 166983 - DNA, 25 bp, Artificial
  probe
  misc_feature (1)..(25): SEQ ID NO: 3374; WAN024DPS_at; Start 21; Stop 45
ttttgtttttatctggactgtgata

SEQ ID NO: 166984 - DNA, 25 bp, Artificial
  probe
  misc_feature (1)..(25): SEQ ID NO: 3374; WAN024DPS_at; Start 41; Stop 65
tgatatttatagttctaaatggttt

SEQ ID NO: 166985 - DNA, 25 bp, Artificial
  probe
  misc_feature (1)..(25): SEQ ID NO: 3374; WAN024DPS_at; Start 18; Stop 42
actttttgtttttatctggactgtg

SEQ ID NO: 166986 - DNA, 25 bp, Artificial
  probe
  misc_feature (1)..(25): SEQ ID NO: 3374; WAN024DPS_at; Start 37; Stop 61
actgtgatatttatagttctaaatg

SEQ ID NO: 166987 - DNA, 25 bp, Artificial
  probe
  misc_feature (1)..(25): SEQ ID NO: 3374; WAN024DPS_at; Start 31; Stop 55
atctggactgtgatatttatagttc

SEQ ID NO: 166988 - DNA, 25 bp, Artificial
  probe
  misc_feature (1)..(25): SEQ ID NO: 3374; WAN024DPS_at; Start 1; Stop 25
ctgattatagatgataaactttttg

SEQ ID NO: 166989 - DNA, 25 bp, Artificial
  probe
  misc_feature (1)..(25): SEQ ID NO: 3374; WAN024DPS_at; Start 24; Stop 48
tgtttttatctggactgtgatattt

SEQ ID NO: 166990 - DNA, 25 bp, Artificial
  probe
  misc_feature (1)..(25): SEQ ID NO: 3374; WAN024DPS_at; Start 33; Stop 57
ctggactgtgatatttatagttcta

SEQ ID NO: 166991 - DNA, 25 bp, Artificial
  probe
  misc_feature (1)..(25): SEQ ID NO: 5190; WAN024DPT_at; Start 54; Stop 78
taccattatatatgaaaacttacgt

SEQ ID NO: 166992 - DNA, 25 bp, Artificial
  probe
  misc_feature (1)..(25): SEQ ID NO: 5190; WAN024DPT_at; Start 30; Stop 54
tcttacctccatatttactaactat

SEQ ID NO: 166993 - DNA, 25 bp, Artificial
  probe
  misc_feature (1)..(25): SEQ ID NO: 5190; WAN024DPT_at; Start 62; Stop 86
tatatgaaaacttacgttttgacaa

SEQ ID NO: 166994 - DNA, 25 bp, Artificial
  probe
  misc_feature (1)..(25): SEQ ID NO: 5190; WAN024DPT_at; Start 6; Stop 30
agctgatttaatgtttgccaatgtt

SEQ ID NO: 166995 - DNA, 25 bp, Artificial
  probe
  misc_feature (1)..(25): SEQ ID NO: 5190; WAN024DPT_at; Start 63; Stop 87
atatgaaaacttacgttttgacaag

SEQ ID NO: 166996 - DNA, 25 bp, Artificial
  probe
  misc_feature (1)..(25): SEQ ID NO: 5190; WAN024DPT_at; Start 1; Stop 25
ttgatagctgatttaatgtttgcca

SEQ ID NO: 166997 - DNA, 25 bp, Artificial
  probe
  misc_feature (1)..(25): SEQ ID NO: 5190; WAN024DPT_at; Start 8; Stop 32
ctgatttaatgtttgccaatgttct

SEQ ID NO: 166998 - DNA, 25 bp, Artificial
  probe
  misc_feature (1)..(25): SEQ ID NO: 5190; WAN024DPT_at; Start 4; Stop 28
atagctgatttaatgtttgccaatg

SEQ ID NO: 166999 - DNA, 25 bp, Artificial
  probe
  misc_feature (1)..(25): SEQ ID NO: 5190; WAN024DPT_at; Start 35; Stop 59
cctccatatttactaactataccat

SEQ ID NO: 167000 - DNA, 25 bp, Artificial
  probe
  misc_feature (1)..(25): SEQ ID NO: 5190; WAN024DPT_at; Start 48; Stop 72
taactataccattatatatgaaaac

SEQ ID NO: 167001 - DNA, 25 bp, Artificial
  probe
  misc_feature (1)..(25): SEQ ID NO: 5190; WAN024DPT_at; Start 14; Stop 38
taatgtttgccaatgttcttacctc

SEQ ID NO: 167002 - DNA, 25 bp, Artificial
  probe
  misc_feature (1)..(25): SEQ ID NO: 5190; WAN024DPT_at; Start 2; Stop 26
tgatagctgatttaatgtttgccaa

SEQ ID NO: 167003 - DNA, 25 bp, Artificial
  probe
  misc_feature (1)..(25): SEQ ID NO: 5190; WAN024DPT_at; Start 24; Stop 48
caatgttcttacctccatatttact

SEQ ID NO: 167004 - DNA, 25 bp, Artificial
  probe
  misc_feature (1)..(25): SEQ ID NO: 5190; WAN024DPT_at; Start 33; Stop 57
tacctccatatttactaactatacc

SEQ ID NO: 167005 - DNA, 25 bp, Artificial
  probe
  misc_feature (1)..(25): SEQ ID NO: 5190; WAN024DPT_at; Start 3; Stop 27
gatagctgatttaatgtttgccaat

SEQ ID NO: 167006 - DNA, 25 bp, Artificial
  probe
  misc_feature (1)..(25): SEQ ID NO: 5190; WAN024DPT_at; Start 45; Stop 69
tactaactataccattatatatgaa

SEQ ID NO: 167007 - DNA, 25 bp, Artificial
  probe
  misc_feature (1)..(25): SEQ ID NO: 5190; WAN024DPT_at; Start 15; Stop 39
aatgtttgccaatgttcttacctcc

SEQ ID NO: 167008 - DNA, 25 bp, Artificial
  probe
  misc_feature (1)..(25): SEQ ID NO: 5190; WAN024DPT_at; Start 25; Stop 49
aatgttcttacctccatatttacta

SEQ ID NO: 167009 - DNA, 25 bp, Artificial
  probe
  misc_feature (1)..(25): SEQ ID NO: 5190; WAN024DPT_at; Start 10; Stop 34
gatttaatgtttgccaatgttctta

SEQ ID NO: 167010 - DNA, 25 bp, Artificial
  probe
  misc_feature (1)..(25): SEQ ID NO: 5190; WAN024DPT_at; Start 12; Stop 36
tttaatgtttgccaatgttcttacc

SEQ ID NO: 167011 - DNA, 25 bp, Artificial
  probe
  misc_feature (1)..(25): SEQ ID NO: 5190; WAN024DPT_at; Start 27; Stop 51
tgttcttacctccatatttactaac

SEQ ID NO: 167012 - DNA, 25 bp, Artificial
  probe
  misc_feature (1)..(25): SEQ ID NO: 5190; WAN024DPT_at; Start 13; Stop 37
ttaatgtttgccaatgttcttacct

SEQ ID NO: 167013 - DNA, 25 bp, Artificial
  probe
  misc_feature (1)..(25): SEQ ID NO: 5190; WAN024DPT_at; Start 21; Stop 45
tgccaatgttcttacctccatattt

SEQ ID NO: 167014 - DNA, 25 bp, Artificial
  probe
  misc_feature (1)..(25): SEQ ID NO: 5190; WAN024DPT_at; Start 56; Stop 80
ccattatatatgaaaacttacgttt

SEQ ID NO: 167015 - DNA, 25 bp, Artificial
  probe
  misc_feature (1)..(25): SEQ ID NO: 5190; WAN024DPT_at; Start 17; Stop 41
tgtttgccaatgttcttacctccat

SEQ ID NO: 167016 - DNA, 25 bp, Artificial
  probe
  misc_feature (1)..(25): SEQ ID NO: 5190; WAN024DPT_at; Start 18; Stop 42
gtttgccaatgttcttacctccata

SEQ ID NO: 167017 - DNA, 25 bp, Artificial
  probe
  misc_feature (1)..(25): SEQ ID NO: 5190; WAN024DPT_at; Start 23; Stop 47
ccaatgttcttacctccatatttac

SEQ ID NO: 167018 - DNA, 25 bp, Artificial
  probe
  misc_feature (1)..(25): SEQ ID NO: 5190; WAN024DPT_at; Start 22; Stop 46
gccaatgttcttacctccatattta

SEQ ID NO: 167019 - DNA, 25 bp, Artificial
  probe
  misc_feature (1)..(25): SEQ ID NO: 5190; WAN024DPT_at; Start 5; Stop 29
tagctgatttaatgtttgccaatgt

SEQ ID NO: 167020 - DNA, 25 bp, Artificial
  probe
  misc_feature (1)..(25): SEQ ID NO: 5190; WAN024DPT_at; Start 37; Stop 61
tccatatttactaactataccatta

SEQ ID NO: 167021 - DNA, 25 bp, Artificial
  probe
  misc_feature (1)..(25): SEQ ID NO: 5190; WAN024DPT_at; Start 16; Stop 40
atgtttgccaatgttcttacctcca

SEQ ID NO: 167022 - DNA, 25 bp, Artificial
  probe
  misc_feature (1)..(25): SEQ ID NO: 5190; WAN024DPT_at; Start 7; Stop 31
gctgatttaatgtttgccaatgttc

SEQ ID NO: 167023 - DNA, 25 bp, Artificial
  probe
  misc_feature (1)..(25): SEQ ID NO: 5190; WAN024DPT_at; Start 19; Stop 43
tttgccaatgttcttacctccatat

SEQ ID NO: 167024 - DNA, 25 bp, Artificial
  probe
  misc_feature (1)..(25): SEQ ID NO: 5190; WAN024DPT_at; Start 20; Stop 44
ttgccaatgttcttacctccatatt

SEQ ID NO: 167025 - DNA, 25 bp, Artificial
  probe
  misc_feature (1)..(25): SEQ ID NO: 2289; WAN024DPU_at; Start 208; Stop 232
gcaagccgcgataaagctcgtcttt

SEQ ID NO: 167026 - DNA, 25 bp, Artificial
  probe
  misc_feature (1)..(25): SEQ ID NO: 2289; WAN024DPU_at; Start 82; Stop 106
gctcaaaaatcagctatgcgtactg

SEQ ID NO: 167027 - DNA, 25 bp, Artificial
  probe
  misc_feature (1)..(25): SEQ ID NO: 2289; WAN024DPU_at; Start 113; Stop 137
aagctttcgaagcaaacccatctga

SEQ ID NO: 167028 - DNA, 25 bp, Artificial
  probe
  misc_feature (1)..(25): SEQ ID NO: 2289; WAN024DPU_at; Start 131; Stop 155
catctgaagaacttttccgtgctgc

SEQ ID NO: 167029 - DNA, 25 bp, Artificial
  probe
  misc_feature (1)..(25): SEQ ID NO: 2289; WAN024DPU_at; Start 135; Stop 159
tgaagaacttttccgtgctgctagc

SEQ ID NO: 167030 - DNA, 25 bp, Artificial
  probe
  misc_feature (1)..(25): SEQ ID NO: 2289; WAN024DPU_at; Start 210; Stop 234
aagccgcgataaagctcgtctttca

SEQ ID NO: 167031 - DNA, 25 bp, Artificial
  probe
  misc_feature (1)..(25): SEQ ID NO: 2289; WAN024DPU_at; Start 137; Stop 161
aagaacttttccgtgctgctagctc

SEQ ID NO: 167032 - DNA, 25 bp, Artificial
  probe
  misc_feature (1)..(25): SEQ ID NO: 2289; WAN024DPU_at; Start 148; Stop 172
cgtgctgctagctcagctatcgata

SEQ ID NO: 167033 - DNA, 25 bp, Artificial
  probe
  misc_feature (1)..(25): SEQ ID NO: 2289; WAN024DPU_at; Start 85; Stop 109
caaaaatcagctatgcgtactgcta

SEQ ID NO: 167034 - DNA, 25 bp, Artificial
  probe
  misc_feature (1)..(25): SEQ ID NO: 2289; WAN024DPU_at; Start 196; Stop 220
cacaaaaacaaagcaagccgcgata

SEQ ID NO: 167035 - DNA, 25 bp, Artificial
  probe
  misc_feature (1)..(25): SEQ ID NO: 2289; WAN024DPU_at; Start 115; Stop 139
gctttcgaagcaaacccatctgaag

SEQ ID NO: 167036 - DNA, 25 bp, Artificial
  probe
  misc_feature (1)..(25): SEQ ID NO: 2289; WAN024DPU_at; Start 191; Stop 215
tgattcacaaaaacaaagcaagccg

SEQ ID NO: 167037 - DNA, 25 bp, Artificial
  probe
  misc_feature (1)..(25): SEQ ID NO: 2289; WAN024DPU_at; Start 165; Stop 189
tatcgataaagcagaaactaaaggt

SEQ ID NO: 167038 - DNA, 25 bp, Artificial
  probe
  misc_feature (1)..(25): SEQ ID NO: 2289; WAN024DPU_at; Start 168; Stop 192
cgataaagcagaaactaaaggtttg

SEQ ID NO: 167039 - DNA, 25 bp, Artificial
  probe
  misc_feature (1)..(25): SEQ ID NO: 2289; WAN024DPU_at; Start 139; Stop 163
gaacttttccgtgctgctagctcag

SEQ ID NO: 167040 - DNA, 25 bp, Artificial
  probe
  misc_feature (1)..(25): SEQ ID NO: 2289; WAN024DPU_at; Start 36; Stop 60
tatcaaacgcgctgaattgaacgtt

SEQ ID NO: 167041 - DNA, 25 bp, Artificial
  probe
  misc_feature (1)..(25): SEQ ID NO: 2289; WAN024DPU_at; Start 14; Stop 38
cattggcaaacattaaatcagctat

SEQ ID NO: 167042 - DNA, 25 bp, Artificial
  probe
  misc_feature (1)..(25): SEQ ID NO: 2289; WAN024DPU_at; Start 96; Stop 120
tatgcgtactgctataaaagctttc

SEQ ID NO: 167043 - DNA, 25 bp, Artificial
  probe
  misc_feature (1)..(25): SEQ ID NO: 2289; WAN024DPU_at; Start 75; Stop 99
gaactcagctcaaaaatcagctatg

SEQ ID NO: 167044 - DNA, 25 bp, Artificial
  probe
  misc_feature (1)..(25): SEQ ID NO: 2289; WAN024DPU_at; Start 127; Stop 151
aacccatctgaagaacttttccgtg

SEQ ID NO: 167045 - DNA, 25 bp, Artificial
  probe
  misc_feature (1)..(25): SEQ ID NO: 2289; WAN024DPU_at; Start 119; Stop 143
tcgaagcaaacccatctgaagaact

SEQ ID NO: 167046 - DNA, 25 bp, Artificial
  probe
  misc_feature (1)..(25): SEQ ID NO: 2289; WAN024DPU_at; Start 91; Stop 115
tcagctatgcgtactgctataaaag

SEQ ID NO: 167047 - DNA, 25 bp, Artificial
  probe
  misc_feature (1)..(25): SEQ ID NO: 2289; WAN024DPU_at; Start 108; Stop 132
tataaaagctttcgaagcaaaccca

SEQ ID NO: 167048 - DNA, 25 bp, Artificial
  probe
  misc_feature (1)..(25): SEQ ID NO: 2289; WAN024DPU_at; Start 176; Stop 200
cagaaactaaaggtttgattcacaa

SEQ ID NO: 167049 - DNA, 25 bp, Artificial
  probe
  misc_feature (1)..(25): SEQ ID NO: 2289; WAN024DPU_at; Start 121; Stop 145
gaagcaaacccatctgaagaacttt

SEQ ID NO: 167050 - DNA, 25 bp, Artificial
  probe
  misc_feature (1)..(25): SEQ ID NO: 2289; WAN024DPU_at; Start 22; Stop 46
aacattaaatcagctatcaaacgcg

SEQ ID NO: 167051 - DNA, 25 bp, Artificial
  probe
  misc_feature (1)..(25): SEQ ID NO: 2289; WAN024DPU_at; Start 70; Stop 94
gaaaagaactcagctcaaaaatcag

SEQ ID NO: 167052 - DNA, 25 bp, Artificial
  probe
  misc_feature (1)..(25): SEQ ID NO: 2289; WAN024DPU_at; Start 194; Stop 218
ttcacaaaaacaaagcaagccgcga

SEQ ID NO: 167053 - DNA, 25 bp, Artificial
  probe
  misc_feature (1)..(25): SEQ ID NO: 2289; WAN024DPU_at; Start 158; Stop 182
gctcagctatcgataaagcagaaac

SEQ ID NO: 167054 - DNA, 25 bp, Artificial
  probe
  misc_feature (1)..(25): SEQ ID NO: 2289; WAN024DPU_at; Start 200; Stop 224
aaaacaaagcaagccgcgataaagc

SEQ ID NO: 167055 - DNA, 25 bp, Artificial
  probe
  misc_feature (1)..(25): SEQ ID NO: 2289; WAN024DPU_at; Start 154; Stop 178
gctagctcagctatcgataaagcag

SEQ ID NO: 167056 - DNA, 25 bp, Artificial
  probe
  misc_feature (1)..(25): SEQ ID NO: 2289; WAN024DPU_at; Start 143; Stop 167
ttttccgtgctgctagctcagctat

SEQ ID NO: 167057 - DNA, 25 bp, Artificial
  probe
  misc_feature (1)..(25): SEQ ID NO: 2289; WAN024DPU_at; Start 205; Stop 229
aaagcaagccgcgataaagctcgtc

SEQ ID NO: 167058 - DNA, 25 bp, Artificial
  probe
  misc_feature (1)..(25): SEQ ID NO: 2289; WAN024DPU_at; Start 100; Stop 124
cgtactgctataaaagctttcgaag

SEQ ID NO: 167059 - DNA, 25 bp, Artificial
  probe
  misc_feature (1)..(25): SEQ ID NO: 2082; WAN024DPV_at; Start 5; Stop 29
tcgctagaccaactatctttttccc

SEQ ID NO: 167060 - DNA, 25 bp, Artificial
  probe
  misc_feature (1)..(25): SEQ ID NO: 2082; WAN024DPV_at; Start 4; Stop 28
ctcgctagaccaactatctttttcc

SEQ ID NO: 167061 - DNA, 25 bp, Artificial
  probe
  misc_feature (1)..(25): SEQ ID NO: 2082; WAN024DPV_at; Start 12; Stop 36
accaactatctttttcccactgctt

SEQ ID NO: 167062 - DNA, 25 bp, Artificial
  probe
  misc_feature (1)..(25): SEQ ID NO: 2082; WAN024DPV_at; Start 11; Stop 35
gaccaactatctttttcccactgct

SEQ ID NO: 167063 - DNA, 25 bp, Artificial
  probe
  misc_feature (1)..(25): SEQ ID NO: 2082; WAN024DPV_at; Start 10; Stop 34
agaccaactatctttttcccactgc

SEQ ID NO: 167064 - DNA, 25 bp, Artificial
  probe
  misc_feature (1)..(25): SEQ ID NO: 2082; WAN024DPV_at; Start 1; Stop 25
atgctcgctagaccaactatctttt

SEQ ID NO: 167065 - DNA, 25 bp, Artificial
  probe
  misc_feature (1)..(25): SEQ ID NO: 2082; WAN024DPV_at; Start 13; Stop 37
ccaactatctttttcccactgcttt

SEQ ID NO: 167066 - DNA, 25 bp, Artificial
  probe
  misc_feature (1)..(25): SEQ ID NO: 2082; WAN024DPV_at; Start 14; Stop 38
caactatctttttcccactgctttt

SEQ ID NO: 167067 - DNA, 25 bp, Artificial
  probe
  misc_feature (1)..(25): SEQ ID NO: 2082; WAN024DPV_at; Start 8; Stop 32
ctagaccaactatctttttcccact

SEQ ID NO: 167068 - DNA, 25 bp, Artificial
  probe
  misc_feature (1)..(25): SEQ ID NO: 2082; WAN024DPV_at; Start 2; Stop 26
tgctcgctagaccaactatcttttt

SEQ ID NO: 167069 - DNA, 25 bp, Artificial
  probe
  misc_feature (1)..(25): SEQ ID NO: 2082; WAN024DPV_at; Start 3; Stop 27
gctcgctagaccaactatctttttc

SEQ ID NO: 167070 - DNA, 25 bp, Artificial
  probe
  misc_feature (1)..(25): SEQ ID NO: 2082; WAN024DPV_at; Start 6; Stop 30
cgctagaccaactatctttttccca

SEQ ID NO: 167071 - DNA, 25 bp, Artificial
  probe
  misc_feature (1)..(25): SEQ ID NO: 2082; WAN024DPV_at; Start 9; Stop 33
tagaccaactatctttttcccactg

SEQ ID NO: 167072 - DNA, 25 bp, Artificial
  probe
  misc_feature (1)..(25): SEQ ID NO: 2082; WAN024DPV_at; Start 7; Stop 31
gctagaccaactatctttttcccac

SEQ ID NO: 167073 - DNA, 25 bp, Artificial
  probe
  misc_feature (1)..(25): SEQ ID NO: 2082; WAN024DPV_at; Start 17; Stop 41
ctatctttttcccactgcttttagg

SEQ ID NO: 167074 - DNA, 25 bp, Artificial
  probe
  misc_feature (1)..(25): SEQ ID NO: 2082; WAN024DPV_at; Start 16; Stop 40
actatctttttcccactgcttttag

SEQ ID NO: 167075 - DNA, 25 bp, Artificial
  probe
  misc_feature (1)..(25): SEQ ID NO: 3390; WAN024DPW_at; Start 86; Stop 110
tgtctgatctgatagccagcattgt

SEQ ID NO: 167076 - DNA, 25 bp, Artificial
  probe
  misc_feature (1)..(25): SEQ ID NO: 3390; WAN024DPW_at; Start 42; Stop 66
gcttcttcctgctcttataactgaa

SEQ ID NO: 167077 - DNA, 25 bp, Artificial
  probe
  misc_feature (1)..(25): SEQ ID NO: 3390; WAN024DPW_at; Start 93; Stop 117
tctgatagccagcattgtgaaagac

SEQ ID NO: 167078 - DNA, 25 bp, Artificial
  probe
  misc_feature (1)..(25): SEQ ID NO: 3390; WAN024DPW_at; Start 105; Stop 129
cattgtgaaagacaagattctagga

SEQ ID NO: 167079 - DNA, 25 bp, Artificial
  probe
  misc_feature (1)..(25): SEQ ID NO: 3390; WAN024DPW_at; Start 71; Stop 95
gcggaagaataggtatgtctgatct

SEQ ID NO: 167080 - DNA, 25 bp, Artificial
  probe
  misc_feature (1)..(25): SEQ ID NO: 3390; WAN024DPW_at; Start 48; Stop 72
tcctgctcttataactgaaagaagc

SEQ ID NO: 167081 - DNA, 25 bp, Artificial
  probe
  misc_feature (1)..(25): SEQ ID NO: 3390; WAN024DPW_at; Start 31; Stop 55
gaatactatgagcttcttcctgctc

SEQ ID NO: 167082 - DNA, 25 bp, Artificial
  probe
  misc_feature (1)..(25): SEQ ID NO: 3390; WAN024DPW_at; Start 68; Stop 92
gaagcggaagaataggtatgtctga

SEQ ID NO: 167083 - DNA, 25 bp, Artificial
  probe
  misc_feature (1)..(25): SEQ ID NO: 3390; WAN024DPW_at; Start 13; Stop 37
attaaagaagaaacagaggaatact

SEQ ID NO: 167084 - DNA, 25 bp, Artificial
  probe
  misc_feature (1)..(25): SEQ ID NO: 3390; WAN024DPW_at; Start 78; Stop 102
aataggtatgtctgatctgatagcc

SEQ ID NO: 167085 - DNA, 25 bp, Artificial
  probe
  misc_feature (1)..(25): SEQ ID NO: 3390; WAN024DPW_at; Start 26; Stop 50
cagaggaatactatgagcttcttcc

SEQ ID NO: 167086 - DNA, 25 bp, Artificial
  probe
  misc_feature (1)..(25): SEQ ID NO: 3390; WAN024DPW_at; Start 62; Stop 86
ctgaaagaagcggaagaataggtat

SEQ ID NO: 167087 - DNA, 25 bp, Artificial
  probe
  misc_feature (1)..(25): SEQ ID NO: 3390; WAN024DPW_at; Start 53; Stop 77
ctcttataactgaaagaagcggaag

SEQ ID NO: 167088 - DNA, 25 bp, Artificial
  probe
  misc_feature (1)..(25): SEQ ID NO: 3390; WAN024DPW_at; Start 82; Stop 106
ggtatgtctgatctgatagccagca

SEQ ID NO: 167089 - DNA, 25 bp, Artificial
  probe
  misc_feature (1)..(25): SEQ ID NO: 3390; WAN024DPW_at; Start 65; Stop 89
aaagaagcggaagaataggtatgtc

SEQ ID NO: 167090 - DNA, 25 bp, Artificial
  probe
  misc_feature (1)..(25): SEQ ID NO: 3390; WAN024DPW_at; Start 108; Stop 132
tgtgaaagacaagattctaggatac

SEQ ID NO: 167091 - DNA, 25 bp, Artificial
  probe
  misc_feature (1)..(25): SEQ ID NO: 3390; WAN024DPW_at; Start 80; Stop 104
taggtatgtctgatctgatagccag

SEQ ID NO: 167092 - DNA, 25 bp, Artificial
  probe
  misc_feature (1)..(25): SEQ ID NO: 3390; WAN024DPW_at; Start 22; Stop 46
gaaacagaggaatactatgagcttc

SEQ ID NO: 167093 - DNA, 25 bp, Artificial
  probe
  misc_feature (1)..(25): SEQ ID NO: 3390; WAN024DPW_at; Start 56; Stop 80
ttataactgaaagaagcggaagaat

SEQ ID NO: 167094 - DNA, 25 bp, Artificial
  probe
  misc_feature (1)..(25): SEQ ID NO: 3390; WAN024DPW_at; Start 100; Stop 124
gccagcattgtgaaagacaagattc

SEQ ID NO: 167095 - DNA, 25 bp, Artificial
  probe
  misc_feature (1)..(25): SEQ ID NO: 3390; WAN024DPW_at; Start 88; Stop 112
tctgatctgatagccagcattgtga

SEQ ID NO: 167096 - DNA, 25 bp, Artificial
  probe
  misc_feature (1)..(25): SEQ ID NO: 3390; WAN024DPW_at; Start 51; Stop 75
tgctcttataactgaaagaagcgga

SEQ ID NO: 167097 - DNA, 25 bp, Artificial
  probe
  misc_feature (1)..(25): SEQ ID NO: 3390; WAN024DPW_at; Start 74; Stop 98
gaagaataggtatgtctgatctgat

SEQ ID NO: 167098 - DNA, 25 bp, Artificial
  probe
  misc_feature (1)..(25): SEQ ID NO: 3390; WAN024DPW_at; Start 84; Stop 108
tatgtctgatctgatagccagcatt

SEQ ID NO: 167099 - DNA, 25 bp, Artificial
  probe
  misc_feature (1)..(25): SEQ ID NO: 3390; WAN024DPW_at; Start 40; Stop 64
gagcttcttcctgctcttataactg

SEQ ID NO: 167100 - DNA, 25 bp, Artificial
  probe
  misc_feature (1)..(25): SEQ ID NO: 3390; WAN024DPW_at; Start 44; Stop 68
ttcttcctgctcttataactgaaag

SEQ ID NO: 167101 - DNA, 25 bp, Artificial
  probe
  misc_feature (1)..(25): SEQ ID NO: 3390; WAN024DPW_at; Start 19; Stop 43
gaagaaacagaggaatactatgagc

SEQ ID NO: 167102 - DNA, 25 bp, Artificial
  probe
  misc_feature (1)..(25): SEQ ID NO: 3390; WAN024DPW_at; Start 98; Stop 122
tagccagcattgtgaaagacaagat

SEQ ID NO: 167103 - DNA, 25 bp, Artificial
  probe
  misc_feature (1)..(25): SEQ ID NO: 3390; WAN024DPW_at; Start 102; Stop 126
cagcattgtgaaagacaagattcta

SEQ ID NO: 167104 - DNA, 25 bp, Artificial
  probe
  misc_feature (1)..(25): SEQ ID NO: 3390; WAN024DPW_at; Start 96; Stop 120
gatagccagcattgtgaaagacaag

SEQ ID NO: 167105 - DNA, 25 bp, Artificial
  probe
  misc_feature (1)..(25): SEQ ID NO: 3390; WAN024DPW_at; Start 91; Stop 115
gatctgatagccagcattgtgaaag

SEQ ID NO: 167106 - DNA, 25 bp, Artificial
  probe
  misc_feature (1)..(25): SEQ ID NO: 3390; WAN024DPW_at; Start 30; Stop 54
ggaatactatgagcttcttcctgct

SEQ ID NO: 167107 - DNA, 25 bp, Artificial
  probe
  misc_feature (1)..(25): SEQ ID NO: 3390; WAN024DPW_at; Start 34; Stop 58
tactatgagcttcttcctgctctta

SEQ ID NO: 167108 - DNA, 25 bp, Artificial
  probe
  misc_feature (1)..(25): SEQ ID NO: 3390; WAN024DPW_at; Start 59; Stop 83
taactgaaagaagcggaagaatagg

SEQ ID NO: 167109 - DNA, 25 bp, Artificial
  probe
  misc_feature (1)..(25): SEQ ID NO: 1424; WAN024DPX_at; Start 44; Stop 68
gtaagaataaggtcgtcatggcgga

SEQ ID NO: 167110 - DNA, 25 bp, Artificial
  probe
  misc_feature (1)..(25): SEQ ID NO: 1424; WAN024DPX_at; Start 193; Stop 217
gcagtccattatccatttattcaga

SEQ ID NO: 167111 - DNA, 25 bp, Artificial
  probe
  misc_feature (1)..(25): SEQ ID NO: 1424; WAN024DPX_at; Start 252; Stop 276
ggaacttgaaaatctaccagcttgg

SEQ ID NO: 167112 - DNA, 25 bp, Artificial
  probe
  misc_feature (1)..(25): SEQ ID NO: 1424; WAN024DPX_at; Start 279; Stop 303
gagcagagacttggcacgaaaagat

SEQ ID NO: 167113 - DNA, 25 bp, Artificial
  probe
  misc_feature (1)..(25): SEQ ID NO: 1424; WAN024DPX_at; Start 358; Stop 382
agtttagagctgaaagatgaagtgc

SEQ ID NO: 167114 - DNA, 25 bp, Artificial
  probe
  misc_feature (1)..(25): SEQ ID NO: 1424; WAN024DPX_at; Start 245; Stop 269
ttgaggcggaacttgaaaatctacc

SEQ ID NO: 167115 - DNA, 25 bp, Artificial
  probe
  misc_feature (1)..(25): SEQ ID NO: 1424; WAN024DPX_at; Start 464; Stop 488
tgaaggtgcctttctaccgccacat

SEQ ID NO: 167116 - DNA, 25 bp, Artificial
  probe
  misc_feature (1)..(25): SEQ ID NO: 1424; WAN024DPX_at; Start 144; Stop 168
ttcgatagattccaaagcccaattg

SEQ ID NO: 167117 - DNA, 25 bp, Artificial
  probe
  misc_feature (1)..(25): SEQ ID NO: 1424; WAN024DPX_at; Start 264; Stop 288
tctaccagcttggtggagcagagac

SEQ ID NO: 167118 - DNA, 25 bp, Artificial
  probe
  misc_feature (1)..(25): SEQ ID NO: 1424; WAN024DPX_at; Start 94; Stop 118
ggactggaaaaggttgagagctaca

SEQ ID NO: 167119 - DNA, 25 bp, Artificial
  probe
  misc_feature (1)..(25): SEQ ID NO: 1424; WAN024DPX_at; Start 3; Stop 27
gacgcgctatgctttgctggtgaga

SEQ ID NO: 167120 - DNA, 25 bp, Artificial
  probe
  misc_feature (1)..(25): SEQ ID NO: 1424; WAN024DPX_at; Start 10; Stop 34
tatgctttgctggtgagaggtatca

SEQ ID NO: 167121 - DNA, 25 bp, Artificial
  probe
  misc_feature (1)..(25): SEQ ID NO: 1424; WAN024DPX_at; Start 156; Stop 180
caaagcccaattggttgaaaagcta

SEQ ID NO: 167122 - DNA, 25 bp, Artificial
  probe
  misc_feature (1)..(25): SEQ ID NO: 1424; WAN024DPX_at; Start 454; Stop 478
aagtacttgctgaaggtgcctttct

SEQ ID NO: 167123 - DNA, 25 bp, Artificial
  probe
  misc_feature (1)..(25): SEQ ID NO: 1424; WAN024DPX_at; Start 299; Stop 323
aagattttctcttttacactgaggg

SEQ ID NO: 167124 - DNA, 25 bp, Artificial
  probe
  misc_feature (1)..(25): SEQ ID NO: 1424; WAN024DPX_at; Start 413; Stop 437
ggaaattttctgaagaatcctattc

SEQ ID NO: 167125 - DNA, 25 bp, Artificial
  probe
  misc_feature (1)..(25): SEQ ID NO: 1424; WAN024DPX_at; Start 234; Stop 258
tctagaggactttgaggcggaactt

SEQ ID NO: 167126 - DNA, 25 bp, Artificial
  probe
  misc_feature (1)..(25): SEQ ID NO: 1424; WAN024DPX_at; Start 284; Stop 308
gagacttggcacgaaaagattttct

SEQ ID NO: 167127 - DNA, 25 bp, Artificial
  probe
  misc_feature (1)..(25): SEQ ID NO: 1424; WAN024DPX_at; Start 227; Stop 251
tactgagtctagaggactttgaggc

SEQ ID NO: 167128 - DNA, 25 bp, Artificial
  probe
  misc_feature (1)..(25): SEQ ID NO: 1424; WAN024DPX_at; Start 427; Stop 451
gaatcctattctaagactgcctatc

SEQ ID NO: 167129 - DNA, 25 bp, Artificial
  probe
  misc_feature (1)..(25): SEQ ID NO: 1424; WAN024DPX_at; Start 500; Stop 524
atgctaaaacctttgacaaaattgg

SEQ ID NO: 167130 - DNA, 25 bp, Artificial
  probe
  misc_feature (1)..(25): SEQ ID NO: 1424; WAN024DPX_at; Start 333; Stop 357
ggaccaagtcatcgcgacagttgaa

SEQ ID NO: 167131 - DNA, 25 bp, Artificial
  probe
  misc_feature (1)..(25): SEQ ID NO: 1424; WAN024DPX_at; Start 313; Stop 337
tacactgagggtttggatgtggacc

SEQ ID NO: 167132 - DNA, 25 bp, Artificial
  probe
  misc_feature (1)..(25): SEQ ID NO: 1424; WAN024DPX_at; Start 475; Stop 499
ttctaccgccacattactattcgta

SEQ ID NO: 167133 - DNA, 25 bp, Artificial
  probe
  misc_feature (1)..(25): SEQ ID NO: 1424; WAN024DPX_at; Start 373; Stop 397
gatgaagtgctttattttggaaaac

SEQ ID NO: 167134 - DNA, 25 bp, Artificial
  probe
  misc_feature (1)..(25): SEQ ID NO: 1424; WAN024DPX_at; Start 98; Stop 122
tggaaaaggttgagagctacatcaa

SEQ ID NO: 167135 - DNA, 25 bp, Artificial
  probe
  misc_feature (1)..(25): SEQ ID NO: 1424; WAN024DPX_at; Start 514; Stop 538
gacaaaattggtcaaatgctaaaaa

SEQ ID NO: 167136 - DNA, 25 bp, Artificial
  probe
  misc_feature (1)..(25): SEQ ID NO: 1424; WAN024DPX_at; Start 79; Stop 103
gaattgacaaacttgggactggaaa

SEQ ID NO: 167137 - DNA, 25 bp, Artificial
  probe
  misc_feature (1)..(25): SEQ ID NO: 1424; WAN024DPX_at; Start 344; Stop 368
tcgcgacagttgaaagtttagagct

SEQ ID NO: 167138 - DNA, 25 bp, Artificial
  probe
  misc_feature (1)..(25): SEQ ID NO: 1424; WAN024DPX_at; Start 162; Stop 186
ccaattggttgaaaagctagagact

SEQ ID NO: 167139 - DNA, 25 bp, Artificial
  probe
  misc_feature (1)..(25): SEQ ID NO: 1424; WAN024DPX_at; Start 177; Stop 201
gctagagactttctttgcagtccat

SEQ ID NO: 167140 - DNA, 25 bp, Artificial
  probe
  misc_feature (1)..(25): SEQ ID NO: 1424; WAN024DPX_at; Start 492; Stop 516
tattcgtaatgctaaaacctttgac

SEQ ID NO: 167141 - DNA, 25 bp, Artificial
  probe
  misc_feature (1)..(25): SEQ ID NO: 1424; WAN024DPX_at; Start 328; Stop 352
gatgtggaccaagtcatcgcgacag

SEQ ID NO: 167142 - DNA, 25 bp, Artificial
  probe
  misc_feature (1)..(25): SEQ ID NO: 1424; WAN024DPX_at; Start 16; Stop 40
ttgctggtgagaggtatcaatgttg

SEQ ID NO: 167143 - DNA, 25 bp, Artificial
  probe
  misc_feature (1)..(25): SEQ ID NO: 5808; WAN024DPY_at; Start 3; Stop 27
gttcatctctttccagttacaaaaa

SEQ ID NO: 167144 - DNA, 25 bp, Artificial
  probe
  misc_feature (1)..(25): SEQ ID NO: 5808; WAN024DPY_at; Start 46; Stop 70
acgtctagtttagccttaaagcagg

SEQ ID NO: 167145 - DNA, 25 bp, Artificial
  probe
  misc_feature (1)..(25): SEQ ID NO: 5808; WAN024DPY_at; Start 92; Stop 116
taagagaaggaagtagatttatctg

SEQ ID NO: 167146 - DNA, 25 bp, Artificial
  probe
  misc_feature (1)..(25): SEQ ID NO: 5808; WAN024DPY_at; Start 94; Stop 118
agagaaggaagtagatttatctgtc

SEQ ID NO: 167147 - DNA, 25 bp, Artificial
  probe
  misc_feature (1)..(25): SEQ ID NO: 5808; WAN024DPY_at; Start 51; Stop 75
tagtttagccttaaagcaggcgcat

SEQ ID NO: 167148 - DNA, 25 bp, Artificial
  probe
  misc_feature (1)..(25): SEQ ID NO: 5808; WAN024DPY_at; Start 53; Stop 77
gtttagccttaaagcaggcgcattt

SEQ ID NO: 167149 - DNA, 25 bp, Artificial
  probe
  misc_feature (1)..(25): SEQ ID NO: 5808; WAN024DPY_at; Start 64; Stop 88
aagcaggcgcatttcaagaatcata

SEQ ID NO: 167150 - DNA, 25 bp, Artificial
  probe
  misc_feature (1)..(25): SEQ ID NO: 5808; WAN024DPY_at; Start 49; Stop 73
tctagtttagccttaaagcaggcgc

SEQ ID NO: 167151 - DNA, 25 bp, Artificial
  probe
  misc_feature (1)..(25): SEQ ID NO: 5808; WAN024DPY_at; Start 71; Stop 95
cgcatttcaagaatcataaattaag

SEQ ID NO: 167152 - DNA, 25 bp, Artificial
  probe
  misc_feature (1)..(25): SEQ ID NO: 5808; WAN024DPY_at; Start 97; Stop 121
gaaggaagtagatttatctgtctat

SEQ ID NO: 167153 - DNA, 25 bp, Artificial
  probe
  misc_feature (1)..(25): SEQ ID NO: 5808; WAN024DPY_at; Start 54; Stop 78
tttagccttaaagcaggcgcatttc

SEQ ID NO: 167154 - DNA, 25 bp, Artificial
  probe
  misc_feature (1)..(25): SEQ ID NO: 5808; WAN024DPY_at; Start 77; Stop 101
tcaagaatcataaattaagagaagg

SEQ ID NO: 167155 - DNA, 25 bp, Artificial
  probe
  misc_feature (1)..(25): SEQ ID NO: 5808; WAN024DPY_at; Start 42; Stop 66
tgatacgtctagtttagccttaaag

SEQ ID NO: 167156 - DNA, 25 bp, Artificial
  probe
  misc_feature (1)..(25): SEQ ID NO: 5808; WAN024DPY_at; Start 6; Stop 30
catctctttccagttacaaaaacaa

SEQ ID NO: 167157 - DNA, 25 bp, Artificial
  probe
  misc_feature (1)..(25): SEQ ID NO: 5808; WAN024DPY_at; Start 65; Stop 89
agcaggcgcatttcaagaatcataa

SEQ ID NO: 167158 - DNA, 25 bp, Artificial
  probe
  misc_feature (1)..(25): SEQ ID NO: 5808; WAN024DPY_at; Start 67; Stop 91
caggcgcatttcaagaatcataaat

SEQ ID NO: 167159 - DNA, 25 bp, Artificial
  probe
  misc_feature (1)..(25): SEQ ID NO: 5808; WAN024DPY_at; Start 56; Stop 80
tagccttaaagcaggcgcatttcaa

SEQ ID NO: 167160 - DNA, 25 bp, Artificial
  probe
  misc_feature (1)..(25): SEQ ID NO: 5808; WAN024DPY_at; Start 61; Stop 85
ttaaagcaggcgcatttcaagaatc

SEQ ID NO: 167161 - DNA, 25 bp, Artificial
  probe
  misc_feature (1)..(25): SEQ ID NO: 5808; WAN024DPY_at; Start 45; Stop 69
tacgtctagtttagccttaaagcag

SEQ ID NO: 167162 - DNA, 25 bp, Artificial
  probe
  misc_feature (1)..(25): SEQ ID NO: 5808; WAN024DPY_at; Start 29; Stop 53
aaactcttaactttgatacgtctag

SEQ ID NO: 167163 - DNA, 25 bp, Artificial
  probe
  misc_feature (1)..(25): SEQ ID NO: 5808; WAN024DPY_at; Start 36; Stop 60
taactttgatacgtctagtttagcc

SEQ ID NO: 167164 - DNA, 25 bp, Artificial
  probe
  misc_feature (1)..(25): SEQ ID NO: 5808; WAN024DPY_at; Start 66; Stop 90
gcaggcgcatttcaagaatcataaa

SEQ ID NO: 167165 - DNA, 25 bp, Artificial
  probe
  misc_feature (1)..(25): SEQ ID NO: 5808; WAN024DPY_at; Start 43; Stop 67
gatacgtctagtttagccttaaagc

SEQ ID NO: 167166 - DNA, 25 bp, Artificial
  probe
  misc_feature (1)..(25): SEQ ID NO: 5808; WAN024DPY_at; Start 85; Stop 109
cataaattaagagaaggaagtagat

SEQ ID NO: 167167 - DNA, 25 bp, Artificial
  probe
  misc_feature (1)..(25): SEQ ID NO: 5808; WAN024DPY_at; Start 37; Stop 61
aactttgatacgtctagtttagcct

SEQ ID NO: 167168 - DNA, 25 bp, Artificial
  probe
  misc_feature (1)..(25): SEQ ID NO: 5808; WAN024DPY_at; Start 69; Stop 93
ggcgcatttcaagaatcataaatta

SEQ ID NO: 167169 - DNA, 25 bp, Artificial
  probe
  misc_feature (1)..(25): SEQ ID NO: 5808; WAN024DPY_at; Start 52; Stop 76
agtttagccttaaagcaggcgcatt

SEQ ID NO: 167170 - DNA, 25 bp, Artificial
  probe
  misc_feature (1)..(25): SEQ ID NO: 5808; WAN024DPY_at; Start 62; Stop 86
taaagcaggcgcatttcaagaatca

SEQ ID NO: 167171 - DNA, 25 bp, Artificial
  probe
  misc_feature (1)..(25): SEQ ID NO: 5808; WAN024DPY_at; Start 81; Stop 105
gaatcataaattaagagaaggaagt

SEQ ID NO: 167172 - DNA, 25 bp, Artificial
  probe
  misc_feature (1)..(25): SEQ ID NO: 5808; WAN024DPY_at; Start 50; Stop 74
ctagtttagccttaaagcaggcgca

SEQ ID NO: 167173 - DNA, 25 bp, Artificial
  probe
  misc_feature (1)..(25): SEQ ID NO: 5808; WAN024DPY_at; Start 63; Stop 87
aaagcaggcgcatttcaagaatcat

SEQ ID NO: 167174 - DNA, 25 bp, Artificial
  probe
  misc_feature (1)..(25): SEQ ID NO: 5808; WAN024DPY_at; Start 2; Stop 26
tgttcatctctttccagttacaaaa

SEQ ID NO: 167175 - DNA, 25 bp, Artificial
  probe
  misc_feature (1)..(25): SEQ ID NO: 5808; WAN024DPY_at; Start 57; Stop 81
agccttaaagcaggcgcatttcaag

SEQ ID NO: 167176 - DNA, 25 bp, Artificial
  probe
  misc_feature (1)..(25): SEQ ID NO: 5808; WAN024DPY_at; Start 39; Stop 63
ctttgatacgtctagtttagcctta

SEQ ID NO: 167177 - DNA, 25 bp, Artificial
  probe
  misc_feature (1)..(25): SEQ ID NO: 1115; WAN024DPZ_at; Start 227; Stop 251
cctctgttgatgaagccaatatcaa

SEQ ID NO: 167178 - DNA, 25 bp, Artificial
  probe
  misc_feature (1)..(25): SEQ ID NO: 1115; WAN024DPZ_at; Start 137; Stop 161
aaatcctcatctcaaacaaacaccg

SEQ ID NO: 167179 - DNA, 25 bp, Artificial
  probe
  misc_feature (1)..(25): SEQ ID NO: 1115; WAN024DPZ_at; Start 126; Stop 150
gcttcactatgaaatcctcatctca

SEQ ID NO: 167180 - DNA, 25 bp, Artificial
  probe
  misc_feature (1)..(25): SEQ ID NO: 1115; WAN024DPZ_at; Start 13; Stop 37
aatacgacaaactcacactcgcaac

SEQ ID NO: 167181 - DNA, 25 bp, Artificial
  probe
  misc_feature (1)..(25): SEQ ID NO: 1115; WAN024DPZ_at; Start 157; Stop 181
caccgtgctattcgtgagcctgaaa

SEQ ID NO: 167182 - DNA, 25 bp, Artificial
  probe
  misc_feature (1)..(25): SEQ ID NO: 1115; WAN024DPZ_at; Start 79; Stop 103
gaggtttattctgcagggaatacag

SEQ ID NO: 167183 - DNA, 25 bp, Artificial
  probe
  misc_feature (1)..(25): SEQ ID NO: 1115; WAN024DPZ_at; Start 62; Stop 86
ccgatgcaacccttgttgaggttta

SEQ ID NO: 167184 - DNA, 25 bp, Artificial
  probe
  misc_feature (1)..(25): SEQ ID NO: 1115; WAN024DPZ_at; Start 267; Stop 291
gaaattaattggaatttcaatccca

SEQ ID NO: 167185 - DNA, 25 bp, Artificial
  probe
  misc_feature (1)..(25): SEQ ID NO: 1115; WAN024DPZ_at; Start 103; Stop 127
gatgttatttttacccaagctccgc

SEQ ID NO: 167186 - DNA, 25 bp, Artificial
  probe
  misc_feature (1)..(25): SEQ ID NO: 1115; WAN024DPZ_at; Start 235; Stop 259
gatgaagccaatatcaagacactct

SEQ ID NO: 167187 - DNA, 25 bp, Artificial
  probe
  misc_feature (1)..(25): SEQ ID NO: 1115; WAN024DPZ_at; Start 238; Stop 262
gaagccaatatcaagacactctact

SEQ ID NO: 167188 - DNA, 25 bp, Artificial
  probe
  misc_feature (1)..(25): SEQ ID NO: 1115; WAN024DPZ_at; Start 143; Stop 167
tcatctcaaacaaacaccgtgctat

SEQ ID NO: 167189 - DNA, 25 bp, Artificial
  probe
  misc_feature (1)..(25): SEQ ID NO: 1115; WAN024DPZ_at; Start 243; Stop 267
caatatcaagacactctactcagag

SEQ ID NO: 167190 - DNA, 25 bp, Artificial
  probe
  misc_feature (1)..(25): SEQ ID NO: 1115; WAN024DPZ_at; Start 281; Stop 305
tttcaatcccaatcaagtaactaat

SEQ ID NO: 167191 - DNA, 25 bp, Artificial
  probe
  misc_feature (1)..(25): SEQ ID NO: 1115; WAN024DPZ_at; Start 55; Stop 79
gaaagtaccgatgcaacccttgttg

SEQ ID NO: 167192 - DNA, 25 bp, Artificial
  probe
  misc_feature (1)..(25): SEQ ID NO: 1115; WAN024DPZ_at; Start 183; Stop 207
cgaaaccattcaagaatttttcttg

SEQ ID NO: 167193 - DNA, 25 bp, Artificial
  probe
  misc_feature (1)..(25): SEQ ID NO: 1115; WAN024DPZ_at; Start 153; Stop 177
caaacaccgtgctattcgtgagcct

SEQ ID NO: 167194 - DNA, 25 bp, Artificial
  probe
  misc_feature (1)..(25): SEQ ID NO: 1115; WAN024DPZ_at; Start 88; Stop 112
tctgcagggaatacagatgttattt

SEQ ID NO: 167195 - DNA, 25 bp, Artificial
  probe
  misc_feature (1)..(25): SEQ ID NO: 1115; WAN024DPZ_at; Start 174; Stop 198
gcctgaaatcgaaaccattcaagaa

SEQ ID NO: 167196 - DNA, 25 bp, Artificial
  probe
  misc_feature (1)..(25): SEQ ID NO: 1115; WAN024DPZ_at; Start 276; Stop 300
tggaatttcaatcccaatcaagtaa

SEQ ID NO: 167197 - DNA, 25 bp, Artificial
  probe
  misc_feature (1)..(25): SEQ ID NO: 1115; WAN024DPZ_at; Start 118; Stop 142
caagctccgcttcactatgaaatcc

SEQ ID NO: 167198 - DNA, 25 bp, Artificial
  probe
  misc_feature (1)..(25): SEQ ID NO: 1115; WAN024DPZ_at; Start 85; Stop 109
tattctgcagggaatacagatgtta

SEQ ID NO: 167199 - DNA, 25 bp, Artificial
  probe
  misc_feature (1)..(25): SEQ ID NO: 1115; WAN024DPZ_at; Start 169; Stop 193
cgtgagcctgaaatcgaaaccattc

SEQ ID NO: 167200 - DNA, 25 bp, Artificial
  probe
  misc_feature (1)..(25): SEQ ID NO: 1115; WAN024DPZ_at; Start 52; Stop 76
ctagaaagtaccgatgcaacccttg

SEQ ID NO: 167201 - DNA, 25 bp, Artificial
  probe
  misc_feature (1)..(25): SEQ ID NO: 1115; WAN024DPZ_at; Start 9; Stop 33
tatcaatacgacaaactcacactcg

SEQ ID NO: 167202 - DNA, 25 bp, Artificial
  probe
  misc_feature (1)..(25): SEQ ID NO: 1115; WAN024DPZ_at; Start 68; Stop 92
caacccttgttgaggtttattctgc

SEQ ID NO: 167203 - DNA, 25 bp, Artificial
  probe
  misc_feature (1)..(25): SEQ ID NO: 1115; WAN024DPZ_at; Start 2; Stop 26
tgaagcttatcaatacgacaaactc

SEQ ID NO: 167204 - DNA, 25 bp, Artificial
  probe
  misc_feature (1)..(25): SEQ ID NO: 1115; WAN024DPZ_at; Start 58; Stop 82
agtaccgatgcaacccttgttgagg

SEQ ID NO: 167205 - DNA, 25 bp, Artificial
  probe
  misc_feature (1)..(25): SEQ ID NO: 1115; WAN024DPZ_at; Start 254; Stop 278
cactctactcagagaaattaattgg

SEQ ID NO: 167206 - DNA, 25 bp, Artificial
  probe
  misc_feature (1)..(25): SEQ ID NO: 1115; WAN024DPZ_at; Start 248; Stop 272
tcaagacactctactcagagaaatt

SEQ ID NO: 167207 - DNA, 25 bp, Artificial
  probe
  misc_feature (1)..(25): SEQ ID NO: 1115; WAN024DPZ_at; Start 108; Stop 132
tatttttacccaagctccgcttcac

SEQ ID NO: 167208 - DNA, 25 bp, Artificial
  probe
  misc_feature (1)..(25): SEQ ID NO: 1115; WAN024DPZ_at; Start 165; Stop 189
tattcgtgagcctgaaatcgaaacc

SEQ ID NO: 167209 - DNA, 25 bp, Artificial
  probe
  misc_feature (1)..(25): SEQ ID NO: 1115; WAN024DPZ_at; Start 73; Stop 97
cttgttgaggtttattctgcaggga

SEQ ID NO: 167210 - DNA, 25 bp, Artificial
  probe
  misc_feature (1)..(25): SEQ ID NO: 1115; WAN024DPZ_at; Start 160; Stop 184
cgtgctattcgtgagcctgaaatcg

SEQ ID NO: 167211 - DNA, 25 bp, Artificial
  probe
  misc_feature (1)..(25): SEQ ID NO: 4195; WAN024DQ2_at; Start 44; Stop 68
gacttattggactttctctcaaatc

SEQ ID NO: 167212 - DNA, 25 bp, Artificial
  probe
  misc_feature (1)..(25): SEQ ID NO: 4195; WAN024DQ2_at; Start 80; Stop 104
caattttcttacttgattgggattg

SEQ ID NO: 167213 - DNA, 25 bp, Artificial
  probe
  misc_feature (1)..(25): SEQ ID NO: 4195; WAN024DQ2_at; Start 53; Stop 77
gactttctctcaaatcgagttttta

SEQ ID NO: 167214 - DNA, 25 bp, Artificial
  probe
  misc_feature (1)..(25): SEQ ID NO: 4195; WAN024DQ2_at; Start 88; Stop 112
ttacttgattgggattgaaattcca

SEQ ID NO: 167215 - DNA, 25 bp, Artificial
  probe
  misc_feature (1)..(25): SEQ ID NO: 4195; WAN024DQ2_at; Start 49; Stop 73
attggactttctctcaaatcgagtt

SEQ ID NO: 167216 - DNA, 25 bp, Artificial
  probe
  misc_feature (1)..(25): SEQ ID NO: 4195; WAN024DQ2_at; Start 89; Stop 113
tacttgattgggattgaaattccaa

SEQ ID NO: 167217 - DNA, 25 bp, Artificial
  probe
  misc_feature (1)..(25): SEQ ID NO: 4195; WAN024DQ2_at; Start 50; Stop 74
ttggactttctctcaaatcgagttt

SEQ ID NO: 167218 - DNA, 25 bp, Artificial
  probe
  misc_feature (1)..(25): SEQ ID NO: 4195; WAN024DQ2_at; Start 47; Stop 71
ttattggactttctctcaaatcgag

SEQ ID NO: 167219 - DNA, 25 bp, Artificial
  probe
  misc_feature (1)..(25): SEQ ID NO: 4195; WAN024DQ2_at; Start 61; Stop 85
ctcaaatcgagtttttactcaattt

SEQ ID NO: 167220 - DNA, 25 bp, Artificial
  probe
  misc_feature (1)..(25): SEQ ID NO: 4195; WAN024DQ2_at; Start 42; Stop 66
aagacttattggactttctctcaaa

SEQ ID NO: 167221 - DNA, 25 bp, Artificial
  probe
  misc_feature (1)..(25): SEQ ID NO: 4195; WAN024DQ2_at; Start 106; Stop 130
aattccaattaatttctctgagcta

SEQ ID NO: 167222 - DNA, 25 bp, Artificial
  probe
  misc_feature (1)..(25): SEQ ID NO: 4195; WAN024DQ2_at; Start 58; Stop 82
tctctcaaatcgagtttttactcaa

SEQ ID NO: 167223 - DNA, 25 bp, Artificial
  probe
  misc_feature (1)..(25): SEQ ID NO: 4195; WAN024DQ2_at; Start 60; Stop 84
tctcaaatcgagtttttactcaatt

SEQ ID NO: 167224 - DNA, 25 bp, Artificial
  probe
  misc_feature (1)..(25): SEQ ID NO: 4195; WAN024DQ2_at; Start 90; Stop 114
acttgattgggattgaaattccaat

SEQ ID NO: 167225 - DNA, 25 bp, Artificial
  probe
  misc_feature (1)..(25): SEQ ID NO: 4195; WAN024DQ2_at; Start 51; Stop 75
tggactttctctcaaatcgagtttt

SEQ ID NO: 167226 - DNA, 25 bp, Artificial
  probe
  misc_feature (1)..(25): SEQ ID NO: 4195; WAN024DQ2_at; Start 78; Stop 102
ctcaattttcttacttgattgggat

SEQ ID NO: 167227 - DNA, 25 bp, Artificial
  probe
  misc_feature (1)..(25): SEQ ID NO: 4195; WAN024DQ2_at; Start 81; Stop 105
aattttcttacttgattgggattga

SEQ ID NO: 167228 - DNA, 25 bp, Artificial
  probe
  misc_feature (1)..(25): SEQ ID NO: 4195; WAN024DQ2_at; Start 43; Stop 67
agacttattggactttctctcaaat

SEQ ID NO: 167229 - DNA, 25 bp, Artificial
  probe
  misc_feature (1)..(25): SEQ ID NO: 4195; WAN024DQ2_at; Start 97; Stop 121
tgggattgaaattccaattaatttc

SEQ ID NO: 167230 - DNA, 25 bp, Artificial
  probe
  misc_feature (1)..(25): SEQ ID NO: 4195; WAN024DQ2_at; Start 46; Stop 70
cttattggactttctctcaaatcga

SEQ ID NO: 167231 - DNA, 25 bp, Artificial
  probe
  misc_feature (1)..(25): SEQ ID NO: 4195; WAN024DQ2_at; Start 77; Stop 101
actcaattttcttacttgattggga

SEQ ID NO: 167232 - DNA, 25 bp, Artificial
  probe
  misc_feature (1)..(25): SEQ ID NO: 4195; WAN024DQ2_at; Start 82; Stop 106
attttcttacttgattgggattgaa

SEQ ID NO: 167233 - DNA, 25 bp, Artificial
  probe
  misc_feature (1)..(25): SEQ ID NO: 4195; WAN024DQ2_at; Start 45; Stop 69
acttattggactttctctcaaatcg

SEQ ID NO: 167234 - DNA, 25 bp, Artificial
  probe
  misc_feature (1)..(25): SEQ ID NO: 4195; WAN024DQ2_at; Start 55; Stop 79
ctttctctcaaatcgagtttttact

SEQ ID NO: 167235 - DNA, 25 bp, Artificial
  probe
  misc_feature (1)..(25): SEQ ID NO: 4195; WAN024DQ2_at; Start 104; Stop 128
gaaattccaattaatttctctgagc

SEQ ID NO: 167236 - DNA, 25 bp, Artificial
  probe
  misc_feature (1)..(25): SEQ ID NO: 4195; WAN024DQ2_at; Start 48; Stop 72
tattggactttctctcaaatcgagt

SEQ ID NO: 167237 - DNA, 25 bp, Artificial
  probe
  misc_feature (1)..(25): SEQ ID NO: 4195; WAN024DQ2_at; Start 59; Stop 83
ctctcaaatcgagtttttactcaat

SEQ ID NO: 167238 - DNA, 25 bp, Artificial
  probe
  misc_feature (1)..(25): SEQ ID NO: 4195; WAN024DQ2_at; Start 57; Stop 81
ttctctcaaatcgagtttttactca

SEQ ID NO: 167239 - DNA, 25 bp, Artificial
  probe
  misc_feature (1)..(25): SEQ ID NO: 4195; WAN024DQ2_at; Start 91; Stop 115
cttgattgggattgaaattccaatt

SEQ ID NO: 167240 - DNA, 25 bp, Artificial
  probe
  misc_feature (1)..(25): SEQ ID NO: 4195; WAN024DQ2_at; Start 76; Stop 100
tactcaattttcttacttgattggg

SEQ ID NO: 167241 - DNA, 25 bp, Artificial
  probe
  misc_feature (1)..(25): SEQ ID NO: 4195; WAN024DQ2_at; Start 93; Stop 117
tgattgggattgaaattccaattaa

SEQ ID NO: 167242 - DNA, 25 bp, Artificial
  probe
  misc_feature (1)..(25): SEQ ID NO: 4195; WAN024DQ2_at; Start 41; Stop 65
aaagacttattggactttctctcaa

SEQ ID NO: 167243 - DNA, 25 bp, Artificial
  probe
  misc_feature (1)..(25): SEQ ID NO: 4195; WAN024DQ2_at; Start 40; Stop 64
gaaagacttattggactttctctca

SEQ ID NO: 167244 - DNA, 25 bp, Artificial
  probe
  misc_feature (1)..(25): SEQ ID NO: 4195; WAN024DQ2_at; Start 86; Stop 110
tcttacttgattgggattgaaattc

SEQ ID NO: 167245 - DNA, 25 bp, Artificial
  probe
  misc_feature (1)..(25): SEQ ID NO: 5420; WAN024DQ3_at; Start 63; Stop 87
gtgggtagaccttgcgaaattcttc

SEQ ID NO: 167246 - DNA, 25 bp, Artificial
  probe
  misc_feature (1)..(25): SEQ ID NO: 5420; WAN024DQ3_at; Start 60; Stop 84
acagtgggtagaccttgcgaaattc

SEQ ID NO: 167247 - DNA, 25 bp, Artificial
  probe
  misc_feature (1)..(25): SEQ ID NO: 5420; WAN024DQ3_at; Start 46; Stop 70
ccttctaatagtctacagtgggtag

SEQ ID NO: 167248 - DNA, 25 bp, Artificial
  probe
  misc_feature (1)..(25): SEQ ID NO: 5420; WAN024DQ3_at; Start 52; Stop 76
aatagtctacagtgggtagaccttg

SEQ ID NO: 167249 - DNA, 25 bp, Artificial
  probe
  misc_feature (1)..(25): SEQ ID NO: 5420; WAN024DQ3_at; Start 45; Stop 69
tccttctaatagtctacagtgggta

SEQ ID NO: 167250 - DNA, 25 bp, Artificial
  probe
  misc_feature (1)..(25): SEQ ID NO: 5420; WAN024DQ3_at; Start 13; Stop 37
aaaggattggacagcgatttccaaa

SEQ ID NO: 167251 - DNA, 25 bp, Artificial
  probe
  misc_feature (1)..(25): SEQ ID NO: 5420; WAN024DQ3_at; Start 17; Stop 41
gattggacagcgatttccaaaactt

SEQ ID NO: 167252 - DNA, 25 bp, Artificial
  probe
  misc_feature (1)..(25): SEQ ID NO: 5420; WAN024DQ3_at; Start 56; Stop 80
gtctacagtgggtagaccttgcgaa

SEQ ID NO: 167253 - DNA, 25 bp, Artificial
  probe
  misc_feature (1)..(25): SEQ ID NO: 5420; WAN024DQ3_at; Start 22; Stop 46
gacagcgatttccaaaactttcttc

SEQ ID NO: 167254 - DNA, 25 bp, Artificial
  probe
  misc_feature (1)..(25): SEQ ID NO: 5420; WAN024DQ3_at; Start 42; Stop 66
tcttccttctaatagtctacagtgg

SEQ ID NO: 167255 - DNA, 25 bp, Artificial
  probe
  misc_feature (1)..(25): SEQ ID NO: 5420; WAN024DQ3_at; Start 53; Stop 77
atagtctacagtgggtagaccttgc

SEQ ID NO: 167256 - DNA, 25 bp, Artificial
  probe
  misc_feature (1)..(25): SEQ ID NO: 5420; WAN024DQ3_at; Start 19; Stop 43
ttggacagcgatttccaaaactttc

SEQ ID NO: 167257 - DNA, 25 bp, Artificial
  probe
  misc_feature (1)..(25): SEQ ID NO: 5420; WAN024DQ3_at; Start 61; Stop 85
cagtgggtagaccttgcgaaattct

SEQ ID NO: 167258 - DNA, 25 bp, Artificial
  probe
  misc_feature (1)..(25): SEQ ID NO: 5420; WAN024DQ3_at; Start 48; Stop 72
ttctaatagtctacagtgggtagac

SEQ ID NO: 167259 - DNA, 25 bp, Artificial
  probe
  misc_feature (1)..(25): SEQ ID NO: 5420; WAN024DQ3_at; Start 20; Stop 44
tggacagcgatttccaaaactttct

SEQ ID NO: 167260 - DNA, 25 bp, Artificial
  probe
  misc_feature (1)..(25): SEQ ID NO: 5420; WAN024DQ3_at; Start 62; Stop 86
agtgggtagaccttgcgaaattctt

SEQ ID NO: 167261 - DNA, 25 bp, Artificial
  probe
  misc_feature (1)..(25): SEQ ID NO: 5420; WAN024DQ3_at; Start 57; Stop 81
tctacagtgggtagaccttgcgaaa

SEQ ID NO: 167262 - DNA, 25 bp, Artificial
  probe
  misc_feature (1)..(25): SEQ ID NO: 5420; WAN024DQ3_at; Start 49; Stop 73
tctaatagtctacagtgggtagacc

SEQ ID NO: 167263 - DNA, 25 bp, Artificial
  probe
  misc_feature (1)..(25): SEQ ID NO: 5420; WAN024DQ3_at; Start 51; Stop 75
taatagtctacagtgggtagacctt

SEQ ID NO: 167264 - DNA, 25 bp, Artificial
  probe
  misc_feature (1)..(25): SEQ ID NO: 5420; WAN024DQ3_at; Start 16; Stop 40
ggattggacagcgatttccaaaact

SEQ ID NO: 167265 - DNA, 25 bp, Artificial
  probe
  misc_feature (1)..(25): SEQ ID NO: 5420; WAN024DQ3_at; Start 11; Stop 35
aaaaaggattggacagcgatttcca

SEQ ID NO: 167266 - DNA, 25 bp, Artificial
  probe
  misc_feature (1)..(25): SEQ ID NO: 5420; WAN024DQ3_at; Start 12; Stop 36
aaaaggattggacagcgatttccaa

SEQ ID NO: 167267 - DNA, 25 bp, Artificial
  probe
  misc_feature (1)..(25): SEQ ID NO: 5420; WAN024DQ3_at; Start 39; Stop 63
ctttcttccttctaatagtctacag

SEQ ID NO: 167268 - DNA, 25 bp, Artificial
  probe
  misc_feature (1)..(25): SEQ ID NO: 5420; WAN024DQ3_at; Start 50; Stop 74
ctaatagtctacagtgggtagacct

SEQ ID NO: 167269 - DNA, 25 bp, Artificial
  probe
  misc_feature (1)..(25): SEQ ID NO: 5420; WAN024DQ3_at; Start 24; Stop 48
cagcgatttccaaaactttcttcct

SEQ ID NO: 167270 - DNA, 25 bp, Artificial
  probe
  misc_feature (1)..(25): SEQ ID NO: 5420; WAN024DQ3_at; Start 41; Stop 65
ttcttccttctaatagtctacagtg

SEQ ID NO: 167271 - DNA, 25 bp, Artificial
  probe
  misc_feature (1)..(25): SEQ ID NO: 5420; WAN024DQ3_at; Start 59; Stop 83
tacagtgggtagaccttgcgaaatt

SEQ ID NO: 167272 - DNA, 25 bp, Artificial
  probe
  misc_feature (1)..(25): SEQ ID NO: 5420; WAN024DQ3_at; Start 47; Stop 71
cttctaatagtctacagtgggtaga

SEQ ID NO: 167273 - DNA, 25 bp, Artificial
  probe
  misc_feature (1)..(25): SEQ ID NO: 5420; WAN024DQ3_at; Start 14; Stop 38
aaggattggacagcgatttccaaaa

SEQ ID NO: 167274 - DNA, 25 bp, Artificial
  probe
  misc_feature (1)..(25): SEQ ID NO: 5420; WAN024DQ3_at; Start 55; Stop 79
agtctacagtgggtagaccttgcga

SEQ ID NO: 167275 - DNA, 25 bp, Artificial
  probe
  misc_feature (1)..(25): SEQ ID NO: 5420; WAN024DQ3_at; Start 43; Stop 67
cttccttctaatagtctacagtggg

SEQ ID NO: 167276 - DNA, 25 bp, Artificial
  probe
  misc_feature (1)..(25): SEQ ID NO: 5420; WAN024DQ3_at; Start 18; Stop 42
attggacagcgatttccaaaacttt

SEQ ID NO: 167277 - DNA, 25 bp, Artificial
  probe
  misc_feature (1)..(25): SEQ ID NO: 5420; WAN024DQ3_at; Start 44; Stop 68
ttccttctaatagtctacagtgggt

SEQ ID NO: 167278 - DNA, 25 bp, Artificial
  probe
  misc_feature (1)..(25): SEQ ID NO: 5420; WAN024DQ3_at; Start 58; Stop 82
ctacagtgggtagaccttgcgaaat

SEQ ID NO: 167279 - DNA, 25 bp, Artificial
  probe
  misc_feature (1)..(25): SEQ ID NO: 1896; WAN024DQ4_at; Start 119; Stop 143
gagaaaagacagcaacagcatcagc

SEQ ID NO: 167280 - DNA, 25 bp, Artificial
  probe
  misc_feature (1)..(25): SEQ ID NO: 1896; WAN024DQ4_at; Start 84; Stop 108
tgaaccagaccttttagcggatttg

SEQ ID NO: 167281 - DNA, 25 bp, Artificial
  probe
  misc_feature (1)..(25): SEQ ID NO: 1896; WAN024DQ4_at; Start 107; Stop 131
tggtgtttaaaggagaaaagacagc

SEQ ID NO: 167282 - DNA, 25 bp, Artificial
  probe
  misc_feature (1)..(25): SEQ ID NO: 1896; WAN024DQ4_at; Start 118; Stop 142
ggagaaaagacagcaacagcatcag

SEQ ID NO: 167283 - DNA, 25 bp, Artificial
  probe
  misc_feature (1)..(25): SEQ ID NO: 1896; WAN024DQ4_at; Start 122; Stop 146
aaaagacagcaacagcatcagccta

SEQ ID NO: 167284 - DNA, 25 bp, Artificial
  probe
  misc_feature (1)..(25): SEQ ID NO: 1896; WAN024DQ4_at; Start 128; Stop 152
cagcaacagcatcagcctatgacct

SEQ ID NO: 167285 - DNA, 25 bp, Artificial
  probe
  misc_feature (1)..(25): SEQ ID NO: 1896; WAN024DQ4_at; Start 409; Stop 433
ttagaagaatttcgcaaggtctacc

SEQ ID NO: 167286 - DNA, 25 bp, Artificial
  probe
  misc_feature (1)..(25): SEQ ID NO: 1896; WAN024DQ4_at; Start 416; Stop 440
aatttcgcaaggtctacccactgta

SEQ ID NO: 167287 - DNA, 25 bp, Artificial
  probe
  misc_feature (1)..(25): SEQ ID NO: 1896; WAN024DQ4_at; Start 227; Stop 251
tctgcattgtcgaaattacaaaggt

SEQ ID NO: 167288 - DNA, 25 bp, Artificial
  probe
  misc_feature (1)..(25): SEQ ID NO: 1896; WAN024DQ4_at; Start 98; Stop 122
tagcggatttggtgtttaaaggaga

SEQ ID NO: 167289 - DNA, 25 bp, Artificial
  probe
  misc_feature (1)..(25): SEQ ID NO: 1896; WAN024DQ4_at; Start 88; Stop 112
ccagaccttttagcggatttggtgt

SEQ ID NO: 167290 - DNA, 25 bp, Artificial
  probe
  misc_feature (1)..(25): SEQ ID NO: 1896; WAN024DQ4_at; Start 414; Stop 438
agaatttcgcaaggtctacccactg

SEQ ID NO: 167291 - DNA, 25 bp, Artificial
  probe
  misc_feature (1)..(25): SEQ ID NO: 1896; WAN024DQ4_at; Start 415; Stop 439
gaatttcgcaaggtctacccactgt

SEQ ID NO: 167292 - DNA, 25 bp, Artificial
  probe
  misc_feature (1)..(25): SEQ ID NO: 1896; WAN024DQ4_at; Start 392; Stop 416
ctgaaagcaaggttgttttagaaga

SEQ ID NO: 167293 - DNA, 25 bp, Artificial
  probe
  misc_feature (1)..(25): SEQ ID NO: 1896; WAN024DQ4_at; Start 230; Stop 254
gcattgtcgaaattacaaaggtttc

SEQ ID NO: 167294 - DNA, 25 bp, Artificial
  probe
  misc_feature (1)..(25): SEQ ID NO: 1896; WAN024DQ4_at; Start 78; Stop 102
tggagttgaaccagaccttttagcg

SEQ ID NO: 167295 - DNA, 25 bp, Artificial
  probe
  misc_feature (1)..(25): SEQ ID NO: 1896; WAN024DQ4_at; Start 224; Stop 248
ctgtctgcattgtcgaaattacaaa

SEQ ID NO: 167296 - DNA, 25 bp, Artificial
  probe
  misc_feature (1)..(25): SEQ ID NO: 1896; WAN024DQ4_at; Start 116; Stop 140
aaggagaaaagacagcaacagcatc

SEQ ID NO: 167297 - DNA, 25 bp, Artificial
  probe
  misc_feature (1)..(25): SEQ ID NO: 1896; WAN024DQ4_at; Start 232; Stop 256
attgtcgaaattacaaaggtttctg

SEQ ID NO: 167298 - DNA, 25 bp, Artificial
  probe
  misc_feature (1)..(25): SEQ ID NO: 1896; WAN024DQ4_at; Start 114; Stop 138
taaaggagaaaagacagcaacagca

SEQ ID NO: 167299 - DNA, 25 bp, Artificial
  probe
  misc_feature (1)..(25): SEQ ID NO: 1896; WAN024DQ4_at; Start 412; Stop 436
gaagaatttcgcaaggtctacccac

SEQ ID NO: 167300 - DNA, 25 bp, Artificial
  probe
  misc_feature (1)..(25): SEQ ID NO: 1896; WAN024DQ4_at; Start 80; Stop 104
gagttgaaccagaccttttagcgga

SEQ ID NO: 167301 - DNA, 25 bp, Artificial
  probe
  misc_feature (1)..(25): SEQ ID NO: 1896; WAN024DQ4_at; Start 405; Stop 429
tgttttagaagaatttcgcaaggtc

SEQ ID NO: 167302 - DNA, 25 bp, Artificial
  probe
  misc_feature (1)..(25): SEQ ID NO: 1896; WAN024DQ4_at; Start 113; Stop 137
ttaaaggagaaaagacagcaacagc

SEQ ID NO: 167303 - DNA, 25 bp, Artificial
  probe
  misc_feature (1)..(25): SEQ ID NO: 1896; WAN024DQ4_at; Start 81; Stop 105
agttgaaccagaccttttagcggat

SEQ ID NO: 167304 - DNA, 25 bp, Artificial
  probe
  misc_feature (1)..(25): SEQ ID NO: 1896; WAN024DQ4_at; Start 110; Stop 134
tgtttaaaggagaaaagacagcaac

SEQ ID NO: 167305 - DNA, 25 bp, Artificial
  probe
  misc_feature (1)..(25): SEQ ID NO: 1896; WAN024DQ4_at; Start 121; Stop 145
gaaaagacagcaacagcatcagcct

SEQ ID NO: 167306 - DNA, 25 bp, Artificial
  probe
  misc_feature (1)..(25): SEQ ID NO: 1896; WAN024DQ4_at; Start 413; Stop 437
aagaatttcgcaaggtctacccact

SEQ ID NO: 167307 - DNA, 25 bp, Artificial
  probe
  misc_feature (1)..(25): SEQ ID NO: 1896; WAN024DQ4_at; Start 70; Stop 94
tgggcttttggagttgaaccagacc

SEQ ID NO: 167308 - DNA, 25 bp, Artificial
  probe
  misc_feature (1)..(25): SEQ ID NO: 1896; WAN024DQ4_at; Start 124; Stop 148
aagacagcaacagcatcagcctatg

SEQ ID NO: 167309 - DNA, 25 bp, Artificial
  probe
  misc_feature (1)..(25): SEQ ID NO: 1896; WAN024DQ4_at; Start 411; Stop 435
agaagaatttcgcaaggtctaccca

SEQ ID NO: 167310 - DNA, 25 bp, Artificial
  probe
  misc_feature (1)..(25): SEQ ID NO: 1896; WAN024DQ4_at; Start 77; Stop 101
ttggagttgaaccagaccttttagc

SEQ ID NO: 167311 - DNA, 25 bp, Artificial
  probe
  misc_feature (1)..(25): SEQ ID NO: 1896; WAN024DQ4_at; Start 126; Stop 150
gacagcaacagcatcagcctatgac

SEQ ID NO: 167312 - DNA, 25 bp, Artificial
  probe
  misc_feature (1)..(25): SEQ ID NO: 1896; WAN024DQ4_at; Start 125; Stop 149
agacagcaacagcatcagcctatga

SEQ ID NO: 167313 - DNA, 25 bp, Artificial
  probe
  misc_feature (1)..(25): SEQ ID NO: 2611; WAN024DQ5_at; Start 350; Stop 374
gtcgttacagaagtttatcaaacca

SEQ ID NO: 167314 - DNA, 25 bp, Artificial
  probe
  misc_feature (1)..(25): SEQ ID NO: 2611; WAN024DQ5_at; Start 397; Stop 421
tccttttgtcaatgatgccgaccaa

SEQ ID NO: 167315 - DNA, 25 bp, Artificial
  probe
  misc_feature (1)..(25): SEQ ID NO: 2611; WAN024DQ5_at; Start 646; Stop 670
tatgcaggataaagcaagaaagaac

SEQ ID NO: 167316 - DNA, 25 bp, Artificial
  probe
  misc_feature (1)..(25): SEQ ID NO: 2611; WAN024DQ5_at; Start 409; Stop 433
tgatgccgaccaattaaaacaagct

SEQ ID NO: 167317 - DNA, 25 bp, Artificial
  probe
  misc_feature (1)..(25): SEQ ID NO: 2611; WAN024DQ5_at; Start 529; Stop 553
gggcatttcaaagattgtagttgga

SEQ ID NO: 167318 - DNA, 25 bp, Artificial
  probe
  misc_feature (1)..(25): SEQ ID NO: 2611; WAN024DQ5_at; Start 477; Stop 501
cgatgattgaattaccgtcagcgta

SEQ ID NO: 167319 - DNA, 25 bp, Artificial
  probe
  misc_feature (1)..(25): SEQ ID NO: 2611; WAN024DQ5_at; Start 689; Stop 713
gcaggctatctgaatacttctttca

SEQ ID NO: 167320 - DNA, 25 bp, Artificial
  probe
  misc_feature (1)..(25): SEQ ID NO: 2611; WAN024DQ5_at; Start 217; Stop 241
tgaattaacgaatacagaagccaat

SEQ ID NO: 167321 - DNA, 25 bp, Artificial
  probe
  misc_feature (1)..(25): SEQ ID NO: 2611; WAN024DQ5_at; Start 569; Stop 593
tcctttgtttttgcgactatgagaa

SEQ ID NO: 167322 - DNA, 25 bp, Artificial
  probe
  misc_feature (1)..(25): SEQ ID NO: 2611; WAN024DQ5_at; Start 485; Stop 509
gaattaccgtcagcgtattttgact

SEQ ID NO: 167323 - DNA, 25 bp, Artificial
  probe
  misc_feature (1)..(25): SEQ ID NO: 2611; WAN024DQ5_at; Start 416; Stop 440
gaccaattaaaacaagctattacag

SEQ ID NO: 167324 - DNA, 25 bp, Artificial
  probe
  misc_feature (1)..(25): SEQ ID NO: 2611; WAN024DQ5_at; Start 341; Stop 365
gaagcacatgtcgttacagaagttt

SEQ ID NO: 167325 - DNA, 25 bp, Artificial
  probe
  misc_feature (1)..(25): SEQ ID NO: 2611; WAN024DQ5_at; Start 312; Stop 336
tactggcgtgtttggatgaatttca

SEQ ID NO: 167326 - DNA, 25 bp, Artificial
  probe
  misc_feature (1)..(25): SEQ ID NO: 2611; WAN024DQ5_at; Start 552; Stop 576
gaatgaatgatttgacttcctttgt

SEQ ID NO: 167327 - DNA, 25 bp, Artificial
  probe
  misc_feature (1)..(25): SEQ ID NO: 2611; WAN024DQ5_at; Start 614; Stop 638
gaaagtccaataatgttagatatgc

SEQ ID NO: 167328 - DNA, 25 bp, Artificial
  probe
  misc_feature (1)..(25): SEQ ID NO: 2611; WAN024DQ5_at; Start 748; Stop 772
tatccactacagttctattccagag

SEQ ID NO: 167329 - DNA, 25 bp, Artificial
  probe
  misc_feature (1)..(25): SEQ ID NO: 2611; WAN024DQ5_at; Start 721; Stop 745
aatgaatcagttgggtatcaagtgc

SEQ ID NO: 167330 - DNA, 25 bp, Artificial
  probe
  misc_feature (1)..(25): SEQ ID NO: 2611; WAN024DQ5_at; Start 586; Stop 610
tatgagaaacagtcaatggcatgat

SEQ ID NO: 167331 - DNA, 25 bp, Artificial
  probe
  misc_feature (1)..(25): SEQ ID NO: 2611; WAN024DQ5_at; Start 16; Stop 40
tcaacttgcccttagtggcgaaaaa

SEQ ID NO: 167332 - DNA, 25 bp, Artificial
  probe
  misc_feature (1)..(25): SEQ ID NO: 2611; WAN024DQ5_at; Start 580; Stop 604
tgcgactatgagaaacagtcaatgg

SEQ ID NO: 167333 - DNA, 25 bp, Artificial
  probe
  misc_feature (1)..(25): SEQ ID NO: 2611; WAN024DQ5_at; Start 763; Stop 787
tattccagagatttttgatttagag

SEQ ID NO: 167334 - DNA, 25 bp, Artificial
  probe
  misc_feature (1)..(25): SEQ ID NO: 2611; WAN024DQ5_at; Start 630; Stop 654
tagatatgctaagagatatgcagga

SEQ ID NO: 167335 - DNA, 25 bp, Artificial
  probe
  misc_feature (1)..(25): SEQ ID NO: 2611; WAN024DQ5_at; Start 224; Stop 248
acgaatacagaagccaattgtttag

SEQ ID NO: 167336 - DNA, 25 bp, Artificial
  probe
  misc_feature (1)..(25): SEQ ID NO: 2611; WAN024DQ5_at; Start 787; Stop 811
gattgaccatccagatcatcttaaa

SEQ ID NO: 167337 - DNA, 25 bp, Artificial
  probe
  misc_feature (1)..(25): SEQ ID NO: 2611; WAN024DQ5_at; Start 800; Stop 824
gatcatcttaaacacataaaagaag

SEQ ID NO: 167338 - DNA, 25 bp, Artificial
  probe
  misc_feature (1)..(25): SEQ ID NO: 2611; WAN024DQ5_at; Start 521; Stop 545
ctggaaacgggcatttcaaagattg

SEQ ID NO: 167339 - DNA, 25 bp, Artificial
  probe
  misc_feature (1)..(25): SEQ ID NO: 2611; WAN024DQ5_at; Start 458; Stop 482
tttactgggaaagtcggaacgatga

SEQ ID NO: 167340 - DNA, 25 bp, Artificial
  probe
  misc_feature (1)..(25): SEQ ID NO: 2611; WAN024DQ5_at; Start 700; Stop 724
gaatacttctttcatacaaaaaatg

SEQ ID NO: 167341 - DNA, 25 bp, Artificial
  probe
  misc_feature (1)..(25): SEQ ID NO: 2611; WAN024DQ5_at; Start 468; Stop 492
aagtcggaacgatgattgaattacc

SEQ ID NO: 167342 - DNA, 25 bp, Artificial
  probe
  misc_feature (1)..(25): SEQ ID NO: 2611; WAN024DQ5_at; Start 652; Stop 676
ggataaagcaagaaagaacaagatt

SEQ ID NO: 167343 - DNA, 25 bp, Artificial
  probe
  misc_feature (1)..(25): SEQ ID NO: 2611; WAN024DQ5_at; Start 776; Stop 800
tttgatttagagattgaccatccag

SEQ ID NO: 167344 - DNA, 25 bp, Artificial
  probe
  misc_feature (1)..(25): SEQ ID NO: 2611; WAN024DQ5_at; Start 733; Stop 757
gggtatcaagtgcattatccactac

SEQ ID NO: 167345 - DNA, 25 bp, Artificial
  probe
  misc_feature (1)..(25): SEQ ID NO: 2611; WAN024DQ5_at; Start 682; Stop 706
tgctgtagcaggctatctgaatact

SEQ ID NO: 167346 - DNA, 25 bp, Artificial
  probe
  misc_feature (1)..(25): SEQ ID NO: 2611; WAN024DQ5_at; Start 51; Stop 75
aaatttatcctcaactatttcacca

SEQ ID NO: 167347 - DNA, 25 bp, Artificial
  probe
  misc_feature (1)..(25): SEQ ID NO: 3433; WAN024DQ6_at; Start 134; Stop 158
tggaggcagtcagcaacttggtgaa

SEQ ID NO: 167348 - DNA, 25 bp, Artificial
  probe
  misc_feature (1)..(25): SEQ ID NO: 3433; WAN024DQ6_at; Start 291; Stop 315
gccttgtatgatgttgaaatgaatg

SEQ ID NO: 167349 - DNA, 25 bp, Artificial
  probe
  misc_feature (1)..(25): SEQ ID NO: 3433; WAN024DQ6_at; Start 343; Stop 367
aagctgtgtctgatggtgcgaatga

SEQ ID NO: 167350 - DNA, 25 bp, Artificial
  probe
  misc_feature (1)..(25): SEQ ID NO: 3433; WAN024DQ6_at; Start 385; Stop 409
ggatggatattcaagagattacaga

SEQ ID NO: 167351 - DNA, 25 bp, Artificial
  probe
  misc_feature (1)..(25): SEQ ID NO: 3433; WAN024DQ6_at; Start 172; Stop 196
cgctgactagagaagttatggaaga

SEQ ID NO: 167352 - DNA, 25 bp, Artificial
  probe
  misc_feature (1)..(25): SEQ ID NO: 3433; WAN024DQ6_at; Start 139; Stop 163
gcagtcagcaacttggtgaaggact

SEQ ID NO: 167353 - DNA, 25 bp, Artificial
  probe
  misc_feature (1)..(25): SEQ ID NO: 3433; WAN024DQ6_at; Start 447; Stop 471
gaattattaggatttccagaactgg

SEQ ID NO: 167354 - DNA, 25 bp, Artificial
  probe
  misc_feature (1)..(25): SEQ ID NO: 3433; WAN024DQ6_at; Start 199; Stop 223
cgggatttactgttagaagctactc

SEQ ID NO: 167355 - DNA, 25 bp, Artificial
  probe
  misc_feature (1)..(25): SEQ ID NO: 3433; WAN024DQ6_at; Start 103; Stop 127
gaggcccttatcaacatcggtatga

SEQ ID NO: 167356 - DNA, 25 bp, Artificial
  probe
  misc_feature (1)..(25): SEQ ID NO: 3433; WAN024DQ6_at; Start 312; Stop 336
aatgagagtgcacctcaagttacga

SEQ ID NO: 167357 - DNA, 25 bp, Artificial
  probe
  misc_feature (1)..(25): SEQ ID NO: 3433; WAN024DQ6_at; Start 177; Stop 201
actagagaagttatggaagagacgg

SEQ ID NO: 167358 - DNA, 25 bp, Artificial
  probe
  misc_feature (1)..(25): SEQ ID NO: 3433; WAN024DQ6_at; Start 123; Stop 147
tatgatctacctggaggcagtcagc

SEQ ID NO: 167359 - DNA, 25 bp, Artificial
  probe
  misc_feature (1)..(25): SEQ ID NO: 3433; WAN024DQ6_at; Start 454; Stop 478
taggatttccagaactggacaagac

SEQ ID NO: 167360 - DNA, 25 bp, Artificial
  probe
  misc_feature (1)..(25): SEQ ID NO: 3433; WAN024DQ6_at; Start 100; Stop 124
cgagaggcccttatcaacatcggta

SEQ ID NO: 167361 - DNA, 25 bp, Artificial
  probe
  misc_feature (1)..(25): SEQ ID NO: 3433; WAN024DQ6_at; Start 192; Stop 216
gaagagacgggatttactgttagaa

SEQ ID NO: 167362 - DNA, 25 bp, Artificial
  probe
  misc_feature (1)..(25): SEQ ID NO: 3433; WAN024DQ6_at; Start 424; Stop 448
cattagtcttgaaggttaagtctga

SEQ ID NO: 167363 - DNA, 25 bp, Artificial
  probe
  misc_feature (1)..(25): SEQ ID NO: 3433; WAN024DQ6_at; Start 214; Stop 238
gaagctactctaatcctcgaatcta

SEQ ID NO: 167364 - DNA, 25 bp, Artificial
  probe
  misc_feature (1)..(25): SEQ ID NO: 3433; WAN024DQ6_at; Start 478; Stop 502
cttcttacatgaattggaaggtgaa

SEQ ID NO: 167365 - DNA, 25 bp, Artificial
  probe
  misc_feature (1)..(25): SEQ ID NO: 3433; WAN024DQ6_at; Start 353; Stop 377
tgatggtgcgaatgattcacttgga

SEQ ID NO: 167366 - DNA, 25 bp, Artificial
  probe
  misc_feature (1)..(25): SEQ ID NO: 3433; WAN024DQ6_at; Start 401; Stop 425
gattacagaagaaaatgcatcgcca

SEQ ID NO: 167367 - DNA, 25 bp, Artificial
  probe
  misc_feature (1)..(25): SEQ ID NO: 3433; WAN024DQ6_at; Start 91; Stop 115
ttgaaaaaacgagaggcccttatca

SEQ ID NO: 167368 - DNA, 25 bp, Artificial
  probe
  misc_feature (1)..(25): SEQ ID NO: 3433; WAN024DQ6_at; Start 219; Stop 243
tactctaatcctcgaatctacgatg

SEQ ID NO: 167369 - DNA, 25 bp, Artificial
  probe
  misc_feature (1)..(25): SEQ ID NO: 3433; WAN024DQ6_at; Start 471; Stop 495
gacaagacttcttacatgaattgga

SEQ ID NO: 167370 - DNA, 25 bp, Artificial
  probe
  misc_feature (1)..(25): SEQ ID NO: 3433; WAN024DQ6_at; Start 14; Stop 38
taggaggagttggatggaaatcaaa

SEQ ID NO: 167371 - DNA, 25 bp, Artificial
  probe
  misc_feature (1)..(25): SEQ ID NO: 3433; WAN024DQ6_at; Start 229; Stop 253
ctcgaatctacgatgttttcgtcag

SEQ ID NO: 167372 - DNA, 25 bp, Artificial
  probe
  misc_feature (1)..(25): SEQ ID NO: 3433; WAN024DQ6_at; Start 406; Stop 430
cagaagaaaatgcatcgccattagt

SEQ ID NO: 167373 - DNA, 25 bp, Artificial
  probe
  misc_feature (1)..(25): SEQ ID NO: 3433; WAN024DQ6_at; Start 366; Stop 390
gattcacttggatatatttggatgg

SEQ ID NO: 167374 - DNA, 25 bp, Artificial
  probe
  misc_feature (1)..(25): SEQ ID NO: 3433; WAN024DQ6_at; Start 417; Stop 441
gcatcgccattagtcttgaaggtta

SEQ ID NO: 167375 - DNA, 25 bp, Artificial
  probe
  misc_feature (1)..(25): SEQ ID NO: 3433; WAN024DQ6_at; Start 306; Stop 330
gaaatgaatgagagtgcacctcaag

SEQ ID NO: 167376 - DNA, 25 bp, Artificial
  probe
  misc_feature (1)..(25): SEQ ID NO: 3433; WAN024DQ6_at; Start 302; Stop 326
tgttgaaatgaatgagagtgcacct

SEQ ID NO: 167377 - DNA, 25 bp, Artificial
  probe
  misc_feature (1)..(25): SEQ ID NO: 3433; WAN024DQ6_at; Start 114; Stop 138
caacatcggtatgatctacctggag

SEQ ID NO: 167378 - DNA, 25 bp, Artificial
  probe
  misc_feature (1)..(25): SEQ ID NO: 3433; WAN024DQ6_at; Start 462; Stop 486
ccagaactggacaagacttcttaca

SEQ ID NO: 167379 - DNA, 25 bp, Artificial
  probe
  misc_feature (1)..(25): SEQ ID NO: 3433; WAN024DQ6_at; Start 130; Stop 154
tacctggaggcagtcagcaacttgg

SEQ ID NO: 167380 - DNA, 25 bp, Artificial
  probe
  misc_feature (1)..(25): SEQ ID NO: 3433; WAN024DQ6_at; Start 434; Stop 458
gaaggttaagtctgaattattagga

SEQ ID NO: 167381 - DNA, 25 bp, Artificial
  probe
  misc_feature (1)..(25): SEQ ID NO: 6461; WAN024DQ7_at; Start 76; Stop 100
ttcgaacgaggaacttgccagagaa

SEQ ID NO: 167382 - DNA, 25 bp, Artificial
  probe
  misc_feature (1)..(25): SEQ ID NO: 6461; WAN024DQ7_at; Start 54; Stop 78
tggtcgaaaagaagggataggattc

SEQ ID NO: 167383 - DNA, 25 bp, Artificial
  probe
  misc_feature (1)..(25): SEQ ID NO: 6461; WAN024DQ7_at; Start 31; Stop 55
gccgaggttttgaataggcgctctg

SEQ ID NO: 167384 - DNA, 25 bp, Artificial
  probe
  misc_feature (1)..(25): SEQ ID NO: 6461; WAN024DQ7_at; Start 35; Stop 59
aggttttgaataggcgctctggtcg

SEQ ID NO: 167385 - DNA, 25 bp, Artificial
  probe
  misc_feature (1)..(25): SEQ ID NO: 6461; WAN024DQ7_at; Start 78; Stop 102
cgaacgaggaacttgccagagaact

SEQ ID NO: 167386 - DNA, 25 bp, Artificial
  probe
  misc_feature (1)..(25): SEQ ID NO: 6461; WAN024DQ7_at; Start 71; Stop 95
taggattcgaacgaggaacttgcca

SEQ ID NO: 167387 - DNA, 25 bp, Artificial
  probe
  misc_feature (1)..(25): SEQ ID NO: 6461; WAN024DQ7_at; Start 75; Stop 99
attcgaacgaggaacttgccagaga

SEQ ID NO: 167388 - DNA, 25 bp, Artificial
  probe
  misc_feature (1)..(25): SEQ ID NO: 6461; WAN024DQ7_at; Start 77; Stop 101
tcgaacgaggaacttgccagagaac

SEQ ID NO: 167389 - DNA, 25 bp, Artificial
  probe
  misc_feature (1)..(25): SEQ ID NO: 6461; WAN024DQ7_at; Start 69; Stop 93
gataggattcgaacgaggaacttgc

SEQ ID NO: 167390 - DNA, 25 bp, Artificial
  probe
  misc_feature (1)..(25): SEQ ID NO: 6461; WAN024DQ7_at; Start 41; Stop 65
tgaataggcgctctggtcgaaaaga

SEQ ID NO: 167391 - DNA, 25 bp, Artificial
  probe
  misc_feature (1)..(25): SEQ ID NO: 6461; WAN024DQ7_at; Start 32; Stop 56
ccgaggttttgaataggcgctctgg

SEQ ID NO: 167392 - DNA, 25 bp, Artificial
  probe
  misc_feature (1)..(25): SEQ ID NO: 6461; WAN024DQ7_at; Start 29; Stop 53
tagccgaggttttgaataggcgctc

SEQ ID NO: 167393 - DNA, 25 bp, Artificial
  probe
  misc_feature (1)..(25): SEQ ID NO: 6461; WAN024DQ7_at; Start 26; Stop 50
aagtagccgaggttttgaataggcg

SEQ ID NO: 167394 - DNA, 25 bp, Artificial
  probe
  misc_feature (1)..(25): SEQ ID NO: 6461; WAN024DQ7_at; Start 34; Stop 58
gaggttttgaataggcgctctggtc

SEQ ID NO: 167395 - DNA, 25 bp, Artificial
  probe
  misc_feature (1)..(25): SEQ ID NO: 6461; WAN024DQ7_at; Start 25; Stop 49
gaagtagccgaggttttgaataggc

SEQ ID NO: 167396 - DNA, 25 bp, Artificial
  probe
  misc_feature (1)..(25): SEQ ID NO: 6461; WAN024DQ7_at; Start 43; Stop 67
aataggcgctctggtcgaaaagaag

SEQ ID NO: 167397 - DNA, 25 bp, Artificial
  probe
  misc_feature (1)..(25): SEQ ID NO: 6461; WAN024DQ7_at; Start 40; Stop 64
ttgaataggcgctctggtcgaaaag

SEQ ID NO: 167398 - DNA, 25 bp, Artificial
  probe
  misc_feature (1)..(25): SEQ ID NO: 6461; WAN024DQ7_at; Start 30; Stop 54
agccgaggttttgaataggcgctct

SEQ ID NO: 167399 - DNA, 25 bp, Artificial
  probe
  misc_feature (1)..(25): SEQ ID NO: 6461; WAN024DQ7_at; Start 27; Stop 51
agtagccgaggttttgaataggcgc

SEQ ID NO: 167400 - DNA, 25 bp, Artificial
  probe
  misc_feature (1)..(25): SEQ ID NO: 6461; WAN024DQ7_at; Start 2; Stop 26
tgaagttagtggaggaagtcggaga

SEQ ID NO: 167401 - DNA, 25 bp, Artificial
  probe
  misc_feature (1)..(25): SEQ ID NO: 6461; WAN024DQ7_at; Start 22; Stop 46
ggagaagtagccgaggttttgaata

SEQ ID NO: 167402 - DNA, 25 bp, Artificial
  probe
  misc_feature (1)..(25): SEQ ID NO: 6461; WAN024DQ7_at; Start 8; Stop 32
tagtggaggaagtcggagaagtagc

SEQ ID NO: 167403 - DNA, 25 bp, Artificial
  probe
  misc_feature (1)..(25): SEQ ID NO: 6461; WAN024DQ7_at; Start 70; Stop 94
ataggattcgaacgaggaacttgcc

SEQ ID NO: 167404 - DNA, 25 bp, Artificial
  probe
  misc_feature (1)..(25): SEQ ID NO: 6461; WAN024DQ7_at; Start 57; Stop 81
tcgaaaagaagggataggattcgaa

SEQ ID NO: 167405 - DNA, 25 bp, Artificial
  probe
  misc_feature (1)..(25): SEQ ID NO: 6461; WAN024DQ7_at; Start 68; Stop 92
ggataggattcgaacgaggaacttg

SEQ ID NO: 167406 - DNA, 25 bp, Artificial
  probe
  misc_feature (1)..(25): SEQ ID NO: 6461; WAN024DQ7_at; Start 72; Stop 96
aggattcgaacgaggaacttgccag

SEQ ID NO: 167407 - DNA, 25 bp, Artificial
  probe
  misc_feature (1)..(25): SEQ ID NO: 6461; WAN024DQ7_at; Start 74; Stop 98
gattcgaacgaggaacttgccagag

SEQ ID NO: 167408 - DNA, 25 bp, Artificial
  probe
  misc_feature (1)..(25): SEQ ID NO: 6461; WAN024DQ7_at; Start 79; Stop 103
gaacgaggaacttgccagagaactg

SEQ ID NO: 167409 - DNA, 25 bp, Artificial
  probe
  misc_feature (1)..(25): SEQ ID NO: 6461; WAN024DQ7_at; Start 42; Stop 66
gaataggcgctctggtcgaaaagaa

SEQ ID NO: 167410 - DNA, 25 bp, Artificial
  probe
  misc_feature (1)..(25): SEQ ID NO: 6461; WAN024DQ7_at; Start 23; Stop 47
gagaagtagccgaggttttgaatag

SEQ ID NO: 167411 - DNA, 25 bp, Artificial
  probe
  misc_feature (1)..(25): SEQ ID NO: 6461; WAN024DQ7_at; Start 73; Stop 97
ggattcgaacgaggaacttgccaga

SEQ ID NO: 167412 - DNA, 25 bp, Artificial
  probe
  misc_feature (1)..(25): SEQ ID NO: 6461; WAN024DQ7_at; Start 39; Stop 63
tttgaataggcgctctggtcgaaaa

SEQ ID NO: 167413 - DNA, 25 bp, Artificial
  probe
  misc_feature (1)..(25): SEQ ID NO: 6461; WAN024DQ7_at; Start 80; Stop 104
aacgaggaacttgccagagaactgg

SEQ ID NO: 167414 - DNA, 25 bp, Artificial
  probe
  misc_feature (1)..(25): SEQ ID NO: 6461; WAN024DQ7_at; Start 61; Stop 85
aaagaagggataggattcgaacgag

SEQ ID NO: 167415 - DNA, 25 bp, Artificial
  probe
  misc_feature (1)..(25): SEQ ID NO: 7146; WAN024DQ8_at; Start 17; Stop 41
tctacaccgtcgctattgctgctat

SEQ ID NO: 167416 - DNA, 25 bp, Artificial
  probe
  misc_feature (1)..(25): SEQ ID NO: 7146; WAN024DQ8_at; Start 24; Stop 48
cgtcgctattgctgctatcaagcat

SEQ ID NO: 167417 - DNA, 25 bp, Artificial
  probe
  misc_feature (1)..(25): SEQ ID NO: 7146; WAN024DQ8_at; Start 56; Stop 80
taactagaaccatctttgagaaaga

SEQ ID NO: 167418 - DNA, 25 bp, Artificial
  probe
  misc_feature (1)..(25): SEQ ID NO: 7146; WAN024DQ8_at; Start 13; Stop 37
attctctacaccgtcgctattgctg

SEQ ID NO: 167419 - DNA, 25 bp, Artificial
  probe
  misc_feature (1)..(25): SEQ ID NO: 7146; WAN024DQ8_at; Start 21; Stop 45
caccgtcgctattgctgctatcaag

SEQ ID NO: 167420 - DNA, 25 bp, Artificial
  probe
  misc_feature (1)..(25): SEQ ID NO: 7146; WAN024DQ8_at; Start 22; Stop 46
accgtcgctattgctgctatcaagc

SEQ ID NO: 167421 - DNA, 25 bp, Artificial
  probe
  misc_feature (1)..(25): SEQ ID NO: 7146; WAN024DQ8_at; Start 48; Stop 72
tattgacctaactagaaccatcttt

SEQ ID NO: 167422 - DNA, 25 bp, Artificial
  probe
  misc_feature (1)..(25): SEQ ID NO: 7146; WAN024DQ8_at; Start 49; Stop 73
attgacctaactagaaccatctttg

SEQ ID NO: 167423 - DNA, 25 bp, Artificial
  probe
  misc_feature (1)..(25): SEQ ID NO: 7146; WAN024DQ8_at; Start 43; Stop 67
aagcatattgacctaactagaacca

SEQ ID NO: 167424 - DNA, 25 bp, Artificial
  probe
  misc_feature (1)..(25): SEQ ID NO: 7146; WAN024DQ8_at; Start 52; Stop 76
gacctaactagaaccatctttgaga

SEQ ID NO: 167425 - DNA, 25 bp, Artificial
  probe
  misc_feature (1)..(25): SEQ ID NO: 7146; WAN024DQ8_at; Start 39; Stop 63
tatcaagcatattgacctaactaga

SEQ ID NO: 167426 - DNA, 25 bp, Artificial
  probe
  misc_feature (1)..(25): SEQ ID NO: 7146; WAN024DQ8_at; Start 46; Stop 70
catattgacctaactagaaccatct

SEQ ID NO: 167427 - DNA, 25 bp, Artificial
  probe
  misc_feature (1)..(25): SEQ ID NO: 7146; WAN024DQ8_at; Start 14; Stop 38
ttctctacaccgtcgctattgctgc

SEQ ID NO: 167428 - DNA, 25 bp, Artificial
  probe
  misc_feature (1)..(25): SEQ ID NO: 7146; WAN024DQ8_at; Start 20; Stop 44
acaccgtcgctattgctgctatcaa

SEQ ID NO: 167429 - DNA, 25 bp, Artificial
  probe
  misc_feature (1)..(25): SEQ ID NO: 7146; WAN024DQ8_at; Start 37; Stop 61
gctatcaagcatattgacctaacta

SEQ ID NO: 167430 - DNA, 25 bp, Artificial
  probe
  misc_feature (1)..(25): SEQ ID NO: 7146; WAN024DQ8_at; Start 26; Stop 50
tcgctattgctgctatcaagcatat

SEQ ID NO: 167431 - DNA, 25 bp, Artificial
  probe
  misc_feature (1)..(25): SEQ ID NO: 7146; WAN024DQ8_at; Start 36; Stop 60
tgctatcaagcatattgacctaact

SEQ ID NO: 167432 - DNA, 25 bp, Artificial
  probe
  misc_feature (1)..(25): SEQ ID NO: 7146; WAN024DQ8_at; Start 11; Stop 35
tcattctctacaccgtcgctattgc

SEQ ID NO: 167433 - DNA, 25 bp, Artificial
  probe
  misc_feature (1)..(25): SEQ ID NO: 7146; WAN024DQ8_at; Start 34; Stop 58
gctgctatcaagcatattgacctaa

SEQ ID NO: 167434 - DNA, 25 bp, Artificial
  probe
  misc_feature (1)..(25): SEQ ID NO: 7146; WAN024DQ8_at; Start 51; Stop 75
tgacctaactagaaccatctttgag

SEQ ID NO: 167435 - DNA, 25 bp, Artificial
  probe
  misc_feature (1)..(25): SEQ ID NO: 7146; WAN024DQ8_at; Start 15; Stop 39
tctctacaccgtcgctattgctgct

SEQ ID NO: 167436 - DNA, 25 bp, Artificial
  probe
  misc_feature (1)..(25): SEQ ID NO: 7146; WAN024DQ8_at; Start 23; Stop 47
ccgtcgctattgctgctatcaagca

SEQ ID NO: 167437 - DNA, 25 bp, Artificial
  probe
  misc_feature (1)..(25): SEQ ID NO: 7146; WAN024DQ8_at; Start 28; Stop 52
gctattgctgctatcaagcatattg

SEQ ID NO: 167438 - DNA, 25 bp, Artificial
  probe
  misc_feature (1)..(25): SEQ ID NO: 7146; WAN024DQ8_at; Start 54; Stop 78
cctaactagaaccatctttgagaaa

SEQ ID NO: 167439 - DNA, 25 bp, Artificial
  probe
  misc_feature (1)..(25): SEQ ID NO: 7146; WAN024DQ8_at; Start 42; Stop 66
caagcatattgacctaactagaacc

SEQ ID NO: 167440 - DNA, 25 bp, Artificial
  probe
  misc_feature (1)..(25): SEQ ID NO: 7146; WAN024DQ8_at; Start 45; Stop 69
gcatattgacctaactagaaccatc

SEQ ID NO: 167441 - DNA, 25 bp, Artificial
  probe
  misc_feature (1)..(25): SEQ ID NO: 7146; WAN024DQ8_at; Start 19; Stop 43
tacaccgtcgctattgctgctatca

SEQ ID NO: 167442 - DNA, 25 bp, Artificial
  probe
  misc_feature (1)..(25): SEQ ID NO: 7146; WAN024DQ8_at; Start 58; Stop 82
actagaaccatctttgagaaagaca

SEQ ID NO: 167443 - DNA, 25 bp, Artificial
  probe
  misc_feature (1)..(25): SEQ ID NO: 7146; WAN024DQ8_at; Start 57; Stop 81
aactagaaccatctttgagaaagac

SEQ ID NO: 167444 - DNA, 25 bp, Artificial
  probe
  misc_feature (1)..(25): SEQ ID NO: 7146; WAN024DQ8_at; Start 9; Stop 33
tatcattctctacaccgtcgctatt

SEQ ID NO: 167445 - DNA, 25 bp, Artificial
  probe
  misc_feature (1)..(25): SEQ ID NO: 7146; WAN024DQ8_at; Start 32; Stop 56
ttgctgctatcaagcatattgacct

SEQ ID NO: 167446 - DNA, 25 bp, Artificial
  probe
  misc_feature (1)..(25): SEQ ID NO: 7146; WAN024DQ8_at; Start 41; Stop 65
tcaagcatattgacctaactagaac

SEQ ID NO: 167447 - DNA, 25 bp, Artificial
  probe
  misc_feature (1)..(25): SEQ ID NO: 7146; WAN024DQ8_at; Start 25; Stop 49
gtcgctattgctgctatcaagcata

SEQ ID NO: 167448 - DNA, 25 bp, Artificial
  probe
  misc_feature (1)..(25): SEQ ID NO: 7146; WAN024DQ8_at; Start 30; Stop 54
tattgctgctatcaagcatattgac

SEQ ID NO: 167449 - DNA, 25 bp, Artificial
  probe
  misc_feature (1)..(25): SEQ ID NO: 3421; WAN024DQ9_at; Start 58; Stop 82
accaagactgtctttgagaaagaca

SEQ ID NO: 167450 - DNA, 25 bp, Artificial
  probe
  misc_feature (1)..(25): SEQ ID NO: 3421; WAN024DQ9_at; Start 41; Stop 65
ttaatcatattgaccttaccaagac

SEQ ID NO: 167451 - DNA, 25 bp, Artificial
  probe
  misc_feature (1)..(25): SEQ ID NO: 3421; WAN024DQ9_at; Start 24; Stop 48
cgtcgcaatcgtagctattaatcat

SEQ ID NO: 167452 - DNA, 25 bp, Artificial
  probe
  misc_feature (1)..(25): SEQ ID NO: 3421; WAN024DQ9_at; Start 21; Stop 45
caccgtcgcaatcgtagctattaat

SEQ ID NO: 167453 - DNA, 25 bp, Artificial
  probe
  misc_feature (1)..(25): SEQ ID NO: 3421; WAN024DQ9_at; Start 45; Stop 69
tcatattgaccttaccaagactgtc

SEQ ID NO: 167454 - DNA, 25 bp, Artificial
  probe
  misc_feature (1)..(25): SEQ ID NO: 3421; WAN024DQ9_at; Start 14; Stop 38
tttactacaccgtcgcaatcgtagc

SEQ ID NO: 167455 - DNA, 25 bp, Artificial
  probe
  misc_feature (1)..(25): SEQ ID NO: 3421; WAN024DQ9_at; Start 51; Stop 75
tgaccttaccaagactgtctttgag

SEQ ID NO: 167456 - DNA, 25 bp, Artificial
  probe
  misc_feature (1)..(25): SEQ ID NO: 3421; WAN024DQ9_at; Start 22; Stop 46
accgtcgcaatcgtagctattaatc

SEQ ID NO: 167457 - DNA, 25 bp, Artificial
  probe
  misc_feature (1)..(25): SEQ ID NO: 3421; WAN024DQ9_at; Start 43; Stop 67
aatcatattgaccttaccaagactg

SEQ ID NO: 167458 - DNA, 25 bp, Artificial
  probe
  misc_feature (1)..(25): SEQ ID NO: 3421; WAN024DQ9_at; Start 52; Stop 76
gaccttaccaagactgtctttgaga

SEQ ID NO: 167459 - DNA, 25 bp, Artificial
  probe
  misc_feature (1)..(25): SEQ ID NO: 3421; WAN024DQ9_at; Start 54; Stop 78
ccttaccaagactgtctttgagaaa

SEQ ID NO: 167460 - DNA, 25 bp, Artificial
  probe
  misc_feature (1)..(25): SEQ ID NO: 3421; WAN024DQ9_at; Start 32; Stop 56
tcgtagctattaatcatattgacct

SEQ ID NO: 167461 - DNA, 25 bp, Artificial
  probe
  misc_feature (1)..(25): SEQ ID NO: 3421; WAN024DQ9_at; Start 11; Stop 35
tcatttactacaccgtcgcaatcgt

SEQ ID NO: 167462 - DNA, 25 bp, Artificial
  probe
  misc_feature (1)..(25): SEQ ID NO: 3421; WAN024DQ9_at; Start 26; Stop 50
tcgcaatcgtagctattaatcatat

SEQ ID NO: 167463 - DNA, 25 bp, Artificial
  probe
  misc_feature (1)..(25): SEQ ID NO: 3421; WAN024DQ9_at; Start 48; Stop 72
tattgaccttaccaagactgtcttt

SEQ ID NO: 167464 - DNA, 25 bp, Artificial
  probe
  misc_feature (1)..(25): SEQ ID NO: 3421; WAN024DQ9_at; Start 49; Stop 73
attgaccttaccaagactgtctttg

SEQ ID NO: 167465 - DNA, 25 bp, Artificial
  probe
  misc_feature (1)..(25): SEQ ID NO: 3421; WAN024DQ9_at; Start 37; Stop 61
gctattaatcatattgaccttacca

SEQ ID NO: 167466 - DNA, 25 bp, Artificial
  probe
  misc_feature (1)..(25): SEQ ID NO: 3421; WAN024DQ9_at; Start 42; Stop 66
taatcatattgaccttaccaagact

SEQ ID NO: 167467 - DNA, 25 bp, Artificial
  probe
  misc_feature (1)..(25): SEQ ID NO: 3421; WAN024DQ9_at; Start 27; Stop 51
cgcaatcgtagctattaatcatatt

SEQ ID NO: 167468 - DNA, 25 bp, Artificial
  probe
  misc_feature (1)..(25): SEQ ID NO: 3421; WAN024DQ9_at; Start 10; Stop 34
atcatttactacaccgtcgcaatcg

SEQ ID NO: 167469 - DNA, 25 bp, Artificial
  probe
  misc_feature (1)..(25): SEQ ID NO: 3421; WAN024DQ9_at; Start 30; Stop 54
aatcgtagctattaatcatattgac

SEQ ID NO: 167470 - DNA, 25 bp, Artificial
  probe
  misc_feature (1)..(25): SEQ ID NO: 3421; WAN024DQ9_at; Start 13; Stop 37
atttactacaccgtcgcaatcgtag

SEQ ID NO: 167471 - DNA, 25 bp, Artificial
  probe
  misc_feature (1)..(25): SEQ ID NO: 3421; WAN024DQ9_at; Start 46; Stop 70
catattgaccttaccaagactgtct

SEQ ID NO: 167472 - DNA, 25 bp, Artificial
  probe
  misc_feature (1)..(25): SEQ ID NO: 3421; WAN024DQ9_at; Start 9; Stop 33
tatcatttactacaccgtcgcaatc

SEQ ID NO: 167473 - DNA, 25 bp, Artificial
  probe
  misc_feature (1)..(25): SEQ ID NO: 3421; WAN024DQ9_at; Start 20; Stop 44
acaccgtcgcaatcgtagctattaa

SEQ ID NO: 167474 - DNA, 25 bp, Artificial
  probe
  misc_feature (1)..(25): SEQ ID NO: 3421; WAN024DQ9_at; Start 15; Stop 39
ttactacaccgtcgcaatcgtagct

SEQ ID NO: 167475 - DNA, 25 bp, Artificial
  probe
  misc_feature (1)..(25): SEQ ID NO: 3421; WAN024DQ9_at; Start 25; Stop 49
gtcgcaatcgtagctattaatcata

SEQ ID NO: 167476 - DNA, 25 bp, Artificial
  probe
  misc_feature (1)..(25): SEQ ID NO: 3421; WAN024DQ9_at; Start 19; Stop 43
tacaccgtcgcaatcgtagctatta

SEQ ID NO: 167477 - DNA, 25 bp, Artificial
  probe
  misc_feature (1)..(25): SEQ ID NO: 3421; WAN024DQ9_at; Start 39; Stop 63
tattaatcatattgaccttaccaag

SEQ ID NO: 167478 - DNA, 25 bp, Artificial
  probe
  misc_feature (1)..(25): SEQ ID NO: 3421; WAN024DQ9_at; Start 23; Stop 47
ccgtcgcaatcgtagctattaatca

SEQ ID NO: 167479 - DNA, 25 bp, Artificial
  probe
  misc_feature (1)..(25): SEQ ID NO: 3421; WAN024DQ9_at; Start 50; Stop 74
ttgaccttaccaagactgtctttga

SEQ ID NO: 167480 - DNA, 25 bp, Artificial
  probe
  misc_feature (1)..(25): SEQ ID NO: 3421; WAN024DQ9_at; Start 57; Stop 81
taccaagactgtctttgagaaagac

SEQ ID NO: 167481 - DNA, 25 bp, Artificial
  probe
  misc_feature (1)..(25): SEQ ID NO: 3421; WAN024DQ9_at; Start 33; Stop 57
cgtagctattaatcatattgacctt

SEQ ID NO: 167482 - DNA, 25 bp, Artificial
  probe
  misc_feature (1)..(25): SEQ ID NO: 3421; WAN024DQ9_at; Start 17; Stop 41
actacaccgtcgcaatcgtagctat

SEQ ID NO: 167483 - DNA, 25 bp, Artificial
  probe
  misc_feature (1)..(25): SEQ ID NO: 3076; WAN024DQA_at; Start 137; Stop 161
gaatcctatcccttcttttcgacca

SEQ ID NO: 167484 - DNA, 25 bp, Artificial
  probe
  misc_feature (1)..(25): SEQ ID NO: 3076; WAN024DQA_at; Start 88; Stop 112
gacggtgtagtaaatgatatcagcc

SEQ ID NO: 167485 - DNA, 25 bp, Artificial
  probe
  misc_feature (1)..(25): SEQ ID NO: 3076; WAN024DQA_at; Start 118; Stop 142
tctggcaagttcctcgttcgaatcc

SEQ ID NO: 167486 - DNA, 25 bp, Artificial
  probe
  misc_feature (1)..(25): SEQ ID NO: 3076; WAN024DQA_at; Start 162; Stop 186
gagcgcctattcaaaacctcgacta

SEQ ID NO: 167487 - DNA, 25 bp, Artificial
  probe
  misc_feature (1)..(25): SEQ ID NO: 3076; WAN024DQA_at; Start 85; Stop 109
tgcgacggtgtagtaaatgatatca

SEQ ID NO: 167488 - DNA, 25 bp, Artificial
  probe
  misc_feature (1)..(25): SEQ ID NO: 3076; WAN024DQA_at; Start 66; Stop 90
tatgattaatagctacgattgcgac

SEQ ID NO: 167489 - DNA, 25 bp, Artificial
  probe
  misc_feature (1)..(25): SEQ ID NO: 3076; WAN024DQA_at; Start 46; Stop 70
gacagtcttggtaaggtcaatatga

SEQ ID NO: 167490 - DNA, 25 bp, Artificial
  probe
  misc_feature (1)..(25): SEQ ID NO: 3076; WAN024DQA_at; Start 164; Stop 188
gcgcctattcaaaacctcgactact

SEQ ID NO: 167491 - DNA, 25 bp, Artificial
  probe
  misc_feature (1)..(25): SEQ ID NO: 3076; WAN024DQA_at; Start 18; Stop 42
taatggctgcggttttgtctttctc

SEQ ID NO: 167492 - DNA, 25 bp, Artificial
  probe
  misc_feature (1)..(25): SEQ ID NO: 3076; WAN024DQA_at; Start 77; Stop 101
gctacgattgcgacggtgtagtaaa

SEQ ID NO: 167493 - DNA, 25 bp, Artificial
  probe
  misc_feature (1)..(25): SEQ ID NO: 3076; WAN024DQA_at; Start 41; Stop 65
tcaaagacagtcttggtaaggtcaa

SEQ ID NO: 167494 - DNA, 25 bp, Artificial
  probe
  misc_feature (1)..(25): SEQ ID NO: 3076; WAN024DQA_at; Start 169; Stop 193
tattcaaaacctcgactacttctcc

SEQ ID NO: 167495 - DNA, 25 bp, Artificial
  probe
  misc_feature (1)..(25): SEQ ID NO: 3076; WAN024DQA_at; Start 72; Stop 96
taatagctacgattgcgacggtgta

SEQ ID NO: 167496 - DNA, 25 bp, Artificial
  probe
  misc_feature (1)..(25): SEQ ID NO: 3076; WAN024DQA_at; Start 93; Stop 117
tgtagtaaatgatatcagccagttc

SEQ ID NO: 167497 - DNA, 25 bp, Artificial
  probe
  misc_feature (1)..(25): SEQ ID NO: 3076; WAN024DQA_at; Start 69; Stop 93
gattaatagctacgattgcgacggt

SEQ ID NO: 167498 - DNA, 25 bp, Artificial
  probe
  misc_feature (1)..(25): SEQ ID NO: 3076; WAN024DQA_at; Start 34; Stop 58
gtctttctcaaagacagtcttggta

SEQ ID NO: 167499 - DNA, 25 bp, Artificial
  probe
  misc_feature (1)..(25): SEQ ID NO: 3076; WAN024DQA_at; Start 152; Stop 176
ttttcgaccagagcgcctattcaaa

SEQ ID NO: 167500 - DNA, 25 bp, Artificial
  probe
  misc_feature (1)..(25): SEQ ID NO: 3076; WAN024DQA_at; Start 98; Stop 122
taaatgatatcagccagttctctgg

SEQ ID NO: 167501 - DNA, 25 bp, Artificial
  probe
  misc_feature (1)..(25): SEQ ID NO: 3076; WAN024DQA_at; Start 81; Stop 105
cgattgcgacggtgtagtaaatgat

SEQ ID NO: 167502 - DNA, 25 bp, Artificial
  probe
  misc_feature (1)..(25): SEQ ID NO: 3076; WAN024DQA_at; Start 58; Stop 82
aaggtcaatatgattaatagctacg

SEQ ID NO: 167503 - DNA, 25 bp, Artificial
  probe
  misc_feature (1)..(25): SEQ ID NO: 3076; WAN024DQA_at; Start 6; Stop 30
tatgttggtaattaatggctgcggt

SEQ ID NO: 167504 - DNA, 25 bp, Artificial
  probe
  misc_feature (1)..(25): SEQ ID NO: 3076; WAN024DQA_at; Start 185; Stop 209
tacttctccgacttcctccactaac

SEQ ID NO: 167505 - DNA, 25 bp, Artificial
  probe
  misc_feature (1)..(25): SEQ ID NO: 3076; WAN024DQA_at; Start 121; Stop 145
ggcaagttcctcgttcgaatcctat

SEQ ID NO: 167506 - DNA, 25 bp, Artificial
  probe
  misc_feature (1)..(25): SEQ ID NO: 3076; WAN024DQA_at; Start 147; Stop 171
ccttcttttcgaccagagcgcctat

SEQ ID NO: 167507 - DNA, 25 bp, Artificial
  probe
  misc_feature (1)..(25): SEQ ID NO: 3076; WAN024DQA_at; Start 102; Stop 126
tgatatcagccagttctctggcaag

SEQ ID NO: 167508 - DNA, 25 bp, Artificial
  probe
  misc_feature (1)..(25): SEQ ID NO: 3076; WAN024DQA_at; Start 123; Stop 147
caagttcctcgttcgaatcctatcc

SEQ ID NO: 167509 - DNA, 25 bp, Artificial
  probe
  misc_feature (1)..(25): SEQ ID NO: 3076; WAN024DQA_at; Start 150; Stop 174
tcttttcgaccagagcgcctattca

SEQ ID NO: 167510 - DNA, 25 bp, Artificial
  probe
  misc_feature (1)..(25): SEQ ID NO: 3076; WAN024DQA_at; Start 143; Stop 167
tatcccttcttttcgaccagagcgc

SEQ ID NO: 167511 - DNA, 25 bp, Artificial
  probe
  misc_feature (1)..(25): SEQ ID NO: 3076; WAN024DQA_at; Start 156; Stop 180
cgaccagagcgcctattcaaaacct

SEQ ID NO: 167512 - DNA, 25 bp, Artificial
  probe
  misc_feature (1)..(25): SEQ ID NO: 3076; WAN024DQA_at; Start 171; Stop 195
ttcaaaacctcgactacttctccga

SEQ ID NO: 167513 - DNA, 25 bp, Artificial
  probe
  misc_feature (1)..(25): SEQ ID NO: 3076; WAN024DQA_at; Start 113; Stop 137
agttctctggcaagttcctcgttcg

SEQ ID NO: 167514 - DNA, 25 bp, Artificial
  probe
  misc_feature (1)..(25): SEQ ID NO: 3076; WAN024DQA_at; Start 23; Stop 47
gctgcggttttgtctttctcaaaga

SEQ ID NO: 167515 - DNA, 25 bp, Artificial
  probe
  misc_feature (1)..(25): SEQ ID NO: 3076; WAN024DQA_at; Start 105; Stop 129
tatcagccagttctctggcaagttc

SEQ ID NO: 167516 - DNA, 25 bp, Artificial
  probe
  misc_feature (1)..(25): SEQ ID NO: 3076; WAN024DQA_at; Start 12; Stop 36
ggtaattaatggctgcggttttgtc

SEQ ID NO: 167517 - DNA, 25 bp, Artificial
  probe
  misc_feature (1)..(25): SEQ ID NO: 791; WAN024DQB_s_at; Start 25; Stop 49
tgggaaaacattgattctaagcgaa

SEQ ID NO: 167518 - DNA, 25 bp, Artificial
  probe
  misc_feature (1)..(25): SEQ ID NO: 791; WAN024DQB_s_at; Start 71; Stop 95
gagtttttaaaatcatgtttcagtg

SEQ ID NO: 167519 - DNA, 25 bp, Artificial
  probe
  misc_feature (1)..(25): SEQ ID NO: 791; WAN024DQB_s_at; Start 47; Stop 71
gaattttgaatcatattcgaatggg

SEQ ID NO: 167520 - DNA, 25 bp, Artificial
  probe
  misc_feature (1)..(25): SEQ ID NO: 791; WAN024DQB_s_at; Start 48; Stop 72
aattttgaatcatattcgaatggga

SEQ ID NO: 167521 - DNA, 25 bp, Artificial
  probe
  misc_feature (1)..(25): SEQ ID NO: 791; WAN024DQB_s_at; Start 33; Stop 57
cattgattctaagcgaattttgaat

SEQ ID NO: 167522 - DNA, 25 bp, Artificial
  probe
  misc_feature (1)..(25): SEQ ID NO: 791; WAN024DQB_s_at; Start 42; Stop 66
taagcgaattttgaatcatattcga

SEQ ID NO: 167523 - DNA, 25 bp, Artificial
  probe
  misc_feature (1)..(25): SEQ ID NO: 791; WAN024DQB_s_at; Start 21; Stop 45
aaagtgggaaaacattgattctaag

SEQ ID NO: 167524 - DNA, 25 bp, Artificial
  probe
  misc_feature (1)..(25): SEQ ID NO: 791; WAN024DQB_s_at; Start 52; Stop 76
ttgaatcatattcgaatgggagttt

SEQ ID NO: 167525 - DNA, 25 bp, Artificial
  probe
  misc_feature (1)..(25): SEQ ID NO: 791; WAN024DQB_s_at; Start 41; Stop 65
ctaagcgaattttgaatcatattcg

SEQ ID NO: 167526 - DNA, 25 bp, Artificial
  probe
  misc_feature (1)..(25): SEQ ID NO: 791; WAN024DQB_s_at; Start 53; Stop 77
tgaatcatattcgaatgggagtttt

SEQ ID NO: 167527 - DNA, 25 bp, Artificial
  probe
  misc_feature (1)..(25): SEQ ID NO: 791; WAN024DQB_s_at; Start 72; Stop 96
agtttttaaaatcatgtttcagtgg

SEQ ID NO: 167528 - DNA, 25 bp, Artificial
  probe
  misc_feature (1)..(25): SEQ ID NO: 791; WAN024DQB_s_at; Start 26; Stop 50
gggaaaacattgattctaagcgaat

SEQ ID NO: 167529 - DNA, 25 bp, Artificial
  probe
  misc_feature (1)..(25): SEQ ID NO: 791; WAN024DQB_s_at; Start 32; Stop 56
acattgattctaagcgaattttgaa

SEQ ID NO: 167530 - DNA, 25 bp, Artificial
  probe
  misc_feature (1)..(25): SEQ ID NO: 791; WAN024DQB_s_at; Start 37; Stop 61
gattctaagcgaattttgaatcata

SEQ ID NO: 167531 - DNA, 25 bp, Artificial
  probe
  misc_feature (1)..(25): SEQ ID NO: 791; WAN024DQB_s_at; Start 17; Stop 41
tgaaaaagtgggaaaacattgattc

SEQ ID NO: 167532 - DNA, 25 bp, Artificial
  probe
  misc_feature (1)..(25): SEQ ID NO: 791; WAN024DQB_s_at; Start 51; Stop 75
tttgaatcatattcgaatgggagtt

SEQ ID NO: 167533 - DNA, 25 bp, Artificial
  probe
  misc_feature (1)..(25): SEQ ID NO: 791; WAN024DQB_s_at; Start 49; Stop 73
attttgaatcatattcgaatgggag

SEQ ID NO: 167534 - DNA, 25 bp, Artificial
  probe
  misc_feature (1)..(25): SEQ ID NO: 791; WAN024DQB_s_at; Start 30; Stop 54
aaacattgattctaagcgaattttg

SEQ ID NO: 167535 - DNA, 25 bp, Artificial
  probe
  misc_feature (1)..(25): SEQ ID NO: 791; WAN024DQB_s_at; Start 45; Stop 69
gcgaattttgaatcatattcgaatg

SEQ ID NO: 167536 - DNA, 25 bp, Artificial
  probe
  misc_feature (1)..(25): SEQ ID NO: 791; WAN024DQB_s_at; Start 31; Stop 55
aacattgattctaagcgaattttga

SEQ ID NO: 167537 - DNA, 25 bp, Artificial
  probe
  misc_feature (1)..(25): SEQ ID NO: 791; WAN024DQB_s_at; Start 57; Stop 81
tcatattcgaatgggagtttttaaa

SEQ ID NO: 167538 - DNA, 25 bp, Artificial
  probe
  misc_feature (1)..(25): SEQ ID NO: 791; WAN024DQB_s_at; Start 68; Stop 92
tgggagtttttaaaatcatgtttca

SEQ ID NO: 167539 - DNA, 25 bp, Artificial
  probe
  misc_feature (1)..(25): SEQ ID NO: 791; WAN024DQB_s_at; Start 55; Stop 79
aatcatattcgaatgggagttttta

SEQ ID NO: 167540 - DNA, 25 bp, Artificial
  probe
  misc_feature (1)..(25): SEQ ID NO: 791; WAN024DQB_s_at; Start 22; Stop 46
aagtgggaaaacattgattctaagc

SEQ ID NO: 167541 - DNA, 25 bp, Artificial
  probe
  misc_feature (1)..(25): SEQ ID NO: 791; WAN024DQB_s_at; Start 54; Stop 78
gaatcatattcgaatgggagttttt

SEQ ID NO: 167542 - DNA, 25 bp, Artificial
  probe
  misc_feature (1)..(25): SEQ ID NO: 791; WAN024DQB_s_at; Start 43; Stop 67
aagcgaattttgaatcatattcgaa

SEQ ID NO: 167543 - DNA, 25 bp, Artificial
  probe
  misc_feature (1)..(25): SEQ ID NO: 791; WAN024DQB_s_at; Start 28; Stop 52
gaaaacattgattctaagcgaattt

SEQ ID NO: 167544 - DNA, 25 bp, Artificial
  probe
  misc_feature (1)..(25): SEQ ID NO: 791; WAN024DQB_s_at; Start 63; Stop 87
tcgaatgggagtttttaaaatcatg

SEQ ID NO: 167545 - DNA, 25 bp, Artificial
  probe
  misc_feature (1)..(25): SEQ ID NO: 791; WAN024DQB_s_at; Start 24; Stop 48
gtgggaaaacattgattctaagcga

SEQ ID NO: 167546 - DNA, 25 bp, Artificial
  probe
  misc_feature (1)..(25): SEQ ID NO: 791; WAN024DQB_s_at; Start 23; Stop 47
agtgggaaaacattgattctaagcg

SEQ ID NO: 167547 - DNA, 25 bp, Artificial
  probe
  misc_feature (1)..(25): SEQ ID NO: 791; WAN024DQB_s_at; Start 64; Stop 88
cgaatgggagtttttaaaatcatgt

SEQ ID NO: 167548 - DNA, 25 bp, Artificial
  probe
  misc_feature (1)..(25): SEQ ID NO: 791; WAN024DQB_s_at; Start 50; Stop 74
ttttgaatcatattcgaatgggagt

SEQ ID NO: 167549 - DNA, 25 bp, Artificial
  probe
  misc_feature (1)..(25): SEQ ID NO: 791; WAN024DQB_s_at; Start 40; Stop 64
tctaagcgaattttgaatcatattc

SEQ ID NO: 167550 - DNA, 25 bp, Artificial
  probe
  misc_feature (1)..(25): SEQ ID NO: 791; WAN024DQB_s_at; Start 27; Stop 51
ggaaaacattgattctaagcgaatt

SEQ ID NO: 167551 - DNA, 25 bp, Artificial
  probe
  misc_feature (1)..(25): SEQ ID NO: 5061; WAN024DQC_at; Start 15; Stop 39
gttttctagagcaacagagtcatgg

SEQ ID NO: 167552 - DNA, 25 bp, Artificial
  probe
  misc_feature (1)..(25): SEQ ID NO: 5061; WAN024DQC_at; Start 84; Stop 108
tcaaaagtctgttacccaagccttg

SEQ ID NO: 167553 - DNA, 25 bp, Artificial
  probe
  misc_feature (1)..(25): SEQ ID NO: 5061; WAN024DQC_at; Start 35; Stop 59
catggaatggactcatggttgagat

SEQ ID NO: 167554 - DNA, 25 bp, Artificial
  probe
  misc_feature (1)..(25): SEQ ID NO: 5061; WAN024DQC_at; Start 6; Stop 30
tattgcaaggttttctagagcaaca

SEQ ID NO: 167555 - DNA, 25 bp, Artificial
  probe
  misc_feature (1)..(25): SEQ ID NO: 5061; WAN024DQC_at; Start 75; Stop 99
ggacttcattcaaaagtctgttacc

SEQ ID NO: 167556 - DNA, 25 bp, Artificial
  probe
  misc_feature (1)..(25): SEQ ID NO: 5061; WAN024DQC_at; Start 48; Stop 72
catggttgagatttctccttgttgc

SEQ ID NO: 167557 - DNA, 25 bp, Artificial
  probe
  misc_feature (1)..(25): SEQ ID NO: 5061; WAN024DQC_at; Start 9; Stop 33
tgcaaggttttctagagcaacagag

SEQ ID NO: 167558 - DNA, 25 bp, Artificial
  probe
  misc_feature (1)..(25): SEQ ID NO: 5061; WAN024DQC_at; Start 2; Stop 26
tgactattgcaaggttttctagagc

SEQ ID NO: 167559 - DNA, 25 bp, Artificial
  probe
  misc_feature (1)..(25): SEQ ID NO: 5061; WAN024DQC_at; Start 31; Stop 55
gagtcatggaatggactcatggttg

SEQ ID NO: 167560 - DNA, 25 bp, Artificial
  probe
  misc_feature (1)..(25): SEQ ID NO: 5061; WAN024DQC_at; Start 23; Stop 47
gagcaacagagtcatggaatggact

SEQ ID NO: 167561 - DNA, 25 bp, Artificial
  probe
  misc_feature (1)..(25): SEQ ID NO: 5061; WAN024DQC_at; Start 14; Stop 38
ggttttctagagcaacagagtcatg

SEQ ID NO: 167562 - DNA, 25 bp, Artificial
  probe
  misc_feature (1)..(25): SEQ ID NO: 5061; WAN024DQC_at; Start 40; Stop 64
aatggactcatggttgagatttctc

SEQ ID NO: 167563 - DNA, 25 bp, Artificial
  probe
  misc_feature (1)..(25): SEQ ID NO: 5061; WAN024DQC_at; Start 79; Stop 103
ttcattcaaaagtctgttacccaag

SEQ ID NO: 167564 - DNA, 25 bp, Artificial
  probe
  misc_feature (1)..(25): SEQ ID NO: 5061; WAN024DQC_at; Start 26; Stop 50
caacagagtcatggaatggactcat

SEQ ID NO: 167565 - DNA, 25 bp, Artificial
  probe
  misc_feature (1)..(25): SEQ ID NO: 5061; WAN024DQC_at; Start 64; Stop 88
ccttgttgcttggacttcattcaaa

SEQ ID NO: 167566 - DNA, 25 bp, Artificial
  probe
  misc_feature (1)..(25): SEQ ID NO: 5061; WAN024DQC_at; Start 44; Stop 68
gactcatggttgagatttctccttg

SEQ ID NO: 167567 - DNA, 25 bp, Artificial
  probe
  misc_feature (1)..(25): SEQ ID NO: 5061; WAN024DQC_at; Start 67; Stop 91
tgttgcttggacttcattcaaaagt

SEQ ID NO: 167568 - DNA, 25 bp, Artificial
  probe
  misc_feature (1)..(25): SEQ ID NO: 5061; WAN024DQC_at; Start 54; Stop 78
tgagatttctccttgttgcttggac

SEQ ID NO: 167569 - DNA, 25 bp, Artificial
  probe
  misc_feature (1)..(25): SEQ ID NO: 5061; WAN024DQC_at; Start 11; Stop 35
caaggttttctagagcaacagagtc

SEQ ID NO: 167570 - DNA, 25 bp, Artificial
  probe
  misc_feature (1)..(25): SEQ ID NO: 5061; WAN024DQC_at; Start 85; Stop 109
caaaagtctgttacccaagccttgt

SEQ ID NO: 167571 - DNA, 25 bp, Artificial
  probe
  misc_feature (1)..(25): SEQ ID NO: 5061; WAN024DQC_at; Start 12; Stop 36
aaggttttctagagcaacagagtca

SEQ ID NO: 167572 - DNA, 25 bp, Artificial
  probe
  misc_feature (1)..(25): SEQ ID NO: 5061; WAN024DQC_at; Start 21; Stop 45
tagagcaacagagtcatggaatgga

SEQ ID NO: 167573 - DNA, 25 bp, Artificial
  probe
  misc_feature (1)..(25): SEQ ID NO: 5061; WAN024DQC_at; Start 25; Stop 49
gcaacagagtcatggaatggactca

SEQ ID NO: 167574 - DNA, 25 bp, Artificial
  probe
  misc_feature (1)..(25): SEQ ID NO: 5061; WAN024DQC_at; Start 42; Stop 66
tggactcatggttgagatttctcct

SEQ ID NO: 167575 - DNA, 25 bp, Artificial
  probe
  misc_feature (1)..(25): SEQ ID NO: 5061; WAN024DQC_at; Start 88; Stop 112
aagtctgttacccaagccttgttca

SEQ ID NO: 167576 - DNA, 25 bp, Artificial
  probe
  misc_feature (1)..(25): SEQ ID NO: 5061; WAN024DQC_at; Start 3; Stop 27
gactattgcaaggttttctagagca

SEQ ID NO: 167577 - DNA, 25 bp, Artificial
  probe
  misc_feature (1)..(25): SEQ ID NO: 5061; WAN024DQC_at; Start 19; Stop 43
tctagagcaacagagtcatggaatg

SEQ ID NO: 167578 - DNA, 25 bp, Artificial
  probe
  misc_feature (1)..(25): SEQ ID NO: 5061; WAN024DQC_at; Start 29; Stop 53
cagagtcatggaatggactcatggt

SEQ ID NO: 167579 - DNA, 25 bp, Artificial
  probe
  misc_feature (1)..(25): SEQ ID NO: 5061; WAN024DQC_at; Start 16; Stop 40
ttttctagagcaacagagtcatgga

SEQ ID NO: 167580 - DNA, 25 bp, Artificial
  probe
  misc_feature (1)..(25): SEQ ID NO: 5061; WAN024DQC_at; Start 91; Stop 115
tctgttacccaagccttgttcaaac

SEQ ID NO: 167581 - DNA, 25 bp, Artificial
  probe
  misc_feature (1)..(25): SEQ ID NO: 5061; WAN024DQC_at; Start 57; Stop 81
gatttctccttgttgcttggacttc

SEQ ID NO: 167582 - DNA, 25 bp, Artificial
  probe
  misc_feature (1)..(25): SEQ ID NO: 5061; WAN024DQC_at; Start 63; Stop 87
tccttgttgcttggacttcattcaa

SEQ ID NO: 167583 - DNA, 25 bp, Artificial
  probe
  misc_feature (1)..(25): SEQ ID NO: 5061; WAN024DQC_at; Start 81; Stop 105
cattcaaaagtctgttacccaagcc

SEQ ID NO: 167584 - DNA, 25 bp, Artificial
  probe
  misc_feature (1)..(25): SEQ ID NO: 5061; WAN024DQC_at; Start 71; Stop 95
gcttggacttcattcaaaagtctgt

SEQ ID NO: 167585 - DNA, 25 bp, Artificial
  probe
  misc_feature (1)..(25): SEQ ID NO: 1136; WAN024DQD_at; Start 2; Stop 26
tgaagtccaagcaacaaggagaaat

SEQ ID NO: 167586 - DNA, 25 bp, Artificial
  probe
  misc_feature (1)..(25): SEQ ID NO: 1136; WAN024DQD_at; Start 20; Stop 44
gagaaatctcaaccatgagtccatt

SEQ ID NO: 167587 - DNA, 25 bp, Artificial
  probe
  misc_feature (1)..(25): SEQ ID NO: 1136; WAN024DQD_at; Start 16; Stop 40
caaggagaaatctcaaccatgagtc

SEQ ID NO: 167588 - DNA, 25 bp, Artificial
  probe
  misc_feature (1)..(25): SEQ ID NO: 1136; WAN024DQD_at; Start 19; Stop 43
ggagaaatctcaaccatgagtccat

SEQ ID NO: 167589 - DNA, 25 bp, Artificial
  probe
  misc_feature (1)..(25): SEQ ID NO: 1136; WAN024DQD_at; Start 7; Stop 31
tccaagcaacaaggagaaatctcaa

SEQ ID NO: 167590 - DNA, 25 bp, Artificial
  probe
  misc_feature (1)..(25): SEQ ID NO: 1136; WAN024DQD_at; Start 53; Stop 77
ctgttgctctagaaaaccttgcaat

SEQ ID NO: 167591 - DNA, 25 bp, Artificial
  probe
  misc_feature (1)..(25): SEQ ID NO: 1136; WAN024DQD_at; Start 51; Stop 75
ctctgttgctctagaaaaccttgca

SEQ ID NO: 167592 - DNA, 25 bp, Artificial
  probe
  misc_feature (1)..(25): SEQ ID NO: 1136; WAN024DQD_at; Start 58; Stop 82
gctctagaaaaccttgcaatagtca

SEQ ID NO: 167593 - DNA, 25 bp, Artificial
  probe
  misc_feature (1)..(25): SEQ ID NO: 1136; WAN024DQD_at; Start 14; Stop 38
aacaaggagaaatctcaaccatgag

SEQ ID NO: 167594 - DNA, 25 bp, Artificial
  probe
  misc_feature (1)..(25): SEQ ID NO: 1136; WAN024DQD_at; Start 26; Stop 50
tctcaaccatgagtccattccatga

SEQ ID NO: 167595 - DNA, 25 bp, Artificial
  probe
  misc_feature (1)..(25): SEQ ID NO: 1136; WAN024DQD_at; Start 60; Stop 84
tctagaaaaccttgcaatagtcaag

SEQ ID NO: 167596 - DNA, 25 bp, Artificial
  probe
  misc_feature (1)..(25): SEQ ID NO: 1136; WAN024DQD_at; Start 9; Stop 33
caagcaacaaggagaaatctcaacc

SEQ ID NO: 167597 - DNA, 25 bp, Artificial
  probe
  misc_feature (1)..(25): SEQ ID NO: 1136; WAN024DQD_at; Start 44; Stop 68
tccatgactctgttgctctagaaaa

SEQ ID NO: 167598 - DNA, 25 bp, Artificial
  probe
  misc_feature (1)..(25): SEQ ID NO: 1136; WAN024DQD_at; Start 8; Stop 32
ccaagcaacaaggagaaatctcaac

SEQ ID NO: 167599 - DNA, 25 bp, Artificial
  probe
  misc_feature (1)..(25): SEQ ID NO: 1136; WAN024DQD_at; Start 36; Stop 60
gagtccattccatgactctgttgct

SEQ ID NO: 167600 - DNA, 25 bp, Artificial
  probe
  misc_feature (1)..(25): SEQ ID NO: 1136; WAN024DQD_at; Start 48; Stop 72
tgactctgttgctctagaaaacctt

SEQ ID NO: 167601 - DNA, 25 bp, Artificial
  probe
  misc_feature (1)..(25): SEQ ID NO: 1136; WAN024DQD_at; Start 28; Stop 52
tcaaccatgagtccattccatgact

SEQ ID NO: 167602 - DNA, 25 bp, Artificial
  probe
  misc_feature (1)..(25): SEQ ID NO: 1136; WAN024DQD_at; Start 46; Stop 70
catgactctgttgctctagaaaacc

SEQ ID NO: 167603 - DNA, 25 bp, Artificial
  probe
  misc_feature (1)..(25): SEQ ID NO: 1136; WAN024DQD_at; Start 50; Stop 74
actctgttgctctagaaaaccttgc

SEQ ID NO: 167604 - DNA, 25 bp, Artificial
  probe
  misc_feature (1)..(25): SEQ ID NO: 1136; WAN024DQD_at; Start 49; Stop 73
gactctgttgctctagaaaaccttg

SEQ ID NO: 167605 - DNA, 25 bp, Artificial
  probe
  misc_feature (1)..(25): SEQ ID NO: 1136; WAN024DQD_at; Start 57; Stop 81
tgctctagaaaaccttgcaatagtc

SEQ ID NO: 167606 - DNA, 25 bp, Artificial
  probe
  misc_feature (1)..(25): SEQ ID NO: 1136; WAN024DQD_at; Start 41; Stop 65
cattccatgactctgttgctctaga

SEQ ID NO: 167607 - DNA, 25 bp, Artificial
  probe
  misc_feature (1)..(25): SEQ ID NO: 1136; WAN024DQD_at; Start 6; Stop 30
gtccaagcaacaaggagaaatctca

SEQ ID NO: 167608 - DNA, 25 bp, Artificial
  probe
  misc_feature (1)..(25): SEQ ID NO: 1136; WAN024DQD_at; Start 35; Stop 59
tgagtccattccatgactctgttgc

SEQ ID NO: 167609 - DNA, 25 bp, Artificial
  probe
  misc_feature (1)..(25): SEQ ID NO: 1136; WAN024DQD_at; Start 17; Stop 41
aaggagaaatctcaaccatgagtcc

SEQ ID NO: 167610 - DNA, 25 bp, Artificial
  probe
  misc_feature (1)..(25): SEQ ID NO: 1136; WAN024DQD_at; Start 40; Stop 64
ccattccatgactctgttgctctag

SEQ ID NO: 167611 - DNA, 25 bp, Artificial
  probe
  misc_feature (1)..(25): SEQ ID NO: 1136; WAN024DQD_at; Start 3; Stop 27
gaagtccaagcaacaaggagaaatc

SEQ ID NO: 167612 - DNA, 25 bp, Artificial
  probe
  misc_feature (1)..(25): SEQ ID NO: 1136; WAN024DQD_at; Start 31; Stop 55
accatgagtccattccatgactctg

SEQ ID NO: 167613 - DNA, 25 bp, Artificial
  probe
  misc_feature (1)..(25): SEQ ID NO: 1136; WAN024DQD_at; Start 22; Stop 46
gaaatctcaaccatgagtccattcc

SEQ ID NO: 167614 - DNA, 25 bp, Artificial
  probe
  misc_feature (1)..(25): SEQ ID NO: 1136; WAN024DQD_at; Start 52; Stop 76
tctgttgctctagaaaaccttgcaa

SEQ ID NO: 167615 - DNA, 25 bp, Artificial
  probe
  misc_feature (1)..(25): SEQ ID NO: 1136; WAN024DQD_at; Start 12; Stop 36
gcaacaaggagaaatctcaaccatg

SEQ ID NO: 167616 - DNA, 25 bp, Artificial
  probe
  misc_feature (1)..(25): SEQ ID NO: 1136; WAN024DQD_at; Start 5; Stop 29
agtccaagcaacaaggagaaatctc

SEQ ID NO: 167617 - DNA, 25 bp, Artificial
  probe
  misc_feature (1)..(25): SEQ ID NO: 1136; WAN024DQD_at; Start 45; Stop 69
ccatgactctgttgctctagaaaac

SEQ ID NO: 167618 - DNA, 25 bp, Artificial
  probe
  misc_feature (1)..(25): SEQ ID NO: 1136; WAN024DQD_at; Start 55; Stop 79
gttgctctagaaaaccttgcaatag

SEQ ID NO: 167619 - DNA, 25 bp, Artificial
  probe
  misc_feature (1)..(25): SEQ ID NO: 5080; WAN024DQE_at; Start 8; Stop 32
tttcaaacatgataaatcctctttc

SEQ ID NO: 167620 - DNA, 25 bp, Artificial
  probe
  misc_feature (1)..(25): SEQ ID NO: 5080; WAN024DQE_at; Start 70; Stop 94
ccagtcgagtttgccttctatcatc

SEQ ID NO: 167621 - DNA, 25 bp, Artificial
  probe
  misc_feature (1)..(25): SEQ ID NO: 5080; WAN024DQE_at; Start 12; Stop 36
aaacatgataaatcctctttctaag

SEQ ID NO: 167622 - DNA, 25 bp, Artificial
  probe
  misc_feature (1)..(25): SEQ ID NO: 5080; WAN024DQE_at; Start 73; Stop 97
gtcgagtttgccttctatcatcatc

SEQ ID NO: 167623 - DNA, 25 bp, Artificial
  probe
  misc_feature (1)..(25): SEQ ID NO: 5080; WAN024DQE_at; Start 67; Stop 91
aacccagtcgagtttgccttctatc

SEQ ID NO: 167624 - DNA, 25 bp, Artificial
  probe
  misc_feature (1)..(25): SEQ ID NO: 5080; WAN024DQE_at; Start 66; Stop 90
aaacccagtcgagtttgccttctat

SEQ ID NO: 167625 - DNA, 25 bp, Artificial
  probe
  misc_feature (1)..(25): SEQ ID NO: 5080; WAN024DQE_at; Start 28; Stop 52
ctttctaagaaatctctccctatta

SEQ ID NO: 167626 - DNA, 25 bp, Artificial
  probe
  misc_feature (1)..(25): SEQ ID NO: 5080; WAN024DQE_at; Start 5; Stop 29
ctttttcaaacatgataaatcctct

SEQ ID NO: 167627 - DNA, 25 bp, Artificial
  probe
  misc_feature (1)..(25): SEQ ID NO: 5080; WAN024DQE_at; Start 36; Stop 60
gaaatctctccctattataccaaaa

SEQ ID NO: 167628 - DNA, 25 bp, Artificial
  probe
  misc_feature (1)..(25): SEQ ID NO: 5080; WAN024DQE_at; Start 69; Stop 93
cccagtcgagtttgccttctatcat

SEQ ID NO: 167629 - DNA, 25 bp, Artificial
  probe
  misc_feature (1)..(25): SEQ ID NO: 5080; WAN024DQE_at; Start 2; Stop 26
tgactttttcaaacatgataaatcc

SEQ ID NO: 167630 - DNA, 25 bp, Artificial
  probe
  misc_feature (1)..(25): SEQ ID NO: 5080; WAN024DQE_at; Start 35; Stop 59
agaaatctctccctattataccaaa

SEQ ID NO: 167631 - DNA, 25 bp, Artificial
  probe
  misc_feature (1)..(25): SEQ ID NO: 5080; WAN024DQE_at; Start 68; Stop 92
acccagtcgagtttgccttctatca

SEQ ID NO: 167632 - DNA, 25 bp, Artificial
  probe
  misc_feature (1)..(25): SEQ ID NO: 5080; WAN024DQE_at; Start 13; Stop 37
aacatgataaatcctctttctaaga

SEQ ID NO: 167633 - DNA, 25 bp, Artificial
  probe
  misc_feature (1)..(25): SEQ ID NO: 5080; WAN024DQE_at; Start 63; Stop 87
agcaaacccagtcgagtttgccttc

SEQ ID NO: 167634 - DNA, 25 bp, Artificial
  probe
  misc_feature (1)..(25): SEQ ID NO: 5080; WAN024DQE_at; Start 3; Stop 27
gactttttcaaacatgataaatcct

SEQ ID NO: 167635 - DNA, 25 bp, Artificial
  probe
  misc_feature (1)..(25): SEQ ID NO: 5080; WAN024DQE_at; Start 75; Stop 99
cgagtttgccttctatcatcatcta

SEQ ID NO: 167636 - DNA, 25 bp, Artificial
  probe
  misc_feature (1)..(25): SEQ ID NO: 5080; WAN024DQE_at; Start 72; Stop 96
agtcgagtttgccttctatcatcat

SEQ ID NO: 167637 - DNA, 25 bp, Artificial
  probe
  misc_feature (1)..(25): SEQ ID NO: 5080; WAN024DQE_at; Start 10; Stop 34
tcaaacatgataaatcctctttcta

SEQ ID NO: 167638 - DNA, 25 bp, Artificial
  probe
  misc_feature (1)..(25): SEQ ID NO: 5080; WAN024DQE_at; Start 9; Stop 33
ttcaaacatgataaatcctctttct

SEQ ID NO: 167639 - DNA, 25 bp, Artificial
  probe
  misc_feature (1)..(25): SEQ ID NO: 5080; WAN024DQE_at; Start 33; Stop 57
taagaaatctctccctattatacca

SEQ ID NO: 167640 - DNA, 25 bp, Artificial
  probe
  misc_feature (1)..(25): SEQ ID NO: 5080; WAN024DQE_at; Start 65; Stop 89
caaacccagtcgagtttgccttcta

SEQ ID NO: 167641 - DNA, 25 bp, Artificial
  probe
  misc_feature (1)..(25): SEQ ID NO: 5080; WAN024DQE_at; Start 6; Stop 30
tttttcaaacatgataaatcctctt

SEQ ID NO: 167642 - DNA, 25 bp, Artificial
  probe
  misc_feature (1)..(25): SEQ ID NO: 5080; WAN024DQE_at; Start 11; Stop 35
caaacatgataaatcctctttctaa

SEQ ID NO: 167643 - DNA, 25 bp, Artificial
  probe
  misc_feature (1)..(25): SEQ ID NO: 5080; WAN024DQE_at; Start 61; Stop 85
aaagcaaacccagtcgagtttgcct

SEQ ID NO: 167644 - DNA, 25 bp, Artificial
  probe
  misc_feature (1)..(25): SEQ ID NO: 5080; WAN024DQE_at; Start 27; Stop 51
tctttctaagaaatctctccctatt

SEQ ID NO: 167645 - DNA, 25 bp, Artificial
  probe
  misc_feature (1)..(25): SEQ ID NO: 5080; WAN024DQE_at; Start 26; Stop 50
ctctttctaagaaatctctccctat

SEQ ID NO: 167646 - DNA, 25 bp, Artificial
  probe
  misc_feature (1)..(25): SEQ ID NO: 5080; WAN024DQE_at; Start 31; Stop 55
tctaagaaatctctccctattatac

SEQ ID NO: 167647 - DNA, 25 bp, Artificial
  probe
  misc_feature (1)..(25): SEQ ID NO: 5080; WAN024DQE_at; Start 32; Stop 56
ctaagaaatctctccctattatacc

SEQ ID NO: 167648 - DNA, 25 bp, Artificial
  probe
  misc_feature (1)..(25): SEQ ID NO: 5080; WAN024DQE_at; Start 74; Stop 98
tcgagtttgccttctatcatcatct

SEQ ID NO: 167649 - DNA, 25 bp, Artificial
  probe
  misc_feature (1)..(25): SEQ ID NO: 5080; WAN024DQE_at; Start 62; Stop 86
aagcaaacccagtcgagtttgcctt

SEQ ID NO: 167650 - DNA, 25 bp, Artificial
  probe
  misc_feature (1)..(25): SEQ ID NO: 5080; WAN024DQE_at; Start 64; Stop 88
gcaaacccagtcgagtttgccttct

SEQ ID NO: 167651 - DNA, 25 bp, Artificial
  probe
  misc_feature (1)..(25): SEQ ID NO: 5080; WAN024DQE_at; Start 4; Stop 28
actttttcaaacatgataaatcctc

SEQ ID NO: 167652 - DNA, 25 bp, Artificial
  probe
  misc_feature (1)..(25): SEQ ID NO: 5080; WAN024DQE_at; Start 25; Stop 49
cctctttctaagaaatctctcccta

SEQ ID NO: 167653 - DNA, 25 bp, Artificial
  probe
  misc_feature (1)..(25): SEQ ID NO: 6700; WAN024DQF_at; Start 130; Stop 154
ctagcaaaaaagagagccaaaactc

SEQ ID NO: 167654 - DNA, 25 bp, Artificial
  probe
  misc_feature (1)..(25): SEQ ID NO: 6700; WAN024DQF_at; Start 81; Stop 105
caaaagagatggtgataactcaaaa

SEQ ID NO: 167655 - DNA, 25 bp, Artificial
  probe
  misc_feature (1)..(25): SEQ ID NO: 6700; WAN024DQF_at; Start 64; Stop 88
cattcatattatccaaacaaaagag

SEQ ID NO: 167656 - DNA, 25 bp, Artificial
  probe
  misc_feature (1)..(25): SEQ ID NO: 6700; WAN024DQF_at; Start 72; Stop 96
ttatccaaacaaaagagatggtgat

SEQ ID NO: 167657 - DNA, 25 bp, Artificial
  probe
  misc_feature (1)..(25): SEQ ID NO: 6700; WAN024DQF_at; Start 80; Stop 104
acaaaagagatggtgataactcaaa

SEQ ID NO: 167658 - DNA, 25 bp, Artificial
  probe
  misc_feature (1)..(25): SEQ ID NO: 6700; WAN024DQF_at; Start 107; Stop 131
taaattgcaatcttgtaaaattcct

SEQ ID NO: 167659 - DNA, 25 bp, Artificial
  probe
  misc_feature (1)..(25): SEQ ID NO: 6700; WAN024DQF_at; Start 68; Stop 92
catattatccaaacaaaagagatgg

SEQ ID NO: 167660 - DNA, 25 bp, Artificial
  probe
  misc_feature (1)..(25): SEQ ID NO: 6700; WAN024DQF_at; Start 131; Stop 155
tagcaaaaaagagagccaaaactct

SEQ ID NO: 167661 - DNA, 25 bp, Artificial
  probe
  misc_feature (1)..(25): SEQ ID NO: 6700; WAN024DQF_at; Start 63; Stop 87
ccattcatattatccaaacaaaaga

SEQ ID NO: 167662 - DNA, 25 bp, Artificial
  probe
  misc_feature (1)..(25): SEQ ID NO: 6700; WAN024DQF_at; Start 84; Stop 108
aagagatggtgataactcaaaaata

SEQ ID NO: 167663 - DNA, 25 bp, Artificial
  probe
  misc_feature (1)..(25): SEQ ID NO: 6700; WAN024DQF_at; Start 67; Stop 91
tcatattatccaaacaaaagagatg

SEQ ID NO: 167664 - DNA, 25 bp, Artificial
  probe
  misc_feature (1)..(25): SEQ ID NO: 6700; WAN024DQF_at; Start 71; Stop 95
attatccaaacaaaagagatggtga

SEQ ID NO: 167665 - DNA, 25 bp, Artificial
  probe
  misc_feature (1)..(25): SEQ ID NO: 6700; WAN024DQF_at; Start 60; Stop 84
ttcccattcatattatccaaacaaa

SEQ ID NO: 167666 - DNA, 25 bp, Artificial
  probe
  misc_feature (1)..(25): SEQ ID NO: 6700; WAN024DQF_at; Start 75; Stop 99
tccaaacaaaagagatggtgataac

SEQ ID NO: 167667 - DNA, 25 bp, Artificial
  probe
  misc_feature (1)..(25): SEQ ID NO: 6700; WAN024DQF_at; Start 142; Stop 166
agagccaaaactctcttttttatct

SEQ ID NO: 167668 - DNA, 25 bp, Artificial
  probe
  misc_feature (1)..(25): SEQ ID NO: 6700; WAN024DQF_at; Start 82; Stop 106
aaaagagatggtgataactcaaaaa

SEQ ID NO: 167669 - DNA, 25 bp, Artificial
  probe
  misc_feature (1)..(25): SEQ ID NO: 6700; WAN024DQF_at; Start 78; Stop 102
aaacaaaagagatggtgataactca

SEQ ID NO: 167670 - DNA, 25 bp, Artificial
  probe
  misc_feature (1)..(25): SEQ ID NO: 6700; WAN024DQF_at; Start 70; Stop 94
tattatccaaacaaaagagatggtg

SEQ ID NO: 167671 - DNA, 25 bp, Artificial
  probe
  misc_feature (1)..(25): SEQ ID NO: 6700; WAN024DQF_at; Start 141; Stop 165
gagagccaaaactctcttttttatc

SEQ ID NO: 167672 - DNA, 25 bp, Artificial
  probe
  misc_feature (1)..(25): SEQ ID NO: 6700; WAN024DQF_at; Start 66; Stop 90
ttcatattatccaaacaaaagagat

SEQ ID NO: 167673 - DNA, 25 bp, Artificial
  probe
  misc_feature (1)..(25): SEQ ID NO: 6700; WAN024DQF_at; Start 97; Stop 121
aactcaaaaataaattgcaatcttg

SEQ ID NO: 167674 - DNA, 25 bp, Artificial
  probe
  misc_feature (1)..(25): SEQ ID NO: 6700; WAN024DQF_at; Start 79; Stop 103
aacaaaagagatggtgataactcaa

SEQ ID NO: 167675 - DNA, 25 bp, Artificial
  probe
  misc_feature (1)..(25): SEQ ID NO: 6700; WAN024DQF_at; Start 99; Stop 123
ctcaaaaataaattgcaatcttgta

SEQ ID NO: 167676 - DNA, 25 bp, Artificial
  probe
  misc_feature (1)..(25): SEQ ID NO: 6700; WAN024DQF_at; Start 69; Stop 93
atattatccaaacaaaagagatggt

SEQ ID NO: 167677 - DNA, 25 bp, Artificial
  probe
  misc_feature (1)..(25): SEQ ID NO: 6700; WAN024DQF_at; Start 129; Stop 153
cctagcaaaaaagagagccaaaact

SEQ ID NO: 167678 - DNA, 25 bp, Artificial
  probe
  misc_feature (1)..(25): SEQ ID NO: 6700; WAN024DQF_at; Start 62; Stop 86
cccattcatattatccaaacaaaag

SEQ ID NO: 167679 - DNA, 25 bp, Artificial
  probe
  misc_feature (1)..(25): SEQ ID NO: 6700; WAN024DQF_at; Start 58; Stop 82
ttttcccattcatattatccaaaca

SEQ ID NO: 167680 - DNA, 25 bp, Artificial
  probe
  misc_feature (1)..(25): SEQ ID NO: 6700; WAN024DQF_at; Start 109; Stop 133
aattgcaatcttgtaaaattcctag

SEQ ID NO: 167681 - DNA, 25 bp, Artificial
  probe
  misc_feature (1)..(25): SEQ ID NO: 6700; WAN024DQF_at; Start 73; Stop 97
tatccaaacaaaagagatggtgata

SEQ ID NO: 167682 - DNA, 25 bp, Artificial
  probe
  misc_feature (1)..(25): SEQ ID NO: 6700; WAN024DQF_at; Start 77; Stop 101
caaacaaaagagatggtgataactc

SEQ ID NO: 167683 - DNA, 25 bp, Artificial
  probe
  misc_feature (1)..(25): SEQ ID NO: 6700; WAN024DQF_at; Start 83; Stop 107
aaagagatggtgataactcaaaaat

SEQ ID NO: 167684 - DNA, 25 bp, Artificial
  probe
  misc_feature (1)..(25): SEQ ID NO: 6700; WAN024DQF_at; Start 101; Stop 125
caaaaataaattgcaatcttgtaaa

SEQ ID NO: 167685 - DNA, 25 bp, Artificial
  probe
  misc_feature (1)..(25): SEQ ID NO: 6700; WAN024DQF_at; Start 65; Stop 89
attcatattatccaaacaaaagaga

SEQ ID NO: 167686 - DNA, 25 bp, Artificial
  probe
  misc_feature (1)..(25): SEQ ID NO: 6700; WAN024DQF_at; Start 76; Stop 100
ccaaacaaaagagatggtgataact

SEQ ID NO: 167687 - DNA, 25 bp, Artificial
  probe
  misc_feature (1)..(25): SEQ ID NO: 5539; WAN024DQG_at; Start 49; Stop 73
gagttatcaccatctcttttgtttg

SEQ ID NO: 167688 - DNA, 25 bp, Artificial
  probe
  misc_feature (1)..(25): SEQ ID NO: 5539; WAN024DQG_at; Start 55; Stop 79
tcaccatctcttttgtttggataat

SEQ ID NO: 167689 - DNA, 25 bp, Artificial
  probe
  misc_feature (1)..(25): SEQ ID NO: 5539; WAN024DQG_at; Start 42; Stop 66
tatttttgagttatcaccatctctt

SEQ ID NO: 167690 - DNA, 25 bp, Artificial
  probe
  misc_feature (1)..(25): SEQ ID NO: 5539; WAN024DQG_at; Start 18; Stop 42
taggaattttacaagattgcaattt

SEQ ID NO: 167691 - DNA, 25 bp, Artificial
  probe
  misc_feature (1)..(25): SEQ ID NO: 5539; WAN024DQG_at; Start 50; Stop 74
agttatcaccatctcttttgtttgg

SEQ ID NO: 167692 - DNA, 25 bp, Artificial
  probe
  misc_feature (1)..(25): SEQ ID NO: 5539; WAN024DQG_at; Start 66; Stop 90
tttgtttggataatatgaatgggaa

SEQ ID NO: 167693 - DNA, 25 bp, Artificial
  probe
  misc_feature (1)..(25): SEQ ID NO: 5539; WAN024DQG_at; Start 69; Stop 93
gtttggataatatgaatgggaaaaa

SEQ ID NO: 167694 - DNA, 25 bp, Artificial
  probe
  misc_feature (1)..(25): SEQ ID NO: 5539; WAN024DQG_at; Start 28; Stop 52
acaagattgcaatttatttttgagt

SEQ ID NO: 167695 - DNA, 25 bp, Artificial
  probe
  misc_feature (1)..(25): SEQ ID NO: 5539; WAN024DQG_at; Start 68; Stop 92
tgtttggataatatgaatgggaaaa

SEQ ID NO: 167696 - DNA, 25 bp, Artificial
  probe
  misc_feature (1)..(25): SEQ ID NO: 5539; WAN024DQG_at; Start 67; Stop 91
ttgtttggataatatgaatgggaaa

SEQ ID NO: 167697 - DNA, 25 bp, Artificial
  probe
  misc_feature (1)..(25): SEQ ID NO: 5539; WAN024DQG_at; Start 48; Stop 72
tgagttatcaccatctcttttgttt

SEQ ID NO: 167698 - DNA, 25 bp, Artificial
  probe
  misc_feature (1)..(25): SEQ ID NO: 5539; WAN024DQG_at; Start 57; Stop 81
accatctcttttgtttggataatat

SEQ ID NO: 167699 - DNA, 25 bp, Artificial
  probe
  misc_feature (1)..(25): SEQ ID NO: 5539; WAN024DQG_at; Start 21; Stop 45
gaattttacaagattgcaatttatt

SEQ ID NO: 167700 - DNA, 25 bp, Artificial
  probe
  misc_feature (1)..(25): SEQ ID NO: 5539; WAN024DQG_at; Start 65; Stop 89
ttttgtttggataatatgaatggga

SEQ ID NO: 167701 - DNA, 25 bp, Artificial
  probe
  misc_feature (1)..(25): SEQ ID NO: 5539; WAN024DQG_at; Start 59; Stop 83
catctcttttgtttggataatatga

SEQ ID NO: 167702 - DNA, 25 bp, Artificial
  probe
  misc_feature (1)..(25): SEQ ID NO: 5539; WAN024DQG_at; Start 20; Stop 44
ggaattttacaagattgcaatttat

SEQ ID NO: 167703 - DNA, 25 bp, Artificial
  probe
  misc_feature (1)..(25): SEQ ID NO: 5539; WAN024DQG_at; Start 52; Stop 76
ttatcaccatctcttttgtttggat

SEQ ID NO: 167704 - DNA, 25 bp, Artificial
  probe
  misc_feature (1)..(25): SEQ ID NO: 5539; WAN024DQG_at; Start 47; Stop 71
ttgagttatcaccatctcttttgtt

SEQ ID NO: 167705 - DNA, 25 bp, Artificial
  probe
  misc_feature (1)..(25): SEQ ID NO: 5539; WAN024DQG_at; Start 58; Stop 82
ccatctcttttgtttggataatatg

SEQ ID NO: 167706 - DNA, 25 bp, Artificial
  probe
  misc_feature (1)..(25): SEQ ID NO: 5539; WAN024DQG_at; Start 17; Stop 41
ctaggaattttacaagattgcaatt

SEQ ID NO: 167707 - DNA, 25 bp, Artificial
  probe
  misc_feature (1)..(25): SEQ ID NO: 5539; WAN024DQG_at; Start 64; Stop 88
cttttgtttggataatatgaatggg

SEQ ID NO: 167708 - DNA, 25 bp, Artificial
  probe
  misc_feature (1)..(25): SEQ ID NO: 5539; WAN024DQG_at; Start 62; Stop 86
ctcttttgtttggataatatgaatg

SEQ ID NO: 167709 - DNA, 25 bp, Artificial
  probe
  misc_feature (1)..(25): SEQ ID NO: 5539; WAN024DQG_at; Start 56; Stop 80
caccatctcttttgtttggataata

SEQ ID NO: 167710 - DNA, 25 bp, Artificial
  probe
  misc_feature (1)..(25): SEQ ID NO: 5539; WAN024DQG_at; Start 46; Stop 70
tttgagttatcaccatctcttttgt

SEQ ID NO: 167711 - DNA, 25 bp, Artificial
  probe
  misc_feature (1)..(25): SEQ ID NO: 5539; WAN024DQG_at; Start 43; Stop 67
atttttgagttatcaccatctcttt

SEQ ID NO: 167712 - DNA, 25 bp, Artificial
  probe
  misc_feature (1)..(25): SEQ ID NO: 5539; WAN024DQG_at; Start 54; Stop 78
atcaccatctcttttgtttggataa

SEQ ID NO: 167713 - DNA, 25 bp, Artificial
  probe
  misc_feature (1)..(25): SEQ ID NO: 5539; WAN024DQG_at; Start 19; Stop 43
aggaattttacaagattgcaattta

SEQ ID NO: 167714 - DNA, 25 bp, Artificial
  probe
  misc_feature (1)..(25): SEQ ID NO: 5539; WAN024DQG_at; Start 45; Stop 69
ttttgagttatcaccatctcttttg

SEQ ID NO: 167715 - DNA, 25 bp, Artificial
  probe
  misc_feature (1)..(25): SEQ ID NO: 5539; WAN024DQG_at; Start 63; Stop 87
tcttttgtttggataatatgaatgg

SEQ ID NO: 167716 - DNA, 25 bp, Artificial
  probe
  misc_feature (1)..(25): SEQ ID NO: 5539; WAN024DQG_at; Start 51; Stop 75
gttatcaccatctcttttgtttgga

SEQ ID NO: 167717 - DNA, 25 bp, Artificial
  probe
  misc_feature (1)..(25): SEQ ID NO: 5539; WAN024DQG_at; Start 61; Stop 85
tctcttttgtttggataatatgaat

SEQ ID NO: 167718 - DNA, 25 bp, Artificial
  probe
  misc_feature (1)..(25): SEQ ID NO: 5539; WAN024DQG_at; Start 53; Stop 77
tatcaccatctcttttgtttggata

SEQ ID NO: 167719 - DNA, 25 bp, Artificial
  probe
  misc_feature (1)..(25): SEQ ID NO: 5539; WAN024DQG_at; Start 27; Stop 51
tacaagattgcaatttatttttgag

SEQ ID NO: 167720 - DNA, 25 bp, Artificial
  probe
  misc_feature (1)..(25): SEQ ID NO: 5539; WAN024DQG_at; Start 29; Stop 53
caagattgcaatttatttttgagtt

SEQ ID NO: 167721 - DNA, 25 bp, Artificial
  probe
  misc_feature (1)..(25): SEQ ID NO: 2666; WAN024DQH_at; Start 35; Stop 59
tactctatgtatttgcgacaccaga

SEQ ID NO: 167722 - DNA, 25 bp, Artificial
  probe
  misc_feature (1)..(25): SEQ ID NO: 2666; WAN024DQH_at; Start 93; Stop 117
ggtatgtattttagtggcactcttg

SEQ ID NO: 167723 - DNA, 25 bp, Artificial
  probe
  misc_feature (1)..(25): SEQ ID NO: 2666; WAN024DQH_at; Start 122; Stop 146
tattggttctatcttttctgaaaat

SEQ ID NO: 167724 - DNA, 25 bp, Artificial
  probe
  misc_feature (1)..(25): SEQ ID NO: 2666; WAN024DQH_at; Start 40; Stop 64
tatgtatttgcgacaccagaaagca

SEQ ID NO: 167725 - DNA, 25 bp, Artificial
  probe
  misc_feature (1)..(25): SEQ ID NO: 2666; WAN024DQH_at; Start 81; Stop 105
tatcgtcgctatggtatgtatttta

SEQ ID NO: 167726 - DNA, 25 bp, Artificial
  probe
  misc_feature (1)..(25): SEQ ID NO: 2666; WAN024DQH_at; Start 194; Stop 218
tagcttactttagtgttagagacat

SEQ ID NO: 167727 - DNA, 25 bp, Artificial
  probe
  misc_feature (1)..(25): SEQ ID NO: 2666; WAN024DQH_at; Start 152; Stop 176
aattaccaacagaaatattcctagc

SEQ ID NO: 167728 - DNA, 25 bp, Artificial
  probe
  misc_feature (1)..(25): SEQ ID NO: 2666; WAN024DQH_at; Start 87; Stop 111
cgctatggtatgtattttagtggca

SEQ ID NO: 167729 - DNA, 25 bp, Artificial
  probe
  misc_feature (1)..(25): SEQ ID NO: 2666; WAN024DQH_at; Start 48; Stop 72
tgcgacaccagaaagcattaaaggg

SEQ ID NO: 167730 - DNA, 25 bp, Artificial
  probe
  misc_feature (1)..(25): SEQ ID NO: 2666; WAN024DQH_at; Start 50; Stop 74
cgacaccagaaagcattaaagggac

SEQ ID NO: 167731 - DNA, 25 bp, Artificial
  probe
  misc_feature (1)..(25): SEQ ID NO: 2666; WAN024DQH_at; Start 33; Stop 57
cctactctatgtatttgcgacacca

SEQ ID NO: 167732 - DNA, 25 bp, Artificial
  probe
  misc_feature (1)..(25): SEQ ID NO: 2666; WAN024DQH_at; Start 30; Stop 54
gctcctactctatgtatttgcgaca

SEQ ID NO: 167733 - DNA, 25 bp, Artificial
  probe
  misc_feature (1)..(25): SEQ ID NO: 2666; WAN024DQH_at; Start 155; Stop 179
taccaacagaaatattcctagcaat

SEQ ID NO: 167734 - DNA, 25 bp, Artificial
  probe
  misc_feature (1)..(25): SEQ ID NO: 2666; WAN024DQH_at; Start 165; Stop 189
aatattcctagcaatagccatgttg

SEQ ID NO: 167735 - DNA, 25 bp, Artificial
  probe
  misc_feature (1)..(25): SEQ ID NO: 2666; WAN024DQH_at; Start 20; Stop 44
gaattttactgctcctactctatgt

SEQ ID NO: 167736 - DNA, 25 bp, Artificial
  probe
  misc_feature (1)..(25): SEQ ID NO: 2666; WAN024DQH_at; Start 42; Stop 66
tgtatttgcgacaccagaaagcatt

SEQ ID NO: 167737 - DNA, 25 bp, Artificial
  probe
  misc_feature (1)..(25): SEQ ID NO: 2666; WAN024DQH_at; Start 159; Stop 183
aacagaaatattcctagcaatagcc

SEQ ID NO: 167738 - DNA, 25 bp, Artificial
  probe
  misc_feature (1)..(25): SEQ ID NO: 2666; WAN024DQH_at; Start 102; Stop 126
tttagtggcactcttgattttattg

SEQ ID NO: 167739 - DNA, 25 bp, Artificial
  probe
  misc_feature (1)..(25): SEQ ID NO: 2666; WAN024DQH_at; Start 221; Stop 245
cactcatgccagtcaaaaaaagtaa

SEQ ID NO: 167740 - DNA, 25 bp, Artificial
  probe
  misc_feature (1)..(25): SEQ ID NO: 2666; WAN024DQH_at; Start 39; Stop 63
ctatgtatttgcgacaccagaaagc

SEQ ID NO: 167741 - DNA, 25 bp, Artificial
  probe
  misc_feature (1)..(25): SEQ ID NO: 2666; WAN024DQH_at; Start 26; Stop 50
tactgctcctactctatgtatttgc

SEQ ID NO: 167742 - DNA, 25 bp, Artificial
  probe
  misc_feature (1)..(25): SEQ ID NO: 2666; WAN024DQH_at; Start 15; Stop 39
cctaggaattttactgctcctactc

SEQ ID NO: 167743 - DNA, 25 bp, Artificial
  probe
  misc_feature (1)..(25): SEQ ID NO: 2666; WAN024DQH_at; Start 192; Stop 216
cctagcttactttagtgttagagac

SEQ ID NO: 167744 - DNA, 25 bp, Artificial
  probe
  misc_feature (1)..(25): SEQ ID NO: 2666; WAN024DQH_at; Start 1; Stop 25
atggtctatttagtcctaggaattt

SEQ ID NO: 167745 - DNA, 25 bp, Artificial
  probe
  misc_feature (1)..(25): SEQ ID NO: 2666; WAN024DQH_at; Start 225; Stop 249
catgccagtcaaaaaaagtaaaaga

SEQ ID NO: 167746 - DNA, 25 bp, Artificial
  probe
  misc_feature (1)..(25): SEQ ID NO: 2666; WAN024DQH_at; Start 37; Stop 61
ctctatgtatttgcgacaccagaaa

SEQ ID NO: 167747 - DNA, 25 bp, Artificial
  probe
  misc_feature (1)..(25): SEQ ID NO: 2666; WAN024DQH_at; Start 46; Stop 70
tttgcgacaccagaaagcattaaag

SEQ ID NO: 167748 - DNA, 25 bp, Artificial
  probe
  misc_feature (1)..(25): SEQ ID NO: 2666; WAN024DQH_at; Start 90; Stop 114
tatggtatgtattttagtggcactc

SEQ ID NO: 167749 - DNA, 25 bp, Artificial
  probe
  misc_feature (1)..(25): SEQ ID NO: 2666; WAN024DQH_at; Start 77; Stop 101
tcaatatcgtcgctatggtatgtat

SEQ ID NO: 167750 - DNA, 25 bp, Artificial
  probe
  misc_feature (1)..(25): SEQ ID NO: 2666; WAN024DQH_at; Start 149; Stop 173
ttcaattaccaacagaaatattcct

SEQ ID NO: 167751 - DNA, 25 bp, Artificial
  probe
  misc_feature (1)..(25): SEQ ID NO: 2666; WAN024DQH_at; Start 163; Stop 187
gaaatattcctagcaatagccatgt

SEQ ID NO: 167752 - DNA, 25 bp, Artificial
  probe
  misc_feature (1)..(25): SEQ ID NO: 2666; WAN024DQH_at; Start 140; Stop 164
tgaaaatttttcaattaccaacaga

SEQ ID NO: 167753 - DNA, 25 bp, Artificial
  probe
  misc_feature (1)..(25): SEQ ID NO: 2666; WAN024DQH_at; Start 44; Stop 68
tatttgcgacaccagaaagcattaa

SEQ ID NO: 167754 - DNA, 25 bp, Artificial
  probe
  misc_feature (1)..(25): SEQ ID NO: 2666; WAN024DQH_at; Start 19; Stop 43
ggaattttactgctcctactctatg

SEQ ID NO: 167755 - DNA, 25 bp, Artificial
  probe
  misc_feature (1)..(25): SEQ ID NO: 6384; WAN024DQI_at; Start 78; Stop 102
gcccacagagactcttgaattgctg

SEQ ID NO: 167756 - DNA, 25 bp, Artificial
  probe
  misc_feature (1)..(25): SEQ ID NO: 6384; WAN024DQI_at; Start 73; Stop 97
gataagcccacagagactcttgaat

SEQ ID NO: 167757 - DNA, 25 bp, Artificial
  probe
  misc_feature (1)..(25): SEQ ID NO: 6384; WAN024DQI_at; Start 52; Stop 76
gaagttcggaatcaattgaaggata

SEQ ID NO: 167758 - DNA, 25 bp, Artificial
  probe
  misc_feature (1)..(25): SEQ ID NO: 6384; WAN024DQI_at; Start 71; Stop 95
aggataagcccacagagactcttga

SEQ ID NO: 167759 - DNA, 25 bp, Artificial
  probe
  misc_feature (1)..(25): SEQ ID NO: 6384; WAN024DQI_at; Start 64; Stop 88
caattgaaggataagcccacagaga

SEQ ID NO: 167760 - DNA, 25 bp, Artificial
  probe
  misc_feature (1)..(25): SEQ ID NO: 6384; WAN024DQI_at; Start 74; Stop 98
ataagcccacagagactcttgaatt

SEQ ID NO: 167761 - DNA, 25 bp, Artificial
  probe
  misc_feature (1)..(25): SEQ ID NO: 6384; WAN024DQI_at; Start 66; Stop 90
attgaaggataagcccacagagact

SEQ ID NO: 167762 - DNA, 25 bp, Artificial
  probe
  misc_feature (1)..(25): SEQ ID NO: 6384; WAN024DQI_at; Start 15; Stop 39
tttacacggtttaggggagtcagca

SEQ ID NO: 167763 - DNA, 25 bp, Artificial
  probe
  misc_feature (1)..(25): SEQ ID NO: 6384; WAN024DQI_at; Start 51; Stop 75
agaagttcggaatcaattgaaggat

SEQ ID NO: 167764 - DNA, 25 bp, Artificial
  probe
  misc_feature (1)..(25): SEQ ID NO: 6384; WAN024DQI_at; Start 69; Stop 93
gaaggataagcccacagagactctt

SEQ ID NO: 167765 - DNA, 25 bp, Artificial
  probe
  misc_feature (1)..(25): SEQ ID NO: 6384; WAN024DQI_at; Start 56; Stop 80
ttcggaatcaattgaaggataagcc

SEQ ID NO: 167766 - DNA, 25 bp, Artificial
  probe
  misc_feature (1)..(25): SEQ ID NO: 6384; WAN024DQI_at; Start 61; Stop 85
aatcaattgaaggataagcccacag

SEQ ID NO: 167767 - DNA, 25 bp, Artificial
  probe
  misc_feature (1)..(25): SEQ ID NO: 6384; WAN024DQI_at; Start 77; Stop 101
agcccacagagactcttgaattgct

SEQ ID NO: 167768 - DNA, 25 bp, Artificial
  probe
  misc_feature (1)..(25): SEQ ID NO: 6384; WAN024DQI_at; Start 63; Stop 87
tcaattgaaggataagcccacagag

SEQ ID NO: 167769 - DNA, 25 bp, Artificial
  probe
  misc_feature (1)..(25): SEQ ID NO: 6384; WAN024DQI_at; Start 67; Stop 91
ttgaaggataagcccacagagactc

SEQ ID NO: 167770 - DNA, 25 bp, Artificial
  probe
  misc_feature (1)..(25): SEQ ID NO: 6384; WAN024DQI_at; Start 57; Stop 81
tcggaatcaattgaaggataagccc

SEQ ID NO: 167771 - DNA, 25 bp, Artificial
  probe
  misc_feature (1)..(25): SEQ ID NO: 6384; WAN024DQI_at; Start 50; Stop 74
aagaagttcggaatcaattgaagga

SEQ ID NO: 167772 - DNA, 25 bp, Artificial
  probe
  misc_feature (1)..(25): SEQ ID NO: 6384; WAN024DQI_at; Start 58; Stop 82
cggaatcaattgaaggataagccca

SEQ ID NO: 167773 - DNA, 25 bp, Artificial
  probe
  misc_feature (1)..(25): SEQ ID NO: 6384; WAN024DQI_at; Start 55; Stop 79
gttcggaatcaattgaaggataagc

SEQ ID NO: 167774 - DNA, 25 bp, Artificial
  probe
  misc_feature (1)..(25): SEQ ID NO: 6384; WAN024DQI_at; Start 62; Stop 86
atcaattgaaggataagcccacaga

SEQ ID NO: 167775 - DNA, 25 bp, Artificial
  probe
  misc_feature (1)..(25): SEQ ID NO: 6384; WAN024DQI_at; Start 65; Stop 89
aattgaaggataagcccacagagac

SEQ ID NO: 167776 - DNA, 25 bp, Artificial
  probe
  misc_feature (1)..(25): SEQ ID NO: 6384; WAN024DQI_at; Start 53; Stop 77
aagttcggaatcaattgaaggataa

SEQ ID NO: 167777 - DNA, 25 bp, Artificial
  probe
  misc_feature (1)..(25): SEQ ID NO: 6384; WAN024DQI_at; Start 70; Stop 94
aaggataagcccacagagactcttg

SEQ ID NO: 167778 - DNA, 25 bp, Artificial
  probe
  misc_feature (1)..(25): SEQ ID NO: 6384; WAN024DQI_at; Start 79; Stop 103
cccacagagactcttgaattgctga

SEQ ID NO: 167779 - DNA, 25 bp, Artificial
  probe
  misc_feature (1)..(25): SEQ ID NO: 6384; WAN024DQI_at; Start 54; Stop 78
agttcggaatcaattgaaggataag

SEQ ID NO: 167780 - DNA, 25 bp, Artificial
  probe
  misc_feature (1)..(25): SEQ ID NO: 6384; WAN024DQI_at; Start 60; Stop 84
gaatcaattgaaggataagcccaca

SEQ ID NO: 167781 - DNA, 25 bp, Artificial
  probe
  misc_feature (1)..(25): SEQ ID NO: 6384; WAN024DQI_at; Start 21; Stop 45
cggtttaggggagtcagcagagtct

SEQ ID NO: 167782 - DNA, 25 bp, Artificial
  probe
  misc_feature (1)..(25): SEQ ID NO: 6384; WAN024DQI_at; Start 75; Stop 99
taagcccacagagactcttgaattg

SEQ ID NO: 167783 - DNA, 25 bp, Artificial
  probe
  misc_feature (1)..(25): SEQ ID NO: 6384; WAN024DQI_at; Start 72; Stop 96
ggataagcccacagagactcttgaa

SEQ ID NO: 167784 - DNA, 25 bp, Artificial
  probe
  misc_feature (1)..(25): SEQ ID NO: 6384; WAN024DQI_at; Start 16; Stop 40
ttacacggtttaggggagtcagcag

SEQ ID NO: 167785 - DNA, 25 bp, Artificial
  probe
  misc_feature (1)..(25): SEQ ID NO: 6384; WAN024DQI_at; Start 59; Stop 83
ggaatcaattgaaggataagcccac

SEQ ID NO: 167786 - DNA, 25 bp, Artificial
  probe
  misc_feature (1)..(25): SEQ ID NO: 6384; WAN024DQI_at; Start 81; Stop 105
cacagagactcttgaattgctgaaa

SEQ ID NO: 167787 - DNA, 25 bp, Artificial
  probe
  misc_feature (1)..(25): SEQ ID NO: 6384; WAN024DQI_at; Start 76; Stop 100
aagcccacagagactcttgaattgc

SEQ ID NO: 167788 - DNA, 25 bp, Artificial
  probe
  misc_feature (1)..(25): SEQ ID NO: 6384; WAN024DQI_at; Start 80; Stop 104
ccacagagactcttgaattgctgaa

SEQ ID NO: 167789 - DNA, 25 bp, Artificial
  probe
  misc_feature (1)..(25): SEQ ID NO: 7050; WAN024DQJ_at; Start 209; Stop 233
tgagggccatcaggaatgatctgaa

SEQ ID NO: 167790 - DNA, 25 bp, Artificial
  probe
  misc_feature (1)..(25): SEQ ID NO: 7050; WAN024DQJ_at; Start 212; Stop 236
gggccatcaggaatgatctgaaact

SEQ ID NO: 167791 - DNA, 25 bp, Artificial
  probe
  misc_feature (1)..(25): SEQ ID NO: 7050; WAN024DQJ_at; Start 47; Stop 71
gcaacgtcaccagactcatttttga

SEQ ID NO: 167792 - DNA, 25 bp, Artificial
  probe
  misc_feature (1)..(25): SEQ ID NO: 7050; WAN024DQJ_at; Start 5; Stop 29
tttcttccgccaaaactgattgtga

SEQ ID NO: 167793 - DNA, 25 bp, Artificial
  probe
  misc_feature (1)..(25): SEQ ID NO: 7050; WAN024DQJ_at; Start 44; Stop 68
ttggcaacgtcaccagactcatttt

SEQ ID NO: 167794 - DNA, 25 bp, Artificial
  probe
  misc_feature (1)..(25): SEQ ID NO: 7050; WAN024DQJ_at; Start 216; Stop 240
catcaggaatgatctgaaactgcga

SEQ ID NO: 167795 - DNA, 25 bp, Artificial
  probe
  misc_feature (1)..(25): SEQ ID NO: 7050; WAN024DQJ_at; Start 147; Stop 171
gcaattcaaggaaacttctggtctt

SEQ ID NO: 167796 - DNA, 25 bp, Artificial
  probe
  misc_feature (1)..(25): SEQ ID NO: 7050; WAN024DQJ_at; Start 53; Stop 77
tcaccagactcatttttgaaaatag

SEQ ID NO: 167797 - DNA, 25 bp, Artificial
  probe
  misc_feature (1)..(25): SEQ ID NO: 7050; WAN024DQJ_at; Start 195; Stop 219
ccttattcaagacatgagggccatc

SEQ ID NO: 167798 - DNA, 25 bp, Artificial
  probe
  misc_feature (1)..(25): SEQ ID NO: 7050; WAN024DQJ_at; Start 15; Stop 39
caaaactgattgtgaaaacaaggct

SEQ ID NO: 167799 - DNA, 25 bp, Artificial
  probe
  misc_feature (1)..(25): SEQ ID NO: 7050; WAN024DQJ_at; Start 91; Stop 115
tctttctcccataattatgatatcg

SEQ ID NO: 167800 - DNA, 25 bp, Artificial
  probe
  misc_feature (1)..(25): SEQ ID NO: 7050; WAN024DQJ_at; Start 164; Stop 188
ctggtcttttctacaaactcctttg

SEQ ID NO: 167801 - DNA, 25 bp, Artificial
  probe
  misc_feature (1)..(25): SEQ ID NO: 7050; WAN024DQJ_at; Start 36; Stop 60
ggctaaaattggcaacgtcaccaga

SEQ ID NO: 167802 - DNA, 25 bp, Artificial
  probe
  misc_feature (1)..(25): SEQ ID NO: 7050; WAN024DQJ_at; Start 200; Stop 224
ttcaagacatgagggccatcaggaa

SEQ ID NO: 167803 - DNA, 25 bp, Artificial
  probe
  misc_feature (1)..(25): SEQ ID NO: 7050; WAN024DQJ_at; Start 221; Stop 245
ggaatgatctgaaactgcgaatctg

SEQ ID NO: 167804 - DNA, 25 bp, Artificial
  probe
  misc_feature (1)..(25): SEQ ID NO: 7050; WAN024DQJ_at; Start 39; Stop 63
taaaattggcaacgtcaccagactc

SEQ ID NO: 167805 - DNA, 25 bp, Artificial
  probe
  misc_feature (1)..(25): SEQ ID NO: 7050; WAN024DQJ_at; Start 188; Stop 212
ggttttgccttattcaagacatgag

SEQ ID NO: 167806 - DNA, 25 bp, Artificial
  probe
  misc_feature (1)..(25): SEQ ID NO: 7050; WAN024DQJ_at; Start 24; Stop 48
ttgtgaaaacaaggctaaaattggc

SEQ ID NO: 167807 - DNA, 25 bp, Artificial
  probe
  misc_feature (1)..(25): SEQ ID NO: 7050; WAN024DQJ_at; Start 77; Stop 101
gacgtttattcatttctttctccca

SEQ ID NO: 167808 - DNA, 25 bp, Artificial
  probe
  misc_feature (1)..(25): SEQ ID NO: 7050; WAN024DQJ_at; Start 27; Stop 51
tgaaaacaaggctaaaattggcaac

SEQ ID NO: 167809 - DNA, 25 bp, Artificial
  probe
  misc_feature (1)..(25): SEQ ID NO: 7050; WAN024DQJ_at; Start 98; Stop 122
cccataattatgatatcgatttcaa

SEQ ID NO: 167810 - DNA, 25 bp, Artificial
  probe
  misc_feature (1)..(25): SEQ ID NO: 7050; WAN024DQJ_at; Start 181; Stop 205
ctcctttggttttgccttattcaag

SEQ ID NO: 167811 - DNA, 25 bp, Artificial
  probe
  misc_feature (1)..(25): SEQ ID NO: 7050; WAN024DQJ_at; Start 133; Stop 157
tcaaacttatttcagcaattcaagg

SEQ ID NO: 167812 - DNA, 25 bp, Artificial
  probe
  misc_feature (1)..(25): SEQ ID NO: 7050; WAN024DQJ_at; Start 41; Stop 65
aaattggcaacgtcaccagactcat

SEQ ID NO: 167813 - DNA, 25 bp, Artificial
  probe
  misc_feature (1)..(25): SEQ ID NO: 7050; WAN024DQJ_at; Start 152; Stop 176
tcaaggaaacttctggtcttttcta

SEQ ID NO: 167814 - DNA, 25 bp, Artificial
  probe
  misc_feature (1)..(25): SEQ ID NO: 7050; WAN024DQJ_at; Start 225; Stop 249
tgatctgaaactgcgaatctgttaa

SEQ ID NO: 167815 - DNA, 25 bp, Artificial
  probe
  misc_feature (1)..(25): SEQ ID NO: 7050; WAN024DQJ_at; Start 57; Stop 81
cagactcatttttgaaaatagacgt

SEQ ID NO: 167816 - DNA, 25 bp, Artificial
  probe
  misc_feature (1)..(25): SEQ ID NO: 7050; WAN024DQJ_at; Start 198; Stop 222
tattcaagacatgagggccatcagg

SEQ ID NO: 167817 - DNA, 25 bp, Artificial
  probe
  misc_feature (1)..(25): SEQ ID NO: 7050; WAN024DQJ_at; Start 205; Stop 229
gacatgagggccatcaggaatgatc

SEQ ID NO: 167818 - DNA, 25 bp, Artificial
  probe
  misc_feature (1)..(25): SEQ ID NO: 7050; WAN024DQJ_at; Start 33; Stop 57
caaggctaaaattggcaacgtcacc

SEQ ID NO: 167819 - DNA, 25 bp, Artificial
  probe
  misc_feature (1)..(25): SEQ ID NO: 7050; WAN024DQJ_at; Start 10; Stop 34
tccgccaaaactgattgtgaaaaca

SEQ ID NO: 167820 - DNA, 25 bp, Artificial
  probe
  misc_feature (1)..(25): SEQ ID NO: 7050; WAN024DQJ_at; Start 192; Stop 216
ttgccttattcaagacatgagggcc

SEQ ID NO: 167821 - DNA, 25 bp, Artificial
  probe
  misc_feature (1)..(25): SEQ ID NO: 7050; WAN024DQJ_at; Start 144; Stop 168
tcagcaattcaaggaaacttctggt

SEQ ID NO: 167822 - DNA, 25 bp, Artificial
  probe
  misc_feature (1)..(25): SEQ ID NO: 7050; WAN024DQJ_at; Start 219; Stop 243
caggaatgatctgaaactgcgaatc

SEQ ID NO: 167823 - DNA, 25 bp, Artificial
  probe
  misc_feature (1)..(25): SEQ ID NO: 7655; WAN024DQK_at; Start 16; Stop 40
gatgagatatcatatttgtgttata

SEQ ID NO: 167824 - DNA, 25 bp, Artificial
  probe
  misc_feature (1)..(25): SEQ ID NO: 7655; WAN024DQK_at; Start 24; Stop 48
atcatatttgtgttataatgtaacc

SEQ ID NO: 167825 - DNA, 25 bp, Artificial
  probe
  misc_feature (1)..(25): SEQ ID NO: 7655; WAN024DQK_at; Start 26; Stop 50
catatttgtgttataatgtaaccgt

SEQ ID NO: 167826 - DNA, 25 bp, Artificial
  probe
  misc_feature (1)..(25): SEQ ID NO: 7655; WAN024DQK_at; Start 27; Stop 51
atatttgtgttataatgtaaccgta

SEQ ID NO: 167827 - DNA, 25 bp, Artificial
  probe
  misc_feature (1)..(25): SEQ ID NO: 7655; WAN024DQK_at; Start 6; Stop 30
gtttacttttgatgagatatcatat

SEQ ID NO: 167828 - DNA, 25 bp, Artificial
  probe
  misc_feature (1)..(25): SEQ ID NO: 7655; WAN024DQK_at; Start 7; Stop 31
tttacttttgatgagatatcatatt

SEQ ID NO: 167829 - DNA, 25 bp, Artificial
  probe
  misc_feature (1)..(25): SEQ ID NO: 7655; WAN024DQK_at; Start 37; Stop 61
tataatgtaaccgtaaacaatagaa

SEQ ID NO: 167830 - DNA, 25 bp, Artificial
  probe
  misc_feature (1)..(25): SEQ ID NO: 7655; WAN024DQK_at; Start 5; Stop 29
tgtttacttttgatgagatatcata

SEQ ID NO: 167831 - DNA, 25 bp, Artificial
  probe
  misc_feature (1)..(25): SEQ ID NO: 7655; WAN024DQK_at; Start 31; Stop 55
ttgtgttataatgtaaccgtaaaca

SEQ ID NO: 167832 - DNA, 25 bp, Artificial
  probe
  misc_feature (1)..(25): SEQ ID NO: 7655; WAN024DQK_at; Start 9; Stop 33
tacttttgatgagatatcatatttg

SEQ ID NO: 167833 - DNA, 25 bp, Artificial
  probe
  misc_feature (1)..(25): SEQ ID NO: 7655; WAN024DQK_at; Start 20; Stop 44
agatatcatatttgtgttataatgt

SEQ ID NO: 167834 - DNA, 25 bp, Artificial
  probe
  misc_feature (1)..(25): SEQ ID NO: 7655; WAN024DQK_at; Start 13; Stop 37
tttgatgagatatcatatttgtgtt

SEQ ID NO: 167835 - DNA, 25 bp, Artificial
  probe
  misc_feature (1)..(25): SEQ ID NO: 7655; WAN024DQK_at; Start 22; Stop 46
atatcatatttgtgttataatgtaa

SEQ ID NO: 167836 - DNA, 25 bp, Artificial
  probe
  misc_feature (1)..(25): SEQ ID NO: 7655; WAN024DQK_at; Start 15; Stop 39
tgatgagatatcatatttgtgttat

SEQ ID NO: 167837 - DNA, 25 bp, Artificial
  probe
  misc_feature (1)..(25): SEQ ID NO: 7655; WAN024DQK_at; Start 34; Stop 58
tgttataatgtaaccgtaaacaata

SEQ ID NO: 167838 - DNA, 25 bp, Artificial
  probe
  misc_feature (1)..(25): SEQ ID NO: 7655; WAN024DQK_at; Start 67; Stop 91
aaggagatttttgatgaaatcaaaa

SEQ ID NO: 167839 - DNA, 25 bp, Artificial
  probe
  misc_feature (1)..(25): SEQ ID NO: 7655; WAN024DQK_at; Start 66; Stop 90
aaaggagatttttgatgaaatcaaa

SEQ ID NO: 167840 - DNA, 25 bp, Artificial
  probe
  misc_feature (1)..(25): SEQ ID NO: 7655; WAN024DQK_at; Start 14; Stop 38
ttgatgagatatcatatttgtgtta

SEQ ID NO: 167841 - DNA, 25 bp, Artificial
  probe
  misc_feature (1)..(25): SEQ ID NO: 7655; WAN024DQK_at; Start 10; Stop 34
acttttgatgagatatcatatttgt

SEQ ID NO: 167842 - DNA, 25 bp, Artificial
  probe
  misc_feature (1)..(25): SEQ ID NO: 7655; WAN024DQK_at; Start 12; Stop 36
ttttgatgagatatcatatttgtgt

SEQ ID NO: 167843 - DNA, 25 bp, Artificial
  probe
  misc_feature (1)..(25): SEQ ID NO: 7655; WAN024DQK_at; Start 19; Stop 43
gagatatcatatttgtgttataatg

SEQ ID NO: 167844 - DNA, 25 bp, Artificial
  probe
  misc_feature (1)..(25): SEQ ID NO: 7655; WAN024DQK_at; Start 23; Stop 47
tatcatatttgtgttataatgtaac

SEQ ID NO: 167845 - DNA, 25 bp, Artificial
  probe
  misc_feature (1)..(25): SEQ ID NO: 7655; WAN024DQK_at; Start 36; Stop 60
ttataatgtaaccgtaaacaataga

SEQ ID NO: 167846 - DNA, 25 bp, Artificial
  probe
  misc_feature (1)..(25): SEQ ID NO: 7655; WAN024DQK_at; Start 17; Stop 41
atgagatatcatatttgtgttataa

SEQ ID NO: 167847 - DNA, 25 bp, Artificial
  probe
  misc_feature (1)..(25): SEQ ID NO: 7655; WAN024DQK_at; Start 18; Stop 42
tgagatatcatatttgtgttataat

SEQ ID NO: 167848 - DNA, 25 bp, Artificial
  probe
  misc_feature (1)..(25): SEQ ID NO: 7655; WAN024DQK_at; Start 25; Stop 49
tcatatttgtgttataatgtaaccg

SEQ ID NO: 167849 - DNA, 25 bp, Artificial
  probe
  misc_feature (1)..(25): SEQ ID NO: 7655; WAN024DQK_at; Start 11; Stop 35
cttttgatgagatatcatatttgtg

SEQ ID NO: 167850 - DNA, 25 bp, Artificial
  probe
  misc_feature (1)..(25): SEQ ID NO: 7655; WAN024DQK_at; Start 28; Stop 52
tatttgtgttataatgtaaccgtaa

SEQ ID NO: 167851 - DNA, 25 bp, Artificial
  probe
  misc_feature (1)..(25): SEQ ID NO: 7655; WAN024DQK_at; Start 58; Stop 82
agaaatttaaaggagatttttgatg

SEQ ID NO: 167852 - DNA, 25 bp, Artificial
  probe
  misc_feature (1)..(25): SEQ ID NO: 7655; WAN024DQK_at; Start 21; Stop 45
gatatcatatttgtgttataatgta

SEQ ID NO: 167853 - DNA, 25 bp, Artificial
  probe
  misc_feature (1)..(25): SEQ ID NO: 7655; WAN024DQK_at; Start 32; Stop 56
tgtgttataatgtaaccgtaaacaa

SEQ ID NO: 167854 - DNA, 25 bp, Artificial
  probe
  misc_feature (1)..(25): SEQ ID NO: 7655; WAN024DQK_at; Start 59; Stop 83
gaaatttaaaggagatttttgatga

SEQ ID NO: 167855 - DNA, 25 bp, Artificial
  probe
  misc_feature (1)..(25): SEQ ID NO: 7655; WAN024DQK_at; Start 8; Stop 32
ttacttttgatgagatatcatattt

SEQ ID NO: 167856 - DNA, 25 bp, Artificial
  probe
  misc_feature (1)..(25): SEQ ID NO: 5206; WAN024DQL_at; Start 1326; Stop 1350
tttgaagtcaaatggtaagatggct

SEQ ID NO: 167857 - DNA, 25 bp, Artificial
  probe
  misc_feature (1)..(25): SEQ ID NO: 5206; WAN024DQL_at; Start 1275; Stop 1299
tctaacatcagaaggcagctacgct

SEQ ID NO: 167858 - DNA, 25 bp, Artificial
  probe
  misc_feature (1)..(25): SEQ ID NO: 5206; WAN024DQL_at; Start 171; Stop 195
tgctgatgaaggtaaaggtctaact

SEQ ID NO: 167859 - DNA, 25 bp, Artificial
  probe
  misc_feature (1)..(25): SEQ ID NO: 5206; WAN024DQL_at; Start 37; Stop 61
gcgatcgcaacacttagcttagtat

SEQ ID NO: 167860 - DNA, 25 bp, Artificial
  probe
  misc_feature (1)..(25): SEQ ID NO: 5206; WAN024DQL_at; Start 66; Stop 90
tgtcgagattgaaggactctcaccg

SEQ ID NO: 167861 - DNA, 25 bp, Artificial
  probe
  misc_feature (1)..(25): SEQ ID NO: 5206; WAN024DQL_at; Start 405; Stop 429
taaatatgttgtgtctaaaggagac

SEQ ID NO: 167862 - DNA, 25 bp, Artificial
  probe
  misc_feature (1)..(25): SEQ ID NO: 5206; WAN024DQL_at; Start 353; Stop 377
ccagtgggaccatatcttcgtttat

SEQ ID NO: 167863 - DNA, 25 bp, Artificial
  probe
  misc_feature (1)..(25): SEQ ID NO: 5206; WAN024DQL_at; Start 846; Stop 870
taaatatgttgcgtatgaaagccag

SEQ ID NO: 167864 - DNA, 25 bp, Artificial
  probe
  misc_feature (1)..(25): SEQ ID NO: 5206; WAN024DQL_at; Start 89; Stop 113
cgtttttaatagagaatgttagcgc

SEQ ID NO: 167865 - DNA, 25 bp, Artificial
  probe
  misc_feature (1)..(25): SEQ ID NO: 5206; WAN024DQL_at; Start 470; Stop 494
gagaatctccagtttttagaatacg

SEQ ID NO: 167866 - DNA, 25 bp, Artificial
  probe
  misc_feature (1)..(25): SEQ ID NO: 5206; WAN024DQL_at; Start 105; Stop 129
tgttagcgcaaatactcattctgca

SEQ ID NO: 167867 - DNA, 25 bp, Artificial
  probe
  misc_feature (1)..(25): SEQ ID NO: 5206; WAN024DQL_at; Start 1413; Stop 1437
ttatgctcgtaacacttgggtaggc

SEQ ID NO: 167868 - DNA, 25 bp, Artificial
  probe
  misc_feature (1)..(25): SEQ ID NO: 5206; WAN024DQL_at; Start 1397; Stop 1421
tgacatcagaaggaagttatgctcg

SEQ ID NO: 167869 - DNA, 25 bp, Artificial
  probe
  misc_feature (1)..(25): SEQ ID NO: 5206; WAN024DQL_at; Start 1487; Stop 1511
cagatggttatcgtgtagatggttc

SEQ ID NO: 167870 - DNA, 25 bp, Artificial
  probe
  misc_feature (1)..(25): SEQ ID NO: 5206; WAN024DQL_at; Start 425; Stop 449
gagactttatcgatcctaagactca

SEQ ID NO: 167871 - DNA, 25 bp, Artificial
  probe
  misc_feature (1)..(25): SEQ ID NO: 5206; WAN024DQL_at; Start 1425; Stop 1449
cacttgggtaggcaattactatctt

SEQ ID NO: 167872 - DNA, 25 bp, Artificial
  probe
  misc_feature (1)..(25): SEQ ID NO: 5206; WAN024DQL_at; Start 1470; Stop 1494
tgttaatgaacgtacaccagatggt

SEQ ID NO: 167873 - DNA, 25 bp, Artificial
  probe
  misc_feature (1)..(25): SEQ ID NO: 5206; WAN024DQL_at; Start 719; Stop 743
taattaatgttaagactggcgaggt

SEQ ID NO: 167874 - DNA, 25 bp, Artificial
  probe
  misc_feature (1)..(25): SEQ ID NO: 5206; WAN024DQL_at; Start 959; Stop 983
tagtatctgcctcaaaaccagacga

SEQ ID NO: 167875 - DNA, 25 bp, Artificial
  probe
  misc_feature (1)..(25): SEQ ID NO: 5206; WAN024DQL_at; Start 337; Stop 361
cgttccaatgatttaaccagtggga

SEQ ID NO: 167876 - DNA, 25 bp, Artificial
  probe
  misc_feature (1)..(25): SEQ ID NO: 5206; WAN024DQL_at; Start 1294; Stop 1318
tacgctcgtaacacttggtcaggca

SEQ ID NO: 167877 - DNA, 25 bp, Artificial
  probe
  misc_feature (1)..(25): SEQ ID NO: 5206; WAN024DQL_at; Start 500; Stop 524
gaaaatatgtggagttgggaacaac

SEQ ID NO: 167878 - DNA, 25 bp, Artificial
  probe
  misc_feature (1)..(25): SEQ ID NO: 5206; WAN024DQL_at; Start 1022; Stop 1046
aaccttcagcaccacaacaggagaa

SEQ ID NO: 167879 - DNA, 25 bp, Artificial
  probe
  misc_feature (1)..(25): SEQ ID NO: 5206; WAN024DQL_at; Start 201; Stop 225
cttttcaacagacagtgttagtcca

SEQ ID NO: 167880 - DNA, 25 bp, Artificial
  probe
  misc_feature (1)..(25): SEQ ID NO: 5206; WAN024DQL_at; Start 613; Stop 637
caaggaggtaatggagttactgcaa

SEQ ID NO: 167881 - DNA, 25 bp, Artificial
  probe
  misc_feature (1)..(25): SEQ ID NO: 5206; WAN024DQL_at; Start 790; Stop 814
ttgaaaagtggttctacagcagtat

SEQ ID NO: 167882 - DNA, 25 bp, Artificial
  probe
  misc_feature (1)..(25): SEQ ID NO: 5206; WAN024DQL_at; Start 893; Stop 917
cattgactcatcagtatagaggaga

SEQ ID NO: 167883 - DNA, 25 bp, Artificial
  probe
  misc_feature (1)..(25): SEQ ID NO: 5206; WAN024DQL_at; Start 732; Stop 756
gactggcgaggttattgatgaaacg

SEQ ID NO: 167884 - DNA, 25 bp, Artificial
  probe
  misc_feature (1)..(25): SEQ ID NO: 5206; WAN024DQL_at; Start 1344; Stop 1368
gatggctaaaagtgagtgggtatac

SEQ ID NO: 167885 - DNA, 25 bp, Artificial
  probe
  misc_feature (1)..(25): SEQ ID NO: 5206; WAN024DQL_at; Start 876; Stop 900
tactgatcctcaaacaacattgact

SEQ ID NO: 167886 - DNA, 25 bp, Artificial
  probe
  misc_feature (1)..(25): SEQ ID NO: 5206; WAN024DQL_at; Start 1006; Stop 1030
ccggatgagaaaccaaaaccttcag

SEQ ID NO: 167887 - DNA, 25 bp, Artificial
  probe
  misc_feature (1)..(25): SEQ ID NO: 5206; WAN024DQL_at; Start 453; Stop 477
taaacatcagtatagaggagaatct

SEQ ID NO: 167888 - DNA, 25 bp, Artificial
  probe
  misc_feature (1)..(25): SEQ ID NO: 5206; WAN024DQL_at; Start 1219; Stop 1243
ggatacatggctaaaagtgagtgga

SEQ ID NO: 167889 - DNA, 25 bp, Artificial
  probe
  misc_feature (1)..(25): SEQ ID NO: 5206; WAN024DQL_at; Start 861; Stop 885
tgaaagccagcaatatactgatcct

SEQ ID NO: 167890 - DNA, 25 bp, Artificial
  probe
  misc_feature (1)..(25): SEQ ID NO: 5695; WAN024DQM_at; Start 159; Stop 183
tgatgctacaaaaactactccagaa

SEQ ID NO: 167891 - DNA, 25 bp, Artificial
  probe
  misc_feature (1)..(25): SEQ ID NO: 5695; WAN024DQM_at; Start 62; Stop 86
tacaaacgcttaccccaatggcaaa

SEQ ID NO: 167892 - DNA, 25 bp, Artificial
  probe
  misc_feature (1)..(25): SEQ ID NO: 5695; WAN024DQM_at; Start 32; Stop 56
ctttttcagcgcaaacggtgcaggc

SEQ ID NO: 167893 - DNA, 25 bp, Artificial
  probe
  misc_feature (1)..(25): SEQ ID NO: 5695; WAN024DQM_at; Start 108; Stop 132
ggatgcagaaatatataaaacttgg

SEQ ID NO: 167894 - DNA, 25 bp, Artificial
  probe
  misc_feature (1)..(25): SEQ ID NO: 5695; WAN024DQM_at; Start 91; Stop 115
tatattattcttccgaaggatgcag

SEQ ID NO: 167895 - DNA, 25 bp, Artificial
  probe
  misc_feature (1)..(25): SEQ ID NO: 5695; WAN024DQM_at; Start 322; Stop 346
gcaacaccaaaaaaggatgaaaagc

SEQ ID NO: 167896 - DNA, 25 bp, Artificial
  probe
  misc_feature (1)..(25): SEQ ID NO: 5695; WAN024DQM_at; Start 299; Stop 323
tgactgataaaaaatcaactactgc

SEQ ID NO: 167897 - DNA, 25 bp, Artificial
  probe
  misc_feature (1)..(25): SEQ ID NO: 5695; WAN024DQM_at; Start 41; Stop 65
cgcaaacggtgcaggctgacataca

SEQ ID NO: 167898 - DNA, 25 bp, Artificial
  probe
  misc_feature (1)..(25): SEQ ID NO: 5695; WAN024DQM_at; Start 144; Stop 168
caatattcccattattgatgctaca

SEQ ID NO: 167899 - DNA, 25 bp, Artificial
  probe
  misc_feature (1)..(25): SEQ ID NO: 5695; WAN024DQM_at; Start 220; Stop 244
gctaatgagaataagtctggtgcca

SEQ ID NO: 167900 - DNA, 25 bp, Artificial
  probe
  misc_feature (1)..(25): SEQ ID NO: 5695; WAN024DQM_at; Start 283; Stop 307
gaggccattaagaagttgactgata

SEQ ID NO: 167901 - DNA, 25 bp, Artificial
  probe
  misc_feature (1)..(25): SEQ ID NO: 5695; WAN024DQM_at; Start 58; Stop 82
gacatacaaacgcttaccccaatgg

SEQ ID NO: 167902 - DNA, 25 bp, Artificial
  probe
  misc_feature (1)..(25): SEQ ID NO: 5695; WAN024DQM_at; Start 265; Stop 289
acagtagaagagtttaaagaggcca

SEQ ID NO: 167903 - DNA, 25 bp, Artificial
  probe
  misc_feature (1)..(25): SEQ ID NO: 5695; WAN024DQM_at; Start 235; Stop 259
tctggtgccaattacatagagtgga

SEQ ID NO: 167904 - DNA, 25 bp, Artificial
  probe
  misc_feature (1)..(25): SEQ ID NO: 5695; WAN024DQM_at; Start 249; Stop 273
catagagtggaagggaacagtagaa

SEQ ID NO: 167905 - DNA, 25 bp, Artificial
  probe
  misc_feature (1)..(25): SEQ ID NO: 5695; WAN024DQM_at; Start 342; Stop 366
aaagccaacaccaaaaccggatgag

SEQ ID NO: 167906 - DNA, 25 bp, Artificial
  probe
  misc_feature (1)..(25): SEQ ID NO: 5695; WAN024DQM_at; Start 121; Stop 145
tataaaacttggagaggtactgtca

SEQ ID NO: 167907 - DNA, 25 bp, Artificial
  probe
  misc_feature (1)..(25): SEQ ID NO: 5695; WAN024DQM_at; Start 313; Stop 337
tcaactactgcaacaccaaaaaagg

SEQ ID NO: 167908 - DNA, 25 bp, Artificial
  probe
  misc_feature (1)..(25): SEQ ID NO: 5695; WAN024DQM_at; Start 69; Stop 93
gcttaccccaatggcaaaatattat

SEQ ID NO: 167909 - DNA, 25 bp, Artificial
  probe
  misc_feature (1)..(25): SEQ ID NO: 5695; WAN024DQM_at; Start 199; Stop 223
gaagatcatcgcaactatatagcta

SEQ ID NO: 167910 - DNA, 25 bp, Artificial
  probe
  misc_feature (1)..(25): SEQ ID NO: 5695; WAN024DQM_at; Start 190; Stop 214
tatttcaaagaagatcatcgcaact

SEQ ID NO: 167911 - DNA, 25 bp, Artificial
  probe
  misc_feature (1)..(25): SEQ ID NO: 5695; WAN024DQM_at; Start 1; Stop 25
ttgtcaacgattgataaatcaggag

SEQ ID NO: 167912 - DNA, 25 bp, Artificial
  probe
  misc_feature (1)..(25): SEQ ID NO: 5695; WAN024DQM_at; Start 51; Stop 75
gcaggctgacatacaaacgcttacc

SEQ ID NO: 167913 - DNA, 25 bp, Artificial
  probe
  misc_feature (1)..(25): SEQ ID NO: 5695; WAN024DQM_at; Start 175; Stop 199
actccagaattatcttatttcaaag

SEQ ID NO: 167914 - DNA, 25 bp, Artificial
  probe
  misc_feature (1)..(25): SEQ ID NO: 5695; WAN024DQM_at; Start 47; Stop 71
cggtgcaggctgacatacaaacgct

SEQ ID NO: 167915 - DNA, 25 bp, Artificial
  probe
  misc_feature (1)..(25): SEQ ID NO: 5695; WAN024DQM_at; Start 99; Stop 123
tcttccgaaggatgcagaaatatat

SEQ ID NO: 167916 - DNA, 25 bp, Artificial
  probe
  misc_feature (1)..(25): SEQ ID NO: 5695; WAN024DQM_at; Start 360; Stop 384
ggatgagaagccaaaaccaacacct

SEQ ID NO: 167917 - DNA, 25 bp, Artificial
  probe
  misc_feature (1)..(25): SEQ ID NO: 5695; WAN024DQM_at; Start 8; Stop 32
cgattgataaatcaggagttcttcc

SEQ ID NO: 167918 - DNA, 25 bp, Artificial
  probe
  misc_feature (1)..(25): SEQ ID NO: 5695; WAN024DQM_at; Start 132; Stop 156
gagaggtactgtcaatattcccatt

SEQ ID NO: 167919 - DNA, 25 bp, Artificial
  probe
  misc_feature (1)..(25): SEQ ID NO: 5695; WAN024DQM_at; Start 243; Stop 267
caattacatagagtggaagggaaca

SEQ ID NO: 167920 - DNA, 25 bp, Artificial
  probe
  misc_feature (1)..(25): SEQ ID NO: 5695; WAN024DQM_at; Start 205; Stop 229
catcgcaactatatagctaatgaga

SEQ ID NO: 167921 - DNA, 25 bp, Artificial
  probe
  misc_feature (1)..(25): SEQ ID NO: 5695; WAN024DQM_at; Start 231; Stop 255
taagtctggtgccaattacatagag

SEQ ID NO: 167922 - DNA, 25 bp, Artificial
  probe
  misc_feature (1)..(25): SEQ ID NO: 5695; WAN024DQM_at; Start 279; Stop 303
taaagaggccattaagaagttgact

SEQ ID NO: 167923 - DNA, 25 bp, Artificial
  probe
  misc_feature (1)..(25): SEQ ID NO: 5695; WAN024DQM_at; Start 22; Stop 46
ggagttcttcctttttcagcgcaaa

SEQ ID NO: 167924 - DNA, 25 bp, Artificial
  probe
  misc_feature (1)..(25): SEQ ID NO: 996; WAN024DQN_at; Start 401; Stop 425
cacttgatttaacggatatagcagg

SEQ ID NO: 167925 - DNA, 25 bp, Artificial
  probe
  misc_feature (1)..(25): SEQ ID NO: 996; WAN024DQN_at; Start 569; Stop 593
caaaggagtttgtagaaaagaccag

SEQ ID NO: 167926 - DNA, 25 bp, Artificial
  probe
  misc_feature (1)..(25): SEQ ID NO: 996; WAN024DQN_at; Start 15; Stop 39
tttgcatgggttagggcagtcagca

SEQ ID NO: 167927 - DNA, 25 bp, Artificial
  probe
  misc_feature (1)..(25): SEQ ID NO: 996; WAN024DQN_at; Start 212; Stop 236
cactagaactttccagttacgattt

SEQ ID NO: 167928 - DNA, 25 bp, Artificial
  probe
  misc_feature (1)..(25): SEQ ID NO: 996; WAN024DQN_at; Start 80; Stop 104
cttctgaggctatcgagttatttcc

SEQ ID NO: 167929 - DNA, 25 bp, Artificial
  probe
  misc_feature (1)..(25): SEQ ID NO: 996; WAN024DQN_at; Start 183; Stop 207
gattggattgtccttaggtgctgcc

SEQ ID NO: 167930 - DNA, 25 bp, Artificial
  probe
  misc_feature (1)..(25): SEQ ID NO: 996; WAN024DQN_at; Start 368; Stop 392
ctcttatggtcggagtttctgagga

SEQ ID NO: 167931 - DNA, 25 bp, Artificial
  probe
  misc_feature (1)..(25): SEQ ID NO: 996; WAN024DQN_at; Start 263; Stop 287
caggatgcccgcttaaattagcagg

SEQ ID NO: 167932 - DNA, 25 bp, Artificial
  probe
  misc_feature (1)..(25): SEQ ID NO: 996; WAN024DQN_at; Start 358; Stop 382
gcagacaagactcttatggtcggag

SEQ ID NO: 167933 - DNA, 25 bp, Artificial
  probe
  misc_feature (1)..(25): SEQ ID NO: 996; WAN024DQN_at; Start 93; Stop 117
cgagttatttccttctggagttagt

SEQ ID NO: 167934 - DNA, 25 bp, Artificial
  probe
  misc_feature (1)..(25): SEQ ID NO: 996; WAN024DQN_at; Start 138; Stop 162
gcgagtttatcagcacctagctcaa

SEQ ID NO: 167935 - DNA, 25 bp, Artificial
  probe
  misc_feature (1)..(25): SEQ ID NO: 996; WAN024DQN_at; Start 538; Stop 562
gatggccctcatgtcttgaataagg

SEQ ID NO: 167936 - DNA, 25 bp, Artificial
  probe
  misc_feature (1)..(25): SEQ ID NO: 996; WAN024DQN_at; Start 227; Stop 251
gttacgatttaccaaatcttcgagc

SEQ ID NO: 167937 - DNA, 25 bp, Artificial
  probe
  misc_feature (1)..(25): SEQ ID NO: 996; WAN024DQN_at; Start 472; Stop 496
ccgaatcttagttctatgaaagctc

SEQ ID NO: 167938 - DNA, 25 bp, Artificial
  probe
  misc_feature (1)..(25): SEQ ID NO: 996; WAN024DQN_at; Start 552; Stop 576
cttgaataaggcaaaaccaaaggag

SEQ ID NO: 167939 - DNA, 25 bp, Artificial
  probe
  misc_feature (1)..(25): SEQ ID NO: 996; WAN024DQN_at; Start 50; Stop 74
aagaagttcggaatctactgacaga

SEQ ID NO: 167940 - DNA, 25 bp, Artificial
  probe
  misc_feature (1)..(25): SEQ ID NO: 996; WAN024DQN_at; Start 345; Stop 369
tgaaaaacagggagcagacaagact

SEQ ID NO: 167941 - DNA, 25 bp, Artificial
  probe
  misc_feature (1)..(25): SEQ ID NO: 996; WAN024DQN_at; Start 526; Stop 550
cagatcattcctgatggccctcatg

SEQ ID NO: 167942 - DNA, 25 bp, Artificial
  probe
  misc_feature (1)..(25): SEQ ID NO: 996; WAN024DQN_at; Start 514; Stop 538
gattcgcagtttcagatcattcctg

SEQ ID NO: 167943 - DNA, 25 bp, Artificial
  probe
  misc_feature (1)..(25): SEQ ID NO: 996; WAN024DQN_at; Start 439; Stop 463
ccaaccttactaatttgtggcagca

SEQ ID NO: 167944 - DNA, 25 bp, Artificial
  probe
  misc_feature (1)..(25): SEQ ID NO: 996; WAN024DQN_at; Start 65; Stop 89
tactgacagattatccttctgaggc

SEQ ID NO: 167945 - DNA, 25 bp, Artificial
  probe
  misc_feature (1)..(25): SEQ ID NO: 996; WAN024DQN_at; Start 284; Stop 308
cagggaatatcctattttatcttca

SEQ ID NO: 167946 - DNA, 25 bp, Artificial
  probe
  misc_feature (1)..(25): SEQ ID NO: 996; WAN024DQN_at; Start 499; Stop 523
catagactgttaacagattcgcagt

SEQ ID NO: 167947 - DNA, 25 bp, Artificial
  probe
  misc_feature (1)..(25): SEQ ID NO: 996; WAN024DQN_at; Start 311; Stop 335
tgctgatttttaaactacttcccaa

SEQ ID NO: 167948 - DNA, 25 bp, Artificial
  probe
  misc_feature (1)..(25): SEQ ID NO: 996; WAN024DQN_at; Start 454; Stop 478
tgtggcagcaaagataaaccgaatc

SEQ ID NO: 167949 - DNA, 25 bp, Artificial
  probe
  misc_feature (1)..(25): SEQ ID NO: 996; WAN024DQN_at; Start 165; Stop 189
gacagaaccttttgttttgattgga

SEQ ID NO: 167950 - DNA, 25 bp, Artificial
  probe
  misc_feature (1)..(25): SEQ ID NO: 996; WAN024DQN_at; Start 586; Stop 610
aagaccagaagtttccttgaattgc

SEQ ID NO: 167951 - DNA, 25 bp, Artificial
  probe
  misc_feature (1)..(25): SEQ ID NO: 996; WAN024DQN_at; Start 108; Stop 132
tggagttagtaactatcaacaagct

SEQ ID NO: 167952 - DNA, 25 bp, Artificial
  probe
  misc_feature (1)..(25): SEQ ID NO: 996; WAN024DQN_at; Start 599; Stop 623
tccttgaattgctgaaactaactaa

SEQ ID NO: 167953 - DNA, 25 bp, Artificial
  probe
  misc_feature (1)..(25): SEQ ID NO: 996; WAN024DQN_at; Start 488; Stop 512
tgaaagctctccatagactgttaac

SEQ ID NO: 167954 - DNA, 25 bp, Artificial
  probe
  misc_feature (1)..(25): SEQ ID NO: 996; WAN024DQN_at; Start 153; Stop 177
cctagctcaagagacagaacctttt

SEQ ID NO: 167955 - DNA, 25 bp, Artificial
  probe
  misc_feature (1)..(25): SEQ ID NO: 996; WAN024DQN_at; Start 254; Stop 278
tgattctgtcaggatgcccgcttaa

SEQ ID NO: 167956 - DNA, 25 bp, Artificial
  probe
  misc_feature (1)..(25): SEQ ID NO: 996; WAN024DQN_at; Start 271; Stop 295
ccgcttaaattagcagggaatatcc

SEQ ID NO: 167957 - DNA, 25 bp, Artificial
  probe
  misc_feature (1)..(25): SEQ ID NO: 996; WAN024DQN_at; Start 241; Stop 265
aatcttcgagctttgattctgtcag

SEQ ID NO: 167958 - DNA, 25 bp, Artificial
  probe
  misc_feature (1)..(25): SEQ ID NO: 1167; WAN024DQO_at; Start 596; Stop 620
gaaactactatttgaaatcagatgg

SEQ ID NO: 167959 - DNA, 25 bp, Artificial
  probe
  misc_feature (1)..(25): SEQ ID NO: 1167; WAN024DQO_at; Start 310; Stop 334
tactactttgatggaaatggaaatc

SEQ ID NO: 167960 - DNA, 25 bp, Artificial
  probe
  misc_feature (1)..(25): SEQ ID NO: 1167; WAN024DQO_at; Start 85; Stop 109
aacatccatttttcgagctgtaagg

SEQ ID NO: 167961 - DNA, 25 bp, Artificial
  probe
  misc_feature (1)..(25): SEQ ID NO: 1167; WAN024DQO_at; Start 226; Stop 250
tttaaagcaaaacagtcaacggcta

SEQ ID NO: 167962 - DNA, 25 bp, Artificial
  probe
  misc_feature (1)..(25): SEQ ID NO: 1167; WAN024DQO_at; Start 121; Stop 145
aatggctattcggatattcacgagg

SEQ ID NO: 167963 - DNA, 25 bp, Artificial
  probe
  misc_feature (1)..(25): SEQ ID NO: 1167; WAN024DQO_at; Start 246; Stop 270
ggctattcaaatcaacacaagttca

SEQ ID NO: 167964 - DNA, 25 bp, Artificial
  probe
  misc_feature (1)..(25): SEQ ID NO: 1167; WAN024DQO_at; Start 294; Stop 318
gcaggacggcgcttggtactacttt

SEQ ID NO: 167965 - DNA, 25 bp, Artificial
  probe
  misc_feature (1)..(25): SEQ ID NO: 1167; WAN024DQO_at; Start 33; Stop 57
ggtgacgttgccaattttagccttg

SEQ ID NO: 167966 - DNA, 25 bp, Artificial
  probe
  misc_feature (1)..(25): SEQ ID NO: 1167; WAN024DQO_at; Start 192; Stop 216
ggcttgcgaattgaaaaatgctcct

SEQ ID NO: 167967 - DNA, 25 bp, Artificial
  probe
  misc_feature (1)..(25): SEQ ID NO: 1167; WAN024DQO_at; Start 613; Stop 637
tcagatggtaaaatggctaaaggtg

SEQ ID NO: 167968 - DNA, 25 bp, Artificial
  probe
  misc_feature (1)..(25): SEQ ID NO: 1167; WAN024DQO_at; Start 275; Stop 299
caacaagtggttgggttaagcagga

SEQ ID NO: 167969 - DNA, 25 bp, Artificial
  probe
  misc_feature (1)..(25): SEQ ID NO: 1167; WAN024DQO_at; Start 162; Stop 186
tgccaagttagaccgtgatcatgat

SEQ ID NO: 167970 - DNA, 25 bp, Artificial
  probe
  misc_feature (1)..(25): SEQ ID NO: 1167; WAN024DQO_at; Start 406; Stop 430
tatgactcttcttatcaagcttggt

SEQ ID NO: 167971 - DNA, 25 bp, Artificial
  probe
  misc_feature (1)..(25): SEQ ID NO: 1167; WAN024DQO_at; Start 509; Stop 533
cacaaggtgagtgggtttatgattc

SEQ ID NO: 167972 - DNA, 25 bp, Artificial
  probe
  misc_feature (1)..(25): SEQ ID NO: 1167; WAN024DQO_at; Start 470; Stop 494
ggcaaggagcttattaccttaaatc

SEQ ID NO: 167973 - DNA, 25 bp, Artificial
  probe
  misc_feature (1)..(25): SEQ ID NO: 1167; WAN024DQO_at; Start 351; Stop 375
gcagggaagctattacctgaaagct

SEQ ID NO: 167974 - DNA, 25 bp, Artificial
  probe
  misc_feature (1)..(25): SEQ ID NO: 1167; WAN024DQO_at; Start 387; Stop 411
ggcacagagtgaatggatttatgac

SEQ ID NO: 167975 - DNA, 25 bp, Artificial
  probe
  misc_feature (1)..(25): SEQ ID NO: 1167; WAN024DQO_at; Start 456; Stop 480
tgcaaaaaatgcatggcaaggagct

SEQ ID NO: 167976 - DNA, 25 bp, Artificial
  probe
  misc_feature (1)..(25): SEQ ID NO: 1167; WAN024DQO_at; Start 148; Stop 172
gaacctggttattctgccaagttag

SEQ ID NO: 167977 - DNA, 25 bp, Artificial
  probe
  misc_feature (1)..(25): SEQ ID NO: 1167; WAN024DQO_at; Start 495; Stop 519
aaacggtaaaatggcacaaggtgag

SEQ ID NO: 167978 - DNA, 25 bp, Artificial
  probe
  misc_feature (1)..(25): SEQ ID NO: 1167; WAN024DQO_at; Start 540; Stop 564
ccaagcatggtattacttgaaatca

SEQ ID NO: 167979 - DNA, 25 bp, Artificial
  probe
  misc_feature (1)..(25): SEQ ID NO: 1167; WAN024DQO_at; Start 582; Stop 606
caatgcatggcaaggaaactactat

SEQ ID NO: 167980 - DNA, 25 bp, Artificial
  probe
  misc_feature (1)..(25): SEQ ID NO: 1167; WAN024DQO_at; Start 342; Stop 366
aaatgcatggcagggaagctattac

SEQ ID NO: 167981 - DNA, 25 bp, Artificial
  probe
  misc_feature (1)..(25): SEQ ID NO: 1167; WAN024DQO_at; Start 211; Stop 235
gctcctaagggtgcttttaaagcaa

SEQ ID NO: 167982 - DNA, 25 bp, Artificial
  probe
  misc_feature (1)..(25): SEQ ID NO: 1167; WAN024DQO_at; Start 328; Stop 352
ggaaatctagtgaaaaatgcatggc

SEQ ID NO: 167983 - DNA, 25 bp, Artificial
  probe
  misc_feature (1)..(25): SEQ ID NO: 1167; WAN024DQO_at; Start 95; Stop 119
tttcgagctgtaaggaagcttgggc

SEQ ID NO: 167984 - DNA, 25 bp, Artificial
  probe
  misc_feature (1)..(25): SEQ ID NO: 1167; WAN024DQO_at; Start 68; Stop 92
cagttttggcggaagaaaacatcca

SEQ ID NO: 167985 - DNA, 25 bp, Artificial
  probe
  misc_feature (1)..(25): SEQ ID NO: 1167; WAN024DQO_at; Start 558; Stop 582
gaaatcagatggttcatatgctcgc

SEQ ID NO: 167986 - DNA, 25 bp, Artificial
  probe
  misc_feature (1)..(25): SEQ ID NO: 1167; WAN024DQO_at; Start 261; Stop 285
cacaagttcagcaacaacaagtggt

SEQ ID NO: 167987 - DNA, 25 bp, Artificial
  probe
  misc_feature (1)..(25): SEQ ID NO: 1167; WAN024DQO_at; Start 572; Stop 596
catatgctcgcaatgcatggcaagg

SEQ ID NO: 167988 - DNA, 25 bp, Artificial
  probe
  misc_feature (1)..(25): SEQ ID NO: 1167; WAN024DQO_at; Start 21; Stop 45
aaaaatgagtctggtgacgttgcca

SEQ ID NO: 167989 - DNA, 25 bp, Artificial
  probe
  misc_feature (1)..(25): SEQ ID NO: 1167; WAN024DQO_at; Start 177; Stop 201
tgatcatgatggtgtggcttgcgaa

SEQ ID NO: 167990 - DNA, 25 bp, Artificial
  probe
  misc_feature (1)..(25): SEQ ID NO: 1167; WAN024DQO_at; Start 366; Stop 390
cctgaaagctgatggtaaaatggca

SEQ ID NO: 167991 - DNA, 25 bp, Artificial
  probe
  misc_feature (1)..(25): SEQ ID NO: 1167; WAN024DQO_at; Start 526; Stop 550
tatgattcttcttaccaagcatggt

SEQ ID NO: 167992 - DNA, 25 bp, Artificial
  probe
  misc_feature (1)..(25): SEQ ID NO: 3452; WAN024DQP_at; Start 100; Stop 124
gaaaaatccctgcaagctctttcaa

SEQ ID NO: 167993 - DNA, 25 bp, Artificial
  probe
  misc_feature (1)..(25): SEQ ID NO: 3452; WAN024DQP_at; Start 97; Stop 121
catgaaaaatccctgcaagctcttt

SEQ ID NO: 167994 - DNA, 25 bp, Artificial
  probe
  misc_feature (1)..(25): SEQ ID NO: 3452; WAN024DQP_at; Start 95; Stop 119
atcatgaaaaatccctgcaagctct

SEQ ID NO: 167995 - DNA, 25 bp, Artificial
  probe
  misc_feature (1)..(25): SEQ ID NO: 3452; WAN024DQP_at; Start 5; Stop 29
ctccattcaaatgtaaagtacttgc

SEQ ID NO: 167996 - DNA, 25 bp, Artificial
  probe
  misc_feature (1)..(25): SEQ ID NO: 3452; WAN024DQP_at; Start 115; Stop 139
gctctttcaaattatggtagaatgg

SEQ ID NO: 167997 - DNA, 25 bp, Artificial
  probe
  misc_feature (1)..(25): SEQ ID NO: 3452; WAN024DQP_at; Start 119; Stop 143
tttcaaattatggtagaatggaagc

SEQ ID NO: 167998 - DNA, 25 bp, Artificial
  probe
  misc_feature (1)..(25): SEQ ID NO: 3452; WAN024DQP_at; Start 76; Stop 100
tctgtgatagaaaaacttaatcatg

SEQ ID NO: 167999 - DNA, 25 bp, Artificial
  probe
  misc_feature (1)..(25): SEQ ID NO: 3452; WAN024DQP_at; Start 67; Stop 91
tcttttatgtctgtgatagaaaaac

SEQ ID NO: 168000 - DNA, 25 bp, Artificial
  probe
  misc_feature (1)..(25): SEQ ID NO: 3452; WAN024DQP_at; Start 18; Stop 42
taaagtacttgctagtttatcagaa

SEQ ID NO: 168001 - DNA, 25 bp, Artificial
  probe
  misc_feature (1)..(25): SEQ ID NO: 3452; WAN024DQP_at; Start 102; Stop 126
aaaatccctgcaagctctttcaaat

SEQ ID NO: 168002 - DNA, 25 bp, Artificial
  probe
  misc_feature (1)..(25): SEQ ID NO: 3452; WAN024DQP_at; Start 88; Stop 112
aaacttaatcatgaaaaatccctgc

SEQ ID NO: 168003 - DNA, 25 bp, Artificial
  probe
  misc_feature (1)..(25): SEQ ID NO: 3452; WAN024DQP_at; Start 122; Stop 146
caaattatggtagaatggaagcagt

SEQ ID NO: 168004 - DNA, 25 bp, Artificial
  probe
  misc_feature (1)..(25): SEQ ID NO: 3452; WAN024DQP_at; Start 44; Stop 68
ctttcctgataaaccaatatatatc

SEQ ID NO: 168005 - DNA, 25 bp, Artificial
  probe
  misc_feature (1)..(25): SEQ ID NO: 3452; WAN024DQP_at; Start 110; Stop 134
tgcaagctctttcaaattatggtag

SEQ ID NO: 168006 - DNA, 25 bp, Artificial
  probe
  misc_feature (1)..(25): SEQ ID NO: 3452; WAN024DQP_at; Start 20; Stop 44
aagtacttgctagtttatcagaaac

SEQ ID NO: 168007 - DNA, 25 bp, Artificial
  probe
  misc_feature (1)..(25): SEQ ID NO: 3452; WAN024DQP_at; Start 1; Stop 25
ctgtctccattcaaatgtaaagtac

SEQ ID NO: 168008 - DNA, 25 bp, Artificial
  probe
  misc_feature (1)..(25): SEQ ID NO: 3452; WAN024DQP_at; Start 12; Stop 36
caaatgtaaagtacttgctagttta

SEQ ID NO: 168009 - DNA, 25 bp, Artificial
  probe
  misc_feature (1)..(25): SEQ ID NO: 3452; WAN024DQP_at; Start 37; Stop 61
tcagaaactttcctgataaaccaat

SEQ ID NO: 168010 - DNA, 25 bp, Artificial
  probe
  misc_feature (1)..(25): SEQ ID NO: 3452; WAN024DQP_at; Start 132; Stop 156
tagaatggaagcagtagaattagaa

SEQ ID NO: 168011 - DNA, 25 bp, Artificial
  probe
  misc_feature (1)..(25): SEQ ID NO: 3452; WAN024DQP_at; Start 58; Stop 82
caatatatatcttttatgtctgtga

SEQ ID NO: 168012 - DNA, 25 bp, Artificial
  probe
  misc_feature (1)..(25): SEQ ID NO: 3452; WAN024DQP_at; Start 142; Stop 166
gcagtagaattagaaaaggaaatcg

SEQ ID NO: 168013 - DNA, 25 bp, Artificial
  probe
  misc_feature (1)..(25): SEQ ID NO: 3452; WAN024DQP_at; Start 112; Stop 136
caagctctttcaaattatggtagaa

SEQ ID NO: 168014 - DNA, 25 bp, Artificial
  probe
  misc_feature (1)..(25): SEQ ID NO: 3452; WAN024DQP_at; Start 28; Stop 52
gctagtttatcagaaactttcctga

SEQ ID NO: 168015 - DNA, 25 bp, Artificial
  probe
  misc_feature (1)..(25): SEQ ID NO: 3452; WAN024DQP_at; Start 137; Stop 161
tggaagcagtagaattagaaaagga

SEQ ID NO: 168016 - DNA, 25 bp, Artificial
  probe
  misc_feature (1)..(25): SEQ ID NO: 3452; WAN024DQP_at; Start 93; Stop 117
taatcatgaaaaatccctgcaagct

SEQ ID NO: 168017 - DNA, 25 bp, Artificial
  probe
  misc_feature (1)..(25): SEQ ID NO: 3452; WAN024DQP_at; Start 127; Stop 151
tatggtagaatggaagcagtagaat

SEQ ID NO: 168018 - DNA, 25 bp, Artificial
  probe
  misc_feature (1)..(25): SEQ ID NO: 3452; WAN024DQP_at; Start 107; Stop 131
ccctgcaagctctttcaaattatgg

SEQ ID NO: 168019 - DNA, 25 bp, Artificial
  probe
  misc_feature (1)..(25): SEQ ID NO: 3452; WAN024DQP_at; Start 40; Stop 64
gaaactttcctgataaaccaatata

SEQ ID NO: 168020 - DNA, 25 bp, Artificial
  probe
  misc_feature (1)..(25): SEQ ID NO: 3452; WAN024DQP_at; Start 92; Stop 116
ttaatcatgaaaaatccctgcaagc

SEQ ID NO: 168021 - DNA, 25 bp, Artificial
  probe
  misc_feature (1)..(25): SEQ ID NO: 3452; WAN024DQP_at; Start 152; Stop 176
tagaaaaggaaatcgattatgaaat

SEQ ID NO: 168022 - DNA, 25 bp, Artificial
  probe
  misc_feature (1)..(25): SEQ ID NO: 3452; WAN024DQP_at; Start 74; Stop 98
tgtctgtgatagaaaaacttaatca

SEQ ID NO: 168023 - DNA, 25 bp, Artificial
  probe
  misc_feature (1)..(25): SEQ ID NO: 3452; WAN024DQP_at; Start 8; Stop 32
cattcaaatgtaaagtacttgctag

SEQ ID NO: 168024 - DNA, 25 bp, Artificial
  probe
  misc_feature (1)..(25): SEQ ID NO: 3452; WAN024DQP_at; Start 124; Stop 148
aattatggtagaatggaagcagtag

SEQ ID NO: 168025 - DNA, 25 bp, Artificial
  probe
  misc_feature (1)..(25): SEQ ID NO: 3452; WAN024DQP_at; Start 148; Stop 172
gaattagaaaaggaaatcgattatg

SEQ ID NO: 168026 - DNA, 25 bp, Artificial
  probe
  misc_feature (1)..(25): SEQ ID NO: 4871; WAN024DQQ_at; Start 59; Stop 83
attcggctgaaagtatcagaacttt

SEQ ID NO: 168027 - DNA, 25 bp, Artificial
  probe
  misc_feature (1)..(25): SEQ ID NO: 4871; WAN024DQQ_at; Start 72; Stop 96
tatcagaacttttagaataagaggg

SEQ ID NO: 168028 - DNA, 25 bp, Artificial
  probe
  misc_feature (1)..(25): SEQ ID NO: 4871; WAN024DQQ_at; Start 75; Stop 99
cagaacttttagaataagagggcta

SEQ ID NO: 168029 - DNA, 25 bp, Artificial
  probe
  misc_feature (1)..(25): SEQ ID NO: 4871; WAN024DQQ_at; Start 42; Stop 66
tataatggtaggaaaagattcggct

SEQ ID NO: 168030 - DNA, 25 bp, Artificial
  probe
  misc_feature (1)..(25): SEQ ID NO: 4871; WAN024DQQ_at; Start 22; Stop 46
gaaaatcatcaaaaaaatggtataa

SEQ ID NO: 168031 - DNA, 25 bp, Artificial
  probe
  misc_feature (1)..(25): SEQ ID NO: 4871; WAN024DQQ_at; Start 39; Stop 63
tggtataatggtaggaaaagattcg

SEQ ID NO: 168032 - DNA, 25 bp, Artificial
  probe
  misc_feature (1)..(25): SEQ ID NO: 4871; WAN024DQQ_at; Start 63; Stop 87
ggctgaaagtatcagaacttttaga

SEQ ID NO: 168033 - DNA, 25 bp, Artificial
  probe
  misc_feature (1)..(25): SEQ ID NO: 4871; WAN024DQQ_at; Start 60; Stop 84
ttcggctgaaagtatcagaactttt

SEQ ID NO: 168034 - DNA, 25 bp, Artificial
  probe
  misc_feature (1)..(25): SEQ ID NO: 4871; WAN024DQQ_at; Start 45; Stop 69
aatggtaggaaaagattcggctgaa

SEQ ID NO: 168035 - DNA, 25 bp, Artificial
  probe
  misc_feature (1)..(25): SEQ ID NO: 4871; WAN024DQQ_at; Start 58; Stop 82
gattcggctgaaagtatcagaactt

SEQ ID NO: 168036 - DNA, 25 bp, Artificial
  probe
  misc_feature (1)..(25): SEQ ID NO: 4871; WAN024DQQ_at; Start 6; Stop 30
aacagaccttcattttgaaaatcat

SEQ ID NO: 168037 - DNA, 25 bp, Artificial
  probe
  misc_feature (1)..(25): SEQ ID NO: 4871; WAN024DQQ_at; Start 1; Stop 25
ttgaaaacagaccttcattttgaaa

SEQ ID NO: 168038 - DNA, 25 bp, Artificial
  probe
  misc_feature (1)..(25): SEQ ID NO: 4871; WAN024DQQ_at; Start 55; Stop 79
aaagattcggctgaaagtatcagaa

SEQ ID NO: 168039 - DNA, 25 bp, Artificial
  probe
  misc_feature (1)..(25): SEQ ID NO: 4871; WAN024DQQ_at; Start 49; Stop 73
gtaggaaaagattcggctgaaagta

SEQ ID NO: 168040 - DNA, 25 bp, Artificial
  probe
  misc_feature (1)..(25): SEQ ID NO: 4871; WAN024DQQ_at; Start 73; Stop 97
atcagaacttttagaataagagggc

SEQ ID NO: 168041 - DNA, 25 bp, Artificial
  probe
  misc_feature (1)..(25): SEQ ID NO: 4871; WAN024DQQ_at; Start 46; Stop 70
atggtaggaaaagattcggctgaaa

SEQ ID NO: 168042 - DNA, 25 bp, Artificial
  probe
  misc_feature (1)..(25): SEQ ID NO: 4871; WAN024DQQ_at; Start 41; Stop 65
gtataatggtaggaaaagattcggc

SEQ ID NO: 168043 - DNA, 25 bp, Artificial
  probe
  misc_feature (1)..(25): SEQ ID NO: 4871; WAN024DQQ_at; Start 71; Stop 95
gtatcagaacttttagaataagagg

SEQ ID NO: 168044 - DNA, 25 bp, Artificial
  probe
  misc_feature (1)..(25): SEQ ID NO: 4871; WAN024DQQ_at; Start 61; Stop 85
tcggctgaaagtatcagaactttta

SEQ ID NO: 168045 - DNA, 25 bp, Artificial
  probe
  misc_feature (1)..(25): SEQ ID NO: 4871; WAN024DQQ_at; Start 9; Stop 33
agaccttcattttgaaaatcatcaa

SEQ ID NO: 168046 - DNA, 25 bp, Artificial
  probe
  misc_feature (1)..(25): SEQ ID NO: 4871; WAN024DQQ_at; Start 2; Stop 26
tgaaaacagaccttcattttgaaaa

SEQ ID NO: 168047 - DNA, 25 bp, Artificial
  probe
  misc_feature (1)..(25): SEQ ID NO: 4871; WAN024DQQ_at; Start 44; Stop 68
taatggtaggaaaagattcggctga

SEQ ID NO: 168048 - DNA, 25 bp, Artificial
  probe
  misc_feature (1)..(25): SEQ ID NO: 4871; WAN024DQQ_at; Start 54; Stop 78
aaaagattcggctgaaagtatcaga

SEQ ID NO: 168049 - DNA, 25 bp, Artificial
  probe
  misc_feature (1)..(25): SEQ ID NO: 4871; WAN024DQQ_at; Start 43; Stop 67
ataatggtaggaaaagattcggctg

SEQ ID NO: 168050 - DNA, 25 bp, Artificial
  probe
  misc_feature (1)..(25): SEQ ID NO: 4871; WAN024DQQ_at; Start 56; Stop 80
aagattcggctgaaagtatcagaac

SEQ ID NO: 168051 - DNA, 25 bp, Artificial
  probe
  misc_feature (1)..(25): SEQ ID NO: 4871; WAN024DQQ_at; Start 5; Stop 29
aaacagaccttcattttgaaaatca

SEQ ID NO: 168052 - DNA, 25 bp, Artificial
  probe
  misc_feature (1)..(25): SEQ ID NO: 4871; WAN024DQQ_at; Start 53; Stop 77
gaaaagattcggctgaaagtatcag

SEQ ID NO: 168053 - DNA, 25 bp, Artificial
  probe
  misc_feature (1)..(25): SEQ ID NO: 4871; WAN024DQQ_at; Start 74; Stop 98
tcagaacttttagaataagagggct

SEQ ID NO: 168054 - DNA, 25 bp, Artificial
  probe
  misc_feature (1)..(25): SEQ ID NO: 4871; WAN024DQQ_at; Start 64; Stop 88
gctgaaagtatcagaacttttagaa

SEQ ID NO: 168055 - DNA, 25 bp, Artificial
  probe
  misc_feature (1)..(25): SEQ ID NO: 4871; WAN024DQQ_at; Start 47; Stop 71
tggtaggaaaagattcggctgaaag

SEQ ID NO: 168056 - DNA, 25 bp, Artificial
  probe
  misc_feature (1)..(25): SEQ ID NO: 4871; WAN024DQQ_at; Start 8; Stop 32
cagaccttcattttgaaaatcatca

SEQ ID NO: 168057 - DNA, 25 bp, Artificial
  probe
  misc_feature (1)..(25): SEQ ID NO: 4871; WAN024DQQ_at; Start 57; Stop 81
agattcggctgaaagtatcagaact

SEQ ID NO: 168058 - DNA, 25 bp, Artificial
  probe
  misc_feature (1)..(25): SEQ ID NO: 4871; WAN024DQQ_at; Start 50; Stop 74
taggaaaagattcggctgaaagtat

SEQ ID NO: 168059 - DNA, 25 bp, Artificial
  probe
  misc_feature (1)..(25): SEQ ID NO: 4871; WAN024DQQ_at; Start 62; Stop 86
cggctgaaagtatcagaacttttag

SEQ ID NO: 168060 - DNA, 25 bp, Artificial
  probe
  misc_feature (1)..(25): SEQ ID NO: 2802; WAN024DQR_at; Start 17; Stop 41
tctttagtgagactgttgccattat

SEQ ID NO: 168061 - DNA, 25 bp, Artificial
  probe
  misc_feature (1)..(25): SEQ ID NO: 2802; WAN024DQR_at; Start 11; Stop 35
ttcatttctttagtgagactgttgc

SEQ ID NO: 168062 - DNA, 25 bp, Artificial
  probe
  misc_feature (1)..(25): SEQ ID NO: 2802; WAN024DQR_at; Start 29; Stop 53
ctgttgccattatcacattcgaatc

SEQ ID NO: 168063 - DNA, 25 bp, Artificial
  probe
  misc_feature (1)..(25): SEQ ID NO: 2802; WAN024DQR_at; Start 43; Stop 67
acattcgaatcacacaaaataaaaa

SEQ ID NO: 168064 - DNA, 25 bp, Artificial
  probe
  misc_feature (1)..(25): SEQ ID NO: 2802; WAN024DQR_at; Start 24; Stop 48
tgagactgttgccattatcacattc

SEQ ID NO: 168065 - DNA, 25 bp, Artificial
  probe
  misc_feature (1)..(25): SEQ ID NO: 2802; WAN024DQR_at; Start 18; Stop 42
ctttagtgagactgttgccattatc

SEQ ID NO: 168066 - DNA, 25 bp, Artificial
  probe
  misc_feature (1)..(25): SEQ ID NO: 2802; WAN024DQR_at; Start 23; Stop 47
gtgagactgttgccattatcacatt

SEQ ID NO: 168067 - DNA, 25 bp, Artificial
  probe
  misc_feature (1)..(25): SEQ ID NO: 2802; WAN024DQR_at; Start 41; Stop 65
tcacattcgaatcacacaaaataaa

SEQ ID NO: 168068 - DNA, 25 bp, Artificial
  probe
  misc_feature (1)..(25): SEQ ID NO: 2802; WAN024DQR_at; Start 13; Stop 37
catttctttagtgagactgttgcca

SEQ ID NO: 168069 - DNA, 25 bp, Artificial
  probe
  misc_feature (1)..(25): SEQ ID NO: 2802; WAN024DQR_at; Start 44; Stop 68
cattcgaatcacacaaaataaaaaa

SEQ ID NO: 168070 - DNA, 25 bp, Artificial
  probe
  misc_feature (1)..(25): SEQ ID NO: 2802; WAN024DQR_at; Start 15; Stop 39
tttctttagtgagactgttgccatt

SEQ ID NO: 168071 - DNA, 25 bp, Artificial
  probe
  misc_feature (1)..(25): SEQ ID NO: 2802; WAN024DQR_at; Start 25; Stop 49
gagactgttgccattatcacattcg

SEQ ID NO: 168072 - DNA, 25 bp, Artificial
  probe
  misc_feature (1)..(25): SEQ ID NO: 2802; WAN024DQR_at; Start 14; Stop 38
atttctttagtgagactgttgccat

SEQ ID NO: 168073 - DNA, 25 bp, Artificial
  probe
  misc_feature (1)..(25): SEQ ID NO: 2802; WAN024DQR_at; Start 9; Stop 33
ttttcatttctttagtgagactgtt

SEQ ID NO: 168074 - DNA, 25 bp, Artificial
  probe
  misc_feature (1)..(25): SEQ ID NO: 2802; WAN024DQR_at; Start 21; Stop 45
tagtgagactgttgccattatcaca

SEQ ID NO: 168075 - DNA, 25 bp, Artificial
  probe
  misc_feature (1)..(25): SEQ ID NO: 2802; WAN024DQR_at; Start 20; Stop 44
ttagtgagactgttgccattatcac

SEQ ID NO: 168076 - DNA, 25 bp, Artificial
  probe
  misc_feature (1)..(25): SEQ ID NO: 2802; WAN024DQR_at; Start 26; Stop 50
agactgttgccattatcacattcga

SEQ ID NO: 168077 - DNA, 25 bp, Artificial
  probe
  misc_feature (1)..(25): SEQ ID NO: 2802; WAN024DQR_at; Start 42; Stop 66
cacattcgaatcacacaaaataaaa

SEQ ID NO: 168078 - DNA, 25 bp, Artificial
  probe
  misc_feature (1)..(25): SEQ ID NO: 2802; WAN024DQR_at; Start 19; Stop 43
tttagtgagactgttgccattatca

SEQ ID NO: 168079 - DNA, 25 bp, Artificial
  probe
  misc_feature (1)..(25): SEQ ID NO: 2802; WAN024DQR_at; Start 22; Stop 46
agtgagactgttgccattatcacat

SEQ ID NO: 168080 - DNA, 25 bp, Artificial
  probe
  misc_feature (1)..(25): SEQ ID NO: 2802; WAN024DQR_at; Start 10; Stop 34
tttcatttctttagtgagactgttg

SEQ ID NO: 168081 - DNA, 25 bp, Artificial
  probe
  misc_feature (1)..(25): SEQ ID NO: 2802; WAN024DQR_at; Start 12; Stop 36
tcatttctttagtgagactgttgcc

SEQ ID NO: 168082 - DNA, 25 bp, Artificial
  probe
  misc_feature (1)..(25): SEQ ID NO: 2802; WAN024DQR_at; Start 28; Stop 52
actgttgccattatcacattcgaat

SEQ ID NO: 168083 - DNA, 25 bp, Artificial
  probe
  misc_feature (1)..(25): SEQ ID NO: 2802; WAN024DQR_at; Start 8; Stop 32
attttcatttctttagtgagactgt

SEQ ID NO: 168084 - DNA, 25 bp, Artificial
  probe
  misc_feature (1)..(25): SEQ ID NO: 2802; WAN024DQR_at; Start 16; Stop 40
ttctttagtgagactgttgccatta

SEQ ID NO: 168085 - DNA, 25 bp, Artificial
  probe
  misc_feature (1)..(25): SEQ ID NO: 2802; WAN024DQR_at; Start 30; Stop 54
tgttgccattatcacattcgaatca

SEQ ID NO: 168086 - DNA, 25 bp, Artificial
  probe
  misc_feature (1)..(25): SEQ ID NO: 2802; WAN024DQR_at; Start 27; Stop 51
gactgttgccattatcacattcgaa

SEQ ID NO: 168087 - DNA, 25 bp, Artificial
  probe
  misc_feature (1)..(25): SEQ ID NO: 4959; WAN024DQS_at; Start 39; Stop 63
tgaactggaaatcaacggtattcgt

SEQ ID NO: 168088 - DNA, 25 bp, Artificial
  probe
  misc_feature (1)..(25): SEQ ID NO: 4959; WAN024DQS_at; Start 49; Stop 73
atcaacggtattcgtttgactaagt

SEQ ID NO: 168089 - DNA, 25 bp, Artificial
  probe
  misc_feature (1)..(25): SEQ ID NO: 4959; WAN024DQS_at; Start 25; Stop 49
ggtcaacgacttaatgaactggaaa

SEQ ID NO: 168090 - DNA, 25 bp, Artificial
  probe
  misc_feature (1)..(25): SEQ ID NO: 4959; WAN024DQS_at; Start 32; Stop 56
gacttaatgaactggaaatcaacgg

SEQ ID NO: 168091 - DNA, 25 bp, Artificial
  probe
  misc_feature (1)..(25): SEQ ID NO: 4959; WAN024DQS_at; Start 31; Stop 55
cgacttaatgaactggaaatcaacg

SEQ ID NO: 168092 - DNA, 25 bp, Artificial
  probe
  misc_feature (1)..(25): SEQ ID NO: 4959; WAN024DQS_at; Start 44; Stop 68
tggaaatcaacggtattcgtttgac

SEQ ID NO: 168093 - DNA, 25 bp, Artificial
  probe
  misc_feature (1)..(25): SEQ ID NO: 4959; WAN024DQS_at; Start 37; Stop 61
aatgaactggaaatcaacggtattc

SEQ ID NO: 168094 - DNA, 25 bp, Artificial
  probe
  misc_feature (1)..(25): SEQ ID NO: 4959; WAN024DQS_at; Start 38; Stop 62
atgaactggaaatcaacggtattcg

SEQ ID NO: 168095 - DNA, 25 bp, Artificial
  probe
  misc_feature (1)..(25): SEQ ID NO: 4959; WAN024DQS_at; Start 48; Stop 72
aatcaacggtattcgtttgactaag

SEQ ID NO: 168096 - DNA, 25 bp, Artificial
  probe
  misc_feature (1)..(25): SEQ ID NO: 4959; WAN024DQS_at; Start 33; Stop 57
acttaatgaactggaaatcaacggt

SEQ ID NO: 168097 - DNA, 25 bp, Artificial
  probe
  misc_feature (1)..(25): SEQ ID NO: 4959; WAN024DQS_at; Start 30; Stop 54
acgacttaatgaactggaaatcaac

SEQ ID NO: 168098 - DNA, 25 bp, Artificial
  probe
  misc_feature (1)..(25): SEQ ID NO: 4959; WAN024DQS_at; Start 43; Stop 67
ctggaaatcaacggtattcgtttga

SEQ ID NO: 168099 - DNA, 25 bp, Artificial
  probe
  misc_feature (1)..(25): SEQ ID NO: 4959; WAN024DQS_at; Start 42; Stop 66
actggaaatcaacggtattcgtttg

SEQ ID NO: 168100 - DNA, 25 bp, Artificial
  probe
  misc_feature (1)..(25): SEQ ID NO: 4959; WAN024DQS_at; Start 28; Stop 52
caacgacttaatgaactggaaatca

SEQ ID NO: 168101 - DNA, 25 bp, Artificial
  probe
  misc_feature (1)..(25): SEQ ID NO: 4959; WAN024DQS_at; Start 36; Stop 60
taatgaactggaaatcaacggtatt

SEQ ID NO: 168102 - DNA, 25 bp, Artificial
  probe
  misc_feature (1)..(25): SEQ ID NO: 4959; WAN024DQS_at; Start 27; Stop 51
tcaacgacttaatgaactggaaatc

SEQ ID NO: 168103 - DNA, 25 bp, Artificial
  probe
  misc_feature (1)..(25): SEQ ID NO: 4959; WAN024DQS_at; Start 35; Stop 59
ttaatgaactggaaatcaacggtat

SEQ ID NO: 168104 - DNA, 25 bp, Artificial
  probe
  misc_feature (1)..(25): SEQ ID NO: 4959; WAN024DQS_at; Start 24; Stop 48
aggtcaacgacttaatgaactggaa

SEQ ID NO: 168105 - DNA, 25 bp, Artificial
  probe
  misc_feature (1)..(25): SEQ ID NO: 4959; WAN024DQS_at; Start 26; Stop 50
gtcaacgacttaatgaactggaaat

SEQ ID NO: 168106 - DNA, 25 bp, Artificial
  probe
  misc_feature (1)..(25): SEQ ID NO: 4959; WAN024DQS_at; Start 29; Stop 53
aacgacttaatgaactggaaatcaa

SEQ ID NO: 168107 - DNA, 25 bp, Artificial
  probe
  misc_feature (1)..(25): SEQ ID NO: 4959; WAN024DQS_at; Start 34; Stop 58
cttaatgaactggaaatcaacggta

SEQ ID NO: 168108 - DNA, 25 bp, Artificial
  probe
  misc_feature (1)..(25): SEQ ID NO: 4959; WAN024DQS_at; Start 46; Stop 70
gaaatcaacggtattcgtttgacta

SEQ ID NO: 168109 - DNA, 25 bp, Artificial
  probe
  misc_feature (1)..(25): SEQ ID NO: 4995; WAN024DQT_at; Start 80; Stop 104
aacaattacaggcagaaaaggtgga

SEQ ID NO: 168110 - DNA, 25 bp, Artificial
  probe
  misc_feature (1)..(25): SEQ ID NO: 4995; WAN024DQT_at; Start 10; Stop 34
gatcgagcggaagaatatttctgcc

SEQ ID NO: 168111 - DNA, 25 bp, Artificial
  probe
  misc_feature (1)..(25): SEQ ID NO: 4995; WAN024DQT_at; Start 2; Stop 26
tgaatcctgatcgagcggaagaata

SEQ ID NO: 168112 - DNA, 25 bp, Artificial
  probe
  misc_feature (1)..(25): SEQ ID NO: 4995; WAN024DQT_at; Start 20; Stop 44
aagaatatttctgccgaggttgcca

SEQ ID NO: 168113 - DNA, 25 bp, Artificial
  probe
  misc_feature (1)..(25): SEQ ID NO: 4995; WAN024DQT_at; Start 82; Stop 106
caattacaggcagaaaaggtggagg

SEQ ID NO: 168114 - DNA, 25 bp, Artificial
  probe
  misc_feature (1)..(25): SEQ ID NO: 4995; WAN024DQT_at; Start 75; Stop 99
tgatgaacaattacaggcagaaaag

SEQ ID NO: 168115 - DNA, 25 bp, Artificial
  probe
  misc_feature (1)..(25): SEQ ID NO: 4995; WAN024DQT_at; Start 15; Stop 39
agcggaagaatatttctgccgaggt

SEQ ID NO: 168116 - DNA, 25 bp, Artificial
  probe
  misc_feature (1)..(25): SEQ ID NO: 4995; WAN024DQT_at; Start 81; Stop 105
acaattacaggcagaaaaggtggag

SEQ ID NO: 168117 - DNA, 25 bp, Artificial
  probe
  misc_feature (1)..(25): SEQ ID NO: 4995; WAN024DQT_at; Start 12; Stop 36
tcgagcggaagaatatttctgccga

SEQ ID NO: 168118 - DNA, 25 bp, Artificial
  probe
  misc_feature (1)..(25): SEQ ID NO: 4995; WAN024DQT_at; Start 25; Stop 49
tatttctgccgaggttgccaagggg

SEQ ID NO: 168119 - DNA, 25 bp, Artificial
  probe
  misc_feature (1)..(25): SEQ ID NO: 4995; WAN024DQT_at; Start 14; Stop 38
gagcggaagaatatttctgccgagg

SEQ ID NO: 168120 - DNA, 25 bp, Artificial
  probe
  misc_feature (1)..(25): SEQ ID NO: 4995; WAN024DQT_at; Start 70; Stop 94
ttttatgatgaacaattacaggcag

SEQ ID NO: 168121 - DNA, 25 bp, Artificial
  probe
  misc_feature (1)..(25): SEQ ID NO: 4995; WAN024DQT_at; Start 4; Stop 28
aatcctgatcgagcggaagaatatt

SEQ ID NO: 168122 - DNA, 25 bp, Artificial
  probe
  misc_feature (1)..(25): SEQ ID NO: 4995; WAN024DQT_at; Start 9; Stop 33
tgatcgagcggaagaatatttctgc

SEQ ID NO: 168123 - DNA, 25 bp, Artificial
  probe
  misc_feature (1)..(25): SEQ ID NO: 4995; WAN024DQT_at; Start 16; Stop 40
gcggaagaatatttctgccgaggtt

SEQ ID NO: 168124 - DNA, 25 bp, Artificial
  probe
  misc_feature (1)..(25): SEQ ID NO: 4995; WAN024DQT_at; Start 73; Stop 97
tatgatgaacaattacaggcagaaa

SEQ ID NO: 168125 - DNA, 25 bp, Artificial
  probe
  misc_feature (1)..(25): SEQ ID NO: 4995; WAN024DQT_at; Start 19; Stop 43
gaagaatatttctgccgaggttgcc

SEQ ID NO: 168126 - DNA, 25 bp, Artificial
  probe
  misc_feature (1)..(25): SEQ ID NO: 4995; WAN024DQT_at; Start 68; Stop 92
aattttatgatgaacaattacaggc

SEQ ID NO: 168127 - DNA, 25 bp, Artificial
  probe
  misc_feature (1)..(25): SEQ ID NO: 4995; WAN024DQT_at; Start 8; Stop 32
ctgatcgagcggaagaatatttctg

SEQ ID NO: 168128 - DNA, 25 bp, Artificial
  probe
  misc_feature (1)..(25): SEQ ID NO: 4995; WAN024DQT_at; Start 3; Stop 27
gaatcctgatcgagcggaagaatat

SEQ ID NO: 168129 - DNA, 25 bp, Artificial
  probe
  misc_feature (1)..(25): SEQ ID NO: 4995; WAN024DQT_at; Start 29; Stop 53
tctgccgaggttgccaaggggaaaa

SEQ ID NO: 168130 - DNA, 25 bp, Artificial
  probe
  misc_feature (1)..(25): SEQ ID NO: 4995; WAN024DQT_at; Start 23; Stop 47
aatatttctgccgaggttgccaagg

SEQ ID NO: 168131 - DNA, 25 bp, Artificial
  probe
  misc_feature (1)..(25): SEQ ID NO: 4995; WAN024DQT_at; Start 1; Stop 25
ttgaatcctgatcgagcggaagaat

SEQ ID NO: 168132 - DNA, 25 bp, Artificial
  probe
  misc_feature (1)..(25): SEQ ID NO: 4995; WAN024DQT_at; Start 71; Stop 95
tttatgatgaacaattacaggcaga

SEQ ID NO: 168133 - DNA, 25 bp, Artificial
  probe
  misc_feature (1)..(25): SEQ ID NO: 4995; WAN024DQT_at; Start 18; Stop 42
ggaagaatatttctgccgaggttgc

SEQ ID NO: 168134 - DNA, 25 bp, Artificial
  probe
  misc_feature (1)..(25): SEQ ID NO: 4995; WAN024DQT_at; Start 56; Stop 80
ctgaagatattgaattttatgatga

SEQ ID NO: 168135 - DNA, 25 bp, Artificial
  probe
  misc_feature (1)..(25): SEQ ID NO: 4995; WAN024DQT_at; Start 24; Stop 48
atatttctgccgaggttgccaaggg

SEQ ID NO: 168136 - DNA, 25 bp, Artificial
  probe
  misc_feature (1)..(25): SEQ ID NO: 4995; WAN024DQT_at; Start 76; Stop 100
gatgaacaattacaggcagaaaagg

SEQ ID NO: 168137 - DNA, 25 bp, Artificial
  probe
  misc_feature (1)..(25): SEQ ID NO: 4995; WAN024DQT_at; Start 13; Stop 37
cgagcggaagaatatttctgccgag

SEQ ID NO: 168138 - DNA, 25 bp, Artificial
  probe
  misc_feature (1)..(25): SEQ ID NO: 4995; WAN024DQT_at; Start 78; Stop 102
tgaacaattacaggcagaaaaggtg

SEQ ID NO: 168139 - DNA, 25 bp, Artificial
  probe
  misc_feature (1)..(25): SEQ ID NO: 4995; WAN024DQT_at; Start 7; Stop 31
cctgatcgagcggaagaatatttct

SEQ ID NO: 168140 - DNA, 25 bp, Artificial
  probe
  misc_feature (1)..(25): SEQ ID NO: 4995; WAN024DQT_at; Start 72; Stop 96
ttatgatgaacaattacaggcagaa

SEQ ID NO: 168141 - DNA, 25 bp, Artificial
  probe
  misc_feature (1)..(25): SEQ ID NO: 4995; WAN024DQT_at; Start 17; Stop 41
cggaagaatatttctgccgaggttg

SEQ ID NO: 168142 - DNA, 25 bp, Artificial
  probe
  misc_feature (1)..(25): SEQ ID NO: 4995; WAN024DQT_at; Start 11; Stop 35
atcgagcggaagaatatttctgccg

SEQ ID NO: 168143 - DNA, 25 bp, Artificial
  probe
  misc_feature (1)..(25): SEQ ID NO: 5345; WAN024DQU_at; Start 49; Stop 73
attttcttctacacgtctgatgata

SEQ ID NO: 168144 - DNA, 25 bp, Artificial
  probe
  misc_feature (1)..(25): SEQ ID NO: 5345; WAN024DQU_at; Start 50; Stop 74
ttttcttctacacgtctgatgataa

SEQ ID NO: 168145 - DNA, 25 bp, Artificial
  probe
  misc_feature (1)..(25): SEQ ID NO: 5345; WAN024DQU_at; Start 85; Stop 109
caaaagagtcaagaggatttttcga

SEQ ID NO: 168146 - DNA, 25 bp, Artificial
  probe
  misc_feature (1)..(25): SEQ ID NO: 5345; WAN024DQU_at; Start 23; Stop 47
ttgaatttttccatagtgactcctt

SEQ ID NO: 168147 - DNA, 25 bp, Artificial
  probe
  misc_feature (1)..(25): SEQ ID NO: 5345; WAN024DQU_at; Start 70; Stop 94
gataaatctaattcgcaaaagagtc

SEQ ID NO: 168148 - DNA, 25 bp, Artificial
  probe
  misc_feature (1)..(25): SEQ ID NO: 5345; WAN024DQU_at; Start 60; Stop 84
cacgtctgatgataaatctaattcg

SEQ ID NO: 168149 - DNA, 25 bp, Artificial
  probe
  misc_feature (1)..(25): SEQ ID NO: 5345; WAN024DQU_at; Start 51; Stop 75
tttcttctacacgtctgatgataaa

SEQ ID NO: 168150 - DNA, 25 bp, Artificial
  probe
  misc_feature (1)..(25): SEQ ID NO: 5345; WAN024DQU_at; Start 62; Stop 86
cgtctgatgataaatctaattcgca

SEQ ID NO: 168151 - DNA, 25 bp, Artificial
  probe
  misc_feature (1)..(25): SEQ ID NO: 5345; WAN024DQU_at; Start 84; Stop 108
gcaaaagagtcaagaggatttttcg

SEQ ID NO: 168152 - DNA, 25 bp, Artificial
  probe
  misc_feature (1)..(25): SEQ ID NO: 5345; WAN024DQU_at; Start 66; Stop 90
tgatgataaatctaattcgcaaaag

SEQ ID NO: 168153 - DNA, 25 bp, Artificial
  probe
  misc_feature (1)..(25): SEQ ID NO: 5345; WAN024DQU_at; Start 56; Stop 80
tctacacgtctgatgataaatctaa

SEQ ID NO: 168154 - DNA, 25 bp, Artificial
  probe
  misc_feature (1)..(25): SEQ ID NO: 5345; WAN024DQU_at; Start 54; Stop 78
cttctacacgtctgatgataaatct

SEQ ID NO: 168155 - DNA, 25 bp, Artificial
  probe
  misc_feature (1)..(25): SEQ ID NO: 5345; WAN024DQU_at; Start 76; Stop 100
tctaattcgcaaaagagtcaagagg

SEQ ID NO: 168156 - DNA, 25 bp, Artificial
  probe
  misc_feature (1)..(25): SEQ ID NO: 5345; WAN024DQU_at; Start 75; Stop 99
atctaattcgcaaaagagtcaagag

SEQ ID NO: 168157 - DNA, 25 bp, Artificial
  probe
  misc_feature (1)..(25): SEQ ID NO: 5345; WAN024DQU_at; Start 22; Stop 46
attgaatttttccatagtgactcct

SEQ ID NO: 168158 - DNA, 25 bp, Artificial
  probe
  misc_feature (1)..(25): SEQ ID NO: 5345; WAN024DQU_at; Start 77; Stop 101
ctaattcgcaaaagagtcaagagga

SEQ ID NO: 168159 - DNA, 25 bp, Artificial
  probe
  misc_feature (1)..(25): SEQ ID NO: 5345; WAN024DQU_at; Start 63; Stop 87
gtctgatgataaatctaattcgcaa

SEQ ID NO: 168160 - DNA, 25 bp, Artificial
  probe
  misc_feature (1)..(25): SEQ ID NO: 5345; WAN024DQU_at; Start 53; Stop 77
tcttctacacgtctgatgataaatc

SEQ ID NO: 168161 - DNA, 25 bp, Artificial
  probe
  misc_feature (1)..(25): SEQ ID NO: 5345; WAN024DQU_at; Start 82; Stop 106
tcgcaaaagagtcaagaggattttt

SEQ ID NO: 168162 - DNA, 25 bp, Artificial
  probe
  misc_feature (1)..(25): SEQ ID NO: 5345; WAN024DQU_at; Start 69; Stop 93
tgataaatctaattcgcaaaagagt

SEQ ID NO: 168163 - DNA, 25 bp, Artificial
  probe
  misc_feature (1)..(25): SEQ ID NO: 5345; WAN024DQU_at; Start 81; Stop 105
ttcgcaaaagagtcaagaggatttt

SEQ ID NO: 168164 - DNA, 25 bp, Artificial
  probe
  misc_feature (1)..(25): SEQ ID NO: 5345; WAN024DQU_at; Start 74; Stop 98
aatctaattcgcaaaagagtcaaga

SEQ ID NO: 168165 - DNA, 25 bp, Artificial
  probe
  misc_feature (1)..(25): SEQ ID NO: 5345; WAN024DQU_at; Start 4; Stop 28
cccgatattgtttttgaaattgaat

SEQ ID NO: 168166 - DNA, 25 bp, Artificial
  probe
  misc_feature (1)..(25): SEQ ID NO: 5345; WAN024DQU_at; Start 73; Stop 97
aaatctaattcgcaaaagagtcaag

SEQ ID NO: 168167 - DNA, 25 bp, Artificial
  probe
  misc_feature (1)..(25): SEQ ID NO: 5345; WAN024DQU_at; Start 79; Stop 103
aattcgcaaaagagtcaagaggatt

SEQ ID NO: 168168 - DNA, 25 bp, Artificial
  probe
  misc_feature (1)..(25): SEQ ID NO: 5345; WAN024DQU_at; Start 78; Stop 102
taattcgcaaaagagtcaagaggat

SEQ ID NO: 168169 - DNA, 25 bp, Artificial
  probe
  misc_feature (1)..(25): SEQ ID NO: 5345; WAN024DQU_at; Start 83; Stop 107
cgcaaaagagtcaagaggatttttc

SEQ ID NO: 168170 - DNA, 25 bp, Artificial
  probe
  misc_feature (1)..(25): SEQ ID NO: 5345; WAN024DQU_at; Start 80; Stop 104
attcgcaaaagagtcaagaggattt

SEQ ID NO: 168171 - DNA, 25 bp, Artificial
  probe
  misc_feature (1)..(25): SEQ ID NO: 5345; WAN024DQU_at; Start 64; Stop 88
tctgatgataaatctaattcgcaaa

SEQ ID NO: 168172 - DNA, 25 bp, Artificial
  probe
  misc_feature (1)..(25): SEQ ID NO: 5345; WAN024DQU_at; Start 3; Stop 27
gcccgatattgtttttgaaattgaa

SEQ ID NO: 168173 - DNA, 25 bp, Artificial
  probe
  misc_feature (1)..(25): SEQ ID NO: 5345; WAN024DQU_at; Start 57; Stop 81
ctacacgtctgatgataaatctaat

SEQ ID NO: 168174 - DNA, 25 bp, Artificial
  probe
  misc_feature (1)..(25): SEQ ID NO: 5345; WAN024DQU_at; Start 67; Stop 91
gatgataaatctaattcgcaaaaga

SEQ ID NO: 168175 - DNA, 25 bp, Artificial
  probe
  misc_feature (1)..(25): SEQ ID NO: 5345; WAN024DQU_at; Start 21; Stop 45
aattgaatttttccatagtgactcc

SEQ ID NO: 168176 - DNA, 25 bp, Artificial
  probe
  misc_feature (1)..(25): SEQ ID NO: 5345; WAN024DQU_at; Start 2; Stop 26
tgcccgatattgtttttgaaattga

SEQ ID NO: 168177 - DNA, 25 bp, Artificial
  probe
  misc_feature (1)..(25): SEQ ID NO: 4023; WAN024DQV_at; Start 29; Stop 53
aaaaactacagaatataaagcgctt

SEQ ID NO: 168178 - DNA, 25 bp, Artificial
  probe
  misc_feature (1)..(25): SEQ ID NO: 4023; WAN024DQV_at; Start 72; Stop 96
caatcttttaggaggagaaaatgaa

SEQ ID NO: 168179 - DNA, 25 bp, Artificial
  probe
  misc_feature (1)..(25): SEQ ID NO: 4023; WAN024DQV_at; Start 79; Stop 103
ttaggaggagaaaatgaagaatcca

SEQ ID NO: 168180 - DNA, 25 bp, Artificial
  probe
  misc_feature (1)..(25): SEQ ID NO: 4023; WAN024DQV_at; Start 82; Stop 106
ggaggagaaaatgaagaatccattt

SEQ ID NO: 168181 - DNA, 25 bp, Artificial
  probe
  misc_feature (1)..(25): SEQ ID NO: 4023; WAN024DQV_at; Start 31; Stop 55
aaactacagaatataaagcgctttc

SEQ ID NO: 168182 - DNA, 25 bp, Artificial
  probe
  misc_feature (1)..(25): SEQ ID NO: 4023; WAN024DQV_at; Start 62; Stop 86
acaacaaaatcaatcttttaggagg

SEQ ID NO: 168183 - DNA, 25 bp, Artificial
  probe
  misc_feature (1)..(25): SEQ ID NO: 4023; WAN024DQV_at; Start 71; Stop 95
tcaatcttttaggaggagaaaatga

SEQ ID NO: 168184 - DNA, 25 bp, Artificial
  probe
  misc_feature (1)..(25): SEQ ID NO: 4023; WAN024DQV_at; Start 75; Stop 99
tcttttaggaggagaaaatgaagaa

SEQ ID NO: 168185 - DNA, 25 bp, Artificial
  probe
  misc_feature (1)..(25): SEQ ID NO: 4023; WAN024DQV_at; Start 30; Stop 54
aaaactacagaatataaagcgcttt

SEQ ID NO: 168186 - DNA, 25 bp, Artificial
  probe
  misc_feature (1)..(25): SEQ ID NO: 4023; WAN024DQV_at; Start 78; Stop 102
tttaggaggagaaaatgaagaatcc

SEQ ID NO: 168187 - DNA, 25 bp, Artificial
  probe
  misc_feature (1)..(25): SEQ ID NO: 4023; WAN024DQV_at; Start 69; Stop 93
aatcaatcttttaggaggagaaaat

SEQ ID NO: 168188 - DNA, 25 bp, Artificial
  probe
  misc_feature (1)..(25): SEQ ID NO: 4023; WAN024DQV_at; Start 63; Stop 87
caacaaaatcaatcttttaggagga

SEQ ID NO: 168189 - DNA, 25 bp, Artificial
  probe
  misc_feature (1)..(25): SEQ ID NO: 4023; WAN024DQV_at; Start 27; Stop 51
taaaaaactacagaatataaagcgc

SEQ ID NO: 168190 - DNA, 25 bp, Artificial
  probe
  misc_feature (1)..(25): SEQ ID NO: 4023; WAN024DQV_at; Start 66; Stop 90
caaaatcaatcttttaggaggagaa

SEQ ID NO: 168191 - DNA, 25 bp, Artificial
  probe
  misc_feature (1)..(25): SEQ ID NO: 4023; WAN024DQV_at; Start 32; Stop 56
aactacagaatataaagcgctttct

SEQ ID NO: 168192 - DNA, 25 bp, Artificial
  probe
  misc_feature (1)..(25): SEQ ID NO: 4023; WAN024DQV_at; Start 73; Stop 97
aatcttttaggaggagaaaatgaag

SEQ ID NO: 168193 - DNA, 25 bp, Artificial
  probe
  misc_feature (1)..(25): SEQ ID NO: 4023; WAN024DQV_at; Start 49; Stop 73
cgctttcttgaaaacaacaaaatca

SEQ ID NO: 168194 - DNA, 25 bp, Artificial
  probe
  misc_feature (1)..(25): SEQ ID NO: 4023; WAN024DQV_at; Start 28; Stop 52
aaaaaactacagaatataaagcgct

SEQ ID NO: 168195 - DNA, 25 bp, Artificial
  probe
  misc_feature (1)..(25): SEQ ID NO: 4023; WAN024DQV_at; Start 3; Stop 27
gattatcatggttctagagtttgat

SEQ ID NO: 168196 - DNA, 25 bp, Artificial
  probe
  misc_feature (1)..(25): SEQ ID NO: 4023; WAN024DQV_at; Start 2; Stop 26
tgattatcatggttctagagtttga

SEQ ID NO: 168197 - DNA, 25 bp, Artificial
  probe
  misc_feature (1)..(25): SEQ ID NO: 4023; WAN024DQV_at; Start 33; Stop 57
actacagaatataaagcgctttctt

SEQ ID NO: 168198 - DNA, 25 bp, Artificial
  probe
  misc_feature (1)..(25): SEQ ID NO: 4023; WAN024DQV_at; Start 65; Stop 89
acaaaatcaatcttttaggaggaga

SEQ ID NO: 168199 - DNA, 25 bp, Artificial
  probe
  misc_feature (1)..(25): SEQ ID NO: 4023; WAN024DQV_at; Start 44; Stop 68
taaagcgctttcttgaaaacaacaa

SEQ ID NO: 168200 - DNA, 25 bp, Artificial
  probe
  misc_feature (1)..(25): SEQ ID NO: 4023; WAN024DQV_at; Start 80; Stop 104
taggaggagaaaatgaagaatccat

SEQ ID NO: 168201 - DNA, 25 bp, Artificial
  probe
  misc_feature (1)..(25): SEQ ID NO: 4023; WAN024DQV_at; Start 6; Stop 30
tatcatggttctagagtttgataaa

SEQ ID NO: 168202 - DNA, 25 bp, Artificial
  probe
  misc_feature (1)..(25): SEQ ID NO: 4023; WAN024DQV_at; Start 54; Stop 78
tcttgaaaacaacaaaatcaatctt

SEQ ID NO: 168203 - DNA, 25 bp, Artificial
  probe
  misc_feature (1)..(25): SEQ ID NO: 4023; WAN024DQV_at; Start 16; Stop 40
ctagagtttgataaaaaactacaga

SEQ ID NO: 168204 - DNA, 25 bp, Artificial
  probe
  misc_feature (1)..(25): SEQ ID NO: 4023; WAN024DQV_at; Start 9; Stop 33
catggttctagagtttgataaaaaa

SEQ ID NO: 168205 - DNA, 25 bp, Artificial
  probe
  misc_feature (1)..(25): SEQ ID NO: 4023; WAN024DQV_at; Start 14; Stop 38
ttctagagtttgataaaaaactaca

SEQ ID NO: 168206 - DNA, 25 bp, Artificial
  probe
  misc_feature (1)..(25): SEQ ID NO: 4023; WAN024DQV_at; Start 64; Stop 88
aacaaaatcaatcttttaggaggag

SEQ ID NO: 168207 - DNA, 25 bp, Artificial
  probe
  misc_feature (1)..(25): SEQ ID NO: 4023; WAN024DQV_at; Start 50; Stop 74
gctttcttgaaaacaacaaaatcaa

SEQ ID NO: 168208 - DNA, 25 bp, Artificial
  probe
  misc_feature (1)..(25): SEQ ID NO: 4023; WAN024DQV_at; Start 1; Stop 25
gtgattatcatggttctagagtttg

SEQ ID NO: 168209 - DNA, 25 bp, Artificial
  probe
  misc_feature (1)..(25): SEQ ID NO: 4023; WAN024DQV_at; Start 48; Stop 72
gcgctttcttgaaaacaacaaaatc

SEQ ID NO: 168210 - DNA, 25 bp, Artificial
  probe
  misc_feature (1)..(25): SEQ ID NO: 4023; WAN024DQV_at; Start 47; Stop 71
agcgctttcttgaaaacaacaaaat

SEQ ID NO: 168211 - DNA, 25 bp, Artificial
  probe
  misc_feature (1)..(25): SEQ ID NO: 3444; WAN024DQW_at; Start 41; Stop 65
tcttgccctgtgctagtgaatggat

SEQ ID NO: 168212 - DNA, 25 bp, Artificial
  probe
  misc_feature (1)..(25): SEQ ID NO: 3444; WAN024DQW_at; Start 49; Stop 73
tgtgctagtgaatggatttatcagt

SEQ ID NO: 168213 - DNA, 25 bp, Artificial
  probe
  misc_feature (1)..(25): SEQ ID NO: 3444; WAN024DQW_at; Start 6; Stop 30
tgtacctgctaccgttgaaatcaat

SEQ ID NO: 168214 - DNA, 25 bp, Artificial
  probe
  misc_feature (1)..(25): SEQ ID NO: 3444; WAN024DQW_at; Start 43; Stop 67
ttgccctgtgctagtgaatggattt

SEQ ID NO: 168215 - DNA, 25 bp, Artificial
  probe
  misc_feature (1)..(25): SEQ ID NO: 3444; WAN024DQW_at; Start 35; Stop 59
actccctcttgccctgtgctagtga

SEQ ID NO: 168216 - DNA, 25 bp, Artificial
  probe
  misc_feature (1)..(25): SEQ ID NO: 3444; WAN024DQW_at; Start 34; Stop 58
gactccctcttgccctgtgctagtg

SEQ ID NO: 168217 - DNA, 25 bp, Artificial
  probe
  misc_feature (1)..(25): SEQ ID NO: 3444; WAN024DQW_at; Start 36; Stop 60
ctccctcttgccctgtgctagtgaa

SEQ ID NO: 168218 - DNA, 25 bp, Artificial
  probe
  misc_feature (1)..(25): SEQ ID NO: 3444; WAN024DQW_at; Start 47; Stop 71
cctgtgctagtgaatggatttatca

SEQ ID NO: 168219 - DNA, 25 bp, Artificial
  probe
  misc_feature (1)..(25): SEQ ID NO: 3444; WAN024DQW_at; Start 39; Stop 63
cctcttgccctgtgctagtgaatgg

SEQ ID NO: 168220 - DNA, 25 bp, Artificial
  probe
  misc_feature (1)..(25): SEQ ID NO: 3444; WAN024DQW_at; Start 42; Stop 66
cttgccctgtgctagtgaatggatt

SEQ ID NO: 168221 - DNA, 25 bp, Artificial
  probe
  misc_feature (1)..(25): SEQ ID NO: 3444; WAN024DQW_at; Start 38; Stop 62
ccctcttgccctgtgctagtgaatg

SEQ ID NO: 168222 - DNA, 25 bp, Artificial
  probe
  misc_feature (1)..(25): SEQ ID NO: 3444; WAN024DQW_at; Start 8; Stop 32
tacctgctaccgttgaaatcaatag

SEQ ID NO: 168223 - DNA, 25 bp, Artificial
  probe
  misc_feature (1)..(25): SEQ ID NO: 3444; WAN024DQW_at; Start 46; Stop 70
ccctgtgctagtgaatggatttatc

SEQ ID NO: 168224 - DNA, 25 bp, Artificial
  probe
  misc_feature (1)..(25): SEQ ID NO: 3444; WAN024DQW_at; Start 50; Stop 74
gtgctagtgaatggatttatcagta

SEQ ID NO: 168225 - DNA, 25 bp, Artificial
  probe
  misc_feature (1)..(25): SEQ ID NO: 3444; WAN024DQW_at; Start 1; Stop 25
ctgtatgtacctgctaccgttgaaa

SEQ ID NO: 168226 - DNA, 25 bp, Artificial
  probe
  misc_feature (1)..(25): SEQ ID NO: 3444; WAN024DQW_at; Start 44; Stop 68
tgccctgtgctagtgaatggattta

SEQ ID NO: 168227 - DNA, 25 bp, Artificial
  probe
  misc_feature (1)..(25): SEQ ID NO: 3444; WAN024DQW_at; Start 4; Stop 28
tatgtacctgctaccgttgaaatca

SEQ ID NO: 168228 - DNA, 25 bp, Artificial
  probe
  misc_feature (1)..(25): SEQ ID NO: 3444; WAN024DQW_at; Start 53; Stop 77
ctagtgaatggatttatcagtatat

SEQ ID NO: 168229 - DNA, 25 bp, Artificial
  probe
  misc_feature (1)..(25): SEQ ID NO: 3444; WAN024DQW_at; Start 3; Stop 27
gtatgtacctgctaccgttgaaatc

SEQ ID NO: 168230 - DNA, 25 bp, Artificial
  probe
  misc_feature (1)..(25): SEQ ID NO: 3444; WAN024DQW_at; Start 45; Stop 69
gccctgtgctagtgaatggatttat

SEQ ID NO: 168231 - DNA, 25 bp, Artificial
  probe
  misc_feature (1)..(25): SEQ ID NO: 3444; WAN024DQW_at; Start 5; Stop 29
atgtacctgctaccgttgaaatcaa

SEQ ID NO: 168232 - DNA, 25 bp, Artificial
  probe
  misc_feature (1)..(25): SEQ ID NO: 3444; WAN024DQW_at; Start 48; Stop 72
ctgtgctagtgaatggatttatcag

SEQ ID NO: 168233 - DNA, 25 bp, Artificial
  probe
  misc_feature (1)..(25): SEQ ID NO: 3444; WAN024DQW_at; Start 40; Stop 64
ctcttgccctgtgctagtgaatgga

SEQ ID NO: 168234 - DNA, 25 bp, Artificial
  probe
  misc_feature (1)..(25): SEQ ID NO: 3444; WAN024DQW_at; Start 51; Stop 75
tgctagtgaatggatttatcagtat

SEQ ID NO: 168235 - DNA, 25 bp, Artificial
  probe
  misc_feature (1)..(25): SEQ ID NO: 3444; WAN024DQW_at; Start 37; Stop 61
tccctcttgccctgtgctagtgaat

SEQ ID NO: 168236 - DNA, 25 bp, Artificial
  probe
  misc_feature (1)..(25): SEQ ID NO: 3444; WAN024DQW_at; Start 7; Stop 31
gtacctgctaccgttgaaatcaata

SEQ ID NO: 168237 - DNA, 25 bp, Artificial
  probe
  misc_feature (1)..(25): SEQ ID NO: 3444; WAN024DQW_at; Start 52; Stop 76
gctagtgaatggatttatcagtata

SEQ ID NO: 168238 - DNA, 25 bp, Artificial
  probe
  misc_feature (1)..(25): SEQ ID NO: 3444; WAN024DQW_at; Start 2; Stop 26
tgtatgtacctgctaccgttgaaat

SEQ ID NO: 168239 - DNA, 25 bp, Artificial
  probe
  misc_feature (1)..(25): SEQ ID NO: 2308; WAN024DQX_at; Start 131; Stop 155
atgcttttatggctctactaactaa

SEQ ID NO: 168240 - DNA, 25 bp, Artificial
  probe
  misc_feature (1)..(25): SEQ ID NO: 2308; WAN024DQX_at; Start 125; Stop 149
atgttgatgcttttatggctctact

SEQ ID NO: 168241 - DNA, 25 bp, Artificial
  probe
  misc_feature (1)..(25): SEQ ID NO: 2308; WAN024DQX_at; Start 132; Stop 156
tgcttttatggctctactaactaat

SEQ ID NO: 168242 - DNA, 25 bp, Artificial
  probe
  misc_feature (1)..(25): SEQ ID NO: 2308; WAN024DQX_at; Start 127; Stop 151
gttgatgcttttatggctctactaa

SEQ ID NO: 168243 - DNA, 25 bp, Artificial
  probe
  misc_feature (1)..(25): SEQ ID NO: 2308; WAN024DQX_at; Start 129; Stop 153
tgatgcttttatggctctactaact

SEQ ID NO: 168244 - DNA, 25 bp, Artificial
  probe
  misc_feature (1)..(25): SEQ ID NO: 2308; WAN024DQX_at; Start 124; Stop 148
gatgttgatgcttttatggctctac

SEQ ID NO: 168245 - DNA, 25 bp, Artificial
  probe
  misc_feature (1)..(25): SEQ ID NO: 2308; WAN024DQX_at; Start 130; Stop 154
gatgcttttatggctctactaacta

SEQ ID NO: 168246 - DNA, 25 bp, Artificial
  probe
  misc_feature (1)..(25): SEQ ID NO: 2308; WAN024DQX_at; Start 126; Stop 150
tgttgatgcttttatggctctacta

SEQ ID NO: 168247 - DNA, 25 bp, Artificial
  probe
  misc_feature (1)..(25): SEQ ID NO: 2308; WAN024DQX_at; Start 128; Stop 152
ttgatgcttttatggctctactaac

SEQ ID NO: 168248 - DNA, 25 bp, Artificial
  probe
  misc_feature (1)..(25): SEQ ID NO: 1848; WAN024DQY_at; Start 27; Stop 51
gggtttaaatgactggactgcgaaa

SEQ ID NO: 168249 - DNA, 25 bp, Artificial
  probe
  misc_feature (1)..(25): SEQ ID NO: 1848; WAN024DQY_at; Start 51; Stop 75
aactttagcttcagctattcgtggg

SEQ ID NO: 168250 - DNA, 25 bp, Artificial
  probe
  misc_feature (1)..(25): SEQ ID NO: 1848; WAN024DQY_at; Start 61; Stop 85
tcagctattcgtgggatattagatg

SEQ ID NO: 168251 - DNA, 25 bp, Artificial
  probe
  misc_feature (1)..(25): SEQ ID NO: 1848; WAN024DQY_at; Start 41; Stop 65
ggactgcgaaaactttagcttcagc

SEQ ID NO: 168252 - DNA, 25 bp, Artificial
  probe
  misc_feature (1)..(25): SEQ ID NO: 1848; WAN024DQY_at; Start 5; Stop 29
ttgcatctggattgaaagaatcggg

SEQ ID NO: 168253 - DNA, 25 bp, Artificial
  probe
  misc_feature (1)..(25): SEQ ID NO: 1848; WAN024DQY_at; Start 8; Stop 32
catctggattgaaagaatcgggttt

SEQ ID NO: 168254 - DNA, 25 bp, Artificial
  probe
  misc_feature (1)..(25): SEQ ID NO: 1848; WAN024DQY_at; Start 37; Stop 61
gactggactgcgaaaactttagctt

SEQ ID NO: 168255 - DNA, 25 bp, Artificial
  probe
  misc_feature (1)..(25): SEQ ID NO: 1848; WAN024DQY_at; Start 46; Stop 70
gcgaaaactttagcttcagctattc

SEQ ID NO: 168256 - DNA, 25 bp, Artificial
  probe
  misc_feature (1)..(25): SEQ ID NO: 1848; WAN024DQY_at; Start 26; Stop 50
cgggtttaaatgactggactgcgaa

SEQ ID NO: 168257 - DNA, 25 bp, Artificial
  probe
  misc_feature (1)..(25): SEQ ID NO: 1848; WAN024DQY_at; Start 69; Stop 93
tcgtgggatattagatgtacttatt

SEQ ID NO: 168258 - DNA, 25 bp, Artificial
  probe
  misc_feature (1)..(25): SEQ ID NO: 1848; WAN024DQY_at; Start 40; Stop 64
tggactgcgaaaactttagcttcag

SEQ ID NO: 168259 - DNA, 25 bp, Artificial
  probe
  misc_feature (1)..(25): SEQ ID NO: 1848; WAN024DQY_at; Start 32; Stop 56
taaatgactggactgcgaaaacttt

SEQ ID NO: 168260 - DNA, 25 bp, Artificial
  probe
  misc_feature (1)..(25): SEQ ID NO: 1848; WAN024DQY_at; Start 44; Stop 68
ctgcgaaaactttagcttcagctat

SEQ ID NO: 168261 - DNA, 25 bp, Artificial
  probe
  misc_feature (1)..(25): SEQ ID NO: 1848; WAN024DQY_at; Start 6; Stop 30
tgcatctggattgaaagaatcgggt

SEQ ID NO: 168262 - DNA, 25 bp, Artificial
  probe
  misc_feature (1)..(25): SEQ ID NO: 1848; WAN024DQY_at; Start 3; Stop 27
gattgcatctggattgaaagaatcg

SEQ ID NO: 168263 - DNA, 25 bp, Artificial
  probe
  misc_feature (1)..(25): SEQ ID NO: 1848; WAN024DQY_at; Start 48; Stop 72
gaaaactttagcttcagctattcgt

SEQ ID NO: 168264 - DNA, 25 bp, Artificial
  probe
  misc_feature (1)..(25): SEQ ID NO: 1848; WAN024DQY_at; Start 53; Stop 77
ctttagcttcagctattcgtgggat

SEQ ID NO: 168265 - DNA, 25 bp, Artificial
  probe
  misc_feature (1)..(25): SEQ ID NO: 1848; WAN024DQY_at; Start 56; Stop 80
tagcttcagctattcgtgggatatt

SEQ ID NO: 168266 - DNA, 25 bp, Artificial
  probe
  misc_feature (1)..(25): SEQ ID NO: 1848; WAN024DQY_at; Start 10; Stop 34
tctggattgaaagaatcgggtttaa

SEQ ID NO: 168267 - DNA, 25 bp, Artificial
  probe
  misc_feature (1)..(25): SEQ ID NO: 1848; WAN024DQY_at; Start 17; Stop 41
tgaaagaatcgggtttaaatgactg

SEQ ID NO: 168268 - DNA, 25 bp, Artificial
  probe
  misc_feature (1)..(25): SEQ ID NO: 1848; WAN024DQY_at; Start 30; Stop 54
tttaaatgactggactgcgaaaact

SEQ ID NO: 168269 - DNA, 25 bp, Artificial
  probe
  misc_feature (1)..(25): SEQ ID NO: 1848; WAN024DQY_at; Start 34; Stop 58
aatgactggactgcgaaaactttag

SEQ ID NO: 168270 - DNA, 25 bp, Artificial
  probe
  misc_feature (1)..(25): SEQ ID NO: 1848; WAN024DQY_at; Start 31; Stop 55
ttaaatgactggactgcgaaaactt

SEQ ID NO: 168271 - DNA, 25 bp, Artificial
  probe
  misc_feature (1)..(25): SEQ ID NO: 1848; WAN024DQY_at; Start 38; Stop 62
actggactgcgaaaactttagcttc

SEQ ID NO: 168272 - DNA, 25 bp, Artificial
  probe
  misc_feature (1)..(25): SEQ ID NO: 1848; WAN024DQY_at; Start 36; Stop 60
tgactggactgcgaaaactttagct

SEQ ID NO: 168273 - DNA, 25 bp, Artificial
  probe
  misc_feature (1)..(25): SEQ ID NO: 1848; WAN024DQY_at; Start 66; Stop 90
tattcgtgggatattagatgtactt

SEQ ID NO: 168274 - DNA, 25 bp, Artificial
  probe
  misc_feature (1)..(25): SEQ ID NO: 1848; WAN024DQY_at; Start 28; Stop 52
ggtttaaatgactggactgcgaaaa

SEQ ID NO: 168275 - DNA, 25 bp, Artificial
  probe
  misc_feature (1)..(25): SEQ ID NO: 1848; WAN024DQY_at; Start 58; Stop 82
gcttcagctattcgtgggatattag

SEQ ID NO: 168276 - DNA, 25 bp, Artificial
  probe
  misc_feature (1)..(25): SEQ ID NO: 1848; WAN024DQY_at; Start 24; Stop 48
atcgggtttaaatgactggactgcg

SEQ ID NO: 168277 - DNA, 25 bp, Artificial
  probe
  misc_feature (1)..(25): SEQ ID NO: 1848; WAN024DQY_at; Start 59; Stop 83
cttcagctattcgtgggatattaga

SEQ ID NO: 168278 - DNA, 25 bp, Artificial
  probe
  misc_feature (1)..(25): SEQ ID NO: 1848; WAN024DQY_at; Start 42; Stop 66
gactgcgaaaactttagcttcagct

SEQ ID NO: 168279 - DNA, 25 bp, Artificial
  probe
  misc_feature (1)..(25): SEQ ID NO: 1848; WAN024DQY_at; Start 64; Stop 88
gctattcgtgggatattagatgtac

SEQ ID NO: 168280 - DNA, 25 bp, Artificial
  probe
  misc_feature (1)..(25): SEQ ID NO: 1848; WAN024DQY_at; Start 22; Stop 46
gaatcgggtttaaatgactggactg

SEQ ID NO: 168281 - DNA, 25 bp, Artificial
  probe
  misc_feature (1)..(25): SEQ ID NO: 1848; WAN024DQY_at; Start 23; Stop 47
aatcgggtttaaatgactggactgc

SEQ ID NO: 168282 - DNA, 25 bp, Artificial
  probe
  misc_feature (1)..(25): SEQ ID NO: 7174; WAN024DQZ_at; Start 44; Stop 68
gactgagaaatcagttcttttttct

SEQ ID NO: 168283 - DNA, 25 bp, Artificial
  probe
  misc_feature (1)..(25): SEQ ID NO: 7174; WAN024DQZ_at; Start 45; Stop 69
actgagaaatcagttcttttttctt

SEQ ID NO: 168284 - DNA, 25 bp, Artificial
  probe
  misc_feature (1)..(25): SEQ ID NO: 7174; WAN024DQZ_at; Start 43; Stop 67
ggactgagaaatcagttcttttttc

SEQ ID NO: 168285 - DNA, 25 bp, Artificial
  probe
  misc_feature (1)..(25): SEQ ID NO: 7174; WAN024DQZ_at; Start 33; Stop 57
gattaatgaaggactgagaaatcag

SEQ ID NO: 168286 - DNA, 25 bp, Artificial
  probe
  misc_feature (1)..(25): SEQ ID NO: 7174; WAN024DQZ_at; Start 38; Stop 62
atgaaggactgagaaatcagttctt

SEQ ID NO: 168287 - DNA, 25 bp, Artificial
  probe
  misc_feature (1)..(25): SEQ ID NO: 7174; WAN024DQZ_at; Start 32; Stop 56
agattaatgaaggactgagaaatca

SEQ ID NO: 168288 - DNA, 25 bp, Artificial
  probe
  misc_feature (1)..(25): SEQ ID NO: 7174; WAN024DQZ_at; Start 19; Stop 43
ttagtgtggaataagattaatgaag

SEQ ID NO: 168289 - DNA, 25 bp, Artificial
  probe
  misc_feature (1)..(25): SEQ ID NO: 7174; WAN024DQZ_at; Start 35; Stop 59
ttaatgaaggactgagaaatcagtt

SEQ ID NO: 168290 - DNA, 25 bp, Artificial
  probe
  misc_feature (1)..(25): SEQ ID NO: 7174; WAN024DQZ_at; Start 29; Stop 53
ataagattaatgaaggactgagaaa

SEQ ID NO: 168291 - DNA, 25 bp, Artificial
  probe
  misc_feature (1)..(25): SEQ ID NO: 7174; WAN024DQZ_at; Start 42; Stop 66
aggactgagaaatcagttctttttt

SEQ ID NO: 168292 - DNA, 25 bp, Artificial
  probe
  misc_feature (1)..(25): SEQ ID NO: 7174; WAN024DQZ_at; Start 24; Stop 48
gtggaataagattaatgaaggactg

SEQ ID NO: 168293 - DNA, 25 bp, Artificial
  probe
  misc_feature (1)..(25): SEQ ID NO: 7174; WAN024DQZ_at; Start 41; Stop 65
aaggactgagaaatcagttcttttt

SEQ ID NO: 168294 - DNA, 25 bp, Artificial
  probe
  misc_feature (1)..(25): SEQ ID NO: 7174; WAN024DQZ_at; Start 18; Stop 42
tttagtgtggaataagattaatgaa

SEQ ID NO: 168295 - DNA, 25 bp, Artificial
  probe
  misc_feature (1)..(25): SEQ ID NO: 7174; WAN024DQZ_at; Start 27; Stop 51
gaataagattaatgaaggactgaga

SEQ ID NO: 168296 - DNA, 25 bp, Artificial
  probe
  misc_feature (1)..(25): SEQ ID NO: 7174; WAN024DQZ_at; Start 31; Stop 55
aagattaatgaaggactgagaaatc

SEQ ID NO: 168297 - DNA, 25 bp, Artificial
  probe
  misc_feature (1)..(25): SEQ ID NO: 7174; WAN024DQZ_at; Start 34; Stop 58
attaatgaaggactgagaaatcagt

SEQ ID NO: 168298 - DNA, 25 bp, Artificial
  probe
  misc_feature (1)..(25): SEQ ID NO: 7174; WAN024DQZ_at; Start 26; Stop 50
ggaataagattaatgaaggactgag

SEQ ID NO: 168299 - DNA, 25 bp, Artificial
  probe
  misc_feature (1)..(25): SEQ ID NO: 7174; WAN024DQZ_at; Start 20; Stop 44
tagtgtggaataagattaatgaagg

SEQ ID NO: 168300 - DNA, 25 bp, Artificial
  probe
  misc_feature (1)..(25): SEQ ID NO: 7174; WAN024DQZ_at; Start 28; Stop 52
aataagattaatgaaggactgagaa

SEQ ID NO: 168301 - DNA, 25 bp, Artificial
  probe
  misc_feature (1)..(25): SEQ ID NO: 7174; WAN024DQZ_at; Start 39; Stop 63
tgaaggactgagaaatcagttcttt

SEQ ID NO: 168302 - DNA, 25 bp, Artificial
  probe
  misc_feature (1)..(25): SEQ ID NO: 7174; WAN024DQZ_at; Start 25; Stop 49
tggaataagattaatgaaggactga

SEQ ID NO: 168303 - DNA, 25 bp, Artificial
  probe
  misc_feature (1)..(25): SEQ ID NO: 7174; WAN024DQZ_at; Start 36; Stop 60
taatgaaggactgagaaatcagttc

SEQ ID NO: 168304 - DNA, 25 bp, Artificial
  probe
  misc_feature (1)..(25): SEQ ID NO: 7174; WAN024DQZ_at; Start 30; Stop 54
taagattaatgaaggactgagaaat

SEQ ID NO: 168305 - DNA, 25 bp, Artificial
  probe
  misc_feature (1)..(25): SEQ ID NO: 7174; WAN024DQZ_at; Start 37; Stop 61
aatgaaggactgagaaatcagttct

SEQ ID NO: 168306 - DNA, 25 bp, Artificial
  probe
  misc_feature (1)..(25): SEQ ID NO: 7174; WAN024DQZ_at; Start 23; Stop 47
tgtggaataagattaatgaaggact

SEQ ID NO: 168307 - DNA, 25 bp, Artificial
  probe
  misc_feature (1)..(25): SEQ ID NO: 7174; WAN024DQZ_at; Start 22; Stop 46
gtgtggaataagattaatgaaggac

SEQ ID NO: 168308 - DNA, 25 bp, Artificial
  probe
  misc_feature (1)..(25): SEQ ID NO: 7174; WAN024DQZ_at; Start 21; Stop 45
agtgtggaataagattaatgaagga

SEQ ID NO: 168309 - DNA, 25 bp, Artificial
  probe
  misc_feature (1)..(25): SEQ ID NO: 7174; WAN024DQZ_at; Start 46; Stop 70
ctgagaaatcagttcttttttcttt

SEQ ID NO: 168310 - DNA, 25 bp, Artificial
  probe
  misc_feature (1)..(25): SEQ ID NO: 7174; WAN024DQZ_at; Start 40; Stop 64
gaaggactgagaaatcagttctttt

SEQ ID NO: 168311 - DNA, 25 bp, Artificial
  probe
  misc_feature (1)..(25): SEQ ID NO: 1260; WAN024DR2_at; Start 63; Stop 87
aactgatttctcagtccttcattaa

SEQ ID NO: 168312 - DNA, 25 bp, Artificial
  probe
  misc_feature (1)..(25): SEQ ID NO: 1260; WAN024DR2_at; Start 65; Stop 89
ctgatttctcagtccttcattaatc

SEQ ID NO: 168313 - DNA, 25 bp, Artificial
  probe
  misc_feature (1)..(25): SEQ ID NO: 1260; WAN024DR2_at; Start 59; Stop 83
aaagaactgatttctcagtccttca

SEQ ID NO: 168314 - DNA, 25 bp, Artificial
  probe
  misc_feature (1)..(25): SEQ ID NO: 1260; WAN024DR2_at; Start 68; Stop 92
atttctcagtccttcattaatctta

SEQ ID NO: 168315 - DNA, 25 bp, Artificial
  probe
  misc_feature (1)..(25): SEQ ID NO: 1260; WAN024DR2_at; Start 56; Stop 80
aaaaaagaactgatttctcagtcct

SEQ ID NO: 168316 - DNA, 25 bp, Artificial
  probe
  misc_feature (1)..(25): SEQ ID NO: 1260; WAN024DR2_at; Start 72; Stop 96
ctcagtccttcattaatcttattcc

SEQ ID NO: 168317 - DNA, 25 bp, Artificial
  probe
  misc_feature (1)..(25): SEQ ID NO: 1260; WAN024DR2_at; Start 54; Stop 78
agaaaaaagaactgatttctcagtc

SEQ ID NO: 168318 - DNA, 25 bp, Artificial
  probe
  misc_feature (1)..(25): SEQ ID NO: 1260; WAN024DR2_at; Start 77; Stop 101
tccttcattaatcttattccacact

SEQ ID NO: 168319 - DNA, 25 bp, Artificial
  probe
  misc_feature (1)..(25): SEQ ID NO: 1260; WAN024DR2_at; Start 61; Stop 85
agaactgatttctcagtccttcatt

SEQ ID NO: 168320 - DNA, 25 bp, Artificial
  probe
  misc_feature (1)..(25): SEQ ID NO: 1260; WAN024DR2_at; Start 74; Stop 98
cagtccttcattaatcttattccac

SEQ ID NO: 168321 - DNA, 25 bp, Artificial
  probe
  misc_feature (1)..(25): SEQ ID NO: 1260; WAN024DR2_at; Start 75; Stop 99
agtccttcattaatcttattccaca

SEQ ID NO: 168322 - DNA, 25 bp, Artificial
  probe
  misc_feature (1)..(25): SEQ ID NO: 1260; WAN024DR2_at; Start 57; Stop 81
aaaaagaactgatttctcagtcctt

SEQ ID NO: 168323 - DNA, 25 bp, Artificial
  probe
  misc_feature (1)..(25): SEQ ID NO: 1260; WAN024DR2_at; Start 58; Stop 82
aaaagaactgatttctcagtccttc

SEQ ID NO: 168324 - DNA, 25 bp, Artificial
  probe
  misc_feature (1)..(25): SEQ ID NO: 1260; WAN024DR2_at; Start 66; Stop 90
tgatttctcagtccttcattaatct

SEQ ID NO: 168325 - DNA, 25 bp, Artificial
  probe
  misc_feature (1)..(25): SEQ ID NO: 1260; WAN024DR2_at; Start 67; Stop 91
gatttctcagtccttcattaatctt

SEQ ID NO: 168326 - DNA, 25 bp, Artificial
  probe
  misc_feature (1)..(25): SEQ ID NO: 1260; WAN024DR2_at; Start 52; Stop 76
aaagaaaaaagaactgatttctcag

SEQ ID NO: 168327 - DNA, 25 bp, Artificial
  probe
  misc_feature (1)..(25): SEQ ID NO: 1260; WAN024DR2_at; Start 69; Stop 93
tttctcagtccttcattaatcttat

SEQ ID NO: 168328 - DNA, 25 bp, Artificial
  probe
  misc_feature (1)..(25): SEQ ID NO: 1260; WAN024DR2_at; Start 53; Stop 77
aagaaaaaagaactgatttctcagt

SEQ ID NO: 168329 - DNA, 25 bp, Artificial
  probe
  misc_feature (1)..(25): SEQ ID NO: 1260; WAN024DR2_at; Start 76; Stop 100
gtccttcattaatcttattccacac

SEQ ID NO: 168330 - DNA, 25 bp, Artificial
  probe
  misc_feature (1)..(25): SEQ ID NO: 1260; WAN024DR2_at; Start 71; Stop 95
tctcagtccttcattaatcttattc

SEQ ID NO: 168331 - DNA, 25 bp, Artificial
  probe
  misc_feature (1)..(25): SEQ ID NO: 1260; WAN024DR2_at; Start 78; Stop 102
ccttcattaatcttattccacacta

SEQ ID NO: 168332 - DNA, 25 bp, Artificial
  probe
  misc_feature (1)..(25): SEQ ID NO: 1260; WAN024DR2_at; Start 70; Stop 94
ttctcagtccttcattaatcttatt

SEQ ID NO: 168333 - DNA, 25 bp, Artificial
  probe
  misc_feature (1)..(25): SEQ ID NO: 1260; WAN024DR2_at; Start 73; Stop 97
tcagtccttcattaatcttattcca

SEQ ID NO: 168334 - DNA, 25 bp, Artificial
  probe
  misc_feature (1)..(25): SEQ ID NO: 1260; WAN024DR2_at; Start 79; Stop 103
cttcattaatcttattccacactaa

SEQ ID NO: 168335 - DNA, 25 bp, Artificial
  probe
  misc_feature (1)..(25): SEQ ID NO: 1260; WAN024DR2_at; Start 64; Stop 88
actgatttctcagtccttcattaat

SEQ ID NO: 168336 - DNA, 25 bp, Artificial
  probe
  misc_feature (1)..(25): SEQ ID NO: 1260; WAN024DR2_at; Start 55; Stop 79
gaaaaaagaactgatttctcagtcc

SEQ ID NO: 168337 - DNA, 25 bp, Artificial
  probe
  misc_feature (1)..(25): SEQ ID NO: 1260; WAN024DR2_at; Start 60; Stop 84
aagaactgatttctcagtccttcat

SEQ ID NO: 168338 - DNA, 25 bp, Artificial
  probe
  misc_feature (1)..(25): SEQ ID NO: 1260; WAN024DR2_at; Start 62; Stop 86
gaactgatttctcagtccttcatta

SEQ ID NO: 168339 - DNA, 25 bp, Artificial
  probe
  misc_feature (1)..(25): SEQ ID NO: 7639; WAN024DR3_at; Start 43; Stop 67
tttgttctgtctagttttctttcaa

SEQ ID NO: 168340 - DNA, 25 bp, Artificial
  probe
  misc_feature (1)..(25): SEQ ID NO: 7639; WAN024DR3_at; Start 27; Stop 51
caaccttagggctggttttgttctg

SEQ ID NO: 168341 - DNA, 25 bp, Artificial
  probe
  misc_feature (1)..(25): SEQ ID NO: 7639; WAN024DR3_at; Start 47; Stop 71
ttctgtctagttttctttcaacttc

SEQ ID NO: 168342 - DNA, 25 bp, Artificial
  probe
  misc_feature (1)..(25): SEQ ID NO: 7639; WAN024DR3_at; Start 68; Stop 92
cttcgccaattcctgtgcaagtagt

SEQ ID NO: 168343 - DNA, 25 bp, Artificial
  probe
  misc_feature (1)..(25): SEQ ID NO: 7639; WAN024DR3_at; Start 32; Stop 56
ttagggctggttttgttctgtctag

SEQ ID NO: 168344 - DNA, 25 bp, Artificial
  probe
  misc_feature (1)..(25): SEQ ID NO: 7639; WAN024DR3_at; Start 58; Stop 82
tttctttcaacttcgccaattcctg

SEQ ID NO: 168345 - DNA, 25 bp, Artificial
  probe
  misc_feature (1)..(25): SEQ ID NO: 7639; WAN024DR3_at; Start 66; Stop 90
aacttcgccaattcctgtgcaagta

SEQ ID NO: 168346 - DNA, 25 bp, Artificial
  probe
  misc_feature (1)..(25): SEQ ID NO: 7639; WAN024DR3_at; Start 65; Stop 89
caacttcgccaattcctgtgcaagt

SEQ ID NO: 168347 - DNA, 25 bp, Artificial
  probe
  misc_feature (1)..(25): SEQ ID NO: 7639; WAN024DR3_at; Start 53; Stop 77
ctagttttctttcaacttcgccaat

SEQ ID NO: 168348 - DNA, 25 bp, Artificial
  probe
  misc_feature (1)..(25): SEQ ID NO: 7639; WAN024DR3_at; Start 61; Stop 85
ctttcaacttcgccaattcctgtgc

SEQ ID NO: 168349 - DNA, 25 bp, Artificial
  probe
  misc_feature (1)..(25): SEQ ID NO: 7639; WAN024DR3_at; Start 37; Stop 61
gctggttttgttctgtctagttttc

SEQ ID NO: 168350 - DNA, 25 bp, Artificial
  probe
  misc_feature (1)..(25): SEQ ID NO: 7639; WAN024DR3_at; Start 49; Stop 73
ctgtctagttttctttcaacttcgc

SEQ ID NO: 168351 - DNA, 25 bp, Artificial
  probe
  misc_feature (1)..(25): SEQ ID NO: 7639; WAN024DR3_at; Start 67; Stop 91
acttcgccaattcctgtgcaagtag

SEQ ID NO: 168352 - DNA, 25 bp, Artificial
  probe
  misc_feature (1)..(25): SEQ ID NO: 7639; WAN024DR3_at; Start 31; Stop 55
cttagggctggttttgttctgtcta

SEQ ID NO: 168353 - DNA, 25 bp, Artificial
  probe
  misc_feature (1)..(25): SEQ ID NO: 7639; WAN024DR3_at; Start 59; Stop 83
ttctttcaacttcgccaattcctgt

SEQ ID NO: 168354 - DNA, 25 bp, Artificial
  probe
  misc_feature (1)..(25): SEQ ID NO: 7639; WAN024DR3_at; Start 62; Stop 86
tttcaacttcgccaattcctgtgca

SEQ ID NO: 168355 - DNA, 25 bp, Artificial
  probe
  misc_feature (1)..(25): SEQ ID NO: 7639; WAN024DR3_at; Start 45; Stop 69
tgttctgtctagttttctttcaact

SEQ ID NO: 168356 - DNA, 25 bp, Artificial
  probe
  misc_feature (1)..(25): SEQ ID NO: 7639; WAN024DR3_at; Start 51; Stop 75
gtctagttttctttcaacttcgcca

SEQ ID NO: 168357 - DNA, 25 bp, Artificial
  probe
  misc_feature (1)..(25): SEQ ID NO: 7639; WAN024DR3_at; Start 50; Stop 74
tgtctagttttctttcaacttcgcc

SEQ ID NO: 168358 - DNA, 25 bp, Artificial
  probe
  misc_feature (1)..(25): SEQ ID NO: 7639; WAN024DR3_at; Start 42; Stop 66
ttttgttctgtctagttttctttca

SEQ ID NO: 168359 - DNA, 25 bp, Artificial
  probe
  misc_feature (1)..(25): SEQ ID NO: 7639; WAN024DR3_at; Start 60; Stop 84
tctttcaacttcgccaattcctgtg

SEQ ID NO: 168360 - DNA, 25 bp, Artificial
  probe
  misc_feature (1)..(25): SEQ ID NO: 7639; WAN024DR3_at; Start 52; Stop 76
tctagttttctttcaacttcgccaa

SEQ ID NO: 168361 - DNA, 25 bp, Artificial
  probe
  misc_feature (1)..(25): SEQ ID NO: 7639; WAN024DR3_at; Start 44; Stop 68
ttgttctgtctagttttctttcaac

SEQ ID NO: 168362 - DNA, 25 bp, Artificial
  probe
  misc_feature (1)..(25): SEQ ID NO: 7639; WAN024DR3_at; Start 63; Stop 87
ttcaacttcgccaattcctgtgcaa

SEQ ID NO: 168363 - DNA, 25 bp, Artificial
  probe
  misc_feature (1)..(25): SEQ ID NO: 7639; WAN024DR3_at; Start 38; Stop 62
ctggttttgttctgtctagttttct

SEQ ID NO: 168364 - DNA, 25 bp, Artificial
  probe
  misc_feature (1)..(25): SEQ ID NO: 7639; WAN024DR3_at; Start 30; Stop 54
ccttagggctggttttgttctgtct

SEQ ID NO: 168365 - DNA, 25 bp, Artificial
  probe
  misc_feature (1)..(25): SEQ ID NO: 7639; WAN024DR3_at; Start 48; Stop 72
tctgtctagttttctttcaacttcg

SEQ ID NO: 168366 - DNA, 25 bp, Artificial
  probe
  misc_feature (1)..(25): SEQ ID NO: 7639; WAN024DR3_at; Start 34; Stop 58
agggctggttttgttctgtctagtt

SEQ ID NO: 168367 - DNA, 25 bp, Artificial
  probe
  misc_feature (1)..(25): SEQ ID NO: 7639; WAN024DR3_at; Start 69; Stop 93
ttcgccaattcctgtgcaagtagtt

SEQ ID NO: 168368 - DNA, 25 bp, Artificial
  probe
  misc_feature (1)..(25): SEQ ID NO: 7639; WAN024DR3_at; Start 33; Stop 57
tagggctggttttgttctgtctagt

SEQ ID NO: 168369 - DNA, 25 bp, Artificial
  probe
  misc_feature (1)..(25): SEQ ID NO: 7639; WAN024DR3_at; Start 64; Stop 88
tcaacttcgccaattcctgtgcaag

SEQ ID NO: 168370 - DNA, 25 bp, Artificial
  probe
  misc_feature (1)..(25): SEQ ID NO: 5662; WAN024DR4_at; Start 19; Stop 43
ccaactcccaataactattttggct

SEQ ID NO: 168371 - DNA, 25 bp, Artificial
  probe
  misc_feature (1)..(25): SEQ ID NO: 5662; WAN024DR4_at; Start 9; Stop 33
ttcttctctaccaactcccaataac

SEQ ID NO: 168372 - DNA, 25 bp, Artificial
  probe
  misc_feature (1)..(25): SEQ ID NO: 5662; WAN024DR4_at; Start 42; Stop 66
ctttatttccagagtattttatggt

SEQ ID NO: 168373 - DNA, 25 bp, Artificial
  probe
  misc_feature (1)..(25): SEQ ID NO: 5662; WAN024DR4_at; Start 50; Stop 74
ccagagtattttatggtaaaatgaa

SEQ ID NO: 168374 - DNA, 25 bp, Artificial
  probe
  misc_feature (1)..(25): SEQ ID NO: 5662; WAN024DR4_at; Start 10; Stop 34
tcttctctaccaactcccaataact

SEQ ID NO: 168375 - DNA, 25 bp, Artificial
  probe
  misc_feature (1)..(25): SEQ ID NO: 5662; WAN024DR4_at; Start 61; Stop 85
tatggtaaaatgaagagtaataata

SEQ ID NO: 168376 - DNA, 25 bp, Artificial
  probe
  misc_feature (1)..(25): SEQ ID NO: 5662; WAN024DR4_at; Start 38; Stop 62
ttggctttatttccagagtatttta

SEQ ID NO: 168377 - DNA, 25 bp, Artificial
  probe
  misc_feature (1)..(25): SEQ ID NO: 5662; WAN024DR4_at; Start 40; Stop 64
ggctttatttccagagtattttatg

SEQ ID NO: 168378 - DNA, 25 bp, Artificial
  probe
  misc_feature (1)..(25): SEQ ID NO: 5662; WAN024DR4_at; Start 7; Stop 31
ttttcttctctaccaactcccaata

SEQ ID NO: 168379 - DNA, 25 bp, Artificial
  probe
  misc_feature (1)..(25): SEQ ID NO: 5662; WAN024DR4_at; Start 53; Stop 77
gagtattttatggtaaaatgaagag

SEQ ID NO: 168380 - DNA, 25 bp, Artificial
  probe
  misc_feature (1)..(25): SEQ ID NO: 5662; WAN024DR4_at; Start 41; Stop 65
gctttatttccagagtattttatgg

SEQ ID NO: 168381 - DNA, 25 bp, Artificial
  probe
  misc_feature (1)..(25): SEQ ID NO: 5662; WAN024DR4_at; Start 44; Stop 68
ttatttccagagtattttatggtaa

SEQ ID NO: 168382 - DNA, 25 bp, Artificial
  probe
  misc_feature (1)..(25): SEQ ID NO: 5662; WAN024DR4_at; Start 43; Stop 67
tttatttccagagtattttatggta

SEQ ID NO: 168383 - DNA, 25 bp, Artificial
  probe
  misc_feature (1)..(25): SEQ ID NO: 5662; WAN024DR4_at; Start 13; Stop 37
tctctaccaactcccaataactatt

SEQ ID NO: 168384 - DNA, 25 bp, Artificial
  probe
  misc_feature (1)..(25): SEQ ID NO: 5662; WAN024DR4_at; Start 49; Stop 73
tccagagtattttatggtaaaatga

SEQ ID NO: 168385 - DNA, 25 bp, Artificial
  probe
  misc_feature (1)..(25): SEQ ID NO: 5662; WAN024DR4_at; Start 59; Stop 83
tttatggtaaaatgaagagtaataa

SEQ ID NO: 168386 - DNA, 25 bp, Artificial
  probe
  misc_feature (1)..(25): SEQ ID NO: 5662; WAN024DR4_at; Start 39; Stop 63
tggctttatttccagagtattttat

SEQ ID NO: 168387 - DNA, 25 bp, Artificial
  probe
  misc_feature (1)..(25): SEQ ID NO: 5662; WAN024DR4_at; Start 34; Stop 58
tattttggctttatttccagagtat

SEQ ID NO: 168388 - DNA, 25 bp, Artificial
  probe
  misc_feature (1)..(25): SEQ ID NO: 5662; WAN024DR4_at; Start 16; Stop 40
ctaccaactcccaataactattttg

SEQ ID NO: 168389 - DNA, 25 bp, Artificial
  probe
  misc_feature (1)..(25): SEQ ID NO: 5662; WAN024DR4_at; Start 33; Stop 57
ctattttggctttatttccagagta

SEQ ID NO: 168390 - DNA, 25 bp, Artificial
  probe
  misc_feature (1)..(25): SEQ ID NO: 5662; WAN024DR4_at; Start 20; Stop 44
caactcccaataactattttggctt
